United States Patent Application Publication US 2014/0004565 A1 - sequence listing, part 73

SEQ ID NO: 1778743 - RNA, 19 nt, Artificial Sequence
  Description of Artificial Sequence: Synthetic oligonucleotide
cguaaggcuccagccaggg

SEQ ID NO: 1778744 - RNA, 19 nt, Artificial Sequence
  Description of Artificial Sequence: Synthetic oligonucleotide
ccguccagcccugcuaagg

SEQ ID NO: 1778745 - RNA, 19 nt, Artificial Sequence
  Description of Artificial Sequence: Synthetic oligonucleotide
cgagagaugcgauauugua

SEQ ID NO: 1778746 - RNA, 19 nt, Artificial Sequence
  Description of Artificial Sequence: Synthetic oligonucleotide
gcugaugagcuguucgaau

SEQ ID NO: 1778747 - RNA, 19 nt, Artificial Sequence
  Description of Artificial Sequence: Synthetic oligonucleotide
cagcccugcuaaggguacc

SEQ ID NO: 1778748 - RNA, 19 nt, Artificial Sequence
  Description of Artificial Sequence: Synthetic oligonucleotide
guuugcgcagacaccacuu

SEQ ID NO: 1778749 - RNA, 19 nt, Artificial Sequence
  Description of Artificial Sequence: Synthetic oligonucleotide
uggggcaccucggggugaa

SEQ ID NO: 1778750 - RNA, 19 nt, Artificial Sequence
  Description of Artificial Sequence: Synthetic oligonucleotide
guacccaucuagacgguuu

SEQ ID NO: 1778751 - RNA, 19 nt, Artificial Sequence
  Description of Artificial Sequence: Synthetic oligonucleotide
caaaggaauucugccuggu

SEQ ID NO: 1778752 - RNA, 19 nt, Artificial Sequence
  Description of Artificial Sequence: Synthetic oligonucleotide
gguguagcuucgcuucgcu

SEQ ID NO: 1778753 - RNA, 19 nt, Artificial Sequence
  Description of Artificial Sequence: Synthetic oligonucleotide
ggaccaaaguagguggggu

SEQ ID NO: 1778754 - RNA, 19 nt, Artificial Sequence
  Description of Artificial Sequence: Synthetic oligonucleotide
ggccguggggccagaggcg

SEQ ID NO: 1778755 - RNA, 19 nt, Artificial Sequence
  Description of Artificial Sequence: Synthetic oligonucleotide
ccuuaaccagccgcacgag

SEQ ID NO: 1778756 - RNA, 19 nt, Artificial Sequence
  Description of Artificial Sequence: Synthetic oligonucleotide
acgaugccauugguagaau

SEQ ID NO: 1778757 - RNA, 19 nt, Artificial Sequence
  Description of Artificial Sequence: Synthetic oligonucleotide
ccgagagccucucuccuga

SEQ ID NO: 1778758 - RNA, 19 nt, Artificial Sequence
  Description of Artificial Sequence: Synthetic oligonucleotide
gacgguuuucagggagcua

SEQ ID NO: 1778759 - RNA, 19 nt, Artificial Sequence
  Description of Artificial Sequence: Synthetic oligonucleotide
gacucgguacacgucgcuu

SEQ ID NO: 1778760 - RNA, 19 nt, Artificial Sequence
  Description of Artificial Sequence: Synthetic oligonucleotide
ggggcuccuccgguuugcg

SEQ ID NO: 1778761 - RNA, 19 nt, Artificial Sequence
  Description of Artificial Sequence: Synthetic oligonucleotide
ccccguaaggcuccagcca

SEQ ID NO: 1778762 - RNA, 19 nt, Artificial Sequence
  Description of Artificial Sequence: Synthetic oligonucleotide
gcucuguucauaggauugu

SEQ ID NO: 1778763 - RNA, 19 nt, Artificial Sequence
  Description of Artificial Sequence: Synthetic oligonucleotide
guuuuccaugucggaggua

SEQ ID NO: 1778764 - RNA, 19 nt, Artificial Sequence
  Description of Artificial Sequence: Synthetic oligonucleotide
acgucgcuucacggggccu

SEQ ID NO: 1778765 - RNA, 19 nt, Artificial Sequence
  Description of Artificial Sequence: Synthetic oligonucleotide
gguucuggaaaggggccgu

SEQ ID NO: 1778766 - RNA, 19 nt, Artificial Sequence
  Description of Artificial Sequence: Synthetic oligonucleotide
cuggggccaccuggggcac

SEQ ID NO: 1778767 - RNA, 19 nt, Artificial Sequence
  Description of Artificial Sequence: Synthetic oligonucleotide
gcuuaguaccgucguccgu

SEQ ID NO: 1778768 - RNA, 19 nt, Artificial Sequence
  Description of Artificial Sequence: Synthetic oligonucleotide
ccucggggugaagccacgc

SEQ ID NO: 1778769 - RNA, 19 nt, Artificial Sequence
  Description of Artificial Sequence: Synthetic oligonucleotide
ggacucgguacacgucgcu

SEQ ID NO: 1778770 - RNA, 19 nt, Artificial Sequence
  Description of Artificial Sequence: Synthetic oligonucleotide
ccgucguccguccagcccu

SEQ ID NO: 1778771 - RNA, 19 nt, Artificial Sequence
  Description of Artificial Sequence: Synthetic oligonucleotide
ccaccacuuuuaguuguga

SEQ ID NO: 1778772 - RNA, 19 nt, Artificial Sequence
  Description of Artificial Sequence: Synthetic oligonucleotide
gcuagacccuccuccuuuu

SEQ ID NO: 1778773 - RNA, 19 nt, Artificial Sequence
  Description of Artificial Sequence: Synthetic oligonucleotide
cgcuucacggggccuugug

SEQ ID NO: 1778774 - RNA, 19 nt, Artificial Sequence
  Description of Artificial Sequence: Synthetic oligonucleotide
cgguuugcgcagacaccac

SEQ ID NO: 1778775 - RNA, 19 nt, Artificial Sequence
  Description of Artificial Sequence: Synthetic oligonucleotide
gcccugcuaaggguaccac

SEQ ID NO: 1778776 - RNA, 19 nt, Artificial Sequence
  Description of Artificial Sequence: Synthetic oligonucleotide
guccgaggcgggcggggcu

SEQ ID NO: 1778777 - RNA, 19 nt, Artificial Sequence
  Description of Artificial Sequence: Synthetic oligonucleotide
cguggggccagaggcgcgc

SEQ ID NO: 1778778 - RNA, 19 nt, Artificial Sequence
  Description of Artificial Sequence: Synthetic oligonucleotide
cacuuggcucuaugacgau

SEQ ID NO: 1778779 - RNA, 19 nt, Artificial Sequence
  Description of Artificial Sequence: Synthetic oligonucleotide
ccagggacccaucccagau

SEQ ID NO: 1778780 - RNA, 19 nt, Artificial Sequence
  Description of Artificial Sequence: Synthetic oligonucleotide
cgguuuucagggagcuaga

SEQ ID NO: 1778781 - RNA, 19 nt, Artificial Sequence
  Description of Artificial Sequence: Synthetic oligonucleotide
cucagccgaucacucucuu

SEQ ID NO: 1778782 - RNA, 19 nt, Artificial Sequence
  Description of Artificial Sequence: Synthetic oligonucleotide
cgcacgagagaugcgauau

SEQ ID NO: 1778783 - RNA, 19 nt, Artificial Sequence
  Description of Artificial Sequence: Synthetic oligonucleotide
cuccuccgguuugcgcaga

SEQ ID NO: 1778784 - RNA, 19 nt, Artificial Sequence
  Description of Artificial Sequence: Synthetic oligonucleotide
ggacggggccaaccaggua

SEQ ID NO: 1778785 - RNA, 19 nt, Artificial Sequence
  Description of Artificial Sequence: Synthetic oligonucleotide
ccgcacgagagaugcgaua

SEQ ID NO: 1778786 - RNA, 19 nt, Artificial Sequence
  Description of Artificial Sequence: Synthetic oligonucleotide
acggcacauuuggcagcuu

SEQ ID NO: 1778787 - RNA, 19 nt, Artificial Sequence
  Description of Artificial Sequence: Synthetic oligonucleotide
gcacgagagaugcgauauu

SEQ ID NO: 1778788 - RNA, 19 nt, Artificial Sequence
  Description of Artificial Sequence: Synthetic oligonucleotide
gcucuaugacgaugccauu

SEQ ID NO: 1778789 - RNA, 19 nt, Artificial Sequence
  Description of Artificial Sequence: Synthetic oligonucleotide
cgucguccguccagcccug

SEQ ID NO: 1778790 - RNA, 19 nt, Artificial Sequence
  Description of Artificial Sequence: Synthetic oligonucleotide
cguccguccagcccugcua

SEQ ID NO: 1778791 - RNA, 19 nt, Artificial Sequence
  Description of Artificial Sequence: Synthetic oligonucleotide
gcucgaggcuggggccacc

SEQ ID NO: 1778792 - RNA, 19 nt, Artificial Sequence
  Description of Artificial Sequence: Synthetic oligonucleotide
ccuccgguuugcgcagaca

SEQ ID NO: 1778793 - RNA, 19 nt, Artificial Sequence
  Description of Artificial Sequence: Synthetic oligonucleotide
cgaugccauugguagaauu

SEQ ID NO: 1778794 - RNA, 19 nt, Artificial Sequence
  Description of Artificial Sequence: Synthetic oligonucleotide
gccgcacgagagaugcgau

SEQ ID NO: 1778795 - RNA, 19 nt, Artificial Sequence
  Description of Artificial Sequence: Synthetic oligonucleotide
gcgcgcugucuucguccga

SEQ ID NO: 1778796 - RNA, 19 nt, Artificial Sequence
  Description of Artificial Sequence: Synthetic oligonucleotide
ccacaaccucuaaccuccu

SEQ ID NO: 1778797 - RNA, 19 nt, Artificial Sequence
  Description of Artificial Sequence: Synthetic oligonucleotide
ccacggaauuagccuuccu

SEQ ID NO: 1778798 - RNA, 19 nt, Artificial Sequence
  Description of Artificial Sequence: Synthetic oligonucleotide
gggacccaucccagaugcu

SEQ ID NO: 1778799 - RNA, 19 nt, Artificial Sequence
  Description of Artificial Sequence: Synthetic oligonucleotide
ccguucucuuugguccagu

SEQ ID NO: 1778800 - RNA, 19 nt, Artificial Sequence
  Description of Artificial Sequence: Synthetic oligonucleotide
cgucgcuucacggggccuu

SEQ ID NO: 1778801 - RNA, 19 nt, Artificial Sequence
  Description of Artificial Sequence: Synthetic oligonucleotide
uguaaaaugcccaagccag

SEQ ID NO: 1778802 - RNA, 19 nt, Artificial Sequence
  Description of Artificial Sequence: Synthetic oligonucleotide
aauauuagcauacuuacua

SEQ ID NO: 1778803 - RNA, 19 nt, Artificial Sequence
  Description of Artificial Sequence: Synthetic oligonucleotide
aaaugauaagccuacaccu

SEQ ID NO: 1778804 - RNA, 19 nt, Artificial Sequence
  Description of Artificial Sequence: Synthetic oligonucleotide
ucuacaucauguaaaaugc

SEQ ID NO: 1778805 - RNA, 19 nt, Artificial Sequence
  Description of Artificial Sequence: Synthetic oligonucleotide
  modified_base (4)..(4): a, c, u, g, unknown or other
aacnccucggacuaacgcc

SEQ ID NO: 1778806 - RNA, 19 nt, Artificial Sequence
  Description of Artificial Sequence: Synthetic oligonucleotide
uuaacauucugcaugggag

SEQ ID NO: 1778807 - RNA, 19 nt, Artificial Sequence
  Description of Artificial Sequence: Synthetic oligonucleotide
uacaccuaagcuuagagcc

SEQ ID NO: 1778808 - RNA, 19 nt, Artificial Sequence
  Description of Artificial Sequence: Synthetic oligonucleotide
uucuacaucauguaaaaug

SEQ ID NO: 1778809 - RNA, 19 nt, Artificial Sequence
  Description of Artificial Sequence: Synthetic oligonucleotide
uuuaaaugaacuucggucu

SEQ ID NO: 1778810 - RNA, 19 nt, Artificial Sequence
  Description of Artificial Sequence: Synthetic oligonucleotide
cauaugaugaauaggaaug

SEQ ID NO: 1778811 - RNA, 19 nt, Artificial Sequence
  Description of Artificial Sequence: Synthetic oligonucleotide
ugagagaucacguggagag

SEQ ID NO: 1778812 - RNA, 19 nt, Artificial Sequence
  Description of Artificial Sequence: Synthetic oligonucleotide
  modified_base (5)..(5): a, c, u, g, unknown or other
aaacnccucggacuaacgc

SEQ ID NO: 1778813 - RNA, 19 nt, Artificial Sequence
  Description of Artificial Sequence: Synthetic oligonucleotide
augaauaggaaugaauggc

SEQ ID NO: 1778814 - RNA, 19 nt, Artificial Sequence
  Description of Artificial Sequence: Synthetic oligonucleotide
uuccaugcaaucauaaugc

SEQ ID NO: 1778815 - RNA, 19 nt, Artificial Sequence
  Description of Artificial Sequence: Synthetic oligonucleotide
gauguuugauuaaagaaag

SEQ ID NO: 1778816 - RNA, 19 nt, Artificial Sequence
  Description of Artificial Sequence: Synthetic oligonucleotide
  modified_base (11)..(11): a, c, u, g, unknown or other
aaucugaaacnccucggac

SEQ ID NO: 1778817 - RNA, 19 nt, Artificial Sequence
  Description of Artificial Sequence: Synthetic oligonucleotide
uaagcuuagagccaguccu

SEQ ID NO: 1778818 - RNA, 19 nt, Artificial Sequence
  Description of Artificial Sequence: Synthetic oligonucleotide
uaucagugcacaaucuugg

SEQ ID NO: 1778819 - RNA, 19 nt, Artificial Sequence
  Description of Artificial Sequence: Synthetic oligonucleotide
ugauuuacuagcuguaagc

SEQ ID NO: 1778820 - RNA, 19 nt, Artificial Sequence
  Description of Artificial Sequence: Synthetic oligonucleotide
auugugguacuuuuauggc

SEQ ID NO: 1778821 - RNA, 19 nt, Artificial Sequence
  Description of Artificial Sequence: Synthetic oligonucleotide
uguaagcuaaaugauaagc

SEQ ID NO: 1778822 - RNA, 19 nt, Artificial Sequence
  Description of Artificial Sequence: Synthetic oligonucleotide
aggauugauaguaaaaugg

SEQ ID NO: 1778823 - RNA, 19 nt, Artificial Sequence
  Description of Artificial Sequence: Synthetic oligonucleotide
aaauguucuauagccuucc

SEQ ID NO: 1778824 - RNA, 19 nt, Artificial Sequence
  Description of Artificial Sequence: Synthetic oligonucleotide
ggauauacaaguuacuugc

SEQ ID NO: 1778825 - RNA, 19 nt, Artificial Sequence
  Description of Artificial Sequence: Synthetic oligonucleotide
auauuagcauacuuacuac

SEQ ID NO: 1778826 - RNA, 19 nt, Artificial Sequence
  Description of Artificial Sequence: Synthetic oligonucleotide
uguucuauagccuucccac

SEQ ID NO: 1778827 - RNA, 19 nt, Artificial Sequence
  Description of Artificial Sequence: Synthetic oligonucleotide
uuaucagugcacaaucuug

SEQ ID NO: 1778828 - RNA, 19 nt, Artificial Sequence
  Description of Artificial Sequence: Synthetic oligonucleotide
aucauaaugccauuaucag

SEQ ID NO: 1778829 - RNA, 19 nt, Artificial Sequence
  Description of Artificial Sequence: Synthetic oligonucleotide
ugaauaggaaugaauggcu

SEQ ID NO: 1778830 - RNA, 19 nt, Artificial Sequence
  Description of Artificial Sequence: Synthetic oligonucleotide
acuaacgccaacgugugcc

SEQ ID NO: 1778831 - RNA, 19 nt, Artificial Sequence
  Description of Artificial Sequence: Synthetic oligonucleotide
uguuugauuaaagaaaguc

SEQ ID NO: 1778832 - RNA, 19 nt, Artificial Sequence
  Description of Artificial Sequence: Synthetic oligonucleotide
aaugccauuaucagugcac

SEQ ID NO: 1778833 - RNA, 19 nt, Artificial Sequence
  Description of Artificial Sequence: Synthetic oligonucleotide
  modified_base (19)..(19): a, c, u, g, unknown or other
aagcagaaaaucugaaacn

SEQ ID NO: 1778834 - RNA, 19 nt, Artificial Sequence
  Description of Artificial Sequence: Synthetic oligonucleotide
cuaauacugcaucagcugg

SEQ ID NO: 1778835 - RNA, 19 nt, Artificial Sequence
  Description of Artificial Sequence: Synthetic oligonucleotide
  modified_base (12)..(12): a, c, u, g, unknown or other
aaaucugaaacnccucgga

SEQ ID NO: 1778836 - RNA, 19 nt, Artificial Sequence
  Description of Artificial Sequence: Synthetic oligonucleotide
auacaacuaauacugcauc

SEQ ID NO: 1778837 - RNA, 19 nt, Artificial Sequence
  Description of Artificial Sequence: Synthetic oligonucleotide
  modified_base (13)..(13): a, c, u, g, unknown or other
aaaaucugaaacnccucgg

SEQ ID NO: 1778838 - RNA, 19 nt, Artificial Sequence
  Description of Artificial Sequence: Synthetic oligonucleotide
uggauguuugauuaaagaa

SEQ ID NO: 1778839 - RNA, 19 nt, Artificial Sequence
  Description of Artificial Sequence: Synthetic oligonucleotide
cagugcacaaucuuggagg

SEQ ID NO: 1778840 - RNA, 19 nt, Artificial Sequence
  Description of Artificial Sequence: Synthetic oligonucleotide
ccagauacaacuaauacug

SEQ ID NO: 1778841 - RNA, 19 nt, Artificial Sequence
  Description of Artificial Sequence: Synthetic oligonucleotide
aauguucuauagccuuccc

SEQ ID NO: 1778842 - RNA, 19 nt, Artificial Sequence
  Description of Artificial Sequence: Synthetic oligonucleotide
aaaacuccugcuaucuuac

SEQ ID NO: 1778843 - RNA, 19 nt, Artificial Sequence
  Description of Artificial Sequence: Synthetic oligonucleotide
uacuauucguuuaauauuu

SEQ ID NO: 1778844 - RNA, 19 nt, Artificial Sequence
  Description of Artificial Sequence: Synthetic oligonucleotide
gacggagugaacuauucgc

SEQ ID NO: 1778845 - RNA, 19 nt, Artificial Sequence
  Description of Artificial Sequence: Synthetic oligonucleotide
aucgcaauucuuaacauuc

SEQ ID NO: 1778846 - RNA, 19 nt, Artificial Sequence
  Description of Artificial Sequence: Synthetic oligonucleotide
cagccuaucgauaacgugc

SEQ ID NO: 1778847 - RNA, 19 nt, Artificial Sequence
  Description of Artificial Sequence: Synthetic oligonucleotide
uuuggauaugucuacucca

SEQ ID NO: 1778848 - RNA, 19 nt, Artificial Sequence
  Description of Artificial Sequence: Synthetic oligonucleotide
uuaaaugaacuucggucug

SEQ ID NO: 1778849 - RNA, 19 nt, Artificial Sequence
  Description of Artificial Sequence: Synthetic oligonucleotide
acuaauacugcaucagcug

SEQ ID NO: 1778850 - RNA, 19 nt, Artificial Sequence
  Description of Artificial Sequence: Synthetic oligonucleotide
ucccguaaaagaaaaucgc

SEQ ID NO: 1778851 - RNA, 19 nt, Artificial Sequence
  Description of Artificial Sequence: Synthetic oligonucleotide
ugauuaaagaaagucuucu

SEQ ID NO: 1778852 - RNA, 19 nt, Artificial Sequence
  Description of Artificial Sequence: Synthetic oligonucleotide
ugaacguuacucuucggug

SEQ ID NO: 1778853 - RNA, 19 nt, Artificial Sequence
  Description of Artificial Sequence: Synthetic oligonucleotide
guaagcuaaaugauaagcc

SEQ ID NO: 1778854 - RNA, 19 nt, Artificial Sequence
  Description of Artificial Sequence: Synthetic oligonucleotide
  modified_base (10)..(10): a, c, u, g, unknown or other
aucugaaacnccucggacu

SEQ ID NO: 1778855 - RNA, 19 nt, Artificial Sequence
  Description of Artificial Sequence: Synthetic oligonucleotide
gauguguucuuuucgcaag

SEQ ID NO: 1778856 - RNA, 19 nt, Artificial Sequence
  Description of Artificial Sequence: Synthetic oligonucleotide
aacgccaacgugugccucc

SEQ ID NO: 1778857 - RNA, 19 nt, Artificial Sequence
  Description of Artificial Sequence: Synthetic oligonucleotide
aacagaauggcacgaugug

SEQ ID NO: 1778858 - RNA, 19 nt, Artificial Sequence
  Description of Artificial Sequence: Synthetic oligonucleotide
auaugucuacuccaagagg

SEQ ID NO: 1778859 - RNA, 19 nt, Artificial Sequence
  Description of Artificial Sequence: Synthetic oligonucleotide
cuucggauauacaaguuac

SEQ ID NO: 1778860 - RNA, 19 nt, Artificial Sequence
  Description of Artificial Sequence: Synthetic oligonucleotide
uacuacucuacaaauaauu

SEQ ID NO: 1778861 - RNA, 19 nt, Artificial Sequence
  Description of Artificial Sequence: Synthetic oligonucleotide
cuccauaugaugaauagga

SEQ ID NO: 1778862 - RNA, 19 nt, Artificial Sequence
  Description of Artificial Sequence: Synthetic oligonucleotide
uccuuguuuggccaaaugu

SEQ ID NO: 1778863 - RNA, 19 nt, Artificial Sequence
  Description of Artificial Sequence: Synthetic oligonucleotide
agauacaacuaauacugca

SEQ ID NO: 1778864 - RNA, 19 nt, Artificial Sequence
  Description of Artificial Sequence: Synthetic oligonucleotide
aacgugugccuccauauga

SEQ ID NO: 1778865 - RNA, 19 nt, Artificial Sequence
  Description of Artificial Sequence: Synthetic oligonucleotide
agucccguaaaagaaaauc

SEQ ID NO: 1778866 - RNA, 19 nt, Artificial Sequence
  Description of Artificial Sequence: Synthetic oligonucleotide
uguuguaugcugcaccgca

SEQ ID NO: 1778867 - RNA, 19 nt, Artificial Sequence
  Description of Artificial Sequence: Synthetic oligonucleotide
uauuagcauacuuacuacu

SEQ ID NO: 1778868 - RNA, 19 nt, Artificial Sequence
  Description of Artificial Sequence: Synthetic oligonucleotide
uuggccaaauguucuauag

SEQ ID NO: 1778869 - RNA, 19 nt, Artificial Sequence
  Description of Artificial Sequence: Synthetic oligonucleotide
auuagcauacuuacuacuc

SEQ ID NO: 1778870 - RNA, 19 nt, Artificial Sequence
  Description of Artificial Sequence: Synthetic oligonucleotide
cauguaaaaugcccaagcc

SEQ ID NO: 1778871 - RNA, 19 nt, Artificial Sequence
  Description of Artificial Sequence: Synthetic oligonucleotide
cuaaaugauaagccuacac

SEQ ID NO: 1778872 - RNA, 19 nt, Artificial Sequence
  Description of Artificial Sequence: Synthetic oligonucleotide
ucuggauguuugauuaaag

SEQ ID NO: 1778873 - RNA, 19 nt, Artificial Sequence
  Description of Artificial Sequence: Synthetic oligonucleotide
ucagugcacaaucuuggag

SEQ ID NO: 1778874 - RNA, 19 nt, Artificial Sequence
  Description of Artificial Sequence: Synthetic oligonucleotide
ucgcugagagaucacgugg

SEQ ID NO: 1778875 - RNA, 19 nt, Artificial Sequence
  Description of Artificial Sequence: Synthetic oligonucleotide
uccaagaggacauuuuggu

SEQ ID NO: 1778876 - RNA, 19 nt, Artificial Sequence
  Description of Artificial Sequence: Synthetic oligonucleotide
uaucagccuaucgauaacg

SEQ ID NO: 1778877 - RNA, 19 nt, Artificial Sequence
  Description of Artificial Sequence: Synthetic oligonucleotide
acuacucuacaaauaauuc

SEQ ID NO: 1778878 - RNA, 19 nt, Artificial Sequence
  Description of Artificial Sequence: Synthetic oligonucleotide
uacaacuaauacugcauca

SEQ ID NO: 1778879 - RNA, 19 nt, Artificial Sequence
  Description of Artificial Sequence: Synthetic oligonucleotide
aauaggaaugaauggcuuu

SEQ ID NO: 1778880 - RNA, 19 nt, Artificial Sequence
  Description of Artificial Sequence: Synthetic oligonucleotide
uaagccuacaccuaagcuu

SEQ ID NO: 1778881 - RNA, 19 nt, Artificial Sequence
  Description of Artificial Sequence: Synthetic oligonucleotide
acuagcuguaagcuaaaug

SEQ ID NO: 1778882 - RNA, 19 nt, Artificial Sequence
  Description of Artificial Sequence: Synthetic oligonucleotide
ucuucuacuauucguuuaa

SEQ ID NO: 1778883 - RNA, 19 nt, Artificial Sequence
  Description of Artificial Sequence: Synthetic oligonucleotide
uucuauagccuucccacca

SEQ ID NO: 1778884 - RNA, 19 nt, Artificial Sequence
  Description of Artificial Sequence: Synthetic oligonucleotide
  modified_base (9)..(9): a, c, u, g, unknown or other
ucugaaacnccucggacua

SEQ ID NO: 1778885 - RNA, 19 nt, Artificial Sequence
  Description of Artificial Sequence: Synthetic oligonucleotide
gauaacgugcugaaguccc

SEQ ID NO: 1778886 - RNA, 19 nt, Artificial Sequence
  Description of Artificial Sequence: Synthetic oligonucleotide
auugauaguaaaauggaau

SEQ ID NO: 1778887 - RNA, 19 nt, Artificial Sequence
  Description of Artificial Sequence: Synthetic oligonucleotide
cuuacuacucuacaaauaa

SEQ ID NO: 1778888 - RNA, 19 nt, Artificial Sequence
  Description of Artificial Sequence: Synthetic oligonucleotide
ugauaguaaaauggaaucu

SEQ ID NO: 1778889 - RNA, 19 nt, Artificial Sequence
  Description of Artificial Sequence: Synthetic oligonucleotide
uugauuaaagaaagucuuc

SEQ ID NO: 1778890 - RNA, 19 nt, Artificial Sequence
  Description of Artificial Sequence: Synthetic oligonucleotide
agaucacguggagagaugc

SEQ ID NO: 1778891 - RNA, 19 nt, Artificial Sequence
  Description of Artificial Sequence: Synthetic oligonucleotide
ugucgagcaugucaccugg

SEQ ID NO: 1778892 - RNA, 19 nt, Artificial Sequence
  Description of Artificial Sequence: Synthetic oligonucleotide
gucccguaaaagaaaaucg

SEQ ID NO: 1778893 - RNA, 19 nt, Artificial Sequence
  Description of Artificial Sequence: Synthetic oligonucleotide
gaaaaucgcaauucuuaac

SEQ ID NO: 1778894 - RNA, 19 nt, Artificial Sequence
  Description of Artificial Sequence: Synthetic oligonucleotide
auacuuacuacucuacaaa

SEQ ID NO: 1778895 - RNA, 19 nt, Artificial Sequence
  Description of Artificial Sequence: Synthetic oligonucleotide
agcuaaaugauaagccuac

SEQ ID NO: 1778896 - RNA, 19 nt, Artificial Sequence
  Description of Artificial Sequence: Synthetic oligonucleotide
aauacugcaucagcuggag

SEQ ID NO: 1778897 - RNA, 19 nt, Artificial Sequence
  Description of Artificial Sequence: Synthetic oligonucleotide
agagcuuuaagaaucacaa

SEQ ID NO: 1778898 - RNA, 19 nt, Artificial Sequence
  Description of Artificial Sequence: Synthetic oligonucleotide
ucuucggauauacaaguua

SEQ ID NO: 1778899 - RNA, 19 nt, Artificial Sequence
  Description of Artificial Sequence: Synthetic oligonucleotide
aaaucgcaauucuuaacau

SEQ ID NO: 1778900 - RNA, 19 nt, Artificial Sequence
  Description of Artificial Sequence: Synthetic oligonucleotide
augaacguuacucuucggu

SEQ ID NO: 1778901 - RNA, 19 nt, Artificial Sequence
  Description of Artificial Sequence: Synthetic oligonucleotide
agaaaaucgcaauucuuaa

SEQ ID NO: 1778902 - RNA, 19 nt, Artificial Sequence
  Description of Artificial Sequence: Synthetic oligonucleotide
acaacuaauacugcaucag

SEQ ID NO: 1778903 - RNA, 19 nt, Artificial Sequence
  Description of Artificial Sequence: Synthetic oligonucleotide
guagagagcuuuaagaauc

SEQ ID NO: 1778904 - RNA, 19 nt, Artificial Sequence
  Description of Artificial Sequence: Synthetic oligonucleotide
augaacuucggucugggaa

SEQ ID NO: 1778905 - RNA, 19 nt, Artificial Sequence
  Description of Artificial Sequence: Synthetic oligonucleotide
caaucuuggaggaggacac

SEQ ID NO: 1778906 - RNA, 19 nt, Artificial Sequence
  Description of Artificial Sequence: Synthetic oligonucleotide
acuccaagaggacauuuug

SEQ ID NO: 1778907 - RNA, 19 nt, Artificial Sequence
  Description of Artificial Sequence: Synthetic oligonucleotide
uggugcuauguccaaagcu

SEQ ID NO: 1778908 - RNA, 19 nt, Artificial Sequence
  Description of Artificial Sequence: Synthetic oligonucleotide
ugaagucccguaaaagaaa

SEQ ID NO: 1778909 - RNA, 19 nt, Artificial Sequence
  Description of Artificial Sequence: Synthetic oligonucleotide
ugauaagccuacaccuaag

SEQ ID NO: 1778910 - RNA, 19 nt, Artificial Sequence
  Description of Artificial Sequence: Synthetic oligonucleotide
ugugaagcuguugagcuac

SEQ ID NO: 1778911 - RNA, 19 nt, Artificial Sequence
  Description of Artificial Sequence: Synthetic oligonucleotide
aaucgcaauucuuaacauu

SEQ ID NO: 1778912 - RNA, 19 nt, Artificial Sequence
  Description of Artificial Sequence: Synthetic oligonucleotide
cugauuuacuagcuguaag

SEQ ID NO: 1778913 - RNA, 19 nt, Artificial Sequence
  Description of Artificial Sequence: Synthetic oligonucleotide
ugaacuucggucugggaau

SEQ ID NO: 1778914 - RNA, 19 nt, Artificial Sequence
  Description of Artificial Sequence: Synthetic oligonucleotide
auaagccuacaccuaagcu

SEQ ID NO: 1778915 - RNA, 19 nt, Artificial Sequence
  Description of Artificial Sequence: Synthetic oligonucleotide
cacgauguguucuuuucgc

SEQ ID NO: 1778916 - RNA, 19 nt, Artificial Sequence
  Description of Artificial Sequence: Synthetic oligonucleotide
cuacaucauguaaaaugcc

SEQ ID NO: 1778917 - RNA, 19 nt, Artificial Sequence
  Description of Artificial Sequence: Synthetic oligonucleotide
cuuuucgcaagguggcacg

SEQ ID NO: 1778918 - RNA, 19 nt, Artificial Sequence
  Description of Artificial Sequence: Synthetic oligonucleotide
uaaaaugcccaagccagca

SEQ ID NO: 1778919 - RNA, 19 nt, Artificial Sequence
  Description of Artificial Sequence: Synthetic oligonucleotide
cuaagcuuagagccagucc

SEQ ID NO: 1778920 - RNA, 19 nt, Artificial Sequence
  Description of Artificial Sequence: Synthetic oligonucleotide
uacuuacuacucuacaaau

SEQ ID NO: 1778921 - RNA, 19 nt, Artificial Sequence
  Description of Artificial Sequence: Synthetic oligonucleotide
gauaguaaaauggaaucua

SEQ ID NO: 1778922 - RNA, 19 nt, Artificial Sequence
  Description of Artificial Sequence: Synthetic oligonucleotide
uaguugcaaucgcugagag

SEQ ID NO: 1778923 - RNA, 19 nt, Artificial Sequence
  Description of Artificial Sequence: Synthetic oligonucleotide
uggccaaauguucuauagc

SEQ ID NO: 1778924 - RNA, 19 nt, Artificial Sequence
  Description of Artificial Sequence: Synthetic oligonucleotide
agaacauucuggauguuug

SEQ ID NO: 1778925 - RNA, 19 nt, Artificial Sequence
  Description of Artificial Sequence: Synthetic oligonucleotide
uuugacgguaguugcaauc

SEQ ID NO: 1778926 - RNA, 19 nt, Artificial Sequence
  Description of Artificial Sequence: Synthetic oligonucleotide
auggaaucuauuuccuugu

SEQ ID NO: 1778927 - RNA, 19 nt, Artificial Sequence
  Description of Artificial Sequence: Synthetic oligonucleotide
cugguuugacgguaguugc

SEQ ID NO: 1778928 - RNA, 19 nt, Artificial Sequence
  Description of Artificial Sequence: Synthetic oligonucleotide
auuaucagugcacaaucuu

SEQ ID NO: 1778929 - RNA, 19 nt, Artificial Sequence
  Description of Artificial Sequence: Synthetic oligonucleotide
auaauuccugcagggacgg

SEQ ID NO: 1778930 - RNA, 19 nt, Artificial Sequence
  Description of Artificial Sequence: Synthetic oligonucleotide
gaacguuacucuucgguga

SEQ ID NO: 1778931 - RNA, 19 nt, Artificial Sequence
  Description of Artificial Sequence: Synthetic oligonucleotide
cacaacaaagugcauugug

SEQ ID NO: 1778932 - RNA, 19 nt, Artificial Sequence
  Description of Artificial Sequence: Synthetic oligonucleotide
uaccaguuuaugaggaaaa

SEQ ID NO: 1778933 - RNA, 19 nt, Artificial Sequence
  Description of Artificial Sequence: Synthetic oligonucleotide
uuguguugcauuugcuaca

SEQ ID NO: 1778934 - RNA, 19 nt, Artificial Sequence
  Description of Artificial Sequence: Synthetic oligonucleotide
guugcaaucgcugagagau

SEQ ID NO: 1778935 - RNA, 19 nt, Artificial Sequence
  Description of Artificial Sequence: Synthetic oligonucleotide
ucuuuggauaugucuacuc

SEQ ID NO: 1778936 - RNA, 19 nt, Artificial Sequence
  Description of Artificial Sequence: Synthetic oligonucleotide
aaagaaaaucgcaauucuu

SEQ ID NO: 1778937 - RNA, 19 nt, Artificial Sequence
  Description of Artificial Sequence: Synthetic oligonucleotide
auaucggaugccuucuaca

SEQ ID NO: 1778938 - RNA, 19 nt, Artificial Sequence
  Description of Artificial Sequence: Synthetic oligonucleotide
uccauaugaugaauaggaa

SEQ ID NO: 1778939 - RNA, 19 nt, Artificial Sequence
  Description of Artificial Sequence: Synthetic oligonucleotide
gucaccuggugcuaugucc

SEQ ID NO: 1778940 - RNA, 19 nt, Artificial Sequence
  Description of Artificial Sequence: Synthetic oligonucleotide
augauaagccuacaccuaa

SEQ ID NO: 1778941 - RNA, 19 nt, Artificial Sequence
  Description of Artificial Sequence: Synthetic oligonucleotide
uguaucaucacagcugguu

SEQ ID NO: 1778942 - RNA, 19 nt, Artificial Sequence
  Description of Artificial Sequence: Synthetic oligonucleotide
uaguaaaauggaaucuauu

SEQ ID NO: 1778943 - RNA, 19 nt, Artificial Sequence
  Description of Artificial Sequence: Synthetic oligonucleotide
ucagccuaucgauaacgug

SEQ ID NO: 1778944 - RNA, 19 nt, Artificial Sequence
  Description of Artificial Sequence: Synthetic oligonucleotide
  modified_base (2)..(2): a, c, u, g, unknown or other
cngaaagaguuucuucuac

SEQ ID NO: 1778945 - RNA, 19 nt, Artificial Sequence
  Description of Artificial Sequence: Synthetic oligonucleotide
agaauggcacgauguguuc

SEQ ID NO: 1778946 - RNA, 19 nt, Artificial Sequence
  Description of Artificial Sequence: Synthetic oligonucleotide
uucggauauacaaguuacu

SEQ ID NO: 1778947 - RNA, 19 nt, Artificial Sequence
  Description of Artificial Sequence: Synthetic oligonucleotide
gcauguaaucuuucaaucc

SEQ ID NO: 1778948 - RNA, 19 nt, Artificial Sequence
  Description of Artificial Sequence: Synthetic oligonucleotide
uccaugcaaucauaaugcc

SEQ ID NO: 1778949 - RNA, 19 nt, Artificial Sequence
  Description of Artificial Sequence: Synthetic oligonucleotide
accuugucgagcaugucac

SEQ ID NO: 1778950 - RNA, 19 nt, Artificial Sequence
  Description of Artificial Sequence: Synthetic oligonucleotide
  modified_base (7)..(7): a, c, u, g, unknown or other
ugaaacnccucggacuaac

SEQ ID NO: 1778951 - RNA, 19 nt, Artificial Sequence
  Description of Artificial Sequence: Synthetic oligonucleotide
caugcaaucauaaugccau

SEQ ID NO: 1778952 - RNA, 19 nt, Artificial Sequence
  Description of Artificial Sequence: Synthetic oligonucleotide
gagcucuucggauauacaa

SEQ ID NO: 1778953 - RNA, 19 nt, Artificial Sequence
  Description of Artificial Sequence: Synthetic oligonucleotide
agugcacaaucuuggagga

SEQ ID NO: 1778954 - RNA, 19 nt, Artificial Sequence
  Description of Artificial Sequence: Synthetic oligonucleotide
aacguuacucuucggugau

SEQ ID NO: 1778955 - RNA, 19 nt, Artificial Sequence
  Description of Artificial Sequence: Synthetic oligonucleotide
uuacuacucuacaaauaau

SEQ ID NO: 1778956 - RNA, 19 nt, Artificial Sequence
  Description of Artificial Sequence: Synthetic oligonucleotide
guucauaucggaugccuuc

SEQ ID NO: 1778957 - RNA, 19 nt, Artificial Sequence
  Description of Artificial Sequence: Synthetic oligonucleotide
uucgcaagguggcacgcug

SEQ ID NO: 1778958 - RNA, 19 nt, Artificial Sequence
  Description of Artificial Sequence: Synthetic oligonucleotide
agcauacuuacuacucuac

SEQ ID NO: 1778959 - RNA, 19 nt, Artificial Sequence
  Description of Artificial Sequence: Synthetic oligonucleotide
ugcugaagucccguaaaag

SEQ ID NO: 1778960 - RNA, 19 nt, Artificial Sequence
  Description of Artificial Sequence: Synthetic oligonucleotide
uguaugcugcaccgcagca

SEQ ID NO: 1778961 - RNA, 19 nt, Artificial Sequence
  Description of Artificial Sequence: Synthetic oligonucleotide
ucuauagccuucccaccac

SEQ ID NO: 1778962 - RNA, 19 nt, Artificial Sequence
  Description of Artificial Sequence: Synthetic oligonucleotide
cuggauguuugauuaaaga

SEQ ID NO: 1778963 - RNA, 19 nt, Artificial Sequence
  Description of Artificial Sequence: Synthetic oligonucleotide
auguucuauagccuuccca

SEQ ID NO: 1778964 - RNA, 19 nt, Artificial Sequence
  Description of Artificial Sequence: Synthetic oligonucleotide
aauggcacgauguguucuu

SEQ ID NO: 1778965 - RNA, 19 nt, Artificial Sequence
  Description of Artificial Sequence: Synthetic oligonucleotide
uagcuguaagcuaaaugau

SEQ ID NO: 1778966 - RNA, 19 nt, Artificial Sequence
  Description of Artificial Sequence: Synthetic oligonucleotide
gcuguuguaugcugcaccg

SEQ ID NO: 1778967 - RNA, 19 nt, Artificial Sequence
  Description of Artificial Sequence: Synthetic oligonucleotide
cuguaagcuaaaugauaag

SEQ ID NO: 1778968 - RNA, 19 nt, Artificial Sequence
  Description of Artificial Sequence: Synthetic oligonucleotide
guucuuuucgcaagguggc

SEQ ID NO: 1778969 - RNA, 19 nt, Artificial Sequence
  Description of Artificial Sequence: Synthetic oligonucleotide
aagcuaaaugauaagccua

SEQ ID NO: 1778970 - RNA, 19 nt, Artificial Sequence
  Description of Artificial Sequence: Synthetic oligonucleotide
ucggauauacaaguuacuu

SEQ ID NO: 1778971 - RNA, 19 nt, Artificial Sequence
  Description of Artificial Sequence: Synthetic oligonucleotide
ucggacuaacgccaacgug

SEQ ID NO: 1778972 - RNA, 19 nt, Artificial Sequence
  Description of Artificial Sequence: Synthetic oligonucleotide
aaugauaagccuacaccua

SEQ ID NO: 1778973 - RNA, 19 nt, Artificial Sequence
  Description of Artificial Sequence: Synthetic oligonucleotide
aagccuacaccuaagcuua

SEQ ID NO: 1778974 - RNA, 19 nt, Artificial Sequence
  Description of Artificial Sequence: Synthetic oligonucleotide
aaugaacuucggucuggga

SEQ ID NO: 1778975 - RNA, 19 nt, Artificial Sequence
  Description of Artificial Sequence: Synthetic oligonucleotide
uguccagcgucauccacca

SEQ ID NO: 1778976 - RNA, 19 nt, Artificial Sequence
  Description of Artificial Sequence: Synthetic oligonucleotide
gguaguugcaaucgcugag

SEQ ID NO: 1778977 - RNA, 19 nt, Artificial Sequence
  Description of Artificial Sequence: Synthetic oligonucleotide
uggcuuuuaaacugauuua

SEQ ID NO: 1778978 - RNA, 19 nt, Artificial Sequence
  Description of Artificial Sequence: Synthetic oligonucleotide
uagcauacuuacuacucua

SEQ ID NO: 1778979 - RNA, 19 nt, Artificial Sequence
  Description of Artificial Sequence: Synthetic oligonucleotide
guucuauagccuucccacc

SEQ ID NO: 1778980 - RNA, 19 nt, Artificial Sequence
  Description of Artificial Sequence: Synthetic oligonucleotide
ggauguuugauuaaagaaa

SEQ ID NO: 1778981 - RNA, 19 nt, Artificial Sequence
  Description of Artificial Sequence: Synthetic oligonucleotide
gauuuacuagcuguaagcu

SEQ ID NO: 1778982 - RNA, 19 nt, Artificial Sequence
  Description of Artificial Sequence: Synthetic oligonucleotide
  modified_base (6)..(6): a, c, u, g, unknown or other
gaaacnccucggacuaacg

SEQ ID NO: 1778983 - RNA, 19 nt, Artificial Sequence
  Description of Artificial Sequence: Synthetic oligonucleotide
aaucgcugagagaucacgu

SEQ ID NO: 1778984 - RNA, 19 nt, Artificial Sequence
  Description of Artificial Sequence: Synthetic oligonucleotide
ucgcaauucuuaacauucu

SEQ ID NO: 1778985 - RNA, 19 nt, Artificial Sequence
  Description of Artificial Sequence: Synthetic oligonucleotide
acuccugcuaucuuacuua

SEQ ID NO: 1778986 - RNA, 19 nt, Artificial Sequence
  Description of Artificial Sequence: Synthetic oligonucleotide
agcucuucggauauacaag

SEQ ID NO: 1778987 - RNA, 19 nt, Artificial Sequence
  Description of Artificial Sequence: Synthetic oligonucleotide
ugguuugacgguaguugca

SEQ ID NO: 1778988 - RNA, 19 nt, Artificial Sequence
  Description of Artificial Sequence: Synthetic oligonucleotide
cuugccaccuugucgagca

SEQ ID NO: 1778989 - RNA, 19 nt, Artificial Sequence
  Description of Artificial Sequence: Synthetic oligonucleotide
cauaucggaugccuucuac

SEQ ID NO: 1778990 - RNA, 19 nt, Artificial Sequence
  Description of Artificial Sequence: Synthetic oligonucleotide
ugccuucuacaucauguaa

SEQ ID NO: 1778991 - RNA, 19 nt, Artificial Sequence
  Description of Artificial Sequence: Synthetic oligonucleotide
uuccuuguuuggccaaaug

SEQ ID NO: 1778992 - RNA, 19 nt, Artificial Sequence
  Description of Artificial Sequence: Synthetic oligonucleotide
ugucuacuccaagaggaca

SEQ ID NO: 1778993 - RNA, 19 nt, Artificial Sequence
  Description of Artificial Sequence: Synthetic oligonucleotide
auagccuucccaccacuca

SEQ ID NO: 1778994 - RNA, 19 nt, Artificial Sequence
  Description of Artificial Sequence: Synthetic oligonucleotide
ucuuuucgcaagguggcac

SEQ ID NO: 1778995 - RNA, 19 nt, Artificial Sequence
  Description of Artificial Sequence: Synthetic oligonucleotide
ugacgguaguugcaaucgc

SEQ ID NO: 1778996 - RNA, 19 nt, Artificial Sequence
  Description of Artificial Sequence: Synthetic oligonucleotide
cauuuugguucauaucgga

SEQ ID NO: 1778997 - RNA, 19 nt, Artificial Sequence
  Description of Artificial Sequence: Synthetic oligonucleotide
uauagccuucccaccacuc

SEQ ID NO: 1778998 - RNA, 19 nt, Artificial Sequence
  Description of Artificial Sequence: Synthetic oligonucleotide
  modified_base (5)..(5): a, c, u, g, unknown or other
uggcngaaagaguuucuuc

SEQ ID NO: 1778999 - RNA, 19 nt, Artificial Sequence
  Description of Artificial Sequence: Synthetic oligonucleotide
uucuggauguuugauuaaa

SEQ ID NO: 1779000 - RNA, 19 nt, Artificial Sequence
  Description of Artificial Sequence: Synthetic oligonucleotide
agccaguccugguuugacg

SEQ ID NO: 1779001 - RNA, 19 nt, Artificial Sequence
  Description of Artificial Sequence: Synthetic oligonucleotide
agagaucacguggagagau

SEQ ID NO: 1779002 - RNA, 19 nt, Artificial Sequence
  Description of Artificial Sequence: Synthetic oligonucleotide
uguguugcauuugcuacaa

SEQ ID NO: 1779003 - RNA, 19 nt, Artificial Sequence
  Description of Artificial Sequence: Synthetic oligonucleotide
gauauacaaguuacuugca

SEQ ID NO: 1779004 - RNA, 19 nt, Artificial Sequence
  Description of Artificial Sequence: Synthetic oligonucleotide
caccacucaucguagaaca

SEQ ID NO: 1779005 - RNA, 19 nt, Artificial Sequence
  Description of Artificial Sequence: Synthetic oligonucleotide
aagcuucccaagaagcaga

SEQ ID NO: 1779006 - RNA, 19 nt, Artificial Sequence
  Description of Artificial Sequence: Synthetic oligonucleotide
ugcaaucauaaugccauua

SEQ ID NO: 1779007 - RNA, 19 nt, Artificial Sequence
  Description of Artificial Sequence: Synthetic oligonucleotide
caggauuugucccuucuca

SEQ ID NO: 1779008 - RNA, 19 nt, Artificial Sequence
  Description of Artificial Sequence: Synthetic oligonucleotide
ucuuaacauucugcauggg

SEQ ID NO: 1779009 - RNA, 19 nt, Artificial Sequence
  Description of Artificial Sequence: Synthetic oligonucleotide
ggauugauaguaaaaugga

SEQ ID NO: 1779010 - RNA, 19 nt, Artificial Sequence
  Description of Artificial Sequence: Synthetic oligonucleotide
uguuuggccaaauguucua

SEQ ID NO: 1779011 - RNA, 19 nt, Artificial Sequence
  Description of Artificial Sequence: Synthetic oligonucleotide
acgauguguucuuuucgca

SEQ ID NO: 1779012 - RNA, 19 nt, Artificial Sequence
  Description of Artificial Sequence: Synthetic oligonucleotide
gaagucccguaaaagaaaa

SEQ ID NO: 1779013 - RNA, 19 nt, Artificial Sequence
  Description of Artificial Sequence: Synthetic oligonucleotide
cauuguguugcauuugcua

SEQ ID NO: 1779014 - RNA, 19 nt, Artificial Sequence
  Description of Artificial Sequence: Synthetic oligonucleotide
ccaugaacguuacucuucg

SEQ ID NO: 1779015 - RNA, 19 nt, Artificial Sequence
  Description of Artificial Sequence: Synthetic oligonucleotide
ugagcuacuggaggaacaa

SEQ ID NO: 1779016 - RNA, 19 nt, Artificial Sequence
  Description of Artificial Sequence: Synthetic oligonucleotide
  modified_base (4)..(4): a, c, u, g, unknown or other
ggcngaaagaguuucuucu

SEQ ID NO: 1779017 - RNA, 19 nt, Artificial Sequence
  Description of Artificial Sequence: Synthetic oligonucleotide
augucuacuccaagaggac

SEQ ID NO: 1779018 - RNA, 19 nt, Artificial Sequence
  Description of Artificial Sequence: Synthetic oligonucleotide
aucagugcacaaucuugga

SEQ ID NO: 1779019 - RNA, 19 nt, Artificial Sequence
  Description of Artificial Sequence: Synthetic oligonucleotide
caugggaggauugauagua

SEQ ID NO: 1779020 - RNA, 19 nt, Artificial Sequence
  Description of Artificial Sequence: Synthetic oligonucleotide
gagcaugucaccuggugcu

SEQ ID NO: 1779021 - RNA, 19 nt, Artificial Sequence
  Description of Artificial Sequence: Synthetic oligonucleotide
uucggucugggaaugcauu

SEQ ID NO: 1779022 - RNA, 19 nt, Artificial Sequence
  Description of Artificial Sequence: Synthetic oligonucleotide
ggacggagugaacuauucg

SEQ ID NO: 1779023 - RNA, 19 nt, Artificial Sequence
  Description of Artificial Sequence: Synthetic oligonucleotide
aguaccaguuuaugaggaa

SEQ ID NO: 1779024 - RNA, 19 nt, Artificial Sequence
  Description of Artificial Sequence: Synthetic oligonucleotide
caugaacguuacucuucgg

SEQ ID NO: 1779025 - RNA, 19 nt, Artificial Sequence
  Description of Artificial Sequence: Synthetic oligonucleotide
uagccuucccaccacucau

SEQ ID NO: 1779026 - RNA, 19 nt, Artificial Sequence
  Description of Artificial Sequence: Synthetic oligonucleotide
uuacuagcuguaagcuaaa

SEQ ID NO: 1779027 - RNA, 19 nt, Artificial Sequence
  Description of Artificial Sequence: Synthetic oligonucleotide
caguaccaguuuaugagga

SEQ ID NO: 1779028 - RNA, 19 nt, Artificial Sequence
  Description of Artificial Sequence: Synthetic oligonucleotide
aguugcaaucgcugagaga

SEQ ID NO: 1779029 - RNA, 19 nt, Artificial Sequence
  Description of Artificial Sequence: Synthetic oligonucleotide
auccaugaacguuacucuu

SEQ ID NO: 1779030 - RNA, 19 nt, Artificial Sequence
  Description of Artificial Sequence: Synthetic oligonucleotide
ggauuugucccuucucaac

SEQ ID NO: 1779031 - RNA, 19 nt, Artificial Sequence
  Description of Artificial Sequence: Synthetic oligonucleotide
caacacauguccagcguca

SEQ ID NO: 1779032 - RNA, 19 nt, Artificial Sequence
  Description of Artificial Sequence: Synthetic oligonucleotide
caccuaagcuuagagccag

SEQ ID NO: 1779033 - RNA, 19 nt, Artificial Sequence
  Description of Artificial Sequence: Synthetic oligonucleotide
augccauuaucagugcaca

SEQ ID NO: 1779034 - RNA, 19 nt, Artificial Sequence
  Description of Artificial Sequence: Synthetic oligonucleotide
auaacgugcugaagucccg

SEQ ID NO: 1779035 - RNA, 19 nt, Artificial Sequence
  Description of Artificial Sequence: Synthetic oligonucleotide
gggaaugcauugcuucucc

SEQ ID NO: 1779036 - RNA, 19 nt, Artificial Sequence
  Description of Artificial Sequence: Synthetic oligonucleotide
acggagugaacuauucgca

SEQ ID NO: 1779037 - RNA, 19 nt, Artificial Sequence
  Description of Artificial Sequence: Synthetic oligonucleotide
guaguugcaaucgcugaga

SEQ ID NO: 1779038 - RNA, 19 nt, Artificial Sequence
  Description of Artificial Sequence: Synthetic oligonucleotide
ugguacuuuuauggcagcu

SEQ ID NO: 1779039 - RNA, 19 nt, Artificial Sequence
  Description of Artificial Sequence: Synthetic oligonucleotide
  modified_base (8)..(8): a, c, u, g, unknown or other
ugcuggcngaaagaguuuc

SEQ ID NO: 1779040 - RNA, 19 nt, Artificial Sequence
  Description of Artificial Sequence: Synthetic oligonucleotide
cuacuauucguuuaauauu

SEQ ID NO: 1779041 - RNA, 19 nt, Artificial Sequence
  Description of Artificial Sequence: Synthetic oligonucleotide
acgguaguugcaaucgcug

SEQ ID NO: 1779042 - RNA, 19 nt, Artificial Sequence
  Description of Artificial Sequence: Synthetic oligonucleotide
cuggaggaacaaucccacc

SEQ ID NO: 1779043 - RNA, 19 nt, Artificial Sequence
  Description of Artificial Sequence: Synthetic oligonucleotide
gguggcacgcuguuguaug

SEQ ID NO: 1779044 - RNA, 19 nt, Artificial Sequence
  Description of Artificial Sequence: Synthetic oligonucleotide
acuuacuacucuacaaaua

SEQ ID NO: 1779045 - RNA, 19 nt, Artificial Sequence
  Description of Artificial Sequence: Synthetic oligonucleotide
auucuggauguuugauuaa

SEQ ID NO: 1779046 - RNA, 19 nt, Artificial Sequence
  Description of Artificial Sequence: Synthetic oligonucleotide
  modified_base (3)..(3): a, c, u, g, unknown or other
acnccucggacuaacgcca

SEQ ID NO: 1779047 - RNA, 19 nt, Artificial Sequence
  Description of Artificial Sequence: Synthetic oligonucleotide
cuggugcuauguccaaagc

SEQ ID NO: 1779048 - RNA, 19 nt, Artificial Sequence
  Description of Artificial Sequence: Synthetic oligonucleotide
uucuuuucgcaagguggca

SEQ ID NO: 1779049 - RNA, 19 nt, Artificial Sequence
  Description of Artificial Sequence: Synthetic oligonucleotide
gcugcuguaucaucacagc

SEQ ID NO: 1779050 - RNA, 19 nt, Artificial Sequence
  Description of Artificial Sequence: Synthetic oligonucleotide
gaacaaucccaccuguuuu

SEQ ID NO: 1779051 - RNA, 19 nt, Artificial Sequence
  Description of Artificial Sequence: Synthetic oligonucleotide
ugucaccuggugcuauguc

SEQ ID NO: 1779052 - RNA, 19 nt, Artificial Sequence
  Description of Artificial Sequence: Synthetic oligonucleotide
ggagugaacuauucgcaga

SEQ ID NO: 1779053 - RNA, 19 nt, Artificial Sequence
  Description of Artificial Sequence: Synthetic oligonucleotide
caugucaccuggugcuaug

SEQ ID NO: 1779054 - RNA, 19 nt, Artificial Sequence
  Description of Artificial Sequence: Synthetic oligonucleotide
cggauauacaaguuacuug

SEQ ID NO: 1779055 - RNA, 19 nt, Artificial Sequence
  Description of Artificial Sequence: Synthetic oligonucleotide
guaccaguuuaugaggaaa

SEQ ID NO: 1779056 - RNA, 19 nt, Artificial Sequence
  Description of Artificial Sequence: Synthetic oligonucleotide
ggugaucuggggaaaacuc

SEQ ID NO: 1779057 - RNA, 19 nt, Artificial Sequence
  Description of Artificial Sequence: Synthetic oligonucleotide
agcuguaagcuaaaugaua

SEQ ID NO: 1779058 - RNA, 19 nt, Artificial Sequence
  Description of Artificial Sequence: Synthetic oligonucleotide
aacgugcugaagucccgua

SEQ ID NO: 1779059 - RNA, 19 nt, Artificial Sequence
  Description of Artificial Sequence: Synthetic oligonucleotide
caacgugugccuccauaug

SEQ ID NO: 1779060 - RNA, 19 nt, Artificial Sequence
  Description of Artificial Sequence: Synthetic oligonucleotide
agccuaucgauaacgugcu

SEQ ID NO: 1779061 - RNA, 19 nt, Artificial Sequence
  Description of Artificial Sequence: Synthetic oligonucleotide
gacuaacgccaacgugugc

SEQ ID NO: 1779062 - RNA, 19 nt, Artificial Sequence
  Description of Artificial Sequence: Synthetic oligonucleotide
uaacgugcugaagucccgu

SEQ ID NO: 1779063 - RNA, 19 nt, Artificial Sequence
  Description of Artificial Sequence: Synthetic oligonucleotide
ugcgacuucuuuggauaug

SEQ ID NO: 1779064 - RNA, 19 nt, Artificial Sequence
  Description of Artificial Sequence: Synthetic oligonucleotide
ucgcaagguggcacgcugu

SEQ ID NO: 1779065 - RNA, 19 nt, Artificial Sequence
  Description of Artificial Sequence: Synthetic oligonucleotide
guggcacgcuguuguaugc

SEQ ID NO: 1779066 - RNA, 19 nt, Artificial Sequence
  Description of Artificial Sequence: Synthetic oligonucleotide
agggccaacacuagaacuu

SEQ ID NO: 1779067 - RNA, 19 nt, Artificial Sequence
  Description of Artificial Sequence: Synthetic oligonucleotide
gcauacuuacuacucuaca

SEQ ID NO: 1779068 - RNA, 19 nt, Artificial Sequence
  Description of Artificial Sequence: Synthetic oligonucleotide
gagaucacguggagagaug

SEQ ID NO: 1779069 - RNA, 19 nt, Artificial Sequence
  Description of Artificial Sequence: Synthetic oligonucleotide
ccugcuaucuuacuuaaua

SEQ ID NO: 1779070 - RNA, 19 nt, Artificial Sequence
  Description of Artificial Sequence: Synthetic oligonucleotide
caucagcuggagauaacaa

SEQ ID NO: 1779071 - RNA, 19 nt, Artificial Sequence
  Description of Artificial Sequence: Synthetic oligonucleotide
cccguaaaagaaaaucgca

SEQ ID NO: 1779072 - RNA, 19 nt, Artificial Sequence
  Description of Artificial Sequence: Synthetic oligonucleotide
aucagccuaucgauaacgu

SEQ ID NO: 1779073 - RNA, 19 nt, Artificial Sequence
  Description of Artificial Sequence: Synthetic oligonucleotide
guccaaagcuucccaagaa

SEQ ID NO: 1779074 - RNA, 19 nt, Artificial Sequence
  Description of Artificial Sequence: Synthetic oligonucleotide
ggcacgauguguucuuuuc

SEQ ID NO: 1779075 - RNA, 19 nt, Artificial Sequence
  Description of Artificial Sequence: Synthetic oligonucleotide
ccguaaaagaaaaucgcaa

SEQ ID NO: 1779076 - RNA, 19 nt, Artificial Sequence
  Description of Artificial Sequence: Synthetic oligonucleotide
ucggugaucuggggaaaac

SEQ ID NO: 1779077 - RNA, 19 nt, Artificial Sequence
  Description of Artificial Sequence: Synthetic oligonucleotide
gaggaacaaucccaccugu

SEQ ID NO: 1779078 - RNA, 19 nt, Artificial Sequence
  Description of Artificial Sequence: Synthetic oligonucleotide
acgcuguuguaugcugcac

SEQ ID NO: 1779079 - RNA, 19 nt, Artificial Sequence
  Description of Artificial Sequence: Synthetic oligonucleotide
guaucaucacagcugguuu

SEQ ID NO: 1779080 - RNA, 19 nt, Artificial Sequence
  Description of Artificial Sequence: Synthetic oligonucleotide
auucccaguaccaguuuau

SEQ ID NO: 1779081 - RNA, 19 nt, Artificial Sequence
  Description of Artificial Sequence: Synthetic oligonucleotide
gugcuauguccaaagcuuc

SEQ ID NO: 1779082 - RNA, 19 nt, Artificial Sequence
  Description of Artificial Sequence: Synthetic oligonucleotide
uaauuccugcagggacggg

SEQ ID NO: 1779083 - RNA, 19 nt, Artificial Sequence
  Description of Artificial Sequence: Synthetic oligonucleotide
aguccugguuugacgguag

SEQ ID NO: 1779084 - RNA, 19 nt, Artificial Sequence
  Description of Artificial Sequence: Synthetic oligonucleotide
uuuccuuguuuggccaaau

SEQ ID NO: 1779085 - RNA, 19 nt, Artificial Sequence
  Description of Artificial Sequence: Synthetic oligonucleotide
uuucgcaagguggcacgcu

SEQ ID NO: 1779086 - RNA, 19 nt, Artificial Sequence
  Description of Artificial Sequence: Synthetic oligonucleotide
gacgggacggagugaacua

SEQ ID NO: 1779087 - RNA, 19 nt, Artificial Sequence
  Description of Artificial Sequence: Synthetic oligonucleotide
gaauaggaaugaauggcuu

SEQ ID NO: 1779088 - RNA, 19 nt, Artificial Sequence
  Description of Artificial Sequence: Synthetic oligonucleotide
aagucccguaaaagaaaau

SEQ ID NO: 1779089 - RNA, 19 nt, Artificial Sequence
  Description of Artificial Sequence: Synthetic oligonucleotide
cacgcuguuguaugcugca

SEQ ID NO: 1779090 - RNA, 19 nt, Artificial Sequence
  Description of Artificial Sequence: Synthetic oligonucleotide
ccuucuacaucauguaaaa

SEQ ID NO: 1779091 - RNA, 19 nt, Artificial Sequence
  Description of Artificial Sequence: Synthetic oligonucleotide
gaauggcacgauguguucu

SEQ ID NO: 1779092 - RNA, 19 nt, Artificial Sequence
  Description of Artificial Sequence: Synthetic oligonucleotide
gcucuucggauauacaagu

SEQ ID NO: 1779093 - RNA, 19 nt, Artificial Sequence
  Description of Artificial Sequence: Synthetic oligonucleotide
cugcaccgcagcagcaaug

SEQ ID NO: 1779094 - RNA, 19 nt, Artificial Sequence
  Description of Artificial Sequence: Synthetic oligonucleotide
ccaugcaaucauaaugcca

SEQ ID NO: 1779095 - RNA, 19 nt, Artificial Sequence
  Description of Artificial Sequence: Synthetic oligonucleotide
ggacuaacgccaacgugug

SEQ ID NO: 1779096 - RNA, 19 nt, Artificial Sequence
  Description of Artificial Sequence: Synthetic oligonucleotide
ccucggacuaacgccaacg

SEQ ID NO: 1779097 - RNA, 19 nt, Artificial Sequence
  Description of Artificial Sequence: Synthetic oligonucleotide
uucggugaucuggggaaaa

SEQ ID NO: 1779098 - RNA, 19 nt, Artificial Sequence
  Description of Artificial Sequence: Synthetic oligonucleotide
uacuagcuguaagcuaaau

SEQ ID NO: 1779099 - RNA, 19 nt, Artificial Sequence
  Description of Artificial Sequence: Synthetic oligonucleotide
cugagagaucacguggaga

SEQ ID NO: 1779100 - RNA, 19 nt, Artificial Sequence
  Description of Artificial Sequence: Synthetic oligonucleotide
agggacgggacggagugaa

SEQ ID NO: 1779101 - RNA, 19 nt, Artificial Sequence
  Description of Artificial Sequence: Synthetic oligonucleotide
cgagcaugucaccuggugc

SEQ ID NO: 1779102 - RNA, 19 nt, Artificial Sequence
  Description of Artificial Sequence: Synthetic oligonucleotide
augcaaucauaaugccauu

SEQ ID NO: 1779103 - RNA, 19 nt, Artificial Sequence
  Description of Artificial Sequence: Synthetic oligonucleotide
  modified_base (3)..(3): a, c, u, g, unknown or other
gcngaaagaguuucuucua

SEQ ID NO: 1779104 - RNA, 19 nt, Artificial Sequence
  Description of Artificial Sequence: Synthetic oligonucleotide
uggcacgcuguuguaugcu

SEQ ID NO: 1779105 - RNA, 19 nt, Artificial Sequence
  Description of Artificial Sequence: Synthetic oligonucleotide
ccuaucgauaacgugcuga

SEQ ID NO: 1779106 - RNA, 19 nt, Artificial Sequence
  Description of Artificial Sequence: Synthetic oligonucleotide
gagagaucacguggagaga

SEQ ID NO: 1779107 - RNA, 19 nt, Artificial Sequence
  Description of Artificial Sequence: Synthetic oligonucleotide
uccugguuugacgguaguu

SEQ ID NO: 1779108 - RNA, 19 nt, Artificial Sequence
  Description of Artificial Sequence: Synthetic oligonucleotide
ccauaugaugaauaggaau

SEQ ID NO: 1779109 - RNA, 19 nt, Artificial Sequence
  Description of Artificial Sequence: Synthetic oligonucleotide
acguuacucuucggugauc

SEQ ID NO: 1779110 - RNA, 19 nt, Artificial Sequence
  Description of Artificial Sequence: Synthetic oligonucleotide
gguuugacgguaguugcaa

SEQ ID NO: 1779111 - RNA, 19 nt, Artificial Sequence
  Description of Artificial Sequence: Synthetic oligonucleotide
gccuucuacaucauguaaa

SEQ ID NO: 1779112 - RNA, 19 nt, Artificial Sequence
  Description of Artificial Sequence: Synthetic oligonucleotide
acguggagagaugcugcug

SEQ ID NO: 1779113 - RNA, 19 nt, Artificial Sequence
  Description of Artificial Sequence: Synthetic oligonucleotide
agagcucuucggauauaca

SEQ ID NO: 1779114 - RNA, 19 nt, Artificial Sequence
  Description of Artificial Sequence: Synthetic oligonucleotide
ggaacaaucccaccuguuu

SEQ ID NO: 1779115 - RNA, 19 nt, Artificial Sequence
  Description of Artificial Sequence: Synthetic oligonucleotide
cagcugguuucaauuccca

SEQ ID NO: 1779116 - RNA, 19 nt, Artificial Sequence
  Description of Artificial Sequence: Synthetic oligonucleotide
gggaggauugauaguaaaa

SEQ ID NO: 1779117 - RNA, 19 nt, Artificial Sequence
  Description of Artificial Sequence: Synthetic oligonucleotide
gucuacuccaagaggacau

SEQ ID NO: 1779118 - RNA, 19 nt, Artificial Sequence
  Description of Artificial Sequence: Synthetic oligonucleotide
agugaacuauucgcagauu

SEQ ID NO: 1779119 - RNA, 19 nt, Artificial Sequence
  Description of Artificial Sequence: Synthetic oligonucleotide
cgcuguuguaugcugcacc

SEQ ID NO: 1779120 - RNA, 19 nt, Artificial Sequence
  Description of Artificial Sequence: Synthetic oligonucleotide
acgugugccuccauaugau

SEQ ID NO: 1779121 - RNA, 19 nt, Artificial Sequence
  Description of Artificial Sequence: Synthetic oligonucleotide
caccuccagauacaacuaa

SEQ ID NO: 1779122 - RNA, 19 nt, Artificial Sequence
  Description of Artificial Sequence: Synthetic oligonucleotide
ggaaucuauuuccuuguuu

SEQ ID NO: 1779123 - RNA, 19 nt, Artificial Sequence
  Description of Artificial Sequence: Synthetic oligonucleotide
uaacgccaacgugugccuc

SEQ ID NO: 1779124 - RNA, 19 nt, Artificial Sequence
  Description of Artificial Sequence: Synthetic oligonucleotide
acgggacggagugaacuau

SEQ ID NO: 1779125 - RNA, 19 nt, Artificial Sequence
  Description of Artificial Sequence: Synthetic oligonucleotide
cggacuaacgccaacgugu

SEQ ID NO: 1779126 - RNA, 19 nt, Artificial Sequence
  Description of Artificial Sequence: Synthetic oligonucleotide
cuaacgccaacgugugccu

SEQ ID NO: 1779127 - RNA, 19 nt, Artificial Sequence
  Description of Artificial Sequence: Synthetic oligonucleotide
ccaaauguucuauagccuu

SEQ ID NO: 1779128 - RNA, 19 nt, Artificial Sequence
  Description of Artificial Sequence: Synthetic oligonucleotide
gcagaacagaauggcacga

SEQ ID NO: 1779129 - RNA, 19 nt, Artificial Sequence
  Description of Artificial Sequence: Synthetic oligonucleotide
aggaacaaucccaccuguu

SEQ ID NO: 1779130 - RNA, 19 nt, Artificial Sequence
  Description of Artificial Sequence: Synthetic oligonucleotide
agguggcacgcuguuguau

SEQ ID NO: 1779131 - RNA, 19 nt, Artificial Sequence
  Description of Artificial Sequence: Synthetic oligonucleotide
cucggacuaacgccaacgu

SEQ ID NO: 1779132 - RNA, 19 nt, Artificial Sequence
  Description of Artificial Sequence: Synthetic oligonucleotide
gcacgcuguuguaugcugc

SEQ ID NO: 1779133 - RNA, 19 nt, Artificial Sequence
  Description of Artificial Sequence: Synthetic oligonucleotide
gaucacguggagagaugcu

SEQ ID NO: 1779134 - RNA, 19 nt, Artificial Sequence
  Description of Artificial Sequence: Synthetic oligonucleotide
gggacggagugaacuauuc

SEQ ID NO: 1779135 - RNA, 19 nt, Artificial Sequence
  Description of Artificial Sequence: Synthetic oligonucleotide
ggucugggaaugcauugcu

SEQ ID NO: 1779136 - RNA, 19 nt, Artificial Sequence
  Description of Artificial Sequence: Synthetic oligonucleotide
cuauagccuucccaccacu

SEQ ID NO: 1779137 - RNA, 19 nt, Artificial Sequence
  Description of Artificial Sequence: Synthetic oligonucleotide
guuugacgguaguugcaau

SEQ ID NO: 1779138 - RNA, 19 nt, Artificial Sequence
  Description of Artificial Sequence: Synthetic oligonucleotide
ccaacacuagaacuucuua

SEQ ID NO: 1779139 - RNA, 19 nt, Artificial Sequence
  Description of Artificial Sequence: Synthetic oligonucleotide
agcaugucaccuggugcua

SEQ ID NO: 1779140 - RNA, 19 nt, Artificial Sequence
  Description of Artificial Sequence: Synthetic oligonucleotide
agccuacaccuaagcuuag

SEQ ID NO: 1779141 - RNA, 19 nt, Artificial Sequence
  Description of Artificial Sequence: Synthetic oligonucleotide
gcgacuucuuuggauaugu

SEQ ID NO: 1779142 - RNA, 19 nt, Artificial Sequence
  Description of Artificial Sequence: Synthetic oligonucleotide
cucuucggauauacaaguu

SEQ ID NO: 1779143 - RNA, 19 nt, Artificial Sequence
  Description of Artificial Sequence: Synthetic oligonucleotide
gccaaauguucuauagccu

SEQ ID NO: 1779144 - RNA, 19 nt, Artificial Sequence
  Description of Artificial Sequence: Synthetic oligonucleotide
gguacuuuuauggcagcuu

SEQ ID NO: 1779145 - RNA, 19 nt, Artificial Sequence
  Description of Artificial Sequence: Synthetic oligonucleotide
aggacacaacaaagugcau

SEQ ID NO: 1779146 - RNA, 19 nt, Artificial Sequence
  Description of Artificial Sequence: Synthetic oligonucleotide
ggacgggacggagugaacu

SEQ ID NO: 1779147 - RNA, 19 nt, Artificial Sequence
  Description of Artificial Sequence: Synthetic oligonucleotide
accuaagcuuagagccagu

SEQ ID NO: 1779148 - RNA, 19 nt, Artificial Sequence
  Description of Artificial Sequence: Synthetic oligonucleotide
caguccugguuugacggua

SEQ ID NO: 1779149 - RNA, 19 nt, Artificial Sequence
  Description of Artificial Sequence: Synthetic oligonucleotide
cugcgacuucuuuggauau

SEQ ID NO: 1779150 - RNA, 19 nt, Artificial Sequence
  Description of Artificial Sequence: Synthetic oligonucleotide
  modified_base (6)..(6): a, c, u, g, unknown or other
cuggcngaaagaguuucuu

SEQ ID NO: 1779151 - RNA, 19 nt, Artificial Sequence
  Description of Artificial Sequence: Synthetic oligonucleotide
gccuaucgauaacgugcug

SEQ ID NO: 1779152 - RNA, 19 nt, Artificial Sequence
  Description of Artificial Sequence: Synthetic oligonucleotide
ccaacgugugccuccauau

SEQ ID NO: 1779153 - RNA, 19 nt, Artificial Sequence
  Description of Artificial Sequence: Synthetic oligonucleotide
  modified_base (2)..(2): a, c, u, g, unknown or other
cnccucggacuaacgccaa

SEQ ID NO: 1779154 - RNA, 19 nt, Artificial Sequence
  Description of Artificial Sequence: Synthetic oligonucleotide
  modified_base (8)..(8): a, c, u, g, unknown or other
cugaaacnccucggacuaa

SEQ ID NO: 1779155 - RNA, 19 nt, Artificial Sequence
  Description of Artificial Sequence: Synthetic oligonucleotide
cgguaguugcaaucgcuga

SEQ ID NO: 1779156 - RNA, 19 nt, Artificial Sequence
  Description of Artificial Sequence: Synthetic oligonucleotide
  modified_base (7)..(7): a, c, u, g, unknown or other
gcuggcngaaagaguuucu

SEQ ID NO: 1779157 - RNA, 19 nt, Artificial Sequence
  Description of Artificial Sequence: Synthetic oligonucleotide
ccaagaggacauuuugguu

SEQ ID NO: 1779158 - RNA, 19 nt, Artificial Sequence
  Description of Artificial Sequence: Synthetic oligonucleotide
gccuacaccuaagcuuaga

SEQ ID NO: 1779159 - RNA, 19 nt, Artificial Sequence
  Description of Artificial Sequence: Synthetic oligonucleotide
guccagcgucauccaccac

SEQ ID NO: 1779160 - RNA, 19 nt, Artificial Sequence
  Description of Artificial Sequence: Synthetic oligonucleotide
gguucauaucggaugccuu

SEQ ID NO: 1779161 - RNA, 19 nt, Artificial Sequence
  Description of Artificial Sequence: Synthetic oligonucleotide
cguuacucuucggugaucu

SEQ ID NO: 1779162 - RNA, 19 nt, Artificial Sequence
  Description of Artificial Sequence: Synthetic oligonucleotide
  modified_base (9)..(9): a, c, u, g, unknown or other
cugcuggcngaaagaguuu

SEQ ID NO: 1779163 - RNA, 19 nt, Artificial Sequence
  Description of Artificial Sequence: Synthetic oligonucleotide
gucgagcaugucaccuggu

SEQ ID NO: 1779164 - RNA, 19 nt, Artificial Sequence
  Description of Artificial Sequence: Synthetic oligonucleotide
cagggacgggacggaguga

SEQ ID NO: 1779165 - RNA, 19 nt, Artificial Sequence
  Description of Artificial Sequence: Synthetic oligonucleotide
gggacgggacggagugaac

SEQ ID NO: 1779166 - RNA, 19 nt, Artificial Sequence
  Description of Artificial Sequence: Synthetic oligonucleotide
gcaugucaccuggugcuau

SEQ ID NO: 1779167 - RNA, 19 nt, Artificial Sequence
  Description of Artificial Sequence: Synthetic oligonucleotide
cgggacggagugaacuauu

SEQ ID NO: 1779168 - RNA, 19 nt, Artificial Sequence
  Description of Artificial Sequence: Synthetic oligonucleotide
cgcaagguggcacgcuguu

SEQ ID NO: 1779169 - RNA, 19 nt, Artificial Sequence
  Description of Artificial Sequence: Synthetic oligonucleotide
cgccaacgugugccuccau

SEQ ID NO: 1779170 - RNA, 19 nt, Artificial Sequence
  Description of Artificial Sequence: Synthetic oligonucleotide
  modified_base (1)..(1): a, c, u, g, unknown or other
nccucggacuaacgccaac

SEQ ID NO: 1779171 - RNA, 19 nt, Artificial Sequence
  Description of Artificial Sequence: Synthetic oligonucleotide
aauucaaugucccagaaag

SEQ ID NO: 1779172 - RNA, 19 nt, Artificial Sequence
  Description of Artificial Sequence: Synthetic oligonucleotide
acacuuacagcucugagcc

SEQ ID NO: 1779173 - RNA, 19 nt, Artificial Sequence
  Description of Artificial Sequence: Synthetic oligonucleotide
acugucuccacuaagaggc

SEQ ID NO: 1779174 - RNA, 19 nt, Artificial Sequence
  Description of Artificial Sequence: Synthetic oligonucleotide
auagguaggauccaggcuc

SEQ ID NO: 1779175 - RNA, 19 nt, Artificial Sequence
  Description of Artificial Sequence: Synthetic oligonucleotide
auagaaguacaacugauca

SEQ ID NO: 1779176 - RNA, 19 nt, Artificial Sequence
  Description of Artificial Sequence: Synthetic oligonucleotide
aauuggggucccuuggagc

SEQ ID NO: 1779177 - RNA, 19 nt, Artificial Sequence
  Description of Artificial Sequence: Synthetic oligonucleotide
ucuagagucagcuuugcug

SEQ ID NO: 1779178 - RNA, 19 nt, Artificial Sequence
  Description of Artificial Sequence: Synthetic oligonucleotide
uaaaguauggccagugggc

SEQ ID NO: 1779179 - RNA, 19 nt, Artificial Sequence
  Description of Artificial Sequence: Synthetic oligonucleotide
uaagguaggggucagcuug

SEQ ID NO: 1779180 - RNA, 19 nt, Artificial Sequence
  Description of Artificial Sequence: Synthetic oligonucleotide
cuagagucagcuuugcugg

SEQ ID NO: 1779181 - RNA, 19 nt, Artificial Sequence
  Description of Artificial Sequence: Synthetic oligonucleotide
uugccuauagguaggaucc

SEQ ID NO: 1779182 - RNA, 19 nt, Artificial Sequence
  Description of Artificial Sequence: Synthetic oligonucleotide
agcuuggucagguugaauc

SEQ ID NO: 1779183 - RNA, 19 nt, Artificial Sequence
  Description of Artificial Sequence: Synthetic oligonucleotide
uuccauccagaauauaggg

SEQ ID NO: 1779184 - RNA, 19 nt, Artificial Sequence
  Description of Artificial Sequence: Synthetic oligonucleotide
ugagccgaagcccugaagc

SEQ ID NO: 1779185 - RNA, 19 nt, Artificial Sequence
  Description of Artificial Sequence: Synthetic oligonucleotide
aaagcuacguaguagggua

SEQ ID NO: 1779186 - RNA, 19 nt, Artificial Sequence
  Description of Artificial Sequence: Synthetic oligonucleotide
uuaauggaagccuuuauuu

SEQ ID NO: 1779187 - RNA, 19 nt, Artificial Sequence
  Description of Artificial Sequence: Synthetic oligonucleotide
aagaccaaacccugcacag

SEQ ID NO: 1779188 - RNA, 19 nt, Artificial Sequence
  Description of Artificial Sequence: Synthetic oligonucleotide
ucuaacacccgugauaagc

SEQ ID NO: 1779189 - RNA, 19 nt, Artificial Sequence
  Description of Artificial Sequence: Synthetic oligonucleotide
ucuaagcccuccaugaggc

SEQ ID NO: 1779190 - RNA, 19 nt, Artificial Sequence
  Description of Artificial Sequence: Synthetic oligonucleotide
cauacacaggcuaagguug

SEQ ID NO: 1779191 - RNA, 19 nt, Artificial Sequence
  Description of Artificial Sequence: Synthetic oligonucleotide
aacauacacaggcuaaggu

SEQ ID NO: 1779192 - RNA, 19 nt, Artificial Sequence
  Description of Artificial Sequence: Synthetic oligonucleotide
uacguaguaggguauuggg

SEQ ID NO: 1779193 - RNA, 19 nt, Artificial Sequence
  Description of Artificial Sequence: Synthetic oligonucleotide
ugggcauagaaguacaacu

SEQ ID NO: 1779194 - RNA, 19 nt, Artificial Sequence
  Description of Artificial Sequence: Synthetic oligonucleotide
cacagguucgcccaggugg

SEQ ID NO: 1779195 - RNA, 19 nt, Artificial Sequence
  Description of Artificial Sequence: Synthetic oligonucleotide
cugaucaugaguagugagg

SEQ ID NO: 1779196 - RNA, 19 nt, Artificial Sequence
  Description of Artificial Sequence: Synthetic oligonucleotide
aaagacagugccuagccuu

SEQ ID NO: 1779197 - RNA, 19 nt, Artificial Sequence
  Description of Artificial Sequence: Synthetic oligonucleotide
uuuaccuuaauggaagccu

SEQ ID NO: 1779198 - RNA, 19 nt, Artificial Sequence
  Description of Artificial Sequence: Synthetic oligonucleotide
ugauaagcgggcauggcca

SEQ ID NO: 1779199 - RNA, 19 nt, Artificial Sequence
  Description of Artificial Sequence: Synthetic oligonucleotide
cuaacacccgugauaagcg

SEQ ID NO: 1779200 - RNA, 19 nt, Artificial Sequence
  Description of Artificial Sequence: Synthetic oligonucleotide
agcucagcuauccugggac

SEQ ID NO: 1779201 - RNA, 19 nt, Artificial Sequence
  Description of Artificial Sequence: Synthetic oligonucleotide
ugaggacuggcccagggag

SEQ ID NO: 1779202 - RNA, 19 nt, Artificial Sequence
  Description of Artificial Sequence: Synthetic oligonucleotide
ugaguagugaggugcagcc

SEQ ID NO: 1779203 - RNA, 19 nt, Artificial Sequence
  Description of Artificial Sequence: Synthetic oligonucleotide
ugugucgugucucuagcag

SEQ ID NO: 1779204 - RNA, 19 nt, Artificial Sequence
  Description of Artificial Sequence: Synthetic oligonucleotide
ugggcaaaagccucuaagc

SEQ ID NO: 1779205 - RNA, 19 nt, Artificial Sequence
  Description of Artificial Sequence: Synthetic oligonucleotide
cuauagguaggauccaggc

SEQ ID NO: 1779206 - RNA, 19 nt, Artificial Sequence
  Description of Artificial Sequence: Synthetic oligonucleotide
agggcaucccuucagaucu

SEQ ID NO: 1779207 - RNA, 19 nt, Artificial Sequence
  Description of Artificial Sequence: Synthetic oligonucleotide
uagaaaagcuacguaguag

SEQ ID NO: 1779208 - RNA, 19 nt, Artificial Sequence
  Description of Artificial Sequence: Synthetic oligonucleotide
cacacuuacagcucugagc

SEQ ID NO: 1779209 - RNA, 19 nt, Artificial Sequence
  Description of Artificial Sequence: Synthetic oligonucleotide
uugcugaagaccaaacccu

SEQ ID NO: 1779210 - RNA, 19 nt, Artificial Sequence
  Description of Artificial Sequence: Synthetic oligonucleotide
aauauagggcaucccuuca

SEQ ID NO: 1779211 - RNA, 19 nt, Artificial Sequence
  Description of Artificial Sequence: Synthetic oligonucleotide
uccagaguaaacucagcug

SEQ ID NO: 1779212 - RNA, 19 nt, Artificial Sequence
  Description of Artificial Sequence: Synthetic oligonucleotide
guacccaggaaacauacac

SEQ ID NO: 1779213 - RNA, 19 nt, Artificial Sequence
  Description of Artificial Sequence: Synthetic oligonucleotide
ugaucaugaguagugaggu

SEQ ID NO: 1779214 - RNA, 19 nt, Artificial Sequence
  Description of Artificial Sequence: Synthetic oligonucleotide
gaauauagggcaucccuuc

SEQ ID NO: 1779215 - RNA, 19 nt, Artificial Sequence
  Description of Artificial Sequence: Synthetic oligonucleotide
uuauuucagccacacuuac

SEQ ID NO: 1779216 - RNA, 19 nt, Artificial Sequence
  Description of Artificial Sequence: Synthetic oligonucleotide
uaauggaagccuuuauuuc

SEQ ID NO: 1779217 - RNA, 19 nt, Artificial Sequence
  Description of Artificial Sequence: Synthetic oligonucleotide
aaaagcuacguaguagggu

SEQ ID NO: 1779218 - RNA, 19 nt, Artificial Sequence
  Description of Artificial Sequence: Synthetic oligonucleotide
uauagguaggauccaggcu

SEQ ID NO: 1779219 - RNA, 19 nt, Artificial Sequence
  Description of Artificial Sequence: Synthetic oligonucleotide
uaggguauugggcagccga

SEQ ID NO: 1779220 - RNA, 19 nt, Artificial Sequence
  Description of Artificial Sequence: Synthetic oligonucleotide
gaguaaacucagcugggcc

SEQ ID NO: 1779221 - RNA, 19 nt, Artificial Sequence
  Description of Artificial Sequence: Synthetic oligonucleotide
gaagccuuuauuucagcca

SEQ ID NO: 1779222 - RNA, 19 nt, Artificial Sequence
  Description of Artificial Sequence: Synthetic oligonucleotide
agaguaaacucagcugggc

SEQ ID NO: 1779223 - RNA, 19 nt, Artificial Sequence
  Description of Artificial Sequence: Synthetic oligonucleotide
uuuuaccuuaauggaagcc

SEQ ID NO: 1779224 - RNA, 19 nt, Artificial Sequence
  Description of Artificial Sequence: Synthetic oligonucleotide
aaaguauggccagugggcu

SEQ ID NO: 1779225 - RNA, 19 nt, Artificial Sequence
  Description of Artificial Sequence: Synthetic oligonucleotide
gaaaagcuacguaguaggg

SEQ ID NO: 1779226 - RNA, 19 nt, Artificial Sequence
  Description of Artificial Sequence: Synthetic oligonucleotide
augaguagugaggugcagc

SEQ ID NO: 1779227 - RNA, 19 nt, Artificial Sequence
  Description of Artificial Sequence: Synthetic oligonucleotide
ucugggcaauucaaugucc

SEQ ID NO: 1779228 - RNA, 19 nt, Artificial Sequence
  Description of Artificial Sequence: Synthetic oligonucleotide
aggaucuagagucagcuuu

SEQ ID NO: 1779229 - RNA, 19 nt, Artificial Sequence
  Description of Artificial Sequence: Synthetic oligonucleotide
uauagggcaucccuucaga

SEQ ID NO: 1779230 - RNA, 19 nt, Artificial Sequence
  Description of Artificial Sequence: Synthetic oligonucleotide
uacaacugaucaugaguag

SEQ ID NO: 1779231 - RNA, 19 nt, Artificial Sequence
  Description of Artificial Sequence: Synthetic oligonucleotide
acauacacaggcuaagguu

SEQ ID NO: 1779232 - RNA, 19 nt, Artificial Sequence
  Description of Artificial Sequence: Synthetic oligonucleotide
gaagaccaaacccugcaca

SEQ ID NO: 1779233 - RNA, 19 nt, Artificial Sequence
  Description of Artificial Sequence: Synthetic oligonucleotide
ucugugucgugucucuagc

SEQ ID NO: 1779234 - RNA, 19 nt, Artificial Sequence
  Description of Artificial Sequence: Synthetic oligonucleotide
gugauaagcgggcauggcc

SEQ ID NO: 1779235 - RNA, 19 nt, Artificial Sequence
  Description of Artificial Sequence: Synthetic oligonucleotide
gcaugcaggaucuagaguc

SEQ ID NO: 1779236 - RNA, 19 nt, Artificial Sequence
  Description of Artificial Sequence: Synthetic oligonucleotide
auauagggcaucccuucag

SEQ ID NO: 1779237 - RNA, 19 nt, Artificial Sequence
  Description of Artificial Sequence: Synthetic oligonucleotide
gucucuagcaggcuuugag

SEQ ID NO: 1779238 - RNA, 19 nt, Artificial Sequence
  Description of Artificial Sequence: Synthetic oligonucleotide
agcgccuugggacagcuug

SEQ ID NO: 1779239 - RNA, 19 nt, Artificial Sequence
  Description of Artificial Sequence: Synthetic oligonucleotide
ugguacccaggaaacauac

SEQ ID NO: 1779240 - RNA, 19 nt, Artificial Sequence
  Description of Artificial Sequence: Synthetic oligonucleotide
uguggggcuggucuaacac

SEQ ID NO: 1779241 - RNA, 19 nt, Artificial Sequence
  Description of Artificial Sequence: Synthetic oligonucleotide
uacccaggaaacauacaca

SEQ ID NO: 1779242 - RNA, 19 nt, Artificial Sequence
  Description of Artificial Sequence: Synthetic oligonucleotide
cacugucuccacuaagagg

SEQ ID NO: 1779243 - RNA, 19 nt, Artificial Sequence
  Description of Artificial Sequence: Synthetic oligonucleotide
aacacccgugauaagcggg

SEQ ID NO: 1779244 - RNA, 19 nt, Artificial Sequence
  Description of Artificial Sequence: Synthetic oligonucleotide
accacaauaggggacgcuc

SEQ ID NO: 1779245 - RNA, 19 nt, Artificial Sequence
  Description of Artificial Sequence: Synthetic oligonucleotide
ucaugaguagugaggugca

SEQ ID NO: 1779246 - RNA, 19 nt, Artificial Sequence
  Description of Artificial Sequence: Synthetic oligonucleotide
uaacacccgugauaagcgg

SEQ ID NO: 1779247 - RNA, 19 nt, Artificial Sequence
  Description of Artificial Sequence: Synthetic oligonucleotide
acguaguaggguauugggc

SEQ ID NO: 1779248 - RNA, 19 nt, Artificial Sequence
  Description of Artificial Sequence: Synthetic oligonucleotide
ugcgugucuuagaaaagcu

SEQ ID NO: 1779249 - RNA, 19 nt, Artificial Sequence
  Description of Artificial Sequence: Synthetic oligonucleotide
ugaagccaccuccuggccc

SEQ ID NO: 1779250 - RNA, 19 nt, Artificial Sequence
  Description of Artificial Sequence: Synthetic oligonucleotide
uccagaauauagggcaucc

SEQ ID NO: 1779251 - RNA, 19 nt, Artificial Sequence
  Description of Artificial Sequence: Synthetic oligonucleotide
aaagccucuaagcccucca

SEQ ID NO: 1779252 - RNA, 19 nt, Artificial Sequence
  Description of Artificial Sequence: Synthetic oligonucleotide
cagaguaaacucagcuggg

SEQ ID NO: 1779253 - RNA, 19 nt, Artificial Sequence
  Description of Artificial Sequence: Synthetic oligonucleotide
ugaagaccaaacccugcac

SEQ ID NO: 1779254 - RNA, 19 nt, Artificial Sequence
  Description of Artificial Sequence: Synthetic oligonucleotide
ggacagaucccuugcaggg

SEQ ID NO: 1779255 - RNA, 19 nt, Artificial Sequence
  Description of Artificial Sequence: Synthetic oligonucleotide
aagacagugccuagccuuc

SEQ ID NO: 1779256 - RNA, 19 nt, Artificial Sequence
  Description of Artificial Sequence: Synthetic oligonucleotide
uggucuaacacccgugaua

SEQ ID NO: 1779257 - RNA, 19 nt, Artificial Sequence
  Description of Artificial Sequence: Synthetic oligonucleotide
uagaaguacaacugaucau

SEQ ID NO: 1779258 - RNA, 19 nt, Artificial Sequence
  Description of Artificial Sequence: Synthetic oligonucleotide
caauaggggacgcuccggg

SEQ ID NO: 1779259 - RNA, 19 nt, Artificial Sequence
  Description of Artificial Sequence: Synthetic oligonucleotide
gugucuuagaaaagcuacg

SEQ ID NO: 1779260 - RNA, 19 nt, Artificial Sequence
  Description of Artificial Sequence: Synthetic oligonucleotide
cacuaagaggcuguggggc

SEQ ID NO: 1779261 - RNA, 19 nt, Artificial Sequence
  Description of Artificial Sequence: Synthetic oligonucleotide
gugucgugucucuagcagg

SEQ ID NO: 1779262 - RNA, 19 nt, Artificial Sequence
  Description of Artificial Sequence: Synthetic oligonucleotide
guaguaggguauugggcag

SEQ ID NO: 1779263 - RNA, 19 nt, Artificial Sequence
  Description of Artificial Sequence: Synthetic oligonucleotide
aauaggggacgcuccgggu

SEQ ID NO: 1779264 - RNA, 19 nt, Artificial Sequence
  Description of Artificial Sequence: Synthetic oligonucleotide
cacaauaggggacgcuccg

SEQ ID NO: 1779265 - RNA, 19 nt, Artificial Sequence
  Description of Artificial Sequence: Synthetic oligonucleotide
auacacaggcuaagguugc

SEQ ID NO: 1779266 - RNA, 19 nt, Artificial Sequence
  Description of Artificial Sequence: Synthetic oligonucleotide
cacaggcuaagguugcccc

SEQ ID NO: 1779267 - RNA, 19 nt, Artificial Sequence
  Description of Artificial Sequence: Synthetic oligonucleotide
cuacguaguaggguauugg

SEQ ID NO: 1779268 - RNA, 19 nt, Artificial Sequence
  Description of Artificial Sequence: Synthetic oligonucleotide
auaggggacgcuccgggug

SEQ ID NO: 1779269 - RNA, 19 nt, Artificial Sequence
  Description of Artificial Sequence: Synthetic oligonucleotide
auugguacccaggaaacau

SEQ ID NO: 1779270 - RNA, 19 nt, Artificial Sequence
  Description of Artificial Sequence: Synthetic oligonucleotide
aacccugcacagguucgcc

SEQ ID NO: 1779271 - RNA, 19 nt, Artificial Sequence
  Description of Artificial Sequence: Synthetic oligonucleotide
agugccuagccuucagaug

SEQ ID NO: 1779272 - RNA, 19 nt, Artificial Sequence
  Description of Artificial Sequence: Synthetic oligonucleotide
ggaagccuuuauuucagcc

SEQ ID NO: 1779273 - RNA, 19 nt, Artificial Sequence
  Description of Artificial Sequence: Synthetic oligonucleotide
gguauugggcagccgacgg

SEQ ID NO: 1779274 - RNA, 19 nt, Artificial Sequence
  Description of Artificial Sequence: Synthetic oligonucleotide
uggcccauugguacccagg

SEQ ID NO: 1779275 - RNA, 19 nt, Artificial Sequence
  Description of Artificial Sequence: Synthetic oligonucleotide
acuuacagcucugagccga

SEQ ID NO: 1779276 - RNA, 19 nt, Artificial Sequence
  Description of Artificial Sequence: Synthetic oligonucleotide
acacaggcuaagguugccc

SEQ ID NO: 1779277 - RNA, 19 nt, Artificial Sequence
  Description of Artificial Sequence: Synthetic oligonucleotide
aagccacggccccucagag

SEQ ID NO: 1779278 - RNA, 19 nt, Artificial Sequence
  Description of Artificial Sequence: Synthetic oligonucleotide
gaucaccuccauccggugc

SEQ ID NO: 1779279 - RNA, 19 nt, Artificial Sequence
  Description of Artificial Sequence: Synthetic oligonucleotide
agcuaggacagaucccuug

SEQ ID NO: 1779280 - RNA, 19 nt, Artificial Sequence
  Description of Artificial Sequence: Synthetic oligonucleotide
ucggcagugcacaggcucc

SEQ ID NO: 1779281 - RNA, 19 nt, Artificial Sequence
  Description of Artificial Sequence: Synthetic oligonucleotide
guacaacugaucaugagua

SEQ ID NO: 1779282 - RNA, 19 nt, Artificial Sequence
  Description of Artificial Sequence: Synthetic oligonucleotide
gagccgaagcccugaagcc

SEQ ID NO: 1779283 - RNA, 19 nt, Artificial Sequence
  Description of Artificial Sequence: Synthetic oligonucleotide
ucucuggguggcaugugga

SEQ ID NO: 1779284 - RNA, 19 nt, Artificial Sequence
  Description of Artificial Sequence: Synthetic oligonucleotide
ugcaggaucuagagucagc

SEQ ID NO: 1779285 - RNA, 19 nt, Artificial Sequence
  Description of Artificial Sequence: Synthetic oligonucleotide
uagguaggauccaggcuca

SEQ ID NO: 1779286 - RNA, 19 nt, Artificial Sequence
  Description of Artificial Sequence: Synthetic oligonucleotide
cucugugucgugucucuag

SEQ ID NO: 1779287 - RNA, 19 nt, Artificial Sequence
  Description of Artificial Sequence: Synthetic oligonucleotide
cagaugggcauagaaguac

SEQ ID NO: 1779288 - RNA, 19 nt, Artificial Sequence
  Description of Artificial Sequence: Synthetic oligonucleotide
gcuaaaguauggccagugg

SEQ ID NO: 1779289 - RNA, 19 nt, Artificial Sequence
  Description of Artificial Sequence: Synthetic oligonucleotide
acacccgugauaagcgggc

SEQ ID NO: 1779290 - RNA, 19 nt, Artificial Sequence
  Description of Artificial Sequence: Synthetic oligonucleotide
acccugcacagguucgccc

SEQ ID NO: 1779291 - RNA, 19 nt, Artificial Sequence
  Description of Artificial Sequence: Synthetic oligonucleotide
caauuggggucccuuggag

SEQ ID NO: 1779292 - RNA, 19 nt, Artificial Sequence
  Description of Artificial Sequence: Synthetic oligonucleotide
ccauccagaauauagggca

SEQ ID NO: 1779293 - RNA, 19 nt, Artificial Sequence
  Description of Artificial Sequence: Synthetic oligonucleotide
gaaucucagggucaauucu

SEQ ID NO: 1779294 - RNA, 19 nt, Artificial Sequence
  Description of Artificial Sequence: Synthetic oligonucleotide
uaagcgggcauggccaacc

SEQ ID NO: 1779295 - RNA, 19 nt, Artificial Sequence
  Description of Artificial Sequence: Synthetic oligonucleotide
cgugucuuagaaaagcuac

SEQ ID NO: 1779296 - RNA, 19 nt, Artificial Sequence
  Description of Artificial Sequence: Synthetic oligonucleotide
aucucagggucaauucugg

SEQ ID NO: 1779297 - RNA, 19 nt, Artificial Sequence
  Description of Artificial Sequence: Synthetic oligonucleotide
gcauguggaauccaggguc

SEQ ID NO: 1779298 - RNA, 19 nt, Artificial Sequence
  Description of Artificial Sequence: Synthetic oligonucleotide
cuggguggcauguggaauc

SEQ ID NO: 1779299 - RNA, 19 nt, Artificial Sequence
  Description of Artificial Sequence: Synthetic oligonucleotide
cagaaagacagugccuagc

SEQ ID NO: 1779300 - RNA, 19 nt, Artificial Sequence
  Description of Artificial Sequence: Synthetic oligonucleotide
auggaagccuuuauuucag

SEQ ID NO: 1779301 - RNA, 19 nt, Artificial Sequence
  Description of Artificial Sequence: Synthetic oligonucleotide
guuagcuuggucagguuga

SEQ ID NO: 1779302 - RNA, 19 nt, Artificial Sequence
  Description of Artificial Sequence: Synthetic oligonucleotide
gugccuagccuucagaugu

SEQ ID NO: 1779303 - RNA, 19 nt, Artificial Sequence
  Description of Artificial Sequence: Synthetic oligonucleotide
auccagaauauagggcauc

SEQ ID NO: 1779304 - RNA, 19 nt, Artificial Sequence
  Description of Artificial Sequence: Synthetic oligonucleotide
gaagccccgggcuugggca

SEQ ID NO: 1779305 - RNA, 19 nt, Artificial Sequence
  Description of Artificial Sequence: Synthetic oligonucleotide
aguauggccagugggcuga

SEQ ID NO: 1779306 - RNA, 19 nt, Artificial Sequence
  Description of Artificial Sequence: Synthetic oligonucleotide
ccuauagguaggauccagg

SEQ ID NO: 1779307 - RNA, 19 nt, Artificial Sequence
  Description of Artificial Sequence: Synthetic oligonucleotide
agaucccuugcaggguugc

SEQ ID NO: 1779308 - RNA, 19 nt, Artificial Sequence
  Description of Artificial Sequence: Synthetic oligonucleotide
gugggaugaggacucagca

SEQ ID NO: 1779309 - RNA, 19 nt, Artificial Sequence
  Description of Artificial Sequence: Synthetic oligonucleotide
acaauaggggacgcuccgg

SEQ ID NO: 1779310 - RNA, 19 nt, Artificial Sequence
  Description of Artificial Sequence: Synthetic oligonucleotide
agaccaaacccugcacagg

SEQ ID NO: 1779311 - RNA, 19 nt, Artificial Sequence
  Description of Artificial Sequence: Synthetic oligonucleotide
uugguacccaggaaacaua

SEQ ID NO: 1779312 - RNA, 19 nt, Artificial Sequence
  Description of Artificial Sequence: Synthetic oligonucleotide
agugcagucgggaggcgcg

SEQ ID NO: 1779313 - RNA, 19 nt, Artificial Sequence
  Description of Artificial Sequence: Synthetic oligonucleotide
uggcaauuggggucccuug

SEQ ID NO: 1779314 - RNA, 19 nt, Artificial Sequence
  Description of Artificial Sequence: Synthetic oligonucleotide
gaguagugaggugcagccg

SEQ ID NO: 1779315 - RNA, 19 nt, Artificial Sequence
  Description of Artificial Sequence: Synthetic oligonucleotide
gggcagcuaggacagaucc

SEQ ID NO: 1779316 - RNA, 19 nt, Artificial Sequence
  Description of Artificial Sequence: Synthetic oligonucleotide
ggcauagaaguacaacuga

SEQ ID NO: 1779317 - RNA, 19 nt, Artificial Sequence
  Description of Artificial Sequence: Synthetic oligonucleotide
gccacggccccucagagcc

SEQ ID NO: 1779318 - RNA, 19 nt, Artificial Sequence
  Description of Artificial Sequence: Synthetic oligonucleotide
agccucuaagcccuccaug

SEQ ID NO: 1779319 - RNA, 19 nt, Artificial Sequence
  Description of Artificial Sequence: Synthetic oligonucleotide
ucagcuauccugggacuca

SEQ ID NO: 1779320 - RNA, 19 nt, Artificial Sequence
  Description of Artificial Sequence: Synthetic oligonucleotide
uugaugaggucagcacaag

SEQ ID NO: 1779321 - RNA, 19 nt, Artificial Sequence
  Description of Artificial Sequence: Synthetic oligonucleotide
auagggcaucccuucagau

SEQ ID NO: 1779322 - RNA, 19 nt, Artificial Sequence
  Description of Artificial Sequence: Synthetic oligonucleotide
gaccaaacccugcacaggu

SEQ ID NO: 1779323 - RNA, 19 nt, Artificial Sequence
  Description of Artificial Sequence: Synthetic oligonucleotide
agaauauagggcaucccuu

SEQ ID NO: 1779324 - RNA, 19 nt, Artificial Sequence
  Description of Artificial Sequence: Synthetic oligonucleotide
cagaauauagggcaucccu

SEQ ID NO: 1779325 - RNA, 19 nt, Artificial Sequence
  Description of Artificial Sequence: Synthetic oligonucleotide
gcuaggacagaucccuugc

SEQ ID NO: 1779326 - RNA, 19 nt, Artificial Sequence
  Description of Artificial Sequence: Synthetic oligonucleotide
aucuagagucagcuuugcu

SEQ ID NO: 1779327 - RNA, 19 nt, Artificial Sequence
  Description of Artificial Sequence: Synthetic oligonucleotide
uucagaucucugugucgug

SEQ ID NO: 1779328 - RNA, 19 nt, Artificial Sequence
  Description of Artificial Sequence: Synthetic oligonucleotide
ggcugcgugucuuagaaaa

SEQ ID NO: 1779329 - RNA, 19 nt, Artificial Sequence
  Description of Artificial Sequence: Synthetic oligonucleotide
uaggggacgcuccgggugu

SEQ ID NO: 1779330 - RNA, 19 nt, Artificial Sequence
  Description of Artificial Sequence: Synthetic oligonucleotide
ccuuggagcgccuugggac

SEQ ID NO: 1779331 - RNA, 19 nt, Artificial Sequence
  Description of Artificial Sequence: Synthetic oligonucleotide
guggcauguggaauccagg

SEQ ID NO: 1779332 - RNA, 19 nt, Artificial Sequence
  Description of Artificial Sequence: Synthetic oligonucleotide
caagcacccaggagcuccg

SEQ ID NO: 1779333 - RNA, 19 nt, Artificial Sequence
  Description of Artificial Sequence: Synthetic oligonucleotide
gggcauagaaguacaacug

SEQ ID NO: 1779334 - RNA, 19 nt, Artificial Sequence
  Description of Artificial Sequence: Synthetic oligonucleotide
cuaagcccuccaugaggcg

SEQ ID NO: 1779335 - RNA, 19 nt, Artificial Sequence
  Description of Artificial Sequence: Synthetic oligonucleotide
gggcaauucaaugucccag

SEQ ID NO: 1779336 - RNA, 19 nt, Artificial Sequence
  Description of Artificial Sequence: Synthetic oligonucleotide
acagaucccuugcaggguu

SEQ ID NO: 1779337 - RNA, 19 nt, Artificial Sequence
  Description of Artificial Sequence: Synthetic oligonucleotide
aggguauugggcagccgac

SEQ ID NO: 1779338 - RNA, 19 nt, Artificial Sequence
  Description of Artificial Sequence: Synthetic oligonucleotide
aggguuagcuuggucaggu

SEQ ID NO: 1779339 - RNA, 19 nt, Artificial Sequence
  Description of Artificial Sequence: Synthetic oligonucleotide
ugcacagguucgcccaggu

SEQ ID NO: 1779340 - RNA, 19 nt, Artificial Sequence
  Description of Artificial Sequence: Synthetic oligonucleotide
ggaauccagggucagcuca

SEQ ID NO: 1779341 - RNA, 19 nt, Artificial Sequence
  Description of Artificial Sequence: Synthetic oligonucleotide
uauugggcagccgacgguu

SEQ ID NO: 1779342 - RNA, 19 nt, Artificial Sequence
  Description of Artificial Sequence: Synthetic oligonucleotide
ggucaacucagccggguug

SEQ ID NO: 1779343 - RNA, 19 nt, Artificial Sequence
  Description of Artificial Sequence: Synthetic oligonucleotide
gugguggcaauuggggucc

SEQ ID NO: 1779344 - RNA, 19 nt, Artificial Sequence
  Description of Artificial Sequence: Synthetic oligonucleotide
ggcauggccaaccacaaua

SEQ ID NO: 1779345 - RNA, 19 nt, Artificial Sequence
  Description of Artificial Sequence: Synthetic oligonucleotide
uaccuuaauggaagccuuu

SEQ ID NO: 1779346 - RNA, 19 nt, Artificial Sequence
  Description of Artificial Sequence: Synthetic oligonucleotide
cagagcccgggcuaccacc

SEQ ID NO: 1779347 - RNA, 19 nt, Artificial Sequence
  Description of Artificial Sequence: Synthetic oligonucleotide
cuuaauggaagccuuuauu

SEQ ID NO: 1779348 - RNA, 19 nt, Artificial Sequence
  Description of Artificial Sequence: Synthetic oligonucleotide
ggucuaacacccgugauaa

SEQ ID NO: 1779349 - RNA, 19 nt, Artificial Sequence
  Description of Artificial Sequence: Synthetic oligonucleotide
cuuggagcgccuugggaca

SEQ ID NO: 1779350 - RNA, 19 nt, Artificial Sequence
  Description of Artificial Sequence: Synthetic oligonucleotide
cacuuacagcucugagccg

SEQ ID NO: 1779351 - RNA, 19 nt, Artificial Sequence
  Description of Artificial Sequence: Synthetic oligonucleotide
caugcaggaucuagaguca

SEQ ID NO: 1779352 - RNA, 19 nt, Artificial Sequence
  Description of Artificial Sequence: Synthetic oligonucleotide
cuuggucagguugaaucuc

SEQ ID NO: 1779353 - RNA, 19 nt, Artificial Sequence
  Description of Artificial Sequence: Synthetic oligonucleotide
ucgugucucuagcaggcuu

SEQ ID NO: 1779354 - RNA, 19 nt, Artificial Sequence
  Description of Artificial Sequence: Synthetic oligonucleotide
agcgggcauggccaaccac

SEQ ID NO: 1779355 - RNA, 19 nt, Artificial Sequence
  Description of Artificial Sequence: Synthetic oligonucleotide
cguaguaggguauugggca

SEQ ID NO: 1779356 - RNA, 19 nt, Artificial Sequence
  Description of Artificial Sequence: Synthetic oligonucleotide
aggaucaccuccauccggu

SEQ ID NO: 1779357 - RNA, 19 nt, Artificial Sequence
  Description of Artificial Sequence: Synthetic oligonucleotide
agaugggcauagaaguaca

SEQ ID NO: 1779358 - RNA, 19 nt, Artificial Sequence
  Description of Artificial Sequence: Synthetic oligonucleotide
ucgcccaggugguagccca

SEQ ID NO: 1779359 - RNA, 19 nt, Artificial Sequence
  Description of Artificial Sequence: Synthetic oligonucleotide
ccauugguacccaggaaac

SEQ ID NO: 1779360 - RNA, 19 nt, Artificial Sequence
  Description of Artificial Sequence: Synthetic oligonucleotide
ugguacucaggaucaccuc

SEQ ID NO: 1779361 - RNA, 19 nt, Artificial Sequence
  Description of Artificial Sequence: Synthetic oligonucleotide
auccaggguuagcuugguc

SEQ ID NO: 1779362 - RNA, 19 nt, Artificial Sequence
  Description of Artificial Sequence: Synthetic oligonucleotide
gauaagcgggcauggccaa

SEQ ID NO: 1779363 - RNA, 19 nt, Artificial Sequence
  Description of Artificial Sequence: Synthetic oligonucleotide
gucaucucuggguggcaug

SEQ ID NO: 1779364 - RNA, 19 nt, Artificial Sequence
  Description of Artificial Sequence: Synthetic oligonucleotide
agaggcagcucuugccuau

SEQ ID NO: 1779365 - RNA, 19 nt, Artificial Sequence
  Description of Artificial Sequence: Synthetic oligonucleotide
caugaggcggcggccaaag

SEQ ID NO: 1779366 - RNA, 19 nt, Artificial Sequence
  Description of Artificial Sequence: Synthetic oligonucleotide
gguggcauguggaauccag

SEQ ID NO: 1779367 - RNA, 19 nt, Artificial Sequence
  Description of Artificial Sequence: Synthetic oligonucleotide
gcaggcuuugaggaggcgg

SEQ ID NO: 1779368 - RNA, 19 nt, Artificial Sequence
  Description of Artificial Sequence: Synthetic oligonucleotide
uggguggcauguggaaucc

SEQ ID NO: 1779369 - RNA, 19 nt, Artificial Sequence
  Description of Artificial Sequence: Synthetic oligonucleotide
augcaggaucuagagucag

SEQ ID NO: 1779370 - RNA, 19 nt, Artificial Sequence
  Description of Artificial Sequence: Synthetic oligonucleotide
caauucaaugucccagaaa

SEQ ID NO: 1779371 - RNA, 19 nt, Artificial Sequence
  Description of Artificial Sequence: Synthetic oligonucleotide
ucagagcccgggcuaccac

SEQ ID NO: 1779372 - RNA, 19 nt, Artificial Sequence
  Description of Artificial Sequence: Synthetic oligonucleotide
guagcccagaugggcauag

SEQ ID NO: 1779373 - RNA, 19 nt, Artificial Sequence
  Description of Artificial Sequence: Synthetic oligonucleotide
ucugagccgaagcccugaa

SEQ ID NO: 1779374 - RNA, 19 nt, Artificial Sequence
  Description of Artificial Sequence: Synthetic oligonucleotide
cuccuggcccauugguacc

SEQ ID NO: 1779375 - RNA, 19 nt, Artificial Sequence
  Description of Artificial Sequence: Synthetic oligonucleotide
aaccacaauaggggacgcu

SEQ ID NO: 1779376 - RNA, 19 nt, Artificial Sequence
  Description of Artificial Sequence: Synthetic oligonucleotide
auaagcgggcauggccaac

SEQ ID NO: 1779377 - RNA, 19 nt, Artificial Sequence
  Description of Artificial Sequence: Synthetic oligonucleotide
aggcagcucuugccuauag

SEQ ID NO: 1779378 - RNA, 19 nt, Artificial Sequence
  Description of Artificial Sequence: Synthetic oligonucleotide
ccacuaagaggcugugggg

SEQ ID NO: 1779379 - RNA, 19 nt, Artificial Sequence
  Description of Artificial Sequence: Synthetic oligonucleotide
ccuugggacagcuugggca

SEQ ID NO: 1779380 - RNA, 19 nt, Artificial Sequence
  Description of Artificial Sequence: Synthetic oligonucleotide
ggcuaaaguauggccagug

SEQ ID NO: 1779381 - RNA, 19 nt, Artificial Sequence
  Description of Artificial Sequence: Synthetic oligonucleotide
gcagcucuugccuauaggu

SEQ ID NO: 1779382 - RNA, 19 nt, Artificial Sequence
  Description of Artificial Sequence: Synthetic oligonucleotide
gucgggaggcgcgacugcg

SEQ ID NO: 1779383 - RNA, 19 nt, Artificial Sequence
  Description of Artificial Sequence: Synthetic oligonucleotide
cuaggacagaucccuugca

SEQ ID NO: 1779384 - RNA, 19 nt, Artificial Sequence
  Description of Artificial Sequence: Synthetic oligonucleotide
ccacaauaggggacgcucc

SEQ ID NO: 1779385 - RNA, 19 nt, Artificial Sequence
  Description of Artificial Sequence: Synthetic oligonucleotide
accuuaauggaagccuuua

SEQ ID NO: 1779386 - RNA, 19 nt, Artificial Sequence
  Description of Artificial Sequence: Synthetic oligonucleotide
cuucagaucucugugucgu

SEQ ID NO: 1779387 - RNA, 19 nt, Artificial Sequence
  Description of Artificial Sequence: Synthetic oligonucleotide
cugagccgaagcccugaag

SEQ ID NO: 1779388 - RNA, 19 nt, Artificial Sequence
  Description of Artificial Sequence: Synthetic oligonucleotide
gcccagaugggcauagaag

SEQ ID NO: 1779389 - RNA, 19 nt, Artificial Sequence
  Description of Artificial Sequence: Synthetic oligonucleotide
gggagugcagucgggaggc

SEQ ID NO: 1779390 - RNA, 19 nt, Artificial Sequence
  Description of Artificial Sequence: Synthetic oligonucleotide
caaagccacggccccucag

SEQ ID NO: 1779391 - RNA, 19 nt, Artificial Sequence
  Description of Artificial Sequence: Synthetic oligonucleotide
gucuaacacccgugauaag

SEQ ID NO: 1779392 - RNA, 19 nt, Artificial Sequence
  Description of Artificial Sequence: Synthetic oligonucleotide
cugagggucaucucugggu

SEQ ID NO: 1779393 - RNA, 19 nt, Artificial Sequence
  Description of Artificial Sequence: Synthetic oligonucleotide
ggguauugggcagccgacg

SEQ ID NO: 1779394 - RNA, 19 nt, Artificial Sequence
  Description of Artificial Sequence: Synthetic oligonucleotide
gcuggucuaacacccguga

SEQ ID NO: 1779395 - RNA, 19 nt, Artificial Sequence
  Description of Artificial Sequence: Synthetic oligonucleotide
acagguucgcccagguggu

SEQ ID NO: 1779396 - RNA, 19 nt, Artificial Sequence
  Description of Artificial Sequence: Synthetic oligonucleotide
caggguuagcuuggucagg

SEQ ID NO: 1779397 - RNA, 19 nt, Artificial Sequence
  Description of Artificial Sequence: Synthetic oligonucleotide
guagugaggugcagccggc

SEQ ID NO: 1779398 - RNA, 19 nt, Artificial Sequence
  Description of Artificial Sequence: Synthetic oligonucleotide
uccggucggcagugcacag

SEQ ID NO: 1779399 - RNA, 19 nt, Artificial Sequence
  Description of Artificial Sequence: Synthetic oligonucleotide
ugccuauagguaggaucca

SEQ ID NO: 1779400 - RNA, 19 nt, Artificial Sequence
  Description of Artificial Sequence: Synthetic oligonucleotide
ugccuagccuucagauguc

SEQ ID NO: 1779401 - RNA, 19 nt, Artificial Sequence
  Description of Artificial Sequence: Synthetic oligonucleotide
cugugucgugucucuagca

SEQ ID NO: 1779402 - RNA, 19 nt, Artificial Sequence
  Description of Artificial Sequence: Synthetic oligonucleotide
agccgacgguugcugaaga

SEQ ID NO: 1779403 - RNA, 19 nt, Artificial Sequence
  Description of Artificial Sequence: Synthetic oligonucleotide
cccauugguacccaggaaa

SEQ ID NO: 1779404 - RNA, 19 nt, Artificial Sequence
  Description of Artificial Sequence: Synthetic oligonucleotide
cccagaugggcauagaagu

SEQ ID NO: 1779405 - RNA, 19 nt, Artificial Sequence
  Description of Artificial Sequence: Synthetic oligonucleotide
ggacugagggucaucucug

SEQ ID NO: 1779406 - RNA, 19 nt, Artificial Sequence
  Description of Artificial Sequence: Synthetic oligonucleotide
guaggguauugggcagccg

SEQ ID NO: 1779407 - RNA, 19 nt, Artificial Sequence
  Description of Artificial Sequence: Synthetic oligonucleotide
cauugguacccaggaaaca

SEQ ID NO: 1779408 - RNA, 19 nt, Artificial Sequence
  Description of Artificial Sequence: Synthetic oligonucleotide
caaccacaauaggggacgc

SEQ ID NO: 1779409 - RNA, 19 nt, Artificial Sequence
  Description of Artificial Sequence: Synthetic oligonucleotide
ugucucuagcaggcuuuga

SEQ ID NO: 1779410 - RNA, 19 nt, Artificial Sequence
  Description of Artificial Sequence: Synthetic oligonucleotide
guucaggauccagaguaaa

SEQ ID NO: 1779411 - RNA, 19 nt, Artificial Sequence
  Description of Artificial Sequence: Synthetic oligonucleotide
aagcacccaggagcuccgg

SEQ ID NO: 1779412 - RNA, 19 nt, Artificial Sequence
  Description of Artificial Sequence: Synthetic oligonucleotide
aagccccgggcuugggcaa

SEQ ID NO: 1779413 - RNA, 19 nt, Artificial Sequence
  Description of Artificial Sequence: Synthetic oligonucleotide
gccuauagguaggauccag

SEQ ID NO: 1779414 - RNA, 19 nt, Artificial Sequence
  Description of Artificial Sequence: Synthetic oligonucleotide
ucuugccuauagguaggau

SEQ ID NO: 1779415 - RNA, 19 nt, Artificial Sequence
  Description of Artificial Sequence: Synthetic oligonucleotide
agcccgggcuaccaccacu

SEQ ID NO: 1779416 - RNA, 19 nt, Artificial Sequence
  Description of Artificial Sequence: Synthetic oligonucleotide
ggaggcgcgacugcggggc

SEQ ID NO: 1779417 - RNA, 19 nt, Artificial Sequence
  Description of Artificial Sequence: Synthetic oligonucleotide
cagcucuugccuauaggua

SEQ ID NO: 1779418 - RNA, 19 nt, Artificial Sequence
  Description of Artificial Sequence: Synthetic oligonucleotide
gcuacguaguaggguauug

SEQ ID NO: 1779419 - RNA, 19 nt, Artificial Sequence
  Description of Artificial Sequence: Synthetic oligonucleotide
acccgugauaagcgggcau

SEQ ID NO: 1779420 - RNA, 19 nt, Artificial Sequence
  Description of Artificial Sequence: Synthetic oligonucleotide
gggucuaagguagggguca

SEQ ID NO: 1779421 - RNA, 19 nt, Artificial Sequence
  Description of Artificial Sequence: Synthetic oligonucleotide
cuggcccauugguacccag

SEQ ID NO: 1779422 - RNA, 19 nt, Artificial Sequence
  Description of Artificial Sequence: Synthetic oligonucleotide
gcaauucaaugucccagaa

SEQ ID NO: 1779423 - RNA, 19 nt, Artificial Sequence
  Description of Artificial Sequence: Synthetic oligonucleotide
cacggccccucagagcccg

SEQ ID NO: 1779424 - RNA, 19 nt, Artificial Sequence
  Description of Artificial Sequence: Synthetic oligonucleotide
cagcuauccugggacucag

SEQ ID NO: 1779425 - RNA, 19 nt, Artificial Sequence
  Description of Artificial Sequence: Synthetic oligonucleotide
gcaauuggggucccuugga

SEQ ID NO: 1779426 - RNA, 19 nt, Artificial Sequence
  Description of Artificial Sequence: Synthetic oligonucleotide
gcccagggagugcagucgg

SEQ ID NO: 1779427 - RNA, 19 nt, Artificial Sequence
  Description of Artificial Sequence: Synthetic oligonucleotide
cagccgacgguugcugaag

SEQ ID NO: 1779428 - RNA, 19 nt, Artificial Sequence
  Description of Artificial Sequence: Synthetic oligonucleotide
gcuuggucagguugaaucu

SEQ ID NO: 1779429 - RNA, 19 nt, Artificial Sequence
  Description of Artificial Sequence: Synthetic oligonucleotide
cccuucagaucucuguguc

SEQ ID NO: 1779430 - RNA, 19 nt, Artificial Sequence
  Description of Artificial Sequence: Synthetic oligonucleotide
cagucgggaggcgcgacug

SEQ ID NO: 1779431 - RNA, 19 nt, Artificial Sequence
  Description of Artificial Sequence: Synthetic oligonucleotide
gcagcuaggacagaucccu

SEQ ID NO: 1779432 - RNA, 19 nt, Artificial Sequence
  Description of Artificial Sequence: Synthetic oligonucleotide
gcggccaaagccacggccc

SEQ ID NO: 1779433 - RNA, 19 nt, Artificial Sequence
  Description of Artificial Sequence: Synthetic oligonucleotide
cuuugaggaggcggcccug

SEQ ID NO: 1779434 - RNA, 19 nt, Artificial Sequence
  Description of Artificial Sequence: Synthetic oligonucleotide
ccagaauauagggcauccc

SEQ ID NO: 1779435 - RNA, 19 nt, Artificial Sequence
  Description of Artificial Sequence: Synthetic oligonucleotide
cugcacagguucgcccagg

SEQ ID NO: 1779436 - RNA, 19 nt, Artificial Sequence
  Description of Artificial Sequence: Synthetic oligonucleotide
ugggcagccgacgguugcu

SEQ ID NO: 1779437 - RNA, 19 nt, Artificial Sequence
  Description of Artificial Sequence: Synthetic oligonucleotide
gguugaaucucagggucaa

SEQ ID NO: 1779438 - RNA, 19 nt, Artificial Sequence
  Description of Artificial Sequence: Synthetic oligonucleotide
cuuacagcucugagccgaa

SEQ ID NO: 1779439 - RNA, 19 nt, Artificial Sequence
  Description of Artificial Sequence: Synthetic oligonucleotide
guucgcccaggugguagcc

SEQ ID NO: 1779440 - RNA, 19 nt, Artificial Sequence
  Description of Artificial Sequence: Synthetic oligonucleotide
agcuacguaguaggguauu

SEQ ID NO: 1779441 - RNA, 19 nt, Artificial Sequence
  Description of Artificial Sequence: Synthetic oligonucleotide
gcaggaucuagagucagcu

SEQ ID NO: 1779442 - RNA, 19 nt, Artificial Sequence
  Description of Artificial Sequence: Synthetic oligonucleotide
ggaucaccuccauccggug

SEQ ID NO: 1779443 - RNA, 19 nt, Artificial Sequence
  Description of Artificial Sequence: Synthetic oligonucleotide
ggucccuuggagcgccuug

SEQ ID NO: 1779444 - RNA, 19 nt, Artificial Sequence
  Description of Artificial Sequence: Synthetic oligonucleotide
agacagugccuagccuuca

SEQ ID NO: 1779445 - RNA, 19 nt, Artificial Sequence
  Description of Artificial Sequence: Synthetic oligonucleotide
gccaaccacaauaggggac

SEQ ID NO: 1779446 - RNA, 19 nt, Artificial Sequence
  Description of Artificial Sequence: Synthetic oligonucleotide
gcggcggccaaagccacgg

SEQ ID NO: 1779447 - RNA, 19 nt, Artificial Sequence
  Description of Artificial Sequence: Synthetic oligonucleotide
ggucaauucuggcuggcau

SEQ ID NO: 1779448 - RNA, 19 nt, Artificial Sequence
  Description of Artificial Sequence: Synthetic oligonucleotide
ggcagcuaggacagauccc

SEQ ID NO: 1779449 - RNA, 19 nt, Artificial Sequence
  Description of Artificial Sequence: Synthetic oligonucleotide
gacagaucccuugcagggu

SEQ ID NO: 1779450 - RNA, 19 nt, Artificial Sequence
  Description of Artificial Sequence: Synthetic oligonucleotide
guauugggcagccgacggu

SEQ ID NO: 1779451 - RNA, 19 nt, Artificial Sequence
  Description of Artificial Sequence: Synthetic oligonucleotide
ggucagagacugggguagg

SEQ ID NO: 1779452 - RNA, 19 nt, Artificial Sequence
  Description of Artificial Sequence: Synthetic oligonucleotide
cauccagaauauagggcau

SEQ ID NO: 1779453 - RNA, 19 nt, Artificial Sequence
  Description of Artificial Sequence: Synthetic oligonucleotide
ccgugauaagcgggcaugg

SEQ ID NO: 1779454 - RNA, 19 nt, Artificial Sequence
  Description of Artificial Sequence: Synthetic oligonucleotide
cuguggggcuggucuaaca

SEQ ID NO: 1779455 - RNA, 19 nt, Artificial Sequence
  Description of Artificial Sequence: Synthetic oligonucleotide
gugcaggauccaggguuag

SEQ ID NO: 1779456 - RNA, 19 nt, Artificial Sequence
  Description of Artificial Sequence: Synthetic oligonucleotide
ggccagggcucagaggcag

SEQ ID NO: 1779457 - RNA, 19 nt, Artificial Sequence
  Description of Artificial Sequence: Synthetic oligonucleotide
cccgugauaagcgggcaug

SEQ ID NO: 1779458 - RNA, 19 nt, Artificial Sequence
  Description of Artificial Sequence: Synthetic oligonucleotide
cggucggcagugcacaggc

SEQ ID NO: 1779459 - RNA, 19 nt, Artificial Sequence
  Description of Artificial Sequence: Synthetic oligonucleotide
agguaggauccaggcucag

SEQ ID NO: 1779460 - RNA, 19 nt, Artificial Sequence
  Description of Artificial Sequence: Synthetic oligonucleotide
ggcuggucuaacacccgug

SEQ ID NO: 1779461 - RNA, 19 nt, Artificial Sequence
  Description of Artificial Sequence: Synthetic oligonucleotide
ggagcuccggucggcagug

SEQ ID NO: 1779462 - RNA, 19 nt, Artificial Sequence
  Description of Artificial Sequence: Synthetic oligonucleotide
ugcagucgggaggcgcgac

SEQ ID NO: 1779463 - RNA, 19 nt, Artificial Sequence
  Description of Artificial Sequence: Synthetic oligonucleotide
gcauagaaguacaacugau

SEQ ID NO: 1779464 - RNA, 19 nt, Artificial Sequence
  Description of Artificial Sequence: Synthetic oligonucleotide
cuccggucggcagugcaca

SEQ ID NO: 1779465 - RNA, 19 nt, Artificial Sequence
  Description of Artificial Sequence: Synthetic oligonucleotide
gaggcgcgacugcggggcc

SEQ ID NO: 1779466 - RNA, 19 nt, Artificial Sequence
  Description of Artificial Sequence: Synthetic oligonucleotide
gggcugguacucaggauca

SEQ ID NO: 1779467 - RNA, 19 nt, Artificial Sequence
  Description of Artificial Sequence: Synthetic oligonucleotide
gggaggcgcgacugcgggg

SEQ ID NO: 1779468 - RNA, 19 nt, Artificial Sequence
  Description of Artificial Sequence: Synthetic oligonucleotide
ggggucuaagguagggguc

SEQ ID NO: 1779469 - RNA, 19 nt, Artificial Sequence
  Description of Artificial Sequence: Synthetic oligonucleotide
gguacccaggaaacauaca

SEQ ID NO: 1779470 - RNA, 19 nt, Artificial Sequence
  Description of Artificial Sequence: Synthetic oligonucleotide
cuaagguaggggucagcuu

SEQ ID NO: 1779471 - RNA, 19 nt, Artificial Sequence
  Description of Artificial Sequence: Synthetic oligonucleotide
ggacucagugacagcucug

SEQ ID NO: 1779472 - RNA, 19 nt, Artificial Sequence
  Description of Artificial Sequence: Synthetic oligonucleotide
gggacgcuccggguguggg

SEQ ID NO: 1779473 - RNA, 19 nt, Artificial Sequence
  Description of Artificial Sequence: Synthetic oligonucleotide
cucagagcccgggcuacca

SEQ ID NO: 1779474 - RNA, 19 nt, Artificial Sequence
  Description of Artificial Sequence: Synthetic oligonucleotide
cucugagccgaagcccuga

SEQ ID NO: 1779475 - RNA, 19 nt, Artificial Sequence
  Description of Artificial Sequence: Synthetic oligonucleotide
gacgcuccgggugugggau

SEQ ID NO: 1779476 - RNA, 19 nt, Artificial Sequence
  Description of Artificial Sequence: Synthetic oligonucleotide
gcgccuugggacagcuugg

SEQ ID NO: 1779477 - RNA, 19 nt, Artificial Sequence
  Description of Artificial Sequence: Synthetic oligonucleotide
ugcggggccacuggucauu

SEQ ID NO: 1779478 - RNA, 19 nt, Artificial Sequence
  Description of Artificial Sequence: Synthetic oligonucleotide
gcacagguucgcccaggug

SEQ ID NO: 1779479 - RNA, 19 nt, Artificial Sequence
  Description of Artificial Sequence: Synthetic oligonucleotide
ccuccauccggugcacggg

SEQ ID NO: 1779480 - RNA, 19 nt, Artificial Sequence
  Description of Artificial Sequence: Synthetic oligonucleotide
ggggcuggucuaacacccg

SEQ ID NO: 1779481 - RNA, 19 nt, Artificial Sequence
  Description of Artificial Sequence: Synthetic oligonucleotide
acgcuccgggugugggaug

SEQ ID NO: 1779482 - RNA, 19 nt, Artificial Sequence
  Description of Artificial Sequence: Synthetic oligonucleotide
guauggccagugggcugag

SEQ ID NO: 1779483 - RNA, 19 nt, Artificial Sequence
  Description of Artificial Sequence: Synthetic oligonucleotide
cccagggagugcagucggg

SEQ ID NO: 1779484 - RNA, 19 nt, Artificial Sequence
  Description of Artificial Sequence: Synthetic oligonucleotide
ggugagguggucagagacu

SEQ ID NO: 1779485 - RNA, 19 nt, Artificial Sequence
  Description of Artificial Sequence: Synthetic oligonucleotide
ugguggcaauugggguccc

SEQ ID NO: 1779486 - RNA, 19 nt, Artificial Sequence
  Description of Artificial Sequence: Synthetic oligonucleotide
gcuuugaggaggcggcccu

SEQ ID NO: 1779487 - RNA, 19 nt, Artificial Sequence
  Description of Artificial Sequence: Synthetic oligonucleotide
gcgugucuuagaaaagcua

SEQ ID NO: 1779488 - RNA, 19 nt, Artificial Sequence
  Description of Artificial Sequence: Synthetic oligonucleotide
ccagggucagcucagcuau

SEQ ID NO: 1779489 - RNA, 19 nt, Artificial Sequence
  Description of Artificial Sequence: Synthetic oligonucleotide
cgugauaagcgggcauggc

SEQ ID NO: 1779490 - RNA, 19 nt, Artificial Sequence
  Description of Artificial Sequence: Synthetic oligonucleotide
ggggccacuggucauugau

SEQ ID NO: 1779491 - RNA, 19 nt, Artificial Sequence
  Description of Artificial Sequence: Synthetic oligonucleotide
cagccggcggaagccccgg

SEQ ID NO: 1779492 - RNA, 19 nt, Artificial Sequence
  Description of Artificial Sequence: Synthetic oligonucleotide
cacaagcacccaggagcuc

SEQ ID NO: 1779493 - RNA, 19 nt, Artificial Sequence
  Description of Artificial Sequence: Synthetic oligonucleotide
gccggcggaagccccgggc

SEQ ID NO: 1779494 - RNA, 19 nt, Artificial Sequence
  Description of Artificial Sequence: Synthetic oligonucleotide
gggucaauucuggcuggca

SEQ ID NO: 1779495 - RNA, 19 nt, Artificial Sequence
  Description of Artificial Sequence: Synthetic oligonucleotide
ccgggcuaccaccacuguc

SEQ ID NO: 1779496 - RNA, 19 nt, Artificial Sequence
  Description of Artificial Sequence: Synthetic oligonucleotide
cuggucuaacacccgugau

SEQ ID NO: 1779497 - RNA, 19 nt, Artificial Sequence
  Description of Artificial Sequence: Synthetic oligonucleotide
gcagccgacgguugcugaa

SEQ ID NO: 1779498 - RNA, 19 nt, Artificial Sequence
  Description of Artificial Sequence: Synthetic oligonucleotide
gcccgggcuaccaccacug

SEQ ID NO: 1779499 - RNA, 19 nt, Artificial Sequence
  Description of Artificial Sequence: Synthetic oligonucleotide
gaucccuugcaggguugcu

SEQ ID NO: 1779500 - RNA, 19 nt, Artificial Sequence
  Description of Artificial Sequence: Synthetic oligonucleotide
cgggaggcgcgacugcggg

SEQ ID NO: 1779501 - RNA, 19 nt, Artificial Sequence
  Description of Artificial Sequence: Synthetic oligonucleotide
ggacgcuccggguguggga

SEQ ID NO: 1779502 - RNA, 19 nt, Artificial Sequence
  Description of Artificial Sequence: Synthetic oligonucleotide
gaggcagcucuugccuaua

SEQ ID NO: 1779503 - RNA, 19 nt, Artificial Sequence
  Description of Artificial Sequence: Synthetic oligonucleotide
cacccgugauaagcgggca

SEQ ID NO: 1779504 - RNA, 19 nt, Artificial Sequence
  Description of Artificial Sequence: Synthetic oligonucleotide
caggauccaggguuagcuu

SEQ ID NO: 1779505 - RNA, 19 nt, Artificial Sequence
  Description of Artificial Sequence: Synthetic oligonucleotide
gcuccggucggcagugcac

SEQ ID NO: 1779506 - RNA, 19 nt, Artificial Sequence
  Description of Artificial Sequence: Synthetic oligonucleotide
gcucagcuauccugggacu

SEQ ID NO: 1779507 - RNA, 19 nt, Artificial Sequence
  Description of Artificial Sequence: Synthetic oligonucleotide
ccuuaauggaagccuuuau

SEQ ID NO: 1779508 - RNA, 19 nt, Artificial Sequence
  Description of Artificial Sequence: Synthetic oligonucleotide
guggcaauuggggucccuu

SEQ ID NO: 1779509 - RNA, 19 nt, Artificial Sequence
  Description of Artificial Sequence: Synthetic oligonucleotide
gagcuccggucggcagugc

SEQ ID NO: 1779510 - RNA, 19 nt, Artificial Sequence
  Description of Artificial Sequence: Synthetic oligonucleotide
ggggacgcuccgggugugg

SEQ ID NO: 1779511 - RNA, 19 nt, Artificial Sequence
  Description of Artificial Sequence: Synthetic oligonucleotide
gugcagucgggaggcgcga

SEQ ID NO: 1779512 - RNA, 19 nt, Artificial Sequence
  Description of Artificial Sequence: Synthetic oligonucleotide
ggcggcggccaaagccacg

SEQ ID NO: 1779513 - RNA, 19 nt, Artificial Sequence
  Description of Artificial Sequence: Synthetic oligonucleotide
aggcgcgacugcggggcca

SEQ ID NO: 1779514 - RNA, 19 nt, Artificial Sequence
  Description of Artificial Sequence: Synthetic oligonucleotide
ggugugggaugaggacuca

SEQ ID NO: 1779515 - RNA, 19 nt, Artificial Sequence
  Description of Artificial Sequence: Synthetic oligonucleotide
ggacuggcccagggagugc

SEQ ID NO: 1779516 - RNA, 19 nt, Artificial Sequence
  Description of Artificial Sequence: Synthetic oligonucleotide
gguagcccagaugggcaua

SEQ ID NO: 1779517 - RNA, 19 nt, Artificial Sequence
  Description of Artificial Sequence: Synthetic oligonucleotide
ggcgcgacugcggggccac

SEQ ID NO: 1779518 - RNA, 19 nt, Artificial Sequence
  Description of Artificial Sequence: Synthetic oligonucleotide
ggcaucccuucagaucucu

SEQ ID NO: 1779519 - RNA, 19 nt, Artificial Sequence
  Description of Artificial Sequence: Synthetic oligonucleotide
ccacggccccucagagccc

SEQ ID NO: 1779520 - RNA, 19 nt, Artificial Sequence
  Description of Artificial Sequence: Synthetic oligonucleotide
gcagucgggaggcgcgacu

SEQ ID NO: 1779521 - RNA, 19 nt, Artificial Sequence
  Description of Artificial Sequence: Synthetic oligonucleotide
ggagcgccuugggacagcu

SEQ ID NO: 1779522 - RNA, 19 nt, Artificial Sequence
  Description of Artificial Sequence: Synthetic oligonucleotide
cagcuaggacagaucccuu

SEQ ID NO: 1779523 - RNA, 19 nt, Artificial Sequence
  Description of Artificial Sequence: Synthetic oligonucleotide
gccaggacugagggucauc

SEQ ID NO: 1779524 - RNA, 19 nt, Artificial Sequence
  Description of Artificial Sequence: Synthetic oligonucleotide
gccuagccuucagaugucu

SEQ ID NO: 1779525 - RNA, 19 nt, Artificial Sequence
  Description of Artificial Sequence: Synthetic oligonucleotide
ggguuagcuuggucagguu

SEQ ID NO: 1779526 - RNA, 19 nt, Artificial Sequence
  Description of Artificial Sequence: Synthetic oligonucleotide
ccuagccuucagaugucuu

SEQ ID NO: 1779527 - RNA, 19 nt, Artificial Sequence
  Description of Artificial Sequence: Synthetic oligonucleotide
gggcauggccaaccacaau

SEQ ID NO: 1779528 - RNA, 19 nt, Artificial Sequence
  Description of Artificial Sequence: Synthetic oligonucleotide
cagguucgcccagguggua

SEQ ID NO: 1779529 - RNA, 19 nt, Artificial Sequence
  Description of Artificial Sequence: Synthetic oligonucleotide
gguggcaauuggggucccu

SEQ ID NO: 1779530 - RNA, 19 nt, Artificial Sequence
  Description of Artificial Sequence: Synthetic oligonucleotide
agccaccuccuggcccauu

SEQ ID NO: 1779531 - RNA, 19 nt, Artificial Sequence
  Description of Artificial Sequence: Synthetic oligonucleotide
ccccgggcuugggcaaaag

SEQ ID NO: 1779532 - RNA, 19 nt, Artificial Sequence
  Description of Artificial Sequence: Synthetic oligonucleotide
cggccccucagagcccggg

SEQ ID NO: 1779533 - RNA, 19 nt, Artificial Sequence
  Description of Artificial Sequence: Synthetic oligonucleotide
cggcggccaaagccacggc

SEQ ID NO: 1779534 - RNA, 19 nt, Artificial Sequence
  Description of Artificial Sequence: Synthetic oligonucleotide
ccaugaggcggcggccaaa

SEQ ID NO: 1779535 - RNA, 19 nt, Artificial Sequence
  Description of Artificial Sequence: Synthetic oligonucleotide
gagcgccuugggacagcuu

SEQ ID NO: 1779536 - RNA, 19 nt, Artificial Sequence
  Description of Artificial Sequence: Synthetic oligonucleotide
ggccaggacugagggucau

SEQ ID NO: 1779537 - RNA, 19 nt, Artificial Sequence
  Description of Artificial Sequence: Synthetic oligonucleotide
ggcuggcaugcaggaucua

SEQ ID NO: 1779538 - RNA, 19 nt, Artificial Sequence
  Description of Artificial Sequence: Synthetic oligonucleotide
cccgggcuaccaccacugu

SEQ ID NO: 1779539 - RNA, 19 nt, Artificial Sequence
  Description of Artificial Sequence: Synthetic oligonucleotide
gcgcgacugcggggccacu

SEQ ID NO: 1779540 - RNA, 19 nt, Artificial Sequence
  Description of Artificial Sequence: Synthetic oligonucleotide
aauaacuugguuucguagc

SEQ ID NO: 1779541 - RNA, 19 nt, Artificial Sequence
  Description of Artificial Sequence: Synthetic oligonucleotide
aauaaugugaugaaagugg

SEQ ID NO: 1779542 - RNA, 19 nt, Artificial Sequence
  Description of Artificial Sequence: Synthetic oligonucleotide
aacacggacacccagcagc

SEQ ID NO: 1779543 - RNA, 19 nt, Artificial Sequence
  Description of Artificial Sequence: Synthetic oligonucleotide
uguucguuccaaaagcacg

SEQ ID NO: 1779544 - RNA, 19 nt, Artificial Sequence
  Description of Artificial Sequence: Synthetic oligonucleotide
ugggguauacacaagagug

SEQ ID NO: 1779545 - RNA, 19 nt, Artificial Sequence
  Description of Artificial Sequence: Synthetic oligonucleotide
auaacuugguuucguagcc

SEQ ID NO: 1779546 - RNA, 19 nt, Artificial Sequence
  Description of Artificial Sequence: Synthetic oligonucleotide
guaagcaccaaagacagcg

SEQ ID NO: 1779547 - RNA, 19 nt, Artificial Sequence
  Description of Artificial Sequence: Synthetic oligonucleotide
aagagcauagccugccagc

SEQ ID NO: 1779548 - RNA, 19 nt, Artificial Sequence
  Description of Artificial Sequence: Synthetic oligonucleotide
cagacaagaagauauuucc

SEQ ID NO: 1779549 - RNA, 19 nt, Artificial Sequence
  Description of Artificial Sequence: Synthetic oligonucleotide
acaagaagauauuucccac

SEQ ID NO: 1779550 - RNA, 19 nt, Artificial Sequence
  Description of Artificial Sequence: Synthetic oligonucleotide
aagauauuucccacgcugc

SEQ ID NO: 1779551 - RNA, 19 nt, Artificial Sequence
  Description of Artificial Sequence: Synthetic oligonucleotide
aguucacugggguauacac

SEQ ID NO: 1779552 - RNA, 19 nt, Artificial Sequence
  Description of Artificial Sequence: Synthetic oligonucleotide
caagggugcaauaacuugg

SEQ ID NO: 1779553 - RNA, 19 nt, Artificial Sequence
  Description of Artificial Sequence: Synthetic oligonucleotide
gaucauaguuagcagcagg

SEQ ID NO: 1779554 - RNA, 19 nt, Artificial Sequence
  Description of Artificial Sequence: Synthetic oligonucleotide
gacaagaagauauuuccca

SEQ ID NO: 1779555 - RNA, 19 nt, Artificial Sequence
  Description of Artificial Sequence: Synthetic oligonucleotide
agaggaaagccguguaagc

SEQ ID NO: 1779556 - RNA, 19 nt, Artificial Sequence
  Description of Artificial Sequence: Synthetic oligonucleotide
aacgcugcagacaagaaga

SEQ ID NO: 1779557 - RNA, 19 nt, Artificial Sequence
  Description of Artificial Sequence: Synthetic oligonucleotide
aggaaagccguguaagcac

SEQ ID NO: 1779558 - RNA, 19 nt, Artificial Sequence
  Description of Artificial Sequence: Synthetic oligonucleotide
uggucaggagcacaguagg

SEQ ID NO: 1779559 - RNA, 19 nt, Artificial Sequence
  Description of Artificial Sequence: Synthetic oligonucleotide
guagaggcugcccacauag

SEQ ID NO: 1779560 - RNA, 19 nt, Artificial Sequence
  Description of Artificial Sequence: Synthetic oligonucleotide
aaggcugccauagagcuug

SEQ ID NO: 1779561 - RNA, 19 nt, Artificial Sequence
  Description of Artificial Sequence: Synthetic oligonucleotide
uuggcggaaacguagcugc

SEQ ID NO: 1779562 - RNA, 19 nt, Artificial Sequence
  Description of Artificial Sequence: Synthetic oligonucleotide
ugcuuuggcggaaacguag

SEQ ID NO: 1779563 - RNA, 19 nt, Artificial Sequence
  Description of Artificial Sequence: Synthetic oligonucleotide
uuugugagaggcugcaccc

SEQ ID NO: 1779564 - RNA, 19 nt, Artificial Sequence
  Description of Artificial Sequence: Synthetic oligonucleotide
ugggcagcauacaagcccg

SEQ ID NO: 1779565 - RNA, 19 nt, Artificial Sequence
  Description of Artificial Sequence: Synthetic oligonucleotide
caucugucaggucacacgg

SEQ ID NO: 1779566 - RNA, 19 nt, Artificial Sequence
  Description of Artificial Sequence: Synthetic oligonucleotide
acgggcaauccauagagag

SEQ ID NO: 1779567 - RNA, 19 nt, Artificial Sequence
  Description of Artificial Sequence: Synthetic oligonucleotide
auagccugccagcaguggc

SEQ ID NO: 1779568 - RNA, 19 nt, Artificial Sequence
  Description of Artificial Sequence: Synthetic oligonucleotide
auaaugugaugaaaguggg

SEQ ID NO: 1779569 - RNA, 19 nt, Artificial Sequence
  Description of Artificial Sequence: Synthetic oligonucleotide
agaacgaggggccaggaca

SEQ ID NO: 1779570 - RNA, 19 nt, Artificial Sequence
  Description of Artificial Sequence: Synthetic oligonucleotide
cuuugugagaggcugcacc

SEQ ID NO: 1779571 - RNA, 19 nt, Artificial Sequence
  Description of Artificial Sequence: Synthetic oligonucleotide
auaaggaggggcugcagag

SEQ ID NO: 1779572 - RNA, 19 nt, Artificial Sequence
  Description of Artificial Sequence: Synthetic oligonucleotide
uccucaaccguucuuugug

SEQ ID NO: 1779573 - RNA, 19 nt, Artificial Sequence
  Description of Artificial Sequence: Synthetic oligonucleotide
ugucaagggugcaauaacu

SEQ ID NO: 1779574 - RNA, 19 nt, Artificial Sequence
  Description of Artificial Sequence: Synthetic oligonucleotide
caauaacuugguuucguag

SEQ ID NO: 1779575 - RNA, 19 nt, Artificial Sequence
  Description of Artificial Sequence: Synthetic oligonucleotide
aaacguagcugcucaauaa

SEQ ID NO: 1779576 - RNA, 19 nt, Artificial Sequence
  Description of Artificial Sequence: Synthetic oligonucleotide
accgacaguagacgcagcc

SEQ ID NO: 1779577 - RNA, 19 nt, Artificial Sequence
  Description of Artificial Sequence: Synthetic oligonucleotide
uguaggagaacuggaacgc

SEQ ID NO: 1779578 - RNA, 19 nt, Artificial Sequence
  Description of Artificial Sequence: Synthetic oligonucleotide
uccaugauaaggaggggcu

SEQ ID NO: 1779579 - RNA, 19 nt, Artificial Sequence
  Description of Artificial Sequence: Synthetic oligonucleotide
cuugguuucguagccagcg

SEQ ID NO: 1779580 - RNA, 19 nt, Artificial Sequence
  Description of Artificial Sequence: Synthetic oligonucleotide
aucauaguuagcagcaggg

SEQ ID NO: 1779581 - RNA, 19 nt, Artificial Sequence
  Description of Artificial Sequence: Synthetic oligonucleotide
aguagacgcagcccguccc

SEQ ID NO: 1779582 - RNA, 19 nt, Artificial Sequence
  Description of Artificial Sequence: Synthetic oligonucleotide
cuggaugccagugaguucc

SEQ ID NO: 1779583 - RNA, 19 nt, Artificial Sequence
  Description of Artificial Sequence: Synthetic oligonucleotide
gaacgcugcagacaagaag

SEQ ID NO: 1779584 - RNA, 19 nt, Artificial Sequence
  Description of Artificial Sequence: Synthetic oligonucleotide
auuccugagaucucgggga

SEQ ID NO: 1779585 - RNA, 19 nt, Artificial Sequence
  Description of Artificial Sequence: Synthetic oligonucleotide
aguagggucucugaggcuc

SEQ ID NO: 1779586 - RNA, 19 nt, Artificial Sequence
  Description of Artificial Sequence: Synthetic oligonucleotide
cuaucagguguccugugcg

SEQ ID NO: 1779587 - RNA, 19 nt, Artificial Sequence
  Description of Artificial Sequence: Synthetic oligonucleotide
uaagcaccaaagacagcgg

SEQ ID NO: 1779588 - RNA, 19 nt, Artificial Sequence
  Description of Artificial Sequence: Synthetic oligonucleotide
guguaagcaccaaagacag

SEQ ID NO: 1779589 - RNA, 19 nt, Artificial Sequence
  Description of Artificial Sequence: Synthetic oligonucleotide
accguucuuugugagaggc

SEQ ID NO: 1779590 - RNA, 19 nt, Artificial Sequence
  Description of Artificial Sequence: Synthetic oligonucleotide
aagaacgaggggccaggac

SEQ ID NO: 1779591 - RNA, 19 nt, Artificial Sequence
  Description of Artificial Sequence: Synthetic oligonucleotide
ugugcauggugcuaacaug

SEQ ID NO: 1779592 - RNA, 19 nt, Artificial Sequence
  Description of Artificial Sequence: Synthetic oligonucleotide
uaaugugaugaaagugggc

SEQ ID NO: 1779593 - RNA, 19 nt, Artificial Sequence
  Description of Artificial Sequence: Synthetic oligonucleotide
ggugcaauaacuugguuuc

SEQ ID NO: 1779594 - RNA, 19 nt, Artificial Sequence
  Description of Artificial Sequence: Synthetic oligonucleotide
caguauuccaugauaagga

SEQ ID NO: 1779595 - RNA, 19 nt, Artificial Sequence
  Description of Artificial Sequence: Synthetic oligonucleotide
aacguagcugcucaauaau

SEQ ID NO: 1779596 - RNA, 19 nt, Artificial Sequence
  Description of Artificial Sequence: Synthetic oligonucleotide
gugcauggugcuaacaugg

SEQ ID NO: 1779597 - RNA, 19 nt, Artificial Sequence
  Description of Artificial Sequence: Synthetic oligonucleotide
agagaacuggcccuaucag

SEQ ID NO: 1779598 - RNA, 19 nt, Artificial Sequence
  Description of Artificial Sequence: Synthetic oligonucleotide
cauggugcuaacaugggca

SEQ ID NO: 1779599 - RNA, 19 nt, Artificial Sequence
  Description of Artificial Sequence: Synthetic oligonucleotide
guauuccaugauaaggagg

SEQ ID NO: 1779600 - RNA, 19 nt, Artificial Sequence
  Description of Artificial Sequence: Synthetic oligonucleotide
acuggaacgcugcagacaa

SEQ ID NO: 1779601 - RNA, 19 nt, Artificial Sequence
  Description of Artificial Sequence: Synthetic oligonucleotide
acaagagugauggucagga

SEQ ID NO: 1779602 - RNA, 19 nt, Artificial Sequence
  Description of Artificial Sequence: Synthetic oligonucleotide
uaucagguguccugugcgg

SEQ ID NO: 1779603 - RNA, 19 nt, Artificial Sequence
  Description of Artificial Sequence: Synthetic oligonucleotide
uuccaugauaaggaggggc

SEQ ID NO: 1779604 - RNA, 19 nt, Artificial Sequence
  Description of Artificial Sequence: Synthetic oligonucleotide
cauguaguugcagaaggag

SEQ ID NO: 1779605 - RNA, 19 nt, Artificial Sequence
  Description of Artificial Sequence: Synthetic oligonucleotide
aaagagugggcaggugaac

SEQ ID NO: 1779606 - RNA, 19 nt, Artificial Sequence
  Description of Artificial Sequence: Synthetic oligonucleotide
gagaccaccaggacgcugg

SEQ ID NO: 1779607 - RNA, 19 nt, Artificial Sequence
  Description of Artificial Sequence: Synthetic oligonucleotide
uccugugcggaugaagagg

SEQ ID NO: 1779608 - RNA, 19 nt, Artificial Sequence
  Description of Artificial Sequence: Synthetic oligonucleotide
agcuccuacggauuuuguc

SEQ ID NO: 1779609 - RNA, 19 nt, Artificial Sequence
  Description of Artificial Sequence: Synthetic oligonucleotide
ugcauggugcuaacauggg

SEQ ID NO: 1779610 - RNA, 19 nt, Artificial Sequence
  Description of Artificial Sequence: Synthetic oligonucleotide
uucccuccagagcagcacg

SEQ ID NO: 1779611 - RNA, 19 nt, Artificial Sequence
  Description of Artificial Sequence: Synthetic oligonucleotide
caaccguucuuugugagag

SEQ ID NO: 1779612 - RNA, 19 nt, Artificial Sequence
  Description of Artificial Sequence: Synthetic oligonucleotide
auagagagcugcaucagug

SEQ ID NO: 1779613 - RNA, 19 nt, Artificial Sequence
  Description of Artificial Sequence: Synthetic oligonucleotide
aacuggcccuaucaggugu

SEQ ID NO: 1779614 - RNA, 19 nt, Artificial Sequence
  Description of Artificial Sequence: Synthetic oligonucleotide
auaguuagcagcaggggca

SEQ ID NO: 1779615 - RNA, 19 nt, Artificial Sequence
  Description of Artificial Sequence: Synthetic oligonucleotide
agagugauggucaggagca

SEQ ID NO: 1779616 - RNA, 19 nt, Artificial Sequence
  Description of Artificial Sequence: Synthetic oligonucleotide
gauaaggaggggcugcaga

SEQ ID NO: 1779617 - RNA, 19 nt, Artificial Sequence
  Description of Artificial Sequence: Synthetic oligonucleotide
agaacacggacacccagca

SEQ ID NO: 1779618 - RNA, 19 nt, Artificial Sequence
  Description of Artificial Sequence: Synthetic oligonucleotide
uccucuuggucccuggggu

SEQ ID NO: 1779619 - RNA, 19 nt, Artificial Sequence
  Description of Artificial Sequence: Synthetic oligonucleotide
ugucaggucacacgggcaa

SEQ ID NO: 1779620 - RNA, 19 nt, Artificial Sequence
  Description of Artificial Sequence: Synthetic oligonucleotide
ugguuucguagccagcgca

SEQ ID NO: 1779621 - RNA, 19 nt, Artificial Sequence
  Description of Artificial Sequence: Synthetic oligonucleotide
ugaaacgccgcuugaugac

SEQ ID NO: 1779622 - RNA, 19 nt, Artificial Sequence
  Description of Artificial Sequence: Synthetic oligonucleotide
aaagcacgcaaaggggaag

SEQ ID NO: 1779623 - RNA, 19 nt, Artificial Sequence
  Description of Artificial Sequence: Synthetic oligonucleotide
guucguuccaaaagcacgc

SEQ ID NO: 1779624 - RNA, 19 nt, Artificial Sequence
  Description of Artificial Sequence: Synthetic oligonucleotide
uuuggcggaaacguagcug

SEQ ID NO: 1779625 - RNA, 19 nt, Artificial Sequence
  Description of Artificial Sequence: Synthetic oligonucleotide
aacgccgcuugaugacagc

SEQ ID NO: 1779626 - RNA, 19 nt, Artificial Sequence
  Description of Artificial Sequence: Synthetic oligonucleotide
agcccaucagaguucacug

SEQ ID NO: 1779627 - RNA, 19 nt, Artificial Sequence
  Description of Artificial Sequence: Synthetic oligonucleotide
uuucccacgcugcuuuggc

SEQ ID NO: 1779628 - RNA, 19 nt, Artificial Sequence
  Description of Artificial Sequence: Synthetic oligonucleotide
agaacuggcccuaucaggu

SEQ ID NO: 1779629 - RNA, 19 nt, Artificial Sequence
  Description of Artificial Sequence: Synthetic oligonucleotide
aaccguucuuugugagagg

SEQ ID NO: 1779630 - RNA, 19 nt, Artificial Sequence
  Description of Artificial Sequence: Synthetic oligonucleotide
cagcauacaagcccggaac

SEQ ID NO: 1779631 - RNA, 19 nt, Artificial Sequence
  Description of Artificial Sequence: Synthetic oligonucleotide
ucacacgggcaauccauag

SEQ ID NO: 1779632 - RNA, 19 nt, Artificial Sequence
  Description of Artificial Sequence: Synthetic oligonucleotide
caugauaaggaggggcugc

SEQ ID NO: 1779633 - RNA, 19 nt, Artificial Sequence
  Description of Artificial Sequence: Synthetic oligonucleotide
uuucguagccagcgcaugu

SEQ ID NO: 1779634 - RNA, 19 nt, Artificial Sequence
  Description of Artificial Sequence: Synthetic oligonucleotide
uuuggauaucugcuccuuc

SEQ ID NO: 1779635 - RNA, 19 nt, Artificial Sequence
  Description of Artificial Sequence: Synthetic oligonucleotide
augaaagugggcaacucca

SEQ ID NO: 1779636 - RNA, 19 nt, Artificial Sequence
  Description of Artificial Sequence: Synthetic oligonucleotide
agcauacaagcccggaaca

SEQ ID NO: 1779637 - RNA, 19 nt, Artificial Sequence
  Description of Artificial Sequence: Synthetic oligonucleotide
uggauaucugcuccuuccu

SEQ ID NO: 1779638 - RNA, 19 nt, Artificial Sequence
  Description of Artificial Sequence: Synthetic oligonucleotide
ucuuccacacguagaggcu

SEQ ID NO: 1779639 - RNA, 19 nt, Artificial Sequence
  Description of Artificial Sequence: Synthetic oligonucleotide
gcuggagaccaccaggacg

SEQ ID NO: 1779640 - RNA, 19 nt, Artificial Sequence
  Description of Artificial Sequence: Synthetic oligonucleotide
uccgucagggguugaagca

SEQ ID NO: 1779641 - RNA, 19 nt, Artificial Sequence
  Description of Artificial Sequence: Synthetic oligonucleotide
ucaaccguucuuugugaga

SEQ ID NO: 1779642 - RNA, 19 nt, Artificial Sequence
  Description of Artificial Sequence: Synthetic oligonucleotide
ucccuugcaguauuccaug

SEQ ID NO: 1779643 - RNA, 19 nt, Artificial Sequence
  Description of Artificial Sequence: Synthetic oligonucleotide
caggcgagacugaagcagg

SEQ ID NO: 1779644 - RNA, 19 nt, Artificial Sequence
  Description of Artificial Sequence: Synthetic oligonucleotide
ugcaauaacuugguuucgu

SEQ ID NO: 1779645 - RNA, 19 nt, Artificial Sequence
  Description of Artificial Sequence: Synthetic oligonucleotide
agacugaagcaggagaaca

SEQ ID NO: 1779646 - RNA, 19 nt, Artificial Sequence
  Description of Artificial Sequence: Synthetic oligonucleotide
cuguucguuccaaaagcac

SEQ ID NO: 1779647 - RNA, 19 nt, Artificial Sequence
  Description of Artificial Sequence: Synthetic oligonucleotide
cagcgcaugucugugaggc

SEQ ID NO: 1779648 - RNA, 19 nt, Artificial Sequence
  Description of Artificial Sequence: Synthetic oligonucleotide
aaaagcacgcaaaggggaa

SEQ ID NO: 1779649 - RNA, 19 nt, Artificial Sequence
  Description of Artificial Sequence: Synthetic oligonucleotide
gaggaaagccguguaagca

SEQ ID NO: 1779650 - RNA, 19 nt, Artificial Sequence
  Description of Artificial Sequence: Synthetic oligonucleotide
aauccauagagagcugcau

SEQ ID NO: 1779651 - RNA, 19 nt, Artificial Sequence
  Description of Artificial Sequence: Synthetic oligonucleotide
cagugaugugccuggcugg

SEQ ID NO: 1779652 - RNA, 19 nt, Artificial Sequence
  Description of Artificial Sequence: Synthetic oligonucleotide
uugguuucguagccagcgc

SEQ ID NO: 1779653 - RNA, 19 nt, Artificial Sequence
  Description of Artificial Sequence: Synthetic oligonucleotide
cugucaagggugcaauaac

SEQ ID NO: 1779654 - RNA, 19 nt, Artificial Sequence
  Description of Artificial Sequence: Synthetic oligonucleotide
gaagaggaaagccguguaa

SEQ ID NO: 1779655 - RNA, 19 nt, Artificial Sequence
  Description of Artificial Sequence: Synthetic oligonucleotide
cucaaccguucuuugugag

SEQ ID NO: 1779656 - RNA, 19 nt, Artificial Sequence
  Description of Artificial Sequence: Synthetic oligonucleotide
acagcgguguaggagaacu

SEQ ID NO: 1779657 - RNA, 19 nt, Artificial Sequence
  Description of Artificial Sequence: Synthetic oligonucleotide
cccaggaauaggaucauag

SEQ ID NO: 1779658 - RNA, 19 nt, Artificial Sequence
  Description of Artificial Sequence: Synthetic oligonucleotide
cugggguucaacuagcucu

SEQ ID NO: 1779659 - RNA, 19 nt, Artificial Sequence
  Description of Artificial Sequence: Synthetic oligonucleotide
ugugcggaugaagaggaaa

SEQ ID NO: 1779660 - RNA, 19 nt, Artificial Sequence
  Description of Artificial Sequence: Synthetic oligonucleotide
ucaguggacccaggaauag

SEQ ID NO: 1779661 - RNA, 19 nt, Artificial Sequence
  Description of Artificial Sequence: Synthetic oligonucleotide
gugcggaugaagaggaaag

SEQ ID NO: 1779662 - RNA, 19 nt, Artificial Sequence
  Description of Artificial Sequence: Synthetic oligonucleotide
agaucucggggaccccagc

SEQ ID NO: 1779663 - RNA, 19 nt, Artificial Sequence
  Description of Artificial Sequence: Synthetic oligonucleotide
aagggugcaauaacuuggu

SEQ ID NO: 1779664 - RNA, 19 nt, Artificial Sequence
  Description of Artificial Sequence: Synthetic oligonucleotide
uuccacacguagaggcugc

SEQ ID NO: 1779665 - RNA, 19 nt, Artificial Sequence
  Description of Artificial Sequence: Synthetic oligonucleotide
agccguguaagcaccaaag

SEQ ID NO: 1779666 - RNA, 19 nt, Artificial Sequence
  Description of Artificial Sequence: Synthetic oligonucleotide
cucgcucuuccacacguag

SEQ ID NO: 1779667 - RNA, 19 nt, Artificial Sequence
  Description of Artificial Sequence: Synthetic oligonucleotide
ugcggaugaagaggaaagc

SEQ ID NO: 1779668 - RNA, 19 nt, Artificial Sequence
  Description of Artificial Sequence: Synthetic oligonucleotide
acugggguauacacaagag

SEQ ID NO: 1779669 - RNA, 19 nt, Artificial Sequence
  Description of Artificial Sequence: Synthetic oligonucleotide
aguggacccaggaauagga

SEQ ID NO: 1779670 - RNA, 19 nt, Artificial Sequence
  Description of Artificial Sequence: Synthetic oligonucleotide
ggugaaacgccgcuugaug

SEQ ID NO: 1779671 - RNA, 19 nt, Artificial Sequence
  Description of Artificial Sequence: Synthetic oligonucleotide
uaguugcagaaggaguggc

SEQ ID NO: 1779672 - RNA, 19 nt, Artificial Sequence
  Description of Artificial Sequence: Synthetic oligonucleotide
gcuaacaugggcagcauac

SEQ ID NO: 1779673 - RNA, 19 nt, Artificial Sequence
  Description of Artificial Sequence: Synthetic oligonucleotide
agaaggaguggcagagaac

SEQ ID NO: 1779674 - RNA, 19 nt, Artificial Sequence
  Description of Artificial Sequence: Synthetic oligonucleotide
aggacgcuggugaaacgcc

SEQ ID NO: 1779675 - RNA, 19 nt, Artificial Sequence
  Description of Artificial Sequence: Synthetic oligonucleotide
acggacacccagcagcaca

SEQ ID NO: 1779676 - RNA, 19 nt, Artificial Sequence
  Description of Artificial Sequence: Synthetic oligonucleotide
ugucugugaggcagcgggc

SEQ ID NO: 1779677 - RNA, 19 nt, Artificial Sequence
  Description of Artificial Sequence: Synthetic oligonucleotide
gaaagugggcaacuccaaa

SEQ ID NO: 1779678 - RNA, 19 nt, Artificial Sequence
  Description of Artificial Sequence: Synthetic oligonucleotide
aaacgccgcuugaugacag

SEQ ID NO: 1779679 - RNA, 19 nt, Artificial Sequence
  Description of Artificial Sequence: Synthetic oligonucleotide
aagccguguaagcaccaaa

SEQ ID NO: 1779680 - RNA, 19 nt, Artificial Sequence
  Description of Artificial Sequence: Synthetic oligonucleotide
guccgucagggguugaagc

SEQ ID NO: 1779681 - RNA, 19 nt, Artificial Sequence
  Description of Artificial Sequence: Synthetic oligonucleotide
ugcgcacacggcagggaag

SEQ ID NO: 1779682 - RNA, 19 nt, Artificial Sequence
  Description of Artificial Sequence: Synthetic oligonucleotide
caggacgcuggugaaacgc

SEQ ID NO: 1779683 - RNA, 19 nt, Artificial Sequence
  Description of Artificial Sequence: Synthetic oligonucleotide
gaugcuccagggcugcgca

SEQ ID NO: 1779684 - RNA, 19 nt, Artificial Sequence
  Description of Artificial Sequence: Synthetic oligonucleotide
agagcauagccugccagca

SEQ ID NO: 1779685 - RNA, 19 nt, Artificial Sequence
  Description of Artificial Sequence: Synthetic oligonucleotide
ggcagcgggcccaagaacg

SEQ ID NO: 1779686 - RNA, 19 nt, Artificial Sequence
  Description of Artificial Sequence: Synthetic oligonucleotide
ucacugggguauacacaag

SEQ ID NO: 1779687 - RNA, 19 nt, Artificial Sequence
  Description of Artificial Sequence: Synthetic oligonucleotide
gaauaggaucauaguuagc

SEQ ID NO: 1779688 - RNA, 19 nt, Artificial Sequence
  Description of Artificial Sequence: Synthetic oligonucleotide
cccaucagaguucacuggg

SEQ ID NO: 1779689 - RNA, 19 nt, Artificial Sequence
  Description of Artificial Sequence: Synthetic oligonucleotide
ugagaucucggggacccca

SEQ ID NO: 1779690 - RNA, 19 nt, Artificial Sequence
  Description of Artificial Sequence: Synthetic oligonucleotide
cacaccaagagcauagccu

SEQ ID NO: 1779691 - RNA, 19 nt, Artificial Sequence
  Description of Artificial Sequence: Synthetic oligonucleotide
auuucccacgcugcuuugg

SEQ ID NO: 1779692 - RNA, 19 nt, Artificial Sequence
  Description of Artificial Sequence: Synthetic oligonucleotide
gagaggcugcacccuuugg

SEQ ID NO: 1779693 - RNA, 19 nt, Artificial Sequence
  Description of Artificial Sequence: Synthetic oligonucleotide
gaacuggcccuaucaggug

SEQ ID NO: 1779694 - RNA, 19 nt, Artificial Sequence
  Description of Artificial Sequence: Synthetic oligonucleotide
ucgcucuuccacacguaga

SEQ ID NO: 1779695 - RNA, 19 nt, Artificial Sequence
  Description of Artificial Sequence: Synthetic oligonucleotide
cucagcgcggcugacucgg

SEQ ID NO: 1779696 - RNA, 19 nt, Artificial Sequence
  Description of Artificial Sequence: Synthetic oligonucleotide
uaacuugguuucguagcca

SEQ ID NO: 1779697 - RNA, 19 nt, Artificial Sequence
  Description of Artificial Sequence: Synthetic oligonucleotide
uacggauuuuguccuuguc

SEQ ID NO: 1779698 - RNA, 19 nt, Artificial Sequence
  Description of Artificial Sequence: Synthetic oligonucleotide
acuugguuucguagccagc

SEQ ID NO: 1779699 - RNA, 19 nt, Artificial Sequence
  Description of Artificial Sequence: Synthetic oligonucleotide
agaguucacugggguauac

SEQ ID NO: 1779700 - RNA, 19 nt, Artificial Sequence
  Description of Artificial Sequence: Synthetic oligonucleotide
cguguaagcaccaaagaca

SEQ ID NO: 1779701 - RNA, 19 nt, Artificial Sequence
  Description of Artificial Sequence: Synthetic oligonucleotide
gguugaagcaaaagcagga

SEQ ID NO: 1779702 - RNA, 19 nt, Artificial Sequence
  Description of Artificial Sequence: Synthetic oligonucleotide
cacugggguauacacaaga

SEQ ID NO: 1779703 - RNA, 19 nt, Artificial Sequence
  Description of Artificial Sequence: Synthetic oligonucleotide
ugaugaaagugggcaacuc

SEQ ID NO: 1779704 - RNA, 19 nt, Artificial Sequence
  Description of Artificial Sequence: Synthetic oligonucleotide
ccguguaagcaccaaagac

SEQ ID NO: 1779705 - RNA, 19 nt, Artificial Sequence
  Description of Artificial Sequence: Synthetic oligonucleotide
ccugaagcccaucagggug

SEQ ID NO: 1779706 - RNA, 19 nt, Artificial Sequence
  Description of Artificial Sequence: Synthetic oligonucleotide
ggagaacacggacacccag

SEQ ID NO: 1779707 - RNA, 19 nt, Artificial Sequence
  Description of Artificial Sequence: Synthetic oligonucleotide
caauccauagagagcugca

SEQ ID NO: 1779708 - RNA, 19 nt, Artificial Sequence
  Description of Artificial Sequence: Synthetic oligonucleotide
aucagaguucacuggggua

SEQ ID NO: 1779709 - RNA, 19 nt, Artificial Sequence
  Description of Artificial Sequence: Synthetic oligonucleotide
gagacugaagcaggagaac

SEQ ID NO: 1779710 - RNA, 19 nt, Artificial Sequence
  Description of Artificial Sequence: Synthetic oligonucleotide
gagagcugcaucaguggac

SEQ ID NO: 1779711 - RNA, 19 nt, Artificial Sequence
  Description of Artificial Sequence: Synthetic oligonucleotide
agggaagcccauguaguug

SEQ ID NO: 1779712 - RNA, 19 nt, Artificial Sequence
  Description of Artificial Sequence: Synthetic oligonucleotide
acguagcugcucaauaaug

SEQ ID NO: 1779713 - RNA, 19 nt, Artificial Sequence
  Description of Artificial Sequence: Synthetic oligonucleotide
guagacgcagcccgucccc

SEQ ID NO: 1779714 - RNA, 19 nt, Artificial Sequence
  Description of Artificial Sequence: Synthetic oligonucleotide
agugcacagcuccuacgga

SEQ ID NO: 1779715 - RNA, 19 nt, Artificial Sequence
  Description of Artificial Sequence: Synthetic oligonucleotide
aucagggugagcagugaug

SEQ ID NO: 1779716 - RNA, 19 nt, Artificial Sequence
  Description of Artificial Sequence: Synthetic oligonucleotide
cacaagagugauggucagg

SEQ ID NO: 1779717 - RNA, 19 nt, Artificial Sequence
  Description of Artificial Sequence: Synthetic oligonucleotide
gcuggugaaacgccgcuug

SEQ ID NO: 1779718 - RNA, 19 nt, Artificial Sequence
  Description of Artificial Sequence: Synthetic oligonucleotide
ccacauaggagcaggcgag

SEQ ID NO: 1779719 - RNA, 19 nt, Artificial Sequence
  Description of Artificial Sequence: Synthetic oligonucleotide
ugcuaacaugggcagcaua

SEQ ID NO: 1779720 - RNA, 19 nt, Artificial Sequence
  Description of Artificial Sequence: Synthetic oligonucleotide
guggucccugggcagcucg

SEQ ID NO: 1779721 - RNA, 19 nt, Artificial Sequence
  Description of Artificial Sequence: Synthetic oligonucleotide
aucucggggaccccagcca

SEQ ID NO: 1779722 - RNA, 19 nt, Artificial Sequence
  Description of Artificial Sequence: Synthetic oligonucleotide
accugugcauggugcuaac

SEQ ID NO: 1779723 - RNA, 19 nt, Artificial Sequence
  Description of Artificial Sequence: Synthetic oligonucleotide
gugcaauaacuugguuucg

SEQ ID NO: 1779724 - RNA, 19 nt, Artificial Sequence
  Description of Artificial Sequence: Synthetic oligonucleotide
guucuuugugagaggcugc

SEQ ID NO: 1779725 - RNA, 19 nt, Artificial Sequence
  Description of Artificial Sequence: Synthetic oligonucleotide
gaaacgccgcuugaugaca

SEQ ID NO: 1779726 - RNA, 19 nt, Artificial Sequence
  Description of Artificial Sequence: Synthetic oligonucleotide
caguagacgcagcccgucc

SEQ ID NO: 1779727 - RNA, 19 nt, Artificial Sequence
  Description of Artificial Sequence: Synthetic oligonucleotide
ggaaagccguguaagcacc

SEQ ID NO: 1779728 - RNA, 19 nt, Artificial Sequence
  Description of Artificial Sequence: Synthetic oligonucleotide
aggguggucccugggcagc

SEQ ID NO: 1779729 - RNA, 19 nt, Artificial Sequence
  Description of Artificial Sequence: Synthetic oligonucleotide
gcggaugaagaggaaagcc

SEQ ID NO: 1779730 - RNA, 19 nt, Artificial Sequence
  Description of Artificial Sequence: Synthetic oligonucleotide
caggaauaggaucauaguu

SEQ ID NO: 1779731 - RNA, 19 nt, Artificial Sequence
  Description of Artificial Sequence: Synthetic oligonucleotide
gacgcuggugaaacgccgc

SEQ ID NO: 1779732 - RNA, 19 nt, Artificial Sequence
  Description of Artificial Sequence: Synthetic oligonucleotide
gcaauccauagagagcugc

SEQ ID NO: 1779733 - RNA, 19 nt, Artificial Sequence
  Description of Artificial Sequence: Synthetic oligonucleotide
agagcagcacgcagagagg

SEQ ID NO: 1779734 - RNA, 19 nt, Artificial Sequence
  Description of Artificial Sequence: Synthetic oligonucleotide
aaggaguggcagagaacug

SEQ ID NO: 1779735 - RNA, 19 nt, Artificial Sequence
  Description of Artificial Sequence: Synthetic oligonucleotide
ucagguguccugugcggau

SEQ ID NO: 1779736 - RNA, 19 nt, Artificial Sequence
  Description of Artificial Sequence: Synthetic oligonucleotide
cgacaguagacgcagcccg

SEQ ID NO: 1779737 - RNA, 19 nt, Artificial Sequence
  Description of Artificial Sequence: Synthetic oligonucleotide
agugaugugccuggcugga

SEQ ID NO: 1779738 - RNA, 19 nt, Artificial Sequence
  Description of Artificial Sequence: Synthetic oligonucleotide
uagacgcagcccguccccg

SEQ ID NO: 1779739 - RNA, 19 nt, Artificial Sequence
  Description of Artificial Sequence: Synthetic oligonucleotide
caguggacccaggaauagg

SEQ ID NO: 1779740 - RNA, 19 nt, Artificial Sequence
  Description of Artificial Sequence: Synthetic oligonucleotide
agcaggcgagacugaagca

SEQ ID NO: 1779741 - RNA, 19 nt, Artificial Sequence
  Description of Artificial Sequence: Synthetic oligonucleotide
gguucaacuagcucuggcu

SEQ ID NO: 1779742 - RNA, 19 nt, Artificial Sequence
  Description of Artificial Sequence: Synthetic oligonucleotide
auagagcuugggguccguc

SEQ ID NO: 1779743 - RNA, 19 nt, Artificial Sequence
  Description of Artificial Sequence: Synthetic oligonucleotide
aaagccguguaagcaccaa

SEQ ID NO: 1779744 - RNA, 19 nt, Artificial Sequence
  Description of Artificial Sequence: Synthetic oligonucleotide
ccaucagaguucacugggg

SEQ ID NO: 1779745 - RNA, 19 nt, Artificial Sequence
  Description of Artificial Sequence: Synthetic oligonucleotide
uucguagccagcgcauguc

SEQ ID NO: 1779746 - RNA, 19 nt, Artificial Sequence
  Description of Artificial Sequence: Synthetic oligonucleotide
agcccguccccgcccagcg

SEQ ID NO: 1779747 - RNA, 19 nt, Artificial Sequence
  Description of Artificial Sequence: Synthetic oligonucleotide
guucacugggguauacaca

SEQ ID NO: 1779748 - RNA, 19 nt, Artificial Sequence
  Description of Artificial Sequence: Synthetic oligonucleotide
aguugcagaaggaguggca

SEQ ID NO: 1779749 - RNA, 19 nt, Artificial Sequence
  Description of Artificial Sequence: Synthetic oligonucleotide
gaggcagcgggcccaagaa

SEQ ID NO: 1779750 - RNA, 19 nt, Artificial Sequence
  Description of Artificial Sequence: Synthetic oligonucleotide
ucaggucacacgggcaauc

SEQ ID NO: 1779751 - RNA, 19 nt, Artificial Sequence
  Description of Artificial Sequence: Synthetic oligonucleotide
ucggggaccccagccagcc

SEQ ID NO: 1779752 - RNA, 19 nt, Artificial Sequence
  Description of Artificial Sequence: Synthetic oligonucleotide
agcccaucugucaggucac

SEQ ID NO: 1779753 - RNA, 19 nt, Artificial Sequence
  Description of Artificial Sequence: Synthetic oligonucleotide
gagaucucggggaccccag

SEQ ID NO: 1779754 - RNA, 19 nt, Artificial Sequence
  Description of Artificial Sequence: Synthetic oligonucleotide
gacgcagcccguccccgcc

SEQ ID NO: 1779755 - RNA, 19 nt, Artificial Sequence
  Description of Artificial Sequence: Synthetic oligonucleotide
caggucacacgggcaaucc

SEQ ID NO: 1779756 - RNA, 19 nt, Artificial Sequence
  Description of Artificial Sequence: Synthetic oligonucleotide
aucugucaggucacacggg

SEQ ID NO: 1779757 - RNA, 19 nt, Artificial Sequence
  Description of Artificial Sequence: Synthetic oligonucleotide
cacccuuuggauaucugcu

SEQ ID NO: 1779758 - RNA, 19 nt, Artificial Sequence
  Description of Artificial Sequence: Synthetic oligonucleotide
cuaacaugggcagcauaca

SEQ ID NO: 1779759 - RNA, 19 nt, Artificial Sequence
  Description of Artificial Sequence: Synthetic oligonucleotide
gguauacacaagagugaug

SEQ ID NO: 1779760 - RNA, 19 nt, Artificial Sequence
  Description of Artificial Sequence: Synthetic oligonucleotide
gaacgaggggccaggacaa

SEQ ID NO: 1779761 - RNA, 19 nt, Artificial Sequence
  Description of Artificial Sequence: Synthetic oligonucleotide
ggguucaacuagcucuggc

SEQ ID NO: 1779762 - RNA, 19 nt, Artificial Sequence
  Description of Artificial Sequence: Synthetic oligonucleotide
gggcaauccauagagagcu

SEQ ID NO: 1779763 - RNA, 19 nt, Artificial Sequence
  Description of Artificial Sequence: Synthetic oligonucleotide
uggugaaacgccgcuugau

SEQ ID NO: 1779764 - RNA, 19 nt, Artificial Sequence
  Description of Artificial Sequence: Synthetic oligonucleotide
guucaacuagcucuggcuu

SEQ ID NO: 1779765 - RNA, 19 nt, Artificial Sequence
  Description of Artificial Sequence: Synthetic oligonucleotide
gcgacaccgacaguagacg

SEQ ID NO: 1779766 - RNA, 19 nt, Artificial Sequence
  Description of Artificial Sequence: Synthetic oligonucleotide
caugucugugaggcagcgg

SEQ ID NO: 1779767 - RNA, 19 nt, Artificial Sequence
  Description of Artificial Sequence: Synthetic oligonucleotide
ccugagaucucggggaccc

SEQ ID NO: 1779768 - RNA, 19 nt, Artificial Sequence
  Description of Artificial Sequence: Synthetic oligonucleotide
uagccagcgcaugucugug

SEQ ID NO: 1779769 - RNA, 19 nt, Artificial Sequence
  Description of Artificial Sequence: Synthetic oligonucleotide
aucaguggacccaggaaua

SEQ ID NO: 1779770 - RNA, 19 nt, Artificial Sequence
  Description of Artificial Sequence: Synthetic oligonucleotide
acgcugcuuuggcggaaac

SEQ ID NO: 1779771 - RNA, 19 nt, Artificial Sequence
  Description of Artificial Sequence: Synthetic oligonucleotide
cugggguauacacaagagu

SEQ ID NO: 1779772 - RNA, 19 nt, Artificial Sequence
  Description of Artificial Sequence: Synthetic oligonucleotide
gccagcgcaugucugugag

SEQ ID NO: 1779773 - RNA, 19 nt, Artificial Sequence
  Description of Artificial Sequence: Synthetic oligonucleotide
acgcuggugaaacgccgcu

SEQ ID NO: 1779774 - RNA, 19 nt, Artificial Sequence
  Description of Artificial Sequence: Synthetic oligonucleotide
agcagcacgcagagagggg

SEQ ID NO: 1779775 - RNA, 19 nt, Artificial Sequence
  Description of Artificial Sequence: Synthetic oligonucleotide
ucagcgcggcugacucggg

SEQ ID NO: 1779776 - RNA, 19 nt, Artificial Sequence
  Description of Artificial Sequence: Synthetic oligonucleotide
uggcggaaacguagcugcu

SEQ ID NO: 1779777 - RNA, 19 nt, Artificial Sequence
  Description of Artificial Sequence: Synthetic oligonucleotide
gaaagccguguaagcacca

SEQ ID NO: 1779778 - RNA, 19 nt, Artificial Sequence
  Description of Artificial Sequence: Synthetic oligonucleotide
cacacgggcaauccauaga

SEQ ID NO: 1779779 - RNA, 19 nt, Artificial Sequence
  Description of Artificial Sequence: Synthetic oligonucleotide
guagccagcgcaugucugu

SEQ ID NO: 1779780 - RNA, 19 nt, Artificial Sequence
  Description of Artificial Sequence: Synthetic oligonucleotide
ggacgcuggugaaacgccg

SEQ ID NO: 1779781 - RNA, 19 nt, Artificial Sequence
  Description of Artificial Sequence: Synthetic oligonucleotide
gggguauacacaagaguga

SEQ ID NO: 1779782 - RNA, 19 nt, Artificial Sequence
  Description of Artificial Sequence: Synthetic oligonucleotide
gggugcaauaacuugguuu

SEQ ID NO: 1779783 - RNA, 19 nt, Artificial Sequence
  Description of Artificial Sequence: Synthetic oligonucleotide
caucagaguucacuggggu

SEQ ID NO: 1779784 - RNA, 19 nt, Artificial Sequence
  Description of Artificial Sequence: Synthetic oligonucleotide
acguagaggcugcccacau

SEQ ID NO: 1779785 - RNA, 19 nt, Artificial Sequence
  Description of Artificial Sequence: Synthetic oligonucleotide
ggcugcagagcccaucaga

SEQ ID NO: 1779786 - RNA, 19 nt, Artificial Sequence
  Description of Artificial Sequence: Synthetic oligonucleotide
cauagagagcugcaucagu

SEQ ID NO: 1779787 - RNA, 19 nt, Artificial Sequence
  Description of Artificial Sequence: Synthetic oligonucleotide
gcccgggccgcucagcgcg

SEQ ID NO: 1779788 - RNA, 19 nt, Artificial Sequence
  Description of Artificial Sequence: Synthetic oligonucleotide
acgccgcuugaugacagca

SEQ ID NO: 1779789 - RNA, 19 nt, Artificial Sequence
  Description of Artificial Sequence: Synthetic oligonucleotide
cagcacgcagagaggggac

SEQ ID NO: 1779790 - RNA, 19 nt, Artificial Sequence
  Description of Artificial Sequence: Synthetic oligonucleotide
gcaauaacuugguuucgua

SEQ ID NO: 1779791 - RNA, 19 nt, Artificial Sequence
  Description of Artificial Sequence: Synthetic oligonucleotide
cugucaggucacacgggca

SEQ ID NO: 1779792 - RNA, 19 nt, Artificial Sequence
  Description of Artificial Sequence: Synthetic oligonucleotide
gacaaccuucagcccaucu

SEQ ID NO: 1779793 - RNA, 19 nt, Artificial Sequence
  Description of Artificial Sequence: Synthetic oligonucleotide
uccacacguagaggcugcc

SEQ ID NO: 1779794 - RNA, 19 nt, Artificial Sequence
  Description of Artificial Sequence: Synthetic oligonucleotide
cuccuacggauuuuguccu

SEQ ID NO: 1779795 - RNA, 19 nt, Artificial Sequence
  Description of Artificial Sequence: Synthetic oligonucleotide
gcuuuggcggaaacguagc

SEQ ID NO: 1779796 - RNA, 19 nt, Artificial Sequence
  Description of Artificial Sequence: Synthetic oligonucleotide
cccacauaggagcaggcga

SEQ ID NO: 1779797 - RNA, 19 nt, Artificial Sequence
  Description of Artificial Sequence: Synthetic oligonucleotide
uuguccccuccacguccag

SEQ ID NO: 1779798 - RNA, 19 nt, Artificial Sequence
  Description of Artificial Sequence: Synthetic oligonucleotide
gccguguaagcaccaaaga

SEQ ID NO: 1779799 - RNA, 19 nt, Artificial Sequence
  Description of Artificial Sequence: Synthetic oligonucleotide
aggcugcacccuuuggaua

SEQ ID NO: 1779800 - RNA, 19 nt, Artificial Sequence
  Description of Artificial Sequence: Synthetic oligonucleotide
agccagcgcaugucuguga

SEQ ID NO: 1779801 - RNA, 19 nt, Artificial Sequence
  Description of Artificial Sequence: Synthetic oligonucleotide
ccggccgcgacaccgacag

SEQ ID NO: 1779802 - RNA, 19 nt, Artificial Sequence
  Description of Artificial Sequence: Synthetic oligonucleotide
ccaagaacgaggggccagg

SEQ ID NO: 1779803 - RNA, 19 nt, Artificial Sequence
  Description of Artificial Sequence: Synthetic oligonucleotide
cucccuugcaguauuccau

SEQ ID NO: 1779804 - RNA, 19 nt, Artificial Sequence
  Description of Artificial Sequence: Synthetic oligonucleotide
agggugcaauaacuugguu

SEQ ID NO: 1779805 - RNA, 19 nt, Artificial Sequence
  Description of Artificial Sequence: Synthetic oligonucleotide
gagugauggucaggagcac

SEQ ID NO: 1779806 - RNA, 19 nt, Artificial Sequence
  Description of Artificial Sequence: Synthetic oligonucleotide
gcccacauaggagcaggcg

SEQ ID NO: 1779807 - RNA, 19 nt, Artificial Sequence
  Description of Artificial Sequence: Synthetic oligonucleotide
uccuacggauuuuguccuu

SEQ ID NO: 1779808 - RNA, 19 nt, Artificial Sequence
  Description of Artificial Sequence: Synthetic oligonucleotide
caagcccggaacaccagcu

SEQ ID NO: 1779809 - RNA, 19 nt, Artificial Sequence
  Description of Artificial Sequence: Synthetic oligonucleotide
cgcgacaccgacaguagac

SEQ ID NO: 1779810 - RNA, 19 nt, Artificial Sequence
  Description of Artificial Sequence: Synthetic oligonucleotide
cuggugaaacgccgcuuga

SEQ ID NO: 1779811 - RNA, 19 nt, Artificial Sequence
  Description of Artificial Sequence: Synthetic oligonucleotide
cacgggcaauccauagaga

SEQ ID NO: 1779812 - RNA, 19 nt, Artificial Sequence
  Description of Artificial Sequence: Synthetic oligonucleotide
gguccgucagggguugaag

SEQ ID NO: 1779813 - RNA, 19 nt, Artificial Sequence
  Description of Artificial Sequence: Synthetic oligonucleotide
gcgggcccaagaacgaggg

SEQ ID NO: 1779814 - RNA, 19 nt, Artificial Sequence
  Description of Artificial Sequence: Synthetic oligonucleotide
gagcagugaugugccuggc

SEQ ID NO: 1779815 - RNA, 19 nt, Artificial Sequence
  Description of Artificial Sequence: Synthetic oligonucleotide
gacagcgguguaggagaac

SEQ ID NO: 1779816 - RNA, 19 nt, Artificial Sequence
  Description of Artificial Sequence: Synthetic oligonucleotide
ccauguaguugcagaagga

SEQ ID NO: 1779817 - RNA, 19 nt, Artificial Sequence
  Description of Artificial Sequence: Synthetic oligonucleotide
uggcagagaacuggcccua

SEQ ID NO: 1779818 - RNA, 19 nt, Artificial Sequence
  Description of Artificial Sequence: Synthetic oligonucleotide
caccgacaguagacgcagc

SEQ ID NO: 1779819 - RNA, 19 nt, Artificial Sequence
  Description of Artificial Sequence: Synthetic oligonucleotide
cuggcccuaucaggugucc

SEQ ID NO: 1779820 - RNA, 19 nt, Artificial Sequence
  Description of Artificial Sequence: Synthetic oligonucleotide
gucaagggugcaauaacuu

SEQ ID NO: 1779821 - RNA, 19 nt, Artificial Sequence
  Description of Artificial Sequence: Synthetic oligonucleotide
uggcccuaucagguguccu

SEQ ID NO: 1779822 - RNA, 19 nt, Artificial Sequence
  Description of Artificial Sequence: Synthetic oligonucleotide
cuuuggcggaaacguagcu

SEQ ID NO: 1779823 - RNA, 19 nt, Artificial Sequence
  Description of Artificial Sequence: Synthetic oligonucleotide
cagcgcggcugacucgggc

SEQ ID NO: 1779824 - RNA, 19 nt, Artificial Sequence
  Description of Artificial Sequence: Synthetic oligonucleotide
cgacaccgacaguagacgc

SEQ ID NO: 1779825 - RNA, 19 nt, Artificial Sequence
  Description of Artificial Sequence: Synthetic oligonucleotide
ugugaggcagcgggcccaa

SEQ ID NO: 1779826 - RNA, 19 nt, Artificial Sequence
  Description of Artificial Sequence: Synthetic oligonucleotide
ccgacaguagacgcagccc

SEQ ID NO: 1779827 - RNA, 19 nt, Artificial Sequence
  Description of Artificial Sequence: Synthetic oligonucleotide
gcacacggcagggaagccc

SEQ ID NO: 1779828 - RNA, 19 nt, Artificial Sequence
  Description of Artificial Sequence: Synthetic oligonucleotide
ggguauacacaagagugau

SEQ ID NO: 1779829 - RNA, 19 nt, Artificial Sequence
  Description of Artificial Sequence: Synthetic oligonucleotide
gcgcacacggcagggaagc

SEQ ID NO: 1779830 - RNA, 19 nt, Artificial Sequence
  Description of Artificial Sequence: Synthetic oligonucleotide
cugcgcacacggcagggaa

SEQ ID NO: 1779831 - RNA, 19 nt, Artificial Sequence
  Description of Artificial Sequence: Synthetic oligonucleotide
ggcugcacccuuuggauau

SEQ ID NO: 1779832 - RNA, 19 nt, Artificial Sequence
  Description of Artificial Sequence: Synthetic oligonucleotide
cacauaggagcaggcgaga

SEQ ID NO: 1779833 - RNA, 19 nt, Artificial Sequence
  Description of Artificial Sequence: Synthetic oligonucleotide
cggacacccagcagcacag

SEQ ID NO: 1779834 - RNA, 19 nt, Artificial Sequence
  Description of Artificial Sequence: Synthetic oligonucleotide
cuacggauuuuguccuugu

SEQ ID NO: 1779835 - RNA, 19 nt, Artificial Sequence
  Description of Artificial Sequence: Synthetic oligonucleotide
cagcgggcccaagaacgag

SEQ ID NO: 1779836 - RNA, 19 nt, Artificial Sequence
  Description of Artificial Sequence: Synthetic oligonucleotide
ccaggacgcuggugaaacg

SEQ ID NO: 1779837 - RNA, 19 nt, Artificial Sequence
  Description of Artificial Sequence: Synthetic oligonucleotide
aggcgagacugaagcagga

SEQ ID NO: 1779838 - RNA, 19 nt, Artificial Sequence
  Description of Artificial Sequence: Synthetic oligonucleotide
cacguagaggcugcccaca

SEQ ID NO: 1779839 - RNA, 19 nt, Artificial Sequence
  Description of Artificial Sequence: Synthetic oligonucleotide
cuccucaaccguucuuugu

SEQ ID NO: 1779840 - RNA, 19 nt, Artificial Sequence
  Description of Artificial Sequence: Synthetic oligonucleotide
cugagaucucggggacccc

SEQ ID NO: 1779841 - RNA, 19 nt, Artificial Sequence
  Description of Artificial Sequence: Synthetic oligonucleotide
cugcuuuggcggaaacgua

SEQ ID NO: 1779842 - RNA, 19 nt, Artificial Sequence
  Description of Artificial Sequence: Synthetic oligonucleotide
cucugucaagggugcaaua

SEQ ID NO: 1779843 - RNA, 19 nt, Artificial Sequence
  Description of Artificial Sequence: Synthetic oligonucleotide
ccauagagcuugggguccg

SEQ ID NO: 1779844 - RNA, 19 nt, Artificial Sequence
  Description of Artificial Sequence: Synthetic oligonucleotide
ccucccuugcaguauucca

SEQ ID NO: 1779845 - RNA, 19 nt, Artificial Sequence
  Description of Artificial Sequence: Synthetic oligonucleotide
ccucaaccguucuuuguga

SEQ ID NO: 1779846 - RNA, 19 nt, Artificial Sequence
  Description of Artificial Sequence: Synthetic oligonucleotide
cguagcugcucaauaaugu

SEQ ID NO: 1779847 - RNA, 19 nt, Artificial Sequence
  Description of Artificial Sequence: Synthetic oligonucleotide
gaagcccaucagggugagc

SEQ ID NO: 1779848 - RNA, 19 nt, Artificial Sequence
  Description of Artificial Sequence: Synthetic oligonucleotide
gggguucaacuagcucugg

SEQ ID NO: 1779849 - RNA, 19 nt, Artificial Sequence
  Description of Artificial Sequence: Synthetic oligonucleotide
gcagagaacuggcccuauc

SEQ ID NO: 1779850 - RNA, 19 nt, Artificial Sequence
  Description of Artificial Sequence: Synthetic oligonucleotide
agacagcgguguaggagaa

SEQ ID NO: 1779851 - RNA, 19 nt, Artificial Sequence
  Description of Artificial Sequence: Synthetic oligonucleotide
caagaacgaggggccagga

SEQ ID NO: 1779852 - RNA, 19 nt, Artificial Sequence
  Description of Artificial Sequence: Synthetic oligonucleotide
gggcugcgcacacggcagg

SEQ ID NO: 1779853 - RNA, 19 nt, Artificial Sequence
  Description of Artificial Sequence: Synthetic oligonucleotide
acgcugcagacaagaagau

SEQ ID NO: 1779854 - RNA, 19 nt, Artificial Sequence
  Description of Artificial Sequence: Synthetic oligonucleotide
ccaggaauaggaucauagu

SEQ ID NO: 1779855 - RNA, 19 nt, Artificial Sequence
  Description of Artificial Sequence: Synthetic oligonucleotide
ggcugcgcacacggcaggg

SEQ ID NO: 1779856 - RNA, 19 nt, Artificial Sequence
  Description of Artificial Sequence: Synthetic oligonucleotide
uggagaccaccaggacgcu

SEQ ID NO: 1779857 - RNA, 19 nt, Artificial Sequence
  Description of Artificial Sequence: Synthetic oligonucleotide
cccaagaacgaggggccag

SEQ ID NO: 1779858 - RNA, 19 nt, Artificial Sequence
  Description of Artificial Sequence: Synthetic oligonucleotide
ggagaccaccaggacgcug

SEQ ID NO: 1779859 - RNA, 19 nt, Artificial Sequence
  Description of Artificial Sequence: Synthetic oligonucleotide
cagggaagcccauguaguu

SEQ ID NO: 1779860 - RNA, 19 nt, Artificial Sequence
  Description of Artificial Sequence: Synthetic oligonucleotide
gcagagcccaucagaguuc

SEQ ID NO: 1779861 - RNA, 19 nt, Artificial Sequence
  Description of Artificial Sequence: Synthetic oligonucleotide
ggccgcgacaccgacagua

SEQ ID NO: 1779862 - RNA, 19 nt, Artificial Sequence
  Description of Artificial Sequence: Synthetic oligonucleotide
gccgcgacaccgacaguag

SEQ ID NO: 1779863 - RNA, 19 nt, Artificial Sequence
  Description of Artificial Sequence: Synthetic oligonucleotide
ggcaauccauagagagcug

SEQ ID NO: 1779864 - RNA, 19 nt, Artificial Sequence
  Description of Artificial Sequence: Synthetic oligonucleotide
cgcaugucugugaggcagc

SEQ ID NO: 1779865 - RNA, 19 nt, Artificial Sequence
  Description of Artificial Sequence: Synthetic oligonucleotide
ggcuggaugccagugaguu

SEQ ID NO: 1779866 - RNA, 19 nt, Artificial Sequence
  Description of Artificial Sequence: Synthetic oligonucleotide
gucagggguugaagcaaaa

SEQ ID NO: 1779867 - RNA, 19 nt, Artificial Sequence
  Description of Artificial Sequence: Synthetic oligonucleotide
ggcagcauacaagcccgga

SEQ ID NO: 1779868 - RNA, 19 nt, Artificial Sequence
  Description of Artificial Sequence: Synthetic oligonucleotide
ggaaacguagcugcucaau

SEQ ID NO: 1779869 - RNA, 19 nt, Artificial Sequence
  Description of Artificial Sequence: Synthetic oligonucleotide
cuccggccgcgacaccgac

SEQ ID NO: 1779870 - RNA, 19 nt, Artificial Sequence
  Description of Artificial Sequence: Synthetic oligonucleotide
cuuuggauaucugcuccuu

SEQ ID NO: 1779871 - RNA, 19 nt, Artificial Sequence
  Description of Artificial Sequence: Synthetic oligonucleotide
cccucccuugcaguauucc

SEQ ID NO: 1779872 - RNA, 19 nt, Artificial Sequence
  Description of Artificial Sequence: Synthetic oligonucleotide
cccacaccaagagcauagc

SEQ ID NO: 1779873 - RNA, 19 nt, Artificial Sequence
  Description of Artificial Sequence: Synthetic oligonucleotide
ccacacguagaggcugccc

SEQ ID NO: 1779874 - RNA, 19 nt, Artificial Sequence
  Description of Artificial Sequence: Synthetic oligonucleotide
cacggacacccagcagcac

SEQ ID NO: 1779875 - RNA, 19 nt, Artificial Sequence
  Description of Artificial Sequence: Synthetic oligonucleotide
cgcucagcgcggcugacuc

SEQ ID NO: 1779876 - RNA, 19 nt, Artificial Sequence
  Description of Artificial Sequence: Synthetic oligonucleotide
gaaggcugccauagagcuu

SEQ ID NO: 1779877 - RNA, 19 nt, Artificial Sequence
  Description of Artificial Sequence: Synthetic oligonucleotide
gcagaaggaguggcagaga

SEQ ID NO: 1779878 - RNA, 19 nt, Artificial Sequence
  Description of Artificial Sequence: Synthetic oligonucleotide
gccgcuccggccgcgacac

SEQ ID NO: 1779879 - RNA, 19 nt, Artificial Sequence
  Description of Artificial Sequence: Synthetic oligonucleotide
gguuucguagccagcgcau

SEQ ID NO: 1779880 - RNA, 19 nt, Artificial Sequence
  Description of Artificial Sequence: Synthetic oligonucleotide
caguagggucucugaggcu

SEQ ID NO: 1779881 - RNA, 19 nt, Artificial Sequence
  Description of Artificial Sequence: Synthetic oligonucleotide
gcagcgggcccaagaacga

SEQ ID NO: 1779882 - RNA, 19 nt, Artificial Sequence
  Description of Artificial Sequence: Synthetic oligonucleotide
cugccgcuccggccgcgac

SEQ ID NO: 1779883 - RNA, 19 nt, Artificial Sequence
  Description of Artificial Sequence: Synthetic oligonucleotide
cacgcugcuuuggcggaaa

SEQ ID NO: 1779884 - RNA, 19 nt, Artificial Sequence
  Description of Artificial Sequence: Synthetic oligonucleotide
ccagcugcuccucaaccgu

SEQ ID NO: 1779885 - RNA, 19 nt, Artificial Sequence
  Description of Artificial Sequence: Synthetic oligonucleotide
gcugcuccucaaccguucu

SEQ ID NO: 1779886 - RNA, 19 nt, Artificial Sequence
  Description of Artificial Sequence: Synthetic oligonucleotide
gcacgcaaaggggaaggcu

SEQ ID NO: 1779887 - RNA, 19 nt, Artificial Sequence
  Description of Artificial Sequence: Synthetic oligonucleotide
gggccgcucagcgcggcug

SEQ ID NO: 1779888 - RNA, 19 nt, Artificial Sequence
  Description of Artificial Sequence: Synthetic oligonucleotide
cagcuccuacggauuuugu

SEQ ID NO: 1779889 - RNA, 19 nt, Artificial Sequence
  Description of Artificial Sequence: Synthetic oligonucleotide
ggccgcucagcgcggcuga

SEQ ID NO: 1779890 - RNA, 19 nt, Artificial Sequence
  Description of Artificial Sequence: Synthetic oligonucleotide
cugcacccuuuggauaucu

SEQ ID NO: 1779891 - RNA, 19 nt, Artificial Sequence
  Description of Artificial Sequence: Synthetic oligonucleotide
gucaggucacacgggcaau

SEQ ID NO: 1779892 - RNA, 19 nt, Artificial Sequence
  Description of Artificial Sequence: Synthetic oligonucleotide
gcccuaucagguguccugu

SEQ ID NO: 1779893 - RNA, 19 nt, Artificial Sequence
  Description of Artificial Sequence: Synthetic oligonucleotide
ccgucagggguugaagcaa

SEQ ID NO: 1779894 - RNA, 19 nt, Artificial Sequence
  Description of Artificial Sequence: Synthetic oligonucleotide
cgucagggguugaagcaaa

SEQ ID NO: 1779895 - RNA, 19 nt, Artificial Sequence
  Description of Artificial Sequence: Synthetic oligonucleotide
gcugcgcacacggcaggga

SEQ ID NO: 1779896 - RNA, 19 nt, Artificial Sequence
  Description of Artificial Sequence: Synthetic oligonucleotide
gcggcugacucgggcugcc

SEQ ID NO: 1779897 - RNA, 19 nt, Artificial Sequence
  Description of Artificial Sequence: Synthetic oligonucleotide
ccaucagggugagcaguga

SEQ ID NO: 1779898 - RNA, 19 nt, Artificial Sequence
  Description of Artificial Sequence: Synthetic oligonucleotide
ggguccgucagggguugaa

SEQ ID NO: 1779899 - RNA, 19 nt, Artificial Sequence
  Description of Artificial Sequence: Synthetic oligonucleotide
gcccaagaacgaggggcca

SEQ ID NO: 1779900 - RNA, 19 nt, Artificial Sequence
  Description of Artificial Sequence: Synthetic oligonucleotide
cauagagcuugggguccgu

SEQ ID NO: 1779901 - RNA, 19 nt, Artificial Sequence
  Description of Artificial Sequence: Synthetic oligonucleotide
cuuggucccugggguucaa

SEQ ID NO: 1779902 - RNA, 19 nt, Artificial Sequence
  Description of Artificial Sequence: Synthetic oligonucleotide
ccgcgacaccgacaguaga

SEQ ID NO: 1779903 - RNA, 19 nt, Artificial Sequence
  Description of Artificial Sequence: Synthetic oligonucleotide
cccgggccgcucagcgcgg

SEQ ID NO: 1779904 - RNA, 19 nt, Artificial Sequence
  Description of Artificial Sequence: Synthetic oligonucleotide
cacagcuccuacggauuuu

SEQ ID NO: 1779905 - RNA, 19 nt, Artificial Sequence
  Description of Artificial Sequence: Synthetic oligonucleotide
gcuccggccgcgacaccga

SEQ ID NO: 1779906 - RNA, 19 nt, Artificial Sequence
  Description of Artificial Sequence: Synthetic oligonucleotide
gcccaucugucaggucaca

SEQ ID NO: 1779907 - RNA, 19 nt, Artificial Sequence
  Description of Artificial Sequence: Synthetic oligonucleotide
gcucgcucuuccacacgua

SEQ ID NO: 1779908 - RNA, 19 nt, Artificial Sequence
  Description of Artificial Sequence: Synthetic oligonucleotide
cgcggcugacucgggcugc

SEQ ID NO: 1779909 - RNA, 19 nt, Artificial Sequence
  Description of Artificial Sequence: Synthetic oligonucleotide
gccgcucagcgcggcugac

SEQ ID NO: 1779910 - RNA, 19 nt, Artificial Sequence
  Description of Artificial Sequence: Synthetic oligonucleotide
cggcugacucgggcugccg

SEQ ID NO: 1779911 - RNA, 19 nt, Artificial Sequence
  Description of Artificial Sequence: Synthetic oligonucleotide
ccgggccgcucagcgcggc

SEQ ID NO: 1779912 - RNA, 19 nt, Artificial Sequence
  Description of Artificial Sequence: Synthetic oligonucleotide
gggguccgucagggguuga

SEQ ID NO: 1779913 - RNA, 19 nt, Artificial Sequence
  Description of Artificial Sequence: Synthetic oligonucleotide
ccgcuccggccgcgacacc

SEQ ID NO: 1779914 - RNA, 19 nt, Artificial Sequence
  Description of Artificial Sequence: Synthetic oligonucleotide
ccgcucagcgcggcugacu

SEQ ID NO: 1779915 - RNA, 19 nt, Artificial Sequence
  Description of Artificial Sequence: Synthetic oligonucleotide
cgcuggugaaacgccgcuu

SEQ ID NO: 1779916 - RNA, 19 nt, Artificial Sequence
  Description of Artificial Sequence: Synthetic oligonucleotide
cgggccgcucagcgcggcu

SEQ ID NO: 1779917 - RNA, 19 nt, Artificial Sequence
  Description of Artificial Sequence: Synthetic oligonucleotide
cggccgcgacaccgacagu

SEQ ID NO: 1779918 - RNA, 19 nt, Artificial Sequence
  Description of Artificial Sequence: Synthetic oligonucleotide
uuugccagagagaugaagg

SEQ ID NO: 1779919 - RNA, 19 nt, Artificial Sequence
  Description of Artificial Sequence: Synthetic oligonucleotide
aauugguuuggcuaccagg

SEQ ID NO: 1779920 - RNA, 19 nt, Artificial Sequence
  Description of Artificial Sequence: Synthetic oligonucleotide
gaacucaacaagcugagcc

SEQ ID NO: 1779921 - RNA, 19 nt, Artificial Sequence
  Description of Artificial Sequence: Synthetic oligonucleotide
cuuguaagccaccagagcc

SEQ ID NO: 1779922 - RNA, 19 nt, Artificial Sequence
  Description of Artificial Sequence: Synthetic oligonucleotide
aaagugcuugggcagaggg

SEQ ID NO: 1779923 - RNA, 19 nt, Artificial Sequence
  Description of Artificial Sequence: Synthetic oligonucleotide
acugaauugguuuggcuac

SEQ ID NO: 1779924 - RNA, 19 nt, Artificial Sequence
  Description of Artificial Sequence: Synthetic oligonucleotide
aaaucgagcagccacccug

SEQ ID NO: 1779925 - RNA, 19 nt, Artificial Sequence
  Description of Artificial Sequence: Synthetic oligonucleotide
ugacaguucaaccagugcu

SEQ ID NO: 1779926 - RNA, 19 nt, Artificial Sequence
  Description of Artificial Sequence: Synthetic oligonucleotide
auaguucacaaugaggaac

SEQ ID NO: 1779927 - RNA, 19 nt, Artificial Sequence
  Description of Artificial Sequence: Synthetic oligonucleotide
acucgagacccacugaccc

SEQ ID NO: 1779928 - RNA, 19 nt, Artificial Sequence
  Description of Artificial Sequence: Synthetic oligonucleotide
accaaauacaauucccaag

SEQ ID NO: 1779929 - RNA, 19 nt, Artificial Sequence
  Description of Artificial Sequence: Synthetic oligonucleotide
aacucaacaagcugagccu

SEQ ID NO: 1779930 - RNA, 19 nt, Artificial Sequence
  Description of Artificial Sequence: Synthetic oligonucleotide
ugguuuggcuaccagguag

SEQ ID NO: 1779931 - RNA, 19 nt, Artificial Sequence
  Description of Artificial Sequence: Synthetic oligonucleotide
aaccacguguguuaggacu

SEQ ID NO: 1779932 - RNA, 19 nt, Artificial Sequence
  Description of Artificial Sequence: Synthetic oligonucleotide
caacuuuccgguaaccccg

SEQ ID NO: 1779933 - RNA, 19 nt, Artificial Sequence
  Description of Artificial Sequence: Synthetic oligonucleotide
uucaaaucgagcagccacc

SEQ ID NO: 1779934 - RNA, 19 nt, Artificial Sequence
  Description of Artificial Sequence: Synthetic oligonucleotide
cuucaaaucgagcagccac

SEQ ID NO: 1779935 - RNA, 19 nt, Artificial Sequence
  Description of Artificial Sequence: Synthetic oligonucleotide
ugggugaucucaaagugcu

SEQ ID NO: 1779936 - RNA, 19 nt, Artificial Sequence
  Description of Artificial Sequence: Synthetic oligonucleotide
gaggagaguuuccugacag

SEQ ID NO: 1779937 - RNA, 19 nt, Artificial Sequence
  Description of Artificial Sequence: Synthetic oligonucleotide
aguucaaccagugcucggc

SEQ ID NO: 1779938 - RNA, 19 nt, Artificial Sequence
  Description of Artificial Sequence: Synthetic oligonucleotide
agcgaauaaucucagggcu

SEQ ID NO: 1779939 - RNA, 19 nt, Artificial Sequence
  Description of Artificial Sequence: Synthetic oligonucleotide
cucagugucagcacaacug

SEQ ID NO: 1779940 - RNA, 19 nt, Artificial Sequence
  Description of Artificial Sequence: Synthetic oligonucleotide
ucaggauuguggcuggacc

SEQ ID NO: 1779941 - RNA, 19 nt, Artificial Sequence
  Description of Artificial Sequence: Synthetic oligonucleotide
aauacuucacuggcuggcg

SEQ ID NO: 1779942 - RNA, 19 nt, Artificial Sequence
  Description of Artificial Sequence: Synthetic oligonucleotide
gagcgaauaaucucagggc

SEQ ID NO: 1779943 - RNA, 19 nt, Artificial Sequence
  Description of Artificial Sequence: Synthetic oligonucleotide
uccuuucccaacuuuccgg

SEQ ID NO: 1779944 - RNA, 19 nt, Artificial Sequence
  Description of Artificial Sequence: Synthetic oligonucleotide
agggagagacacuguaacc

SEQ ID NO: 1779945 - RNA, 19 nt, Artificial Sequence
  Description of Artificial Sequence: Synthetic oligonucleotide
uguguuaggacuucuccaa

SEQ ID NO: 1779946 - RNA, 19 nt, Artificial Sequence
  Description of Artificial Sequence: Synthetic oligonucleotide
ugacuggucguacaccucc

SEQ ID NO: 1779947 - RNA, 19 nt, Artificial Sequence
  Description of Artificial Sequence: Synthetic oligonucleotide
ucuaucucagccgugcacc

SEQ ID NO: 1779948 - RNA, 19 nt, Artificial Sequence
  Description of Artificial Sequence: Synthetic oligonucleotide
aaaucgcuuaaggacacug

SEQ ID NO: 1779949 - RNA, 19 nt, Artificial Sequence
  Description of Artificial Sequence: Synthetic oligonucleotide
auucccaaguuguuggcag

SEQ ID NO: 1779950 - RNA, 19 nt, Artificial Sequence
  Description of Artificial Sequence: Synthetic oligonucleotide
uacugaauugguuuggcua

SEQ ID NO: 1779951 - RNA, 19 nt, Artificial Sequence
  Description of Artificial Sequence: Synthetic oligonucleotide
accggguaaccacaaaggg

SEQ ID NO: 1779952 - RNA, 19 nt, Artificial Sequence
  Description of Artificial Sequence: Synthetic oligonucleotide
uccucacacagcuuguaag

SEQ ID NO: 1779953 - RNA, 19 nt, Artificial Sequence
  Description of Artificial Sequence: Synthetic oligonucleotide
uagcaaguccucaggauug

SEQ ID NO: 1779954 - RNA, 19 nt, Artificial Sequence
  Description of Artificial Sequence: Synthetic oligonucleotide
uucagcgagcgaauaaucu

SEQ ID NO: 1779955 - RNA, 19 nt, Artificial Sequence
  Description of Artificial Sequence: Synthetic oligonucleotide
agacccacugacccgauag

SEQ ID NO: 1779956 - RNA, 19 nt, Artificial Sequence
  Description of Artificial Sequence: Synthetic oligonucleotide
acggugcucuaucucagcc

SEQ ID NO: 1779957 - RNA, 19 nt, Artificial Sequence
  Description of Artificial Sequence: Synthetic oligonucleotide
uacaauucccaaguuguug

SEQ ID NO: 1779958 - RNA, 19 nt, Artificial Sequence
  Description of Artificial Sequence: Synthetic oligonucleotide
cacgggaucagugagcucc

SEQ ID NO: 1779959 - RNA, 19 nt, Artificial Sequence
  Description of Artificial Sequence: Synthetic oligonucleotide
augaggagaguuuccugac

SEQ ID NO: 1779960 - RNA, 19 nt, Artificial Sequence
  Description of Artificial Sequence: Synthetic oligonucleotide
cuggggacuagauucgagg

SEQ ID NO: 1779961 - RNA, 19 nt, Artificial Sequence
  Description of Artificial Sequence: Synthetic oligonucleotide
uguuaggacuucuccaaga

SEQ ID NO: 1779962 - RNA, 19 nt, Artificial Sequence
  Description of Artificial Sequence: Synthetic oligonucleotide
aguggaaagggaccacggg

SEQ ID NO: 1779963 - RNA, 19 nt, Artificial Sequence
  Description of Artificial Sequence: Synthetic oligonucleotide
aaucgcuuaaggacacugg

SEQ ID NO: 1779964 - RNA, 19 nt, Artificial Sequence
  Description of Artificial Sequence: Synthetic oligonucleotide
agugacuggucguacaccu

SEQ ID NO: 1779965 - RNA, 19 nt, Artificial Sequence
  Description of Artificial Sequence: Synthetic oligonucleotide
ucaacucaguccugggucc

SEQ ID NO: 1779966 - RNA, 19 nt, Artificial Sequence
  Description of Artificial Sequence: Synthetic oligonucleotide
aagggcacggugcucuauc

SEQ ID NO: 1779967 - RNA, 19 nt, Artificial Sequence
  Description of Artificial Sequence: Synthetic oligonucleotide
auuguggcuggacccuucc

SEQ ID NO: 1779968 - RNA, 19 nt, Artificial Sequence
  Description of Artificial Sequence: Synthetic oligonucleotide
uuaggacuucuccaagaug

SEQ ID NO: 1779969 - RNA, 19 nt, Artificial Sequence
  Description of Artificial Sequence: Synthetic oligonucleotide
acugacccgauagaugccc

SEQ ID NO: 1779970 - RNA, 19 nt, Artificial Sequence
  Description of Artificial Sequence: Synthetic oligonucleotide
cuagauucgaggagugcag

SEQ ID NO: 1779971 - RNA, 19 nt, Artificial Sequence
  Description of Artificial Sequence: Synthetic oligonucleotide
ugaaauggccccgggauug

SEQ ID NO: 1779972 - RNA, 19 nt, Artificial Sequence
  Description of Artificial Sequence: Synthetic oligonucleotide
acagccguuccacacgcac

SEQ ID NO: 1779973 - RNA, 19 nt, Artificial Sequence
  Description of Artificial Sequence: Synthetic oligonucleotide
agacacuguaaccacgugu

SEQ ID NO: 1779974 - RNA, 19 nt, Artificial Sequence
  Description of Artificial Sequence: Synthetic oligonucleotide
gacacagucucacugucca

SEQ ID NO: 1779975 - RNA, 19 nt, Artificial Sequence
  Description of Artificial Sequence: Synthetic oligonucleotide
agagaugaaggcgucguag

SEQ ID NO: 1779976 - RNA, 19 nt, Artificial Sequence
  Description of Artificial Sequence: Synthetic oligonucleotide
uucgaggagugcaggagcc

SEQ ID NO: 1779977 - RNA, 19 nt, Artificial Sequence
  Description of Artificial Sequence: Synthetic oligonucleotide
uugccagagagaugaaggc

SEQ ID NO: 1779978 - RNA, 19 nt, Artificial Sequence
  Description of Artificial Sequence: Synthetic oligonucleotide
uggucguacaccuccccgg

SEQ ID NO: 1779979 - RNA, 19 nt, Artificial Sequence
  Description of Artificial Sequence: Synthetic oligonucleotide
ucagcgagcgaauaaucuc

SEQ ID NO: 1779980 - RNA, 19 nt, Artificial Sequence
  Description of Artificial Sequence: Synthetic oligonucleotide
aagcuggacaguugaugag

SEQ ID NO: 1779981 - RNA, 19 nt, Artificial Sequence
  Description of Artificial Sequence: Synthetic oligonucleotide
gucguagaaguggaaaggg

SEQ ID NO: 1779982 - RNA, 19 nt, Artificial Sequence
  Description of Artificial Sequence: Synthetic oligonucleotide
uccagcuuugagaguagcc

SEQ ID NO: 1779983 - RNA, 19 nt, Artificial Sequence
  Description of Artificial Sequence: Synthetic oligonucleotide
aucgcuuaaggacacuggu

SEQ ID NO: 1779984 - RNA, 19 nt, Artificial Sequence
  Description of Artificial Sequence: Synthetic oligonucleotide
caccggguaaccacaaagg

SEQ ID NO: 1779985 - RNA, 19 nt, Artificial Sequence
  Description of Artificial Sequence: Synthetic oligonucleotide
gugaccggaguccagcagg

SEQ ID NO: 1779986 - RNA, 19 nt, Artificial Sequence
  Description of Artificial Sequence: Synthetic oligonucleotide
caggauuguggcuggaccc

SEQ ID NO: 1779987 - RNA, 19 nt, Artificial Sequence
  Description of Artificial Sequence: Synthetic oligonucleotide
uacccuacugaauugguuu

SEQ ID NO: 1779988 - RNA, 19 nt, Artificial Sequence
  Description of Artificial Sequence: Synthetic oligonucleotide
uuuccgguaaccccgucuc

SEQ ID NO: 1779989 - RNA, 19 nt, Artificial Sequence
  Description of Artificial Sequence: Synthetic oligonucleotide
ucguagaaguggaaaggga

SEQ ID NO: 1779990 - RNA, 19 nt, Artificial Sequence
  Description of Artificial Sequence: Synthetic oligonucleotide
aaguggaaagggaccacgg

SEQ ID NO: 1779991 - RNA, 19 nt, Artificial Sequence
  Description of Artificial Sequence: Synthetic oligonucleotide
uggcuggcggcugaaaugg

SEQ ID NO: 1779992 - RNA, 19 nt, Artificial Sequence
  Description of Artificial Sequence: Synthetic oligonucleotide
cugggugaucucaaagugc

SEQ ID NO: 1779993 - RNA, 19 nt, Artificial Sequence
  Description of Artificial Sequence: Synthetic oligonucleotide
acuggugaugucaugagga

SEQ ID NO: 1779994 - RNA, 19 nt, Artificial Sequence
  Description of Artificial Sequence: Synthetic oligonucleotide
aucucagccgugcaccggg

SEQ ID NO: 1779995 - RNA, 19 nt, Artificial Sequence
  Description of Artificial Sequence: Synthetic oligonucleotide
gauucgaggagugcaggag

SEQ ID NO: 1779996 - RNA, 19 nt, Artificial Sequence
  Description of Artificial Sequence: Synthetic oligonucleotide
ucgcuuaaggacacuggug

SEQ ID NO: 1779997 - RNA, 19 nt, Artificial Sequence
  Description of Artificial Sequence: Synthetic oligonucleotide
ugcacuguugagacaguga

SEQ ID NO: 1779998 - RNA, 19 nt, Artificial Sequence
  Description of Artificial Sequence: Synthetic oligonucleotide
caugaggagaguuuccuga

SEQ ID NO: 1779999 - RNA, 19 nt, Artificial Sequence
  Description of Artificial Sequence: Synthetic oligonucleotide
uggggacuagauucgagga

SEQ ID NO: 1780000 - RNA, 19 nt, Artificial Sequence
  Description of Artificial Sequence: Synthetic oligonucleotide
agccguuccacacgcacuc

SEQ ID NO: 1780001 - RNA, 19 nt, Artificial Sequence
  Description of Artificial Sequence: Synthetic oligonucleotide
uguucccaguagcaagucc

SEQ ID NO: 1780002 - RNA, 19 nt, Artificial Sequence
  Description of Artificial Sequence: Synthetic oligonucleotide
agacuucguccccucaaac

SEQ ID NO: 1780003 - RNA, 19 nt, Artificial Sequence
  Description of Artificial Sequence: Synthetic oligonucleotide
agaugggccaccaggugcc

SEQ ID NO: 1780004 - RNA, 19 nt, Artificial Sequence
  Description of Artificial Sequence: Synthetic oligonucleotide
acuguaaccacguguguua

SEQ ID NO: 1780005 - RNA, 19 nt, Artificial Sequence
  Description of Artificial Sequence: Synthetic oligonucleotide
uccccucaaacuaccuccg

SEQ ID NO: 1780006 - RNA, 19 nt, Artificial Sequence
  Description of Artificial Sequence: Synthetic oligonucleotide
aacagaugggccaccaggu

SEQ ID NO: 1780007 - RNA, 19 nt, Artificial Sequence
  Description of Artificial Sequence: Synthetic oligonucleotide
acuucguccccucaaacua

SEQ ID NO: 1780008 - RNA, 19 nt, Artificial Sequence
  Description of Artificial Sequence: Synthetic oligonucleotide
ucaaacuaccuccgugcac

SEQ ID NO: 1780009 - RNA, 19 nt, Artificial Sequence
  Description of Artificial Sequence: Synthetic oligonucleotide
cacacagcuuguaagccac

SEQ ID NO: 1780010 - RNA, 19 nt, Artificial Sequence
  Description of Artificial Sequence: Synthetic oligonucleotide
agaugaguggucuuccuuu

SEQ ID NO: 1780011 - RNA, 19 nt, Artificial Sequence
  Description of Artificial Sequence: Synthetic oligonucleotide
ucaugaggagaguuuccug

SEQ ID NO: 1780012 - RNA, 19 nt, Artificial Sequence
  Description of Artificial Sequence: Synthetic oligonucleotide
acuggucguacaccucccc

SEQ ID NO: 1780013 - RNA, 19 nt, Artificial Sequence
  Description of Artificial Sequence: Synthetic oligonucleotide
uagauucgaggagugcagg

SEQ ID NO: 1780014 - RNA, 19 nt, Artificial Sequence
  Description of Artificial Sequence: Synthetic oligonucleotide
caggagucuccucacacag

SEQ ID NO: 1780015 - RNA, 19 nt, Artificial Sequence
  Description of Artificial Sequence: Synthetic oligonucleotide
aauucccaaguuguuggca

SEQ ID NO: 1780016 - RNA, 19 nt, Artificial Sequence
  Description of Artificial Sequence: Synthetic oligonucleotide
aagaugaguggucuuccuu

SEQ ID NO: 1780017 - RNA, 19 nt, Artificial Sequence
  Description of Artificial Sequence: Synthetic oligonucleotide
gggaauacuucacuggcug

SEQ ID NO: 1780018 - RNA, 19 nt, Artificial Sequence
  Description of Artificial Sequence: Synthetic oligonucleotide
gaauugguuuggcuaccag

SEQ ID NO: 1780019 - RNA, 19 nt, Artificial Sequence
  Description of Artificial Sequence: Synthetic oligonucleotide
cagggagagacacuguaac

SEQ ID NO: 1780020 - RNA, 19 nt, Artificial Sequence
  Description of Artificial Sequence: Synthetic oligonucleotide
guaguuagagucaggcagc

SEQ ID NO: 1780021 - RNA, 19 nt, Artificial Sequence
  Description of Artificial Sequence: Synthetic oligonucleotide
acaguucaaccagugcucg

SEQ ID NO: 1780022 - RNA, 19 nt, Artificial Sequence
  Description of Artificial Sequence: Synthetic oligonucleotide
cagaugggccaccaggugc

SEQ ID NO: 1780023 - RNA, 19 nt, Artificial Sequence
  Description of Artificial Sequence: Synthetic oligonucleotide
ugaggagaguuuccugaca

SEQ ID NO: 1780024 - RNA, 19 nt, Artificial Sequence
  Description of Artificial Sequence: Synthetic oligonucleotide
ucuccaagaugaguggucu

SEQ ID NO: 1780025 - RNA, 19 nt, Artificial Sequence
  Description of Artificial Sequence: Synthetic oligonucleotide
ugcucuaucucagccgugc

SEQ ID NO: 1780026 - RNA, 19 nt, Artificial Sequence
  Description of Artificial Sequence: Synthetic oligonucleotide
cgagcgaauaaucucaggg

SEQ ID NO: 1780027 - RNA, 19 nt, Artificial Sequence
  Description of Artificial Sequence: Synthetic oligonucleotide
uacuucacuggcuggcggc

SEQ ID NO: 1780028 - RNA, 19 nt, Artificial Sequence
  Description of Artificial Sequence: Synthetic oligonucleotide
uugaugagugacuggucgu

SEQ ID NO: 1780029 - RNA, 19 nt, Artificial Sequence
  Description of Artificial Sequence: Synthetic oligonucleotide
ucuucagcgagcgaauaau

SEQ ID NO: 1780030 - RNA, 19 nt, Artificial Sequence
  Description of Artificial Sequence: Synthetic oligonucleotide
accggaguccagcaggcag

SEQ ID NO: 1780031 - RNA, 19 nt, Artificial Sequence
  Description of Artificial Sequence: Synthetic oligonucleotide
cuaucucagccgugcaccg

SEQ ID NO: 1780032 - RNA, 19 nt, Artificial Sequence
  Description of Artificial Sequence: Synthetic oligonucleotide
gauagaugcccugcaggcc

SEQ ID NO: 1780033 - RNA, 19 nt, Artificial Sequence
  Description of Artificial Sequence: Synthetic oligonucleotide
uucguccccucaaacuacc

SEQ ID NO: 1780034 - RNA, 19 nt, Artificial Sequence
  Description of Artificial Sequence: Synthetic oligonucleotide
uccacacgcacucgagacc

SEQ ID NO: 1780035 - RNA, 19 nt, Artificial Sequence
  Description of Artificial Sequence: Synthetic oligonucleotide
caggcaggccaccaaauac

SEQ ID NO: 1780036 - RNA, 19 nt, Artificial Sequence
  Description of Artificial Sequence: Synthetic oligonucleotide
guggaaagggaccacggga

SEQ ID NO: 1780037 - RNA, 19 nt, Artificial Sequence
  Description of Artificial Sequence: Synthetic oligonucleotide
uagccgugcugucuccugg

SEQ ID NO: 1780038 - RNA, 19 nt, Artificial Sequence
  Description of Artificial Sequence: Synthetic oligonucleotide
gauuguguucccaguagca

SEQ ID NO: 1780039 - RNA, 19 nt, Artificial Sequence
  Description of Artificial Sequence: Synthetic oligonucleotide
ucuccccauacccuacuga

SEQ ID NO: 1780040 - RNA, 19 nt, Artificial Sequence
  Description of Artificial Sequence: Synthetic oligonucleotide
cacuggugaugucaugagg

SEQ ID NO: 1780041 - RNA, 19 nt, Artificial Sequence
  Description of Artificial Sequence: Synthetic oligonucleotide
cacagucucacuguccagc

SEQ ID NO: 1780042 - RNA, 19 nt, Artificial Sequence
  Description of Artificial Sequence: Synthetic oligonucleotide
gcuguaguuagagucaggc

SEQ ID NO: 1780043 - RNA, 19 nt, Artificial Sequence
  Description of Artificial Sequence: Synthetic oligonucleotide
cugacaguucaaccagugc

SEQ ID NO: 1780044 - RNA, 19 nt, Artificial Sequence
  Description of Artificial Sequence: Synthetic oligonucleotide
cuccgugcacuguugagac

SEQ ID NO: 1780045 - RNA, 19 nt, Artificial Sequence
  Description of Artificial Sequence: Synthetic oligonucleotide
acccuacugaauugguuug

SEQ ID NO: 1780046 - RNA, 19 nt, Artificial Sequence
  Description of Artificial Sequence: Synthetic oligonucleotide
ucaaccagugcucggccau

SEQ ID NO: 1780047 - RNA, 19 nt, Artificial Sequence
  Description of Artificial Sequence: Synthetic oligonucleotide
agccaagcuggacaguuga

SEQ ID NO: 1780048 - RNA, 19 nt, Artificial Sequence
  Description of Artificial Sequence: Synthetic oligonucleotide
agauucgaggagugcagga

SEQ ID NO: 1780049 - RNA, 19 nt, Artificial Sequence
  Description of Artificial Sequence: Synthetic oligonucleotide
ccaacuuuccgguaacccc

SEQ ID NO: 1780050 - RNA, 19 nt, Artificial Sequence
  Description of Artificial Sequence: Synthetic oligonucleotide
caauucccaaguuguuggc

SEQ ID NO: 1780051 - RNA, 19 nt, Artificial Sequence
  Description of Artificial Sequence: Synthetic oligonucleotide
ccucaaacuaccuccgugc

SEQ ID NO: 1780052 - RNA, 19 nt, Artificial Sequence
  Description of Artificial Sequence: Synthetic oligonucleotide
agcuuguaagccaccagag

SEQ ID NO: 1780053 - RNA, 19 nt, Artificial Sequence
  Description of Artificial Sequence: Synthetic oligonucleotide
aaacuaccuccgugcacug

SEQ ID NO: 1780054 - RNA, 19 nt, Artificial Sequence
  Description of Artificial Sequence: Synthetic oligonucleotide
cuggucguacaccuccccg

SEQ ID NO: 1780055 - RNA, 19 nt, Artificial Sequence
  Description of Artificial Sequence: Synthetic oligonucleotide
gcacuguugagacagugac

SEQ ID NO: 1780056 - RNA, 19 nt, Artificial Sequence
  Description of Artificial Sequence: Synthetic oligonucleotide
uggcagacauucuuguuuu

SEQ ID NO: 1780057 - RNA, 19 nt, Artificial Sequence
  Description of Artificial Sequence: Synthetic oligonucleotide
agaugaaggcgucguagaa

SEQ ID NO: 1780058 - RNA, 19 nt, Artificial Sequence
  Description of Artificial Sequence: Synthetic oligonucleotide
gaaagggaccacgggauca

SEQ ID NO: 1780059 - RNA, 19 nt, Artificial Sequence
  Description of Artificial Sequence: Synthetic oligonucleotide
aggaacucaacaagcugag

SEQ ID NO: 1780060 - RNA, 19 nt, Artificial Sequence
  Description of Artificial Sequence: Synthetic oligonucleotide
uggacccuuccccugcccc

SEQ ID NO: 1780061 - RNA, 19 nt, Artificial Sequence
  Description of Artificial Sequence: Synthetic oligonucleotide
agagacacuguaaccacgu

SEQ ID NO: 1780062 - RNA, 19 nt, Artificial Sequence
  Description of Artificial Sequence: Synthetic oligonucleotide
guguuaggacuucuccaag

SEQ ID NO: 1780063 - RNA, 19 nt, Artificial Sequence
  Description of Artificial Sequence: Synthetic oligonucleotide
uucaaccagugcucggcca

SEQ ID NO: 1780064 - RNA, 19 nt, Artificial Sequence
  Description of Artificial Sequence: Synthetic oligonucleotide
acucaacaagcugagccug

SEQ ID NO: 1780065 - RNA, 19 nt, Artificial Sequence
  Description of Artificial Sequence: Synthetic oligonucleotide
ucagccgugcaccggguaa

SEQ ID NO: 1780066 - RNA, 19 nt, Artificial Sequence
  Description of Artificial Sequence: Synthetic oligonucleotide
ugaauugguuuggcuacca

SEQ ID NO: 1780067 - RNA, 19 nt, Artificial Sequence
  Description of Artificial Sequence: Synthetic oligonucleotide
acuaccuccgugcacuguu

SEQ ID NO: 1780068 - RNA, 19 nt, Artificial Sequence
  Description of Artificial Sequence: Synthetic oligonucleotide
aaggcgucguagaagugga

SEQ ID NO: 1780069 - RNA, 19 nt, Artificial Sequence
  Description of Artificial Sequence: Synthetic oligonucleotide
cagcgagcgaauaaucuca

SEQ ID NO: 1780070 - RNA, 19 nt, Artificial Sequence
  Description of Artificial Sequence: Synthetic oligonucleotide
cguagaaguggaaagggac

SEQ ID NO: 1780071 - RNA, 19 nt, Artificial Sequence
  Description of Artificial Sequence: Synthetic oligonucleotide
aaccagugcucggccauuc

SEQ ID NO: 1780072 - RNA, 19 nt, Artificial Sequence
  Description of Artificial Sequence: Synthetic oligonucleotide
gggauuguguucccaguag

SEQ ID NO: 1780073 - RNA, 19 nt, Artificial Sequence
  Description of Artificial Sequence: Synthetic oligonucleotide
gaauaaucucagggcuggg

SEQ ID NO: 1780074 - RNA, 19 nt, Artificial Sequence
  Description of Artificial Sequence: Synthetic oligonucleotide
agggucuucagcgagcgaa

SEQ ID NO: 1780075 - RNA, 19 nt, Artificial Sequence
  Description of Artificial Sequence: Synthetic oligonucleotide
cucuaucucagccgugcac

SEQ ID NO: 1780076 - RNA, 19 nt, Artificial Sequence
  Description of Artificial Sequence: Synthetic oligonucleotide
gcaccggguaaccacaaag

SEQ ID NO: 1780077 - RNA, 19 nt, Artificial Sequence
  Description of Artificial Sequence: Synthetic oligonucleotide
auuguguucccaguagcaa

SEQ ID NO: 1780078 - RNA, 19 nt, Artificial Sequence
  Description of Artificial Sequence: Synthetic oligonucleotide
aaucgagcagccacccuga

SEQ ID NO: 1780079 - RNA, 19 nt, Artificial Sequence
  Description of Artificial Sequence: Synthetic oligonucleotide
agcuggacaguugaugagu

SEQ ID NO: 1780080 - RNA, 19 nt, Artificial Sequence
  Description of Artificial Sequence: Synthetic oligonucleotide
gaugagugacuggucguac

SEQ ID NO: 1780081 - RNA, 19 nt, Artificial Sequence
  Description of Artificial Sequence: Synthetic oligonucleotide
ucgagacccacugacccga

SEQ ID NO: 1780082 - RNA, 19 nt, Artificial Sequence
  Description of Artificial Sequence: Synthetic oligonucleotide
uccccgggaauacuucacu

SEQ ID NO: 1780083 - RNA, 19 nt, Artificial Sequence
  Description of Artificial Sequence: Synthetic oligonucleotide
uccugacaguucaaccagu

SEQ ID NO: 1780084 - RNA, 19 nt, Artificial Sequence
  Description of Artificial Sequence: Synthetic oligonucleotide
uucccaaguuguuggcaga

SEQ ID NO: 1780085 - RNA, 19 nt, Artificial Sequence
  Description of Artificial Sequence: Synthetic oligonucleotide
aaaaucgcuuaaggacacu

SEQ ID NO: 1780086 - RNA, 19 nt, Artificial Sequence
  Description of Artificial Sequence: Synthetic oligonucleotide
aguggucuuccuuucccaa

SEQ ID NO: 1780087 - RNA, 19 nt, Artificial Sequence
  Description of Artificial Sequence: Synthetic oligonucleotide
gacuagauucgaggagugc

SEQ ID NO: 1780088 - RNA, 19 nt, Artificial Sequence
  Description of Artificial Sequence: Synthetic oligonucleotide
gggagagacacuguaacca

SEQ ID NO: 1780089 - RNA, 19 nt, Artificial Sequence
  Description of Artificial Sequence: Synthetic oligonucleotide
accacgggaucagugagcu

SEQ ID NO: 1780090 - RNA, 19 nt, Artificial Sequence
  Description of Artificial Sequence: Synthetic oligonucleotide
ggaucagugagcuccugca

SEQ ID NO: 1780091 - RNA, 19 nt, Artificial Sequence
  Description of Artificial Sequence: Synthetic oligonucleotide
ugaugagugacuggucgua

SEQ ID NO: 1780092 - RNA, 19 nt, Artificial Sequence
  Description of Artificial Sequence: Synthetic oligonucleotide
gacccgauagaugcccugc

SEQ ID NO: 1780093 - RNA, 19 nt, Artificial Sequence
  Description of Artificial Sequence: Synthetic oligonucleotide
uaguuagagucaggcagcu

SEQ ID NO: 1780094 - RNA, 19 nt, Artificial Sequence
  Description of Artificial Sequence: Synthetic oligonucleotide
ugacccgauagaugcccug

SEQ ID NO: 1780095 - RNA, 19 nt, Artificial Sequence
  Description of Artificial Sequence: Synthetic oligonucleotide
uucccaguagcaaguccuc

SEQ ID NO: 1780096 - RNA, 19 nt, Artificial Sequence
  Description of Artificial Sequence: Synthetic oligonucleotide
caguucaaccagugcucgg

SEQ ID NO: 1780097 - RNA, 19 nt, Artificial Sequence
  Description of Artificial Sequence: Synthetic oligonucleotide
ucgagcagccacccugaac

SEQ ID NO: 1780098 - RNA, 19 nt, Artificial Sequence
  Description of Artificial Sequence: Synthetic oligonucleotide
caccaaauacaauucccaa

SEQ ID NO: 1780099 - RNA, 19 nt, Artificial Sequence
  Description of Artificial Sequence: Synthetic oligonucleotide
gacuucguccccucaaacu

SEQ ID NO: 1780100 - RNA, 19 nt, Artificial Sequence
  Description of Artificial Sequence: Synthetic oligonucleotide
ccgauagaugcccugcagg

SEQ ID NO: 1780101 - RNA, 19 nt, Artificial Sequence
  Description of Artificial Sequence: Synthetic oligonucleotide
uaaccacguguguuaggac

SEQ ID NO: 1780102 - RNA, 19 nt, Artificial Sequence
  Description of Artificial Sequence: Synthetic oligonucleotide
agccgugcugucuccuggg

SEQ ID NO: 1780103 - RNA, 19 nt, Artificial Sequence
  Description of Artificial Sequence: Synthetic oligonucleotide
cuguugagacagugacagg

SEQ ID NO: 1780104 - RNA, 19 nt, Artificial Sequence
  Description of Artificial Sequence: Synthetic oligonucleotide
ccaaauacaauucccaagu

SEQ ID NO: 1780105 - RNA, 19 nt, Artificial Sequence
  Description of Artificial Sequence: Synthetic oligonucleotide
cugaauugguuuggcuacc

SEQ ID NO: 1780106 - RNA, 19 nt, Artificial Sequence
  Description of Artificial Sequence: Synthetic oligonucleotide
cuguaguuagagucaggca

SEQ ID NO: 1780107 - RNA, 19 nt, Artificial Sequence
  Description of Artificial Sequence: Synthetic oligonucleotide
gcuuguaagccaccagagc

SEQ ID NO: 1780108 - RNA, 19 nt, Artificial Sequence
  Description of Artificial Sequence: Synthetic oligonucleotide
ggggacuagauucgaggag

SEQ ID NO: 1780109 - RNA, 19 nt, Artificial Sequence
  Description of Artificial Sequence: Synthetic oligonucleotide
aggagaguuuccugacagu

SEQ ID NO: 1780110 - RNA, 19 nt, Artificial Sequence
  Description of Artificial Sequence: Synthetic oligonucleotide
aggagucuccucacacagc

SEQ ID NO: 1780111 - RNA, 19 nt, Artificial Sequence
  Description of Artificial Sequence: Synthetic oligonucleotide
ggucguacaccuccccggg

SEQ ID NO: 1780112 - RNA, 19 nt, Artificial Sequence
  Description of Artificial Sequence: Synthetic oligonucleotide
uaccuccgugcacuguuga

SEQ ID NO: 1780113 - RNA, 19 nt, Artificial Sequence
  Description of Artificial Sequence: Synthetic oligonucleotide
uugguuuggcuaccaggua

SEQ ID NO: 1780114 - RNA, 19 nt, Artificial Sequence
  Description of Artificial Sequence: Synthetic oligonucleotide
cuguaaccacguguguuag

SEQ ID NO: 1780115 - RNA, 19 nt, Artificial Sequence
  Description of Artificial Sequence: Synthetic oligonucleotide
caaacuaccuccgugcacu

SEQ ID NO: 1780116 - RNA, 19 nt, Artificial Sequence
  Description of Artificial Sequence: Synthetic oligonucleotide
ccugggugaucucaaagug

SEQ ID NO: 1780117 - RNA, 19 nt, Artificial Sequence
  Description of Artificial Sequence: Synthetic oligonucleotide
cccgggaauacuucacugg

SEQ ID NO: 1780118 - RNA, 19 nt, Artificial Sequence
  Description of Artificial Sequence: Synthetic oligonucleotide
ccgggaauacuucacuggc

SEQ ID NO: 1780119 - RNA, 19 nt, Artificial Sequence
  Description of Artificial Sequence: Synthetic oligonucleotide
ggaccacgggaucagugag

SEQ ID NO: 1780120 - RNA, 19 nt, Artificial Sequence
  Description of Artificial Sequence: Synthetic oligonucleotide
uccccauacccuacugaau

SEQ ID NO: 1780121 - RNA, 19 nt, Artificial Sequence
  Description of Artificial Sequence: Synthetic oligonucleotide
cucaaacuaccuccgugca

SEQ ID NO: 1780122 - RNA, 19 nt, Artificial Sequence
  Description of Artificial Sequence: Synthetic oligonucleotide
guuaggacuucuccaagau

SEQ ID NO: 1780123 - RNA, 19 nt, Artificial Sequence
  Description of Artificial Sequence: Synthetic oligonucleotide
cuccccauacccuacugaa

SEQ ID NO: 1780124 - RNA, 19 nt, Artificial Sequence
  Description of Artificial Sequence: Synthetic oligonucleotide
cagugcucggccauucuca

SEQ ID NO: 1780125 - RNA, 19 nt, Artificial Sequence
  Description of Artificial Sequence: Synthetic oligonucleotide
acacgcacucgagacccac

SEQ ID NO: 1780126 - RNA, 19 nt, Artificial Sequence
  Description of Artificial Sequence: Synthetic oligonucleotide
guuccacacgcacucgaga

SEQ ID NO: 1780127 - RNA, 19 nt, Artificial Sequence
  Description of Artificial Sequence: Synthetic oligonucleotide
uccgguaaccccgucucuc

SEQ ID NO: 1780128 - RNA, 19 nt, Artificial Sequence
  Description of Artificial Sequence: Synthetic oligonucleotide
caaagugcuugggcagagg

SEQ ID NO: 1780129 - RNA, 19 nt, Artificial Sequence
  Description of Artificial Sequence: Synthetic oligonucleotide
cucgcugggugcuggggac

SEQ ID NO: 1780130 - RNA, 19 nt, Artificial Sequence
  Description of Artificial Sequence: Synthetic oligonucleotide
guaaccacaaagggcaccu

SEQ ID NO: 1780131 - RNA, 19 nt, Artificial Sequence
  Description of Artificial Sequence: Synthetic oligonucleotide
acguguguuaggacuucuc

SEQ ID NO: 1780132 - RNA, 19 nt, Artificial Sequence
  Description of Artificial Sequence: Synthetic oligonucleotide
cacggugcucuaucucagc

SEQ ID NO: 1780133 - RNA, 19 nt, Artificial Sequence
  Description of Artificial Sequence: Synthetic oligonucleotide
guuuggcuaccagguagag

SEQ ID NO: 1780134 - RNA, 19 nt, Artificial Sequence
  Description of Artificial Sequence: Synthetic oligonucleotide
ggagucuccucacacagcu

SEQ ID NO: 1780135 - RNA, 19 nt, Artificial Sequence
  Description of Artificial Sequence: Synthetic oligonucleotide
ccauacccuacugaauugg

SEQ ID NO: 1780136 - RNA, 19 nt, Artificial Sequence
  Description of Artificial Sequence: Synthetic oligonucleotide
agcgagcgaauaaucucag

SEQ ID NO: 1780137 - RNA, 19 nt, Artificial Sequence
  Description of Artificial Sequence: Synthetic oligonucleotide
gaccacgggaucagugagc

SEQ ID NO: 1780138 - RNA, 19 nt, Artificial Sequence
  Description of Artificial Sequence: Synthetic oligonucleotide
ccaccaaauacaauuccca

SEQ ID NO: 1780139 - RNA, 19 nt, Artificial Sequence
  Description of Artificial Sequence: Synthetic oligonucleotide
gucagagaugcuccucaga

SEQ ID NO: 1780140 - RNA, 19 nt, Artificial Sequence
  Description of Artificial Sequence: Synthetic oligonucleotide
cuguccagcuuugagagua

SEQ ID NO: 1780141 - RNA, 19 nt, Artificial Sequence
  Description of Artificial Sequence: Synthetic oligonucleotide
aggacuucuccaagaugag

SEQ ID NO: 1780142 - RNA, 19 nt, Artificial Sequence
  Description of Artificial Sequence: Synthetic oligonucleotide
guagagcaggcagggagac

SEQ ID NO: 1780143 - RNA, 19 nt, Artificial Sequence
  Description of Artificial Sequence: Synthetic oligonucleotide
guagccgugcugucuccug

SEQ ID NO: 1780144 - RNA, 19 nt, Artificial Sequence
  Description of Artificial Sequence: Synthetic oligonucleotide
gguaaccccgucucucccc

SEQ ID NO: 1780145 - RNA, 19 nt, Artificial Sequence
  Description of Artificial Sequence: Synthetic oligonucleotide
cuaccuccgugcacuguug

SEQ ID NO: 1780146 - RNA, 19 nt, Artificial Sequence
  Description of Artificial Sequence: Synthetic oligonucleotide
uuccgguaaccccgucucu

SEQ ID NO: 1780147 - RNA, 19 nt, Artificial Sequence
  Description of Artificial Sequence: Synthetic oligonucleotide
gucuucagcgagcgaauaa

SEQ ID NO: 1780148 - RNA, 19 nt, Artificial Sequence
  Description of Artificial Sequence: Synthetic oligonucleotide
agggcacggugcucuaucu

SEQ ID NO: 1780149 - RNA, 19 nt, Artificial Sequence
  Description of Artificial Sequence: Synthetic oligonucleotide
guaaccccgucucucccca

SEQ ID NO: 1780150 - RNA, 19 nt, Artificial Sequence
  Description of Artificial Sequence: Synthetic oligonucleotide
agccgugcaccggguaacc

SEQ ID NO: 1780151 - RNA, 19 nt, Artificial Sequence
  Description of Artificial Sequence: Synthetic oligonucleotide
cuccccgggaauacuucac

SEQ ID NO: 1780152 - RNA, 19 nt, Artificial Sequence
  Description of Artificial Sequence: Synthetic oligonucleotide
acccgauagaugcccugca

SEQ ID NO: 1780153 - RNA, 19 nt, Artificial Sequence
  Description of Artificial Sequence: Synthetic oligonucleotide
cucaggauuguggcuggac

SEQ ID NO: 1780154 - RNA, 19 nt, Artificial Sequence
  Description of Artificial Sequence: Synthetic oligonucleotide
gacuggucguacaccuccc

SEQ ID NO: 1780155 - RNA, 19 nt, Artificial Sequence
  Description of Artificial Sequence: Synthetic oligonucleotide
agcacaacugguggcccug

SEQ ID NO: 1780156 - RNA, 19 nt, Artificial Sequence
  Description of Artificial Sequence: Synthetic oligonucleotide
aacuaccuccgugcacugu

SEQ ID NO: 1780157 - RNA, 19 nt, Artificial Sequence
  Description of Artificial Sequence: Synthetic oligonucleotide
ccaaugucuugggucaggg

SEQ ID NO: 1780158 - RNA, 19 nt, Artificial Sequence
  Description of Artificial Sequence: Synthetic oligonucleotide
acucaguccugggucccuc

SEQ ID NO: 1780159 - RNA, 19 nt, Artificial Sequence
  Description of Artificial Sequence: Synthetic oligonucleotide
ccacacgcacucgagaccc

SEQ ID NO: 1780160 - RNA, 19 nt, Artificial Sequence
  Description of Artificial Sequence: Synthetic oligonucleotide
ccggaguccagcaggcagg

SEQ ID NO: 1780161 - RNA, 19 nt, Artificial Sequence
  Description of Artificial Sequence: Synthetic oligonucleotide
ggugaccggaguccagcag

SEQ ID NO: 1780162 - RNA, 19 nt, Artificial Sequence
  Description of Artificial Sequence: Synthetic oligonucleotide
ugcaccggguaaccacaaa

SEQ ID NO: 1780163 - RNA, 19 nt, Artificial Sequence
  Description of Artificial Sequence: Synthetic oligonucleotide
gggaccacgggaucaguga

SEQ ID NO: 1780164 - RNA, 19 nt, Artificial Sequence
  Description of Artificial Sequence: Synthetic oligonucleotide
ccuacugaauugguuuggc

SEQ ID NO: 1780165 - RNA, 19 nt, Artificial Sequence
  Description of Artificial Sequence: Synthetic oligonucleotide
uccgugcacuguugagaca

SEQ ID NO: 1780166 - RNA, 19 nt, Artificial Sequence
  Description of Artificial Sequence: Synthetic oligonucleotide
ccaagcuggacaguugaug

SEQ ID NO: 1780167 - RNA, 19 nt, Artificial Sequence
  Description of Artificial Sequence: Synthetic oligonucleotide
gcugaaauggccccgggau

SEQ ID NO: 1780168 - RNA, 19 nt, Artificial Sequence
  Description of Artificial Sequence: Synthetic oligonucleotide
gcgagcgaauaaucucagg

SEQ ID NO: 1780169 - RNA, 19 nt, Artificial Sequence
  Description of Artificial Sequence: Synthetic oligonucleotide
gagagaugaaggcgucgua

SEQ ID NO: 1780170 - RNA, 19 nt, Artificial Sequence
  Description of Artificial Sequence: Synthetic oligonucleotide
cccaacuuuccgguaaccc

SEQ ID NO: 1780171 - RNA, 19 nt, Artificial Sequence
  Description of Artificial Sequence: Synthetic oligonucleotide
ccacccugaacagaugggc

SEQ ID NO: 1780172 - RNA, 19 nt, Artificial Sequence
  Description of Artificial Sequence: Synthetic oligonucleotide
gauuguggcuggacccuuc

SEQ ID NO: 1780173 - RNA, 19 nt, Artificial Sequence
  Description of Artificial Sequence: Synthetic oligonucleotide
auacccuacugaauugguu

SEQ ID NO: 1780174 - RNA, 19 nt, Artificial Sequence
  Description of Artificial Sequence: Synthetic oligonucleotide
agggaccacgggaucagug

SEQ ID NO: 1780175 - RNA, 19 nt, Artificial Sequence
  Description of Artificial Sequence: Synthetic oligonucleotide
ugcuggggacuagauucga

SEQ ID NO: 1780176 - RNA, 19 nt, Artificial Sequence
  Description of Artificial Sequence: Synthetic oligonucleotide
cuacugaauugguuuggcu

SEQ ID NO: 1780177 - RNA, 19 nt, Artificial Sequence
  Description of Artificial Sequence: Synthetic oligonucleotide
cccucaaacuaccuccgug

SEQ ID NO: 1780178 - RNA, 19 nt, Artificial Sequence
  Description of Artificial Sequence: Synthetic oligonucleotide
ucuccucacacagcuugua

SEQ ID NO: 1780179 - RNA, 19 nt, Artificial Sequence
  Description of Artificial Sequence: Synthetic oligonucleotide
ugucuugggucaggggcuc

SEQ ID NO: 1780180 - RNA, 19 nt, Artificial Sequence
  Description of Artificial Sequence: Synthetic oligonucleotide
ucucagccgugcaccgggu

SEQ ID NO: 1780181 - RNA, 19 nt, Artificial Sequence
  Description of Artificial Sequence: Synthetic oligonucleotide
cuggacacagucucacugu

SEQ ID NO: 1780182 - RNA, 19 nt, Artificial Sequence
  Description of Artificial Sequence: Synthetic oligonucleotide
auggccccgggauuguguu

SEQ ID NO: 1780183 - RNA, 19 nt, Artificial Sequence
  Description of Artificial Sequence: Synthetic oligonucleotide
cauacccuacugaauuggu

SEQ ID NO: 1780184 - RNA, 19 nt, Artificial Sequence
  Description of Artificial Sequence: Synthetic oligonucleotide
accagugcucggccauucu

SEQ ID NO: 1780185 - RNA, 19 nt, Artificial Sequence
  Description of Artificial Sequence: Synthetic oligonucleotide
agggucuuugccagagaga

SEQ ID NO: 1780186 - RNA, 19 nt, Artificial Sequence
  Description of Artificial Sequence: Synthetic oligonucleotide
aguagccgugcugucuccu

SEQ ID NO: 1780187 - RNA, 19 nt, Artificial Sequence
  Description of Artificial Sequence: Synthetic oligonucleotide
agggucguccccagggucu

SEQ ID NO: 1780188 - RNA, 19 nt, Artificial Sequence
  Description of Artificial Sequence: Synthetic oligonucleotide
gcucggccauucucaaagg

SEQ ID NO: 1780189 - RNA, 19 nt, Artificial Sequence
  Description of Artificial Sequence: Synthetic oligonucleotide
ggacuagauucgaggagug

SEQ ID NO: 1780190 - RNA, 19 nt, Artificial Sequence
  Description of Artificial Sequence: Synthetic oligonucleotide
ggaaagggaccacgggauc

SEQ ID NO: 1780191 - RNA, 19 nt, Artificial Sequence
  Description of Artificial Sequence: Synthetic oligonucleotide
accacguguguuaggacuu

SEQ ID NO: 1780192 - RNA, 19 nt, Artificial Sequence
  Description of Artificial Sequence: Synthetic oligonucleotide
cgcagggugcuguaguuag

SEQ ID NO: 1780193 - RNA, 19 nt, Artificial Sequence
  Description of Artificial Sequence: Synthetic oligonucleotide
cccauacccuacugaauug

SEQ ID NO: 1780194 - RNA, 19 nt, Artificial Sequence
  Description of Artificial Sequence: Synthetic oligonucleotide
cuuuccgguaaccccgucu

SEQ ID NO: 1780195 - RNA, 19 nt, Artificial Sequence
  Description of Artificial Sequence: Synthetic oligonucleotide
gggacuagauucgaggagu

SEQ ID NO: 1780196 - RNA, 19 nt, Artificial Sequence
  Description of Artificial Sequence: Synthetic oligonucleotide
cagacuucguccccucaaa

SEQ ID NO: 1780197 - RNA, 19 nt, Artificial Sequence
  Description of Artificial Sequence: Synthetic oligonucleotide
cccgggauuguguucccag

SEQ ID NO: 1780198 - RNA, 19 nt, Artificial Sequence
  Description of Artificial Sequence: Synthetic oligonucleotide
ggaacucaacaagcugagc

SEQ ID NO: 1780199 - RNA, 19 nt, Artificial Sequence
  Description of Artificial Sequence: Synthetic oligonucleotide
cccuacugaauugguuugg

SEQ ID NO: 1780200 - RNA, 19 nt, Artificial Sequence
  Description of Artificial Sequence: Synthetic oligonucleotide
gccaggccaaugucuuggg

SEQ ID NO: 1780201 - RNA, 19 nt, Artificial Sequence
  Description of Artificial Sequence: Synthetic oligonucleotide
ccgguaaccccgucucucc

SEQ ID NO: 1780202 - RNA, 19 nt, Artificial Sequence
  Description of Artificial Sequence: Synthetic oligonucleotide
cuggacccuuccccugccc

SEQ ID NO: 1780203 - RNA, 19 nt, Artificial Sequence
  Description of Artificial Sequence: Synthetic oligonucleotide
cccgauagaugcccugcag

SEQ ID NO: 1780204 - RNA, 19 nt, Artificial Sequence
  Description of Artificial Sequence: Synthetic oligonucleotide
cggugcucuaucucagccg

SEQ ID NO: 1780205 - RNA, 19 nt, Artificial Sequence
  Description of Artificial Sequence: Synthetic oligonucleotide
ccauuccaaagaucugcuc

SEQ ID NO: 1780206 - RNA, 19 nt, Artificial Sequence
  Description of Artificial Sequence: Synthetic oligonucleotide
cuucacuggcuggcggcug

SEQ ID NO: 1780207 - RNA, 19 nt, Artificial Sequence
  Description of Artificial Sequence: Synthetic oligonucleotide
cuuugagaguagccgugcu

SEQ ID NO: 1780208 - RNA, 19 nt, Artificial Sequence
  Description of Artificial Sequence: Synthetic oligonucleotide
ccccgggaauacuucacug

SEQ ID NO: 1780209 - RNA, 19 nt, Artificial Sequence
  Description of Artificial Sequence: Synthetic oligonucleotide
cuuucccaacuuuccggua

SEQ ID NO: 1780210 - RNA, 19 nt, Artificial Sequence
  Description of Artificial Sequence: Synthetic oligonucleotide
cagccgugcaccggguaac

SEQ ID NO: 1780211 - RNA, 19 nt, Artificial Sequence
  Description of Artificial Sequence: Synthetic oligonucleotide
ccgugcaccggguaaccac

SEQ ID NO: 1780212 - RNA, 19 nt, Artificial Sequence
  Description of Artificial Sequence: Synthetic oligonucleotide
ggagaguuuccugacaguu

SEQ ID NO: 1780213 - RNA, 19 nt, Artificial Sequence
  Description of Artificial Sequence: Synthetic oligonucleotide
agcaggcaggccaccaaau

SEQ ID NO: 1780214 - RNA, 19 nt, Artificial Sequence
  Description of Artificial Sequence: Synthetic oligonucleotide
ggcggcugaaauggccccg

SEQ ID NO: 1780215 - RNA, 19 nt, Artificial Sequence
  Description of Artificial Sequence: Synthetic oligonucleotide
uccuucucgcugggugcug

SEQ ID NO: 1780216 - RNA, 19 nt, Artificial Sequence
  Description of Artificial Sequence: Synthetic oligonucleotide
gcacggugcucuaucucag

SEQ ID NO: 1780217 - RNA, 19 nt, Artificial Sequence
  Description of Artificial Sequence: Synthetic oligonucleotide
gucguacaccuccccggga

SEQ ID NO: 1780218 - RNA, 19 nt, Artificial Sequence
  Description of Artificial Sequence: Synthetic oligonucleotide
ccagugcucggccauucuc

SEQ ID NO: 1780219 - RNA, 19 nt, Artificial Sequence
  Description of Artificial Sequence: Synthetic oligonucleotide
aucgagcagccacccugaa

SEQ ID NO: 1780220 - RNA, 19 nt, Artificial Sequence
  Description of Artificial Sequence: Synthetic oligonucleotide
gugacuggucguacaccuc

SEQ ID NO: 1780221 - RNA, 19 nt, Artificial Sequence
  Description of Artificial Sequence: Synthetic oligonucleotide
acgggaucagugagcuccu

SEQ ID NO: 1780222 - RNA, 19 nt, Artificial Sequence
  Description of Artificial Sequence: Synthetic oligonucleotide
ucguccccagggucugcau

SEQ ID NO: 1780223 - RNA, 19 nt, Artificial Sequence
  Description of Artificial Sequence: Synthetic oligonucleotide
ggaugggaguggucagaga

SEQ ID NO: 1780224 - RNA, 19 nt, Artificial Sequence
  Description of Artificial Sequence: Synthetic oligonucleotide
guacaccuccccgggaaua

SEQ ID NO: 1780225 - RNA, 19 nt, Artificial Sequence
  Description of Artificial Sequence: Synthetic oligonucleotide
gcucagugucagcacaacu

SEQ ID NO: 1780226 - RNA, 19 nt, Artificial Sequence
  Description of Artificial Sequence: Synthetic oligonucleotide
gcucuaucucagccgugca

SEQ ID NO: 1780227 - RNA, 19 nt, Artificial Sequence
  Description of Artificial Sequence: Synthetic oligonucleotide
ggucccucaggaugggagu

SEQ ID NO: 1780228 - RNA, 19 nt, Artificial Sequence
  Description of Artificial Sequence: Synthetic oligonucleotide
gugcucuaucucagccgug

SEQ ID NO: 1780229 - RNA, 19 nt, Artificial Sequence
  Description of Artificial Sequence: Synthetic oligonucleotide
ugccccgucucugguguuu

SEQ ID NO: 1780230 - RNA, 19 nt, Artificial Sequence
  Description of Artificial Sequence: Synthetic oligonucleotide
cugaaauggccccgggauu

SEQ ID NO: 1780231 - RNA, 19 nt, Artificial Sequence
  Description of Artificial Sequence: Synthetic oligonucleotide
ccuggugaccggaguccag

SEQ ID NO: 1780232 - RNA, 19 nt, Artificial Sequence
  Description of Artificial Sequence: Synthetic oligonucleotide
uaaccccgucucuccccau

SEQ ID NO: 1780233 - RNA, 19 nt, Artificial Sequence
  Description of Artificial Sequence: Synthetic oligonucleotide
gggcacggugcucuaucuc

SEQ ID NO: 1780234 - RNA, 19 nt, Artificial Sequence
  Description of Artificial Sequence: Synthetic oligonucleotide
cagccguuccacacgcacu

SEQ ID NO: 1780235 - RNA, 19 nt, Artificial Sequence
  Description of Artificial Sequence: Synthetic oligonucleotide
ccuccgugcacuguugaga

SEQ ID NO: 1780236 - RNA, 19 nt, Artificial Sequence
  Description of Artificial Sequence: Synthetic oligonucleotide
ccgugcugucuccugggug

SEQ ID NO: 1780237 - RNA, 19 nt, Artificial Sequence
  Description of Artificial Sequence: Synthetic oligonucleotide
gaccggaguccagcaggca

SEQ ID NO: 1780238 - RNA, 19 nt, Artificial Sequence
  Description of Artificial Sequence: Synthetic oligonucleotide
cugacccgauagaugcccu

SEQ ID NO: 1780239 - RNA, 19 nt, Artificial Sequence
  Description of Artificial Sequence: Synthetic oligonucleotide
gggcccagacuucgucccc

SEQ ID NO: 1780240 - RNA, 19 nt, Artificial Sequence
  Description of Artificial Sequence: Synthetic oligonucleotide
cgugcaccggguaaccaca

SEQ ID NO: 1780241 - RNA, 19 nt, Artificial Sequence
  Description of Artificial Sequence: Synthetic oligonucleotide
cacacgcacucgagaccca

SEQ ID NO: 1780242 - RNA, 19 nt, Artificial Sequence
  Description of Artificial Sequence: Synthetic oligonucleotide
ccuccccgggaauacuuca

SEQ ID NO: 1780243 - RNA, 19 nt, Artificial Sequence
  Description of Artificial Sequence: Synthetic oligonucleotide
ccccauacccuacugaauu

SEQ ID NO: 1780244 - RNA, 19 nt, Artificial Sequence
  Description of Artificial Sequence: Synthetic oligonucleotide
cagcacaacugguggcccu

SEQ ID NO: 1780245 - RNA, 19 nt, Artificial Sequence
  Description of Artificial Sequence: Synthetic oligonucleotide
cacgcacucgagacccacu

SEQ ID NO: 1780246 - RNA, 19 nt, Artificial Sequence
  Description of Artificial Sequence: Synthetic oligonucleotide
gacccuuccccugccccgu

SEQ ID NO: 1780247 - RNA, 19 nt, Artificial Sequence
  Description of Artificial Sequence: Synthetic oligonucleotide
cucagccgugcaccgggua

SEQ ID NO: 1780248 - RNA, 19 nt, Artificial Sequence
  Description of Artificial Sequence: Synthetic oligonucleotide
gugcaccggguaaccacaa

SEQ ID NO: 1780249 - RNA, 19 nt, Artificial Sequence
  Description of Artificial Sequence: Synthetic oligonucleotide
cacguguguuaggacuucu

SEQ ID NO: 1780250 - RNA, 19 nt, Artificial Sequence
  Description of Artificial Sequence: Synthetic oligonucleotide
ccguuccacacgcacucga

SEQ ID NO: 1780251 - RNA, 19 nt, Artificial Sequence
  Description of Artificial Sequence: Synthetic oligonucleotide
ggugccgcagggugcugua

SEQ ID NO: 1780252 - RNA, 19 nt, Artificial Sequence
  Description of Artificial Sequence: Synthetic oligonucleotide
aggcgucguagaaguggaa

SEQ ID NO: 1780253 - RNA, 19 nt, Artificial Sequence
  Description of Artificial Sequence: Synthetic oligonucleotide
gccuggugaccggagucca

SEQ ID NO: 1780254 - RNA, 19 nt, Artificial Sequence
  Description of Artificial Sequence: Synthetic oligonucleotide
ccacguguguuaggacuuc

SEQ ID NO: 1780255 - RNA, 19 nt, Artificial Sequence
  Description of Artificial Sequence: Synthetic oligonucleotide
gcugggugcuggggacuag

SEQ ID NO: 1780256 - RNA, 19 nt, Artificial Sequence
  Description of Artificial Sequence: Synthetic oligonucleotide
cgucucuccccauacccua

SEQ ID NO: 1780257 - RNA, 19 nt, Artificial Sequence
  Description of Artificial Sequence: Synthetic oligonucleotide
gccccgggauuguguuccc

SEQ ID NO: 1780258 - RNA, 19 nt, Artificial Sequence
  Description of Artificial Sequence: Synthetic oligonucleotide
ccgucucuccccauacccu

SEQ ID NO: 1780259 - RNA, 19 nt, Artificial Sequence
  Description of Artificial Sequence: Synthetic oligonucleotide
cgggaauacuucacuggcu

SEQ ID NO: 1780260 - RNA, 19 nt, Artificial Sequence
  Description of Artificial Sequence: Synthetic oligonucleotide
cccagacuucguccccuca

SEQ ID NO: 1780261 - RNA, 19 nt, Artificial Sequence
  Description of Artificial Sequence: Synthetic oligonucleotide
ccagaggagcucauccauu

SEQ ID NO: 1780262 - RNA, 19 nt, Artificial Sequence
  Description of Artificial Sequence: Synthetic oligonucleotide
ccgggauuguguucccagu

SEQ ID NO: 1780263 - RNA, 19 nt, Artificial Sequence
  Description of Artificial Sequence: Synthetic oligonucleotide
gccgugcaccggguaacca

SEQ ID NO: 1780264 - RNA, 19 nt, Artificial Sequence
  Description of Artificial Sequence: Synthetic oligonucleotide
ccacgggaucagugagcuc

SEQ ID NO: 1780265 - RNA, 19 nt, Artificial Sequence
  Description of Artificial Sequence: Synthetic oligonucleotide
cacuggcuggcggcugaaa

SEQ ID NO: 1780266 - RNA, 19 nt, Artificial Sequence
  Description of Artificial Sequence: Synthetic oligonucleotide
ccccgucucugguguuuuc

SEQ ID NO: 1780267 - RNA, 19 nt, Artificial Sequence
  Description of Artificial Sequence: Synthetic oligonucleotide
gccgcagggugcuguaguu

SEQ ID NO: 1780268 - RNA, 19 nt, Artificial Sequence
  Description of Artificial Sequence: Synthetic oligonucleotide
gggcaccuccucagggaaa

SEQ ID NO: 1780269 - RNA, 19 nt, Artificial Sequence
  Description of Artificial Sequence: Synthetic oligonucleotide
ggccaagggcacggugcuc

SEQ ID NO: 1780270 - RNA, 19 nt, Artificial Sequence
  Description of Artificial Sequence: Synthetic oligonucleotide
gccgugcugucuccugggu

SEQ ID NO: 1780271 - RNA, 19 nt, Artificial Sequence
  Description of Artificial Sequence: Synthetic oligonucleotide
caagggcacggugcucuau

SEQ ID NO: 1780272 - RNA, 19 nt, Artificial Sequence
  Description of Artificial Sequence: Synthetic oligonucleotide
ggauuguggcuggacccuu

SEQ ID NO: 1780273 - RNA, 19 nt, Artificial Sequence
  Description of Artificial Sequence: Synthetic oligonucleotide
caaccagugcucggccauu

SEQ ID NO: 1780274 - RNA, 19 nt, Artificial Sequence
  Description of Artificial Sequence: Synthetic oligonucleotide
cagauuccucaggcucagu

SEQ ID NO: 1780275 - RNA, 19 nt, Artificial Sequence
  Description of Artificial Sequence: Synthetic oligonucleotide
gccaagcuggacaguugau

SEQ ID NO: 1780276 - RNA, 19 nt, Artificial Sequence
  Description of Artificial Sequence: Synthetic oligonucleotide
gcaggccaccaaauacaau

SEQ ID NO: 1780277 - RNA, 19 nt, Artificial Sequence
  Description of Artificial Sequence: Synthetic oligonucleotide
ccucaggauuguggcugga

SEQ ID NO: 1780278 - RNA, 19 nt, Artificial Sequence
  Description of Artificial Sequence: Synthetic oligonucleotide
ccgcagggugcuguaguua

SEQ ID NO: 1780279 - RNA, 19 nt, Artificial Sequence
  Description of Artificial Sequence: Synthetic oligonucleotide
ccccucaaacuaccuccgu

SEQ ID NO: 1780280 - RNA, 19 nt, Artificial Sequence
  Description of Artificial Sequence: Synthetic oligonucleotide
ccccgggauuguguuccca

SEQ ID NO: 1780281 - RNA, 19 nt, Artificial Sequence
  Description of Artificial Sequence: Synthetic oligonucleotide
cguacaccuccccgggaau

SEQ ID NO: 1780282 - RNA, 19 nt, Artificial Sequence
  Description of Artificial Sequence: Synthetic oligonucleotide
cugccccgucucugguguu

SEQ ID NO: 1780283 - RNA, 19 nt, Artificial Sequence
  Description of Artificial Sequence: Synthetic oligonucleotide
cccuuccccugccccgucu

SEQ ID NO: 1780284 - RNA, 19 nt, Artificial Sequence
  Description of Artificial Sequence: Synthetic oligonucleotide
gccccgucucugguguuuu

SEQ ID NO: 1780285 - RNA, 19 nt, Artificial Sequence
  Description of Artificial Sequence: Synthetic oligonucleotide
agaaagcuuacuuacagcc

SEQ ID NO: 1780286 - RNA, 19 nt, Artificial Sequence
  Description of Artificial Sequence: Synthetic oligonucleotide
uguugaaucauucaggucu

SEQ ID NO: 1780287 - RNA, 19 nt, Artificial Sequence
  Description of Artificial Sequence: Synthetic oligonucleotide
  modified_base (7)..(7): a, c, u, g, unknown or other
ucaaacngcguccagaggu

SEQ ID NO: 1780288 - RNA, 19 nt, Artificial Sequence
  Description of Artificial Sequence: Synthetic oligonucleotide
aacuagauaagaaaacaac

SEQ ID NO: 1780289 - RNA, 19 nt, Artificial Sequence
  Description of Artificial Sequence: Synthetic oligonucleotide
uacggaaacacaaagcacc

SEQ ID NO: 1780290 - RNA, 19 nt, Artificial Sequence
  Description of Artificial Sequence: Synthetic oligonucleotide
aagugucagacacauaauc

SEQ ID NO: 1780291 - RNA, 19 nt, Artificial Sequence
  Description of Artificial Sequence: Synthetic oligonucleotide
gaauggaugaacauggccc

SEQ ID NO: 1780292 - RNA, 19 nt, Artificial Sequence
  Description of Artificial Sequence: Synthetic oligonucleotide
aaagcuuacuuacagccga

SEQ ID NO: 1780293 - RNA, 19 nt, Artificial Sequence
  Description of Artificial Sequence: Synthetic oligonucleotide
aagugcacacgucagguuc

SEQ ID NO: 1780294 - RNA, 19 nt, Artificial Sequence
  Description of Artificial Sequence: Synthetic oligonucleotide
aauugaaaagcaaacacau

SEQ ID NO: 1780295 - RNA, 19 nt, Artificial Sequence
  Description of Artificial Sequence: Synthetic oligonucleotide
ucaaguaauuaguucaaga

SEQ ID NO: 1780296 - RNA, 19 nt, Artificial Sequence
  Description of Artificial Sequence: Synthetic oligonucleotide
ucagguaguaccacugccg

SEQ ID NO: 1780297 - RNA, 19 nt, Artificial Sequence
  Description of Artificial Sequence: Synthetic oligonucleotide
uucuccuucagguaguacc

SEQ ID NO: 1780298 - RNA, 19 nt, Artificial Sequence
  Description of Artificial Sequence: Synthetic oligonucleotide
auguagaugguccuccucg

SEQ ID NO: 1780299 - RNA, 19 nt, Artificial Sequence
  Description of Artificial Sequence: Synthetic oligonucleotide
ucagaauggacccucggug

SEQ ID NO: 1780300 - RNA, 19 nt, Artificial Sequence
  Description of Artificial Sequence: Synthetic oligonucleotide
ugagugaauucuaacaaaa

SEQ ID NO: 1780301 - RNA, 19 nt, Artificial Sequence
  Description of Artificial Sequence: Synthetic oligonucleotide
uguacuugaggaacacgcg

SEQ ID NO: 1780302 - RNA, 19 nt, Artificial Sequence
  Description of Artificial Sequence: Synthetic oligonucleotide
aaaacgacaacuagauaag

SEQ ID NO: 1780303 - RNA, 19 nt, Artificial Sequence
  Description of Artificial Sequence: Synthetic oligonucleotide
aauggaugaacauggcccu

SEQ ID NO: 1780304 - RNA, 19 nt, Artificial Sequence
  Description of Artificial Sequence: Synthetic oligonucleotide
ucaaacgaaggaagugucg

SEQ ID NO: 1780305 - RNA, 19 nt, Artificial Sequence
  Description of Artificial Sequence: Synthetic oligonucleotide
ugcaaggauuauuuaaaag

SEQ ID NO: 1780306 - RNA, 19 nt, Artificial Sequence
  Description of Artificial Sequence: Synthetic oligonucleotide
guagauagagagaagaaac

SEQ ID NO: 1780307 - RNA, 19 nt, Artificial Sequence
  Description of Artificial Sequence: Synthetic oligonucleotide
  modified_base (9)..(9): a, c, u, g, unknown or other
ucucaaacngcguccagag

SEQ ID NO: 1780308 - RNA, 19 nt, Artificial Sequence
  Description of Artificial Sequence: Synthetic oligonucleotide
uguuucacaagugucagac

SEQ ID NO: 1780309 - RNA, 19 nt, Artificial Sequence
  Description of Artificial Sequence: Synthetic oligonucleotide
aguguugaaucauucaggu

SEQ ID NO: 1780310 - RNA, 19 nt, Artificial Sequence
  Description of Artificial Sequence: Synthetic oligonucleotide
caugauauagaugccgucg

SEQ ID NO: 1780311 - RNA, 19 nt, Artificial Sequence
  Description of Artificial Sequence: Synthetic oligonucleotide
aaacuacggacucaguaca

SEQ ID NO: 1780312 - RNA, 19 nt, Artificial Sequence
  Description of Artificial Sequence: Synthetic oligonucleotide
aaacaacagagggacaggg

SEQ ID NO: 1780313 - RNA, 19 nt, Artificial Sequence
  Description of Artificial Sequence: Synthetic oligonucleotide
ugaagugcaaggauuauuu

SEQ ID NO: 1780314 - RNA, 19 nt, Artificial Sequence
  Description of Artificial Sequence: Synthetic oligonucleotide
uuauuugaauacauuuccu

SEQ ID NO: 1780315 - RNA, 19 nt, Artificial Sequence
  Description of Artificial Sequence: Synthetic oligonucleotide
aagugcaaggauuauuuaa

SEQ ID NO: 1780316 - RNA, 19 nt, Artificial Sequence
  Description of Artificial Sequence: Synthetic oligonucleotide
ucggugacauuucacaggc

SEQ ID NO: 1780317 - RNA, 19 nt, Artificial Sequence
  Description of Artificial Sequence: Synthetic oligonucleotide
ugucggucauaacagaaca

SEQ ID NO: 1780318 - RNA, 19 nt, Artificial Sequence
  Description of Artificial Sequence: Synthetic oligonucleotide
caaacuacggacucaguac

SEQ ID NO: 1780319 - RNA, 19 nt, Artificial Sequence
  Description of Artificial Sequence: Synthetic oligonucleotide
gacagagugacaucucugc

SEQ ID NO: 1780320 - RNA, 19 nt, Artificial Sequence
  Description of Artificial Sequence: Synthetic oligonucleotide
cuauaugaagcaccaacag

SEQ ID NO: 1780321 - RNA, 19 nt, Artificial Sequence
  Description of Artificial Sequence: Synthetic oligonucleotide
gaagugucggucauaacag

SEQ ID NO: 1780322 - RNA, 19 nt, Artificial Sequence
  Description of Artificial Sequence: Synthetic oligonucleotide
uuucaaacgaaggaagugu

SEQ ID NO: 1780323 - RNA, 19 nt, Artificial Sequence
  Description of Artificial Sequence: Synthetic oligonucleotide
accgauuccacaucauuuc

SEQ ID NO: 1780324 - RNA, 19 nt, Artificial Sequence
  Description of Artificial Sequence: Synthetic oligonucleotide
acacgucagguucaggccc

SEQ ID NO: 1780325 - RNA, 19 nt, Artificial Sequence
  Description of Artificial Sequence: Synthetic oligonucleotide
acaauguugacaugcgugu

SEQ ID NO: 1780326 - RNA, 19 nt, Artificial Sequence
  Description of Artificial Sequence: Synthetic oligonucleotide
uugugaagugcacacguca

SEQ ID NO: 1780327 - RNA, 19 nt, Artificial Sequence
  Description of Artificial Sequence: Synthetic oligonucleotide
caguacaaccuuucaaacg

SEQ ID NO: 1780328 - RNA, 19 nt, Artificial Sequence
  Description of Artificial Sequence: Synthetic oligonucleotide
uguguuuauuccacacucc

SEQ ID NO: 1780329 - RNA, 19 nt, Artificial Sequence
  Description of Artificial Sequence: Synthetic oligonucleotide
guacuugaggaacacgcgg

SEQ ID NO: 1780330 - RNA, 19 nt, Artificial Sequence
  Description of Artificial Sequence: Synthetic oligonucleotide
aaaggcugggaaccgccgg

SEQ ID NO: 1780331 - RNA, 19 nt, Artificial Sequence
  Description of Artificial Sequence: Synthetic oligonucleotide
gauauagaugccgucguug

SEQ ID NO: 1780332 - RNA, 19 nt, Artificial Sequence
  Description of Artificial Sequence: Synthetic oligonucleotide
caaacgaaggaagugucgg

SEQ ID NO: 1780333 - RNA, 19 nt, Artificial Sequence
  Description of Artificial Sequence: Synthetic oligonucleotide
uucaggcccgacuuggacg

SEQ ID NO: 1780334 - RNA, 19 nt, Artificial Sequence
  Description of Artificial Sequence: Synthetic oligonucleotide
acgacaacuagauaagaaa

SEQ ID NO: 1780335 - RNA, 19 nt, Artificial Sequence
  Description of Artificial Sequence: Synthetic oligonucleotide
uggguagauagagagaaga

SEQ ID NO: 1780336 - RNA, 19 nt, Artificial Sequence
  Description of Artificial Sequence: Synthetic oligonucleotide
gaacauaacuugaagauua

SEQ ID NO: 1780337 - RNA, 19 nt, Artificial Sequence
  Description of Artificial Sequence: Synthetic oligonucleotide
uccacacuccaaacuacgg

SEQ ID NO: 1780338 - RNA, 19 nt, Artificial Sequence
  Description of Artificial Sequence: Synthetic oligonucleotide
aacacgcggugcuccaagc

SEQ ID NO: 1780339 - RNA, 19 nt, Artificial Sequence
  Description of Artificial Sequence: Synthetic oligonucleotide
uguccaaaggcugggaacc

SEQ ID NO: 1780340 - RNA, 19 nt, Artificial Sequence
  Description of Artificial Sequence: Synthetic oligonucleotide
caaacuauaugaagcacca

SEQ ID NO: 1780341 - RNA, 19 nt, Artificial Sequence
  Description of Artificial Sequence: Synthetic oligonucleotide
agauagagagaagaaacca

SEQ ID NO: 1780342 - RNA, 19 nt, Artificial Sequence
  Description of Artificial Sequence: Synthetic oligonucleotide
cauggcccugucaacaugg

SEQ ID NO: 1780343 - RNA, 19 nt, Artificial Sequence
  Description of Artificial Sequence: Synthetic oligonucleotide
cacacuccaaacuacggac

SEQ ID NO: 1780344 - RNA, 19 nt, Artificial Sequence
  Description of Artificial Sequence: Synthetic oligonucleotide
acauuuccuuccauggucc

SEQ ID NO: 1780345 - RNA, 19 nt, Artificial Sequence
  Description of Artificial Sequence: Synthetic oligonucleotide
gucauaacagaacauaacu

SEQ ID NO: 1780346 - RNA, 19 nt, Artificial Sequence
  Description of Artificial Sequence: Synthetic oligonucleotide
uucaaacgaaggaaguguc

SEQ ID NO: 1780347 - RNA, 19 nt, Artificial Sequence
  Description of Artificial Sequence: Synthetic oligonucleotide
uuacuuacagccgagccuc

SEQ ID NO: 1780348 - RNA, 19 nt, Artificial Sequence
  Description of Artificial Sequence: Synthetic oligonucleotide
gugucagacacauaaucac

SEQ ID NO: 1780349 - RNA, 19 nt, Artificial Sequence
  Description of Artificial Sequence: Synthetic oligonucleotide
gacgcugcaggucucaaac

SEQ ID NO: 1780350 - RNA, 19 nt, Artificial Sequence
  Description of Artificial Sequence: Synthetic oligonucleotide
agaauggacccucggugac

SEQ ID NO: 1780351 - RNA, 19 nt, Artificial Sequence
  Description of Artificial Sequence: Synthetic oligonucleotide
guaauuaguucaagaaagc

SEQ ID NO: 1780352 - RNA, 19 nt, Artificial Sequence
  Description of Artificial Sequence: Synthetic oligonucleotide
acugcugcgguugugugac

SEQ ID NO: 1780353 - RNA, 19 nt, Artificial Sequence
  Description of Artificial Sequence: Synthetic oligonucleotide
aacugugaagugcaaggau

SEQ ID NO: 1780354 - RNA, 19 nt, Artificial Sequence
  Description of Artificial Sequence: Synthetic oligonucleotide
gcaguugcuauauauuucc

SEQ ID NO: 1780355 - RNA, 19 nt, Artificial Sequence
  Description of Artificial Sequence: Synthetic oligonucleotide
cucggugacauuucacagg

SEQ ID NO: 1780356 - RNA, 19 nt, Artificial Sequence
  Description of Artificial Sequence: Synthetic oligonucleotide
cuacggacucaguacaacc

SEQ ID NO: 1780357 - RNA, 19 nt, Artificial Sequence
  Description of Artificial Sequence: Synthetic oligonucleotide
ucgauggacagcaucugcu

SEQ ID NO: 1780358 - RNA, 19 nt, Artificial Sequence
  Description of Artificial Sequence: Synthetic oligonucleotide
guguguuuauuccacacuc

SEQ ID NO: 1780359 - RNA, 19 nt, Artificial Sequence
  Description of Artificial Sequence: Synthetic oligonucleotide
caaggauuauuuaaaagua

SEQ ID NO: 1780360 - RNA, 19 nt, Artificial Sequence
  Description of Artificial Sequence: Synthetic oligonucleotide
auaaucacugcugcgguug

SEQ ID NO: 1780361 - RNA, 19 nt, Artificial Sequence
  Description of Artificial Sequence: Synthetic oligonucleotide
acguuagucuacuuugucu

SEQ ID NO: 1780362 - RNA, 19 nt, Artificial Sequence
  Description of Artificial Sequence: Synthetic oligonucleotide
guugcuauauauuuccugu

SEQ ID NO: 1780363 - RNA, 19 nt, Artificial Sequence
  Description of Artificial Sequence: Synthetic oligonucleotide
aaacgaaggaagugucggu

SEQ ID NO: 1780364 - RNA, 19 nt, Artificial Sequence
  Description of Artificial Sequence: Synthetic oligonucleotide
uacggacucaguacaaccu

SEQ ID NO: 1780365 - RNA, 19 nt, Artificial Sequence
  Description of Artificial Sequence: Synthetic oligonucleotide
uucaaguaauuaguucaag

SEQ ID NO: 1780366 - RNA, 19 nt, Artificial Sequence
  Description of Artificial Sequence: Synthetic oligonucleotide
cauguccucacccuggcug

SEQ ID NO: 1780367 - RNA, 19 nt, Artificial Sequence
  Description of Artificial Sequence: Synthetic oligonucleotide
augauauagaugccgucgu

SEQ ID NO: 1780368 - RNA, 19 nt, Artificial Sequence
  Description of Artificial Sequence: Synthetic oligonucleotide
aaaccgauuccacaucauu

SEQ ID NO: 1780369 - RNA, 19 nt, Artificial Sequence
  Description of Artificial Sequence: Synthetic oligonucleotide
gacacagacuacaaauuac

SEQ ID NO: 1780370 - RNA, 19 nt, Artificial Sequence
  Description of Artificial Sequence: Synthetic oligonucleotide
aggauuucaaaggguugcc

SEQ ID NO: 1780371 - RNA, 19 nt, Artificial Sequence
  Description of Artificial Sequence: Synthetic oligonucleotide
uguuggguagauagagaga

SEQ ID NO: 1780372 - RNA, 19 nt, Artificial Sequence
  Description of Artificial Sequence: Synthetic oligonucleotide
caggauuucaaaggguugc

SEQ ID NO: 1780373 - RNA, 19 nt, Artificial Sequence
  Description of Artificial Sequence: Synthetic oligonucleotide
gcaaggauuauuuaaaagu

SEQ ID NO: 1780374 - RNA, 19 nt, Artificial Sequence
  Description of Artificial Sequence: Synthetic oligonucleotide
ugaagugcacacgucaggu

SEQ ID NO: 1780375 - RNA, 19 nt, Artificial Sequence
  Description of Artificial Sequence: Synthetic oligonucleotide
agugucagacacauaauca

SEQ ID NO: 1780376 - RNA, 19 nt, Artificial Sequence
  Description of Artificial Sequence: Synthetic oligonucleotide
cuacggaaacacaaagcac

SEQ ID NO: 1780377 - RNA, 19 nt, Artificial Sequence
  Description of Artificial Sequence: Synthetic oligonucleotide
guuggguagauagagagaa

SEQ ID NO: 1780378 - RNA, 19 nt, Artificial Sequence
  Description of Artificial Sequence: Synthetic oligonucleotide
acggaaacacaaagcaccc

SEQ ID NO: 1780379 - RNA, 19 nt, Artificial Sequence
  Description of Artificial Sequence: Synthetic oligonucleotide
ccaacgauguagauggucc

SEQ ID NO: 1780380 - RNA, 19 nt, Artificial Sequence
  Description of Artificial Sequence: Synthetic oligonucleotide
  modified_base (13)..(13): a, c, u, g, unknown or other
caggucucaaacngcgucc

SEQ ID NO: 1780381 - RNA, 19 nt, Artificial Sequence
  Description of Artificial Sequence: Synthetic oligonucleotide
uuaguucaagaaagcuuac

SEQ ID NO: 1780382 - RNA, 19 nt, Artificial Sequence
  Description of Artificial Sequence: Synthetic oligonucleotide
caugcguguguguuuauuc

SEQ ID NO: 1780383 - RNA, 19 nt, Artificial Sequence
  Description of Artificial Sequence: Synthetic oligonucleotide
aaccagaccugucuuuuaa

SEQ ID NO: 1780384 - RNA, 19 nt, Artificial Sequence
  Description of Artificial Sequence: Synthetic oligonucleotide
ucccuguaggaauggauga

SEQ ID NO: 1780385 - RNA, 19 nt, Artificial Sequence
  Description of Artificial Sequence: Synthetic oligonucleotide
gucguugugaagugcacac

SEQ ID NO: 1780386 - RNA, 19 nt, Artificial Sequence
  Description of Artificial Sequence: Synthetic oligonucleotide
ugacaauguugacaugcgu

SEQ ID NO: 1780387 - RNA, 19 nt, Artificial Sequence
  Description of Artificial Sequence: Synthetic oligonucleotide
ccuacguuagucuacuuug

SEQ ID NO: 1780388 - RNA, 19 nt, Artificial Sequence
  Description of Artificial Sequence: Synthetic oligonucleotide
uuugcggauauggacgcug

SEQ ID NO: 1780389 - RNA, 19 nt, Artificial Sequence
  Description of Artificial Sequence: Synthetic oligonucleotide
uccuacauaugugaccuac

SEQ ID NO: 1780390 - RNA, 19 nt, Artificial Sequence
  Description of Artificial Sequence: Synthetic oligonucleotide
acucaguacaaccuuucaa

SEQ ID NO: 1780391 - RNA, 19 nt, Artificial Sequence
  Description of Artificial Sequence: Synthetic oligonucleotide
agugcaaggauuauuuaaa

SEQ ID NO: 1780392 - RNA, 19 nt, Artificial Sequence
  Description of Artificial Sequence: Synthetic oligonucleotide
gacaaacuauaugaagcac

SEQ ID NO: 1780393 - RNA, 19 nt, Artificial Sequence
  Description of Artificial Sequence: Synthetic oligonucleotide
uguagaugguccuccucga

SEQ ID NO: 1780394 - RNA, 19 nt, Artificial Sequence
  Description of Artificial Sequence: Synthetic oligonucleotide
acuacggacucaguacaac

SEQ ID NO: 1780395 - RNA, 19 nt, Artificial Sequence
  Description of Artificial Sequence: Synthetic oligonucleotide
aacauggcaguugcuauau

SEQ ID NO: 1780396 - RNA, 19 nt, Artificial Sequence
  Description of Artificial Sequence: Synthetic oligonucleotide
gguugugugacaauguuga

SEQ ID NO: 1780397 - RNA, 19 nt, Artificial Sequence
  Description of Artificial Sequence: Synthetic oligonucleotide
ugaaucauucaggucucug

SEQ ID NO: 1780398 - RNA, 19 nt, Artificial Sequence
  Description of Artificial Sequence: Synthetic oligonucleotide
uacguuagucuacuuuguc

SEQ ID NO: 1780399 - RNA, 19 nt, Artificial Sequence
  Description of Artificial Sequence: Synthetic oligonucleotide
acacagacuacaaauuaca

SEQ ID NO: 1780400 - RNA, 19 nt, Artificial Sequence
  Description of Artificial Sequence: Synthetic oligonucleotide
aaacgacaacuagauaaga

SEQ ID NO: 1780401 - RNA, 19 nt, Artificial Sequence
  Description of Artificial Sequence: Synthetic oligonucleotide
uuggguagauagagagaag

SEQ ID NO: 1780402 - RNA, 19 nt, Artificial Sequence
  Description of Artificial Sequence: Synthetic oligonucleotide
ugugaccuacguuagucua

SEQ ID NO: 1780403 - RNA, 19 nt, Artificial Sequence
  Description of Artificial Sequence: Synthetic oligonucleotide
ucggucauaacagaacaua

SEQ ID NO: 1780404 - RNA, 19 nt, Artificial Sequence
  Description of Artificial Sequence: Synthetic oligonucleotide
ucaggcccgacuuggacgu

SEQ ID NO: 1780405 - RNA, 19 nt, Artificial Sequence
  Description of Artificial Sequence: Synthetic oligonucleotide
cagagugacaucucugcuc

SEQ ID NO: 1780406 - RNA, 19 nt, Artificial Sequence
  Description of Artificial Sequence: Synthetic oligonucleotide
uacauaugugaccuacguu

SEQ ID NO: 1780407 - RNA, 19 nt, Artificial Sequence
  Description of Artificial Sequence: Synthetic oligonucleotide
uuacagccgagccuccuac

SEQ ID NO: 1780408 - RNA, 19 nt, Artificial Sequence
  Description of Artificial Sequence: Synthetic oligonucleotide
ucaugauauagaugccguc

SEQ ID NO: 1780409 - RNA, 19 nt, Artificial Sequence
  Description of Artificial Sequence: Synthetic oligonucleotide
aacauggcccugucaacau

SEQ ID NO: 1780410 - RNA, 19 nt, Artificial Sequence
  Description of Artificial Sequence: Synthetic oligonucleotide
aaccgauuccacaucauuu

SEQ ID NO: 1780411 - RNA, 19 nt, Artificial Sequence
  Description of Artificial Sequence: Synthetic oligonucleotide
gagccuccuacauauguga

SEQ ID NO: 1780412 - RNA, 19 nt, Artificial Sequence
  Description of Artificial Sequence: Synthetic oligonucleotide
gaugccgucguugugaagu

SEQ ID NO: 1780413 - RNA, 19 nt, Artificial Sequence
  Description of Artificial Sequence: Synthetic oligonucleotide
cagaacauaacuugaagau

SEQ ID NO: 1780414 - RNA, 19 nt, Artificial Sequence
  Description of Artificial Sequence: Synthetic oligonucleotide
guguguguuuauuccacac

SEQ ID NO: 1780415 - RNA, 19 nt, Artificial Sequence
  Description of Artificial Sequence: Synthetic oligonucleotide
agcuuacuuacagccgagc

SEQ ID NO: 1780416 - RNA, 19 nt, Artificial Sequence
  Description of Artificial Sequence: Synthetic oligonucleotide
ugcgguugugugacaaugu

SEQ ID NO: 1780417 - RNA, 19 nt, Artificial Sequence
  Description of Artificial Sequence: Synthetic oligonucleotide
cucgauggacagcaucugc

SEQ ID NO: 1780418 - RNA, 19 nt, Artificial Sequence
  Description of Artificial Sequence: Synthetic oligonucleotide
augugaccuacguuagucu

SEQ ID NO: 1780419 - RNA, 19 nt, Artificial Sequence
  Description of Artificial Sequence: Synthetic oligonucleotide
gaacacgcggugcuccaag

SEQ ID NO: 1780420 - RNA, 19 nt, Artificial Sequence
  Description of Artificial Sequence: Synthetic oligonucleotide
ccuacggaaacacaaagca

SEQ ID NO: 1780421 - RNA, 19 nt, Artificial Sequence
  Description of Artificial Sequence: Synthetic oligonucleotide
uugcggauauggacgcugc

SEQ ID NO: 1780422 - RNA, 19 nt, Artificial Sequence
  Description of Artificial Sequence: Synthetic oligonucleotide
gcuuacuuacagccgagcc

SEQ ID NO: 1780423 - RNA, 19 nt, Artificial Sequence
  Description of Artificial Sequence: Synthetic oligonucleotide
auuccacaucauuucugug

SEQ ID NO: 1780424 - RNA, 19 nt, Artificial Sequence
  Description of Artificial Sequence: Synthetic oligonucleotide
ucguugugaagugcacacg

SEQ ID NO: 1780425 - RNA, 19 nt, Artificial Sequence
  Description of Artificial Sequence: Synthetic oligonucleotide
gcguccagaggucaggagg

SEQ ID NO: 1780426 - RNA, 19 nt, Artificial Sequence
  Description of Artificial Sequence: Synthetic oligonucleotide
cuguaggaauggaugaaca

SEQ ID NO: 1780427 - RNA, 19 nt, Artificial Sequence
  Description of Artificial Sequence: Synthetic oligonucleotide
acagugcugagugaauucu

SEQ ID NO: 1780428 - RNA, 19 nt, Artificial Sequence
  Description of Artificial Sequence: Synthetic oligonucleotide
  modified_base (6)..(6): a, c, u, g, unknown or other
caaacngcguccagagguc

SEQ ID NO: 1780429 - RNA, 19 nt, Artificial Sequence
  Description of Artificial Sequence: Synthetic oligonucleotide
aauggacccucggugacau

SEQ ID NO: 1780430 - RNA, 19 nt, Artificial Sequence
  Description of Artificial Sequence: Synthetic oligonucleotide
ugaccuacguuagucuacu

SEQ ID NO: 1780431 - RNA, 19 nt, Artificial Sequence
  Description of Artificial Sequence: Synthetic oligonucleotide
accuacguuagucuacuuu

SEQ ID NO: 1780432 - RNA, 19 nt, Artificial Sequence
  Description of Artificial Sequence: Synthetic oligonucleotide
ggcccugucaacauggcag

SEQ ID NO: 1780433 - RNA, 19 nt, Artificial Sequence
  Description of Artificial Sequence: Synthetic oligonucleotide
ugauauagaugccgucguu

SEQ ID NO: 1780434 - RNA, 19 nt, Artificial Sequence
  Description of Artificial Sequence: Synthetic oligonucleotide
cagaccugucuuuuaaaca

SEQ ID NO: 1780435 - RNA, 19 nt, Artificial Sequence
  Description of Artificial Sequence: Synthetic oligonucleotide
  modified_base (8)..(8): a, c, u, g, unknown or other
cucaaacngcguccagagg

SEQ ID NO: 1780436 - RNA, 19 nt, Artificial Sequence
  Description of Artificial Sequence: Synthetic oligonucleotide
gcaccaacaggcccuacgg

SEQ ID NO: 1780437 - RNA, 19 nt, Artificial Sequence
  Description of Artificial Sequence: Synthetic oligonucleotide
  modified_base (5)..(5): a, c, u, g, unknown or other
aaacngcguccagagguca

SEQ ID NO: 1780438 - RNA, 19 nt, Artificial Sequence
  Description of Artificial Sequence: Synthetic oligonucleotide
gauauggacgcugcagguc

SEQ ID NO: 1780439 - RNA, 19 nt, Artificial Sequence
  Description of Artificial Sequence: Synthetic oligonucleotide
gaugaacauggcccuguca

SEQ ID NO: 1780440 - RNA, 19 nt, Artificial Sequence
  Description of Artificial Sequence: Synthetic oligonucleotide
  modified_base (10)..(10): a, c, u, g, unknown or other
gucucaaacngcguccaga

SEQ ID NO: 1780441 - RNA, 19 nt, Artificial Sequence
  Description of Artificial Sequence: Synthetic oligonucleotide
cacgucagguucaggcccg

SEQ ID NO: 1780442 - RNA, 19 nt, Artificial Sequence
  Description of Artificial Sequence: Synthetic oligonucleotide
cugagugaauucuaacaaa

SEQ ID NO: 1780443 - RNA, 19 nt, Artificial Sequence
  Description of Artificial Sequence: Synthetic oligonucleotide
auaugugaccuacguuagu

SEQ ID NO: 1780444 - RNA, 19 nt, Artificial Sequence
  Description of Artificial Sequence: Synthetic oligonucleotide
aaacacaucuguggggcua

SEQ ID NO: 1780445 - RNA, 19 nt, Artificial Sequence
  Description of Artificial Sequence: Synthetic oligonucleotide
  modified_base (4)..(4): a, c, u, g, unknown or other
aacngcguccagaggucag

SEQ ID NO: 1780446 - RNA, 19 nt, Artificial Sequence
  Description of Artificial Sequence: Synthetic oligonucleotide
aagcuuacuuacagccgag

SEQ ID NO: 1780447 - RNA, 19 nt, Artificial Sequence
  Description of Artificial Sequence: Synthetic oligonucleotide
  modified_base (14)..(14): a, c, u, g, unknown or other
gcaggucucaaacngcguc

SEQ ID NO: 1780448 - RNA, 19 nt, Artificial Sequence
  Description of Artificial Sequence: Synthetic oligonucleotide
cacuccaaacuacggacuc

SEQ ID NO: 1780449 - RNA, 19 nt, Artificial Sequence
  Description of Artificial Sequence: Synthetic oligonucleotide
cuuugcuuugccagugaca

SEQ ID NO: 1780450 - RNA, 19 nt, Artificial Sequence
  Description of Artificial Sequence: Synthetic oligonucleotide
ugaaccagaccugucuuuu

SEQ ID NO: 1780451 - RNA, 19 nt, Artificial Sequence
  Description of Artificial Sequence: Synthetic oligonucleotide
agaaaccaguagguuaugu

SEQ ID NO: 1780452 - RNA, 19 nt, Artificial Sequence
  Description of Artificial Sequence: Synthetic oligonucleotide
guaguaccacugccgagug

SEQ ID NO: 1780453 - RNA, 19 nt, Artificial Sequence
  Description of Artificial Sequence: Synthetic oligonucleotide
cagaauggacccucgguga

SEQ ID NO: 1780454 - RNA, 19 nt, Artificial Sequence
  Description of Artificial Sequence: Synthetic oligonucleotide
cuuacuuacagccgagccu

SEQ ID NO: 1780455 - RNA, 19 nt, Artificial Sequence
  Description of Artificial Sequence: Synthetic oligonucleotide
uggaugaacauggcccugu

SEQ ID NO: 1780456 - RNA, 19 nt, Artificial Sequence
  Description of Artificial Sequence: Synthetic oligonucleotide
  modified_base (3)..(3): a, c, u, g, unknown or other
acngcguccagaggucagg

SEQ ID NO: 1780457 - RNA, 19 nt, Artificial Sequence
  Description of Artificial Sequence: Synthetic oligonucleotide
ggucauaacagaacauaac

SEQ ID NO: 1780458 - RNA, 19 nt, Artificial Sequence
  Description of Artificial Sequence: Synthetic oligonucleotide
gguagauagagagaagaaa

SEQ ID NO: 1780459 - RNA, 19 nt, Artificial Sequence
  Description of Artificial Sequence: Synthetic oligonucleotide
agguaguaccacugccgag

SEQ ID NO: 1780460 - RNA, 19 nt, Artificial Sequence
  Description of Artificial Sequence: Synthetic oligonucleotide
aagaaaccaguagguuaug

SEQ ID NO: 1780461 - RNA, 19 nt, Artificial Sequence
  Description of Artificial Sequence: Synthetic oligonucleotide
ugacaugcguguguguuua

SEQ ID NO: 1780462 - RNA, 19 nt, Artificial Sequence
  Description of Artificial Sequence: Synthetic oligonucleotide
gucagcgaagauguuguac

SEQ ID NO: 1780463 - RNA, 19 nt, Artificial Sequence
  Description of Artificial Sequence: Synthetic oligonucleotide
gaagugcaaggauuauuua

SEQ ID NO: 1780464 - RNA, 19 nt, Artificial Sequence
  Description of Artificial Sequence: Synthetic oligonucleotide
uccuuccaugguccaaaga

SEQ ID NO: 1780465 - RNA, 19 nt, Artificial Sequence
  Description of Artificial Sequence: Synthetic oligonucleotide
guugaaucauucaggucuc

SEQ ID NO: 1780466 - RNA, 19 nt, Artificial Sequence
  Description of Artificial Sequence: Synthetic oligonucleotide
ugccagugacaaacuauau

SEQ ID NO: 1780467 - RNA, 19 nt, Artificial Sequence
  Description of Artificial Sequence: Synthetic oligonucleotide
ccuacauaugugaccuacg

SEQ ID NO: 1780468 - RNA, 19 nt, Artificial Sequence
  Description of Artificial Sequence: Synthetic oligonucleotide
cguuagucuacuuugucuc

SEQ ID NO: 1780469 - RNA, 19 nt, Artificial Sequence
  Description of Artificial Sequence: Synthetic oligonucleotide
caacaggcccuacggaaac

SEQ ID NO: 1780470 - RNA, 19 nt, Artificial Sequence
  Description of Artificial Sequence: Synthetic oligonucleotide
uugaaccagaccugucuuu

SEQ ID NO: 1780471 - RNA, 19 nt, Artificial Sequence
  Description of Artificial Sequence: Synthetic oligonucleotide
uugacaugcguguguguuu

SEQ ID NO: 1780472 - RNA, 19 nt, Artificial Sequence
  Description of Artificial Sequence: Synthetic oligonucleotide
caugguccaaagaaacaaa

SEQ ID NO: 1780473 - RNA, 19 nt, Artificial Sequence
  Description of Artificial Sequence: Synthetic oligonucleotide
  modified_base (15)..(15): a, c, u, g, unknown or other
ugcaggucucaaacngcgu

SEQ ID NO: 1780474 - RNA, 19 nt, Artificial Sequence
  Description of Artificial Sequence: Synthetic oligonucleotide
ccagaccugucuuuuaaac

SEQ ID NO: 1780475 - RNA, 19 nt, Artificial Sequence
  Description of Artificial Sequence: Synthetic oligonucleotide
cucaugauauagaugccgu

SEQ ID NO: 1780476 - RNA, 19 nt, Artificial Sequence
  Description of Artificial Sequence: Synthetic oligonucleotide
agugucggucauaacagaa

SEQ ID NO: 1780477 - RNA, 19 nt, Artificial Sequence
  Description of Artificial Sequence: Synthetic oligonucleotide
cuacauaugugaccuacgu

SEQ ID NO: 1780478 - RNA, 19 nt, Artificial Sequence
  Description of Artificial Sequence: Synthetic oligonucleotide
cgagugacgguguuguagg

SEQ ID NO: 1780479 - RNA, 19 nt, Artificial Sequence
  Description of Artificial Sequence: Synthetic oligonucleotide
ugcggauauggacgcugca

SEQ ID NO: 1780480 - RNA, 19 nt, Artificial Sequence
  Description of Artificial Sequence: Synthetic oligonucleotide
cugcacggugagcaugucc

SEQ ID NO: 1780481 - RNA, 19 nt, Artificial Sequence
  Description of Artificial Sequence: Synthetic oligonucleotide
uagaugccgucguugugaa

SEQ ID NO: 1780482 - RNA, 19 nt, Artificial Sequence
  Description of Artificial Sequence: Synthetic oligonucleotide
acauggcccugucaacaug

SEQ ID NO: 1780483 - RNA, 19 nt, Artificial Sequence
  Description of Artificial Sequence: Synthetic oligonucleotide
cacgcggugcuccaagcug

SEQ ID NO: 1780484 - RNA, 19 nt, Artificial Sequence
  Description of Artificial Sequence: Synthetic oligonucleotide
guguugaaucauucagguc

SEQ ID NO: 1780485 - RNA, 19 nt, Artificial Sequence
  Description of Artificial Sequence: Synthetic oligonucleotide
gcugucagcgaagauguug

SEQ ID NO: 1780486 - RNA, 19 nt, Artificial Sequence
  Description of Artificial Sequence: Synthetic oligonucleotide
cugcgguugugugacaaug

SEQ ID NO: 1780487 - RNA, 19 nt, Artificial Sequence
  Description of Artificial Sequence: Synthetic oligonucleotide
cccuacggaaacacaaagc

SEQ ID NO: 1780488 - RNA, 19 nt, Artificial Sequence
  Description of Artificial Sequence: Synthetic oligonucleotide
gugucggucauaacagaac

SEQ ID NO: 1780489 - RNA, 19 nt, Artificial Sequence
  Description of Artificial Sequence: Synthetic oligonucleotide
acggacucaguacaaccuu

SEQ ID NO: 1780490 - RNA, 19 nt, Artificial Sequence
  Description of Artificial Sequence: Synthetic oligonucleotide
agccuccuacauaugugac

SEQ ID NO: 1780491 - RNA, 19 nt, Artificial Sequence
  Description of Artificial Sequence: Synthetic oligonucleotide
guucaggcccgacuuggac

SEQ ID NO: 1780492 - RNA, 19 nt, Artificial Sequence
  Description of Artificial Sequence: Synthetic oligonucleotide
ugugaagugcaaggauuau

SEQ ID NO: 1780493 - RNA, 19 nt, Artificial Sequence
  Description of Artificial Sequence: Synthetic oligonucleotide
guuucacaagugucagaca

SEQ ID NO: 1780494 - RNA, 19 nt, Artificial Sequence
  Description of Artificial Sequence: Synthetic oligonucleotide
cagguaguaccacugccga

SEQ ID NO: 1780495 - RNA, 19 nt, Artificial Sequence
  Description of Artificial Sequence: Synthetic oligonucleotide
gcccuacggaaacacaaag

SEQ ID NO: 1780496 - RNA, 19 nt, Artificial Sequence
  Description of Artificial Sequence: Synthetic oligonucleotide
uacuuacagccgagccucc

SEQ ID NO: 1780497 - RNA, 19 nt, Artificial Sequence
  Description of Artificial Sequence: Synthetic oligonucleotide
uccaaacuacggacucagu

SEQ ID NO: 1780498 - RNA, 19 nt, Artificial Sequence
  Description of Artificial Sequence: Synthetic oligonucleotide
gugacgguguuguaggccu

SEQ ID NO: 1780499 - RNA, 19 nt, Artificial Sequence
  Description of Artificial Sequence: Synthetic oligonucleotide
acgcggugcuccaagcugg

SEQ ID NO: 1780500 - RNA, 19 nt, Artificial Sequence
  Description of Artificial Sequence: Synthetic oligonucleotide
gccuccuacauaugugacc

SEQ ID NO: 1780501 - RNA, 19 nt, Artificial Sequence
  Description of Artificial Sequence: Synthetic oligonucleotide
ugacgguguuguaggccug

SEQ ID NO: 1780502 - RNA, 19 nt, Artificial Sequence
  Description of Artificial Sequence: Synthetic oligonucleotide
accagaccugucuuuuaaa

SEQ ID NO: 1780503 - RNA, 19 nt, Artificial Sequence
  Description of Artificial Sequence: Synthetic oligonucleotide
gugaccuacguuagucuac

SEQ ID NO: 1780504 - RNA, 19 nt, Artificial Sequence
  Description of Artificial Sequence: Synthetic oligonucleotide
gacgguguuguaggccugc

SEQ ID NO: 1780505 - RNA, 19 nt, Artificial Sequence
  Description of Artificial Sequence: Synthetic oligonucleotide
augccgucguugugaagug

SEQ ID NO: 1780506 - RNA, 19 nt, Artificial Sequence
  Description of Artificial Sequence: Synthetic oligonucleotide
cggauauggacgcugcagg

SEQ ID NO: 1780507 - RNA, 19 nt, Artificial Sequence
  Description of Artificial Sequence: Synthetic oligonucleotide
aacuacggacucaguacaa

SEQ ID NO: 1780508 - RNA, 19 nt, Artificial Sequence
  Description of Artificial Sequence: Synthetic oligonucleotide
uaguaccacugccgaguga

SEQ ID NO: 1780509 - RNA, 19 nt, Artificial Sequence
  Description of Artificial Sequence: Synthetic oligonucleotide
guuagucuacuuugucucu

SEQ ID NO: 1780510 - RNA, 19 nt, Artificial Sequence
  Description of Artificial Sequence: Synthetic oligonucleotide
ccucggugacauuucacag

SEQ ID NO: 1780511 - RNA, 19 nt, Artificial Sequence
  Description of Artificial Sequence: Synthetic oligonucleotide
acacuccaaacuacggacu

SEQ ID NO: 1780512 - RNA, 19 nt, Artificial Sequence
  Description of Artificial Sequence: Synthetic oligonucleotide
acaaagcaccccggggcuc

SEQ ID NO: 1780513 - RNA, 19 nt, Artificial Sequence
  Description of Artificial Sequence: Synthetic oligonucleotide
  modified_base (12)..(12): a, c, u, g, unknown or other
aggucucaaacngcgucca

SEQ ID NO: 1780514 - RNA, 19 nt, Artificial Sequence
  Description of Artificial Sequence: Synthetic oligonucleotide
aucugcuguuugcggauau

SEQ ID NO: 1780515 - RNA, 19 nt, Artificial Sequence
  Description of Artificial Sequence: Synthetic oligonucleotide
  modified_base (19)..(19): a, c, u, g, unknown or other
acgcugcaggucucaaacn

SEQ ID NO: 1780516 - RNA, 19 nt, Artificial Sequence
  Description of Artificial Sequence: Synthetic oligonucleotide
ugcugcgguugugugacaa

SEQ ID NO: 1780517 - RNA, 19 nt, Artificial Sequence
  Description of Artificial Sequence: Synthetic oligonucleotide
agggacaugcccacucuga

SEQ ID NO: 1780518 - RNA, 19 nt, Artificial Sequence
  Description of Artificial Sequence: Synthetic oligonucleotide
gaauggacccucggugaca

SEQ ID NO: 1780519 - RNA, 19 nt, Artificial Sequence
  Description of Artificial Sequence: Synthetic oligonucleotide
gcggauauggacgcugcag

SEQ ID NO: 1780520 - RNA, 19 nt, Artificial Sequence
  Description of Artificial Sequence: Synthetic oligonucleotide
cagggacaugcccacucug

SEQ ID NO: 1780521 - RNA, 19 nt, Artificial Sequence
  Description of Artificial Sequence: Synthetic oligonucleotide
ggcaguugcuauauauuuc

SEQ ID NO: 1780522 - RNA, 19 nt, Artificial Sequence
  Description of Artificial Sequence: Synthetic oligonucleotide
aaccgccggaaggcuuccc

SEQ ID NO: 1780523 - RNA, 19 nt, Artificial Sequence
  Description of Artificial Sequence: Synthetic oligonucleotide
gacccucggugacauuuca

SEQ ID NO: 1780524 - RNA, 19 nt, Artificial Sequence
  Description of Artificial Sequence: Synthetic oligonucleotide
ugcacacgucagguucagg

SEQ ID NO: 1780525 - RNA, 19 nt, Artificial Sequence
  Description of Artificial Sequence: Synthetic oligonucleotide
acguguucuccuucaggua

SEQ ID NO: 1780526 - RNA, 19 nt, Artificial Sequence
  Description of Artificial Sequence: Synthetic oligonucleotide
acccucggugacauuucac

SEQ ID NO: 1780527 - RNA, 19 nt, Artificial Sequence
  Description of Artificial Sequence: Synthetic oligonucleotide
auggaugaacauggcccug

SEQ ID NO: 1780528 - RNA, 19 nt, Artificial Sequence
  Description of Artificial Sequence: Synthetic oligonucleotide
gguggacagagugacaucu

SEQ ID NO: 1780529 - RNA, 19 nt, Artificial Sequence
  Description of Artificial Sequence: Synthetic oligonucleotide
cuacguuagucuacuuugu

SEQ ID NO: 1780530 - RNA, 19 nt, Artificial Sequence
  Description of Artificial Sequence: Synthetic oligonucleotide
ccaaacuacggacucagua

SEQ ID NO: 1780531 - RNA, 19 nt, Artificial Sequence
  Description of Artificial Sequence: Synthetic oligonucleotide
agaugccgucguugugaag

SEQ ID NO: 1780532 - RNA, 19 nt, Artificial Sequence
  Description of Artificial Sequence: Synthetic oligonucleotide
cacagacuacaaauuacau

SEQ ID NO: 1780533 - RNA, 19 nt, Artificial Sequence
  Description of Artificial Sequence: Synthetic oligonucleotide
caugcccacucugaaguga

SEQ ID NO: 1780534 - RNA, 19 nt, Artificial Sequence
  Description of Artificial Sequence: Synthetic oligonucleotide
guugacaugcguguguguu

SEQ ID NO: 1780535 - RNA, 19 nt, Artificial Sequence
  Description of Artificial Sequence: Synthetic oligonucleotide
aagcaccaacaggcccuac

SEQ ID NO: 1780536 - RNA, 19 nt, Artificial Sequence
  Description of Artificial Sequence: Synthetic oligonucleotide
acuuacagccgagccuccu

SEQ ID NO: 1780537 - RNA, 19 nt, Artificial Sequence
  Description of Artificial Sequence: Synthetic oligonucleotide
ccgagugacgguguuguag

SEQ ID NO: 1780538 - RNA, 19 nt, Artificial Sequence
  Description of Artificial Sequence: Synthetic oligonucleotide
ugccgucguugugaagugc

SEQ ID NO: 1780539 - RNA, 19 nt, Artificial Sequence
  Description of Artificial Sequence: Synthetic oligonucleotide
  modified_base (11)..(11): a, c, u, g, unknown or other
ggucucaaacngcguccag

SEQ ID NO: 1780540 - RNA, 19 nt, Artificial Sequence
  Description of Artificial Sequence: Synthetic oligonucleotide
cacugcugcgguuguguga

SEQ ID NO: 1780541 - RNA, 19 nt, Artificial Sequence
  Description of Artificial Sequence: Synthetic oligonucleotide
cccucggugacauuucaca

SEQ ID NO: 1780542 - RNA, 19 nt, Artificial Sequence
  Description of Artificial Sequence: Synthetic oligonucleotide
acaugcguguguguuuauu

SEQ ID NO: 1780543 - RNA, 19 nt, Artificial Sequence
  Description of Artificial Sequence: Synthetic oligonucleotide
acugccgagugacgguguu

SEQ ID NO: 1780544 - RNA, 19 nt, Artificial Sequence
  Description of Artificial Sequence: Synthetic oligonucleotide
ccaugguccaaagaaacaa

SEQ ID NO: 1780545 - RNA, 19 nt, Artificial Sequence
  Description of Artificial Sequence: Synthetic oligonucleotide
cuuacagccgagccuccua

SEQ ID NO: 1780546 - RNA, 19 nt, Artificial Sequence
  Description of Artificial Sequence: Synthetic oligonucleotide
cccggggcucuucagaaug

SEQ ID NO: 1780547 - RNA, 19 nt, Artificial Sequence
  Description of Artificial Sequence: Synthetic oligonucleotide
caacgauguagaugguccu

SEQ ID NO: 1780548 - RNA, 19 nt, Artificial Sequence
  Description of Artificial Sequence: Synthetic oligonucleotide
ggcuacagugcugagugaa

SEQ ID NO: 1780549 - RNA, 19 nt, Artificial Sequence
  Description of Artificial Sequence: Synthetic oligonucleotide
cacaucauuucuguguuuu

SEQ ID NO: 1780550 - RNA, 19 nt, Artificial Sequence
  Description of Artificial Sequence: Synthetic oligonucleotide
ggacucaguacaaccuuuc

SEQ ID NO: 1780551 - RNA, 19 nt, Artificial Sequence
  Description of Artificial Sequence: Synthetic oligonucleotide
cgguugugugacaauguug

SEQ ID NO: 1780552 - RNA, 19 nt, Artificial Sequence
  Description of Artificial Sequence: Synthetic oligonucleotide
gaagugcacacgucagguu

SEQ ID NO: 1780553 - RNA, 19 nt, Artificial Sequence
  Description of Artificial Sequence: Synthetic oligonucleotide
ccacacuccaaacuacgga

SEQ ID NO: 1780554 - RNA, 19 nt, Artificial Sequence
  Description of Artificial Sequence: Synthetic oligonucleotide
gcccacucugaagugacac

SEQ ID NO: 1780555 - RNA, 19 nt, Artificial Sequence
  Description of Artificial Sequence: Synthetic oligonucleotide
gcguguguguuuauuccac

SEQ ID NO: 1780556 - RNA, 19 nt, Artificial Sequence
  Description of Artificial Sequence: Synthetic oligonucleotide
caccaacaggcccuacgga

SEQ ID NO: 1780557 - RNA, 19 nt, Artificial Sequence
  Description of Artificial Sequence: Synthetic oligonucleotide
cagugcugagugaauucua

SEQ ID NO: 1780558 - RNA, 19 nt, Artificial Sequence
  Description of Artificial Sequence: Synthetic oligonucleotide
caguugcuauauauuuccu

SEQ ID NO: 1780559 - RNA, 19 nt, Artificial Sequence
  Description of Artificial Sequence: Synthetic oligonucleotide
acauggcaguugcuauaua

SEQ ID NO: 1780560 - RNA, 19 nt, Artificial Sequence
  Description of Artificial Sequence: Synthetic oligonucleotide
ggaaccgccggaaggcuuc

SEQ ID NO: 1780561 - RNA, 19 nt, Artificial Sequence
  Description of Artificial Sequence: Synthetic oligonucleotide
ccggggcucuucagaaugg

SEQ ID NO: 1780562 - RNA, 19 nt, Artificial Sequence
  Description of Artificial Sequence: Synthetic oligonucleotide
ccgacuuggacguguucuc

SEQ ID NO: 1780563 - RNA, 19 nt, Artificial Sequence
  Description of Artificial Sequence: Synthetic oligonucleotide
ccuccuacauaugugaccu

SEQ ID NO: 1780564 - RNA, 19 nt, Artificial Sequence
  Description of Artificial Sequence: Synthetic oligonucleotide
gacauuucacaggcucccu

SEQ ID NO: 1780565 - RNA, 19 nt, Artificial Sequence
  Description of Artificial Sequence: Synthetic oligonucleotide
aggcccgacuuggacgugu

SEQ ID NO: 1780566 - RNA, 19 nt, Artificial Sequence
  Description of Artificial Sequence: Synthetic oligonucleotide
cccaacgauguagaugguc

SEQ ID NO: 1780567 - RNA, 19 nt, Artificial Sequence
  Description of Artificial Sequence: Synthetic oligonucleotide
guagaugguccuccucgau

SEQ ID NO: 1780568 - RNA, 19 nt, Artificial Sequence
  Description of Artificial Sequence: Synthetic oligonucleotide
gccgucguugugaagugca

SEQ ID NO: 1780569 - RNA, 19 nt, Artificial Sequence
  Description of Artificial Sequence: Synthetic oligonucleotide
cugccgagugacgguguug

SEQ ID NO: 1780570 - RNA, 19 nt, Artificial Sequence
  Description of Artificial Sequence: Synthetic oligonucleotide
ccaacaggcccuacggaaa

SEQ ID NO: 1780571 - RNA, 19 nt, Artificial Sequence
  Description of Artificial Sequence: Synthetic oligonucleotide
ggauuucaaaggguugccu

SEQ ID NO: 1780572 - RNA, 19 nt, Artificial Sequence
  Description of Artificial Sequence: Synthetic oligonucleotide
gucggucauaacagaacau

SEQ ID NO: 1780573 - RNA, 19 nt, Artificial Sequence
  Description of Artificial Sequence: Synthetic oligonucleotide
  modified_base (2)..(2): a, c, u, g, unknown or other
cngcguccagaggucagga

SEQ ID NO: 1780574 - RNA, 19 nt, Artificial Sequence
  Description of Artificial Sequence: Synthetic oligonucleotide
ccgucguugugaagugcac

SEQ ID NO: 1780575 - RNA, 19 nt, Artificial Sequence
  Description of Artificial Sequence: Synthetic oligonucleotide
ccgccggaaggcuucccag

SEQ ID NO: 1780576 - RNA, 19 nt, Artificial Sequence
  Description of Artificial Sequence: Synthetic oligonucleotide
cccacucugaagugacaca

SEQ ID NO: 1780577 - RNA, 19 nt, Artificial Sequence
  Description of Artificial Sequence: Synthetic oligonucleotide
ggacgcugcaggucucaaa

SEQ ID NO: 1780578 - RNA, 19 nt, Artificial Sequence
  Description of Artificial Sequence: Synthetic oligonucleotide
cccuugaaccagaccuguc

SEQ ID NO: 1780579 - RNA, 19 nt, Artificial Sequence
  Description of Artificial Sequence: Synthetic oligonucleotide
cagcgaagauguuguacuu

SEQ ID NO: 1780580 - RNA, 19 nt, Artificial Sequence
  Description of Artificial Sequence: Synthetic oligonucleotide
ggcccuacggaaacacaaa

SEQ ID NO: 1780581 - RNA, 19 nt, Artificial Sequence
  Description of Artificial Sequence: Synthetic oligonucleotide
gcccugucaacauggcagu

SEQ ID NO: 1780582 - RNA, 19 nt, Artificial Sequence
  Description of Artificial Sequence: Synthetic oligonucleotide
gguucaggcccgacuugga

SEQ ID NO: 1780583 - RNA, 19 nt, Artificial Sequence
  Description of Artificial Sequence: Synthetic oligonucleotide
cuccuacauaugugaccua

SEQ ID NO: 1780584 - RNA, 19 nt, Artificial Sequence
  Description of Artificial Sequence: Synthetic oligonucleotide
gcgguugugugacaauguu

SEQ ID NO: 1780585 - RNA, 19 nt, Artificial Sequence
  Description of Artificial Sequence: Synthetic oligonucleotide
ccgauuccacaucauuucu

SEQ ID NO: 1780586 - RNA, 19 nt, Artificial Sequence
  Description of Artificial Sequence: Synthetic oligonucleotide
cccgacuuggacguguucu

SEQ ID NO: 1780587 - RNA, 19 nt, Artificial Sequence
  Description of Artificial Sequence: Synthetic oligonucleotide
ccgagccuccuacauaugu

SEQ ID NO: 1780588 - RNA, 19 nt, Artificial Sequence
  Description of Artificial Sequence: Synthetic oligonucleotide
gggcuacagugcugaguga

SEQ ID NO: 1780589 - RNA, 19 nt, Artificial Sequence
  Description of Artificial Sequence: Synthetic oligonucleotide
gaccuacguuagucuacuu

SEQ ID NO: 1780590 - RNA, 19 nt, Artificial Sequence
  Description of Artificial Sequence: Synthetic oligonucleotide
cacugccgagugacggugu

SEQ ID NO: 1780591 - RNA, 19 nt, Artificial Sequence
  Description of Artificial Sequence: Synthetic oligonucleotide
cgucguugugaagugcaca

SEQ ID NO: 1780592 - RNA, 19 nt, Artificial Sequence
  Description of Artificial Sequence: Synthetic oligonucleotide
ggaacacgcggugcuccaa

SEQ ID NO: 1780593 - RNA, 19 nt, Artificial Sequence
  Description of Artificial Sequence: Synthetic oligonucleotide
gcuacagugcugagugaau

SEQ ID NO: 1780594 - RNA, 19 nt, Artificial Sequence
  Description of Artificial Sequence: Synthetic oligonucleotide
cugcugcgguugugugaca

SEQ ID NO: 1780595 - RNA, 19 nt, Artificial Sequence
  Description of Artificial Sequence: Synthetic oligonucleotide
gcccgacuuggacguguuc

SEQ ID NO: 1780596 - RNA, 19 nt, Artificial Sequence
  Description of Artificial Sequence: Synthetic oligonucleotide
caggcccgacuuggacgug

SEQ ID NO: 1780597 - RNA, 19 nt, Artificial Sequence
  Description of Artificial Sequence: Synthetic oligonucleotide
cgauguagaugguccuccu

SEQ ID NO: 1780598 - RNA, 19 nt, Artificial Sequence
  Description of Artificial Sequence: Synthetic oligonucleotide
gccgagugacgguguugua

SEQ ID NO: 1780599 - RNA, 19 nt, Artificial Sequence
  Description of Artificial Sequence: Synthetic oligonucleotide
cggacucaguacaaccuuu

SEQ ID NO: 1780600 - RNA, 19 nt, Artificial Sequence
  Description of Artificial Sequence: Synthetic oligonucleotide
cgucagguucaggcccgac

SEQ ID NO: 1780601 - RNA, 19 nt, Artificial Sequence
  Description of Artificial Sequence: Synthetic oligonucleotide
ggcccgacuuggacguguu

SEQ ID NO: 1780602 - RNA, 19 nt, Artificial Sequence
  Description of Artificial Sequence: Synthetic oligonucleotide
ccccggggcucuucagaau

SEQ ID NO: 1780603 - RNA, 19 nt, Artificial Sequence
  Description of Artificial Sequence: Synthetic oligonucleotide
  modified_base (1)..(1): a, c, u, g, unknown or other
ngcguccagaggucaggag

SEQ ID NO: 1780604 - RNA, 19 nt, Artificial Sequence
  Description of Artificial Sequence: Synthetic oligonucleotide
aagguuaaguucuugaagg

SEQ ID NO: 1780605 - RNA, 19 nt, Artificial Sequence
  Description of Artificial Sequence: Synthetic oligonucleotide
uguaauuuuauuucgagcu

SEQ ID NO: 1780606 - RNA, 19 nt, Artificial Sequence
  Description of Artificial Sequence: Synthetic oligonucleotide
aaagacucuagacacaauc

SEQ ID NO: 1780607 - RNA, 19 nt, Artificial Sequence
  Description of Artificial Sequence: Synthetic oligonucleotide
aguuaaugguacuugaagc

SEQ ID NO: 1780608 - RNA, 19 nt, Artificial Sequence
  Description of Artificial Sequence: Synthetic oligonucleotide
caaaucucgacaaacaugg

SEQ ID NO: 1780609 - RNA, 19 nt, Artificial Sequence
  Description of Artificial Sequence: Synthetic oligonucleotide
ugauaugagggccauaugg

SEQ ID NO: 1780610 - RNA, 19 nt, Artificial Sequence
  Description of Artificial Sequence: Synthetic oligonucleotide
aaauucugaagucuucuac

SEQ ID NO: 1780611 - RNA, 19 nt, Artificial Sequence
  Description of Artificial Sequence: Synthetic oligonucleotide
uaagguuuaaauuucuaag

SEQ ID NO: 1780612 - RNA, 19 nt, Artificial Sequence
  Description of Artificial Sequence: Synthetic oligonucleotide
cuuuaaauucacaagguag

SEQ ID NO: 1780613 - RNA, 19 nt, Artificial Sequence
  Description of Artificial Sequence: Synthetic oligonucleotide
aauucauuaucacuaaggu

SEQ ID NO: 1780614 - RNA, 19 nt, Artificial Sequence
  Description of Artificial Sequence: Synthetic oligonucleotide
gaugugauaaccauuuugg

SEQ ID NO: 1780615 - RNA, 19 nt, Artificial Sequence
  Description of Artificial Sequence: Synthetic oligonucleotide
gauuaauuguuguaguucc

SEQ ID NO: 1780616 - RNA, 19 nt, Artificial Sequence
  Description of Artificial Sequence: Synthetic oligonucleotide
uaaauuucuaaguucccgg

SEQ ID NO: 1780617 - RNA, 19 nt, Artificial Sequence
  Description of Artificial Sequence: Synthetic oligonucleotide
aaguuaaugguacuugaag

SEQ ID NO: 1780618 - RNA, 19 nt, Artificial Sequence
  Description of Artificial Sequence: Synthetic oligonucleotide
gaaaacgaagguuuguuag

SEQ ID NO: 1780619 - RNA, 19 nt, Artificial Sequence
  Description of Artificial Sequence: Synthetic oligonucleotide
auaauaggagcuuccauuc

SEQ ID NO: 1780620 - RNA, 19 nt, Artificial Sequence
  Description of Artificial Sequence: Synthetic oligonucleotide
aauccuguuggauaguaug

SEQ ID NO: 1780621 - RNA, 19 nt, Artificial Sequence
  Description of Artificial Sequence: Synthetic oligonucleotide
uuagagaacaaaaguaaga

SEQ ID NO: 1780622 - RNA, 19 nt, Artificial Sequence
  Description of Artificial Sequence: Synthetic oligonucleotide
ucuacuaagaccaccgugu

SEQ ID NO: 1780623 - RNA, 19 nt, Artificial Sequence
  Description of Artificial Sequence: Synthetic oligonucleotide
uaagguuaaguucuugaag

SEQ ID NO: 1780624 - RNA, 19 nt, Artificial Sequence
  Description of Artificial Sequence: Synthetic oligonucleotide
uguuguaguuccuugaaug

SEQ ID NO: 1780625 - RNA, 19 nt, Artificial Sequence
  Description of Artificial Sequence: Synthetic oligonucleotide
uauacaauugugacucagg

SEQ ID NO: 1780626 - RNA, 19 nt, Artificial Sequence
  Description of Artificial Sequence: Synthetic oligonucleotide
aucacuaagguuuaaauuu

SEQ ID NO: 1780627 - RNA, 19 nt, Artificial Sequence
  Description of Artificial Sequence: Synthetic oligonucleotide
aaaauugccaggacuggcc

SEQ ID NO: 1780628 - RNA, 19 nt, Artificial Sequence
  Description of Artificial Sequence: Synthetic oligonucleotide
aggucuaacuuucuaaggg

SEQ ID NO: 1780629 - RNA, 19 nt, Artificial Sequence
  Description of Artificial Sequence: Synthetic oligonucleotide
ugauagaaaacgaagguuu

SEQ ID NO: 1780630 - RNA, 19 nt, Artificial Sequence
  Description of Artificial Sequence: Synthetic oligonucleotide
aguuguccuaucuugaaag

SEQ ID NO: 1780631 - RNA, 19 nt, Artificial Sequence
  Description of Artificial Sequence: Synthetic oligonucleotide
uuuauaaucggaagggcuc

SEQ ID NO: 1780632 - RNA, 19 nt, Artificial Sequence
  Description of Artificial Sequence: Synthetic oligonucleotide
uauuucgagcugcugauag

SEQ ID NO: 1780633 - RNA, 19 nt, Artificial Sequence
  Description of Artificial Sequence: Synthetic oligonucleotide
acuaagaccaccguguggg

SEQ ID NO: 1780634 - RNA, 19 nt, Artificial Sequence
  Description of Artificial Sequence: Synthetic oligonucleotide
aauuucuaaguucccggag

SEQ ID NO: 1780635 - RNA, 19 nt, Artificial Sequence
  Description of Artificial Sequence: Synthetic oligonucleotide
uguuaguuguccuaucuug

SEQ ID NO: 1780636 - RNA, 19 nt, Artificial Sequence
  Description of Artificial Sequence: Synthetic oligonucleotide
aguguugaaagugguaugc

SEQ ID NO: 1780637 - RNA, 19 nt, Artificial Sequence
  Description of Artificial Sequence: Synthetic oligonucleotide
gauaguaugguuugugcac

SEQ ID NO: 1780638 - RNA, 19 nt, Artificial Sequence
  Description of Artificial Sequence: Synthetic oligonucleotide
uccaauuguagcuggaagc

SEQ ID NO: 1780639 - RNA, 19 nt, Artificial Sequence
  Description of Artificial Sequence: Synthetic oligonucleotide
ucuaaguucccggaguugg

SEQ ID NO: 1780640 - RNA, 19 nt, Artificial Sequence
  Description of Artificial Sequence: Synthetic oligonucleotide
aaugauaugagggccauau

SEQ ID NO: 1780641 - RNA, 19 nt, Artificial Sequence
  Description of Artificial Sequence: Synthetic oligonucleotide
auccacauuaucuacuaag

SEQ ID NO: 1780642 - RNA, 19 nt, Artificial Sequence
  Description of Artificial Sequence: Synthetic oligonucleotide
caggugauugucauuaagg

SEQ ID NO: 1780643 - RNA, 19 nt, Artificial Sequence
  Description of Artificial Sequence: Synthetic oligonucleotide
ucaggucuaacuuucuaag

SEQ ID NO: 1780644 - RNA, 19 nt, Artificial Sequence
  Description of Artificial Sequence: Synthetic oligonucleotide
aauuguuguaguuccuuga

SEQ ID NO: 1780645 - RNA, 19 nt, Artificial Sequence
  Description of Artificial Sequence: Synthetic oligonucleotide
ugucauuaagguuaaguuc

SEQ ID NO: 1780646 - RNA, 19 nt, Artificial Sequence
  Description of Artificial Sequence: Synthetic oligonucleotide
auuaagguuaaguucuuga

SEQ ID NO: 1780647 - RNA, 19 nt, Artificial Sequence
  Description of Artificial Sequence: Synthetic oligonucleotide
uuguaauuuuauuucgagc

SEQ ID NO: 1780648 - RNA, 19 nt, Artificial Sequence
  Description of Artificial Sequence: Synthetic oligonucleotide
aaguaagagauaauaggag

SEQ ID NO: 1780649 - RNA, 19 nt, Artificial Sequence
  Description of Artificial Sequence: Synthetic oligonucleotide
aaauuucuaaguucccgga

SEQ ID NO: 1780650 - RNA, 19 nt, Artificial Sequence
  Description of Artificial Sequence: Synthetic oligonucleotide
ugaagcuuuauaaucggaa

SEQ ID NO: 1780651 - RNA, 19 nt, Artificial Sequence
  Description of Artificial Sequence: Synthetic oligonucleotide
agcuuuauaaucggaaggg

SEQ ID NO: 1780652 - RNA, 19 nt, Artificial Sequence
  Description of Artificial Sequence: Synthetic oligonucleotide
aagaugaaucaauucauua

SEQ ID NO: 1780653 - RNA, 19 nt, Artificial Sequence
  Description of Artificial Sequence: Synthetic oligonucleotide
aagcgcagcaaaugacucc

SEQ ID NO: 1780654 - RNA, 19 nt, Artificial Sequence
  Description of Artificial Sequence: Synthetic oligonucleotide
aaucucgacaaacauggaa

SEQ ID NO: 1780655 - RNA, 19 nt, Artificial Sequence
  Description of Artificial Sequence: Synthetic oligonucleotide
uuuaagcagagcauacgca

SEQ ID NO: 1780656 - RNA, 19 nt, Artificial Sequence
  Description of Artificial Sequence: Synthetic oligonucleotide
agggauagcacuuuaaauu

SEQ ID NO: 1780657 - RNA, 19 nt, Artificial Sequence
  Description of Artificial Sequence: Synthetic oligonucleotide
acucuagacacaaucuucc

SEQ ID NO: 1780658 - RNA, 19 nt, Artificial Sequence
  Description of Artificial Sequence: Synthetic oligonucleotide
cuugaagcuuuauaaucgg

SEQ ID NO: 1780659 - RNA, 19 nt, Artificial Sequence
  Description of Artificial Sequence: Synthetic oligonucleotide
aagagauaauaggagcuuc

SEQ ID NO: 1780660 - RNA, 19 nt, Artificial Sequence
  Description of Artificial Sequence: Synthetic oligonucleotide
uguuggauaguaugguuug

SEQ ID NO: 1780661 - RNA, 19 nt, Artificial Sequence
  Description of Artificial Sequence: Synthetic oligonucleotide
agaugaaucaauucauuau

SEQ ID NO: 1780662 - RNA, 19 nt, Artificial Sequence
  Description of Artificial Sequence: Synthetic oligonucleotide
uccuuuaaccgaacagugg

SEQ ID NO: 1780663 - RNA, 19 nt, Artificial Sequence
  Description of Artificial Sequence: Synthetic oligonucleotide
uuaagcagagcauacgcau

SEQ ID NO: 1780664 - RNA, 19 nt, Artificial Sequence
  Description of Artificial Sequence: Synthetic oligonucleotide
auacaauugugacucaggu

SEQ ID NO: 1780665 - RNA, 19 nt, Artificial Sequence
  Description of Artificial Sequence: Synthetic oligonucleotide
aaagugguaugcugauguc

SEQ ID NO: 1780666 - RNA, 19 nt, Artificial Sequence
  Description of Artificial Sequence: Synthetic oligonucleotide
uguccuaucuugaaaggaa

SEQ ID NO: 1780667 - RNA, 19 nt, Artificial Sequence
  Description of Artificial Sequence: Synthetic oligonucleotide
ucucgacaaacauggaaag

SEQ ID NO: 1780668 - RNA, 19 nt, Artificial Sequence
  Description of Artificial Sequence: Synthetic oligonucleotide
ucuagacacaaucuuccac

SEQ ID NO: 1780669 - RNA, 19 nt, Artificial Sequence
  Description of Artificial Sequence: Synthetic oligonucleotide
agagauaauaggagcuucc

SEQ ID NO: 1780670 - RNA, 19 nt, Artificial Sequence
  Description of Artificial Sequence: Synthetic oligonucleotide
guuagagaacaaaaguaag

SEQ ID NO: 1780671 - RNA, 19 nt, Artificial Sequence
  Description of Artificial Sequence: Synthetic oligonucleotide
agcaaaugacuccagguga

SEQ ID NO: 1780672 - RNA, 19 nt, Artificial Sequence
  Description of Artificial Sequence: Synthetic oligonucleotide
gaagguuuguuaguugucc

SEQ ID NO: 1780673 - RNA, 19 nt, Artificial Sequence
  Description of Artificial Sequence: Synthetic oligonucleotide
agagcauacgcaugucaac

SEQ ID NO: 1780674 - RNA, 19 nt, Artificial Sequence
  Description of Artificial Sequence: Synthetic oligonucleotide
cauaacaaguuagagaaca

SEQ ID NO: 1780675 - RNA, 19 nt, Artificial Sequence
  Description of Artificial Sequence: Synthetic oligonucleotide
uggauaguaugguuugugc

SEQ ID NO: 1780676 - RNA, 19 nt, Artificial Sequence
  Description of Artificial Sequence: Synthetic oligonucleotide
aauaggagcuuccauucua

SEQ ID NO: 1780677 - RNA, 19 nt, Artificial Sequence
  Description of Artificial Sequence: Synthetic oligonucleotide
aagccuacaaugagaaguc

SEQ ID NO: 1780678 - RNA, 19 nt, Artificial Sequence
  Description of Artificial Sequence: Synthetic oligonucleotide
ugaguguugaaagugguau

SEQ ID NO: 1780679 - RNA, 19 nt, Artificial Sequence
  Description of Artificial Sequence: Synthetic oligonucleotide
augcugaugucacagccuc

SEQ ID NO: 1780680 - RNA, 19 nt, Artificial Sequence
  Description of Artificial Sequence: Synthetic oligonucleotide
gaaagugguaugcugaugu

SEQ ID NO: 1780681 - RNA, 19 nt, Artificial Sequence
  Description of Artificial Sequence: Synthetic oligonucleotide
ggaaaggaaugauaugagg

SEQ ID NO: 1780682 - RNA, 19 nt, Artificial Sequence
  Description of Artificial Sequence: Synthetic oligonucleotide
agugguaugcugaugucac

SEQ ID NO: 1780683 - RNA, 19 nt, Artificial Sequence
  Description of Artificial Sequence: Synthetic oligonucleotide
uuuuggaugugauaaccau

SEQ ID NO: 1780684 - RNA, 19 nt, Artificial Sequence
  Description of Artificial Sequence: Synthetic oligonucleotide
aguauccaaaucucgacaa

SEQ ID NO: 1780685 - RNA, 19 nt, Artificial Sequence
  Description of Artificial Sequence: Synthetic oligonucleotide
aaguacucuagggauagca

SEQ ID NO: 1780686 - RNA, 19 nt, Artificial Sequence
  Description of Artificial Sequence: Synthetic oligonucleotide
aaauugccaggacuggccu

SEQ ID NO: 1780687 - RNA, 19 nt, Artificial Sequence
  Description of Artificial Sequence: Synthetic oligonucleotide
uccaaaucucgacaaacau

SEQ ID NO: 1780688 - RNA, 19 nt, Artificial Sequence
  Description of Artificial Sequence: Synthetic oligonucleotide
uggcaguauccaaaucucg

SEQ ID NO: 1780689 - RNA, 19 nt, Artificial Sequence
  Description of Artificial Sequence: Synthetic oligonucleotide
aacgaagguuuguuaguug

SEQ ID NO: 1780690 - RNA, 19 nt, Artificial Sequence
  Description of Artificial Sequence: Synthetic oligonucleotide
cugugagccauccucacag

SEQ ID NO: 1780691 - RNA, 19 nt, Artificial Sequence
  Description of Artificial Sequence: Synthetic oligonucleotide
aagguuuguuaguuguccu

SEQ ID NO: 1780692 - RNA, 19 nt, Artificial Sequence
  Description of Artificial Sequence: Synthetic oligonucleotide
uauccaaaucucgacaaac

SEQ ID NO: 1780693 - RNA, 19 nt, Artificial Sequence
  Description of Artificial Sequence: Synthetic oligonucleotide
uugguagcgaguuccgugc

SEQ ID NO: 1780694 - RNA, 19 nt, Artificial Sequence
  Description of Artificial Sequence: Synthetic oligonucleotide
uuauaaucggaagggcucc

SEQ ID NO: 1780695 - RNA, 19 nt, Artificial Sequence
  Description of Artificial Sequence: Synthetic oligonucleotide
aucuacuaagaccaccgug

SEQ ID NO: 1780696 - RNA, 19 nt, Artificial Sequence
  Description of Artificial Sequence: Synthetic oligonucleotide
cuuuucaguugguagcgag

SEQ ID NO: 1780697 - RNA, 19 nt, Artificial Sequence
  Description of Artificial Sequence: Synthetic oligonucleotide
guuguccuaucuugaaagg

SEQ ID NO: 1780698 - RNA, 19 nt, Artificial Sequence
  Description of Artificial Sequence: Synthetic oligonucleotide
acgaagguuuguuaguugu

SEQ ID NO: 1780699 - RNA, 19 nt, Artificial Sequence
  Description of Artificial Sequence: Synthetic oligonucleotide
aagacucuagacacaaucu

SEQ ID NO: 1780700 - RNA, 19 nt, Artificial Sequence
  Description of Artificial Sequence: Synthetic oligonucleotide
uaagcagagcauacgcaug

SEQ ID NO: 1780701 - RNA, 19 nt, Artificial Sequence
  Description of Artificial Sequence: Synthetic oligonucleotide
gauaauaggagcuuccauu

SEQ ID NO: 1780702 - RNA, 19 nt, Artificial Sequence
  Description of Artificial Sequence: Synthetic oligonucleotide
ucuuuaaaauugccaggac

SEQ ID NO: 1780703 - RNA, 19 nt, Artificial Sequence
  Description of Artificial Sequence: Synthetic oligonucleotide
cuaagguuuaaauuucuaa

SEQ ID NO: 1780704 - RNA, 19 nt, Artificial Sequence
  Description of Artificial Sequence: Synthetic oligonucleotide
ugguaugcugaugucacag

SEQ ID NO: 1780705 - RNA, 19 nt, Artificial Sequence
  Description of Artificial Sequence: Synthetic oligonucleotide
cuugccucggcucuugagc

SEQ ID NO: 1780706 - RNA, 19 nt, Artificial Sequence
  Description of Artificial Sequence: Synthetic oligonucleotide
uuuucaguugguagcgagu

SEQ ID NO: 1780707 - RNA, 19 nt, Artificial Sequence
  Description of Artificial Sequence: Synthetic oligonucleotide
acuuuaaauucacaaggua

SEQ ID NO: 1780708 - RNA, 19 nt, Artificial Sequence
  Description of Artificial Sequence: Synthetic oligonucleotide
acagggagugccuugauuu

SEQ ID NO: 1780709 - RNA, 19 nt, Artificial Sequence
  Description of Artificial Sequence: Synthetic oligonucleotide
cauacgcaugucaacucgg

SEQ ID NO: 1780710 - RNA, 19 nt, Artificial Sequence
  Description of Artificial Sequence: Synthetic oligonucleotide
ucgagcugcugauagaaaa

SEQ ID NO: 1780711 - RNA, 19 nt, Artificial Sequence
  Description of Artificial Sequence: Synthetic oligonucleotide
ucacaagguagauuuguaa

SEQ ID NO: 1780712 - RNA, 19 nt, Artificial Sequence
  Description of Artificial Sequence: Synthetic oligonucleotide
acaagguagauuuguaauu

SEQ ID NO: 1780713 - RNA, 19 nt, Artificial Sequence
  Description of Artificial Sequence: Synthetic oligonucleotide
ggaugugauaaccauuuug

SEQ ID NO: 1780714 - RNA, 19 nt, Artificial Sequence
  Description of Artificial Sequence: Synthetic oligonucleotide
uccacaaacacagguuuug

SEQ ID NO: 1780715 - RNA, 19 nt, Artificial Sequence
  Description of Artificial Sequence: Synthetic oligonucleotide
auccaaguacucuagggau

SEQ ID NO: 1780716 - RNA, 19 nt, Artificial Sequence
  Description of Artificial Sequence: Synthetic oligonucleotide
uagggauagcacuuuaaau

SEQ ID NO: 1780717 - RNA, 19 nt, Artificial Sequence
  Description of Artificial Sequence: Synthetic oligonucleotide
guugguagcgaguuccgug

SEQ ID NO: 1780718 - RNA, 19 nt, Artificial Sequence
  Description of Artificial Sequence: Synthetic oligonucleotide
agcauacgcaugucaacuc

SEQ ID NO: 1780719 - RNA, 19 nt, Artificial Sequence
  Description of Artificial Sequence: Synthetic oligonucleotide
ccuuuaaccgaacaguggc

SEQ ID NO: 1780720 - RNA, 19 nt, Artificial Sequence
  Description of Artificial Sequence: Synthetic oligonucleotide
acgcaugucaacucgggca

SEQ ID NO: 1780721 - RNA, 19 nt, Artificial Sequence
  Description of Artificial Sequence: Synthetic oligonucleotide
gucauuaagguuaaguucu

SEQ ID NO: 1780722 - RNA, 19 nt, Artificial Sequence
  Description of Artificial Sequence: Synthetic oligonucleotide
aaccgaacaguggcuuucc

SEQ ID NO: 1780723 - RNA, 19 nt, Artificial Sequence
  Description of Artificial Sequence: Synthetic oligonucleotide
uaaugguacuugaagcuuu

SEQ ID NO: 1780724 - RNA, 19 nt, Artificial Sequence
  Description of Artificial Sequence: Synthetic oligonucleotide
cacaaaucuggugaagagc

SEQ ID NO: 1780725 - RNA, 19 nt, Artificial Sequence
  Description of Artificial Sequence: Synthetic oligonucleotide
uuaguuguccuaucuugaa

SEQ ID NO: 1780726 - RNA, 19 nt, Artificial Sequence
  Description of Artificial Sequence: Synthetic oligonucleotide
uugcugagauccaaacucu

SEQ ID NO: 1780727 - RNA, 19 nt, Artificial Sequence
  Description of Artificial Sequence: Synthetic oligonucleotide
uuggauaguaugguuugug

SEQ ID NO: 1780728 - RNA, 19 nt, Artificial Sequence
  Description of Artificial Sequence: Synthetic oligonucleotide
uccgcgguggcugacacag

SEQ ID NO: 1780729 - RNA, 19 nt, Artificial Sequence
  Description of Artificial Sequence: Synthetic oligonucleotide
ucuacuggugugaguguug

SEQ ID NO: 1780730 - RNA, 19 nt, Artificial Sequence
  Description of Artificial Sequence: Synthetic oligonucleotide
guaugguuugugcacaaga

SEQ ID NO: 1780731 - RNA, 19 nt, Artificial Sequence
  Description of Artificial Sequence: Synthetic oligonucleotide
ucuagggauagcacuuuaa

SEQ ID NO: 1780732 - RNA, 19 nt, Artificial Sequence
  Description of Artificial Sequence: Synthetic oligonucleotide
ucgggcaagccuacaauga

SEQ ID NO: 1780733 - RNA, 19 nt, Artificial Sequence
  Description of Artificial Sequence: Synthetic oligonucleotide
augaaucaauucauuauca

SEQ ID NO: 1780734 - RNA, 19 nt, Artificial Sequence
  Description of Artificial Sequence: Synthetic oligonucleotide
uuucuaaguucccggaguu

SEQ ID NO: 1780735 - RNA, 19 nt, Artificial Sequence
  Description of Artificial Sequence: Synthetic oligonucleotide
aagaccaccgugugggcaa

SEQ ID NO: 1780736 - RNA, 19 nt, Artificial Sequence
  Description of Artificial Sequence: Synthetic oligonucleotide
cuccaauuguagcuggaag

SEQ ID NO: 1780737 - RNA, 19 nt, Artificial Sequence
  Description of Artificial Sequence: Synthetic oligonucleotide
auccuguuggauaguaugg

SEQ ID NO: 1780738 - RNA, 19 nt, Artificial Sequence
  Description of Artificial Sequence: Synthetic oligonucleotide
gggauagcacuuuaaauuc

SEQ ID NO: 1780739 - RNA, 19 nt, Artificial Sequence
  Description of Artificial Sequence: Synthetic oligonucleotide
uacucuagggauagcacuu

SEQ ID NO: 1780740 - RNA, 19 nt, Artificial Sequence
  Description of Artificial Sequence: Synthetic oligonucleotide
ugguacuugaagcuuuaua

SEQ ID NO: 1780741 - RNA, 19 nt, Artificial Sequence
  Description of Artificial Sequence: Synthetic oligonucleotide
uuguccuaucuugaaagga

SEQ ID NO: 1780742 - RNA, 19 nt, Artificial Sequence
  Description of Artificial Sequence: Synthetic oligonucleotide
aaacgaagguuuguuaguu

SEQ ID NO: 1780743 - RNA, 19 nt, Artificial Sequence
  Description of Artificial Sequence: Synthetic oligonucleotide
uuaauuguuguaguuccuu

SEQ ID NO: 1780744 - RNA, 19 nt, Artificial Sequence
  Description of Artificial Sequence: Synthetic oligonucleotide
aagguagauuuguaauuuu

SEQ ID NO: 1780745 - RNA, 19 nt, Artificial Sequence
  Description of Artificial Sequence: Synthetic oligonucleotide
agaaaacgaagguuuguua

SEQ ID NO: 1780746 - RNA, 19 nt, Artificial Sequence
  Description of Artificial Sequence: Synthetic oligonucleotide
agauaauaggagcuuccau

SEQ ID NO: 1780747 - RNA, 19 nt, Artificial Sequence
  Description of Artificial Sequence: Synthetic oligonucleotide
uacgcaugucaacucgggc

SEQ ID NO: 1780748 - RNA, 19 nt, Artificial Sequence
  Description of Artificial Sequence: Synthetic oligonucleotide
ugcuuagaggauaauccuu

SEQ ID NO: 1780749 - RNA, 19 nt, Artificial Sequence
  Description of Artificial Sequence: Synthetic oligonucleotide
caccgugugggcaauggag

SEQ ID NO: 1780750 - RNA, 19 nt, Artificial Sequence
  Description of Artificial Sequence: Synthetic oligonucleotide
uugccucggcucuugagcc

SEQ ID NO: 1780751 - RNA, 19 nt, Artificial Sequence
  Description of Artificial Sequence: Synthetic oligonucleotide
aucucgacaaacauggaaa

SEQ ID NO: 1780752 - RNA, 19 nt, Artificial Sequence
  Description of Artificial Sequence: Synthetic oligonucleotide
uucccuucauccacaaauc

SEQ ID NO: 1780753 - RNA, 19 nt, Artificial Sequence
  Description of Artificial Sequence: Synthetic oligonucleotide
uuaaugguacuugaagcuu

SEQ ID NO: 1780754 - RNA, 19 nt, Artificial Sequence
  Description of Artificial Sequence: Synthetic oligonucleotide
uucacaagguagauuugua

SEQ ID NO: 1780755 - RNA, 19 nt, Artificial Sequence
  Description of Artificial Sequence: Synthetic oligonucleotide
cuuuauaaucggaagggcu

SEQ ID NO: 1780756 - RNA, 19 nt, Artificial Sequence
  Description of Artificial Sequence: Synthetic oligonucleotide
agguuaaguucuugaaggu

SEQ ID NO: 1780757 - RNA, 19 nt, Artificial Sequence
  Description of Artificial Sequence: Synthetic oligonucleotide
gacucuagacacaaucuuc

SEQ ID NO: 1780758 - RNA, 19 nt, Artificial Sequence
  Description of Artificial Sequence: Synthetic oligonucleotide
ugucaacucgggcaagccu

SEQ ID NO: 1780759 - RNA, 19 nt, Artificial Sequence
  Description of Artificial Sequence: Synthetic oligonucleotide
ucccuucauccacaaaucu

SEQ ID NO: 1780760 - RNA, 19 nt, Artificial Sequence
  Description of Artificial Sequence: Synthetic oligonucleotide
uaucuacuaagaccaccgu

SEQ ID NO: 1780761 - RNA, 19 nt, Artificial Sequence
  Description of Artificial Sequence: Synthetic oligonucleotide
agacucuagacacaaucuu

SEQ ID NO: 1780762 - RNA, 19 nt, Artificial Sequence
  Description of Artificial Sequence: Synthetic oligonucleotide
ucugugagccauccucaca

SEQ ID NO: 1780763 - RNA, 19 nt, Artificial Sequence
  Description of Artificial Sequence: Synthetic oligonucleotide
uaagagauaauaggagcuu

SEQ ID NO: 1780764 - RNA, 19 nt, Artificial Sequence
  Description of Artificial Sequence: Synthetic oligonucleotide
augucacagccucugugag

SEQ ID NO: 1780765 - RNA, 19 nt, Artificial Sequence
  Description of Artificial Sequence: Synthetic oligonucleotide
auaguaugguuugugcaca

SEQ ID NO: 1780766 - RNA, 19 nt, Artificial Sequence
  Description of Artificial Sequence: Synthetic oligonucleotide
uuuaaccgaacaguggcuu

SEQ ID NO: 1780767 - RNA, 19 nt, Artificial Sequence
  Description of Artificial Sequence: Synthetic oligonucleotide
cucgacaaacauggaaagg

SEQ ID NO: 1780768 - RNA, 19 nt, Artificial Sequence
  Description of Artificial Sequence: Synthetic oligonucleotide
ggagcuuccauucuaucca

SEQ ID NO: 1780769 - RNA, 19 nt, Artificial Sequence
  Description of Artificial Sequence: Synthetic oligonucleotide
ugggcaauggagugcagau

SEQ ID NO: 1780770 - RNA, 19 nt, Artificial Sequence
  Description of Artificial Sequence: Synthetic oligonucleotide
cucgggcaagccuacaaug

SEQ ID NO: 1780771 - RNA, 19 nt, Artificial Sequence
  Description of Artificial Sequence: Synthetic oligonucleotide
aacucgggcaagccuacaa

SEQ ID NO: 1780772 - RNA, 19 nt, Artificial Sequence
  Description of Artificial Sequence: Synthetic oligonucleotide
gcauacgcaugucaacucg

SEQ ID NO: 1780773 - RNA, 19 nt, Artificial Sequence
  Description of Artificial Sequence: Synthetic oligonucleotide
augucaacucgggcaagcc

SEQ ID NO: 1780774 - RNA, 19 nt, Artificial Sequence
  Description of Artificial Sequence: Synthetic oligonucleotide
aggaaaccucuuuaaaauu

SEQ ID NO: 1780775 - RNA, 19 nt, Artificial Sequence
  Description of Artificial Sequence: Synthetic oligonucleotide
guaagagauaauaggagcu

SEQ ID NO: 1780776 - RNA, 19 nt, Artificial Sequence
  Description of Artificial Sequence: Synthetic oligonucleotide
ugaagauguuccagaggaa

SEQ ID NO: 1780777 - RNA, 19 nt, Artificial Sequence
  Description of Artificial Sequence: Synthetic oligonucleotide
ggauaguaugguuugugca

SEQ ID NO: 1780778 - RNA, 19 nt, Artificial Sequence
  Description of Artificial Sequence: Synthetic oligonucleotide
ccaaaucucgacaaacaug

SEQ ID NO: 1780779 - RNA, 19 nt, Artificial Sequence
  Description of Artificial Sequence: Synthetic oligonucleotide
gaggucuccaauuguagcu

SEQ ID NO: 1780780 - RNA, 19 nt, Artificial Sequence
  Description of Artificial Sequence: Synthetic oligonucleotide
ccucuuuaaaauugccagg

SEQ ID NO: 1780781 - RNA, 19 nt, Artificial Sequence
  Description of Artificial Sequence: Synthetic oligonucleotide
auauggaaagcuccugcuu

SEQ ID NO: 1780782 - RNA, 19 nt, Artificial Sequence
  Description of Artificial Sequence: Synthetic oligonucleotide
uccugcuuagaggauaauc

SEQ ID NO: 1780783 - RNA, 19 nt, Artificial Sequence
  Description of Artificial Sequence: Synthetic oligonucleotide
agauggauguccacaggag

SEQ ID NO: 1780784 - RNA, 19 nt, Artificial Sequence
  Description of Artificial Sequence: Synthetic oligonucleotide
gagauaauaggagcuucca

SEQ ID NO: 1780785 - RNA, 19 nt, Artificial Sequence
  Description of Artificial Sequence: Synthetic oligonucleotide
guuaguuguccuaucuuga

SEQ ID NO: 1780786 - RNA, 19 nt, Artificial Sequence
  Description of Artificial Sequence: Synthetic oligonucleotide
uccuguuggauaguauggu

SEQ ID NO: 1780787 - RNA, 19 nt, Artificial Sequence
  Description of Artificial Sequence: Synthetic oligonucleotide
accgaacaguggcuuuccc

SEQ ID NO: 1780788 - RNA, 19 nt, Artificial Sequence
  Description of Artificial Sequence: Synthetic oligonucleotide
aaguucccggaguuggcaa

SEQ ID NO: 1780789 - RNA, 19 nt, Artificial Sequence
  Description of Artificial Sequence: Synthetic oligonucleotide
uccauucuauccacauuau

SEQ ID NO: 1780790 - RNA, 19 nt, Artificial Sequence
  Description of Artificial Sequence: Synthetic oligonucleotide
ggcuccuuuaaccgaacag

SEQ ID NO: 1780791 - RNA, 19 nt, Artificial Sequence
  Description of Artificial Sequence: Synthetic oligonucleotide
ucaacucgggcaagccuac

SEQ ID NO: 1780792 - RNA, 19 nt, Artificial Sequence
  Description of Artificial Sequence: Synthetic oligonucleotide
auaaccauuuugguuuuaa

SEQ ID NO: 1780793 - RNA, 19 nt, Artificial Sequence
  Description of Artificial Sequence: Synthetic oligonucleotide
agcgcagcaaaugacucca

SEQ ID NO: 1780794 - RNA, 19 nt, Artificial Sequence
  Description of Artificial Sequence: Synthetic oligonucleotide
auacgcaugucaacucggg

SEQ ID NO: 1780795 - RNA, 19 nt, Artificial Sequence
  Description of Artificial Sequence: Synthetic oligonucleotide
augauaugagggccauaug

SEQ ID NO: 1780796 - RNA, 19 nt, Artificial Sequence
  Description of Artificial Sequence: Synthetic oligonucleotide
ucauuaagguuaaguucuu

SEQ ID NO: 1780797 - RNA, 19 nt, Artificial Sequence
  Description of Artificial Sequence: Synthetic oligonucleotide
caguauccaaaucucgaca

SEQ ID NO: 1780798 - RNA, 19 nt, Artificial Sequence
  Description of Artificial Sequence: Synthetic oligonucleotide
ugagaagucugaagauguu

SEQ ID NO: 1780799 - RNA, 19 nt, Artificial Sequence
  Description of Artificial Sequence: Synthetic oligonucleotide
caugucaacucgggcaagc

SEQ ID NO: 1780800 - RNA, 19 nt, Artificial Sequence
  Description of Artificial Sequence: Synthetic oligonucleotide
guagcgaguuccgugcuug

SEQ ID NO: 1780801 - RNA, 19 nt, Artificial Sequence
  Description of Artificial Sequence: Synthetic oligonucleotide
ucggaagggcuccugguuu

SEQ ID NO: 1780802 - RNA, 19 nt, Artificial Sequence
  Description of Artificial Sequence: Synthetic oligonucleotide
ucuccaauuguagcuggaa

SEQ ID NO: 1780803 - RNA, 19 nt, Artificial Sequence
  Description of Artificial Sequence: Synthetic oligonucleotide
gcaguauccaaaucucgac

SEQ ID NO: 1780804 - RNA, 19 nt, Artificial Sequence
  Description of Artificial Sequence: Synthetic oligonucleotide
uucaguugguagcgaguuc

SEQ ID NO: 1780805 - RNA, 19 nt, Artificial Sequence
  Description of Artificial Sequence: Synthetic oligonucleotide
aggaaugauaugagggcca

SEQ ID NO: 1780806 - RNA, 19 nt, Artificial Sequence
  Description of Artificial Sequence: Synthetic oligonucleotide
uaaccgaacaguggcuuuc

SEQ ID NO: 1780807 - RNA, 19 nt, Artificial Sequence
  Description of Artificial Sequence: Synthetic oligonucleotide
guuuguuaguuguccuauc

SEQ ID NO: 1780808 - RNA, 19 nt, Artificial Sequence
  Description of Artificial Sequence: Synthetic oligonucleotide
aggucuccaauuguagcug

SEQ ID NO: 1780809 - RNA, 19 nt, Artificial Sequence
  Description of Artificial Sequence: Synthetic oligonucleotide
auauggaauccuguuggau

SEQ ID NO: 1780810 - RNA, 19 nt, Artificial Sequence
  Description of Artificial Sequence: Synthetic oligonucleotide
ugucuucuggaguguggac

SEQ ID NO: 1780811 - RNA, 19 nt, Artificial Sequence
  Description of Artificial Sequence: Synthetic oligonucleotide
aaugguacuugaagcuuua

SEQ ID NO: 1780812 - RNA, 19 nt, Artificial Sequence
  Description of Artificial Sequence: Synthetic oligonucleotide
cacaagguagauuuguaau

SEQ ID NO: 1780813 - RNA, 19 nt, Artificial Sequence
  Description of Artificial Sequence: Synthetic oligonucleotide
cuaagaccaccgugugggc

SEQ ID NO: 1780814 - RNA, 19 nt, Artificial Sequence
  Description of Artificial Sequence: Synthetic oligonucleotide
uauaaucggaagggcuccu

SEQ ID NO: 1780815 - RNA, 19 nt, Artificial Sequence
  Description of Artificial Sequence: Synthetic oligonucleotide
ccacauuaucuacuaagac

SEQ ID NO: 1780816 - RNA, 19 nt, Artificial Sequence
  Description of Artificial Sequence: Synthetic oligonucleotide
uucgagcugcugauagaaa

SEQ ID NO: 1780817 - RNA, 19 nt, Artificial Sequence
  Description of Artificial Sequence: Synthetic oligonucleotide
gcgaguuccgugcuugucc

SEQ ID NO: 1780818 - RNA, 19 nt, Artificial Sequence
  Description of Artificial Sequence: Synthetic oligonucleotide
gcugauagaaaacgaaggu

SEQ ID NO: 1780819 - RNA, 19 nt, Artificial Sequence
  Description of Artificial Sequence: Synthetic oligonucleotide
agguagauuuguaauuuua

SEQ ID NO: 1780820 - RNA, 19 nt, Artificial Sequence
  Description of Artificial Sequence: Synthetic oligonucleotide
gagcauacgcaugucaacu

SEQ ID NO: 1780821 - RNA, 19 nt, Artificial Sequence
  Description of Artificial Sequence: Synthetic oligonucleotide
gguuugugcacaagacucc

SEQ ID NO: 1780822 - RNA, 19 nt, Artificial Sequence
  Description of Artificial Sequence: Synthetic oligonucleotide
acucaggucuaacuuucua

SEQ ID NO: 1780823 - RNA, 19 nt, Artificial Sequence
  Description of Artificial Sequence: Synthetic oligonucleotide
uucuacuggugugaguguu

SEQ ID NO: 1780824 - RNA, 19 nt, Artificial Sequence
  Description of Artificial Sequence: Synthetic oligonucleotide
agggagugccuugauuuug

SEQ ID NO: 1780825 - RNA, 19 nt, Artificial Sequence
  Description of Artificial Sequence: Synthetic oligonucleotide
aaaucucgacaaacaugga

SEQ ID NO: 1780826 - RNA, 19 nt, Artificial Sequence
  Description of Artificial Sequence: Synthetic oligonucleotide
agccccaagacuggcaagu

SEQ ID NO: 1780827 - RNA, 19 nt, Artificial Sequence
  Description of Artificial Sequence: Synthetic oligonucleotide
uggccuuacucagauggau

SEQ ID NO: 1780828 - RNA, 19 nt, Artificial Sequence
  Description of Artificial Sequence: Synthetic oligonucleotide
cuugagccccaagacuggc

SEQ ID NO: 1780829 - RNA, 19 nt, Artificial Sequence
  Description of Artificial Sequence: Synthetic oligonucleotide
uucuggaguguggacugac

SEQ ID NO: 1780830 - RNA, 19 nt, Artificial Sequence
  Description of Artificial Sequence: Synthetic oligonucleotide
agggccauauggaauccug

SEQ ID NO: 1780831 - RNA, 19 nt, Artificial Sequence
  Description of Artificial Sequence: Synthetic oligonucleotide
uggaugugauaaccauuuu

SEQ ID NO: 1780832 - RNA, 19 nt, Artificial Sequence
  Description of Artificial Sequence: Synthetic oligonucleotide
ugguagcgaguuccgugcu

SEQ ID NO: 1780833 - RNA, 19 nt, Artificial Sequence
  Description of Artificial Sequence: Synthetic oligonucleotide
auaggagcuuccauucuau

SEQ ID NO: 1780834 - RNA, 19 nt, Artificial Sequence
  Description of Artificial Sequence: Synthetic oligonucleotide
aguucccggaguuggcaaa

SEQ ID NO: 1780835 - RNA, 19 nt, Artificial Sequence
  Description of Artificial Sequence: Synthetic oligonucleotide
gucaacucgggcaagccua

SEQ ID NO: 1780836 - RNA, 19 nt, Artificial Sequence
  Description of Artificial Sequence: Synthetic oligonucleotide
cacacccuugccucggcuc

SEQ ID NO: 1780837 - RNA, 19 nt, Artificial Sequence
  Description of Artificial Sequence: Synthetic oligonucleotide
agcagagcauacgcauguc

SEQ ID NO: 1780838 - RNA, 19 nt, Artificial Sequence
  Description of Artificial Sequence: Synthetic oligonucleotide
cagaggaauauggaaagcu

SEQ ID NO: 1780839 - RNA, 19 nt, Artificial Sequence
  Description of Artificial Sequence: Synthetic oligonucleotide
uuauuucgagcugcugaua

SEQ ID NO: 1780840 - RNA, 19 nt, Artificial Sequence
  Description of Artificial Sequence: Synthetic oligonucleotide
ggucuaacuuucuaagggu

SEQ ID NO: 1780841 - RNA, 19 nt, Artificial Sequence
  Description of Artificial Sequence: Synthetic oligonucleotide
agcgaguuccgugcuuguc

SEQ ID NO: 1780842 - RNA, 19 nt, Artificial Sequence
  Description of Artificial Sequence: Synthetic oligonucleotide
auugccaggacuggccuua

SEQ ID NO: 1780843 - RNA, 19 nt, Artificial Sequence
  Description of Artificial Sequence: Synthetic oligonucleotide
cuuuaaccgaacaguggcu

SEQ ID NO: 1780844 - RNA, 19 nt, Artificial Sequence
  Description of Artificial Sequence: Synthetic oligonucleotide
gccuacaaugagaagucug

SEQ ID NO: 1780845 - RNA, 19 nt, Artificial Sequence
  Description of Artificial Sequence: Synthetic oligonucleotide
ccaggugauugucauuaag

SEQ ID NO: 1780846 - RNA, 19 nt, Artificial Sequence
  Description of Artificial Sequence: Synthetic oligonucleotide
gcaagugccggcucaggac

SEQ ID NO: 1780847 - RNA, 19 nt, Artificial Sequence
  Description of Artificial Sequence: Synthetic oligonucleotide
ucgcacacccuugccucgg

SEQ ID NO: 1780848 - RNA, 19 nt, Artificial Sequence
  Description of Artificial Sequence: Synthetic oligonucleotide
cuguuggauaguaugguuu

SEQ ID NO: 1780849 - RNA, 19 nt, Artificial Sequence
  Description of Artificial Sequence: Synthetic oligonucleotide
ggcaagccuacaaugagaa

SEQ ID NO: 1780850 - RNA, 19 nt, Artificial Sequence
  Description of Artificial Sequence: Synthetic oligonucleotide
ugccucggcucuugagccc

SEQ ID NO: 1780851 - RNA, 19 nt, Artificial Sequence
  Description of Artificial Sequence: Synthetic oligonucleotide
ggaagaugaaucaauucau

SEQ ID NO: 1780852 - RNA, 19 nt, Artificial Sequence
  Description of Artificial Sequence: Synthetic oligonucleotide
cuacuggugugaguguuga

SEQ ID NO: 1780853 - RNA, 19 nt, Artificial Sequence
  Description of Artificial Sequence: Synthetic oligonucleotide
agacuggcaagugccggcu

SEQ ID NO: 1780854 - RNA, 19 nt, Artificial Sequence
  Description of Artificial Sequence: Synthetic oligonucleotide
caccaccgcucgcacaccc

SEQ ID NO: 1780855 - RNA, 19 nt, Artificial Sequence
  Description of Artificial Sequence: Synthetic oligonucleotide
uggcaagugccggcucagg

SEQ ID NO: 1780856 - RNA, 19 nt, Artificial Sequence
  Description of Artificial Sequence: Synthetic oligonucleotide
ccacaaacacagguuuugg

SEQ ID NO: 1780857 - RNA, 19 nt, Artificial Sequence
  Description of Artificial Sequence: Synthetic oligonucleotide
cugauagaaaacgaagguu

SEQ ID NO: 1780858 - RNA, 19 nt, Artificial Sequence
  Description of Artificial Sequence: Synthetic oligonucleotide
cuacaaugagaagucugaa

SEQ ID NO: 1780859 - RNA, 19 nt, Artificial Sequence
  Description of Artificial Sequence: Synthetic oligonucleotide
gugacucaggucuaacuuu

SEQ ID NO: 1780860 - RNA, 19 nt, Artificial Sequence
  Description of Artificial Sequence: Synthetic oligonucleotide
ggccuuacucagauggaug

SEQ ID NO: 1780861 - RNA, 19 nt, Artificial Sequence
  Description of Artificial Sequence: Synthetic oligonucleotide
gcaagccuacaaugagaag

SEQ ID NO: 1780862 - RNA, 19 nt, Artificial Sequence
  Description of Artificial Sequence: Synthetic oligonucleotide
cacaagacuccaguaaagu

SEQ ID NO: 1780863 - RNA, 19 nt, Artificial Sequence
  Description of Artificial Sequence: Synthetic oligonucleotide
gugguaugcugaugucaca

SEQ ID NO: 1780864 - RNA, 19 nt, Artificial Sequence
  Description of Artificial Sequence: Synthetic oligonucleotide
uggaauccuguuggauagu

SEQ ID NO: 1780865 - RNA, 19 nt, Artificial Sequence
  Description of Artificial Sequence: Synthetic oligonucleotide
agccuacaaugagaagucu

SEQ ID NO: 1780866 - RNA, 19 nt, Artificial Sequence
  Description of Artificial Sequence: Synthetic oligonucleotide
uagcgaguuccgugcuugu

SEQ ID NO: 1780867 - RNA, 19 nt, Artificial Sequence
  Description of Artificial Sequence: Synthetic oligonucleotide
gcuccuuuaaccgaacagu

SEQ ID NO: 1780868 - RNA, 19 nt, Artificial Sequence
  Description of Artificial Sequence: Synthetic oligonucleotide
uacuggugugaguguugaa

SEQ ID NO: 1780869 - RNA, 19 nt, Artificial Sequence
  Description of Artificial Sequence: Synthetic oligonucleotide
aggcucaccaccgcucgca

SEQ ID NO: 1780870 - RNA, 19 nt, Artificial Sequence
  Description of Artificial Sequence: Synthetic oligonucleotide
cuggccuuacucagaugga

SEQ ID NO: 1780871 - RNA, 19 nt, Artificial Sequence
  Description of Artificial Sequence: Synthetic oligonucleotide
caaguacucuagggauagc

SEQ ID NO: 1780872 - RNA, 19 nt, Artificial Sequence
  Description of Artificial Sequence: Synthetic oligonucleotide
caguaaaguuaaugguacu

SEQ ID NO: 1780873 - RNA, 19 nt, Artificial Sequence
  Description of Artificial Sequence: Synthetic oligonucleotide
ccuugaaugaaagacucua

SEQ ID NO: 1780874 - RNA, 19 nt, Artificial Sequence
  Description of Artificial Sequence: Synthetic oligonucleotide
ggugaggucuccaauugua

SEQ ID NO: 1780875 - RNA, 19 nt, Artificial Sequence
  Description of Artificial Sequence: Synthetic oligonucleotide
cuggcaagugccggcucag

SEQ ID NO: 1780876 - RNA, 19 nt, Artificial Sequence
  Description of Artificial Sequence: Synthetic oligonucleotide
caauugugacucaggucua

SEQ ID NO: 1780877 - RNA, 19 nt, Artificial Sequence
  Description of Artificial Sequence: Synthetic oligonucleotide
agcugaaaggaaaccucuu

SEQ ID NO: 1780878 - RNA, 19 nt, Artificial Sequence
  Description of Artificial Sequence: Synthetic oligonucleotide
ugccaggacuggccuuacu

SEQ ID NO: 1780879 - RNA, 19 nt, Artificial Sequence
  Description of Artificial Sequence: Synthetic oligonucleotide
uucccggaguuggcaaaac

SEQ ID NO: 1780880 - RNA, 19 nt, Artificial Sequence
  Description of Artificial Sequence: Synthetic oligonucleotide
gugaguguugaaaguggua

SEQ ID NO: 1780881 - RNA, 19 nt, Artificial Sequence
  Description of Artificial Sequence: Synthetic oligonucleotide
ccccaagacuggcaagugc

SEQ ID NO: 1780882 - RNA, 19 nt, Artificial Sequence
  Description of Artificial Sequence: Synthetic oligonucleotide
cuuagaggauaauccuuuu

SEQ ID NO: 1780883 - RNA, 19 nt, Artificial Sequence
  Description of Artificial Sequence: Synthetic oligonucleotide
caccgcucgcacacccuug

SEQ ID NO: 1780884 - RNA, 19 nt, Artificial Sequence
  Description of Artificial Sequence: Synthetic oligonucleotide
gguuuguuaguuguccuau

SEQ ID NO: 1780885 - RNA, 19 nt, Artificial Sequence
  Description of Artificial Sequence: Synthetic oligonucleotide
gaauccuguuggauaguau

SEQ ID NO: 1780886 - RNA, 19 nt, Artificial Sequence
  Description of Artificial Sequence: Synthetic oligonucleotide
augguacuugaagcuuuau

SEQ ID NO: 1780887 - RNA, 19 nt, Artificial Sequence
  Description of Artificial Sequence: Synthetic oligonucleotide
ccgugugggcaauggagug

SEQ ID NO: 1780888 - RNA, 19 nt, Artificial Sequence
  Description of Artificial Sequence: Synthetic oligonucleotide
guuggauaguaugguuugu

SEQ ID NO: 1780889 - RNA, 19 nt, Artificial Sequence
  Description of Artificial Sequence: Synthetic oligonucleotide
caggcucaccaccgcucgc

SEQ ID NO: 1780890 - RNA, 19 nt, Artificial Sequence
  Description of Artificial Sequence: Synthetic oligonucleotide
ggaggcuccuuuaaccgaa

SEQ ID NO: 1780891 - RNA, 19 nt, Artificial Sequence
  Description of Artificial Sequence: Synthetic oligonucleotide
uccuccgcgguggcugaca

SEQ ID NO: 1780892 - RNA, 19 nt, Artificial Sequence
  Description of Artificial Sequence: Synthetic oligonucleotide
gaaugauaugagggccaua

SEQ ID NO: 1780893 - RNA, 19 nt, Artificial Sequence
  Description of Artificial Sequence: Synthetic oligonucleotide
ggaauccuguuggauagua

SEQ ID NO: 1780894 - RNA, 19 nt, Artificial Sequence
  Description of Artificial Sequence: Synthetic oligonucleotide
gcuuagaggauaauccuuu

SEQ ID NO: 1780895 - RNA, 19 nt, Artificial Sequence
  Description of Artificial Sequence: Synthetic oligonucleotide
guucccggaguuggcaaaa

SEQ ID NO: 1780896 - RNA, 19 nt, Artificial Sequence
  Description of Artificial Sequence: Synthetic oligonucleotide
aagugccggcucaggacuu

SEQ ID NO: 1780897 - RNA, 19 nt, Artificial Sequence
  Description of Artificial Sequence: Synthetic oligonucleotide
acccuugccucggcucuug

SEQ ID NO: 1780898 - RNA, 19 nt, Artificial Sequence
  Description of Artificial Sequence: Synthetic oligonucleotide
uugccaggacuggccuuac

SEQ ID NO: 1780899 - RNA, 19 nt, Artificial Sequence
  Description of Artificial Sequence: Synthetic oligonucleotide
ccuuacucagauggauguc

SEQ ID NO: 1780900 - RNA, 19 nt, Artificial Sequence
  Description of Artificial Sequence: Synthetic oligonucleotide
gcaugucaacucgggcaag

SEQ ID NO: 1780901 - RNA, 19 nt, Artificial Sequence
  Description of Artificial Sequence: Synthetic oligonucleotide
gggcucggccccugcuagg

SEQ ID NO: 1780902 - RNA, 19 nt, Artificial Sequence
  Description of Artificial Sequence: Synthetic oligonucleotide
ggaaugauaugagggccau

SEQ ID NO: 1780903 - RNA, 19 nt, Artificial Sequence
  Description of Artificial Sequence: Synthetic oligonucleotide
gaccaccgugugggcaaug

SEQ ID NO: 1780904 - RNA, 19 nt, Artificial Sequence
  Description of Artificial Sequence: Synthetic oligonucleotide
cgcaugucaacucgggcaa

SEQ ID NO: 1780905 - RNA, 19 nt, Artificial Sequence
  Description of Artificial Sequence: Synthetic oligonucleotide
gggagugccuugauuuugu

SEQ ID NO: 1780906 - RNA, 19 nt, Artificial Sequence
  Description of Artificial Sequence: Synthetic oligonucleotide
cagggagugccuugauuuu

SEQ ID NO: 1780907 - RNA, 19 nt, Artificial Sequence
  Description of Artificial Sequence: Synthetic oligonucleotide
gccccaagacuggcaagug

SEQ ID NO: 1780908 - RNA, 19 nt, Artificial Sequence
  Description of Artificial Sequence: Synthetic oligonucleotide
agaccaccgugugggcaau

SEQ ID NO: 1780909 - RNA, 19 nt, Artificial Sequence
  Description of Artificial Sequence: Synthetic oligonucleotide
ccuccgcgguggcugacac

SEQ ID NO: 1780910 - RNA, 19 nt, Artificial Sequence
  Description of Artificial Sequence: Synthetic oligonucleotide
ccuguuggauaguaugguu

SEQ ID NO: 1780911 - RNA, 19 nt, Artificial Sequence
  Description of Artificial Sequence: Synthetic oligonucleotide
cuccgcgguggcugacaca

SEQ ID NO: 1780912 - RNA, 19 nt, Artificial Sequence
  Description of Artificial Sequence: Synthetic oligonucleotide
caacucgggcaagccuaca

SEQ ID NO: 1780913 - RNA, 19 nt, Artificial Sequence
  Description of Artificial Sequence: Synthetic oligonucleotide
gguagcgaguuccgugcuu

SEQ ID NO: 1780914 - RNA, 19 nt, Artificial Sequence
  Description of Artificial Sequence: Synthetic oligonucleotide
ccgcucgcacacccuugcc

SEQ ID NO: 1780915 - RNA, 19 nt, Artificial Sequence
  Description of Artificial Sequence: Synthetic oligonucleotide
ccaccgugugggcaaugga

SEQ ID NO: 1780916 - RNA, 19 nt, Artificial Sequence
  Description of Artificial Sequence: Synthetic oligonucleotide
cgaguuccgugcuuguccu

SEQ ID NO: 1780917 - RNA, 19 nt, Artificial Sequence
  Description of Artificial Sequence: Synthetic oligonucleotide
ccgcgguggcugacacagg

SEQ ID NO: 1780918 - RNA, 19 nt, Artificial Sequence
  Description of Artificial Sequence: Synthetic oligonucleotide
gccccugcuaggggcugca

SEQ ID NO: 1780919 - RNA, 19 nt, Artificial Sequence
  Description of Artificial Sequence: Synthetic oligonucleotide
cuccugcuuagaggauaau

SEQ ID NO: 1780920 - RNA, 19 nt, Artificial Sequence
  Description of Artificial Sequence: Synthetic oligonucleotide
ccccugcuaggggcugcag

SEQ ID NO: 1780921 - RNA, 19 nt, Artificial Sequence
  Description of Artificial Sequence: Synthetic oligonucleotide
ccaccgcucgcacacccuu

SEQ ID NO: 1780922 - RNA, 19 nt, Artificial Sequence
  Description of Artificial Sequence: Synthetic oligonucleotide
cacccuugccucggcucuu

SEQ ID NO: 1780923 - RNA, 19 nt, Artificial Sequence
  Description of Artificial Sequence: Synthetic oligonucleotide
ccacuccuccgcgguggcu

SEQ ID NO: 1780924 - RNA, 19 nt, Artificial Sequence
  Description of Artificial Sequence: Synthetic oligonucleotide
aaguuaaaaggcuuaagac

SEQ ID NO: 1780925 - RNA, 19 nt, Artificial Sequence
  Description of Artificial Sequence: Synthetic oligonucleotide
ugucauaacagauugcuag

SEQ ID NO: 1780926 - RNA, 19 nt, Artificial Sequence
  Description of Artificial Sequence: Synthetic oligonucleotide
ugaaacugaaaucugaggu

SEQ ID NO: 1780927 - RNA, 19 nt, Artificial Sequence
  Description of Artificial Sequence: Synthetic oligonucleotide
uaaguuaaaaggcuuaaga

SEQ ID NO: 1780928 - RNA, 19 nt, Artificial Sequence
  Description of Artificial Sequence: Synthetic oligonucleotide
aagucaguauuucugcccc

SEQ ID NO: 1780929 - RNA, 19 nt, Artificial Sequence
  Description of Artificial Sequence: Synthetic oligonucleotide
aaaggcuuaagacaguggu

SEQ ID NO: 1780930 - RNA, 19 nt, Artificial Sequence
  Description of Artificial Sequence: Synthetic oligonucleotide
aaaguaccgagauucgagg

SEQ ID NO: 1780931 - RNA, 19 nt, Artificial Sequence
  Description of Artificial Sequence: Synthetic oligonucleotide
uaguuuaagguucugcaag

SEQ ID NO: 1780932 - RNA, 19 nt, Artificial Sequence
  Description of Artificial Sequence: Synthetic oligonucleotide
uguuguagaaaguugagau

SEQ ID NO: 1780933 - RNA, 19 nt, Artificial Sequence
  Description of Artificial Sequence: Synthetic oligonucleotide
gauguuaccuggcacacag

SEQ ID NO: 1780934 - RNA, 19 nt, Artificial Sequence
  Description of Artificial Sequence: Synthetic oligonucleotide
uuguagaaaguugagauca

SEQ ID NO: 1780935 - RNA, 19 nt, Artificial Sequence
  Description of Artificial Sequence: Synthetic oligonucleotide
aaaguuauuucuuucccau

SEQ ID NO: 1780936 - RNA, 19 nt, Artificial Sequence
  Description of Artificial Sequence: Synthetic oligonucleotide
ugaaggauaagucaguauu

SEQ ID NO: 1780937 - RNA, 19 nt, Artificial Sequence
  Description of Artificial Sequence: Synthetic oligonucleotide
aaaaguuauuucuuuccca

SEQ ID NO: 1780938 - RNA, 19 nt, Artificial Sequence
  Description of Artificial Sequence: Synthetic oligonucleotide
ugcaaugaagucaaaugcc

SEQ ID NO: 1780939 - RNA, 19 nt, Artificial Sequence
  Description of Artificial Sequence: Synthetic oligonucleotide
aaguaccgagauucgaggc

SEQ ID NO: 1780940 - RNA, 19 nt, Artificial Sequence
  Description of Artificial Sequence: Synthetic oligonucleotide
ugugucuuccuguaagugg

SEQ ID NO: 1780941 - RNA, 19 nt, Artificial Sequence
  Description of Artificial Sequence: Synthetic oligonucleotide
ucagagaaaguucagggaa

SEQ ID NO: 1780942 - RNA, 19 nt, Artificial Sequence
  Description of Artificial Sequence: Synthetic oligonucleotide
uaagaguaguuuaagguuc

SEQ ID NO: 1780943 - RNA, 19 nt, Artificial Sequence
  Description of Artificial Sequence: Synthetic oligonucleotide
aguaguuuaagguucugca

SEQ ID NO: 1780944 - RNA, 19 nt, Artificial Sequence
  Description of Artificial Sequence: Synthetic oligonucleotide
aagcacaugacaauuguag

SEQ ID NO: 1780945 - RNA, 19 nt, Artificial Sequence
  Description of Artificial Sequence: Synthetic oligonucleotide
agaaaguucagggaaccgc

SEQ ID NO: 1780946 - RNA, 19 nt, Artificial Sequence
  Description of Artificial Sequence: Synthetic oligonucleotide
gcuauaucgucccagaagg

SEQ ID NO: 1780947 - RNA, 19 nt, Artificial Sequence
  Description of Artificial Sequence: Synthetic oligonucleotide
gauucaauggcacgggccc

SEQ ID NO: 1780948 - RNA, 19 nt, Artificial Sequence
  Description of Artificial Sequence: Synthetic oligonucleotide
uguucagaagcacaugaca

SEQ ID NO: 1780949 - RNA, 19 nt, Artificial Sequence
  Description of Artificial Sequence: Synthetic oligonucleotide
ucaagaaugguuccaggca

SEQ ID NO: 1780950 - RNA, 19 nt, Artificial Sequence
  Description of Artificial Sequence: Synthetic oligonucleotide
auucgaggcaaucuguuuc

SEQ ID NO: 1780951 - RNA, 19 nt, Artificial Sequence
  Description of Artificial Sequence: Synthetic oligonucleotide
uggcaagcuggcuauaucg

SEQ ID NO: 1780952 - RNA, 19 nt, Artificial Sequence
  Description of Artificial Sequence: Synthetic oligonucleotide
cugaguacaaaguaccgag

SEQ ID NO: 1780953 - RNA, 19 nt, Artificial Sequence
  Description of Artificial Sequence: Synthetic oligonucleotide
cagugguugacccagauug

SEQ ID NO: 1780954 - RNA, 19 nt, Artificial Sequence
  Description of Artificial Sequence: Synthetic oligonucleotide
ucacguagcacugagauuc

SEQ ID NO: 1780955 - RNA, 19 nt, Artificial Sequence
  Description of Artificial Sequence: Synthetic oligonucleotide
aaaugccucaggcagaaaa

SEQ ID NO: 1780956 - RNA, 19 nt, Artificial Sequence
  Description of Artificial Sequence: Synthetic oligonucleotide
aaggauaagucaguauuuc

SEQ ID NO: 1780957 - RNA, 19 nt, Artificial Sequence
  Description of Artificial Sequence: Synthetic oligonucleotide
uaucacguagcacugagau

SEQ ID NO: 1780958 - RNA, 19 nt, Artificial Sequence
  Description of Artificial Sequence: Synthetic oligonucleotide
ugacuauauaaaauuuuac

SEQ ID NO: 1780959 - RNA, 19 nt, Artificial Sequence
  Description of Artificial Sequence: Synthetic oligonucleotide
guugcuuucccgcauaggc

SEQ ID NO: 1780960 - RNA, 19 nt, Artificial Sequence
  Description of Artificial Sequence: Synthetic oligonucleotide
ucauggaaaccacccaagg

SEQ ID NO: 1780961 - RNA, 19 nt, Artificial Sequence
  Description of Artificial Sequence: Synthetic oligonucleotide
ucguaucuguuguagaaag

SEQ ID NO: 1780962 - RNA, 19 nt, Artificial Sequence
  Description of Artificial Sequence: Synthetic oligonucleotide
aagcuggcuauaucguccc

SEQ ID NO: 1780963 - RNA, 19 nt, Artificial Sequence
  Description of Artificial Sequence: Synthetic oligonucleotide
gacuauauaaaauuuuacu

SEQ ID NO: 1780964 - RNA, 19 nt, Artificial Sequence
  Description of Artificial Sequence: Synthetic oligonucleotide
uaagucaguauuucugccc

SEQ ID NO: 1780965 - RNA, 19 nt, Artificial Sequence
  Description of Artificial Sequence: Synthetic oligonucleotide
aaugguuccaggcauggua

SEQ ID NO: 1780966 - RNA, 19 nt, Artificial Sequence
  Description of Artificial Sequence: Synthetic oligonucleotide
uguaaguggccacuacuag

SEQ ID NO: 1780967 - RNA, 19 nt, Artificial Sequence
  Description of Artificial Sequence: Synthetic oligonucleotide
uaugucucaacccgcauaa

SEQ ID NO: 1780968 - RNA, 19 nt, Artificial Sequence
  Description of Artificial Sequence: Synthetic oligonucleotide
augacaauuguagauuuuc

SEQ ID NO: 1780969 - RNA, 19 nt, Artificial Sequence
  Description of Artificial Sequence: Synthetic oligonucleotide
guagcacugagauucaaug

SEQ ID NO: 1780970 - RNA, 19 nt, Artificial Sequence
  Description of Artificial Sequence: Synthetic oligonucleotide
caaaguaccgagauucgag

SEQ ID NO: 1780971 - RNA, 19 nt, Artificial Sequence
  Description of Artificial Sequence: Synthetic oligonucleotide
auuucagagaaaguucagg

SEQ ID NO: 1780972 - RNA, 19 nt, Artificial Sequence
  Description of Artificial Sequence: Synthetic oligonucleotide
uguaacggauccaaaggcu

SEQ ID NO: 1780973 - RNA, 19 nt, Artificial Sequence
  Description of Artificial Sequence: Synthetic oligonucleotide
auaucgucccagaaggucc

SEQ ID NO: 1780974 - RNA, 19 nt, Artificial Sequence
  Description of Artificial Sequence: Synthetic oligonucleotide
ugaacuugaaccuguguuc

SEQ ID NO: 1780975 - RNA, 19 nt, Artificial Sequence
  Description of Artificial Sequence: Synthetic oligonucleotide
uacaaaguaccgagauucg

SEQ ID NO: 1780976 - RNA, 19 nt, Artificial Sequence
  Description of Artificial Sequence: Synthetic oligonucleotide
uuauuucuuucccaugaac

SEQ ID NO: 1780977 - RNA, 19 nt, Artificial Sequence
  Description of Artificial Sequence: Synthetic oligonucleotide
ugguguugauguuaccugg

SEQ ID NO: 1780978 - RNA, 19 nt, Artificial Sequence
  Description of Artificial Sequence: Synthetic oligonucleotide
uaaguggccacuacuaguc

SEQ ID NO: 1780979 - RNA, 19 nt, Artificial Sequence
  Description of Artificial Sequence: Synthetic oligonucleotide
uuucgugcaaugaagucaa

SEQ ID NO: 1780980 - RNA, 19 nt, Artificial Sequence
  Description of Artificial Sequence: Synthetic oligonucleotide
acugagauucaauggcacg

SEQ ID NO: 1780981 - RNA, 19 nt, Artificial Sequence
  Description of Artificial Sequence: Synthetic oligonucleotide
gagccaauuucagagaaag

SEQ ID NO: 1780982 - RNA, 19 nt, Artificial Sequence
  Description of Artificial Sequence: Synthetic oligonucleotide
uagcacugagauucaaugg

SEQ ID NO: 1780983 - RNA, 19 nt, Artificial Sequence
  Description of Artificial Sequence: Synthetic oligonucleotide
gaaccuguguuccauuaag

SEQ ID NO: 1780984 - RNA, 19 nt, Artificial Sequence
  Description of Artificial Sequence: Synthetic oligonucleotide
aucaauucuggcaaggcag

SEQ ID NO: 1780985 - RNA, 19 nt, Artificial Sequence
  Description of Artificial Sequence: Synthetic oligonucleotide
cucuacaucgcauagaugu

SEQ ID NO: 1780986 - RNA, 19 nt, Artificial Sequence
  Description of Artificial Sequence: Synthetic oligonucleotide
accuguguuccauuaagag

SEQ ID NO: 1780987 - RNA, 19 nt, Artificial Sequence
  Description of Artificial Sequence: Synthetic oligonucleotide
accuguaacggauccaaag

SEQ ID NO: 1780988 - RNA, 19 nt, Artificial Sequence
  Description of Artificial Sequence: Synthetic oligonucleotide
ugcuagaccaaccuucccu

SEQ ID NO: 1780989 - RNA, 19 nt, Artificial Sequence
  Description of Artificial Sequence: Synthetic oligonucleotide
ugauugguggcucaagaau

SEQ ID NO: 1780990 - RNA, 19 nt, Artificial Sequence
  Description of Artificial Sequence: Synthetic oligonucleotide
ugucucaacccgcauaagu

SEQ ID NO: 1780991 - RNA, 19 nt, Artificial Sequence
  Description of Artificial Sequence: Synthetic oligonucleotide
acacugacuauauaaaauu

SEQ ID NO: 1780992 - RNA, 19 nt, Artificial Sequence
  Description of Artificial Sequence: Synthetic oligonucleotide
uguuugguguugauguuac

SEQ ID NO: 1780993 - RNA, 19 nt, Artificial Sequence
  Description of Artificial Sequence: Synthetic oligonucleotide
cuguguuccauuaagagua

SEQ ID NO: 1780994 - RNA, 19 nt, Artificial Sequence
  Description of Artificial Sequence: Synthetic oligonucleotide
caagcuggcuauaucgucc

SEQ ID NO: 1780995 - RNA, 19 nt, Artificial Sequence
  Description of Artificial Sequence: Synthetic oligonucleotide
aaguuauuucuuucccaug

SEQ ID NO: 1780996 - RNA, 19 nt, Artificial Sequence
  Description of Artificial Sequence: Synthetic oligonucleotide
cuguguguaugucucaacc

SEQ ID NO: 1780997 - RNA, 19 nt, Artificial Sequence
  Description of Artificial Sequence: Synthetic oligonucleotide
cugagauucaauggcacgg

SEQ ID NO: 1780998 - RNA, 19 nt, Artificial Sequence
  Description of Artificial Sequence: Synthetic oligonucleotide
cauaacagauugcuagacc

SEQ ID NO: 1780999 - RNA, 19 nt, Artificial Sequence
  Description of Artificial Sequence: Synthetic oligonucleotide
ugacaauuguagauuuucu

SEQ ID NO: 1781000 - RNA, 19 nt, Artificial Sequence
  Description of Artificial Sequence: Synthetic oligonucleotide
uguguaugucucaacccgc

SEQ ID NO: 1781001 - RNA, 19 nt, Artificial Sequence
  Description of Artificial Sequence: Synthetic oligonucleotide
cuguaacggauccaaaggc

SEQ ID NO: 1781002 - RNA, 19 nt, Artificial Sequence
  Description of Artificial Sequence: Synthetic oligonucleotide
auugcuagaccaaccuucc

SEQ ID NO: 1781003 - RNA, 19 nt, Artificial Sequence
  Description of Artificial Sequence: Synthetic oligonucleotide
aaccgcaugucauaacaga

SEQ ID NO: 1781004 - RNA, 19 nt, Artificial Sequence
  Description of Artificial Sequence: Synthetic oligonucleotide
uugguguugauguuaccug

SEQ ID NO: 1781005 - RNA, 19 nt, Artificial Sequence
  Description of Artificial Sequence: Synthetic oligonucleotide
aacccgcauaaguuaaaag

SEQ ID NO: 1781006 - RNA, 19 nt, Artificial Sequence
  Description of Artificial Sequence: Synthetic oligonucleotide
ugcuuucccgcauaggccc

SEQ ID NO: 1781007 - RNA, 19 nt, Artificial Sequence
  Description of Artificial Sequence: Synthetic oligonucleotide
aaguggagggaacugugcu

SEQ ID NO: 1781008 - RNA, 19 nt, Artificial Sequence
  Description of Artificial Sequence: Synthetic oligonucleotide
agauucaauggcacgggcc

SEQ ID NO: 1781009 - RNA, 19 nt, Artificial Sequence
  Description of Artificial Sequence: Synthetic oligonucleotide
caagcacccagucuggccg

SEQ ID NO: 1781010 - RNA, 19 nt, Artificial Sequence
  Description of Artificial Sequence: Synthetic oligonucleotide
auuucgugcaaugaaguca

SEQ ID NO: 1781011 - RNA, 19 nt, Artificial Sequence
  Description of Artificial Sequence: Synthetic oligonucleotide
gauugcuagaccaaccuuc

SEQ ID NO: 1781012 - RNA, 19 nt, Artificial Sequence
  Description of Artificial Sequence: Synthetic oligonucleotide
cuuaagacagugguugacc

SEQ ID NO: 1781013 - RNA, 19 nt, Artificial Sequence
  Description of Artificial Sequence: Synthetic oligonucleotide
aaugccucaggcagaaaag

SEQ ID NO: 1781014 - RNA, 19 nt, Artificial Sequence
  Description of Artificial Sequence: Synthetic oligonucleotide
agauuccacauucccuggc

SEQ ID NO: 1781015 - RNA, 19 nt, Artificial Sequence
  Description of Artificial Sequence: Synthetic oligonucleotide
uguugauguuaccuggcac

SEQ ID NO: 1781016 - RNA, 19 nt, Artificial Sequence
  Description of Artificial Sequence: Synthetic oligonucleotide
uugacauuauuauuauuuu

SEQ ID NO: 1781017 - RNA, 19 nt, Artificial Sequence
  Description of Artificial Sequence: Synthetic oligonucleotide
ugagauucaauggcacggg

SEQ ID NO: 1781018 - RNA, 19 nt, Artificial Sequence
  Description of Artificial Sequence: Synthetic oligonucleotide
ugucguaucuguuguagaa

SEQ ID NO: 1781019 - RNA, 19 nt, Artificial Sequence
  Description of Artificial Sequence: Synthetic oligonucleotide
ucuacaucgcauagaugug

SEQ ID NO: 1781020 - RNA, 19 nt, Artificial Sequence
  Description of Artificial Sequence: Synthetic oligonucleotide
ugggcugaguacaaaguac

SEQ ID NO: 1781021 - RNA, 19 nt, Artificial Sequence
  Description of Artificial Sequence: Synthetic oligonucleotide
augguagaguugcuuuccc

SEQ ID NO: 1781022 - RNA, 19 nt, Artificial Sequence
  Description of Artificial Sequence: Synthetic oligonucleotide
gaacuugaaccuguguucc

SEQ ID NO: 1781023 - RNA, 19 nt, Artificial Sequence
  Description of Artificial Sequence: Synthetic oligonucleotide
aggcuuaagacagugguug

SEQ ID NO: 1781024 - RNA, 19 nt, Artificial Sequence
  Description of Artificial Sequence: Synthetic oligonucleotide
uucccaugaacuugaaccu

SEQ ID NO: 1781025 - RNA, 19 nt, Artificial Sequence
  Description of Artificial Sequence: Synthetic oligonucleotide
aguucagggaaccgcaugu

SEQ ID NO: 1781026 - RNA, 19 nt, Artificial Sequence
  Description of Artificial Sequence: Synthetic oligonucleotide
aaguucagggaaccgcaug

SEQ ID NO: 1781027 - RNA, 19 nt, Artificial Sequence
  Description of Artificial Sequence: Synthetic oligonucleotide
ucuggccgccucuagaacc

SEQ ID NO: 1781028 - RNA, 19 nt, Artificial Sequence
  Description of Artificial Sequence: Synthetic oligonucleotide
aucgcauagaugugucuuc

SEQ ID NO: 1781029 - RNA, 19 nt, Artificial Sequence
  Description of Artificial Sequence: Synthetic oligonucleotide
acagauugcuagaccaacc

SEQ ID NO: 1781030 - RNA, 19 nt, Artificial Sequence
  Description of Artificial Sequence: Synthetic oligonucleotide
uucgaggcaaucuguuucc

SEQ ID NO: 1781031 - RNA, 19 nt, Artificial Sequence
  Description of Artificial Sequence: Synthetic oligonucleotide
ugaguacaaaguaccgaga

SEQ ID NO: 1781032 - RNA, 19 nt, Artificial Sequence
  Description of Artificial Sequence: Synthetic oligonucleotide
uugcuuucccgcauaggcc

SEQ ID NO: 1781033 - RNA, 19 nt, Artificial Sequence
  Description of Artificial Sequence: Synthetic oligonucleotide
aaugucucggcaggauuuc

SEQ ID NO: 1781034 - RNA, 19 nt, Artificial Sequence
  Description of Artificial Sequence: Synthetic oligonucleotide
gacccagauugccauacag

SEQ ID NO: 1781035 - RNA, 19 nt, Artificial Sequence
  Description of Artificial Sequence: Synthetic oligonucleotide
gauuucgugcaaugaaguc

SEQ ID NO: 1781036 - RNA, 19 nt, Artificial Sequence
  Description of Artificial Sequence: Synthetic oligonucleotide
agcacaugacaauuguaga

SEQ ID NO: 1781037 - RNA, 19 nt, Artificial Sequence
  Description of Artificial Sequence: Synthetic oligonucleotide
cugacuauauaaaauuuua

SEQ ID NO: 1781038 - RNA, 19 nt, Artificial Sequence
  Description of Artificial Sequence: Synthetic oligonucleotide
aggauaagucaguauuucu

SEQ ID NO: 1781039 - RNA, 19 nt, Artificial Sequence
  Description of Artificial Sequence: Synthetic oligonucleotide
aguaccgagauucgaggca

SEQ ID NO: 1781040 - RNA, 19 nt, Artificial Sequence
  Description of Artificial Sequence: Synthetic oligonucleotide
uguguuccauuaagaguag

SEQ ID NO: 1781041 - RNA, 19 nt, Artificial Sequence
  Description of Artificial Sequence: Synthetic oligonucleotide
uccaaaggcugaaggauaa

SEQ ID NO: 1781042 - RNA, 19 nt, Artificial Sequence
  Description of Artificial Sequence: Synthetic oligonucleotide
ugugcccguaacuuguucu

SEQ ID NO: 1781043 - RNA, 19 nt, Artificial Sequence
  Description of Artificial Sequence: Synthetic oligonucleotide
guugucguaucuguuguag

SEQ ID NO: 1781044 - RNA, 19 nt, Artificial Sequence
  Description of Artificial Sequence: Synthetic oligonucleotide
guuguagaaaguugagauc

SEQ ID NO: 1781045 - RNA, 19 nt, Artificial Sequence
  Description of Artificial Sequence: Synthetic oligonucleotide
uaacggauccaaaggcuga

SEQ ID NO: 1781046 - RNA, 19 nt, Artificial Sequence
  Description of Artificial Sequence: Synthetic oligonucleotide
ucauaacagauugcuagac

SEQ ID NO: 1781047 - RNA, 19 nt, Artificial Sequence
  Description of Artificial Sequence: Synthetic oligonucleotide
gguagaguugcuuucccgc

SEQ ID NO: 1781048 - RNA, 19 nt, Artificial Sequence
  Description of Artificial Sequence: Synthetic oligonucleotide
ucaggucaaaaguuauuuc

SEQ ID NO: 1781049 - RNA, 19 nt, Artificial Sequence
  Description of Artificial Sequence: Synthetic oligonucleotide
uuggguccugccuacaagu

SEQ ID NO: 1781050 - RNA, 19 nt, Artificial Sequence
  Description of Artificial Sequence: Synthetic oligonucleotide
gaguaguuuaagguucugc

SEQ ID NO: 1781051 - RNA, 19 nt, Artificial Sequence
  Description of Artificial Sequence: Synthetic oligonucleotide
uuggccacgcucauggaaa

SEQ ID NO: 1781052 - RNA, 19 nt, Artificial Sequence
  Description of Artificial Sequence: Synthetic oligonucleotide
aguaggcaucaccucacag

SEQ ID NO: 1781053 - RNA, 19 nt, Artificial Sequence
  Description of Artificial Sequence: Synthetic oligonucleotide
uacaggucaggucugcgau

SEQ ID NO: 1781054 - RNA, 19 nt, Artificial Sequence
  Description of Artificial Sequence: Synthetic oligonucleotide
auugccauacaggucaggu

SEQ ID NO: 1781055 - RNA, 19 nt, Artificial Sequence
  Description of Artificial Sequence: Synthetic oligonucleotide
uaucgucccagaagguccc

SEQ ID NO: 1781056 - RNA, 19 nt, Artificial Sequence
  Description of Artificial Sequence: Synthetic oligonucleotide
gaagguccccauccagugg

SEQ ID NO: 1781057 - RNA, 19 nt, Artificial Sequence
  Description of Artificial Sequence: Synthetic oligonucleotide
cagagaaaguucagggaac

SEQ ID NO: 1781058 - RNA, 19 nt, Artificial Sequence
  Description of Artificial Sequence: Synthetic oligonucleotide
ccuguaacggauccaaagg

SEQ ID NO: 1781059 - RNA, 19 nt, Artificial Sequence
  Description of Artificial Sequence: Synthetic oligonucleotide
guaacggauccaaaggcug

SEQ ID NO: 1781060 - RNA, 19 nt, Artificial Sequence
  Description of Artificial Sequence: Synthetic oligonucleotide
ugcugugcccguaacuugu

SEQ ID NO: 1781061 - RNA, 19 nt, Artificial Sequence
  Description of Artificial Sequence: Synthetic oligonucleotide
ggcuauaucgucccagaag

SEQ ID NO: 1781062 - RNA, 19 nt, Artificial Sequence
  Description of Artificial Sequence: Synthetic oligonucleotide
gccuacaagucacaguagg

SEQ ID NO: 1781063 - RNA, 19 nt, Artificial Sequence
  Description of Artificial Sequence: Synthetic oligonucleotide
gagaaaguucagggaaccg

SEQ ID NO: 1781064 - RNA, 19 nt, Artificial Sequence
  Description of Artificial Sequence: Synthetic oligonucleotide
ucucaacccgcauaaguua

SEQ ID NO: 1781065 - RNA, 19 nt, Artificial Sequence
  Description of Artificial Sequence: Synthetic oligonucleotide
caugguagaguugcuuucc

SEQ ID NO: 1781066 - RNA, 19 nt, Artificial Sequence
  Description of Artificial Sequence: Synthetic oligonucleotide
accccagggguccaccacc

SEQ ID NO: 1781067 - RNA, 19 nt, Artificial Sequence
  Description of Artificial Sequence: Synthetic oligonucleotide
uacaucgcauagauguguc

SEQ ID NO: 1781068 - RNA, 19 nt, Artificial Sequence
  Description of Artificial Sequence: Synthetic oligonucleotide
auagaugugucuuccugua

SEQ ID NO: 1781069 - RNA, 19 nt, Artificial Sequence
  Description of Artificial Sequence: Synthetic oligonucleotide
ucaguauuucugccccagc

SEQ ID NO: 1781070 - RNA, 19 nt, Artificial Sequence
  Description of Artificial Sequence: Synthetic oligonucleotide
gaccaaccuucccugcugg

SEQ ID NO: 1781071 - RNA, 19 nt, Artificial Sequence
  Description of Artificial Sequence: Synthetic oligonucleotide
gucauaacagauugcuaga

SEQ ID NO: 1781072 - RNA, 19 nt, Artificial Sequence
  Description of Artificial Sequence: Synthetic oligonucleotide
gcugcuaucacguagcacu

SEQ ID NO: 1781073 - RNA, 19 nt, Artificial Sequence
  Description of Artificial Sequence: Synthetic oligonucleotide
agugguugacccagauugc

SEQ ID NO: 1781074 - RNA, 19 nt, Artificial Sequence
  Description of Artificial Sequence: Synthetic oligonucleotide
uagaccaaccuucccugcu

SEQ ID NO: 1781075 - RNA, 19 nt, Artificial Sequence
  Description of Artificial Sequence: Synthetic oligonucleotide
cacuacuagucccuuguug

SEQ ID NO: 1781076 - RNA, 19 nt, Artificial Sequence
  Description of Artificial Sequence: Synthetic oligonucleotide
cagacagcuguaaugucuc

SEQ ID NO: 1781077 - RNA, 19 nt, Artificial Sequence
  Description of Artificial Sequence: Synthetic oligonucleotide
ucucggcaggauuucgugc

SEQ ID NO: 1781078 - RNA, 19 nt, Artificial Sequence
  Description of Artificial Sequence: Synthetic oligonucleotide
aaaucugaggucaggucaa

SEQ ID NO: 1781079 - RNA, 19 nt, Artificial Sequence
  Description of Artificial Sequence: Synthetic oligonucleotide
acaguaggcaucaccucac

SEQ ID NO: 1781080 - RNA, 19 nt, Artificial Sequence
  Description of Artificial Sequence: Synthetic oligonucleotide
uugucguaucuguuguaga

SEQ ID NO: 1781081 - RNA, 19 nt, Artificial Sequence
  Description of Artificial Sequence: Synthetic oligonucleotide
ucaaaugccucaggcagaa

SEQ ID NO: 1781082 - RNA, 19 nt, Artificial Sequence
  Description of Artificial Sequence: Synthetic oligonucleotide
uucaaugccagugcugcuc

SEQ ID NO: 1781083 - RNA, 19 nt, Artificial Sequence
  Description of Artificial Sequence: Synthetic oligonucleotide
auacaggucaggucugcga

SEQ ID NO: 1781084 - RNA, 19 nt, Artificial Sequence
  Description of Artificial Sequence: Synthetic oligonucleotide
acugacuauauaaaauuuu

SEQ ID NO: 1781085 - RNA, 19 nt, Artificial Sequence
  Description of Artificial Sequence: Synthetic oligonucleotide
uugauguuaccuggcacac

SEQ ID NO: 1781086 - RNA, 19 nt, Artificial Sequence
  Description of Artificial Sequence: Synthetic oligonucleotide
aucaccucacagcugugcu

SEQ ID NO: 1781087 - RNA, 19 nt, Artificial Sequence
  Description of Artificial Sequence: Synthetic oligonucleotide
aaguugaggaggacaccuc

SEQ ID NO: 1781088 - RNA, 19 nt, Artificial Sequence
  Description of Artificial Sequence: Synthetic oligonucleotide
ggucccucagagcagcugg

SEQ ID NO: 1781089 - RNA, 19 nt, Artificial Sequence
  Description of Artificial Sequence: Synthetic oligonucleotide
gaaccgcaugucauaacag

SEQ ID NO: 1781090 - RNA, 19 nt, Artificial Sequence
  Description of Artificial Sequence: Synthetic oligonucleotide
agcauaacuucaguuuuca

SEQ ID NO: 1781091 - RNA, 19 nt, Artificial Sequence
  Description of Artificial Sequence: Synthetic oligonucleotide
ugugcugauugguggcuca

SEQ ID NO: 1781092 - RNA, 19 nt, Artificial Sequence
  Description of Artificial Sequence: Synthetic oligonucleotide
ucgcauagaugugucuucc

SEQ ID NO: 1781093 - RNA, 19 nt, Artificial Sequence
  Description of Artificial Sequence: Synthetic oligonucleotide
uugaaccuguguuccauua

SEQ ID NO: 1781094 - RNA, 19 nt, Artificial Sequence
  Description of Artificial Sequence: Synthetic oligonucleotide
ggaaccgcaugucauaaca

SEQ ID NO: 1781095 - RNA, 19 nt, Artificial Sequence
  Description of Artificial Sequence: Synthetic oligonucleotide
gcuuguuugguguugaugu

SEQ ID NO: 1781096 - RNA, 19 nt, Artificial Sequence
  Description of Artificial Sequence: Synthetic oligonucleotide
augguuccaggcaugguag

SEQ ID NO: 1781097 - RNA, 19 nt, Artificial Sequence
  Description of Artificial Sequence: Synthetic oligonucleotide
acauucccuggcaagcugg

SEQ ID NO: 1781098 - RNA, 19 nt, Artificial Sequence
  Description of Artificial Sequence: Synthetic oligonucleotide
ugagccaauuucagagaaa

SEQ ID NO: 1781099 - RNA, 19 nt, Artificial Sequence
  Description of Artificial Sequence: Synthetic oligonucleotide
ugccuacaagucacaguag

SEQ ID NO: 1781100 - RNA, 19 nt, Artificial Sequence
  Description of Artificial Sequence: Synthetic oligonucleotide
agaccaaccuucccugcug

SEQ ID NO: 1781101 - RNA, 19 nt, Artificial Sequence
  Description of Artificial Sequence: Synthetic oligonucleotide
cuuggguccugccuacaag

SEQ ID NO: 1781102 - RNA, 19 nt, Artificial Sequence
  Description of Artificial Sequence: Synthetic oligonucleotide
ugucucggcaggauuucgu

SEQ ID NO: 1781103 - RNA, 19 nt, Artificial Sequence
  Description of Artificial Sequence: Synthetic oligonucleotide
cgugcaaugaagucaaaug

SEQ ID NO: 1781104 - RNA, 19 nt, Artificial Sequence
  Description of Artificial Sequence: Synthetic oligonucleotide
agcuugagccaauuucaga

SEQ ID NO: 1781105 - RNA, 19 nt, Artificial Sequence
  Description of Artificial Sequence: Synthetic oligonucleotide
gaguacaaaguaccgagau

SEQ ID NO: 1781106 - RNA, 19 nt, Artificial Sequence
  Description of Artificial Sequence: Synthetic oligonucleotide
gcuaucacguagcacugag

SEQ ID NO: 1781107 - RNA, 19 nt, Artificial Sequence
  Description of Artificial Sequence: Synthetic oligonucleotide
caugucauaacagauugcu

SEQ ID NO: 1781108 - RNA, 19 nt, Artificial Sequence
  Description of Artificial Sequence: Synthetic oligonucleotide
aacugaaaucugaggucag

SEQ ID NO: 1781109 - RNA, 19 nt, Artificial Sequence
  Description of Artificial Sequence: Synthetic oligonucleotide
ugggaucucuacaucgcau

SEQ ID NO: 1781110 - RNA, 19 nt, Artificial Sequence
  Description of Artificial Sequence: Synthetic oligonucleotide
gaaguugaggaggacaccu

SEQ ID NO: 1781111 - RNA, 19 nt, Artificial Sequence
  Description of Artificial Sequence: Synthetic oligonucleotide
ggaucucuacaucgcauag

SEQ ID NO: 1781112 - RNA, 19 nt, Artificial Sequence
  Description of Artificial Sequence: Synthetic oligonucleotide
cacgcucauggaaaccacc

SEQ ID NO: 1781113 - RNA, 19 nt, Artificial Sequence
  Description of Artificial Sequence: Synthetic oligonucleotide
acaaaguaccgagauucga

SEQ ID NO: 1781114 - RNA, 19 nt, Artificial Sequence
  Description of Artificial Sequence: Synthetic oligonucleotide
cuagaccaaccuucccugc

SEQ ID NO: 1781115 - RNA, 19 nt, Artificial Sequence
  Description of Artificial Sequence: Synthetic oligonucleotide
uaacuuguucuugucucgu

SEQ ID NO: 1781116 - RNA, 19 nt, Artificial Sequence
  Description of Artificial Sequence: Synthetic oligonucleotide
uuguuugguguugauguua

SEQ ID NO: 1781117 - RNA, 19 nt, Artificial Sequence
  Description of Artificial Sequence: Synthetic oligonucleotide
uguaugucucaacccgcau

SEQ ID NO: 1781118 - RNA, 19 nt, Artificial Sequence
  Description of Artificial Sequence: Synthetic oligonucleotide
caggaccuguaacggaucc

SEQ ID NO: 1781119 - RNA, 19 nt, Artificial Sequence
  Description of Artificial Sequence: Synthetic oligonucleotide
guagaguugcuuucccgca

SEQ ID NO: 1781120 - RNA, 19 nt, Artificial Sequence
  Description of Artificial Sequence: Synthetic oligonucleotide
ucuugucucgugguggcgu

SEQ ID NO: 1781121 - RNA, 19 nt, Artificial Sequence
  Description of Artificial Sequence: Synthetic oligonucleotide
uguaaugucucggcaggau

SEQ ID NO: 1781122 - RNA, 19 nt, Artificial Sequence
  Description of Artificial Sequence: Synthetic oligonucleotide
guggcucaagaaugguucc

SEQ ID NO: 1781123 - RNA, 19 nt, Artificial Sequence
  Description of Artificial Sequence: Synthetic oligonucleotide
cagcuugagccaauuucag

SEQ ID NO: 1781124 - RNA, 19 nt, Artificial Sequence
  Description of Artificial Sequence: Synthetic oligonucleotide
uagaguugcuuucccgcau

SEQ ID NO: 1781125 - RNA, 19 nt, Artificial Sequence
  Description of Artificial Sequence: Synthetic oligonucleotide
gucaguauuucugccccag

SEQ ID NO: 1781126 - RNA, 19 nt, Artificial Sequence
  Description of Artificial Sequence: Synthetic oligonucleotide
caaucuguuuccgguacac

SEQ ID NO: 1781127 - RNA, 19 nt, Artificial Sequence
  Description of Artificial Sequence: Synthetic oligonucleotide
uugccauacaggucagguc

SEQ ID NO: 1781128 - RNA, 19 nt, Artificial Sequence
  Description of Artificial Sequence: Synthetic oligonucleotide
guuauuucuuucccaugaa

SEQ ID NO: 1781129 - RNA, 19 nt, Artificial Sequence
  Description of Artificial Sequence: Synthetic oligonucleotide
ucccaugaacuugaaccug

SEQ ID NO: 1781130 - RNA, 19 nt, Artificial Sequence
  Description of Artificial Sequence: Synthetic oligonucleotide
ugguucagacagcuguaau

SEQ ID NO: 1781131 - RNA, 19 nt, Artificial Sequence
  Description of Artificial Sequence: Synthetic oligonucleotide
cucggcaggauuucgugca

SEQ ID NO: 1781132 - RNA, 19 nt, Artificial Sequence
  Description of Artificial Sequence: Synthetic oligonucleotide
gucucggcaggauuucgug

SEQ ID NO: 1781133 - RNA, 19 nt, Artificial Sequence
  Description of Artificial Sequence: Synthetic oligonucleotide
gguggcucaagaaugguuc

SEQ ID NO: 1781134 - RNA, 19 nt, Artificial Sequence
  Description of Artificial Sequence: Synthetic oligonucleotide
cauaaguuaaaaggcuuaa

SEQ ID NO: 1781135 - RNA, 19 nt, Artificial Sequence
  Description of Artificial Sequence: Synthetic oligonucleotide
ucaacccgcauaaguuaaa

SEQ ID NO: 1781136 - RNA, 19 nt, Artificial Sequence
  Description of Artificial Sequence: Synthetic oligonucleotide
aggccccugaccugggauc

SEQ ID NO: 1781137 - RNA, 19 nt, Artificial Sequence
  Description of Artificial Sequence: Synthetic oligonucleotide
cagcauaacuucaguuuuc

SEQ ID NO: 1781138 - RNA, 19 nt, Artificial Sequence
  Description of Artificial Sequence: Synthetic oligonucleotide
acaucgcauagaugugucu

SEQ ID NO: 1781139 - RNA, 19 nt, Artificial Sequence
  Description of Artificial Sequence: Synthetic oligonucleotide
aguugcuuucccgcauagg

SEQ ID NO: 1781140 - RNA, 19 nt, Artificial Sequence
  Description of Artificial Sequence: Synthetic oligonucleotide
guaaguggccacuacuagu

SEQ ID NO: 1781141 - RNA, 19 nt, Artificial Sequence
  Description of Artificial Sequence: Synthetic oligonucleotide
cuguaaguggccacuacua

SEQ ID NO: 1781142 - RNA, 19 nt, Artificial Sequence
  Description of Artificial Sequence: Synthetic oligonucleotide
gauugccauacaggucagg

SEQ ID NO: 1781143 - RNA, 19 nt, Artificial Sequence
  Description of Artificial Sequence: Synthetic oligonucleotide
ucgaggcaaucuguuuccg

SEQ ID NO: 1781144 - RNA, 19 nt, Artificial Sequence
  Description of Artificial Sequence: Synthetic oligonucleotide
gcgaugcuggaacacaggc

SEQ ID NO: 1781145 - RNA, 19 nt, Artificial Sequence
  Description of Artificial Sequence: Synthetic oligonucleotide
uggcuauaucgucccagaa

SEQ ID NO: 1781146 - RNA, 19 nt, Artificial Sequence
  Description of Artificial Sequence: Synthetic oligonucleotide
uccugccuacaagucacag

SEQ ID NO: 1781147 - RNA, 19 nt, Artificial Sequence
  Description of Artificial Sequence: Synthetic oligonucleotide
acaggucaggucugcgaug

SEQ ID NO: 1781148 - RNA, 19 nt, Artificial Sequence
  Description of Artificial Sequence: Synthetic oligonucleotide
gaucucuacaucgcauaga

SEQ ID NO: 1781149 - RNA, 19 nt, Artificial Sequence
  Description of Artificial Sequence: Synthetic oligonucleotide
ugaggaggacaccuccaua

SEQ ID NO: 1781150 - RNA, 19 nt, Artificial Sequence
  Description of Artificial Sequence: Synthetic oligonucleotide
cguaacuuguucuugucuc

SEQ ID NO: 1781151 - RNA, 19 nt, Artificial Sequence
  Description of Artificial Sequence: Synthetic oligonucleotide
aacggauccaaaggcugaa

SEQ ID NO: 1781152 - RNA, 19 nt, Artificial Sequence
  Description of Artificial Sequence: Synthetic oligonucleotide
aaggcuuaagacagugguu

SEQ ID NO: 1781153 - RNA, 19 nt, Artificial Sequence
  Description of Artificial Sequence: Synthetic oligonucleotide
accgagauucgaggcaauc

SEQ ID NO: 1781154 - RNA, 19 nt, Artificial Sequence
  Description of Artificial Sequence: Synthetic oligonucleotide
uucuugucucgugguggcg

SEQ ID NO: 1781155 - RNA, 19 nt, Artificial Sequence
  Description of Artificial Sequence: Synthetic oligonucleotide
guguugauguuaccuggca

SEQ ID NO: 1781156 - RNA, 19 nt, Artificial Sequence
  Description of Artificial Sequence: Synthetic oligonucleotide
gaaccagcucagcacaugu

SEQ ID NO: 1781157 - RNA, 19 nt, Artificial Sequence
  Description of Artificial Sequence: Synthetic oligonucleotide
guaugucucaacccgcaua

SEQ ID NO: 1781158 - RNA, 19 nt, Artificial Sequence
  Description of Artificial Sequence: Synthetic oligonucleotide
cucaacccgcauaaguuaa

SEQ ID NO: 1781159 - RNA, 19 nt, Artificial Sequence
  Description of Artificial Sequence: Synthetic oligonucleotide
cagugguucagacagcugu

SEQ ID NO: 1781160 - RNA, 19 nt, Artificial Sequence
  Description of Artificial Sequence: Synthetic oligonucleotide
aaaguucagggaaccgcau

SEQ ID NO: 1781161 - RNA, 19 nt, Artificial Sequence
  Description of Artificial Sequence: Synthetic oligonucleotide
agucugcucccagucuugg

SEQ ID NO: 1781162 - RNA, 19 nt, Artificial Sequence
  Description of Artificial Sequence: Synthetic oligonucleotide
ggcaaucuguuuccgguac

SEQ ID NO: 1781163 - RNA, 19 nt, Artificial Sequence
  Description of Artificial Sequence: Synthetic oligonucleotide
ugacccagauugccauaca

SEQ ID NO: 1781164 - RNA, 19 nt, Artificial Sequence
  Description of Artificial Sequence: Synthetic oligonucleotide
uguugucguaucuguugua

SEQ ID NO: 1781165 - RNA, 19 nt, Artificial Sequence
  Description of Artificial Sequence: Synthetic oligonucleotide
agaaccagcucagcacaug

SEQ ID NO: 1781166 - RNA, 19 nt, Artificial Sequence
  Description of Artificial Sequence: Synthetic oligonucleotide
accgcaugucauaacagau

SEQ ID NO: 1781167 - RNA, 19 nt, Artificial Sequence
  Description of Artificial Sequence: Synthetic oligonucleotide
agaguugcuuucccgcaua

SEQ ID NO: 1781168 - RNA, 19 nt, Artificial Sequence
  Description of Artificial Sequence: Synthetic oligonucleotide
gaaggauaagucaguauuu

SEQ ID NO: 1781169 - RNA, 19 nt, Artificial Sequence
  Description of Artificial Sequence: Synthetic oligonucleotide
ugauguuaccuggcacaca

SEQ ID NO: 1781170 - RNA, 19 nt, Artificial Sequence
  Description of Artificial Sequence: Synthetic oligonucleotide
ccauuaagaguaguuuaag

SEQ ID NO: 1781171 - RNA, 19 nt, Artificial Sequence
  Description of Artificial Sequence: Synthetic oligonucleotide
ugcccguaacuuguucuug

SEQ ID NO: 1781172 - RNA, 19 nt, Artificial Sequence
  Description of Artificial Sequence: Synthetic oligonucleotide
augucucggcaggauuucg

SEQ ID NO: 1781173 - RNA, 19 nt, Artificial Sequence
  Description of Artificial Sequence: Synthetic oligonucleotide
ggaaaccacccaaggacag

SEQ ID NO: 1781174 - RNA, 19 nt, Artificial Sequence
  Description of Artificial Sequence: Synthetic oligonucleotide
cuugucucgugguggcguc

SEQ ID NO: 1781175 - RNA, 19 nt, Artificial Sequence
  Description of Artificial Sequence: Synthetic oligonucleotide
uaggccccugaccugggau

SEQ ID NO: 1781176 - RNA, 19 nt, Artificial Sequence
  Description of Artificial Sequence: Synthetic oligonucleotide
ucccuggcaagcuggcuau

SEQ ID NO: 1781177 - RNA, 19 nt, Artificial Sequence
  Description of Artificial Sequence: Synthetic oligonucleotide
auguuaccuggcacacagc

SEQ ID NO: 1781178 - RNA, 19 nt, Artificial Sequence
  Description of Artificial Sequence: Synthetic oligonucleotide
acagugguugacccagauu

SEQ ID NO: 1781179 - RNA, 19 nt, Artificial Sequence
  Description of Artificial Sequence: Synthetic oligonucleotide
caagaaugguuccaggcau

SEQ ID NO: 1781180 - RNA, 19 nt, Artificial Sequence
  Description of Artificial Sequence: Synthetic oligonucleotide
agaguaguuuaagguucug

SEQ ID NO: 1781181 - RNA, 19 nt, Artificial Sequence
  Description of Artificial Sequence: Synthetic oligonucleotide
gguccugccuacaagucac

SEQ ID NO: 1781182 - RNA, 19 nt, Artificial Sequence
  Description of Artificial Sequence: Synthetic oligonucleotide
guguugucguaucuguugu

SEQ ID NO: 1781183 - RNA, 19 nt, Artificial Sequence
  Description of Artificial Sequence: Synthetic oligonucleotide
cuaucacguagcacugaga

SEQ ID NO: 1781184 - RNA, 19 nt, Artificial Sequence
  Description of Artificial Sequence: Synthetic oligonucleotide
cagauugcuagaccaaccu

SEQ ID NO: 1781185 - RNA, 19 nt, Artificial Sequence
  Description of Artificial Sequence: Synthetic oligonucleotide
ugcuaucacguagcacuga

SEQ ID NO: 1781186 - RNA, 19 nt, Artificial Sequence
  Description of Artificial Sequence: Synthetic oligonucleotide
cgagauucgaggcaaucug

SEQ ID NO: 1781187 - RNA, 19 nt, Artificial Sequence
  Description of Artificial Sequence: Synthetic oligonucleotide
cuuggccacgcucauggaa

SEQ ID NO: 1781188 - RNA, 19 nt, Artificial Sequence
  Description of Artificial Sequence: Synthetic oligonucleotide
agauucgaggcaaucuguu

SEQ ID NO: 1781189 - RNA, 19 nt, Artificial Sequence
  Description of Artificial Sequence: Synthetic oligonucleotide
ucucgugguggcguccaca

SEQ ID NO: 1781190 - RNA, 19 nt, Artificial Sequence
  Description of Artificial Sequence: Synthetic oligonucleotide
uggccacgcucauggaaac

SEQ ID NO: 1781191 - RNA, 19 nt, Artificial Sequence
  Description of Artificial Sequence: Synthetic oligonucleotide
gagucugcucccagucuug

SEQ ID NO: 1781192 - RNA, 19 nt, Artificial Sequence
  Description of Artificial Sequence: Synthetic oligonucleotide
caccuccauagcucugggc

SEQ ID NO: 1781193 - RNA, 19 nt, Artificial Sequence
  Description of Artificial Sequence: Synthetic oligonucleotide
ugcugcuaucacguagcac

SEQ ID NO: 1781194 - RNA, 19 nt, Artificial Sequence
  Description of Artificial Sequence: Synthetic oligonucleotide
guguaugucucaacccgca

SEQ ID NO: 1781195 - RNA, 19 nt, Artificial Sequence
  Description of Artificial Sequence: Synthetic oligonucleotide
gauucgaggcaaucuguuu

SEQ ID NO: 1781196 - RNA, 19 nt, Artificial Sequence
  Description of Artificial Sequence: Synthetic oligonucleotide
guaccgagauucgaggcaa

SEQ ID NO: 1781197 - RNA, 19 nt, Artificial Sequence
  Description of Artificial Sequence: Synthetic oligonucleotide
cuagucccuuguuguucag

SEQ ID NO: 1781198 - RNA, 19 nt, Artificial Sequence
  Description of Artificial Sequence: Synthetic oligonucleotide
gagauucgaggcaaucugu

SEQ ID NO: 1781199 - RNA, 19 nt, Artificial Sequence
  Description of Artificial Sequence: Synthetic oligonucleotide
guugaggaggacaccucca

SEQ ID NO: 1781200 - RNA, 19 nt, Artificial Sequence
  Description of Artificial Sequence: Synthetic oligonucleotide
cacugacuauauaaaauuu

SEQ ID NO: 1781201 - RNA, 19 nt, Artificial Sequence
  Description of Artificial Sequence: Synthetic oligonucleotide
cuggaacacaggcaggugu

SEQ ID NO: 1781202 - RNA, 19 nt, Artificial Sequence
  Description of Artificial Sequence: Synthetic oligonucleotide
gucguaucuguuguagaaa

SEQ ID NO: 1781203 - RNA, 19 nt, Artificial Sequence
  Description of Artificial Sequence: Synthetic oligonucleotide
auggcacgggcccgcagca

SEQ ID NO: 1781204 - RNA, 19 nt, Artificial Sequence
  Description of Artificial Sequence: Synthetic oligonucleotide
ucggcaggauuucgugcaa

SEQ ID NO: 1781205 - RNA, 19 nt, Artificial Sequence
  Description of Artificial Sequence: Synthetic oligonucleotide
aggucaggucaaaaguuau

SEQ ID NO: 1781206 - RNA, 19 nt, Artificial Sequence
  Description of Artificial Sequence: Synthetic oligonucleotide
gcugaguacaaaguaccga

SEQ ID NO: 1781207 - RNA, 19 nt, Artificial Sequence
  Description of Artificial Sequence: Synthetic oligonucleotide
gccaccacuguaccccagg

SEQ ID NO: 1781208 - RNA, 19 nt, Artificial Sequence
  Description of Artificial Sequence: Synthetic oligonucleotide
acggauccaaaggcugaag

SEQ ID NO: 1781209 - RNA, 19 nt, Artificial Sequence
  Description of Artificial Sequence: Synthetic oligonucleotide
agggaaccgcaugucauaa

SEQ ID NO: 1781210 - RNA, 19 nt, Artificial Sequence
  Description of Artificial Sequence: Synthetic oligonucleotide
cacugugcugcugcuauca

SEQ ID NO: 1781211 - RNA, 19 nt, Artificial Sequence
  Description of Artificial Sequence: Synthetic oligonucleotide
gcacaugacaauuguagau

SEQ ID NO: 1781212 - RNA, 19 nt, Artificial Sequence
  Description of Artificial Sequence: Synthetic oligonucleotide
uggucccucagagcagcug

SEQ ID NO: 1781213 - RNA, 19 nt, Artificial Sequence
  Description of Artificial Sequence: Synthetic oligonucleotide
cuggccgccucuagaacca

SEQ ID NO: 1781214 - RNA, 19 nt, Artificial Sequence
  Description of Artificial Sequence: Synthetic oligonucleotide
gcuuaagacagugguugac

SEQ ID NO: 1781215 - RNA, 19 nt, Artificial Sequence
  Description of Artificial Sequence: Synthetic oligonucleotide
cagguguugucguaucugu

SEQ ID NO: 1781216 - RNA, 19 nt, Artificial Sequence
  Description of Artificial Sequence: Synthetic oligonucleotide
ccagucuuggccacgcuca

SEQ ID NO: 1781217 - RNA, 19 nt, Artificial Sequence
  Description of Artificial Sequence: Synthetic oligonucleotide
agcacccagucuggccgcc

SEQ ID NO: 1781218 - RNA, 19 nt, Artificial Sequence
  Description of Artificial Sequence: Synthetic oligonucleotide
agugguucagacagcugua

SEQ ID NO: 1781219 - RNA, 19 nt, Artificial Sequence
  Description of Artificial Sequence: Synthetic oligonucleotide
caaccuucccugcuggugu

SEQ ID NO: 1781220 - RNA, 19 nt, Artificial Sequence
  Description of Artificial Sequence: Synthetic oligonucleotide
cuacaucgcauagaugugu

SEQ ID NO: 1781221 - RNA, 19 nt, Artificial Sequence
  Description of Artificial Sequence: Synthetic oligonucleotide
gcauaaguuaaaaggcuua

SEQ ID NO: 1781222 - RNA, 19 nt, Artificial Sequence
  Description of Artificial Sequence: Synthetic oligonucleotide
gggaucucuacaucgcaua

SEQ ID NO: 1781223 - RNA, 19 nt, Artificial Sequence
  Description of Artificial Sequence: Synthetic oligonucleotide
augucucaacccgcauaag

SEQ ID NO: 1781224 - RNA, 19 nt, Artificial Sequence
  Description of Artificial Sequence: Synthetic oligonucleotide
agcccucagcauaacuuca

SEQ ID NO: 1781225 - RNA, 19 nt, Artificial Sequence
  Description of Artificial Sequence: Synthetic oligonucleotide
gguggcguccacacugugc

SEQ ID NO: 1781226 - RNA, 19 nt, Artificial Sequence
  Description of Artificial Sequence: Synthetic oligonucleotide
ggcuuaagacagugguuga

SEQ ID NO: 1781227 - RNA, 19 nt, Artificial Sequence
  Description of Artificial Sequence: Synthetic oligonucleotide
gcuguguguaugucucaac

SEQ ID NO: 1781228 - RNA, 19 nt, Artificial Sequence
  Description of Artificial Sequence: Synthetic oligonucleotide
aggaccuguaacggaucca

SEQ ID NO: 1781229 - RNA, 19 nt, Artificial Sequence
  Description of Artificial Sequence: Synthetic oligonucleotide
uucgugcaaugaagucaaa

SEQ ID NO: 1781230 - RNA, 19 nt, Artificial Sequence
  Description of Artificial Sequence: Synthetic oligonucleotide
cugugcccguaacuuguuc

SEQ ID NO: 1781231 - RNA, 19 nt, Artificial Sequence
  Description of Artificial Sequence: Synthetic oligonucleotide
gcacauguuuuaaaguucu

SEQ ID NO: 1781232 - RNA, 19 nt, Artificial Sequence
  Description of Artificial Sequence: Synthetic oligonucleotide
ggauuucgugcaaugaagu

SEQ ID NO: 1781233 - RNA, 19 nt, Artificial Sequence
  Description of Artificial Sequence: Synthetic oligonucleotide
ggaccuguaacggauccaa

SEQ ID NO: 1781234 - RNA, 19 nt, Artificial Sequence
  Description of Artificial Sequence: Synthetic oligonucleotide
cugaaggauaagucaguau

SEQ ID NO: 1781235 - RNA, 19 nt, Artificial Sequence
  Description of Artificial Sequence: Synthetic oligonucleotide
gugcuuggguccugccuac

SEQ ID NO: 1781236 - RNA, 19 nt, Artificial Sequence
  Description of Artificial Sequence: Synthetic oligonucleotide
guagaaaguugagaucaau

SEQ ID NO: 1781237 - RNA, 19 nt, Artificial Sequence
  Description of Artificial Sequence: Synthetic oligonucleotide
uaccgagauucgaggcaau

SEQ ID NO: 1781238 - RNA, 19 nt, Artificial Sequence
  Description of Artificial Sequence: Synthetic oligonucleotide
uucccgcauaggccccuga

SEQ ID NO: 1781239 - RNA, 19 nt, Artificial Sequence
  Description of Artificial Sequence: Synthetic oligonucleotide
cacacugugcugcugcuau

SEQ ID NO: 1781240 - RNA, 19 nt, Artificial Sequence
  Description of Artificial Sequence: Synthetic oligonucleotide
aucugaggucaggucaaaa

SEQ ID NO: 1781241 - RNA, 19 nt, Artificial Sequence
  Description of Artificial Sequence: Synthetic oligonucleotide
caacccgcauaaguuaaaa

SEQ ID NO: 1781242 - RNA, 19 nt, Artificial Sequence
  Description of Artificial Sequence: Synthetic oligonucleotide
cgaggcaaucuguuuccgg

SEQ ID NO: 1781243 - RNA, 19 nt, Artificial Sequence
  Description of Artificial Sequence: Synthetic oligonucleotide
gccacuacuagucccuugu

SEQ ID NO: 1781244 - RNA, 19 nt, Artificial Sequence
  Description of Artificial Sequence: Synthetic oligonucleotide
gccacgcucauggaaacca

SEQ ID NO: 1781245 - RNA, 19 nt, Artificial Sequence
  Description of Artificial Sequence: Synthetic oligonucleotide
cagggaaccgcaugucaua

SEQ ID NO: 1781246 - RNA, 19 nt, Artificial Sequence
  Description of Artificial Sequence: Synthetic oligonucleotide
agcuggcuauaucguccca

SEQ ID NO: 1781247 - RNA, 19 nt, Artificial Sequence
  Description of Artificial Sequence: Synthetic oligonucleotide
aggcaugguagaguugcuu

SEQ ID NO: 1781248 - RNA, 19 nt, Artificial Sequence
  Description of Artificial Sequence: Synthetic oligonucleotide
acccagucuggccgccucu

SEQ ID NO: 1781249 - RNA, 19 nt, Artificial Sequence
  Description of Artificial Sequence: Synthetic oligonucleotide
cacguagcacugagauuca

SEQ ID NO: 1781250 - RNA, 19 nt, Artificial Sequence
  Description of Artificial Sequence: Synthetic oligonucleotide
gcuggccaccacuguaccc

SEQ ID NO: 1781251 - RNA, 19 nt, Artificial Sequence
  Description of Artificial Sequence: Synthetic oligonucleotide
gugguucagacagcuguaa

SEQ ID NO: 1781252 - RNA, 19 nt, Artificial Sequence
  Description of Artificial Sequence: Synthetic oligonucleotide
uuucccgcauaggccccug

SEQ ID NO: 1781253 - RNA, 19 nt, Artificial Sequence
  Description of Artificial Sequence: Synthetic oligonucleotide
ccagggguccaccaccaug

SEQ ID NO: 1781254 - RNA, 19 nt, Artificial Sequence
  Description of Artificial Sequence: Synthetic oligonucleotide
guaccccagggguccacca

SEQ ID NO: 1781255 - RNA, 19 nt, Artificial Sequence
  Description of Artificial Sequence: Synthetic oligonucleotide
gcaaucuguuuccgguaca

SEQ ID NO: 1781256 - RNA, 19 nt, Artificial Sequence
  Description of Artificial Sequence: Synthetic oligonucleotide
guuccaggcaugguagagu

SEQ ID NO: 1781257 - RNA, 19 nt, Artificial Sequence
  Description of Artificial Sequence: Synthetic oligonucleotide
ggcacgggcccgcagcaac

SEQ ID NO: 1781258 - RNA, 19 nt, Artificial Sequence
  Description of Artificial Sequence: Synthetic oligonucleotide
caucgcauagaugugucuu

SEQ ID NO: 1781259 - RNA, 19 nt, Artificial Sequence
  Description of Artificial Sequence: Synthetic oligonucleotide
caguaggcaucaccucaca

SEQ ID NO: 1781260 - RNA, 19 nt, Artificial Sequence
  Description of Artificial Sequence: Synthetic oligonucleotide
cccauccagugguucagac

SEQ ID NO: 1781261 - RNA, 19 nt, Artificial Sequence
  Description of Artificial Sequence: Synthetic oligonucleotide
gcccucagcauaacuucag

SEQ ID NO: 1781262 - RNA, 19 nt, Artificial Sequence
  Description of Artificial Sequence: Synthetic oligonucleotide
gggaaccgcaugucauaac

SEQ ID NO: 1781263 - RNA, 19 nt, Artificial Sequence
  Description of Artificial Sequence: Synthetic oligonucleotide
ugcuuggguccugccuaca

SEQ ID NO: 1781264 - RNA, 19 nt, Artificial Sequence
  Description of Artificial Sequence: Synthetic oligonucleotide
cugcugcuaucacguagca

SEQ ID NO: 1781265 - RNA, 19 nt, Artificial Sequence
  Description of Artificial Sequence: Synthetic oligonucleotide
gaccuguaacggauccaaa

SEQ ID NO: 1781266 - RNA, 19 nt, Artificial Sequence
  Description of Artificial Sequence: Synthetic oligonucleotide
cacccagucuggccgccuc

SEQ ID NO: 1781267 - RNA, 19 nt, Artificial Sequence
  Description of Artificial Sequence: Synthetic oligonucleotide
ccgcauaaguuaaaaggcu

SEQ ID NO: 1781268 - RNA, 19 nt, Artificial Sequence
  Description of Artificial Sequence: Synthetic oligonucleotide
ugccccagcuugagccaau

SEQ ID NO: 1781269 - RNA, 19 nt, Artificial Sequence
  Description of Artificial Sequence: Synthetic oligonucleotide
ccauacaggucaggucugc

SEQ ID NO: 1781270 - RNA, 19 nt, Artificial Sequence
  Description of Artificial Sequence: Synthetic oligonucleotide
uggccgccucuagaaccag

SEQ ID NO: 1781271 - RNA, 19 nt, Artificial Sequence
  Description of Artificial Sequence: Synthetic oligonucleotide
cuacuagucccuuguuguu

SEQ ID NO: 1781272 - RNA, 19 nt, Artificial Sequence
  Description of Artificial Sequence: Synthetic oligonucleotide
gccauacaggucaggucug

SEQ ID NO: 1781273 - RNA, 19 nt, Artificial Sequence
  Description of Artificial Sequence: Synthetic oligonucleotide
ggaacugugcuuggguccu

SEQ ID NO: 1781274 - RNA, 19 nt, Artificial Sequence
  Description of Artificial Sequence: Synthetic oligonucleotide
acguagcacugagauucaa

SEQ ID NO: 1781275 - RNA, 19 nt, Artificial Sequence
  Description of Artificial Sequence: Synthetic oligonucleotide
cacaggcagguguugucgu

SEQ ID NO: 1781276 - RNA, 19 nt, Artificial Sequence
  Description of Artificial Sequence: Synthetic oligonucleotide
ccagugguucagacagcug

SEQ ID NO: 1781277 - RNA, 19 nt, Artificial Sequence
  Description of Artificial Sequence: Synthetic oligonucleotide
gcuuggguccugccuacaa

SEQ ID NO: 1781278 - RNA, 19 nt, Artificial Sequence
  Description of Artificial Sequence: Synthetic oligonucleotide
caccaugcugugcccguaa

SEQ ID NO: 1781279 - RNA, 19 nt, Artificial Sequence
  Description of Artificial Sequence: Synthetic oligonucleotide
gccaggcaagcacccaguc

SEQ ID NO: 1781280 - RNA, 19 nt, Artificial Sequence
  Description of Artificial Sequence: Synthetic oligonucleotide
acccaaggacagccagauu

SEQ ID NO: 1781281 - RNA, 19 nt, Artificial Sequence
  Description of Artificial Sequence: Synthetic oligonucleotide
gcaacaccucccagugggc

SEQ ID NO: 1781282 - RNA, 19 nt, Artificial Sequence
  Description of Artificial Sequence: Synthetic oligonucleotide
ggcaggaccuguaacggau

SEQ ID NO: 1781283 - RNA, 19 nt, Artificial Sequence
  Description of Artificial Sequence: Synthetic oligonucleotide
gcccguaacuuguucuugu

SEQ ID NO: 1781284 - RNA, 19 nt, Artificial Sequence
  Description of Artificial Sequence: Synthetic oligonucleotide
gucucgugguggcguccac

SEQ ID NO: 1781285 - RNA, 19 nt, Artificial Sequence
  Description of Artificial Sequence: Synthetic oligonucleotide
ggcaagcuggcuauaucgu

SEQ ID NO: 1781286 - RNA, 19 nt, Artificial Sequence
  Description of Artificial Sequence: Synthetic oligonucleotide
ccgcauaggccccugaccu

SEQ ID NO: 1781287 - RNA, 19 nt, Artificial Sequence
  Description of Artificial Sequence: Synthetic oligonucleotide
ggccacgcucauggaaacc

SEQ ID NO: 1781288 - RNA, 19 nt, Artificial Sequence
  Description of Artificial Sequence: Synthetic oligonucleotide
gcucccagucuuggccacg

SEQ ID NO: 1781289 - RNA, 19 nt, Artificial Sequence
  Description of Artificial Sequence: Synthetic oligonucleotide
caggucugcgaugcuggaa

SEQ ID NO: 1781290 - RNA, 19 nt, Artificial Sequence
  Description of Artificial Sequence: Synthetic oligonucleotide
cuguaccccagggguccac

SEQ ID NO: 1781291 - RNA, 19 nt, Artificial Sequence
  Description of Artificial Sequence: Synthetic oligonucleotide
gcugugcuguguguauguc

SEQ ID NO: 1781292 - RNA, 19 nt, Artificial Sequence
  Description of Artificial Sequence: Synthetic oligonucleotide
gugcugauugguggcucaa

SEQ ID NO: 1781293 - RNA, 19 nt, Artificial Sequence
  Description of Artificial Sequence: Synthetic oligonucleotide
gcaggaccuguaacggauc

SEQ ID NO: 1781294 - RNA, 19 nt, Artificial Sequence
  Description of Artificial Sequence: Synthetic oligonucleotide
guccugccuacaagucaca

SEQ ID NO: 1781295 - RNA, 19 nt, Artificial Sequence
  Description of Artificial Sequence: Synthetic oligonucleotide
ccguaacuuguucuugucu

SEQ ID NO: 1781296 - RNA, 19 nt, Artificial Sequence
  Description of Artificial Sequence: Synthetic oligonucleotide
ggugugcugauugguggcu

SEQ ID NO: 1781297 - RNA, 19 nt, Artificial Sequence
  Description of Artificial Sequence: Synthetic oligonucleotide
ccucagcauaacuucaguu

SEQ ID NO: 1781298 - RNA, 19 nt, Artificial Sequence
  Description of Artificial Sequence: Synthetic oligonucleotide
cgcauaaguuaaaaggcuu

SEQ ID NO: 1781299 - RNA, 19 nt, Artificial Sequence
  Description of Artificial Sequence: Synthetic oligonucleotide
uggcacgggcccgcagcaa

SEQ ID NO: 1781300 - RNA, 19 nt, Artificial Sequence
  Description of Artificial Sequence: Synthetic oligonucleotide
caggcaugguagaguugcu

SEQ ID NO: 1781301 - RNA, 19 nt, Artificial Sequence
  Description of Artificial Sequence: Synthetic oligonucleotide
ggucaggucaaaaguuauu

SEQ ID NO: 1781302 - RNA, 19 nt, Artificial Sequence
  Description of Artificial Sequence: Synthetic oligonucleotide
gcaucaccucacagcugug

SEQ ID NO: 1781303 - RNA, 19 nt, Artificial Sequence
  Description of Artificial Sequence: Synthetic oligonucleotide
cguaucuguuguagaaagu

SEQ ID NO: 1781304 - RNA, 19 nt, Artificial Sequence
  Description of Artificial Sequence: Synthetic oligonucleotide
ccgagauucgaggcaaucu

SEQ ID NO: 1781305 - RNA, 19 nt, Artificial Sequence
  Description of Artificial Sequence: Synthetic oligonucleotide
ccgcaugucauaacagauu

SEQ ID NO: 1781306 - RNA, 19 nt, Artificial Sequence
  Description of Artificial Sequence: Synthetic oligonucleotide
cguagcacugagauucaau

SEQ ID NO: 1781307 - RNA, 19 nt, Artificial Sequence
  Description of Artificial Sequence: Synthetic oligonucleotide
cuuucccgcauaggccccu

SEQ ID NO: 1781308 - RNA, 19 nt, Artificial Sequence
  Description of Artificial Sequence: Synthetic oligonucleotide
cccucagcauaacuucagu

SEQ ID NO: 1781309 - RNA, 19 nt, Artificial Sequence
  Description of Artificial Sequence: Synthetic oligonucleotide
ggccccugaccugggaucu

SEQ ID NO: 1781310 - RNA, 19 nt, Artificial Sequence
  Description of Artificial Sequence: Synthetic oligonucleotide
caggggcagcucccaggaa

SEQ ID NO: 1781311 - RNA, 19 nt, Artificial Sequence
  Description of Artificial Sequence: Synthetic oligonucleotide
gcucugggccugggcugag

SEQ ID NO: 1781312 - RNA, 19 nt, Artificial Sequence
  Description of Artificial Sequence: Synthetic oligonucleotide
ccccauccagugguucaga

SEQ ID NO: 1781313 - RNA, 19 nt, Artificial Sequence
  Description of Artificial Sequence: Synthetic oligonucleotide
ccacuacuagucccuuguu

SEQ ID NO: 1781314 - RNA, 19 nt, Artificial Sequence
  Description of Artificial Sequence: Synthetic oligonucleotide
gcugugcccguaacuuguu

SEQ ID NO: 1781315 - RNA, 19 nt, Artificial Sequence
  Description of Artificial Sequence: Synthetic oligonucleotide
cgucccagaagguccccau

SEQ ID NO: 1781316 - RNA, 19 nt, Artificial Sequence
  Description of Artificial Sequence: Synthetic oligonucleotide
gccccagcuugagccaauu

SEQ ID NO: 1781317 - RNA, 19 nt, Artificial Sequence
  Description of Artificial Sequence: Synthetic oligonucleotide
aaaagggauaaauaaagga

SEQ ID NO: 1781318 - RNA, 19 nt, Artificial Sequence
  Description of Artificial Sequence: Synthetic oligonucleotide
uuaagaacuggugugaugg

SEQ ID NO: 1781319 - RNA, 19 nt, Artificial Sequence
  Description of Artificial Sequence: Synthetic oligonucleotide
agugaggucaaauuccucc

SEQ ID NO: 1781320 - RNA, 19 nt, Artificial Sequence
  Description of Artificial Sequence: Synthetic oligonucleotide
aaaugaaacaucugcuggg

SEQ ID NO: 1781321 - RNA, 19 nt, Artificial Sequence
  Description of Artificial Sequence: Synthetic oligonucleotide
aaagggauaaauaaaggag

SEQ ID NO: 1781322 - RNA, 19 nt, Artificial Sequence
  Description of Artificial Sequence: Synthetic oligonucleotide
caaauuagcacccugugcc

SEQ ID NO: 1781323 - RNA, 19 nt, Artificial Sequence
  Description of Artificial Sequence: Synthetic oligonucleotide
aauauagaucaugaagugg

SEQ ID NO: 1781324 - RNA, 19 nt, Artificial Sequence
  Description of Artificial Sequence: Synthetic oligonucleotide
agauggaacuccuccaucc

SEQ ID NO: 1781325 - RNA, 19 nt, Artificial Sequence
  Description of Artificial Sequence: Synthetic oligonucleotide
accugaagaaagcucagcc

SEQ ID NO: 1781326 - RNA, 19 nt, Artificial Sequence
  Description of Artificial Sequence: Synthetic oligonucleotide
gaagugaccucccaugugg

SEQ ID NO: 1781327 - RNA, 19 nt, Artificial Sequence
  Description of Artificial Sequence: Synthetic oligonucleotide
ucuggaaaugaccacacga

SEQ ID NO: 1781328 - RNA, 19 nt, Artificial Sequence
  Description of Artificial Sequence: Synthetic oligonucleotide
acaaauuagcacccugugc

SEQ ID NO: 1781329 - RNA, 19 nt, Artificial Sequence
  Description of Artificial Sequence: Synthetic oligonucleotide
ugugauuaggacuuccugc

SEQ ID NO: 1781330 - RNA, 19 nt, Artificial Sequence
  Description of Artificial Sequence: Synthetic oligonucleotide
aaugaagaaaacugcugcu

SEQ ID NO: 1781331 - RNA, 19 nt, Artificial Sequence
  Description of Artificial Sequence: Synthetic oligonucleotide
auaaaggagauuaaaagga

SEQ ID NO: 1781332 - RNA, 19 nt, Artificial Sequence
  Description of Artificial Sequence: Synthetic oligonucleotide
uagaacagugcucagugug

SEQ ID NO: 1781333 - RNA, 19 nt, Artificial Sequence
  Description of Artificial Sequence: Synthetic oligonucleotide
gacuuuaagaacuggugug

SEQ ID NO: 1781334 - RNA, 19 nt, Artificial Sequence
  Description of Artificial Sequence: Synthetic oligonucleotide
aagaauuagagguccggcu

SEQ ID NO: 1781335 - RNA, 19 nt, Artificial Sequence
  Description of Artificial Sequence: Synthetic oligonucleotide
auggaaugaagaaaacugc

SEQ ID NO: 1781336 - RNA, 19 nt, Artificial Sequence
  Description of Artificial Sequence: Synthetic oligonucleotide
ugaagaaaacugcugcuga

SEQ ID NO: 1781337 - RNA, 19 nt, Artificial Sequence
  Description of Artificial Sequence: Synthetic oligonucleotide
agguagugaggucaaauuc

SEQ ID NO: 1781338 - RNA, 19 nt, Artificial Sequence
  Description of Artificial Sequence: Synthetic oligonucleotide
gagagugacagguucacug

SEQ ID NO: 1781339 - RNA, 19 nt, Artificial Sequence
  Description of Artificial Sequence: Synthetic oligonucleotide
aagggauaaauaaaggaga

SEQ ID NO: 1781340 - RNA, 19 nt, Artificial Sequence
  Description of Artificial Sequence: Synthetic oligonucleotide
uuugacagaggugagucag

SEQ ID NO: 1781341 - RNA, 19 nt, Artificial Sequence
  Description of Artificial Sequence: Synthetic oligonucleotide
auauagaucaugaagugga

SEQ ID NO: 1781342 - RNA, 19 nt, Artificial Sequence
  Description of Artificial Sequence: Synthetic oligonucleotide
aaaugaccucuccuggcac

SEQ ID NO: 1781343 - RNA, 19 nt, Artificial Sequence
  Description of Artificial Sequence: Synthetic oligonucleotide
uucuuugcccugauaagag

SEQ ID NO: 1781344 - RNA, 19 nt, Artificial Sequence
  Description of Artificial Sequence: Synthetic oligonucleotide
agaauuagagguccggcug

SEQ ID NO: 1781345 - RNA, 19 nt, Artificial Sequence
  Description of Artificial Sequence: Synthetic oligonucleotide
ucauuugcuuuuccuagag

SEQ ID NO: 1781346 - RNA, 19 nt, Artificial Sequence
  Description of Artificial Sequence: Synthetic oligonucleotide
cuauagagaggcaugggac

SEQ ID NO: 1781347 - RNA, 19 nt, Artificial Sequence
  Description of Artificial Sequence: Synthetic oligonucleotide
aguuugacagaggugaguc

SEQ ID NO: 1781348 - RNA, 19 nt, Artificial Sequence
  Description of Artificial Sequence: Synthetic oligonucleotide
cugaagaaagcucagccac

SEQ ID NO: 1781349 - RNA, 19 nt, Artificial Sequence
  Description of Artificial Sequence: Synthetic oligonucleotide
  modified_base (8)..(8): a, c, u, g, unknown or other
ugaaaccngguccaggaac

SEQ ID NO: 1781350 - RNA, 19 nt, Artificial Sequence
  Description of Artificial Sequence: Synthetic oligonucleotide
caauauagaucaugaagug

SEQ ID NO: 1781351 - RNA, 19 nt, Artificial Sequence
  Description of Artificial Sequence: Synthetic oligonucleotide
caaccuaccacccaaaaga

SEQ ID NO: 1781352 - RNA, 19 nt, Artificial Sequence
  Description of Artificial Sequence: Synthetic oligonucleotide
ugacaugaaaugaaggguu

SEQ ID NO: 1781353 - RNA, 19 nt, Artificial Sequence
  Description of Artificial Sequence: Synthetic oligonucleotide
gaguguuuugccugguggg

SEQ ID NO: 1781354 - RNA, 19 nt, Artificial Sequence
  Description of Artificial Sequence: Synthetic oligonucleotide
uggguaagugggaggaugg

SEQ ID NO: 1781355 - RNA, 19 nt, Artificial Sequence
  Description of Artificial Sequence: Synthetic oligonucleotide
ggagauuaaaaggagagug

SEQ ID NO: 1781356 - RNA, 19 nt, Artificial Sequence
  Description of Artificial Sequence: Synthetic oligonucleotide
agccuaccaaccuaccacc

SEQ ID NO: 1781357 - RNA, 19 nt, Artificial Sequence
  Description of Artificial Sequence: Synthetic oligonucleotide
uucaaacucauccacgauu

SEQ ID NO: 1781358 - RNA, 19 nt, Artificial Sequence
  Description of Artificial Sequence: Synthetic oligonucleotide
aauuagagguccggcugcc

SEQ ID NO: 1781359 - RNA, 19 nt, Artificial Sequence
  Description of Artificial Sequence: Synthetic oligonucleotide
aaguggagagaccuaggug

SEQ ID NO: 1781360 - RNA, 19 nt, Artificial Sequence
  Description of Artificial Sequence: Synthetic oligonucleotide
ccuaccacccaaaagaacc

SEQ ID NO: 1781361 - RNA, 19 nt, Artificial Sequence
  Description of Artificial Sequence: Synthetic oligonucleotide
uggaaaugaccacacgaca

SEQ ID NO: 1781362 - RNA, 19 nt, Artificial Sequence
  Description of Artificial Sequence: Synthetic oligonucleotide
ucgagaagaauuuguuccc

SEQ ID NO: 1781363 - RNA, 19 nt, Artificial Sequence
  Description of Artificial Sequence: Synthetic oligonucleotide
uguucccggacuugcagcg

SEQ ID NO: 1781364 - RNA, 19 nt, Artificial Sequence
  Description of Artificial Sequence: Synthetic oligonucleotide
cuggaaaugaccacacgac

SEQ ID NO: 1781365 - RNA, 19 nt, Artificial Sequence
  Description of Artificial Sequence: Synthetic oligonucleotide
agacaugcaucacccacac

SEQ ID NO: 1781366 - RNA, 19 nt, Artificial Sequence
  Description of Artificial Sequence: Synthetic oligonucleotide
gaauuagagguccggcugc

SEQ ID NO: 1781367 - RNA, 19 nt, Artificial Sequence
  Description of Artificial Sequence: Synthetic oligonucleotide
agaggcaugggacaaggcu

SEQ ID NO: 1781368 - RNA, 19 nt, Artificial Sequence
  Description of Artificial Sequence: Synthetic oligonucleotide
ugaccacaaauuagcaccc

SEQ ID NO: 1781369 - RNA, 19 nt, Artificial Sequence
  Description of Artificial Sequence: Synthetic oligonucleotide
uaagugggaggauggaaug

SEQ ID NO: 1781370 - RNA, 19 nt, Artificial Sequence
  Description of Artificial Sequence: Synthetic oligonucleotide
agaagaauuagagguccgg

SEQ ID NO: 1781371 - RNA, 19 nt, Artificial Sequence
  Description of Artificial Sequence: Synthetic oligonucleotide
uggucuauagagaggcaug

SEQ ID NO: 1781372 - RNA, 19 nt, Artificial Sequence
  Description of Artificial Sequence: Synthetic oligonucleotide
gaagaauuagagguccggc

SEQ ID NO: 1781373 - RNA, 19 nt, Artificial Sequence
  Description of Artificial Sequence: Synthetic oligonucleotide
gaaagcucagccacagggg

SEQ ID NO: 1781374 - RNA, 19 nt, Artificial Sequence
  Description of Artificial Sequence: Synthetic oligonucleotide
gaagaaagcucagccacag

SEQ ID NO: 1781375 - RNA, 19 nt, Artificial Sequence
  Description of Artificial Sequence: Synthetic oligonucleotide
uugggaaagcugaugggga

SEQ ID NO: 1781376 - RNA, 19 nt, Artificial Sequence
  Description of Artificial Sequence: Synthetic oligonucleotide
uggugugauggccaguggc

SEQ ID NO: 1781377 - RNA, 19 nt, Artificial Sequence
  Description of Artificial Sequence: Synthetic oligonucleotide
gaagaaaacugcugcugac

SEQ ID NO: 1781378 - RNA, 19 nt, Artificial Sequence
  Description of Artificial Sequence: Synthetic oligonucleotide
ugcuguaccccaccagggg

SEQ ID NO: 1781379 - RNA, 19 nt, Artificial Sequence
  Description of Artificial Sequence: Synthetic oligonucleotide
aaggacuuuaagaacuggu

SEQ ID NO: 1781380 - RNA, 19 nt, Artificial Sequence
  Description of Artificial Sequence: Synthetic oligonucleotide
aaugaccucuccuggcaca

SEQ ID NO: 1781381 - RNA, 19 nt, Artificial Sequence
  Description of Artificial Sequence: Synthetic oligonucleotide
cucagugugugauuaggac

SEQ ID NO: 1781382 - RNA, 19 nt, Artificial Sequence
  Description of Artificial Sequence: Synthetic oligonucleotide
gugauuucuggaaaugacc

SEQ ID NO: 1781383 - RNA, 19 nt, Artificial Sequence
  Description of Artificial Sequence: Synthetic oligonucleotide
cccaaaagaaccaggagag

SEQ ID NO: 1781384 - RNA, 19 nt, Artificial Sequence
  Description of Artificial Sequence: Synthetic oligonucleotide
ucgguuucauccucggagc

SEQ ID NO: 1781385 - RNA, 19 nt, Artificial Sequence
  Description of Artificial Sequence: Synthetic oligonucleotide
aacucauccacgauuuccu

SEQ ID NO: 1781386 - RNA, 19 nt, Artificial Sequence
  Description of Artificial Sequence: Synthetic oligonucleotide
uguuuugccuggugggaag

SEQ ID NO: 1781387 - RNA, 19 nt, Artificial Sequence
  Description of Artificial Sequence: Synthetic oligonucleotide
gauuucuggaaaugaccac

SEQ ID NO: 1781388 - RNA, 19 nt, Artificial Sequence
  Description of Artificial Sequence: Synthetic oligonucleotide
ggcacaaggacuuuaagaa

SEQ ID NO: 1781389 - RNA, 19 nt, Artificial Sequence
  Description of Artificial Sequence: Synthetic oligonucleotide
ugcucagugugugauuagg

SEQ ID NO: 1781390 - RNA, 19 nt, Artificial Sequence
  Description of Artificial Sequence: Synthetic oligonucleotide
ugaagugaccucccaugug

SEQ ID NO: 1781391 - RNA, 19 nt, Artificial Sequence
  Description of Artificial Sequence: Synthetic oligonucleotide
aguggugacggagaaccac

SEQ ID NO: 1781392 - RNA, 19 nt, Artificial Sequence
  Description of Artificial Sequence: Synthetic oligonucleotide
guagaagguagugagguca

SEQ ID NO: 1781393 - RNA, 19 nt, Artificial Sequence
  Description of Artificial Sequence: Synthetic oligonucleotide
caucgagaagaauuuguuc

SEQ ID NO: 1781394 - RNA, 19 nt, Artificial Sequence
  Description of Artificial Sequence: Synthetic oligonucleotide
ugacaacuggagaggacug

SEQ ID NO: 1781395 - RNA, 19 nt, Artificial Sequence
  Description of Artificial Sequence: Synthetic oligonucleotide
augcccugaagugaccucc

SEQ ID NO: 1781396 - RNA, 19 nt, Artificial Sequence
  Description of Artificial Sequence: Synthetic oligonucleotide
agcuugauggaaaauaaaa

SEQ ID NO: 1781397 - RNA, 19 nt, Artificial Sequence
  Description of Artificial Sequence: Synthetic oligonucleotide
aggggcaggaguguuuugc

SEQ ID NO: 1781398 - RNA, 19 nt, Artificial Sequence
  Description of Artificial Sequence: Synthetic oligonucleotide
uuagagguccggcugcccu

SEQ ID NO: 1781399 - RNA, 19 nt, Artificial Sequence
  Description of Artificial Sequence: Synthetic oligonucleotide
gaggacugguucuuugccc

SEQ ID NO: 1781400 - RNA, 19 nt, Artificial Sequence
  Description of Artificial Sequence: Synthetic oligonucleotide
agagugacagguucacuga

SEQ ID NO: 1781401 - RNA, 19 nt, Artificial Sequence
  Description of Artificial Sequence: Synthetic oligonucleotide
gccaguggcaucaauauag

SEQ ID NO: 1781402 - RNA, 19 nt, Artificial Sequence
  Description of Artificial Sequence: Synthetic oligonucleotide
ugcaucacccacacaccag

SEQ ID NO: 1781403 - RNA, 19 nt, Artificial Sequence
  Description of Artificial Sequence: Synthetic oligonucleotide
cacaaauuagcacccugug

SEQ ID NO: 1781404 - RNA, 19 nt, Artificial Sequence
  Description of Artificial Sequence: Synthetic oligonucleotide
acuuuaagaacugguguga

SEQ ID NO: 1781405 - RNA, 19 nt, Artificial Sequence
  Description of Artificial Sequence: Synthetic oligonucleotide
ucauccacgauuuccugua

SEQ ID NO: 1781406 - RNA, 19 nt, Artificial Sequence
  Description of Artificial Sequence: Synthetic oligonucleotide
gagauuaaaaggagaguga

SEQ ID NO: 1781407 - RNA, 19 nt, Artificial Sequence
  Description of Artificial Sequence: Synthetic oligonucleotide
aggacuuuaagaacuggug

SEQ ID NO: 1781408 - RNA, 19 nt, Artificial Sequence
  Description of Artificial Sequence: Synthetic oligonucleotide
gcucauuugcuuuuccuag

SEQ ID NO: 1781409 - RNA, 19 nt, Artificial Sequence
  Description of Artificial Sequence: Synthetic oligonucleotide
gaaccacgcucugagacag

SEQ ID NO: 1781410 - RNA, 19 nt, Artificial Sequence
  Description of Artificial Sequence: Synthetic oligonucleotide
ugauuaggacuuccugcug

SEQ ID NO: 1781411 - RNA, 19 nt, Artificial Sequence
  Description of Artificial Sequence: Synthetic oligonucleotide
ugauaagagcuugauggaa

SEQ ID NO: 1781412 - RNA, 19 nt, Artificial Sequence
  Description of Artificial Sequence: Synthetic oligonucleotide
cauuugcuuuuccuagagg

SEQ ID NO: 1781413 - RNA, 19 nt, Artificial Sequence
  Description of Artificial Sequence: Synthetic oligonucleotide
uccggcugcccucuacugg

SEQ ID NO: 1781414 - RNA, 19 nt, Artificial Sequence
  Description of Artificial Sequence: Synthetic oligonucleotide
cugguagaagguagugagg

SEQ ID NO: 1781415 - RNA, 19 nt, Artificial Sequence
  Description of Artificial Sequence: Synthetic oligonucleotide
gagaagaauuagagguccg

SEQ ID NO: 1781416 - RNA, 19 nt, Artificial Sequence
  Description of Artificial Sequence: Synthetic oligonucleotide
aaugaccacacgacagcag

SEQ ID NO: 1781417 - RNA, 19 nt, Artificial Sequence
  Description of Artificial Sequence: Synthetic oligonucleotide
aggacugguucuuugcccu

SEQ ID NO: 1781418 - RNA, 19 nt, Artificial Sequence
  Description of Artificial Sequence: Synthetic oligonucleotide
uggugauuucuggaaauga

SEQ ID NO: 1781419 - RNA, 19 nt, Artificial Sequence
  Description of Artificial Sequence: Synthetic oligonucleotide
uuguucccggacuugcagc

SEQ ID NO: 1781420 - RNA, 19 nt, Artificial Sequence
  Description of Artificial Sequence: Synthetic oligonucleotide
uaagaacuggugugauggc

SEQ ID NO: 1781421 - RNA, 19 nt, Artificial Sequence
  Description of Artificial Sequence: Synthetic oligonucleotide
cacaaggacuuuaagaacu

SEQ ID NO: 1781422 - RNA, 19 nt, Artificial Sequence
  Description of Artificial Sequence: Synthetic oligonucleotide
cagccuaccaaccuaccac

SEQ ID NO: 1781423 - RNA, 19 nt, Artificial Sequence
  Description of Artificial Sequence: Synthetic oligonucleotide
aauuagcacccugugcccu

SEQ ID NO: 1781424 - RNA, 19 nt, Artificial Sequence
  Description of Artificial Sequence: Synthetic oligonucleotide
gacaacuggagaggacugg

SEQ ID NO: 1781425 - RNA, 19 nt, Artificial Sequence
  Description of Artificial Sequence: Synthetic oligonucleotide
cuguaccccaccaggggcg

SEQ ID NO: 1781426 - RNA, 19 nt, Artificial Sequence
  Description of Artificial Sequence: Synthetic oligonucleotide
gagaggagcccacuagaac

SEQ ID NO: 1781427 - RNA, 19 nt, Artificial Sequence
  Description of Artificial Sequence: Synthetic oligonucleotide
gugacggagaaccacgcuc

SEQ ID NO: 1781428 - RNA, 19 nt, Artificial Sequence
  Description of Artificial Sequence: Synthetic oligonucleotide
uggaacuccuccaucccuc

SEQ ID NO: 1781429 - RNA, 19 nt, Artificial Sequence
  Description of Artificial Sequence: Synthetic oligonucleotide
aaggcaucgagaagaauuu

SEQ ID NO: 1781430 - RNA, 19 nt, Artificial Sequence
  Description of Artificial Sequence: Synthetic oligonucleotide
gaacuggugugauggccag

SEQ ID NO: 1781431 - RNA, 19 nt, Artificial Sequence
  Description of Artificial Sequence: Synthetic oligonucleotide
cuucaaaggcaucgagaag

SEQ ID NO: 1781432 - RNA, 19 nt, Artificial Sequence
  Description of Artificial Sequence: Synthetic oligonucleotide
uccacgauuuccuguaguu

SEQ ID NO: 1781433 - RNA, 19 nt, Artificial Sequence
  Description of Artificial Sequence: Synthetic oligonucleotide
ggucuauagagaggcaugg

SEQ ID NO: 1781434 - RNA, 19 nt, Artificial Sequence
  Description of Artificial Sequence: Synthetic oligonucleotide
aggagagugacagguucac

SEQ ID NO: 1781435 - RNA, 19 nt, Artificial Sequence
  Description of Artificial Sequence: Synthetic oligonucleotide
uagaagguagugaggucaa

SEQ ID NO: 1781436 - RNA, 19 nt, Artificial Sequence
  Description of Artificial Sequence: Synthetic oligonucleotide
auagaucaugaaguggaga

SEQ ID NO: 1781437 - RNA, 19 nt, Artificial Sequence
  Description of Artificial Sequence: Synthetic oligonucleotide
guucuuugcccugauaaga

SEQ ID NO: 1781438 - RNA, 19 nt, Artificial Sequence
  Description of Artificial Sequence: Synthetic oligonucleotide
ugaccacacgacagcagca

SEQ ID NO: 1781439 - RNA, 19 nt, Artificial Sequence
  Description of Artificial Sequence: Synthetic oligonucleotide
aggagaggagcccacuaga

SEQ ID NO: 1781440 - RNA, 19 nt, Artificial Sequence
  Description of Artificial Sequence: Synthetic oligonucleotide
guggugacggagaaccacg

SEQ ID NO: 1781441 - RNA, 19 nt, Artificial Sequence
  Description of Artificial Sequence: Synthetic oligonucleotide
gcucacuucaaaggcaucg

SEQ ID NO: 1781442 - RNA, 19 nt, Artificial Sequence
  Description of Artificial Sequence: Synthetic oligonucleotide
agugaccucccaugugguc

SEQ ID NO: 1781443 - RNA, 19 nt, Artificial Sequence
  Description of Artificial Sequence: Synthetic oligonucleotide
gguucuuugcccugauaag

SEQ ID NO: 1781444 - RNA, 19 nt, Artificial Sequence
  Description of Artificial Sequence: Synthetic oligonucleotide
ggagacaugcaucacccac

SEQ ID NO: 1781445 - RNA, 19 nt, Artificial Sequence
  Description of Artificial Sequence: Synthetic oligonucleotide
aagcaggggucacagguuu

SEQ ID NO: 1781446 - RNA, 19 nt, Artificial Sequence
  Description of Artificial Sequence: Synthetic oligonucleotide
uggccaguggcaucaauau

SEQ ID NO: 1781447 - RNA, 19 nt, Artificial Sequence
  Description of Artificial Sequence: Synthetic oligonucleotide
agagcuugauggaaaauaa

SEQ ID NO: 1781448 - RNA, 19 nt, Artificial Sequence
  Description of Artificial Sequence: Synthetic oligonucleotide
gacaugaaaugaaggguuc

SEQ ID NO: 1781449 - RNA, 19 nt, Artificial Sequence
  Description of Artificial Sequence: Synthetic oligonucleotide
uggacuccccagcagggcu

SEQ ID NO: 1781450 - RNA, 19 nt, Artificial Sequence
  Description of Artificial Sequence: Synthetic oligonucleotide
uggugacggagaaccacgc

SEQ ID NO: 1781451 - RNA, 19 nt, Artificial Sequence
  Description of Artificial Sequence: Synthetic oligonucleotide
acgcaacagcaucucagag

SEQ ID NO: 1781452 - RNA, 19 nt, Artificial Sequence
  Description of Artificial Sequence: Synthetic oligonucleotide
aaggagagugacagguuca

SEQ ID NO: 1781453 - RNA, 19 nt, Artificial Sequence
  Description of Artificial Sequence: Synthetic oligonucleotide
caaggacuuuaagaacugg

SEQ ID NO: 1781454 - RNA, 19 nt, Artificial Sequence
  Description of Artificial Sequence: Synthetic oligonucleotide
agcccacuagaacagugcu

SEQ ID NO: 1781455 - RNA, 19 nt, Artificial Sequence
  Description of Artificial Sequence: Synthetic oligonucleotide
agggauaaauaaaggagau

SEQ ID NO: 1781456 - RNA, 19 nt, Artificial Sequence
  Description of Artificial Sequence: Synthetic oligonucleotide
ugaggucaaauuccuccau

SEQ ID NO: 1781457 - RNA, 19 nt, Artificial Sequence
  Description of Artificial Sequence: Synthetic oligonucleotide
auuagcacccugugcccug

SEQ ID NO: 1781458 - RNA, 19 nt, Artificial Sequence
  Description of Artificial Sequence: Synthetic oligonucleotide
agaacuggugugauggcca

SEQ ID NO: 1781459 - RNA, 19 nt, Artificial Sequence
  Description of Artificial Sequence: Synthetic oligonucleotide
cugauaagagcuugaugga

SEQ ID NO: 1781460 - RNA, 19 nt, Artificial Sequence
  Description of Artificial Sequence: Synthetic oligonucleotide
gaacagugcucagugugug

SEQ ID NO: 1781461 - RNA, 19 nt, Artificial Sequence
  Description of Artificial Sequence: Synthetic oligonucleotide
ugugcuucuuugggaaagc

SEQ ID NO: 1781462 - RNA, 19 nt, Artificial Sequence
  Description of Artificial Sequence: Synthetic oligonucleotide
  modified_base (7)..(7): a, c, u, g, unknown or other
gaaaccngguccaggaacu

SEQ ID NO: 1781463 - RNA, 19 nt, Artificial Sequence
  Description of Artificial Sequence: Synthetic oligonucleotide
acgacagcagcagccuacc

SEQ ID NO: 1781464 - RNA, 19 nt, Artificial Sequence
  Description of Artificial Sequence: Synthetic oligonucleotide
aagugggaggauggaauga

SEQ ID NO: 1781465 - RNA, 19 nt, Artificial Sequence
  Description of Artificial Sequence: Synthetic oligonucleotide
aggagauuaaaaggagagu

SEQ ID NO: 1781466 - RNA, 19 nt, Artificial Sequence
  Description of Artificial Sequence: Synthetic oligonucleotide
ugggaaagcugauggggaa

SEQ ID NO: 1781467 - RNA, 19 nt, Artificial Sequence
  Description of Artificial Sequence: Synthetic oligonucleotide
acaugaaaugaaggguucu

SEQ ID NO: 1781468 - RNA, 19 nt, Artificial Sequence
  Description of Artificial Sequence: Synthetic oligonucleotide
cacgacagcagcagccuac

SEQ ID NO: 1781469 - RNA, 19 nt, Artificial Sequence
  Description of Artificial Sequence: Synthetic oligonucleotide
auuagagguccggcugccc

SEQ ID NO: 1781470 - RNA, 19 nt, Artificial Sequence
  Description of Artificial Sequence: Synthetic oligonucleotide
agagaccuagguggggacg

SEQ ID NO: 1781471 - RNA, 19 nt, Artificial Sequence
  Description of Artificial Sequence: Synthetic oligonucleotide
gucuauagagaggcauggg

SEQ ID NO: 1781472 - RNA, 19 nt, Artificial Sequence
  Description of Artificial Sequence: Synthetic oligonucleotide
accacccaaaagaaccagg

SEQ ID NO: 1781473 - RNA, 19 nt, Artificial Sequence
  Description of Artificial Sequence: Synthetic oligonucleotide
ggugauuucuggaaaugac

SEQ ID NO: 1781474 - RNA, 19 nt, Artificial Sequence
  Description of Artificial Sequence: Synthetic oligonucleotide
  modified_base (19)..(19): a, c, u, g, unknown or other
cuguccaccucugaaaccn

SEQ ID NO: 1781475 - RNA, 19 nt, Artificial Sequence
  Description of Artificial Sequence: Synthetic oligonucleotide
ggcaggaguguuuugccug

SEQ ID NO: 1781476 - RNA, 19 nt, Artificial Sequence
  Description of Artificial Sequence: Synthetic oligonucleotide
uggcuggguaagugggagg

SEQ ID NO: 1781477 - RNA, 19 nt, Artificial Sequence
  Description of Artificial Sequence: Synthetic oligonucleotide
uucccggacuugcagcgga

SEQ ID NO: 1781478 - RNA, 19 nt, Artificial Sequence
  Description of Artificial Sequence: Synthetic oligonucleotide
guuuugccuggugggaagg

SEQ ID NO: 1781479 - RNA, 19 nt, Artificial Sequence
  Description of Artificial Sequence: Synthetic oligonucleotide
gagcccacuagaacagugc

SEQ ID NO: 1781480 - RNA, 19 nt, Artificial Sequence
  Description of Artificial Sequence: Synthetic oligonucleotide
gcugcugaccacaaauuag

SEQ ID NO: 1781481 - RNA, 19 nt, Artificial Sequence
  Description of Artificial Sequence: Synthetic oligonucleotide
gggcacaaggacuuuaaga

SEQ ID NO: 1781482 - RNA, 19 nt, Artificial Sequence
  Description of Artificial Sequence: Synthetic oligonucleotide
agaucaugaaguggagaga

SEQ ID NO: 1781483 - RNA, 19 nt, Artificial Sequence
  Description of Artificial Sequence: Synthetic oligonucleotide
acaacuggagaggacuggu

SEQ ID NO: 1781484 - RNA, 19 nt, Artificial Sequence
  Description of Artificial Sequence: Synthetic oligonucleotide
  modified_base (6)..(6): a, c, u, g, unknown or other
aaaccngguccaggaacug

SEQ ID NO: 1781485 - RNA, 19 nt, Artificial Sequence
  Description of Artificial Sequence: Synthetic oligonucleotide
cuacuggugauuucuggaa

SEQ ID NO: 1781486 - RNA, 19 nt, Artificial Sequence
  Description of Artificial Sequence: Synthetic oligonucleotide
uggguggacuccccagcag

SEQ ID NO: 1781487 - RNA, 19 nt, Artificial Sequence
  Description of Artificial Sequence: Synthetic oligonucleotide
cugagauggaacuccucca

SEQ ID NO: 1781488 - RNA, 19 nt, Artificial Sequence
  Description of Artificial Sequence: Synthetic oligonucleotide
agaacagugcucagugugu

SEQ ID NO: 1781489 - RNA, 19 nt, Artificial Sequence
  Description of Artificial Sequence: Synthetic oligonucleotide
agugcucagugugugauua

SEQ ID NO: 1781490 - RNA, 19 nt, Artificial Sequence
  Description of Artificial Sequence: Synthetic oligonucleotide
auagagaggcaugggacaa

SEQ ID NO: 1781491 - RNA, 19 nt, Artificial Sequence
  Description of Artificial Sequence: Synthetic oligonucleotide
caucacccacacaccaggc

SEQ ID NO: 1781492 - RNA, 19 nt, Artificial Sequence
  Description of Artificial Sequence: Synthetic oligonucleotide
guggagagaccuagguggg

SEQ ID NO: 1781493 - RNA, 19 nt, Artificial Sequence
  Description of Artificial Sequence: Synthetic oligonucleotide
ggaaagcugauggggaaag

SEQ ID NO: 1781494 - RNA, 19 nt, Artificial Sequence
  Description of Artificial Sequence: Synthetic oligonucleotide
auccacgauuuccuguagu

SEQ ID NO: 1781495 - RNA, 19 nt, Artificial Sequence
  Description of Artificial Sequence: Synthetic oligonucleotide
gaaagcugauggggaaagc

SEQ ID NO: 1781496 - RNA, 19 nt, Artificial Sequence
  Description of Artificial Sequence: Synthetic oligonucleotide
accuaccacccaaaagaac

SEQ ID NO: 1781497 - RNA, 19 nt, Artificial Sequence
  Description of Artificial Sequence: Synthetic oligonucleotide
uuagcacccugugcccugg

SEQ ID NO: 1781498 - RNA, 19 nt, Artificial Sequence
  Description of Artificial Sequence: Synthetic oligonucleotide
uuaggacuuccugcuggag

SEQ ID NO: 1781499 - RNA, 19 nt, Artificial Sequence
  Description of Artificial Sequence: Synthetic oligonucleotide
ggguggacuccccagcagg

SEQ ID NO: 1781500 - RNA, 19 nt, Artificial Sequence
  Description of Artificial Sequence: Synthetic oligonucleotide
cucccauguggucuuugag

SEQ ID NO: 1781501 - RNA, 19 nt, Artificial Sequence
  Description of Artificial Sequence: Synthetic oligonucleotide
cuaccacccaaaagaacca

SEQ ID NO: 1781502 - RNA, 19 nt, Artificial Sequence
  Description of Artificial Sequence: Synthetic oligonucleotide
aggaguguuuugccuggug

SEQ ID NO: 1781503 - RNA, 19 nt, Artificial Sequence
  Description of Artificial Sequence: Synthetic oligonucleotide
uugcagcggaccugcuccg

SEQ ID NO: 1781504 - RNA, 19 nt, Artificial Sequence
  Description of Artificial Sequence: Synthetic oligonucleotide
gcaggaguguuuugccugg

SEQ ID NO: 1781505 - RNA, 19 nt, Artificial Sequence
  Description of Artificial Sequence: Synthetic oligonucleotide
aggggucacagguuuugga

SEQ ID NO: 1781506 - RNA, 19 nt, Artificial Sequence
  Description of Artificial Sequence: Synthetic oligonucleotide
gagagaccuagguggggac

SEQ ID NO: 1781507 - RNA, 19 nt, Artificial Sequence
  Description of Artificial Sequence: Synthetic oligonucleotide
guuugacagaggugaguca

SEQ ID NO: 1781508 - RNA, 19 nt, Artificial Sequence
  Description of Artificial Sequence: Synthetic oligonucleotide
uagugaggucaaauuccuc

SEQ ID NO: 1781509 - RNA, 19 nt, Artificial Sequence
  Description of Artificial Sequence: Synthetic oligonucleotide
gguuucauccucggagccg

SEQ ID NO: 1781510 - RNA, 19 nt, Artificial Sequence
  Description of Artificial Sequence: Synthetic oligonucleotide
cacgcaacagcaucucaga

SEQ ID NO: 1781511 - RNA, 19 nt, Artificial Sequence
  Description of Artificial Sequence: Synthetic oligonucleotide
agcacacgcaacagcaucu

SEQ ID NO: 1781512 - RNA, 19 nt, Artificial Sequence
  Description of Artificial Sequence: Synthetic oligonucleotide
gcacaaggacuuuaagaac

SEQ ID NO: 1781513 - RNA, 19 nt, Artificial Sequence
  Description of Artificial Sequence: Synthetic oligonucleotide
aaagcaggggucacagguu

SEQ ID NO: 1781514 - RNA, 19 nt, Artificial Sequence
  Description of Artificial Sequence: Synthetic oligonucleotide
uggagacaugcaucaccca

SEQ ID NO: 1781515 - RNA, 19 nt, Artificial Sequence
  Description of Artificial Sequence: Synthetic oligonucleotide
ggggacgccacugagggug

SEQ ID NO: 1781516 - RNA, 19 nt, Artificial Sequence
  Description of Artificial Sequence: Synthetic oligonucleotide
ccaaccuaccacccaaaag

SEQ ID NO: 1781517 - RNA, 19 nt, Artificial Sequence
  Description of Artificial Sequence: Synthetic oligonucleotide
gaaccaggagaggagccca

SEQ ID NO: 1781518 - RNA, 19 nt, Artificial Sequence
  Description of Artificial Sequence: Synthetic oligonucleotide
ggagaggacugguucuuug

SEQ ID NO: 1781519 - RNA, 19 nt, Artificial Sequence
  Description of Artificial Sequence: Synthetic oligonucleotide
ccacacgacagcagcagcc

SEQ ID NO: 1781520 - RNA, 19 nt, Artificial Sequence
  Description of Artificial Sequence: Synthetic oligonucleotide
caugacucuguccaccucu

SEQ ID NO: 1781521 - RNA, 19 nt, Artificial Sequence
  Description of Artificial Sequence: Synthetic oligonucleotide
gaagguagugaggucaaau

SEQ ID NO: 1781522 - RNA, 19 nt, Artificial Sequence
  Description of Artificial Sequence: Synthetic oligonucleotide
agcagccuaccaaccuacc

SEQ ID NO: 1781523 - RNA, 19 nt, Artificial Sequence
  Description of Artificial Sequence: Synthetic oligonucleotide
agguccggcugcccucuac

SEQ ID NO: 1781524 - RNA, 19 nt, Artificial Sequence
  Description of Artificial Sequence: Synthetic oligonucleotide
uuuugccuggugggaaggu

SEQ ID NO: 1781525 - RNA, 19 nt, Artificial Sequence
  Description of Artificial Sequence: Synthetic oligonucleotide
cagguuuuggaggccuggc

SEQ ID NO: 1781526 - RNA, 19 nt, Artificial Sequence
  Description of Artificial Sequence: Synthetic oligonucleotide
guaagugggaggauggaau

SEQ ID NO: 1781527 - RNA, 19 nt, Artificial Sequence
  Description of Artificial Sequence: Synthetic oligonucleotide
cuggugugauggccagugg

SEQ ID NO: 1781528 - RNA, 19 nt, Artificial Sequence
  Description of Artificial Sequence: Synthetic oligonucleotide
gagcuugauggaaaauaaa

SEQ ID NO: 1781529 - RNA, 19 nt, Artificial Sequence
  Description of Artificial Sequence: Synthetic oligonucleotide
cucugagacaggcugagau

SEQ ID NO: 1781530 - RNA, 19 nt, Artificial Sequence
  Description of Artificial Sequence: Synthetic oligonucleotide
caugcccugaagugaccuc

SEQ ID NO: 1781531 - RNA, 19 nt, Artificial Sequence
  Description of Artificial Sequence: Synthetic oligonucleotide
cacagguuuuggaggccug

SEQ ID NO: 1781532 - RNA, 19 nt, Artificial Sequence
  Description of Artificial Sequence: Synthetic oligonucleotide
gugcucagugugugauuag

SEQ ID NO: 1781533 - RNA, 19 nt, Artificial Sequence
  Description of Artificial Sequence: Synthetic oligonucleotide
uggaggcaucccacagaug

SEQ ID NO: 1781534 - RNA, 19 nt, Artificial Sequence
  Description of Artificial Sequence: Synthetic oligonucleotide
uguaccccaccaggggcgc

SEQ ID NO: 1781535 - RNA, 19 nt, Artificial Sequence
  Description of Artificial Sequence: Synthetic oligonucleotide
gguggacuccccagcaggg

SEQ ID NO: 1781536 - RNA, 19 nt, Artificial Sequence
  Description of Artificial Sequence: Synthetic oligonucleotide
aggcaucgagaagaauuug

SEQ ID NO: 1781537 - RNA, 19 nt, Artificial Sequence
  Description of Artificial Sequence: Synthetic oligonucleotide
ggauggaaugaagaaaacu

SEQ ID NO: 1781538 - RNA, 19 nt, Artificial Sequence
  Description of Artificial Sequence: Synthetic oligonucleotide
ggcucauuugcuuuuccua

SEQ ID NO: 1781539 - RNA, 19 nt, Artificial Sequence
  Description of Artificial Sequence: Synthetic oligonucleotide
ggggcaggaguguuuugcc

SEQ ID NO: 1781540 - RNA, 19 nt, Artificial Sequence
  Description of Artificial Sequence: Synthetic oligonucleotide
ggugugauggccaguggca

SEQ ID NO: 1781541 - RNA, 19 nt, Artificial Sequence
  Description of Artificial Sequence: Synthetic oligonucleotide
cccacagauggcagcaggc

SEQ ID NO: 1781542 - RNA, 19 nt, Artificial Sequence
  Description of Artificial Sequence: Synthetic oligonucleotide
ugaccucccauguggucuu

SEQ ID NO: 1781543 - RNA, 19 nt, Artificial Sequence
  Description of Artificial Sequence: Synthetic oligonucleotide
caugggacaaggcucacuu

SEQ ID NO: 1781544 - RNA, 19 nt, Artificial Sequence
  Description of Artificial Sequence: Synthetic oligonucleotide
ggacuugcagcggaccugc

SEQ ID NO: 1781545 - RNA, 19 nt, Artificial Sequence
  Description of Artificial Sequence: Synthetic oligonucleotide
ccacccaaaagaaccagga

SEQ ID NO: 1781546 - RNA, 19 nt, Artificial Sequence
  Description of Artificial Sequence: Synthetic oligonucleotide
  modified_base (2)..(2): a, c, u, g, unknown or other
cngguccaggaacugggca

SEQ ID NO: 1781547 - RNA, 19 nt, Artificial Sequence
  Description of Artificial Sequence: Synthetic oligonucleotide
ugcccucuacuggugauuu

SEQ ID NO: 1781548 - RNA, 19 nt, Artificial Sequence
  Description of Artificial Sequence: Synthetic oligonucleotide
caugaaguggagagaccua

SEQ ID NO: 1781549 - RNA, 19 nt, Artificial Sequence
  Description of Artificial Sequence: Synthetic oligonucleotide
uccaguggugacggagaac

SEQ ID NO: 1781550 - RNA, 19 nt, Artificial Sequence
  Description of Artificial Sequence: Synthetic oligonucleotide
gcaucccacagauggcagc

SEQ ID NO: 1781551 - RNA, 19 nt, Artificial Sequence
  Description of Artificial Sequence: Synthetic oligonucleotide
cugaagugaccucccaugu

SEQ ID NO: 1781552 - RNA, 19 nt, Artificial Sequence
  Description of Artificial Sequence: Synthetic oligonucleotide
ggagcccacuagaacagug

SEQ ID NO: 1781553 - RNA, 19 nt, Artificial Sequence
  Description of Artificial Sequence: Synthetic oligonucleotide
cugcaggcacugucccucc

SEQ ID NO: 1781554 - RNA, 19 nt, Artificial Sequence
  Description of Artificial Sequence: Synthetic oligonucleotide
ugccugcacgaaggggagg

SEQ ID NO: 1781555 - RNA, 19 nt, Artificial Sequence
  Description of Artificial Sequence: Synthetic oligonucleotide
gucacagguuuuggaggcc

SEQ ID NO: 1781556 - RNA, 19 nt, Artificial Sequence
  Description of Artificial Sequence: Synthetic oligonucleotide
uggcaucaauauagaucau

SEQ ID NO: 1781557 - RNA, 19 nt, Artificial Sequence
  Description of Artificial Sequence: Synthetic oligonucleotide
cugcacgaaggggaggauc

SEQ ID NO: 1781558 - RNA, 19 nt, Artificial Sequence
  Description of Artificial Sequence: Synthetic oligonucleotide
aaccacgcucugagacagg

SEQ ID NO: 1781559 - RNA, 19 nt, Artificial Sequence
  Description of Artificial Sequence: Synthetic oligonucleotide
ugccucccgccucucucca

SEQ ID NO: 1781560 - RNA, 19 nt, Artificial Sequence
  Description of Artificial Sequence: Synthetic oligonucleotide
ccauguggucuuugagugc

SEQ ID NO: 1781561 - RNA, 19 nt, Artificial Sequence
  Description of Artificial Sequence: Synthetic oligonucleotide
guucccggacuugcagcgg

SEQ ID NO: 1781562 - RNA, 19 nt, Artificial Sequence
  Description of Artificial Sequence: Synthetic oligonucleotide
augaaggguucugguagaa

SEQ ID NO: 1781563 - RNA, 19 nt, Artificial Sequence
  Description of Artificial Sequence: Synthetic oligonucleotide
ucccggacuugcagcggac

SEQ ID NO: 1781564 - RNA, 19 nt, Artificial Sequence
  Description of Artificial Sequence: Synthetic oligonucleotide
guccggcugcccucuacug

SEQ ID NO: 1781565 - RNA, 19 nt, Artificial Sequence
  Description of Artificial Sequence: Synthetic oligonucleotide
gcagccuaccaaccuacca

SEQ ID NO: 1781566 - RNA, 19 nt, Artificial Sequence
  Description of Artificial Sequence: Synthetic oligonucleotide
  modified_base (9)..(9): a, c, u, g, unknown or other
cugaaaccngguccaggaa

SEQ ID NO: 1781567 - RNA, 19 nt, Artificial Sequence
  Description of Artificial Sequence: Synthetic oligonucleotide
ccagacugacaugaaauga

SEQ ID NO: 1781568 - RNA, 19 nt, Artificial Sequence
  Description of Artificial Sequence: Synthetic oligonucleotide
caggaacugggcaugcccu

SEQ ID NO: 1781569 - RNA, 19 nt, Artificial Sequence
  Description of Artificial Sequence: Synthetic oligonucleotide
ggccaaaaugaaacaucug

SEQ ID NO: 1781570 - RNA, 19 nt, Artificial Sequence
  Description of Artificial Sequence: Synthetic oligonucleotide
guguuuugccuggugggaa

SEQ ID NO: 1781571 - RNA, 19 nt, Artificial Sequence
  Description of Artificial Sequence: Synthetic oligonucleotide
cuagaacagugcucagugu

SEQ ID NO: 1781572 - RNA, 19 nt, Artificial Sequence
  Description of Artificial Sequence: Synthetic oligonucleotide
agagguccggcugcccucu

SEQ ID NO: 1781573 - RNA, 19 nt, Artificial Sequence
  Description of Artificial Sequence: Synthetic oligonucleotide
cacacgcaacagcaucuca

SEQ ID NO: 1781574 - RNA, 19 nt, Artificial Sequence
  Description of Artificial Sequence: Synthetic oligonucleotide
cuccaacucagcuggucua

SEQ ID NO: 1781575 - RNA, 19 nt, Artificial Sequence
  Description of Artificial Sequence: Synthetic oligonucleotide
cagcaggcuccuccaacuc

SEQ ID NO: 1781576 - RNA, 19 nt, Artificial Sequence
  Description of Artificial Sequence: Synthetic oligonucleotide
ggcaucgagaagaauuugu

SEQ ID NO: 1781577 - RNA, 19 nt, Artificial Sequence
  Description of Artificial Sequence: Synthetic oligonucleotide
cgcucauggggucuugacc

SEQ ID NO: 1781578 - RNA, 19 nt, Artificial Sequence
  Description of Artificial Sequence: Synthetic oligonucleotide
ugcagcggaccugcuccgc

SEQ ID NO: 1781579 - RNA, 19 nt, Artificial Sequence
  Description of Artificial Sequence: Synthetic oligonucleotide
acacgacagcagcagccua

SEQ ID NO: 1781580 - RNA, 19 nt, Artificial Sequence
  Description of Artificial Sequence: Synthetic oligonucleotide
agaagguagugaggucaaa

SEQ ID NO: 1781581 - RNA, 19 nt, Artificial Sequence
  Description of Artificial Sequence: Synthetic oligonucleotide
caaauuccuccaugacucu

SEQ ID NO: 1781582 - RNA, 19 nt, Artificial Sequence
  Description of Artificial Sequence: Synthetic oligonucleotide
cugucccuccagcuggaga

SEQ ID NO: 1781583 - RNA, 19 nt, Artificial Sequence
  Description of Artificial Sequence: Synthetic oligonucleotide
ggacaaggcucacuucaaa

SEQ ID NO: 1781584 - RNA, 19 nt, Artificial Sequence
  Description of Artificial Sequence: Synthetic oligonucleotide
ggacugguucuuugcccug

SEQ ID NO: 1781585 - RNA, 19 nt, Artificial Sequence
  Description of Artificial Sequence: Synthetic oligonucleotide
gcucagugugugauuagga

SEQ ID NO: 1781586 - RNA, 19 nt, Artificial Sequence
  Description of Artificial Sequence: Synthetic oligonucleotide
accaggggcgccgcgcuca

SEQ ID NO: 1781587 - RNA, 19 nt, Artificial Sequence
  Description of Artificial Sequence: Synthetic oligonucleotide
caucccucgguuucauccu

SEQ ID NO: 1781588 - RNA, 19 nt, Artificial Sequence
  Description of Artificial Sequence: Synthetic oligonucleotide
gggcaugcccugaagugac

SEQ ID NO: 1781589 - RNA, 19 nt, Artificial Sequence
  Description of Artificial Sequence: Synthetic oligonucleotide
uggggacgccacugagggu

SEQ ID NO: 1781590 - RNA, 19 nt, Artificial Sequence
  Description of Artificial Sequence: Synthetic oligonucleotide
ccucccgccucucuccacc

SEQ ID NO: 1781591 - RNA, 19 nt, Artificial Sequence
  Description of Artificial Sequence: Synthetic oligonucleotide
cacuagaacagugcucagu

SEQ ID NO: 1781592 - RNA, 19 nt, Artificial Sequence
  Description of Artificial Sequence: Synthetic oligonucleotide
cccucgguuucauccucgg

SEQ ID NO: 1781593 - RNA, 19 nt, Artificial Sequence
  Description of Artificial Sequence: Synthetic oligonucleotide
ggagaggagcccacuagaa

SEQ ID NO: 1781594 - RNA, 19 nt, Artificial Sequence
  Description of Artificial Sequence: Synthetic oligonucleotide
ccacgauuuccuguaguuc

SEQ ID NO: 1781595 - RNA, 19 nt, Artificial Sequence
  Description of Artificial Sequence: Synthetic oligonucleotide
gacuccccagcagggcuca

SEQ ID NO: 1781596 - RNA, 19 nt, Artificial Sequence
  Description of Artificial Sequence: Synthetic oligonucleotide
gcagcaggcuccuccaacu

SEQ ID NO: 1781597 - RNA, 19 nt, Artificial Sequence
  Description of Artificial Sequence: Synthetic oligonucleotide
gccuaccaaccuaccaccc

SEQ ID NO: 1781598 - RNA, 19 nt, Artificial Sequence
  Description of Artificial Sequence: Synthetic oligonucleotide
caguggcaucaauauagau

SEQ ID NO: 1781599 - RNA, 19 nt, Artificial Sequence
  Description of Artificial Sequence: Synthetic oligonucleotide
gguucugguagaagguagu

SEQ ID NO: 1781600 - RNA, 19 nt, Artificial Sequence
  Description of Artificial Sequence: Synthetic oligonucleotide
gccugcacgaaggggagga

SEQ ID NO: 1781601 - RNA, 19 nt, Artificial Sequence
  Description of Artificial Sequence: Synthetic oligonucleotide
gaccacaaauuagcacccu

SEQ ID NO: 1781602 - RNA, 19 nt, Artificial Sequence
  Description of Artificial Sequence: Synthetic oligonucleotide
ccacuagaacagugcucag

SEQ ID NO: 1781603 - RNA, 19 nt, Artificial Sequence
  Description of Artificial Sequence: Synthetic oligonucleotide
gcgcucauggggucuugac

SEQ ID NO: 1781604 - RNA, 19 nt, Artificial Sequence
  Description of Artificial Sequence: Synthetic oligonucleotide
caguuugacagaggugagu

SEQ ID NO: 1781605 - RNA, 19 nt, Artificial Sequence
  Description of Artificial Sequence: Synthetic oligonucleotide
cacacgacagcagcagccu

SEQ ID NO: 1781606 - RNA, 19 nt, Artificial Sequence
  Description of Artificial Sequence: Synthetic oligonucleotide
agccauggccaggccaaaa

SEQ ID NO: 1781607 - RNA, 19 nt, Artificial Sequence
  Description of Artificial Sequence: Synthetic oligonucleotide
ugauggccaguggcaucaa

SEQ ID NO: 1781608 - RNA, 19 nt, Artificial Sequence
  Description of Artificial Sequence: Synthetic oligonucleotide
gggacgccacugagggugg

SEQ ID NO: 1781609 - RNA, 19 nt, Artificial Sequence
  Description of Artificial Sequence: Synthetic oligonucleotide
gcaucgagaagaauuuguu

SEQ ID NO: 1781610 - RNA, 19 nt, Artificial Sequence
  Description of Artificial Sequence: Synthetic oligonucleotide
ggcuggcagccauggccag

SEQ ID NO: 1781611 - RNA, 19 nt, Artificial Sequence
  Description of Artificial Sequence: Synthetic oligonucleotide
gugugauggccaguggcau

SEQ ID NO: 1781612 - RNA, 19 nt, Artificial Sequence
  Description of Artificial Sequence: Synthetic oligonucleotide
ggguaagugggaggaugga

SEQ ID NO: 1781613 - RNA, 19 nt, Artificial Sequence
  Description of Artificial Sequence: Synthetic oligonucleotide
cugguucuuugcccugaua

SEQ ID NO: 1781614 - RNA, 19 nt, Artificial Sequence
  Description of Artificial Sequence: Synthetic oligonucleotide
gcacacgcaacagcaucuc

SEQ ID NO: 1781615 - RNA, 19 nt, Artificial Sequence
  Description of Artificial Sequence: Synthetic oligonucleotide
ggcaugcccugaagugacc

SEQ ID NO: 1781616 - RNA, 19 nt, Artificial Sequence
  Description of Artificial Sequence: Synthetic oligonucleotide
agcaggggucacagguuuu

SEQ ID NO: 1781617 - RNA, 19 nt, Artificial Sequence
  Description of Artificial Sequence: Synthetic oligonucleotide
ccgccucucuccaccuccc

SEQ ID NO: 1781618 - RNA, 19 nt, Artificial Sequence
  Description of Artificial Sequence: Synthetic oligonucleotide
ggacuccccagcagggcuc

SEQ ID NO: 1781619 - RNA, 19 nt, Artificial Sequence
  Description of Artificial Sequence: Synthetic oligonucleotide
gacgccacugagggugggu

SEQ ID NO: 1781620 - RNA, 19 nt, Artificial Sequence
  Description of Artificial Sequence: Synthetic oligonucleotide
cgcucugagacaggcugag

SEQ ID NO: 1781621 - RNA, 19 nt, Artificial Sequence
  Description of Artificial Sequence: Synthetic oligonucleotide
guaccccaccaggggcgcc

SEQ ID NO: 1781622 - RNA, 19 nt, Artificial Sequence
  Description of Artificial Sequence: Synthetic oligonucleotide
gcaugcccugaagugaccu

SEQ ID NO: 1781623 - RNA, 19 nt, Artificial Sequence
  Description of Artificial Sequence: Synthetic oligonucleotide
ggcucacuucaaaggcauc

SEQ ID NO: 1781624 - RNA, 19 nt, Artificial Sequence
  Description of Artificial Sequence: Synthetic oligonucleotide
cacaggggcaggaguguuu

SEQ ID NO: 1781625 - RNA, 19 nt, Artificial Sequence
  Description of Artificial Sequence: Synthetic oligonucleotide
caaaggcaucgagaagaau

SEQ ID NO: 1781626 - RNA, 19 nt, Artificial Sequence
  Description of Artificial Sequence: Synthetic oligonucleotide
ggagagugacagguucacu

SEQ ID NO: 1781627 - RNA, 19 nt, Artificial Sequence
  Description of Artificial Sequence: Synthetic oligonucleotide
cacugaggguggguggacu

SEQ ID NO: 1781628 - RNA, 19 nt, Artificial Sequence
  Description of Artificial Sequence: Synthetic oligonucleotide
ccggcugcccucuacuggu

SEQ ID NO: 1781629 - RNA, 19 nt, Artificial Sequence
  Description of Artificial Sequence: Synthetic oligonucleotide
ggcaugggacaaggcucac

SEQ ID NO: 1781630 - RNA, 19 nt, Artificial Sequence
  Description of Artificial Sequence: Synthetic oligonucleotide
cccacaccugaagaaagcu

SEQ ID NO: 1781631 - RNA, 19 nt, Artificial Sequence
  Description of Artificial Sequence: Synthetic oligonucleotide
ccucgguuucauccucgga

SEQ ID NO: 1781632 - RNA, 19 nt, Artificial Sequence
  Description of Artificial Sequence: Synthetic oligonucleotide
ggcgccgcgcucauggggu

SEQ ID NO: 1781633 - RNA, 19 nt, Artificial Sequence
  Description of Artificial Sequence: Synthetic oligonucleotide
gcugcccucuacuggugau

SEQ ID NO: 1781634 - RNA, 19 nt, Artificial Sequence
  Description of Artificial Sequence: Synthetic oligonucleotide
ccacugaggguggguggac

SEQ ID NO: 1781635 - RNA, 19 nt, Artificial Sequence
  Description of Artificial Sequence: Synthetic oligonucleotide
ccacagauggcagcaggcu

SEQ ID NO: 1781636 - RNA, 19 nt, Artificial Sequence
  Description of Artificial Sequence: Synthetic oligonucleotide
gcaugggacaaggcucacu

SEQ ID NO: 1781637 - RNA, 19 nt, Artificial Sequence
  Description of Artificial Sequence: Synthetic oligonucleotide
ccggacuugcagcggaccu

SEQ ID NO: 1781638 - RNA, 19 nt, Artificial Sequence
  Description of Artificial Sequence: Synthetic oligonucleotide
gacuugcagcggaccugcu

SEQ ID NO: 1781639 - RNA, 19 nt, Artificial Sequence
  Description of Artificial Sequence: Synthetic oligonucleotide
gcccugauaagagcuugau

SEQ ID NO: 1781640 - RNA, 19 nt, Artificial Sequence
  Description of Artificial Sequence: Synthetic oligonucleotide
gagguccggcugcccucua

SEQ ID NO: 1781641 - RNA, 19 nt, Artificial Sequence
  Description of Artificial Sequence: Synthetic oligonucleotide
caggaguguuuugccuggu

SEQ ID NO: 1781642 - RNA, 19 nt, Artificial Sequence
  Description of Artificial Sequence: Synthetic oligonucleotide
gccucccgccucucuccac

SEQ ID NO: 1781643 - RNA, 19 nt, Artificial Sequence
  Description of Artificial Sequence: Synthetic oligonucleotide
cccugaagugaccucccau

SEQ ID NO: 1781644 - RNA, 19 nt, Artificial Sequence
  Description of Artificial Sequence: Synthetic oligonucleotide
cugcccucuacuggugauu

SEQ ID NO: 1781645 - RNA, 19 nt, Artificial Sequence
  Description of Artificial Sequence: Synthetic oligonucleotide
caggggcgccgcgcucaug

SEQ ID NO: 1781646 - RNA, 19 nt, Artificial Sequence
  Description of Artificial Sequence: Synthetic oligonucleotide
ccaacucagcuggucuaua

SEQ ID NO: 1781647 - RNA, 19 nt, Artificial Sequence
  Description of Artificial Sequence: Synthetic oligonucleotide
cuccaucccucgguuucau

SEQ ID NO: 1781648 - RNA, 19 nt, Artificial Sequence
  Description of Artificial Sequence: Synthetic oligonucleotide
cgcgcucauggggucuuga

SEQ ID NO: 1781649 - RNA, 19 nt, Artificial Sequence
  Description of Artificial Sequence: Synthetic oligonucleotide
ccgcgcucauggggucuug

SEQ ID NO: 1781650 - RNA, 19 nt, Artificial Sequence
  Description of Artificial Sequence: Synthetic oligonucleotide
gccgcgcucauggggucuu

SEQ ID NO: 1781651 - RNA, 19 nt, Artificial Sequence
  Description of Artificial Sequence: Synthetic oligonucleotide
cggagccgcugcugcugua

SEQ ID NO: 1781652 - RNA, 19 nt, Artificial Sequence
  Description of Artificial Sequence: Synthetic oligonucleotide
aaugaaaucacaaagccac

SEQ ID NO: 1781653 - RNA, 19 nt, Artificial Sequence
  Description of Artificial Sequence: Synthetic oligonucleotide
aacaagaugccccauaggg

SEQ ID NO: 1781654 - RNA, 19 nt, Artificial Sequence
  Description of Artificial Sequence: Synthetic oligonucleotide
aaauggagaggauucuucc

SEQ ID NO: 1781655 - RNA, 19 nt, Artificial Sequence
  Description of Artificial Sequence: Synthetic oligonucleotide
ugauugaagacaaugauuc

SEQ ID NO: 1781656 - RNA, 19 nt, Artificial Sequence
  Description of Artificial Sequence: Synthetic oligonucleotide
uuuguguagagaaaacacg

SEQ ID NO: 1781657 - RNA, 19 nt, Artificial Sequence
  Description of Artificial Sequence: Synthetic oligonucleotide
uuguguagagaaaacacgg

SEQ ID NO: 1781658 - RNA, 19 nt, Artificial Sequence
  Description of Artificial Sequence: Synthetic oligonucleotide
aaagauauccccaggauuc

SEQ ID NO: 1781659 - RNA, 19 nt, Artificial Sequence
  Description of Artificial Sequence: Synthetic oligonucleotide
ucugcuaacauccaagcug

SEQ ID NO: 1781660 - RNA, 19 nt, Artificial Sequence
  Description of Artificial Sequence: Synthetic oligonucleotide
uuagaccucaccaaguucc

SEQ ID NO: 1781661 - RNA, 19 nt, Artificial Sequence
  Description of Artificial Sequence: Synthetic oligonucleotide
uuccuggugaaauuaaucg

SEQ ID NO: 1781662 - RNA, 19 nt, Artificial Sequence
  Description of Artificial Sequence: Synthetic oligonucleotide
aaauuauuugacuguuccg

SEQ ID NO: 1781663 - RNA, 19 nt, Artificial Sequence
  Description of Artificial Sequence: Synthetic oligonucleotide
ucagguaaauuaaucacag

SEQ ID NO: 1781664 - RNA, 19 nt, Artificial Sequence
  Description of Artificial Sequence: Synthetic oligonucleotide
uuaucagguaaauuaauca

SEQ ID NO: 1781665 - RNA, 19 nt, Artificial Sequence
  Description of Artificial Sequence: Synthetic oligonucleotide
guaacaacuaaccacuucc

SEQ ID NO: 1781666 - RNA, 19 nt, Artificial Sequence
  Description of Artificial Sequence: Synthetic oligonucleotide
acaucuaaugcauuagagg

SEQ ID NO: 1781667 - RNA, 19 nt, Artificial Sequence
  Description of Artificial Sequence: Synthetic oligonucleotide
aauuauuugacuguuccgu

SEQ ID NO: 1781668 - RNA, 19 nt, Artificial Sequence
  Description of Artificial Sequence: Synthetic oligonucleotide
ucuauggcaguacacuugg

SEQ ID NO: 1781669 - RNA, 19 nt, Artificial Sequence
  Description of Artificial Sequence: Synthetic oligonucleotide
aagagccuagaacugaauc

SEQ ID NO: 1781670 - RNA, 19 nt, Artificial Sequence
  Description of Artificial Sequence: Synthetic oligonucleotide
guagagaaaacacggaaag

SEQ ID NO: 1781671 - RNA, 19 nt, Artificial Sequence
  Description of Artificial Sequence: Synthetic oligonucleotide
uauggauugguuugauucg

SEQ ID NO: 1781672 - RNA, 19 nt, Artificial Sequence
  Description of Artificial Sequence: Synthetic oligonucleotide
ugcugaaagguucugacca

SEQ ID NO: 1781673 - RNA, 19 nt, Artificial Sequence
  Description of Artificial Sequence: Synthetic oligonucleotide
uguugaguaacaaggaaaa

SEQ ID NO: 1781674 - RNA, 19 nt, Artificial Sequence
  Description of Artificial Sequence: Synthetic oligonucleotide
gaagcaucgggacuggagg

SEQ ID NO: 1781675 - RNA, 19 nt, Artificial Sequence
  Description of Artificial Sequence: Synthetic oligonucleotide
gaaucagccauugugugcg

SEQ ID NO: 1781676 - RNA, 19 nt, Artificial Sequence
  Description of Artificial Sequence: Synthetic oligonucleotide
cuaacauccaagcugggag

SEQ ID NO: 1781677 - RNA, 19 nt, Artificial Sequence
  Description of Artificial Sequence: Synthetic oligonucleotide
aaacacggauuuuguaugg

SEQ ID NO: 1781678 - RNA, 19 nt, Artificial Sequence
  Description of Artificial Sequence: Synthetic oligonucleotide
auauccccaggauucaacc

SEQ ID NO: 1781679 - RNA, 19 nt, Artificial Sequence
  Description of Artificial Sequence: Synthetic oligonucleotide
caucuaaugcauuagagga

SEQ ID NO: 1781680 - RNA, 19 nt, Artificial Sequence
  Description of Artificial Sequence: Synthetic oligonucleotide
aagggcaguaaaugaaauc

SEQ ID NO: 1781681 - RNA, 19 nt, Artificial Sequence
  Description of Artificial Sequence: Synthetic oligonucleotide
aaagaguacuuguugagua

SEQ ID NO: 1781682 - RNA, 19 nt, Artificial Sequence
  Description of Artificial Sequence: Synthetic oligonucleotide
uguuaauaauuuccccagg

SEQ ID NO: 1781683 - RNA, 19 nt, Artificial Sequence
  Description of Artificial Sequence: Synthetic oligonucleotide
aaaagauauccccaggauu

SEQ ID NO: 1781684 - RNA, 19 nt, Artificial Sequence
  Description of Artificial Sequence: Synthetic oligonucleotide
auuggcaagagcuugacuu

SEQ ID NO: 1781685 - RNA, 19 nt, Artificial Sequence
  Description of Artificial Sequence: Synthetic oligonucleotide
ugguuguuaauaauuuccc

SEQ ID NO: 1781686 - RNA, 19 nt, Artificial Sequence
  Description of Artificial Sequence: Synthetic oligonucleotide
agugacuuagaccucacca

SEQ ID NO: 1781687 - RNA, 19 nt, Artificial Sequence
  Description of Artificial Sequence: Synthetic oligonucleotide
gauucaacagacaagggca

SEQ ID NO: 1781688 - RNA, 19 nt, Artificial Sequence
  Description of Artificial Sequence: Synthetic oligonucleotide
uguagagaaaacacggaaa

SEQ ID NO: 1781689 - RNA, 19 nt, Artificial Sequence
  Description of Artificial Sequence: Synthetic oligonucleotide
uuguugaguaacaaggaaa

SEQ ID NO: 1781690 - RNA, 19 nt, Artificial Sequence
  Description of Artificial Sequence: Synthetic oligonucleotide
cuuaacaggugcugaaagg

SEQ ID NO: 1781691 - RNA, 19 nt, Artificial Sequence
  Description of Artificial Sequence: Synthetic oligonucleotide
cuuaucagguaaauuaauc

SEQ ID NO: 1781692 - RNA, 19 nt, Artificial Sequence
  Description of Artificial Sequence: Synthetic oligonucleotide
uugugugcgaagcaucggg

SEQ ID NO: 1781693 - RNA, 19 nt, Artificial Sequence
  Description of Artificial Sequence: Synthetic oligonucleotide
aauuaaucgcuuucuucca

SEQ ID NO: 1781694 - RNA, 19 nt, Artificial Sequence
  Description of Artificial Sequence: Synthetic oligonucleotide
ugacuuagaccucaccaag

SEQ ID NO: 1781695 - RNA, 19 nt, Artificial Sequence
  Description of Artificial Sequence: Synthetic oligonucleotide
ucaagcagugacuuagacc

SEQ ID NO: 1781696 - RNA, 19 nt, Artificial Sequence
  Description of Artificial Sequence: Synthetic oligonucleotide
aguaacaacuaaccacuuc

SEQ ID NO: 1781697 - RNA, 19 nt, Artificial Sequence
  Description of Artificial Sequence: Synthetic oligonucleotide
uuggaugaaacaaccaguc

SEQ ID NO: 1781698 - RNA, 19 nt, Artificial Sequence
  Description of Artificial Sequence: Synthetic oligonucleotide
uguuccguaaaguaacaac

SEQ ID NO: 1781699 - RNA, 19 nt, Artificial Sequence
  Description of Artificial Sequence: Synthetic oligonucleotide
acggauuuuguauggauug

SEQ ID NO: 1781700 - RNA, 19 nt, Artificial Sequence
  Description of Artificial Sequence: Synthetic oligonucleotide
gguaaauuaaucacagggg

SEQ ID NO: 1781701 - RNA, 19 nt, Artificial Sequence
  Description of Artificial Sequence: Synthetic oligonucleotide
gauucgaagcugauuaucc

SEQ ID NO: 1781702 - RNA, 19 nt, Artificial Sequence
  Description of Artificial Sequence: Synthetic oligonucleotide
ucuugaucagaacuuuuac

SEQ ID NO: 1781703 - RNA, 19 nt, Artificial Sequence
  Description of Artificial Sequence: Synthetic oligonucleotide
gaaguguugaaaauggaga

SEQ ID NO: 1781704 - RNA, 19 nt, Artificial Sequence
  Description of Artificial Sequence: Synthetic oligonucleotide
caagcagugacuuagaccu

SEQ ID NO: 1781705 - RNA, 19 nt, Artificial Sequence
  Description of Artificial Sequence: Synthetic oligonucleotide
aaaacacggaaagaguacu

SEQ ID NO: 1781706 - RNA, 19 nt, Artificial Sequence
  Description of Artificial Sequence: Synthetic oligonucleotide
uuaacaggugcugaaaggu

SEQ ID NO: 1781707 - RNA, 19 nt, Artificial Sequence
  Description of Artificial Sequence: Synthetic oligonucleotide
caguuagccccauacaugc

SEQ ID NO: 1781708 - RNA, 19 nt, Artificial Sequence
  Description of Artificial Sequence: Synthetic oligonucleotide
agagccuagaacugaauca

SEQ ID NO: 1781709 - RNA, 19 nt, Artificial Sequence
  Description of Artificial Sequence: Synthetic oligonucleotide
cacaucuaaugcauuagag

SEQ ID NO: 1781710 - RNA, 19 nt, Artificial Sequence
  Description of Artificial Sequence: Synthetic oligonucleotide
caaugauucuggaacuucc

SEQ ID NO: 1781711 - RNA, 19 nt, Artificial Sequence
  Description of Artificial Sequence: Synthetic oligonucleotide
cauugugugcgaagcaucg

SEQ ID NO: 1781712 - RNA, 19 nt, Artificial Sequence
  Description of Artificial Sequence: Synthetic oligonucleotide
ucccaguugucuuaucagg

SEQ ID NO: 1781713 - RNA, 19 nt, Artificial Sequence
  Description of Artificial Sequence: Synthetic oligonucleotide
guuaauaauuuccccagga

SEQ ID NO: 1781714 - RNA, 19 nt, Artificial Sequence
  Description of Artificial Sequence: Synthetic oligonucleotide
uuagaggaagugcacugug

SEQ ID NO: 1781715 - RNA, 19 nt, Artificial Sequence
  Description of Artificial Sequence: Synthetic oligonucleotide
uccuggugaaauuaaucgc

SEQ ID NO: 1781716 - RNA, 19 nt, Artificial Sequence
  Description of Artificial Sequence: Synthetic oligonucleotide
  modified_base (8)..(8): a, c, u, g, unknown or other
aguguugnuuccccacagc

SEQ ID NO: 1781717 - RNA, 19 nt, Artificial Sequence
  Description of Artificial Sequence: Synthetic oligonucleotide
ucaguuuguguagagaaaa

SEQ ID NO: 1781718 - RNA, 19 nt, Artificial Sequence
  Description of Artificial Sequence: Synthetic oligonucleotide
ugaaucagccauugugugc

SEQ ID NO: 1781719 - RNA, 19 nt, Artificial Sequence
  Description of Artificial Sequence: Synthetic oligonucleotide
ggauucaacagacaagggc

SEQ ID NO: 1781720 - RNA, 19 nt, Artificial Sequence
  Description of Artificial Sequence: Synthetic oligonucleotide
cuuggccuugguuauuucg

SEQ ID NO: 1781721 - RNA, 19 nt, Artificial Sequence
  Description of Artificial Sequence: Synthetic oligonucleotide
uugacuguuccguaaagua

SEQ ID NO: 1781722 - RNA, 19 nt, Artificial Sequence
  Description of Artificial Sequence: Synthetic oligonucleotide
aguguugaaaauggagagg

SEQ ID NO: 1781723 - RNA, 19 nt, Artificial Sequence
  Description of Artificial Sequence: Synthetic oligonucleotide
cguaaaguaacaacuaacc

SEQ ID NO: 1781724 - RNA, 19 nt, Artificial Sequence
  Description of Artificial Sequence: Synthetic oligonucleotide
agaguacuuguugaguaac

SEQ ID NO: 1781725 - RNA, 19 nt, Artificial Sequence
  Description of Artificial Sequence: Synthetic oligonucleotide
aacacggaaagaguacuug

SEQ ID NO: 1781726 - RNA, 19 nt, Artificial Sequence
  Description of Artificial Sequence: Synthetic oligonucleotide
ucugcaucucacucaauac

SEQ ID NO: 1781727 - RNA, 19 nt, Artificial Sequence
  Description of Artificial Sequence: Synthetic oligonucleotide
uccguaaaguaacaacuaa

SEQ ID NO: 1781728 - RNA, 19 nt, Artificial Sequence
  Description of Artificial Sequence: Synthetic oligonucleotide
acggaaagaguacuuguug

SEQ ID NO: 1781729 - RNA, 19 nt, Artificial Sequence
  Description of Artificial Sequence: Synthetic oligonucleotide
cuucacacuaucuacaucu

SEQ ID NO: 1781730 - RNA, 19 nt, Artificial Sequence
  Description of Artificial Sequence: Synthetic oligonucleotide
uucgaagcugauuauccac

SEQ ID NO: 1781731 - RNA, 19 nt, Artificial Sequence
  Description of Artificial Sequence: Synthetic oligonucleotide
uauuugacuguuccguaaa

SEQ ID NO: 1781732 - RNA, 19 nt, Artificial Sequence
  Description of Artificial Sequence: Synthetic oligonucleotide
uggaugaaacaaccagucc

SEQ ID NO: 1781733 - RNA, 19 nt, Artificial Sequence
  Description of Artificial Sequence: Synthetic oligonucleotide
ugacuguuccguaaaguaa

SEQ ID NO: 1781734 - RNA, 19 nt, Artificial Sequence
  Description of Artificial Sequence: Synthetic oligonucleotide
uggacuuaggauggaaucc

SEQ ID NO: 1781735 - RNA, 19 nt, Artificial Sequence
  Description of Artificial Sequence: Synthetic oligonucleotide
gagccuagaacugaaucag

SEQ ID NO: 1781736 - RNA, 19 nt, Artificial Sequence
  Description of Artificial Sequence: Synthetic oligonucleotide
uaaucgcuuucuuccaugc

SEQ ID NO: 1781737 - RNA, 19 nt, Artificial Sequence
  Description of Artificial Sequence: Synthetic oligonucleotide
cuaucuacaucugugucac

SEQ ID NO: 1781738 - RNA, 19 nt, Artificial Sequence
  Description of Artificial Sequence: Synthetic oligonucleotide
ugguuugauucgaagcuga

SEQ ID NO: 1781739 - RNA, 19 nt, Artificial Sequence
  Description of Artificial Sequence: Synthetic oligonucleotide
ucugugacuuguaugucuc

SEQ ID NO: 1781740 - RNA, 19 nt, Artificial Sequence
  Description of Artificial Sequence: Synthetic oligonucleotide
aagaguacuuguugaguaa

SEQ ID NO: 1781741 - RNA, 19 nt, Artificial Sequence
  Description of Artificial Sequence: Synthetic oligonucleotide
gaaaacacggaaagaguac

SEQ ID NO: 1781742 - RNA, 19 nt, Artificial Sequence
  Description of Artificial Sequence: Synthetic oligonucleotide
cacucaauacaucaucuuc

SEQ ID NO: 1781743 - RNA, 19 nt, Artificial Sequence
  Description of Artificial Sequence: Synthetic oligonucleotide
gacuguuccguaaaguaac

SEQ ID NO: 1781744 - RNA, 19 nt, Artificial Sequence
  Description of Artificial Sequence: Synthetic oligonucleotide
ugucacuuaaugugauuga

SEQ ID NO: 1781745 - RNA, 19 nt, Artificial Sequence
  Description of Artificial Sequence: Synthetic oligonucleotide
agacaaugauucuggaacu

SEQ ID NO: 1781746 - RNA, 19 nt, Artificial Sequence
  Description of Artificial Sequence: Synthetic oligonucleotide
cuugaucagaacuuuuaca

SEQ ID NO: 1781747 - RNA, 19 nt, Artificial Sequence
  Description of Artificial Sequence: Synthetic oligonucleotide
gugucacuuaaugugauug

SEQ ID NO: 1781748 - RNA, 19 nt, Artificial Sequence
  Description of Artificial Sequence: Synthetic oligonucleotide
cuggauaccauccuuaucu

SEQ ID NO: 1781749 - RNA, 19 nt, Artificial Sequence
  Description of Artificial Sequence: Synthetic oligonucleotide
acucaauacaucaucuuca

SEQ ID NO: 1781750 - RNA, 19 nt, Artificial Sequence
  Description of Artificial Sequence: Synthetic oligonucleotide
caucucacucaauacauca

SEQ ID NO: 1781751 - RNA, 19 nt, Artificial Sequence
  Description of Artificial Sequence: Synthetic oligonucleotide
ugcauuagaggaagugcac

SEQ ID NO: 1781752 - RNA, 19 nt, Artificial Sequence
  Description of Artificial Sequence: Synthetic oligonucleotide
aucugugacuuguaugucu

SEQ ID NO: 1781753 - RNA, 19 nt, Artificial Sequence
  Description of Artificial Sequence: Synthetic oligonucleotide
ucagaggacugauggaaac

SEQ ID NO: 1781754 - RNA, 19 nt, Artificial Sequence
  Description of Artificial Sequence: Synthetic oligonucleotide
  modified_base (9)..(9): a, c, u, g, unknown or other
gaguguugnuuccccacag

SEQ ID NO: 1781755 - RNA, 19 nt, Artificial Sequence
  Description of Artificial Sequence: Synthetic oligonucleotide
cucggaugucuccacaugc

SEQ ID NO: 1781756 - RNA, 19 nt, Artificial Sequence
  Description of Artificial Sequence: Synthetic oligonucleotide
ugaagagccuagaacugaa

SEQ ID NO: 1781757 - RNA, 19 nt, Artificial Sequence
  Description of Artificial Sequence: Synthetic oligonucleotide
  modified_base (5)..(5): a, c, u, g, unknown or other
guugnuuccccacagcuua

SEQ ID NO: 1781758 - RNA, 19 nt, Artificial Sequence
  Description of Artificial Sequence: Synthetic oligonucleotide
agaacugaaucagccauug

SEQ ID NO: 1781759 - RNA, 19 nt, Artificial Sequence
  Description of Artificial Sequence: Synthetic oligonucleotide
cuggacuuaggauggaauc

SEQ ID NO: 1781760 - RNA, 19 nt, Artificial Sequence
  Description of Artificial Sequence: Synthetic oligonucleotide
gguuguuaauaauuucccc

SEQ ID NO: 1781761 - RNA, 19 nt, Artificial Sequence
  Description of Artificial Sequence: Synthetic oligonucleotide
aaugauucuggaacuuccu

SEQ ID NO: 1781762 - RNA, 19 nt, Artificial Sequence
  Description of Artificial Sequence: Synthetic oligonucleotide
gcuguguuacguuuacugg

SEQ ID NO: 1781763 - RNA, 19 nt, Artificial Sequence
  Description of Artificial Sequence: Synthetic oligonucleotide
auccuugugaugucucaag

SEQ ID NO: 1781764 - RNA, 19 nt, Artificial Sequence
  Description of Artificial Sequence: Synthetic oligonucleotide
agaaaacacggaaagagua

SEQ ID NO: 1781765 - RNA, 19 nt, Artificial Sequence
  Description of Artificial Sequence: Synthetic oligonucleotide
ugugugcgaagcaucggga

SEQ ID NO: 1781766 - RNA, 19 nt, Artificial Sequence
  Description of Artificial Sequence: Synthetic oligonucleotide
uggccuugguuauuucggg

SEQ ID NO: 1781767 - RNA, 19 nt, Artificial Sequence
  Description of Artificial Sequence: Synthetic oligonucleotide
uucacacuaucuacaucug

SEQ ID NO: 1781768 - RNA, 19 nt, Artificial Sequence
  Description of Artificial Sequence: Synthetic oligonucleotide
cucuauggcaguacacuug

SEQ ID NO: 1781769 - RNA, 19 nt, Artificial Sequence
  Description of Artificial Sequence: Synthetic oligonucleotide
acacggaaagaguacuugu

SEQ ID NO: 1781770 - RNA, 19 nt, Artificial Sequence
  Description of Artificial Sequence: Synthetic oligonucleotide
uccccaggauucaacagac

SEQ ID NO: 1781771 - RNA, 19 nt, Artificial Sequence
  Description of Artificial Sequence: Synthetic oligonucleotide
guacacuuggccuugguua

SEQ ID NO: 1781772 - RNA, 19 nt, Artificial Sequence
  Description of Artificial Sequence: Synthetic oligonucleotide
  modified_base (15)..(15): a, c, u, g, unknown or other
caaggugaguguugnuucc

SEQ ID NO: 1781773 - RNA, 19 nt, Artificial Sequence
  Description of Artificial Sequence: Synthetic oligonucleotide
acuuguaugucuccauaau

SEQ ID NO: 1781774 - RNA, 19 nt, Artificial Sequence
  Description of Artificial Sequence: Synthetic oligonucleotide
caggauucaaccagcacca

SEQ ID NO: 1781775 - RNA, 19 nt, Artificial Sequence
  Description of Artificial Sequence: Synthetic oligonucleotide
caccaaguuccucuauugg

SEQ ID NO: 1781776 - RNA, 19 nt, Artificial Sequence
  Description of Artificial Sequence: Synthetic oligonucleotide
ggugaaauuaaucgcuuuc

SEQ ID NO: 1781777 - RNA, 19 nt, Artificial Sequence
  Description of Artificial Sequence: Synthetic oligonucleotide
ucggaugucuccacaugca

SEQ ID NO: 1781778 - RNA, 19 nt, Artificial Sequence
  Description of Artificial Sequence: Synthetic oligonucleotide
aaucgcuuucuuccaugcu

SEQ ID NO: 1781779 - RNA, 19 nt, Artificial Sequence
  Description of Artificial Sequence: Synthetic oligonucleotide
caaguuccucuauuggaac

SEQ ID NO: 1781780 - RNA, 19 nt, Artificial Sequence
  Description of Artificial Sequence: Synthetic oligonucleotide
uaaucacuaucaccagggu

SEQ ID NO: 1781781 - RNA, 19 nt, Artificial Sequence
  Description of Artificial Sequence: Synthetic oligonucleotide
aauuaaucacaggggacuu

SEQ ID NO: 1781782 - RNA, 19 nt, Artificial Sequence
  Description of Artificial Sequence: Synthetic oligonucleotide
auuaaucacaggggacuuc

SEQ ID NO: 1781783 - RNA, 19 nt, Artificial Sequence
  Description of Artificial Sequence: Synthetic oligonucleotide
ugaucagaacuuuuacauu

SEQ ID NO: 1781784 - RNA, 19 nt, Artificial Sequence
  Description of Artificial Sequence: Synthetic oligonucleotide
  modified_base (6)..(6): a, c, u, g, unknown or other
uguugnuuccccacagcuu

SEQ ID NO: 1781785 - RNA, 19 nt, Artificial Sequence
  Description of Artificial Sequence: Synthetic oligonucleotide
auuaaucgcuuucuuccau

SEQ ID NO: 1781786 - RNA, 19 nt, Artificial Sequence
  Description of Artificial Sequence: Synthetic oligonucleotide
cauagggacacucaggccu

SEQ ID NO: 1781787 - RNA, 19 nt, Artificial Sequence
  Description of Artificial Sequence: Synthetic oligonucleotide
uacacuuggccuugguuau

SEQ ID NO: 1781788 - RNA, 19 nt, Artificial Sequence
  Description of Artificial Sequence: Synthetic oligonucleotide
acuuagaccucaccaaguu

SEQ ID NO: 1781789 - RNA, 19 nt, Artificial Sequence
  Description of Artificial Sequence: Synthetic oligonucleotide
ugauucgaagcugauuauc

SEQ ID NO: 1781790 - RNA, 19 nt, Artificial Sequence
  Description of Artificial Sequence: Synthetic oligonucleotide
uugcucgguucauuuaucu

SEQ ID NO: 1781791 - RNA, 19 nt, Artificial Sequence
  Description of Artificial Sequence: Synthetic oligonucleotide
gucccaguugucuuaucag

SEQ ID NO: 1781792 - RNA, 19 nt, Artificial Sequence
  Description of Artificial Sequence: Synthetic oligonucleotide
ucuucacacuaucuacauc

SEQ ID NO: 1781793 - RNA, 19 nt, Artificial Sequence
  Description of Artificial Sequence: Synthetic oligonucleotide
guugaguaacaaggaaaag

SEQ ID NO: 1781794 - RNA, 19 nt, Artificial Sequence
  Description of Artificial Sequence: Synthetic oligonucleotide
  modified_base (16)..(16): a, c, u, g, unknown or other
gcaaggugaguguugnuuc

SEQ ID NO: 1781795 - RNA, 19 nt, Artificial Sequence
  Description of Artificial Sequence: Synthetic oligonucleotide
ucuacaucugugucacuua

SEQ ID NO: 1781796 - RNA, 19 nt, Artificial Sequence
  Description of Artificial Sequence: Synthetic oligonucleotide
ugcauugcucgguucauuu

SEQ ID NO: 1781797 - RNA, 19 nt, Artificial Sequence
  Description of Artificial Sequence: Synthetic oligonucleotide
ugggcucuauggcaguaca

SEQ ID NO: 1781798 - RNA, 19 nt, Artificial Sequence
  Description of Artificial Sequence: Synthetic oligonucleotide
uuccuguagcaguuagccc

SEQ ID NO: 1781799 - RNA, 19 nt, Artificial Sequence
  Description of Artificial Sequence: Synthetic oligonucleotide
caguuuguguagagaaaac

SEQ ID NO: 1781800 - RNA, 19 nt, Artificial Sequence
  Description of Artificial Sequence: Synthetic oligonucleotide
gaggacugauggaaacacg

SEQ ID NO: 1781801 - RNA, 19 nt, Artificial Sequence
  Description of Artificial Sequence: Synthetic oligonucleotide
cuuagaccucaccaaguuc

SEQ ID NO: 1781802 - RNA, 19 nt, Artificial Sequence
  Description of Artificial Sequence: Synthetic oligonucleotide
ucucaagcagugacuuaga

SEQ ID NO: 1781803 - RNA, 19 nt, Artificial Sequence
  Description of Artificial Sequence: Synthetic oligonucleotide
caugcuguguuacguuuac

SEQ ID NO: 1781804 - RNA, 19 nt, Artificial Sequence
  Description of Artificial Sequence: Synthetic oligonucleotide
gcucgguucauuuaucuuc

SEQ ID NO: 1781805 - RNA, 19 nt, Artificial Sequence
  Description of Artificial Sequence: Synthetic oligonucleotide
ggauugguuugauucgaag

SEQ ID NO: 1781806 - RNA, 19 nt, Artificial Sequence
  Description of Artificial Sequence: Synthetic oligonucleotide
gauauccccaggauucaac

SEQ ID NO: 1781807 - RNA, 19 nt, Artificial Sequence
  Description of Artificial Sequence: Synthetic oligonucleotide
  modified_base (11)..(11): a, c, u, g, unknown or other
gugaguguugnuuccccac

SEQ ID NO: 1781808 - RNA, 19 nt, Artificial Sequence
  Description of Artificial Sequence: Synthetic oligonucleotide
cucaagcagugacuuagac

SEQ ID NO: 1781809 - RNA, 19 nt, Artificial Sequence
  Description of Artificial Sequence: Synthetic oligonucleotide
uccccaggauucaaccagc

SEQ ID NO: 1781810 - RNA, 19 nt, Artificial Sequence
  Description of Artificial Sequence: Synthetic oligonucleotide
ucaacagacaagggcagua

SEQ ID NO: 1781811 - RNA, 19 nt, Artificial Sequence
  Description of Artificial Sequence: Synthetic oligonucleotide
  modified_base (7)..(7): a, c, u, g, unknown or other
guguugnuuccccacagcu

SEQ ID NO: 1781812 - RNA, 19 nt, Artificial Sequence
  Description of Artificial Sequence: Synthetic oligonucleotide
uguuacguuuacugggguu

SEQ ID NO: 1781813 - RNA, 19 nt, Artificial Sequence
  Description of Artificial Sequence: Synthetic oligonucleotide
ucacucaauacaucaucuu

SEQ ID NO: 1781814 - RNA, 19 nt, Artificial Sequence
  Description of Artificial Sequence: Synthetic oligonucleotide
  modified_base (2)..(2): a, c, u, g, unknown or other
gnuuccccacagcuuaaca

SEQ ID NO: 1781815 - RNA, 19 nt, Artificial Sequence
  Description of Artificial Sequence: Synthetic oligonucleotide
caugcaggacacccucugg

SEQ ID NO: 1781816 - RNA, 19 nt, Artificial Sequence
  Description of Artificial Sequence: Synthetic oligonucleotide
ccguaaaguaacaacuaac

SEQ ID NO: 1781817 - RNA, 19 nt, Artificial Sequence
  Description of Artificial Sequence: Synthetic oligonucleotide
acacggauuuuguauggau

SEQ ID NO: 1781818 - RNA, 19 nt, Artificial Sequence
  Description of Artificial Sequence: Synthetic oligonucleotide
auugugugcgaagcaucgg

SEQ ID NO: 1781819 - RNA, 19 nt, Artificial Sequence
  Description of Artificial Sequence: Synthetic oligonucleotide
guauuccaucuugugcugg

SEQ ID NO: 1781820 - RNA, 19 nt, Artificial Sequence
  Description of Artificial Sequence: Synthetic oligonucleotide
aaucacaaagccacaucua

SEQ ID NO: 1781821 - RNA, 19 nt, Artificial Sequence
  Description of Artificial Sequence: Synthetic oligonucleotide
agcuuaacaggaucauuuu

SEQ ID NO: 1781822 - RNA, 19 nt, Artificial Sequence
  Description of Artificial Sequence: Synthetic oligonucleotide
ugcuaacauccaagcuggg

SEQ ID NO: 1781823 - RNA, 19 nt, Artificial Sequence
  Description of Artificial Sequence: Synthetic oligonucleotide
agccuagaacugaaucagc

SEQ ID NO: 1781824 - RNA, 19 nt, Artificial Sequence
  Description of Artificial Sequence: Synthetic oligonucleotide
agccacaucuaaugcauua

SEQ ID NO: 1781825 - RNA, 19 nt, Artificial Sequence
  Description of Artificial Sequence: Synthetic oligonucleotide
uggauaccauccuuaucuc

SEQ ID NO: 1781826 - RNA, 19 nt, Artificial Sequence
  Description of Artificial Sequence: Synthetic oligonucleotide
aggauccuguucugcugac

SEQ ID NO: 1781827 - RNA, 19 nt, Artificial Sequence
  Description of Artificial Sequence: Synthetic oligonucleotide
auugcucgguucauuuauc

SEQ ID NO: 1781828 - RNA, 19 nt, Artificial Sequence
  Description of Artificial Sequence: Synthetic oligonucleotide
gauugaagacaaugauucu

SEQ ID NO: 1781829 - RNA, 19 nt, Artificial Sequence
  Description of Artificial Sequence: Synthetic oligonucleotide
uggauugguuugauucgaa

SEQ ID NO: 1781830 - RNA, 19 nt, Artificial Sequence
  Description of Artificial Sequence: Synthetic oligonucleotide
uggugaaauuaaucgcuuu

SEQ ID NO: 1781831 - RNA, 19 nt, Artificial Sequence
  Description of Artificial Sequence: Synthetic oligonucleotide
ccuuaacaggugcugaaag

SEQ ID NO: 1781832 - RNA, 19 nt, Artificial Sequence
  Description of Artificial Sequence: Synthetic oligonucleotide
  modified_base (19)..(19): a, c, u, g, unknown or other
cuugcaaggugaguguugn

SEQ ID NO: 1781833 - RNA, 19 nt, Artificial Sequence
  Description of Artificial Sequence: Synthetic oligonucleotide
acugauggaaacacggauu

SEQ ID NO: 1781834 - RNA, 19 nt, Artificial Sequence
  Description of Artificial Sequence: Synthetic oligonucleotide
agugcacugugucuguauu

SEQ ID NO: 1781835 - RNA, 19 nt, Artificial Sequence
  Description of Artificial Sequence: Synthetic oligonucleotide
uaaugugauugaagacaau

SEQ ID NO: 1781836 - RNA, 19 nt, Artificial Sequence
  Description of Artificial Sequence: Synthetic oligonucleotide
ggaggauucuuuuccucug

SEQ ID NO: 1781837 - RNA, 19 nt, Artificial Sequence
  Description of Artificial Sequence: Synthetic oligonucleotide
acaagggcaguaaaugaaa

SEQ ID NO: 1781838 - RNA, 19 nt, Artificial Sequence
  Description of Artificial Sequence: Synthetic oligonucleotide
aggauucaacagacaaggg

SEQ ID NO: 1781839 - RNA, 19 nt, Artificial Sequence
  Description of Artificial Sequence: Synthetic oligonucleotide
ugugucacuuaaugugauu

SEQ ID NO: 1781840 - RNA, 19 nt, Artificial Sequence
  Description of Artificial Sequence: Synthetic oligonucleotide
cuggaacuuccuuggauga

SEQ ID NO: 1781841 - RNA, 19 nt, Artificial Sequence
  Description of Artificial Sequence: Synthetic oligonucleotide
ccauacaugcaggacaccc

SEQ ID NO: 1781842 - RNA, 19 nt, Artificial Sequence
  Description of Artificial Sequence: Synthetic oligonucleotide
gagaaaacacggaaagagu

SEQ ID NO: 1781843 - RNA, 19 nt, Artificial Sequence
  Description of Artificial Sequence: Synthetic oligonucleotide
  modified_base (4)..(4): a, c, u, g, unknown or other
uugnuuccccacagcuuaa

SEQ ID NO: 1781844 - RNA, 19 nt, Artificial Sequence
  Description of Artificial Sequence: Synthetic oligonucleotide
cugugacuuguaugucucc

SEQ ID NO: 1781845 - RNA, 19 nt, Artificial Sequence
  Description of Artificial Sequence: Synthetic oligonucleotide
auccaagcugggaggauuc

SEQ ID NO: 1781846 - RNA, 19 nt, Artificial Sequence
  Description of Artificial Sequence: Synthetic oligonucleotide
aucuaaugcauuagaggaa

SEQ ID NO: 1781847 - RNA, 19 nt, Artificial Sequence
  Description of Artificial Sequence: Synthetic oligonucleotide
ucuccacccuuaacaggug

SEQ ID NO: 1781848 - RNA, 19 nt, Artificial Sequence
  Description of Artificial Sequence: Synthetic oligonucleotide
gccuagaacugaaucagcc

SEQ ID NO: 1781849 - RNA, 19 nt, Artificial Sequence
  Description of Artificial Sequence: Synthetic oligonucleotide
acacucaggccugucacca

SEQ ID NO: 1781850 - RNA, 19 nt, Artificial Sequence
  Description of Artificial Sequence: Synthetic oligonucleotide
gcuuaacaggaucauuuuc

SEQ ID NO: 1781851 - RNA, 19 nt, Artificial Sequence
  Description of Artificial Sequence: Synthetic oligonucleotide
gaguacuuguugaguaaca

SEQ ID NO: 1781852 - RNA, 19 nt, Artificial Sequence
  Description of Artificial Sequence: Synthetic oligonucleotide
aaacacggaaagaguacuu

SEQ ID NO: 1781853 - RNA, 19 nt, Artificial Sequence
  Description of Artificial Sequence: Synthetic oligonucleotide
uugucuuaucagguaaauu

SEQ ID NO: 1781854 - RNA, 19 nt, Artificial Sequence
  Description of Artificial Sequence: Synthetic oligonucleotide
augggcucuauggcaguac

SEQ ID NO: 1781855 - RNA, 19 nt, Artificial Sequence
  Description of Artificial Sequence: Synthetic oligonucleotide
gucacuuaaugugauugaa

SEQ ID NO: 1781856 - RNA, 19 nt, Artificial Sequence
  Description of Artificial Sequence: Synthetic oligonucleotide
ggccuugguuauuucgggg

SEQ ID NO: 1781857 - RNA, 19 nt, Artificial Sequence
  Description of Artificial Sequence: Synthetic oligonucleotide
aaucagccauugugugcga

SEQ ID NO: 1781858 - RNA, 19 nt, Artificial Sequence
  Description of Artificial Sequence: Synthetic oligonucleotide
guuauuucggggucuuccu

SEQ ID NO: 1781859 - RNA, 19 nt, Artificial Sequence
  Description of Artificial Sequence: Synthetic oligonucleotide
gauccuguucugcugacuu

SEQ ID NO: 1781860 - RNA, 19 nt, Artificial Sequence
  Description of Artificial Sequence: Synthetic oligonucleotide
cagugacuuagaccucacc

SEQ ID NO: 1781861 - RNA, 19 nt, Artificial Sequence
  Description of Artificial Sequence: Synthetic oligonucleotide
ugcugacuuacuguccaaa

SEQ ID NO: 1781862 - RNA, 19 nt, Artificial Sequence
  Description of Artificial Sequence: Synthetic oligonucleotide
ugcucgguucauuuaucuu

SEQ ID NO: 1781863 - RNA, 19 nt, Artificial Sequence
  Description of Artificial Sequence: Synthetic oligonucleotide
  modified_base (3)..(3): a, c, u, g, unknown or other
ugnuuccccacagcuuaac

SEQ ID NO: 1781864 - RNA, 19 nt, Artificial Sequence
  Description of Artificial Sequence: Synthetic oligonucleotide
auagggacacucaggccug

SEQ ID NO: 1781865 - RNA, 19 nt, Artificial Sequence
  Description of Artificial Sequence: Synthetic oligonucleotide
aguugucuuaucagguaaa

SEQ ID NO: 1781866 - RNA, 19 nt, Artificial Sequence
  Description of Artificial Sequence: Synthetic oligonucleotide
augaaaucacaaagccaca

SEQ ID NO: 1781867 - RNA, 19 nt, Artificial Sequence
  Description of Artificial Sequence: Synthetic oligonucleotide
ugcgaagcaucgggacugg

SEQ ID NO: 1781868 - RNA, 19 nt, Artificial Sequence
  Description of Artificial Sequence: Synthetic oligonucleotide
gcaguuagccccauacaug

SEQ ID NO: 1781869 - RNA, 19 nt, Artificial Sequence
  Description of Artificial Sequence: Synthetic oligonucleotide
aucgggacuggagggagca

SEQ ID NO: 1781870 - RNA, 19 nt, Artificial Sequence
  Description of Artificial Sequence: Synthetic oligonucleotide
acuguuccguaaaguaaca

SEQ ID NO: 1781871 - RNA, 19 nt, Artificial Sequence
  Description of Artificial Sequence: Synthetic oligonucleotide
aggauucaaccagcaccac

SEQ ID NO: 1781872 - RNA, 19 nt, Artificial Sequence
  Description of Artificial Sequence: Synthetic oligonucleotide
agcaccacacaugugucuu

SEQ ID NO: 1781873 - RNA, 19 nt, Artificial Sequence
  Description of Artificial Sequence: Synthetic oligonucleotide
gccacaucuaaugcauuag

SEQ ID NO: 1781874 - RNA, 19 nt, Artificial Sequence
  Description of Artificial Sequence: Synthetic oligonucleotide
gcaggacacccucuggacc

SEQ ID NO: 1781875 - RNA, 19 nt, Artificial Sequence
  Description of Artificial Sequence: Synthetic oligonucleotide
guuacguuuacugggguuu

SEQ ID NO: 1781876 - RNA, 19 nt, Artificial Sequence
  Description of Artificial Sequence: Synthetic oligonucleotide
caugcaccugcagaggaca

SEQ ID NO: 1781877 - RNA, 19 nt, Artificial Sequence
  Description of Artificial Sequence: Synthetic oligonucleotide
uuguauggauugguuugau

SEQ ID NO: 1781878 - RNA, 19 nt, Artificial Sequence
  Description of Artificial Sequence: Synthetic oligonucleotide
cugauggaaacacggauuu

SEQ ID NO: 1781879 - RNA, 19 nt, Artificial Sequence
  Description of Artificial Sequence: Synthetic oligonucleotide
cauugcucgguucauuuau

SEQ ID NO: 1781880 - RNA, 19 nt, Artificial Sequence
  Description of Artificial Sequence: Synthetic oligonucleotide
ccaaguuccucuauuggaa

SEQ ID NO: 1781881 - RNA, 19 nt, Artificial Sequence
  Description of Artificial Sequence: Synthetic oligonucleotide
ccccauacaugcaggacac

SEQ ID NO: 1781882 - RNA, 19 nt, Artificial Sequence
  Description of Artificial Sequence: Synthetic oligonucleotide
acguuuacugggguuuuau

SEQ ID NO: 1781883 - RNA, 19 nt, Artificial Sequence
  Description of Artificial Sequence: Synthetic oligonucleotide
aggugcugaaagguucuga

SEQ ID NO: 1781884 - RNA, 19 nt, Artificial Sequence
  Description of Artificial Sequence: Synthetic oligonucleotide
uuacguuuacugggguuuu

SEQ ID NO: 1781885 - RNA, 19 nt, Artificial Sequence
  Description of Artificial Sequence: Synthetic oligonucleotide
ccuagaacugaaucagcca

SEQ ID NO: 1781886 - RNA, 19 nt, Artificial Sequence
  Description of Artificial Sequence: Synthetic oligonucleotide
  modified_base (12)..(12): a, c, u, g, unknown or other
ggugaguguugnuucccca

SEQ ID NO: 1781887 - RNA, 19 nt, Artificial Sequence
  Description of Artificial Sequence: Synthetic oligonucleotide
ugauggaaacacggauuuu

SEQ ID NO: 1781888 - RNA, 19 nt, Artificial Sequence
  Description of Artificial Sequence: Synthetic oligonucleotide
cagaggacugauggaaaca

SEQ ID NO: 1781889 - RNA, 19 nt, Artificial Sequence
  Description of Artificial Sequence: Synthetic oligonucleotide
cgaagcaucgggacuggag

SEQ ID NO: 1781890 - RNA, 19 nt, Artificial Sequence
  Description of Artificial Sequence: Synthetic oligonucleotide
uucugaccacuugaacuuu

SEQ ID NO: 1781891 - RNA, 19 nt, Artificial Sequence
  Description of Artificial Sequence: Synthetic oligonucleotide
gggaggauucuuuuccucu

SEQ ID NO: 1781892 - RNA, 19 nt, Artificial Sequence
  Description of Artificial Sequence: Synthetic oligonucleotide
ccuugcaaggugaguguug

SEQ ID NO: 1781893 - RNA, 19 nt, Artificial Sequence
  Description of Artificial Sequence: Synthetic oligonucleotide
gcuaacauccaagcuggga

SEQ ID NO: 1781894 - RNA, 19 nt, Artificial Sequence
  Description of Artificial Sequence: Synthetic oligonucleotide
gucaccaguuucaccuuca

SEQ ID NO: 1781895 - RNA, 19 nt, Artificial Sequence
  Description of Artificial Sequence: Synthetic oligonucleotide
caagggcaguaaaugaaau

SEQ ID NO: 1781896 - RNA, 19 nt, Artificial Sequence
  Description of Artificial Sequence: Synthetic oligonucleotide
  modified_base (18)..(18): a, c, u, g, unknown or other
uugcaaggugaguguugnu

SEQ ID NO: 1781897 - RNA, 19 nt, Artificial Sequence
  Description of Artificial Sequence: Synthetic oligonucleotide
cacggauuuuguauggauu

SEQ ID NO: 1781898 - RNA, 19 nt, Artificial Sequence
  Description of Artificial Sequence: Synthetic oligonucleotide
guugucuuaucagguaaau

SEQ ID NO: 1781899 - RNA, 19 nt, Artificial Sequence
  Description of Artificial Sequence: Synthetic oligonucleotide
cuaaugcauuagaggaagu

SEQ ID NO: 1781900 - RNA, 19 nt, Artificial Sequence
  Description of Artificial Sequence: Synthetic oligonucleotide
agcuggacuuaggauggaa

SEQ ID NO: 1781901 - RNA, 19 nt, Artificial Sequence
  Description of Artificial Sequence: Synthetic oligonucleotide
uacguuuacugggguuuua

SEQ ID NO: 1781902 - RNA, 19 nt, Artificial Sequence
  Description of Artificial Sequence: Synthetic oligonucleotide
ggauuuuguauggauuggu

SEQ ID NO: 1781903 - RNA, 19 nt, Artificial Sequence
  Description of Artificial Sequence: Synthetic oligonucleotide
cacggaaagaguacuuguu

SEQ ID NO: 1781904 - RNA, 19 nt, Artificial Sequence
  Description of Artificial Sequence: Synthetic oligonucleotide
ggguuuuaucuuugcaggu

SEQ ID NO: 1781905 - RNA, 19 nt, Artificial Sequence
  Description of Artificial Sequence: Synthetic oligonucleotide
cugaccacuugaacuuucu

SEQ ID NO: 1781906 - RNA, 19 nt, Artificial Sequence
  Description of Artificial Sequence: Synthetic oligonucleotide
ggcucuauggcaguacacu

SEQ ID NO: 1781907 - RNA, 19 nt, Artificial Sequence
  Description of Artificial Sequence: Synthetic oligonucleotide
ggacuuaggauggaauccu

SEQ ID NO: 1781908 - RNA, 19 nt, Artificial Sequence
  Description of Artificial Sequence: Synthetic oligonucleotide
gugaugucucaagcaguga

SEQ ID NO: 1781909 - RNA, 19 nt, Artificial Sequence
  Description of Artificial Sequence: Synthetic oligonucleotide
gccuugguuauuucggggu

SEQ ID NO: 1781910 - RNA, 19 nt, Artificial Sequence
  Description of Artificial Sequence: Synthetic oligonucleotide
gcaucgggacuggagggag

SEQ ID NO: 1781911 - RNA, 19 nt, Artificial Sequence
  Description of Artificial Sequence: Synthetic oligonucleotide
cuguuccguaaaguaacaa

SEQ ID NO: 1781912 - RNA, 19 nt, Artificial Sequence
  Description of Artificial Sequence: Synthetic oligonucleotide
guguuacguuuacuggggu

SEQ ID NO: 1781913 - RNA, 19 nt, Artificial Sequence
  Description of Artificial Sequence: Synthetic oligonucleotide
gcauuagaggaagugcacu

SEQ ID NO: 1781914 - RNA, 19 nt, Artificial Sequence
  Description of Artificial Sequence: Synthetic oligonucleotide
cugugucacuuaaugugau

SEQ ID NO: 1781915 - RNA, 19 nt, Artificial Sequence
  Description of Artificial Sequence: Synthetic oligonucleotide
cguuuacugggguuuuauc

SEQ ID NO: 1781916 - RNA, 19 nt, Artificial Sequence
  Description of Artificial Sequence: Synthetic oligonucleotide
gcaucucacucaauacauc

SEQ ID NO: 1781917 - RNA, 19 nt, Artificial Sequence
  Description of Artificial Sequence: Synthetic oligonucleotide
gcugacuuacuguccaaau

SEQ ID NO: 1781918 - RNA, 19 nt, Artificial Sequence
  Description of Artificial Sequence: Synthetic oligonucleotide
cauuggcaagagcuugacu

SEQ ID NO: 1781919 - RNA, 19 nt, Artificial Sequence
  Description of Artificial Sequence: Synthetic oligonucleotide
ccuguagcaguuagcccca

SEQ ID NO: 1781920 - RNA, 19 nt, Artificial Sequence
  Description of Artificial Sequence: Synthetic oligonucleotide
uagggacacucaggccugu

SEQ ID NO: 1781921 - RNA, 19 nt, Artificial Sequence
  Description of Artificial Sequence: Synthetic oligonucleotide
gcauugcucgguucauuua

SEQ ID NO: 1781922 - RNA, 19 nt, Artificial Sequence
  Description of Artificial Sequence: Synthetic oligonucleotide
gggcucuauggcaguacac

SEQ ID NO: 1781923 - RNA, 19 nt, Artificial Sequence
  Description of Artificial Sequence: Synthetic oligonucleotide
gcagugacuuagaccucac

SEQ ID NO: 1781924 - RNA, 19 nt, Artificial Sequence
  Description of Artificial Sequence: Synthetic oligonucleotide
ccucuauuggaacugcauu

SEQ ID NO: 1781925 - RNA, 19 nt, Artificial Sequence
  Description of Artificial Sequence: Synthetic oligonucleotide
caugggcucuauggcagua

SEQ ID NO: 1781926 - RNA, 19 nt, Artificial Sequence
  Description of Artificial Sequence: Synthetic oligonucleotide
gcuggacuuaggauggaau

SEQ ID NO: 1781927 - RNA, 19 nt, Artificial Sequence
  Description of Artificial Sequence: Synthetic oligonucleotide
cccauacaugcaggacacc

SEQ ID NO: 1781928 - RNA, 19 nt, Artificial Sequence
  Description of Artificial Sequence: Synthetic oligonucleotide
gguuugauucgaagcugau

SEQ ID NO: 1781929 - RNA, 19 nt, Artificial Sequence
  Description of Artificial Sequence: Synthetic oligonucleotide
ggauccuguucugcugacu

SEQ ID NO: 1781930 - RNA, 19 nt, Artificial Sequence
  Description of Artificial Sequence: Synthetic oligonucleotide
gaugccccauagggacacu

SEQ ID NO: 1781931 - RNA, 19 nt, Artificial Sequence
  Description of Artificial Sequence: Synthetic oligonucleotide
cugcauugcucgguucauu

SEQ ID NO: 1781932 - RNA, 19 nt, Artificial Sequence
  Description of Artificial Sequence: Synthetic oligonucleotide
gcgaagcaucgggacugga

SEQ ID NO: 1781933 - RNA, 19 nt, Artificial Sequence
  Description of Artificial Sequence: Synthetic oligonucleotide
aauagaagcacacccuucc

SEQ ID NO: 1781934 - RNA, 19 nt, Artificial Sequence
  Description of Artificial Sequence: Synthetic oligonucleotide
uccuauacagccaaggucg

SEQ ID NO: 1781935 - RNA, 19 nt, Artificial Sequence
  Description of Artificial Sequence: Synthetic oligonucleotide
aguauucuccuauacagcc

SEQ ID NO: 1781936 - RNA, 19 nt, Artificial Sequence
  Description of Artificial Sequence: Synthetic oligonucleotide
aaguacuccaguaacaacc

SEQ ID NO: 1781937 - RNA, 19 nt, Artificial Sequence
  Description of Artificial Sequence: Synthetic oligonucleotide
aagaaaauucccuugggcu

SEQ ID NO: 1781938 - RNA, 19 nt, Artificial Sequence
  Description of Artificial Sequence: Synthetic oligonucleotide
gacaguaucagguucaaug

SEQ ID NO: 1781939 - RNA, 19 nt, Artificial Sequence
  Description of Artificial Sequence: Synthetic oligonucleotide
agcaacgaugaucacaucc

SEQ ID NO: 1781940 - RNA, 19 nt, Artificial Sequence
  Description of Artificial Sequence: Synthetic oligonucleotide
aguaacaaccuccugcagc

SEQ ID NO: 1781941 - RNA, 19 nt, Artificial Sequence
  Description of Artificial Sequence: Synthetic oligonucleotide
uccacuuucggcaaagagg

SEQ ID NO: 1781942 - RNA, 19 nt, Artificial Sequence
  Description of Artificial Sequence: Synthetic oligonucleotide
guaguauucuccuauacag

SEQ ID NO: 1781943 - RNA, 19 nt, Artificial Sequence
  Description of Artificial Sequence: Synthetic oligonucleotide
uguacaucuuuccagaccu

SEQ ID NO: 1781944 - RNA, 19 nt, Artificial Sequence
  Description of Artificial Sequence: Synthetic oligonucleotide
auauuuuggacuugguuuc

SEQ ID NO: 1781945 - RNA, 19 nt, Artificial Sequence
  Description of Artificial Sequence: Synthetic oligonucleotide
ugugauaacgcucugggaa

SEQ ID NO: 1781946 - RNA, 19 nt, Artificial Sequence
  Description of Artificial Sequence: Synthetic oligonucleotide
uaugauuauaaaaucuccu

SEQ ID NO: 1781947 - RNA, 19 nt, Artificial Sequence
  Description of Artificial Sequence: Synthetic oligonucleotide
uccaguaacaaccuccugc

SEQ ID NO: 1781948 - RNA, 19 nt, Artificial Sequence
  Description of Artificial Sequence: Synthetic oligonucleotide
ugcaaauacagguugcucc

SEQ ID NO: 1781949 - RNA, 19 nt, Artificial Sequence
  Description of Artificial Sequence: Synthetic oligonucleotide
ugggaauagaagcacaccc

SEQ ID NO: 1781950 - RNA, 19 nt, Artificial Sequence
  Description of Artificial Sequence: Synthetic oligonucleotide
cuaugauuauaaaaucucc

SEQ ID NO: 1781951 - RNA, 19 nt, Artificial Sequence
  Description of Artificial Sequence: Synthetic oligonucleotide
uucacuugggcauugggag

SEQ ID NO: 1781952 - RNA, 19 nt, Artificial Sequence
  Description of Artificial Sequence: Synthetic oligonucleotide
aauccaauuggaaucuuac

SEQ ID NO: 1781953 - RNA, 19 nt, Artificial Sequence
  Description of Artificial Sequence: Synthetic oligonucleotide
gugauagacagcucaaugg

SEQ ID NO: 1781954 - RNA, 19 nt, Artificial Sequence
  Description of Artificial Sequence: Synthetic oligonucleotide
ucauaaucugucuugacaa

SEQ ID NO: 1781955 - RNA, 19 nt, Artificial Sequence
  Description of Artificial Sequence: Synthetic oligonucleotide
guaacaaccuccugcagcg

SEQ ID NO: 1781956 - RNA, 19 nt, Artificial Sequence
  Description of Artificial Sequence: Synthetic oligonucleotide
ucugcaagacgucaagcgg

SEQ ID NO: 1781957 - RNA, 19 nt, Artificial Sequence
  Description of Artificial Sequence: Synthetic oligonucleotide
ugaaggagcccucaguucc

SEQ ID NO: 1781958 - RNA, 19 nt, Artificial Sequence
  Description of Artificial Sequence: Synthetic oligonucleotide
uccuaugauuauaaaaucu

SEQ ID NO: 1781959 - RNA, 19 nt, Artificial Sequence
  Description of Artificial Sequence: Synthetic oligonucleotide
ucaaauagaguucuggcuu

SEQ ID NO: 1781960 - RNA, 19 nt, Artificial Sequence
  Description of Artificial Sequence: Synthetic oligonucleotide
ugugauauuuuggacuugg

SEQ ID NO: 1781961 - RNA, 19 nt, Artificial Sequence
  Description of Artificial Sequence: Synthetic oligonucleotide
uguucuucgaaguacucca

SEQ ID NO: 1781962 - RNA, 19 nt, Artificial Sequence
  Description of Artificial Sequence: Synthetic oligonucleotide
caaacuacuggucuguccc

SEQ ID NO: 1781963 - RNA, 19 nt, Artificial Sequence
  Description of Artificial Sequence: Synthetic oligonucleotide
ugauagacagcucaauggu

SEQ ID NO: 1781964 - RNA, 19 nt, Artificial Sequence
  Description of Artificial Sequence: Synthetic oligonucleotide
acgcucugggaauagaagc

SEQ ID NO: 1781965 - RNA, 19 nt, Artificial Sequence
  Description of Artificial Sequence: Synthetic oligonucleotide
gauagguguaaaauugggg

SEQ ID NO: 1781966 - RNA, 19 nt, Artificial Sequence
  Description of Artificial Sequence: Synthetic oligonucleotide
aaggauccccaucggaggc

SEQ ID NO: 1781967 - RNA, 19 nt, Artificial Sequence
  Description of Artificial Sequence: Synthetic oligonucleotide
aucugcaagacgucaagcg

SEQ ID NO: 1781968 - RNA, 19 nt, Artificial Sequence
  Description of Artificial Sequence: Synthetic oligonucleotide
uacagguugcuccuuuucg

SEQ ID NO: 1781969 - RNA, 19 nt, Artificial Sequence
  Description of Artificial Sequence: Synthetic oligonucleotide
agagauggaggccugauga

SEQ ID NO: 1781970 - RNA, 19 nt, Artificial Sequence
  Description of Artificial Sequence: Synthetic oligonucleotide
gcaggauugagaaagaccg

SEQ ID NO: 1781971 - RNA, 19 nt, Artificial Sequence
  Description of Artificial Sequence: Synthetic oligonucleotide
ucgcugucgaugcugaagg

SEQ ID NO: 1781972 - RNA, 19 nt, Artificial Sequence
  Description of Artificial Sequence: Synthetic oligonucleotide
gauauuuuggacuugguuu

SEQ ID NO: 1781973 - RNA, 19 nt, Artificial Sequence
  Description of Artificial Sequence: Synthetic oligonucleotide
ugcaggauugagaaagacc

SEQ ID NO: 1781974 - RNA, 19 nt, Artificial Sequence
  Description of Artificial Sequence: Synthetic oligonucleotide
agcgggauaaauccaauug

SEQ ID NO: 1781975 - RNA, 19 nt, Artificial Sequence
  Description of Artificial Sequence: Synthetic oligonucleotide
cuugguuuccacuuucggc

SEQ ID NO: 1781976 - RNA, 19 nt, Artificial Sequence
  Description of Artificial Sequence: Synthetic oligonucleotide
uuucacuugggcauuggga

SEQ ID NO: 1781977 - RNA, 19 nt, Artificial Sequence
  Description of Artificial Sequence: Synthetic oligonucleotide
uucgaaguacuccaguaac

SEQ ID NO: 1781978 - RNA, 19 nt, Artificial Sequence
  Description of Artificial Sequence: Synthetic oligonucleotide
auagacagcucaauggugg

SEQ ID NO: 1781979 - RNA, 19 nt, Artificial Sequence
  Description of Artificial Sequence: Synthetic oligonucleotide
caagaaaauucccuugggc

SEQ ID NO: 1781980 - RNA, 19 nt, Artificial Sequence
  Description of Artificial Sequence: Synthetic oligonucleotide
gacaguuguacaucuuucc

SEQ ID NO: 1781981 - RNA, 19 nt, Artificial Sequence
  Description of Artificial Sequence: Synthetic oligonucleotide
aacaaccuccugcagcguc

SEQ ID NO: 1781982 - RNA, 19 nt, Artificial Sequence
  Description of Artificial Sequence: Synthetic oligonucleotide
uuuaggucccguguaagag

SEQ ID NO: 1781983 - RNA, 19 nt, Artificial Sequence
  Description of Artificial Sequence: Synthetic oligonucleotide
ucaaguuggcuguuucggg

SEQ ID NO: 1781984 - RNA, 19 nt, Artificial Sequence
  Description of Artificial Sequence: Synthetic oligonucleotide
uuguacaucuuuccagacc

SEQ ID NO: 1781985 - RNA, 19 nt, Artificial Sequence
  Description of Artificial Sequence: Synthetic oligonucleotide
uacuugcuaacguucacgc

SEQ ID NO: 1781986 - RNA, 19 nt, Artificial Sequence
  Description of Artificial Sequence: Synthetic oligonucleotide
uaaaauuggggcagcauuu

SEQ ID NO: 1781987 - RNA, 19 nt, Artificial Sequence
  Description of Artificial Sequence: Synthetic oligonucleotide
uaguauucuccuauacagc

SEQ ID NO: 1781988 - RNA, 19 nt, Artificial Sequence
  Description of Artificial Sequence: Synthetic oligonucleotide
cagauagguguaaaauugg

SEQ ID NO: 1781989 - RNA, 19 nt, Artificial Sequence
  Description of Artificial Sequence: Synthetic oligonucleotide
gauaccaguacuugcuaac

SEQ ID NO: 1781990 - RNA, 19 nt, Artificial Sequence
  Description of Artificial Sequence: Synthetic oligonucleotide
uuuaccuuugcaagcugca

SEQ ID NO: 1781991 - RNA, 19 nt, Artificial Sequence
  Description of Artificial Sequence: Synthetic oligonucleotide
ugaagguagccucaucugu

SEQ ID NO: 1781992 - RNA, 19 nt, Artificial Sequence
  Description of Artificial Sequence: Synthetic oligonucleotide
ucuuacugaagguagccuc

SEQ ID NO: 1781993 - RNA, 19 nt, Artificial Sequence
  Description of Artificial Sequence: Synthetic oligonucleotide
ugauauuuuggacuugguu

SEQ ID NO: 1781994 - RNA, 19 nt, Artificial Sequence
  Description of Artificial Sequence: Synthetic oligonucleotide
uagguguaaaauuggggca

SEQ ID NO: 1781995 - RNA, 19 nt, Artificial Sequence
  Description of Artificial Sequence: Synthetic oligonucleotide
uugacaacagucacaucca

SEQ ID NO: 1781996 - RNA, 19 nt, Artificial Sequence
  Description of Artificial Sequence: Synthetic oligonucleotide
uccguguuguccaucaacu

SEQ ID NO: 1781997 - RNA, 19 nt, Artificial Sequence
  Description of Artificial Sequence: Synthetic oligonucleotide
uuacuuccuaugauuauaa

SEQ ID NO: 1781998 - RNA, 19 nt, Artificial Sequence
  Description of Artificial Sequence: Synthetic oligonucleotide
cugcaagacgucaagcggg

SEQ ID NO: 1781999 - RNA, 19 nt, Artificial Sequence
  Description of Artificial Sequence: Synthetic oligonucleotide
cuugcuaacguucacgcca

SEQ ID NO: 1782000 - RNA, 19 nt, Artificial Sequence
  Description of Artificial Sequence: Synthetic oligonucleotide
cuuuaccuuugcaagcugc

SEQ ID NO: 1782001 - RNA, 19 nt, Artificial Sequence
  Description of Artificial Sequence: Synthetic oligonucleotide
ccacuuucggcaaagaggg

SEQ ID NO: 1782002 - RNA, 19 nt, Artificial Sequence
  Description of Artificial Sequence: Synthetic oligonucleotide
ugaucugcaagacgucaag

SEQ ID NO: 1782003 - RNA, 19 nt, Artificial Sequence
  Description of Artificial Sequence: Synthetic oligonucleotide
uggaccaagauaccaguac

SEQ ID NO: 1782004 - RNA, 19 nt, Artificial Sequence
  Description of Artificial Sequence: Synthetic oligonucleotide
uuccacuuucggcaaagag

SEQ ID NO: 1782005 - RNA, 19 nt, Artificial Sequence
  Description of Artificial Sequence: Synthetic oligonucleotide
aguucccucaggaaguagc

SEQ ID NO: 1782006 - RNA, 19 nt, Artificial Sequence
  Description of Artificial Sequence: Synthetic oligonucleotide
uucuccuauacagccaagg

SEQ ID NO: 1782007 - RNA, 19 nt, Artificial Sequence
  Description of Artificial Sequence: Synthetic oligonucleotide
acgccagcaucucugaagg

SEQ ID NO: 1782008 - RNA, 19 nt, Artificial Sequence
  Description of Artificial Sequence: Synthetic oligonucleotide
aguacuugcuaacguucac

SEQ ID NO: 1782009 - RNA, 19 nt, Artificial Sequence
  Description of Artificial Sequence: Synthetic oligonucleotide
gaaaauucccuugggcucc

SEQ ID NO: 1782010 - RNA, 19 nt, Artificial Sequence
  Description of Artificial Sequence: Synthetic oligonucleotide
cugucgaugcugaaggagc

SEQ ID NO: 1782011 - RNA, 19 nt, Artificial Sequence
  Description of Artificial Sequence: Synthetic oligonucleotide
aauagaguucuggcuuuac

SEQ ID NO: 1782012 - RNA, 19 nt, Artificial Sequence
  Description of Artificial Sequence: Synthetic oligonucleotide
auccguguuguccaucaac

SEQ ID NO: 1782013 - RNA, 19 nt, Artificial Sequence
  Description of Artificial Sequence: Synthetic oligonucleotide
acuugcuaacguucacgcc

SEQ ID NO: 1782014 - RNA, 19 nt, Artificial Sequence
  Description of Artificial Sequence: Synthetic oligonucleotide
caguuguacaucuuuccag

SEQ ID NO: 1782015 - RNA, 19 nt, Artificial Sequence
  Description of Artificial Sequence: Synthetic oligonucleotide
cauugcaaauacagguugc

SEQ ID NO: 1782016 - RNA, 19 nt, Artificial Sequence
  Description of Artificial Sequence: Synthetic oligonucleotide
uuuaguggaccaagauacc

SEQ ID NO: 1782017 - RNA, 19 nt, Artificial Sequence
  Description of Artificial Sequence: Synthetic oligonucleotide
ucaaacuacuggucugucc

SEQ ID NO: 1782018 - RNA, 19 nt, Artificial Sequence
  Description of Artificial Sequence: Synthetic oligonucleotide
ucuccuauacagccaaggu

SEQ ID NO: 1782019 - RNA, 19 nt, Artificial Sequence
  Description of Artificial Sequence: Synthetic oligonucleotide
agauagguguaaaauuggg

SEQ ID NO: 1782020 - RNA, 19 nt, Artificial Sequence
  Description of Artificial Sequence: Synthetic oligonucleotide
uggcuugucccucauaauc

SEQ ID NO: 1782021 - RNA, 19 nt, Artificial Sequence
  Description of Artificial Sequence: Synthetic oligonucleotide
ucgaaguacuccaguaaca

SEQ ID NO: 1782022 - RNA, 19 nt, Artificial Sequence
  Description of Artificial Sequence: Synthetic oligonucleotide
uucggguucacuagcagau

SEQ ID NO: 1782023 - RNA, 19 nt, Artificial Sequence
  Description of Artificial Sequence: Synthetic oligonucleotide
gugugacucaaacuacugg

SEQ ID NO: 1782024 - RNA, 19 nt, Artificial Sequence
  Description of Artificial Sequence: Synthetic oligonucleotide
ucugaaggauccccaucgg

SEQ ID NO: 1782025 - RNA, 19 nt, Artificial Sequence
  Description of Artificial Sequence: Synthetic oligonucleotide
gucccagcgggauaaaucc

SEQ ID NO: 1782026 - RNA, 19 nt, Artificial Sequence
  Description of Artificial Sequence: Synthetic oligonucleotide
uuaguggaccaagauacca

SEQ ID NO: 1782027 - RNA, 19 nt, Artificial Sequence
  Description of Artificial Sequence: Synthetic oligonucleotide
ggccugaugagucugaggc

SEQ ID NO: 1782028 - RNA, 19 nt, Artificial Sequence
  Description of Artificial Sequence: Synthetic oligonucleotide
ucggaggccagucauugca

SEQ ID NO: 1782029 - RNA, 19 nt, Artificial Sequence
  Description of Artificial Sequence: Synthetic oligonucleotide
ccagauagguguaaaauug

SEQ ID NO: 1782030 - RNA, 19 nt, Artificial Sequence
  Description of Artificial Sequence: Synthetic oligonucleotide
ugucgaugcugaaggagcc

SEQ ID NO: 1782031 - RNA, 19 nt, Artificial Sequence
  Description of Artificial Sequence: Synthetic oligonucleotide
ucauacuccucgcugucga

SEQ ID NO: 1782032 - RNA, 19 nt, Artificial Sequence
  Description of Artificial Sequence: Synthetic oligonucleotide
agguugcuccuuuucgccc

SEQ ID NO: 1782033 - RNA, 19 nt, Artificial Sequence
  Description of Artificial Sequence: Synthetic oligonucleotide
cucauaaucugucuugaca

SEQ ID NO: 1782034 - RNA, 19 nt, Artificial Sequence
  Description of Artificial Sequence: Synthetic oligonucleotide
ccuaugauuauaaaaucuc

SEQ ID NO: 1782035 - RNA, 19 nt, Artificial Sequence
  Description of Artificial Sequence: Synthetic oligonucleotide
ggaaucuuacugaagguag

SEQ ID NO: 1782036 - RNA, 19 nt, Artificial Sequence
  Description of Artificial Sequence: Synthetic oligonucleotide
auaaucugucuugacaaca

SEQ ID NO: 1782037 - RNA, 19 nt, Artificial Sequence
  Description of Artificial Sequence: Synthetic oligonucleotide
auaccaguacuugcuaacg

SEQ ID NO: 1782038 - RNA, 19 nt, Artificial Sequence
  Description of Artificial Sequence: Synthetic oligonucleotide
uugcuaacguucacgccag

SEQ ID NO: 1782039 - RNA, 19 nt, Artificial Sequence
  Description of Artificial Sequence: Synthetic oligonucleotide
acuuucggcaaagagggug

SEQ ID NO: 1782040 - RNA, 19 nt, Artificial Sequence
  Description of Artificial Sequence: Synthetic oligonucleotide
uaacguucacgccagcauc

SEQ ID NO: 1782041 - RNA, 19 nt, Artificial Sequence
  Description of Artificial Sequence: Synthetic oligonucleotide
uuaggucccguguaagaga

SEQ ID NO: 1782042 - RNA, 19 nt, Artificial Sequence
  Description of Artificial Sequence: Synthetic oligonucleotide
uagaagcacacccuucccu

SEQ ID NO: 1782043 - RNA, 19 nt, Artificial Sequence
  Description of Artificial Sequence: Synthetic oligonucleotide
ucccguguaagagauggag

SEQ ID NO: 1782044 - RNA, 19 nt, Artificial Sequence
  Description of Artificial Sequence: Synthetic oligonucleotide
aggauugagaaagaccgug

SEQ ID NO: 1782045 - RNA, 19 nt, Artificial Sequence
  Description of Artificial Sequence: Synthetic oligonucleotide
ucguaguauucuccuauac

SEQ ID NO: 1782046 - RNA, 19 nt, Artificial Sequence
  Description of Artificial Sequence: Synthetic oligonucleotide
guacuugcuaacguucacg

SEQ ID NO: 1782047 - RNA, 19 nt, Artificial Sequence
  Description of Artificial Sequence: Synthetic oligonucleotide
uuagggucucucaucuucu

SEQ ID NO: 1782048 - RNA, 19 nt, Artificial Sequence
  Description of Artificial Sequence: Synthetic oligonucleotide
ucuucgaaguacuccagua

SEQ ID NO: 1782049 - RNA, 19 nt, Artificial Sequence
  Description of Artificial Sequence: Synthetic oligonucleotide
gcgggauaaauccaauugg

SEQ ID NO: 1782050 - RNA, 19 nt, Artificial Sequence
  Description of Artificial Sequence: Synthetic oligonucleotide
agguguaaaauuggggcag

SEQ ID NO: 1782051 - RNA, 19 nt, Artificial Sequence
  Description of Artificial Sequence: Synthetic oligonucleotide
gauagacagcucaauggug

SEQ ID NO: 1782052 - RNA, 19 nt, Artificial Sequence
  Description of Artificial Sequence: Synthetic oligonucleotide
gaaucuuacugaagguagc

SEQ ID NO: 1782053 - RNA, 19 nt, Artificial Sequence
  Description of Artificial Sequence: Synthetic oligonucleotide
aguggaccaagauaccagu

SEQ ID NO: 1782054 - RNA, 19 nt, Artificial Sequence
  Description of Artificial Sequence: Synthetic oligonucleotide
acuacuggucugucccagc

SEQ ID NO: 1782055 - RNA, 19 nt, Artificial Sequence
  Description of Artificial Sequence: Synthetic oligonucleotide
aacgcucugggaauagaag

SEQ ID NO: 1782056 - RNA, 19 nt, Artificial Sequence
  Description of Artificial Sequence: Synthetic oligonucleotide
uaacgcucugggaauagaa

SEQ ID NO: 1782057 - RNA, 19 nt, Artificial Sequence
  Description of Artificial Sequence: Synthetic oligonucleotide
uccagcaacgaugaucaca

SEQ ID NO: 1782058 - RNA, 19 nt, Artificial Sequence
  Description of Artificial Sequence: Synthetic oligonucleotide
cuccuauacagccaagguc

SEQ ID NO: 1782059 - RNA, 19 nt, Artificial Sequence
  Description of Artificial Sequence: Synthetic oligonucleotide
ugucccagcgggauaaauc

SEQ ID NO: 1782060 - RNA, 19 nt, Artificial Sequence
  Description of Artificial Sequence: Synthetic oligonucleotide
cuacuggucugucccagcg

SEQ ID NO: 1782061 - RNA, 19 nt, Artificial Sequence
  Description of Artificial Sequence: Synthetic oligonucleotide
aggucaaguuggcuguuuc

SEQ ID NO: 1782062 - RNA, 19 nt, Artificial Sequence
  Description of Artificial Sequence: Synthetic oligonucleotide
gguugugauagacagcuca

SEQ ID NO: 1782063 - RNA, 19 nt, Artificial Sequence
  Description of Artificial Sequence: Synthetic oligonucleotide
cuagcagaucuuucuuuag

SEQ ID NO: 1782064 - RNA, 19 nt, Artificial Sequence
  Description of Artificial Sequence: Synthetic oligonucleotide
uugaucugcaagacgucaa

SEQ ID NO: 1782065 - RNA, 19 nt, Artificial Sequence
  Description of Artificial Sequence: Synthetic oligonucleotide
ucuuuaggucccguguaag

SEQ ID NO: 1782066 - RNA, 19 nt, Artificial Sequence
  Description of Artificial Sequence: Synthetic oligonucleotide
caucugugauauuuuggac

SEQ ID NO: 1782067 - RNA, 19 nt, Artificial Sequence
  Description of Artificial Sequence: Synthetic oligonucleotide
ucgcccuugaucugcaaga

SEQ ID NO: 1782068 - RNA, 19 nt, Artificial Sequence
  Description of Artificial Sequence: Synthetic oligonucleotide
accauguugccaugagcuc

SEQ ID NO: 1782069 - RNA, 19 nt, Artificial Sequence
  Description of Artificial Sequence: Synthetic oligonucleotide
aagauaccaguacuugcua

SEQ ID NO: 1782070 - RNA, 19 nt, Artificial Sequence
  Description of Artificial Sequence: Synthetic oligonucleotide
aaacuacuggucuguccca

SEQ ID NO: 1782071 - RNA, 19 nt, Artificial Sequence
  Description of Artificial Sequence: Synthetic oligonucleotide
uucuuuaggucccguguaa

SEQ ID NO: 1782072 - RNA, 19 nt, Artificial Sequence
  Description of Artificial Sequence: Synthetic oligonucleotide
aauacagguugcuccuuuu

SEQ ID NO: 1782073 - RNA, 19 nt, Artificial Sequence
  Description of Artificial Sequence: Synthetic oligonucleotide
gcaacgaugaucacauccg

SEQ ID NO: 1782074 - RNA, 19 nt, Artificial Sequence
  Description of Artificial Sequence: Synthetic oligonucleotide
auccaauuggaaucuuacu

SEQ ID NO: 1782075 - RNA, 19 nt, Artificial Sequence
  Description of Artificial Sequence: Synthetic oligonucleotide
uuuuggacuugguuuccac

SEQ ID NO: 1782076 - RNA, 19 nt, Artificial Sequence
  Description of Artificial Sequence: Synthetic oligonucleotide
agaagaacugcaguuuccu

SEQ ID NO: 1782077 - RNA, 19 nt, Artificial Sequence
  Description of Artificial Sequence: Synthetic oligonucleotide
ugcaagacgucaagcggga

SEQ ID NO: 1782078 - RNA, 19 nt, Artificial Sequence
  Description of Artificial Sequence: Synthetic oligonucleotide
cuguuucggguugugauag

SEQ ID NO: 1782079 - RNA, 19 nt, Artificial Sequence
  Description of Artificial Sequence: Synthetic oligonucleotide
accaagauaccaguacuug

SEQ ID NO: 1782080 - RNA, 19 nt, Artificial Sequence
  Description of Artificial Sequence: Synthetic oligonucleotide
uccugugauaacgcucugg

SEQ ID NO: 1782081 - RNA, 19 nt, Artificial Sequence
  Description of Artificial Sequence: Synthetic oligonucleotide
aacuacuggucugucccag

SEQ ID NO: 1782082 - RNA, 19 nt, Artificial Sequence
  Description of Artificial Sequence: Synthetic oligonucleotide
uugggcauugggaggaauc

SEQ ID NO: 1782083 - RNA, 19 nt, Artificial Sequence
  Description of Artificial Sequence: Synthetic oligonucleotide
uuaccuuugcaagcugcag

SEQ ID NO: 1782084 - RNA, 19 nt, Artificial Sequence
  Description of Artificial Sequence: Synthetic oligonucleotide
cugaagguagccucaucug

SEQ ID NO: 1782085 - RNA, 19 nt, Artificial Sequence
  Description of Artificial Sequence: Synthetic oligonucleotide
cugcucucagguuaggguc

SEQ ID NO: 1782086 - RNA, 19 nt, Artificial Sequence
  Description of Artificial Sequence: Synthetic oligonucleotide
uaggucccguguaagagau

SEQ ID NO: 1782087 - RNA, 19 nt, Artificial Sequence
  Description of Artificial Sequence: Synthetic oligonucleotide
cuuuucgcccuugaucugc

SEQ ID NO: 1782088 - RNA, 19 nt, Artificial Sequence
  Description of Artificial Sequence: Synthetic oligonucleotide
ccguguaagagauggaggc

SEQ ID NO: 1782089 - RNA, 19 nt, Artificial Sequence
  Description of Artificial Sequence: Synthetic oligonucleotide
cagcaucucugaaggaucc

SEQ ID NO: 1782090 - RNA, 19 nt, Artificial Sequence
  Description of Artificial Sequence: Synthetic oligonucleotide
accaucugcucucagguua

SEQ ID NO: 1782091 - RNA, 19 nt, Artificial Sequence
  Description of Artificial Sequence: Synthetic oligonucleotide
ugccagauagguguaaaau

SEQ ID NO: 1782092 - RNA, 19 nt, Artificial Sequence
  Description of Artificial Sequence: Synthetic oligonucleotide
gguucaaugcaaauguuca

SEQ ID NO: 1782093 - RNA, 19 nt, Artificial Sequence
  Description of Artificial Sequence: Synthetic oligonucleotide
uccuuucacaauggcaagc

SEQ ID NO: 1782094 - RNA, 19 nt, Artificial Sequence
  Description of Artificial Sequence: Synthetic oligonucleotide
gacuugguuuccacuuucg

SEQ ID NO: 1782095 - RNA, 19 nt, Artificial Sequence
  Description of Artificial Sequence: Synthetic oligonucleotide
gauaacgcucugggaauag

SEQ ID NO: 1782096 - RNA, 19 nt, Artificial Sequence
  Description of Artificial Sequence: Synthetic oligonucleotide
augguggacaguuguacau

SEQ ID NO: 1782097 - RNA, 19 nt, Artificial Sequence
  Description of Artificial Sequence: Synthetic oligonucleotide
cuugccaagaaaauucccu

SEQ ID NO: 1782098 - RNA, 19 nt, Artificial Sequence
  Description of Artificial Sequence: Synthetic oligonucleotide
ugcucucagguuagggucu

SEQ ID NO: 1782099 - RNA, 19 nt, Artificial Sequence
  Description of Artificial Sequence: Synthetic oligonucleotide
aacguucacgccagcaucu

SEQ ID NO: 1782100 - RNA, 19 nt, Artificial Sequence
  Description of Artificial Sequence: Synthetic oligonucleotide
uguaaaauuggggcagcau

SEQ ID NO: 1782101 - RNA, 19 nt, Artificial Sequence
  Description of Artificial Sequence: Synthetic oligonucleotide
aaguuggcuguuucggguu

SEQ ID NO: 1782102 - RNA, 19 nt, Artificial Sequence
  Description of Artificial Sequence: Synthetic oligonucleotide
aaaauuggggcagcauuuu

SEQ ID NO: 1782103 - RNA, 19 nt, Artificial Sequence
  Description of Artificial Sequence: Synthetic oligonucleotide
cgaucgagcaccauguugc

SEQ ID NO: 1782104 - RNA, 19 nt, Artificial Sequence
  Description of Artificial Sequence: Synthetic oligonucleotide
gacagcucaaugguggaca

SEQ ID NO: 1782105 - RNA, 19 nt, Artificial Sequence
  Description of Artificial Sequence: Synthetic oligonucleotide
caagauaccaguacuugcu

SEQ ID NO: 1782106 - RNA, 19 nt, Artificial Sequence
  Description of Artificial Sequence: Synthetic oligonucleotide
aucggaggccagucauugc

SEQ ID NO: 1782107 - RNA, 19 nt, Artificial Sequence
  Description of Artificial Sequence: Synthetic oligonucleotide
ugucccucauaaucugucu

SEQ ID NO: 1782108 - RNA, 19 nt, Artificial Sequence
  Description of Artificial Sequence: Synthetic oligonucleotide
ucacuagcagaucuuucuu

SEQ ID NO: 1782109 - RNA, 19 nt, Artificial Sequence
  Description of Artificial Sequence: Synthetic oligonucleotide
ggucaaguuggcuguuucg

SEQ ID NO: 1782110 - RNA, 19 nt, Artificial Sequence
  Description of Artificial Sequence: Synthetic oligonucleotide
cucaucaggucaaguuggc

SEQ ID NO: 1782111 - RNA, 19 nt, Artificial Sequence
  Description of Artificial Sequence: Synthetic oligonucleotide
ucucugaaggauccccauc

SEQ ID NO: 1782112 - RNA, 19 nt, Artificial Sequence
  Description of Artificial Sequence: Synthetic oligonucleotide
acccuucccuuuguggucc

SEQ ID NO: 1782113 - RNA, 19 nt, Artificial Sequence
  Description of Artificial Sequence: Synthetic oligonucleotide
ccaagauaccaguacuugc

SEQ ID NO: 1782114 - RNA, 19 nt, Artificial Sequence
  Description of Artificial Sequence: Synthetic oligonucleotide
agccuucguaguauucucc

SEQ ID NO: 1782115 - RNA, 19 nt, Artificial Sequence
  Description of Artificial Sequence: Synthetic oligonucleotide
cagccugcgaucgagcacc

SEQ ID NO: 1782116 - RNA, 19 nt, Artificial Sequence
  Description of Artificial Sequence: Synthetic oligonucleotide
guaaaauuggggcagcauu

SEQ ID NO: 1782117 - RNA, 19 nt, Artificial Sequence
  Description of Artificial Sequence: Synthetic oligonucleotide
cagaaugaggcaagccuuc

SEQ ID NO: 1782118 - RNA, 19 nt, Artificial Sequence
  Description of Artificial Sequence: Synthetic oligonucleotide
aguacuccaguaacaaccu

SEQ ID NO: 1782119 - RNA, 19 nt, Artificial Sequence
  Description of Artificial Sequence: Synthetic oligonucleotide
gaauagaagcacacccuuc

SEQ ID NO: 1782120 - RNA, 19 nt, Artificial Sequence
  Description of Artificial Sequence: Synthetic oligonucleotide
uuuccagaccucugggcuc

SEQ ID NO: 1782121 - RNA, 19 nt, Artificial Sequence
  Description of Artificial Sequence: Synthetic oligonucleotide
agggugugacucaaacuac

SEQ ID NO: 1782122 - RNA, 19 nt, Artificial Sequence
  Description of Artificial Sequence: Synthetic oligonucleotide
cauugggaggaaucagcug

SEQ ID NO: 1782123 - RNA, 19 nt, Artificial Sequence
  Description of Artificial Sequence: Synthetic oligonucleotide
caccauguugccaugagcu

SEQ ID NO: 1782124 - RNA, 19 nt, Artificial Sequence
  Description of Artificial Sequence: Synthetic oligonucleotide
cugggaauagaagcacacc

SEQ ID NO: 1782125 - RNA, 19 nt, Artificial Sequence
  Description of Artificial Sequence: Synthetic oligonucleotide
cuuuaggucccguguaaga

SEQ ID NO: 1782126 - RNA, 19 nt, Artificial Sequence
  Description of Artificial Sequence: Synthetic oligonucleotide
gagugcaguggcuggcuug

SEQ ID NO: 1782127 - RNA, 19 nt, Artificial Sequence
  Description of Artificial Sequence: Synthetic oligonucleotide
aguuggcuguuucggguug

SEQ ID NO: 1782128 - RNA, 19 nt, Artificial Sequence
  Description of Artificial Sequence: Synthetic oligonucleotide
ucggguugugauagacagc

SEQ ID NO: 1782129 - RNA, 19 nt, Artificial Sequence
  Description of Artificial Sequence: Synthetic oligonucleotide
uagcagagugcaguggcug

SEQ ID NO: 1782130 - RNA, 19 nt, Artificial Sequence
  Description of Artificial Sequence: Synthetic oligonucleotide
guucacgccagcaucucug

SEQ ID NO: 1782131 - RNA, 19 nt, Artificial Sequence
  Description of Artificial Sequence: Synthetic oligonucleotide
gggucucucaucuucuuac

SEQ ID NO: 1782132 - RNA, 19 nt, Artificial Sequence
  Description of Artificial Sequence: Synthetic oligonucleotide
agcaucucugaaggauccc

SEQ ID NO: 1782133 - RNA, 19 nt, Artificial Sequence
  Description of Artificial Sequence: Synthetic oligonucleotide
agacagcucaaugguggac

SEQ ID NO: 1782134 - RNA, 19 nt, Artificial Sequence
  Description of Artificial Sequence: Synthetic oligonucleotide
uucguaguauucuccuaua

SEQ ID NO: 1782135 - RNA, 19 nt, Artificial Sequence
  Description of Artificial Sequence: Synthetic oligonucleotide
ugggcucaccucucgggag

SEQ ID NO: 1782136 - RNA, 19 nt, Artificial Sequence
  Description of Artificial Sequence: Synthetic oligonucleotide
cuuuguggucccacuggug

SEQ ID NO: 1782137 - RNA, 19 nt, Artificial Sequence
  Description of Artificial Sequence: Synthetic oligonucleotide
cucgggagaaggcauccug

SEQ ID NO: 1782138 - RNA, 19 nt, Artificial Sequence
  Description of Artificial Sequence: Synthetic oligonucleotide
guaccaucugcucucaggu

SEQ ID NO: 1782139 - RNA, 19 nt, Artificial Sequence
  Description of Artificial Sequence: Synthetic oligonucleotide
aagcguggcaucugugaua

SEQ ID NO: 1782140 - RNA, 19 nt, Artificial Sequence
  Description of Artificial Sequence: Synthetic oligonucleotide
guuucggguugugauagac

SEQ ID NO: 1782141 - RNA, 19 nt, Artificial Sequence
  Description of Artificial Sequence: Synthetic oligonucleotide
uucacgccagcaucucuga

SEQ ID NO: 1782142 - RNA, 19 nt, Artificial Sequence
  Description of Artificial Sequence: Synthetic oligonucleotide
ccaagaaaauucccuuggg

SEQ ID NO: 1782143 - RNA, 19 nt, Artificial Sequence
  Description of Artificial Sequence: Synthetic oligonucleotide
ugccaugagcucacuggga

SEQ ID NO: 1782144 - RNA, 19 nt, Artificial Sequence
  Description of Artificial Sequence: Synthetic oligonucleotide
ccuuucacaauggcaagcg

SEQ ID NO: 1782145 - RNA, 19 nt, Artificial Sequence
  Description of Artificial Sequence: Synthetic oligonucleotide
aagcgggauggucucuccu

SEQ ID NO: 1782146 - RNA, 19 nt, Artificial Sequence
  Description of Artificial Sequence: Synthetic oligonucleotide
agauggaggccugaugagu

SEQ ID NO: 1782147 - RNA, 19 nt, Artificial Sequence
  Description of Artificial Sequence: Synthetic oligonucleotide
cuugaucugcaagacguca

SEQ ID NO: 1782148 - RNA, 19 nt, Artificial Sequence
  Description of Artificial Sequence: Synthetic oligonucleotide
ccuccagcaacgaugauca

SEQ ID NO: 1782149 - RNA, 19 nt, Artificial Sequence
  Description of Artificial Sequence: Synthetic oligonucleotide
cuucggguucacuagcaga

SEQ ID NO: 1782150 - RNA, 19 nt, Artificial Sequence
  Description of Artificial Sequence: Synthetic oligonucleotide
cucgcugucgaugcugaag

SEQ ID NO: 1782151 - RNA, 19 nt, Artificial Sequence
  Description of Artificial Sequence: Synthetic oligonucleotide
aaugggcugcuuugauuuu

SEQ ID NO: 1782152 - RNA, 19 nt, Artificial Sequence
  Description of Artificial Sequence: Synthetic oligonucleotide
agucacauccaugccagau

SEQ ID NO: 1782153 - RNA, 19 nt, Artificial Sequence
  Description of Artificial Sequence: Synthetic oligonucleotide
aucuuacugaagguagccu

SEQ ID NO: 1782154 - RNA, 19 nt, Artificial Sequence
  Description of Artificial Sequence: Synthetic oligonucleotide
caucggaggccagucauug

SEQ ID NO: 1782155 - RNA, 19 nt, Artificial Sequence
  Description of Artificial Sequence: Synthetic oligonucleotide
cuucgaaguacuccaguaa

SEQ ID NO: 1782156 - RNA, 19 nt, Artificial Sequence
  Description of Artificial Sequence: Synthetic oligonucleotide
acgucaagcgggauggucu

SEQ ID NO: 1782157 - RNA, 19 nt, Artificial Sequence
  Description of Artificial Sequence: Synthetic oligonucleotide
cuauacagccaaggucggg

SEQ ID NO: 1782158 - RNA, 19 nt, Artificial Sequence
  Description of Artificial Sequence: Synthetic oligonucleotide
uaagagauggaggccugau

SEQ ID NO: 1782159 - RNA, 19 nt, Artificial Sequence
  Description of Artificial Sequence: Synthetic oligonucleotide
uggacuugguuuccacuuu

SEQ ID NO: 1782160 - RNA, 19 nt, Artificial Sequence
  Description of Artificial Sequence: Synthetic oligonucleotide
ugcaagcugcaggauugag

SEQ ID NO: 1782161 - RNA, 19 nt, Artificial Sequence
  Description of Artificial Sequence: Synthetic oligonucleotide
aaauagaguucuggcuuua

SEQ ID NO: 1782162 - RNA, 19 nt, Artificial Sequence
  Description of Artificial Sequence: Synthetic oligonucleotide
ucccagcgggauaaaucca

SEQ ID NO: 1782163 - RNA, 19 nt, Artificial Sequence
  Description of Artificial Sequence: Synthetic oligonucleotide
uggcaagcguggcaucugu

SEQ ID NO: 1782164 - RNA, 19 nt, Artificial Sequence
  Description of Artificial Sequence: Synthetic oligonucleotide
ggcauugggaggaaucagc

SEQ ID NO: 1782165 - RNA, 19 nt, Artificial Sequence
  Description of Artificial Sequence: Synthetic oligonucleotide
gaugagucugaggccacuc

SEQ ID NO: 1782166 - RNA, 19 nt, Artificial Sequence
  Description of Artificial Sequence: Synthetic oligonucleotide
ugguuuccacuuucggcaa

SEQ ID NO: 1782167 - RNA, 19 nt, Artificial Sequence
  Description of Artificial Sequence: Synthetic oligonucleotide
gaaggagcccucaguuccc

SEQ ID NO: 1782168 - RNA, 19 nt, Artificial Sequence
  Description of Artificial Sequence: Synthetic oligonucleotide
caucucugaaggaucccca

SEQ ID NO: 1782169 - RNA, 19 nt, Artificial Sequence
  Description of Artificial Sequence: Synthetic oligonucleotide
gggaggaaucagcugguug

SEQ ID NO: 1782170 - RNA, 19 nt, Artificial Sequence
  Description of Artificial Sequence: Synthetic oligonucleotide
ugguggacaguuguacauc

SEQ ID NO: 1782171 - RNA, 19 nt, Artificial Sequence
  Description of Artificial Sequence: Synthetic oligonucleotide
auggaggccugaugagucu

SEQ ID NO: 1782172 - RNA, 19 nt, Artificial Sequence
  Description of Artificial Sequence: Synthetic oligonucleotide
cugggacgugcucugcagc

SEQ ID NO: 1782173 - RNA, 19 nt, Artificial Sequence
  Description of Artificial Sequence: Synthetic oligonucleotide
uggaggccugaugagucug

SEQ ID NO: 1782174 - RNA, 19 nt, Artificial Sequence
  Description of Artificial Sequence: Synthetic oligonucleotide
gccaugagcucacugggac

SEQ ID NO: 1782175 - RNA, 19 nt, Artificial Sequence
  Description of Artificial Sequence: Synthetic oligonucleotide
gcaaauguucauaaagucu

SEQ ID NO: 1782176 - RNA, 19 nt, Artificial Sequence
  Description of Artificial Sequence: Synthetic oligonucleotide
aaaauucccuugggcuccu

SEQ ID NO: 1782177 - RNA, 19 nt, Artificial Sequence
  Description of Artificial Sequence: Synthetic oligonucleotide
uguuucggguugugauaga

SEQ ID NO: 1782178 - RNA, 19 nt, Artificial Sequence
  Description of Artificial Sequence: Synthetic oligonucleotide
ggccagucauugcaaauac

SEQ ID NO: 1782179 - RNA, 19 nt, Artificial Sequence
  Description of Artificial Sequence: Synthetic oligonucleotide
guugugauagacagcucaa

SEQ ID NO: 1782180 - RNA, 19 nt, Artificial Sequence
  Description of Artificial Sequence: Synthetic oligonucleotide
cucagguuagggucucuca

SEQ ID NO: 1782181 - RNA, 19 nt, Artificial Sequence
  Description of Artificial Sequence: Synthetic oligonucleotide
ucaagcgggauggucucuc

SEQ ID NO: 1782182 - RNA, 19 nt, Artificial Sequence
  Description of Artificial Sequence: Synthetic oligonucleotide
ugauaacgcucugggaaua

SEQ ID NO: 1782183 - RNA, 19 nt, Artificial Sequence
  Description of Artificial Sequence: Synthetic oligonucleotide
ucucagguuagggucucuc

SEQ ID NO: 1782184 - RNA, 19 nt, Artificial Sequence
  Description of Artificial Sequence: Synthetic oligonucleotide
caagcgggauggucucucc

SEQ ID NO: 1782185 - RNA, 19 nt, Artificial Sequence
  Description of Artificial Sequence: Synthetic oligonucleotide
cuucguaguauucuccuau

SEQ ID NO: 1782186 - RNA, 19 nt, Artificial Sequence
  Description of Artificial Sequence: Synthetic oligonucleotide
cucucgggagaaggcaucc

SEQ ID NO: 1782187 - RNA, 19 nt, Artificial Sequence
  Description of Artificial Sequence: Synthetic oligonucleotide
caguaacaaccuccugcag

SEQ ID NO: 1782188 - RNA, 19 nt, Artificial Sequence
  Description of Artificial Sequence: Synthetic oligonucleotide
gcuuggagacacucgguac

SEQ ID NO: 1782189 - RNA, 19 nt, Artificial Sequence
  Description of Artificial Sequence: Synthetic oligonucleotide
cugaaggauccccaucgga

SEQ ID NO: 1782190 - RNA, 19 nt, Artificial Sequence
  Description of Artificial Sequence: Synthetic oligonucleotide
cugcaggauugagaaagac

SEQ ID NO: 1782191 - RNA, 19 nt, Artificial Sequence
  Description of Artificial Sequence: Synthetic oligonucleotide
gcgaucgagcaccauguug

SEQ ID NO: 1782192 - RNA, 19 nt, Artificial Sequence
  Description of Artificial Sequence: Synthetic oligonucleotide
agcgcagccugcgaucgag

SEQ ID NO: 1782193 - RNA, 19 nt, Artificial Sequence
  Description of Artificial Sequence: Synthetic oligonucleotide
ccugcgaucgagcaccaug

SEQ ID NO: 1782194 - RNA, 19 nt, Artificial Sequence
  Description of Artificial Sequence: Synthetic oligonucleotide
auaacgcucugggaauaga

SEQ ID NO: 1782195 - RNA, 19 nt, Artificial Sequence
  Description of Artificial Sequence: Synthetic oligonucleotide
gaggccugaugagucugag

SEQ ID NO: 1782196 - RNA, 19 nt, Artificial Sequence
  Description of Artificial Sequence: Synthetic oligonucleotide
cugaugagucugaggccac

SEQ ID NO: 1782197 - RNA, 19 nt, Artificial Sequence
  Description of Artificial Sequence: Synthetic oligonucleotide
uuucggcaaagagggugug

SEQ ID NO: 1782198 - RNA, 19 nt, Artificial Sequence
  Description of Artificial Sequence: Synthetic oligonucleotide
cuuucggcaaagagggugu

SEQ ID NO: 1782199 - RNA, 19 nt, Artificial Sequence
  Description of Artificial Sequence: Synthetic oligonucleotide
cacucgguaccaucugcuc

SEQ ID NO: 1782200 - RNA, 19 nt, Artificial Sequence
  Description of Artificial Sequence: Synthetic oligonucleotide
ggaaucagcugguugccaa

SEQ ID NO: 1782201 - RNA, 19 nt, Artificial Sequence
  Description of Artificial Sequence: Synthetic oligonucleotide
caaguuggcuguuucgggu

SEQ ID NO: 1782202 - RNA, 19 nt, Artificial Sequence
  Description of Artificial Sequence: Synthetic oligonucleotide
aaggucggggaggggucuc

SEQ ID NO: 1782203 - RNA, 19 nt, Artificial Sequence
  Description of Artificial Sequence: Synthetic oligonucleotide
ccuauacagccaaggucgg

SEQ ID NO: 1782204 - RNA, 19 nt, Artificial Sequence
  Description of Artificial Sequence: Synthetic oligonucleotide
aggccagucauugcaaaua

SEQ ID NO: 1782205 - RNA, 19 nt, Artificial Sequence
  Description of Artificial Sequence: Synthetic oligonucleotide
ugcagcgucccauccccuc

SEQ ID NO: 1782206 - RNA, 19 nt, Artificial Sequence
  Description of Artificial Sequence: Synthetic oligonucleotide
ugaugagucugaggccacu

SEQ ID NO: 1782207 - RNA, 19 nt, Artificial Sequence
  Description of Artificial Sequence: Synthetic oligonucleotide
cccuuuguggucccacugg

SEQ ID NO: 1782208 - RNA, 19 nt, Artificial Sequence
  Description of Artificial Sequence: Synthetic oligonucleotide
gcaaauacagguugcuccu

SEQ ID NO: 1782209 - RNA, 19 nt, Artificial Sequence
  Description of Artificial Sequence: Synthetic oligonucleotide
gugauaacgcucugggaau

SEQ ID NO: 1782210 - RNA, 19 nt, Artificial Sequence
  Description of Artificial Sequence: Synthetic oligonucleotide
gaggggucucuucggguuc

SEQ ID NO: 1782211 - RNA, 19 nt, Artificial Sequence
  Description of Artificial Sequence: Synthetic oligonucleotide
agggucucucaucuucuua

SEQ ID NO: 1782212 - RNA, 19 nt, Artificial Sequence
  Description of Artificial Sequence: Synthetic oligonucleotide
gguguaaaauuggggcagc

SEQ ID NO: 1782213 - RNA, 19 nt, Artificial Sequence
  Description of Artificial Sequence: Synthetic oligonucleotide
gaaugaggcaagccuucgu

SEQ ID NO: 1782214 - RNA, 19 nt, Artificial Sequence
  Description of Artificial Sequence: Synthetic oligonucleotide
cacccuucccuuugugguc

SEQ ID NO: 1782215 - RNA, 19 nt, Artificial Sequence
  Description of Artificial Sequence: Synthetic oligonucleotide
ggagacacucgguaccauc

SEQ ID NO: 1782216 - RNA, 19 nt, Artificial Sequence
  Description of Artificial Sequence: Synthetic oligonucleotide
ggacgugcucugcagcacc

SEQ ID NO: 1782217 - RNA, 19 nt, Artificial Sequence
  Description of Artificial Sequence: Synthetic oligonucleotide
gugcccagaaugaggcaag

SEQ ID NO: 1782218 - RNA, 19 nt, Artificial Sequence
  Description of Artificial Sequence: Synthetic oligonucleotide
gcugacaguaucagguuca

SEQ ID NO: 1782219 - RNA, 19 nt, Artificial Sequence
  Description of Artificial Sequence: Synthetic oligonucleotide
gcccuugaucugcaagacg

SEQ ID NO: 1782220 - RNA, 19 nt, Artificial Sequence
  Description of Artificial Sequence: Synthetic oligonucleotide
cuaacguucacgccagcau

SEQ ID NO: 1782221 - RNA, 19 nt, Artificial Sequence
  Description of Artificial Sequence: Synthetic oligonucleotide
ggacaguuguacaucuuuc

SEQ ID NO: 1782222 - RNA, 19 nt, Artificial Sequence
  Description of Artificial Sequence: Synthetic oligonucleotide
ugcuaacguucacgccagc

SEQ ID NO: 1782223 - RNA, 19 nt, Artificial Sequence
  Description of Artificial Sequence: Synthetic oligonucleotide
aaagagggugugacucaaa

SEQ ID NO: 1782224 - RNA, 19 nt, Artificial Sequence
  Description of Artificial Sequence: Synthetic oligonucleotide
ccaucugcucucagguuag

SEQ ID NO: 1782225 - RNA, 19 nt, Artificial Sequence
  Description of Artificial Sequence: Synthetic oligonucleotide
guacuccaguaacaaccuc

SEQ ID NO: 1782226 - RNA, 19 nt, Artificial Sequence
  Description of Artificial Sequence: Synthetic oligonucleotide
cugcgaucgagcaccaugu

SEQ ID NO: 1782227 - RNA, 19 nt, Artificial Sequence
  Description of Artificial Sequence: Synthetic oligonucleotide
acguucacgccagcaucuc

SEQ ID NO: 1782228 - RNA, 19 nt, Artificial Sequence
  Description of Artificial Sequence: Synthetic oligonucleotide
gcuggaagcgcagccugcg

SEQ ID NO: 1782229 - RNA, 19 nt, Artificial Sequence
  Description of Artificial Sequence: Synthetic oligonucleotide
ggagcccucaguucccuca

SEQ ID NO: 1782230 - RNA, 19 nt, Artificial Sequence
  Description of Artificial Sequence: Synthetic oligonucleotide
caagccuucguaguauucu

SEQ ID NO: 1782231 - RNA, 19 nt, Artificial Sequence
  Description of Artificial Sequence: Synthetic oligonucleotide
guguaaaauuggggcagca

SEQ ID NO: 1782232 - RNA, 19 nt, Artificial Sequence
  Description of Artificial Sequence: Synthetic oligonucleotide
gguggacaguuguacaucu

SEQ ID NO: 1782233 - RNA, 19 nt, Artificial Sequence
  Description of Artificial Sequence: Synthetic oligonucleotide
caaauagaguucuggcuuu

SEQ ID NO: 1782234 - RNA, 19 nt, Artificial Sequence
  Description of Artificial Sequence: Synthetic oligonucleotide
cguaguauucuccuauaca

SEQ ID NO: 1782235 - RNA, 19 nt, Artificial Sequence
  Description of Artificial Sequence: Synthetic oligonucleotide
gaagguagccucaucuguu

SEQ ID NO: 1782236 - RNA, 19 nt, Artificial Sequence
  Description of Artificial Sequence: Synthetic oligonucleotide
ccugaugagucugaggcca

SEQ ID NO: 1782237 - RNA, 19 nt, Artificial Sequence
  Description of Artificial Sequence: Synthetic oligonucleotide
caugagcucacugggacgu

SEQ ID NO: 1782238 - RNA, 19 nt, Artificial Sequence
  Description of Artificial Sequence: Synthetic oligonucleotide
gucauugcaaauacagguu

SEQ ID NO: 1782239 - RNA, 19 nt, Artificial Sequence
  Description of Artificial Sequence: Synthetic oligonucleotide
auggcaagcguggcaucug

SEQ ID NO: 1782240 - RNA, 19 nt, Artificial Sequence
  Description of Artificial Sequence: Synthetic oligonucleotide
cuuugcaagcugcaggauu

SEQ ID NO: 1782241 - RNA, 19 nt, Artificial Sequence
  Description of Artificial Sequence: Synthetic oligonucleotide
ugcgaucgagcaccauguu

SEQ ID NO: 1782242 - RNA, 19 nt, Artificial Sequence
  Description of Artificial Sequence: Synthetic oligonucleotide
gcuuuaccuuugcaagcug

SEQ ID NO: 1782243 - RNA, 19 nt, Artificial Sequence
  Description of Artificial Sequence: Synthetic oligonucleotide
guaagagauggaggccuga

SEQ ID NO: 1782244 - RNA, 19 nt, Artificial Sequence
  Description of Artificial Sequence: Synthetic oligonucleotide
cgggauaaauccaauugga

SEQ ID NO: 1782245 - RNA, 19 nt, Artificial Sequence
  Description of Artificial Sequence: Synthetic oligonucleotide
gucugucccagcgggauaa

SEQ ID NO: 1782246 - RNA, 19 nt, Artificial Sequence
  Description of Artificial Sequence: Synthetic oligonucleotide
ccucauaaucugucuugac

SEQ ID NO: 1782247 - RNA, 19 nt, Artificial Sequence
  Description of Artificial Sequence: Synthetic oligonucleotide
aggcaagccuucguaguau

SEQ ID NO: 1782248 - RNA, 19 nt, Artificial Sequence
  Description of Artificial Sequence: Synthetic oligonucleotide
cuugucccucauaaucugu

SEQ ID NO: 1782249 - RNA, 19 nt, Artificial Sequence
  Description of Artificial Sequence: Synthetic oligonucleotide
caugccagauagguguaaa

SEQ ID NO: 1782250 - RNA, 19 nt, Artificial Sequence
  Description of Artificial Sequence: Synthetic oligonucleotide
caucugcucucagguuagg

SEQ ID NO: 1782251 - RNA, 19 nt, Artificial Sequence
  Description of Artificial Sequence: Synthetic oligonucleotide
gccagauagguguaaaauu

SEQ ID NO: 1782252 - RNA, 19 nt, Artificial Sequence
  Description of Artificial Sequence: Synthetic oligonucleotide
ggcuuggagacacucggua

SEQ ID NO: 1782253 - RNA, 19 nt, Artificial Sequence
  Description of Artificial Sequence: Synthetic oligonucleotide
gcuaacguucacgccagca

SEQ ID NO: 1782254 - RNA, 19 nt, Artificial Sequence
  Description of Artificial Sequence: Synthetic oligonucleotide
gcuguuucggguugugaua

SEQ ID NO: 1782255 - RNA, 19 nt, Artificial Sequence
  Description of Artificial Sequence: Synthetic oligonucleotide
gggcauugggaggaaucag

SEQ ID NO: 1782256 - RNA, 19 nt, Artificial Sequence
  Description of Artificial Sequence: Synthetic oligonucleotide
auccuguggcugugcccag

SEQ ID NO: 1782257 - RNA, 19 nt, Artificial Sequence
  Description of Artificial Sequence: Synthetic oligonucleotide
cccauccccuccagcaacg

SEQ ID NO: 1782258 - RNA, 19 nt, Artificial Sequence
  Description of Artificial Sequence: Synthetic oligonucleotide
caacgaugaucacauccgu

SEQ ID NO: 1782259 - RNA, 19 nt, Artificial Sequence
  Description of Artificial Sequence: Synthetic oligonucleotide
gggaauagaagcacacccu

SEQ ID NO: 1782260 - RNA, 19 nt, Artificial Sequence
  Description of Artificial Sequence: Synthetic oligonucleotide
ggcuguuucggguugugau

SEQ ID NO: 1782261 - RNA, 19 nt, Artificial Sequence
  Description of Artificial Sequence: Synthetic oligonucleotide
cuuucacaauggcaagcgu

SEQ ID NO: 1782262 - RNA, 19 nt, Artificial Sequence
  Description of Artificial Sequence: Synthetic oligonucleotide
cccagaaugaggcaagccu

SEQ ID NO: 1782263 - RNA, 19 nt, Artificial Sequence
  Description of Artificial Sequence: Synthetic oligonucleotide
cguguaagagauggaggcc

SEQ ID NO: 1782264 - RNA, 19 nt, Artificial Sequence
  Description of Artificial Sequence: Synthetic oligonucleotide
ccauguugccaugagcuca

SEQ ID NO: 1782265 - RNA, 19 nt, Artificial Sequence
  Description of Artificial Sequence: Synthetic oligonucleotide
ggcuugucccucauaaucu

SEQ ID NO: 1782266 - RNA, 19 nt, Artificial Sequence
  Description of Artificial Sequence: Synthetic oligonucleotide
aggggucucuucggguuca

SEQ ID NO: 1782267 - RNA, 19 nt, Artificial Sequence
  Description of Artificial Sequence: Synthetic oligonucleotide
cuccugugauaacgcucug

SEQ ID NO: 1782268 - RNA, 19 nt, Artificial Sequence
  Description of Artificial Sequence: Synthetic oligonucleotide
caagcguggcaucugugau

SEQ ID NO: 1782269 - RNA, 19 nt, Artificial Sequence
  Description of Artificial Sequence: Synthetic oligonucleotide
ggaggccagucauugcaaa

SEQ ID NO: 1782270 - RNA, 19 nt, Artificial Sequence
  Description of Artificial Sequence: Synthetic oligonucleotide
gucggggaggggucucuuc

SEQ ID NO: 1782271 - RNA, 19 nt, Artificial Sequence
  Description of Artificial Sequence: Synthetic oligonucleotide
ggcauggcuucauacuccu

SEQ ID NO: 1782272 - RNA, 19 nt, Artificial Sequence
  Description of Artificial Sequence: Synthetic oligonucleotide
gccuucguaguauucuccu

SEQ ID NO: 1782273 - RNA, 19 nt, Artificial Sequence
  Description of Artificial Sequence: Synthetic oligonucleotide
ccguguuguccaucaacuc

SEQ ID NO: 1782274 - RNA, 19 nt, Artificial Sequence
  Description of Artificial Sequence: Synthetic oligonucleotide
cuccagcaacgaugaucac

SEQ ID NO: 1782275 - RNA, 19 nt, Artificial Sequence
  Description of Artificial Sequence: Synthetic oligonucleotide
ccaaggucggggagggguc

SEQ ID NO: 1782276 - RNA, 19 nt, Artificial Sequence
  Description of Artificial Sequence: Synthetic oligonucleotide
gugauauuuuggacuuggu

SEQ ID NO: 1782277 - RNA, 19 nt, Artificial Sequence
  Description of Artificial Sequence: Synthetic oligonucleotide
guagcagagugcaguggcu

SEQ ID NO: 1782278 - RNA, 19 nt, Artificial Sequence
  Description of Artificial Sequence: Synthetic oligonucleotide
gcccagaaugaggcaagcc

SEQ ID NO: 1782279 - RNA, 19 nt, Artificial Sequence
  Description of Artificial Sequence: Synthetic oligonucleotide
cuggaagcgcagccugcga

SEQ ID NO: 1782280 - RNA, 19 nt, Artificial Sequence
  Description of Artificial Sequence: Synthetic oligonucleotide
gcucaaugguggacaguug

SEQ ID NO: 1782281 - RNA, 19 nt, Artificial Sequence
  Description of Artificial Sequence: Synthetic oligonucleotide
ccuuuucgcccuugaucug

SEQ ID NO: 1782282 - RNA, 19 nt, Artificial Sequence
  Description of Artificial Sequence: Synthetic oligonucleotide
cgaaguacuccaguaacaa

SEQ ID NO: 1782283 - RNA, 19 nt, Artificial Sequence
  Description of Artificial Sequence: Synthetic oligonucleotide
cccagcgggauaaauccaa

SEQ ID NO: 1782284 - RNA, 19 nt, Artificial Sequence
  Description of Artificial Sequence: Synthetic oligonucleotide
ggcaagcguggcaucugug

SEQ ID NO: 1782285 - RNA, 19 nt, Artificial Sequence
  Description of Artificial Sequence: Synthetic oligonucleotide
gggugugacucaaacuacu

SEQ ID NO: 1782286 - RNA, 19 nt, Artificial Sequence
  Description of Artificial Sequence: Synthetic oligonucleotide
gccagucauugcaaauaca

SEQ ID NO: 1782287 - RNA, 19 nt, Artificial Sequence
  Description of Artificial Sequence: Synthetic oligonucleotide
gguucacuagcagaucuuu

SEQ ID NO: 1782288 - RNA, 19 nt, Artificial Sequence
  Description of Artificial Sequence: Synthetic oligonucleotide
agacgucaagcgggauggu

SEQ ID NO: 1782289 - RNA, 19 nt, Artificial Sequence
  Description of Artificial Sequence: Synthetic oligonucleotide
aggucggggaggggucucu

SEQ ID NO: 1782290 - RNA, 19 nt, Artificial Sequence
  Description of Artificial Sequence: Synthetic oligonucleotide
cgucaagcgggauggucuc

SEQ ID NO: 1782291 - RNA, 19 nt, Artificial Sequence
  Description of Artificial Sequence: Synthetic oligonucleotide
cagcgggauaaauccaauu

SEQ ID NO: 1782292 - RNA, 19 nt, Artificial Sequence
  Description of Artificial Sequence: Synthetic oligonucleotide
cauccguguuguccaucaa

SEQ ID NO: 1782293 - RNA, 19 nt, Artificial Sequence
  Description of Artificial Sequence: Synthetic oligonucleotide
gggacgugcucugcagcac

SEQ ID NO: 1782294 - RNA, 19 nt, Artificial Sequence
  Description of Artificial Sequence: Synthetic oligonucleotide
gucccguguaagagaugga

SEQ ID NO: 1782295 - RNA, 19 nt, Artificial Sequence
  Description of Artificial Sequence: Synthetic oligonucleotide
guuggcuguuucggguugu

SEQ ID NO: 1782296 - RNA, 19 nt, Artificial Sequence
  Description of Artificial Sequence: Synthetic oligonucleotide
gcucacugggacgugcucu

SEQ ID NO: 1782297 - RNA, 19 nt, Artificial Sequence
  Description of Artificial Sequence: Synthetic oligonucleotide
ggaggccugaugagucuga

SEQ ID NO: 1782298 - RNA, 19 nt, Artificial Sequence
  Description of Artificial Sequence: Synthetic oligonucleotide
cauacuccucgcugucgau

SEQ ID NO: 1782299 - RNA, 19 nt, Artificial Sequence
  Description of Artificial Sequence: Synthetic oligonucleotide
ccuucguaguauucuccua

SEQ ID NO: 1782300 - RNA, 19 nt, Artificial Sequence
  Description of Artificial Sequence: Synthetic oligonucleotide
ccuuuguggucccacuggu

SEQ ID NO: 1782301 - RNA, 19 nt, Artificial Sequence
  Description of Artificial Sequence: Synthetic oligonucleotide
cacuuucggcaaagagggu

SEQ ID NO: 1782302 - RNA, 19 nt, Artificial Sequence
  Description of Artificial Sequence: Synthetic oligonucleotide
ggucugucccagcgggaua

SEQ ID NO: 1782303 - RNA, 19 nt, Artificial Sequence
  Description of Artificial Sequence: Synthetic oligonucleotide
ggucccacugguggcugga

SEQ ID NO: 1782304 - RNA, 19 nt, Artificial Sequence
  Description of Artificial Sequence: Synthetic oligonucleotide
gcucucagguuagggucuc

SEQ ID NO: 1782305 - RNA, 19 nt, Artificial Sequence
  Description of Artificial Sequence: Synthetic oligonucleotide
ggguugugauagacagcuc

SEQ ID NO: 1782306 - RNA, 19 nt, Artificial Sequence
  Description of Artificial Sequence: Synthetic oligonucleotide
cauccccuccagcaacgau

SEQ ID NO: 1782307 - RNA, 19 nt, Artificial Sequence
  Description of Artificial Sequence: Synthetic oligonucleotide
caaggucggggaggggucu

SEQ ID NO: 1782308 - RNA, 19 nt, Artificial Sequence
  Description of Artificial Sequence: Synthetic oligonucleotide
guugcuccuuuucgcccuu

SEQ ID NO: 1782309 - RNA, 19 nt, Artificial Sequence
  Description of Artificial Sequence: Synthetic oligonucleotide
gucaagcgggauggucucu

SEQ ID NO: 1782310 - RNA, 19 nt, Artificial Sequence
  Description of Artificial Sequence: Synthetic oligonucleotide
gcucaccucucgggagaag

SEQ ID NO: 1782311 - RNA, 19 nt, Artificial Sequence
  Description of Artificial Sequence: Synthetic oligonucleotide
agccugcgaucgagcacca

SEQ ID NO: 1782312 - RNA, 19 nt, Artificial Sequence
  Description of Artificial Sequence: Synthetic oligonucleotide
gcgcagccugcgaucgagc

SEQ ID NO: 1782313 - RNA, 19 nt, Artificial Sequence
  Description of Artificial Sequence: Synthetic oligonucleotide
ggcucaccucucgggagaa

SEQ ID NO: 1782314 - RNA, 19 nt, Artificial Sequence
  Description of Artificial Sequence: Synthetic oligonucleotide
cugucccagcgggauaaau

SEQ ID NO: 1782315 - RNA, 19 nt, Artificial Sequence
  Description of Artificial Sequence: Synthetic oligonucleotide
ccagcgggauaaauccaau

SEQ ID NO: 1782316 - RNA, 19 nt, Artificial Sequence
  Description of Artificial Sequence: Synthetic oligonucleotide
cuguggcugugcccagaau

SEQ ID NO: 1782317 - RNA, 19 nt, Artificial Sequence
  Description of Artificial Sequence: Synthetic oligonucleotide
ccaugccagauagguguaa

SEQ ID NO: 1782318 - RNA, 19 nt, Artificial Sequence
  Description of Artificial Sequence: Synthetic oligonucleotide
cgcugucgaugcugaagga

SEQ ID NO: 1782319 - RNA, 19 nt, Artificial Sequence
  Description of Artificial Sequence: Synthetic oligonucleotide
cucucagguuagggucucu

SEQ ID NO: 1782320 - RNA, 19 nt, Artificial Sequence
  Description of Artificial Sequence: Synthetic oligonucleotide
cccuugggcuccugugaua

SEQ ID NO: 1782321 - RNA, 19 nt, Artificial Sequence
  Description of Artificial Sequence: Synthetic oligonucleotide
ccaucggaggccagucauu

SEQ ID NO: 1782322 - RNA, 19 nt, Artificial Sequence
  Description of Artificial Sequence: Synthetic oligonucleotide
cguucacgccagcaucucu

SEQ ID NO: 1782323 - RNA, 19 nt, Artificial Sequence
  Description of Artificial Sequence: Synthetic oligonucleotide
gcaagacgucaagcgggau

SEQ ID NO: 1782324 - RNA, 19 nt, Artificial Sequence
  Description of Artificial Sequence: Synthetic oligonucleotide
ggucggggaggggucucuu

SEQ ID NO: 1782325 - RNA, 19 nt, Artificial Sequence
  Description of Artificial Sequence: Synthetic oligonucleotide
gccugcgaucgagcaccau

SEQ ID NO: 1782326 - RNA, 19 nt, Artificial Sequence
  Description of Artificial Sequence: Synthetic oligonucleotide
aauaauagagcccuggccg

SEQ ID NO: 1782327 - RNA, 19 nt, Artificial Sequence
  Description of Artificial Sequence: Synthetic oligonucleotide
agaacaaagugccaagccc

SEQ ID NO: 1782328 - RNA, 19 nt, Artificial Sequence
  Description of Artificial Sequence: Synthetic oligonucleotide
aaaaccuucuguuuugcag

SEQ ID NO: 1782329 - RNA, 19 nt, Artificial Sequence
  Description of Artificial Sequence: Synthetic oligonucleotide
uguagacuguugcagaagg

SEQ ID NO: 1782330 - RNA, 19 nt, Artificial Sequence
  Description of Artificial Sequence: Synthetic oligonucleotide
aguacucagggucagaguc

SEQ ID NO: 1782331 - RNA, 19 nt, Artificial Sequence
  Description of Artificial Sequence: Synthetic oligonucleotide
aguggugccugccaaagcc

SEQ ID NO: 1782332 - RNA, 19 nt, Artificial Sequence
  Description of Artificial Sequence: Synthetic oligonucleotide
gagcggaugacuuucaugc

SEQ ID NO: 1782333 - RNA, 19 nt, Artificial Sequence
  Description of Artificial Sequence: Synthetic oligonucleotide
uguagcacuugcuugaggc

SEQ ID NO: 1782334 - RNA, 19 nt, Artificial Sequence
  Description of Artificial Sequence: Synthetic oligonucleotide
cucacagucacaaaaggac

SEQ ID NO: 1782335 - RNA, 19 nt, Artificial Sequence
  Description of Artificial Sequence: Synthetic oligonucleotide
cacaccaucggguaaaacc

SEQ ID NO: 1782336 - RNA, 19 nt, Artificial Sequence
  Description of Artificial Sequence: Synthetic oligonucleotide
auggccaacaggaagaucg

SEQ ID NO: 1782337 - RNA, 19 nt, Artificial Sequence
  Description of Artificial Sequence: Synthetic oligonucleotide
uguauguagacuguugcag

SEQ ID NO: 1782338 - RNA, 19 nt, Artificial Sequence
  Description of Artificial Sequence: Synthetic oligonucleotide
cuuguuauguagcacuugc

SEQ ID NO: 1782339 - RNA, 19 nt, Artificial Sequence
  Description of Artificial Sequence: Synthetic oligonucleotide
aaguguacgccaauaauag

SEQ ID NO: 1782340 - RNA, 19 nt, Artificial Sequence
  Description of Artificial Sequence: Synthetic oligonucleotide
uuauguagcacuugcuuga

SEQ ID NO: 1782341 - RNA, 19 nt, Artificial Sequence
  Description of Artificial Sequence: Synthetic oligonucleotide
ucuguuuugcagccgagug

SEQ ID NO: 1782342 - RNA, 19 nt, Artificial Sequence
  Description of Artificial Sequence: Synthetic oligonucleotide
agaagcuugucuugucacc

SEQ ID NO: 1782343 - RNA, 19 nt, Artificial Sequence
  Description of Artificial Sequence: Synthetic oligonucleotide
uguacgccaauaauagagc

SEQ ID NO: 1782344 - RNA, 19 nt, Artificial Sequence
  Description of Artificial Sequence: Synthetic oligonucleotide
guuauguagcacuugcuug

SEQ ID NO: 1782345 - RNA, 19 nt, Artificial Sequence
  Description of Artificial Sequence: Synthetic oligonucleotide
gagucauagccccaguuag

SEQ ID NO: 1782346 - RNA, 19 nt, Artificial Sequence
  Description of Artificial Sequence: Synthetic oligonucleotide
ugaggacuuguucagguca

SEQ ID NO: 1782347 - RNA, 19 nt, Artificial Sequence
  Description of Artificial Sequence: Synthetic oligonucleotide
uuucaugcugcucuuggca

SEQ ID NO: 1782348 - RNA, 19 nt, Artificial Sequence
  Description of Artificial Sequence: Synthetic oligonucleotide
guguguuguauguagacug

SEQ ID NO: 1782349 - RNA, 19 nt, Artificial Sequence
  Description of Artificial Sequence: Synthetic oligonucleotide
uguuguauguagacuguug

SEQ ID NO: 1782350 - RNA, 19 nt, Artificial Sequence
  Description of Artificial Sequence: Synthetic oligonucleotide
uuacgguugucacagcuca

SEQ ID NO: 1782351 - RNA, 19 nt, Artificial Sequence
  Description of Artificial Sequence: Synthetic oligonucleotide
cuggccauccccuagcucc

SEQ ID NO: 1782352 - RNA, 19 nt, Artificial Sequence
  Description of Artificial Sequence: Synthetic oligonucleotide
uguuuugcagccgaguggc

SEQ ID NO: 1782353 - RNA, 19 nt, Artificial Sequence
  Description of Artificial Sequence: Synthetic oligonucleotide
uccuuagugccccgaaugg

SEQ ID NO: 1782354 - RNA, 19 nt, Artificial Sequence
  Description of Artificial Sequence: Synthetic oligonucleotide
guguacgccaauaauagag

SEQ ID NO: 1782355 - RNA, 19 nt, Artificial Sequence
  Description of Artificial Sequence: Synthetic oligonucleotide
uguuauguagcacuugcuu

SEQ ID NO: 1782356 - RNA, 19 nt, Artificial Sequence
  Description of Artificial Sequence: Synthetic oligonucleotide
caauaauagagcccuggcc

SEQ ID NO: 1782357 - RNA, 19 nt, Artificial Sequence
  Description of Artificial Sequence: Synthetic oligonucleotide
cuuagugccccgaauggcc

SEQ ID NO: 1782358 - RNA, 19 nt, Artificial Sequence
  Description of Artificial Sequence: Synthetic oligonucleotide
uacuccacgugaaagcuga

SEQ ID NO: 1782359 - RNA, 19 nt, Artificial Sequence
  Description of Artificial Sequence: Synthetic oligonucleotide
agguauugcagggaggugg

SEQ ID NO: 1782360 - RNA, 19 nt, Artificial Sequence
  Description of Artificial Sequence: Synthetic oligonucleotide
aauguguggugguacuugu

SEQ ID NO: 1782361 - RNA, 19 nt, Artificial Sequence
  Description of Artificial Sequence: Synthetic oligonucleotide
gaucguccuggcuucaggg

SEQ ID NO: 1782362 - RNA, 19 nt, Artificial Sequence
  Description of Artificial Sequence: Synthetic oligonucleotide
uacgccaauaauagagccc

SEQ ID NO: 1782363 - RNA, 19 nt, Artificial Sequence
  Description of Artificial Sequence: Synthetic oligonucleotide
caucugaugucccaaugcc

SEQ ID NO: 1782364 - RNA, 19 nt, Artificial Sequence
  Description of Artificial Sequence: Synthetic oligonucleotide
ucaccuuugugauggagga

SEQ ID NO: 1782365 - RNA, 19 nt, Artificial Sequence
  Description of Artificial Sequence: Synthetic oligonucleotide
gaccuuacgguugucacag

SEQ ID NO: 1782366 - RNA, 19 nt, Artificial Sequence
  Description of Artificial Sequence: Synthetic oligonucleotide
ugaagaaggucaguguccc

SEQ ID NO: 1782367 - RNA, 19 nt, Artificial Sequence
  Description of Artificial Sequence: Synthetic oligonucleotide
acuccuaugcacuuccugu

SEQ ID NO: 1782368 - RNA, 19 nt, Artificial Sequence
  Description of Artificial Sequence: Synthetic oligonucleotide
cugccaaagccacagcucg

SEQ ID NO: 1782369 - RNA, 19 nt, Artificial Sequence
  Description of Artificial Sequence: Synthetic oligonucleotide
uuguauguagacuguugca

SEQ ID NO: 1782370 - RNA, 19 nt, Artificial Sequence
  Description of Artificial Sequence: Synthetic oligonucleotide
ucaugucagugccauacac

SEQ ID NO: 1782371 - RNA, 19 nt, Artificial Sequence
  Description of Artificial Sequence: Synthetic oligonucleotide
cagaacaaagugccaagcc

SEQ ID NO: 1782372 - RNA, 19 nt, Artificial Sequence
  Description of Artificial Sequence: Synthetic oligonucleotide
ugaguuuggccgcaacuga

SEQ ID NO: 1782373 - RNA, 19 nt, Artificial Sequence
  Description of Artificial Sequence: Synthetic oligonucleotide
cuguacuccacgugaaagc

SEQ ID NO: 1782374 - RNA, 19 nt, Artificial Sequence
  Description of Artificial Sequence: Synthetic oligonucleotide
acuugcuugaggccagggg

SEQ ID NO: 1782375 - RNA, 19 nt, Artificial Sequence
  Description of Artificial Sequence: Synthetic oligonucleotide
caucaugucagugccauac

SEQ ID NO: 1782376 - RNA, 19 nt, Artificial Sequence
  Description of Artificial Sequence: Synthetic oligonucleotide
uguguuguauguagacugu

SEQ ID NO: 1782377 - RNA, 19 nt, Artificial Sequence
  Description of Artificial Sequence: Synthetic oligonucleotide
agugccauacacaggagag

SEQ ID NO: 1782378 - RNA, 19 nt, Artificial Sequence
  Description of Artificial Sequence: Synthetic oligonucleotide
cauucuggcccucacaguc

SEQ ID NO: 1782379 - RNA, 19 nt, Artificial Sequence
  Description of Artificial Sequence: Synthetic oligonucleotide
ucggguaaaaccuucuguu

SEQ ID NO: 1782380 - RNA, 19 nt, Artificial Sequence
  Description of Artificial Sequence: Synthetic oligonucleotide
aggaagaucguccuggcuu

SEQ ID NO: 1782381 - RNA, 19 nt, Artificial Sequence
  Description of Artificial Sequence: Synthetic oligonucleotide
gacccaaucaaaauccuca

SEQ ID NO: 1782382 - RNA, 19 nt, Artificial Sequence
  Description of Artificial Sequence: Synthetic oligonucleotide
ucguccuggcuucagggag

SEQ ID NO: 1782383 - RNA, 19 nt, Artificial Sequence
  Description of Artificial Sequence: Synthetic oligonucleotide
guacgccaauaauagagcc

SEQ ID NO: 1782384 - RNA, 19 nt, Artificial Sequence
  Description of Artificial Sequence: Synthetic oligonucleotide
gucaccuuugugauggagg

SEQ ID NO: 1782385 - RNA, 19 nt, Artificial Sequence
  Description of Artificial Sequence: Synthetic oligonucleotide
gacuuguucaggucauccc

SEQ ID NO: 1782386 - RNA, 19 nt, Artificial Sequence
  Description of Artificial Sequence: Synthetic oligonucleotide
aucggguaaaaccuucugu

SEQ ID NO: 1782387 - RNA, 19 nt, Artificial Sequence
  Description of Artificial Sequence: Synthetic oligonucleotide
auagagcccuggccgaagc

SEQ ID NO: 1782388 - RNA, 19 nt, Artificial Sequence
  Description of Artificial Sequence: Synthetic oligonucleotide
cuguuuugcagccgagugg

SEQ ID NO: 1782389 - RNA, 19 nt, Artificial Sequence
  Description of Artificial Sequence: Synthetic oligonucleotide
cacgguguguuguauguag

SEQ ID NO: 1782390 - RNA, 19 nt, Artificial Sequence
  Description of Artificial Sequence: Synthetic oligonucleotide
cuuguucaggucaucccag

SEQ ID NO: 1782391 - RNA, 19 nt, Artificial Sequence
  Description of Artificial Sequence: Synthetic oligonucleotide
agagaagcuugucuuguca

SEQ ID NO: 1782392 - RNA, 19 nt, Artificial Sequence
  Description of Artificial Sequence: Synthetic oligonucleotide
ucagaacaaagugccaagc

SEQ ID NO: 1782393 - RNA, 19 nt, Artificial Sequence
  Description of Artificial Sequence: Synthetic oligonucleotide
acuccguggacgccgggcc

SEQ ID NO: 1782394 - RNA, 19 nt, Artificial Sequence
  Description of Artificial Sequence: Synthetic oligonucleotide
ugauuucccagaagugcug

SEQ ID NO: 1782395 - RNA, 19 nt, Artificial Sequence
  Description of Artificial Sequence: Synthetic oligonucleotide
uuaguggugccugccaaag

SEQ ID NO: 1782396 - RNA, 19 nt, Artificial Sequence
  Description of Artificial Sequence: Synthetic oligonucleotide
ccagacccaaucaaaaucc

SEQ ID NO: 1782397 - RNA, 19 nt, Artificial Sequence
  Description of Artificial Sequence: Synthetic oligonucleotide
uccaaguguacgccaauaa

SEQ ID NO: 1782398 - RNA, 19 nt, Artificial Sequence
  Description of Artificial Sequence: Synthetic oligonucleotide
auagcagcacagguauugc

SEQ ID NO: 1782399 - RNA, 19 nt, Artificial Sequence
  Description of Artificial Sequence: Synthetic oligonucleotide
uuggccgcaacugacgcag

SEQ ID NO: 1782400 - RNA, 19 nt, Artificial Sequence
  Description of Artificial Sequence: Synthetic oligonucleotide
agaauggcuuccacgcucc

SEQ ID NO: 1782401 - RNA, 19 nt, Artificial Sequence
  Description of Artificial Sequence: Synthetic oligonucleotide
cuccucaccacaacggcag

SEQ ID NO: 1782402 - RNA, 19 nt, Artificial Sequence
  Description of Artificial Sequence: Synthetic oligonucleotide
uuguuauguagcacuugcu

SEQ ID NO: 1782403 - RNA, 19 nt, Artificial Sequence
  Description of Artificial Sequence: Synthetic oligonucleotide
agaggucaucuugauuucc

SEQ ID NO: 1782404 - RNA, 19 nt, Artificial Sequence
  Description of Artificial Sequence: Synthetic oligonucleotide
caaguguacgccaauaaua

SEQ ID NO: 1782405 - RNA, 19 nt, Artificial Sequence
  Description of Artificial Sequence: Synthetic oligonucleotide
acgguugucacagcucagc

SEQ ID NO: 1782406 - RNA, 19 nt, Artificial Sequence
  Description of Artificial Sequence: Synthetic oligonucleotide
ugccauacacaggagaggu

SEQ ID NO: 1782407 - RNA, 19 nt, Artificial Sequence
  Description of Artificial Sequence: Synthetic oligonucleotide
gaaggucagugucccaugc

SEQ ID NO: 1782408 - RNA, 19 nt, Artificial Sequence
  Description of Artificial Sequence: Synthetic oligonucleotide
ugacgcaggcgauagcagc

SEQ ID NO: 1782409 - RNA, 19 nt, Artificial Sequence
  Description of Artificial Sequence: Synthetic oligonucleotide
cacagcucgggcaucugcg

SEQ ID NO: 1782410 - RNA, 19 nt, Artificial Sequence
  Description of Artificial Sequence: Synthetic oligonucleotide
aagcgugaagagaagcuug

SEQ ID NO: 1782411 - RNA, 19 nt, Artificial Sequence
  Description of Artificial Sequence: Synthetic oligonucleotide
gaauguguggugguacuug

SEQ ID NO: 1782412 - RNA, 19 nt, Artificial Sequence
  Description of Artificial Sequence: Synthetic oligonucleotide
acgccaauaauagagcccu

SEQ ID NO: 1782413 - RNA, 19 nt, Artificial Sequence
  Description of Artificial Sequence: Synthetic oligonucleotide
agacagaccucaguucucg

SEQ ID NO: 1782414 - RNA, 19 nt, Artificial Sequence
  Description of Artificial Sequence: Synthetic oligonucleotide
aacugacgcaggcgauagc

SEQ ID NO: 1782415 - RNA, 19 nt, Artificial Sequence
  Description of Artificial Sequence: Synthetic oligonucleotide
uguucaggucaucccagac

SEQ ID NO: 1782416 - RNA, 19 nt, Artificial Sequence
  Description of Artificial Sequence: Synthetic oligonucleotide
uggacgccgggccauagug

SEQ ID NO: 1782417 - RNA, 19 nt, Artificial Sequence
  Description of Artificial Sequence: Synthetic oligonucleotide
acaggagcggaugacuuuc

SEQ ID NO: 1782418 - RNA, 19 nt, Artificial Sequence
  Description of Artificial Sequence: Synthetic oligonucleotide
agagucugagucgcugugc

SEQ ID NO: 1782419 - RNA, 19 nt, Artificial Sequence
  Description of Artificial Sequence: Synthetic oligonucleotide
auaguggaaaggaccuggc

SEQ ID NO: 1782420 - RNA, 19 nt, Artificial Sequence
  Description of Artificial Sequence: Synthetic oligonucleotide
gggaagaguacucaggguc

SEQ ID NO: 1782421 - RNA, 19 nt, Artificial Sequence
  Description of Artificial Sequence: Synthetic oligonucleotide
cacaggagaggucaucuug

SEQ ID NO: 1782422 - RNA, 19 nt, Artificial Sequence
  Description of Artificial Sequence: Synthetic oligonucleotide
agacuguugcagaagguag

SEQ ID NO: 1782423 - RNA, 19 nt, Artificial Sequence
  Description of Artificial Sequence: Synthetic oligonucleotide
cugguuucugggcucgugg

SEQ ID NO: 1782424 - RNA, 19 nt, Artificial Sequence
  Description of Artificial Sequence: Synthetic oligonucleotide
agaucguccuggcuucagg

SEQ ID NO: 1782425 - RNA, 19 nt, Artificial Sequence
  Description of Artificial Sequence: Synthetic oligonucleotide
agagucauagccccaguua

SEQ ID NO: 1782426 - RNA, 19 nt, Artificial Sequence
  Description of Artificial Sequence: Synthetic oligonucleotide
gaagaaggcagcugcgcuc

SEQ ID NO: 1782427 - RNA, 19 nt, Artificial Sequence
  Description of Artificial Sequence: Synthetic oligonucleotide
ugaccuuacgguugucaca

SEQ ID NO: 1782428 - RNA, 19 nt, Artificial Sequence
  Description of Artificial Sequence: Synthetic oligonucleotide
ugucccaugccagguaucc

SEQ ID NO: 1782429 - RNA, 19 nt, Artificial Sequence
  Description of Artificial Sequence: Synthetic oligonucleotide
acugacgcaggcgauagca

SEQ ID NO: 1782430 - RNA, 19 nt, Artificial Sequence
  Description of Artificial Sequence: Synthetic oligonucleotide
gacaagccuagacagaccu

SEQ ID NO: 1782431 - RNA, 19 nt, Artificial Sequence
  Description of Artificial Sequence: Synthetic oligonucleotide
cuccuuagugccccgaaug

SEQ ID NO: 1782432 - RNA, 19 nt, Artificial Sequence
  Description of Artificial Sequence: Synthetic oligonucleotide
cuuacgguugucacagcuc

SEQ ID NO: 1782433 - RNA, 19 nt, Artificial Sequence
  Description of Artificial Sequence: Synthetic oligonucleotide
gauggaggagcccaguaua

SEQ ID NO: 1782434 - RNA, 19 nt, Artificial Sequence
  Description of Artificial Sequence: Synthetic oligonucleotide
uagacuguugcagaaggua

SEQ ID NO: 1782435 - RNA, 19 nt, Artificial Sequence
  Description of Artificial Sequence: Synthetic oligonucleotide
auccccuagcuccuuagug

SEQ ID NO: 1782436 - RNA, 19 nt, Artificial Sequence
  Description of Artificial Sequence: Synthetic oligonucleotide
uagcacuugcuugaggcca

SEQ ID NO: 1782437 - RNA, 19 nt, Artificial Sequence
  Description of Artificial Sequence: Synthetic oligonucleotide
aagcugaccuuacgguugu

SEQ ID NO: 1782438 - RNA, 19 nt, Artificial Sequence
  Description of Artificial Sequence: Synthetic oligonucleotide
guuuggccgcaacugacgc

SEQ ID NO: 1782439 - RNA, 19 nt, Artificial Sequence
  Description of Artificial Sequence: Synthetic oligonucleotide
ugccagguauccaagugua

SEQ ID NO: 1782440 - RNA, 19 nt, Artificial Sequence
  Description of Artificial Sequence: Synthetic oligonucleotide
gucauagccccaguuagug

SEQ ID NO: 1782441 - RNA, 19 nt, Artificial Sequence
  Description of Artificial Sequence: Synthetic oligonucleotide
acucagaacaaagugccaa

SEQ ID NO: 1782442 - RNA, 19 nt, Artificial Sequence
  Description of Artificial Sequence: Synthetic oligonucleotide
gcagcugcgcuccagcugg

SEQ ID NO: 1782443 - RNA, 19 nt, Artificial Sequence
  Description of Artificial Sequence: Synthetic oligonucleotide
guagcacuugcuugaggcc

SEQ ID NO: 1782444 - RNA, 19 nt, Artificial Sequence
  Description of Artificial Sequence: Synthetic oligonucleotide
uaugcacuuccuguucuug

SEQ ID NO: 1782445 - RNA, 19 nt, Artificial Sequence
  Description of Artificial Sequence: Synthetic oligonucleotide
aguguacgccaauaauaga

SEQ ID NO: 1782446 - RNA, 19 nt, Artificial Sequence
  Description of Artificial Sequence: Synthetic oligonucleotide
acagaccucaguucucgcu

SEQ ID NO: 1782447 - RNA, 19 nt, Artificial Sequence
  Description of Artificial Sequence: Synthetic oligonucleotide
agugcuggccauccccuag

SEQ ID NO: 1782448 - RNA, 19 nt, Artificial Sequence
  Description of Artificial Sequence: Synthetic oligonucleotide
aguuuggccgcaacugacg

SEQ ID NO: 1782449 - RNA, 19 nt, Artificial Sequence
  Description of Artificial Sequence: Synthetic oligonucleotide
ccaucagagucauagcccc

SEQ ID NO: 1782450 - RNA, 19 nt, Artificial Sequence
  Description of Artificial Sequence: Synthetic oligonucleotide
caugucagugccauacaca

SEQ ID NO: 1782451 - RNA, 19 nt, Artificial Sequence
  Description of Artificial Sequence: Synthetic oligonucleotide
aaggguguccccugaguuu

SEQ ID NO: 1782452 - RNA, 19 nt, Artificial Sequence
  Description of Artificial Sequence: Synthetic oligonucleotide
agaaggucagugucccaug

SEQ ID NO: 1782453 - RNA, 19 nt, Artificial Sequence
  Description of Artificial Sequence: Synthetic oligonucleotide
acuuccagcgacugcaguu

SEQ ID NO: 1782454 - RNA, 19 nt, Artificial Sequence
  Description of Artificial Sequence: Synthetic oligonucleotide
gaacaaagugccaagcccu

SEQ ID NO: 1782455 - RNA, 19 nt, Artificial Sequence
  Description of Artificial Sequence: Synthetic oligonucleotide
agcgacugcaguucaugcu

SEQ ID NO: 1782456 - RNA, 19 nt, Artificial Sequence
  Description of Artificial Sequence: Synthetic oligonucleotide
auggccgcagugccgcagc

SEQ ID NO: 1782457 - RNA, 19 nt, Artificial Sequence
  Description of Artificial Sequence: Synthetic oligonucleotide
aguuaguggugccugccaa

SEQ ID NO: 1782458 - RNA, 19 nt, Artificial Sequence
  Description of Artificial Sequence: Synthetic oligonucleotide
acagaagaaggcagcugcg

SEQ ID NO: 1782459 - RNA, 19 nt, Artificial Sequence
  Description of Artificial Sequence: Synthetic oligonucleotide
cccaguauaggagaggccc

SEQ ID NO: 1782460 - RNA, 19 nt, Artificial Sequence
  Description of Artificial Sequence: Synthetic oligonucleotide
agacccaaucaaaauccuc

SEQ ID NO: 1782461 - RNA, 19 nt, Artificial Sequence
  Description of Artificial Sequence: Synthetic oligonucleotide
gcagaagguagccucauuc

SEQ ID NO: 1782462 - RNA, 19 nt, Artificial Sequence
  Description of Artificial Sequence: Synthetic oligonucleotide
ucauccuccucaccacaac

SEQ ID NO: 1782463 - RNA, 19 nt, Artificial Sequence
  Description of Artificial Sequence: Synthetic oligonucleotide
uagcagcacagguauugca

SEQ ID NO: 1782464 - RNA, 19 nt, Artificial Sequence
  Description of Artificial Sequence: Synthetic oligonucleotide
cagaccucaguucucgcuc

SEQ ID NO: 1782465 - RNA, 19 nt, Artificial Sequence
  Description of Artificial Sequence: Synthetic oligonucleotide
accacaacggcagucccug

SEQ ID NO: 1782466 - RNA, 19 nt, Artificial Sequence
  Description of Artificial Sequence: Synthetic oligonucleotide
acuuccuguucuugaagaa

SEQ ID NO: 1782467 - RNA, 19 nt, Artificial Sequence
  Description of Artificial Sequence: Synthetic oligonucleotide
gccaauaauagagcccugg

SEQ ID NO: 1782468 - RNA, 19 nt, Artificial Sequence
  Description of Artificial Sequence: Synthetic oligonucleotide
caaaaggacucuccuguca

SEQ ID NO: 1782469 - RNA, 19 nt, Artificial Sequence
  Description of Artificial Sequence: Synthetic oligonucleotide
auguagacuguugcagaag

SEQ ID NO: 1782470 - RNA, 19 nt, Artificial Sequence
  Description of Artificial Sequence: Synthetic oligonucleotide
ccaauaauagagcccuggc

SEQ ID NO: 1782471 - RNA, 19 nt, Artificial Sequence
  Description of Artificial Sequence: Synthetic oligonucleotide
aggcgauagcagcacaggu

SEQ ID NO: 1782472 - RNA, 19 nt, Artificial Sequence
  Description of Artificial Sequence: Synthetic oligonucleotide
uucuguuuugcagccgagu

SEQ ID NO: 1782473 - RNA, 19 nt, Artificial Sequence
  Description of Artificial Sequence: Synthetic oligonucleotide
caucggguaaaaccuucug

SEQ ID NO: 1782474 - RNA, 19 nt, Artificial Sequence
  Description of Artificial Sequence: Synthetic oligonucleotide
uuuggccgcaacugacgca

SEQ ID NO: 1782475 - RNA, 19 nt, Artificial Sequence
  Description of Artificial Sequence: Synthetic oligonucleotide
cuggccgaagcgugaagag

SEQ ID NO: 1782476 - RNA, 19 nt, Artificial Sequence
  Description of Artificial Sequence: Synthetic oligonucleotide
gcagcuguggagcacacca

SEQ ID NO: 1782477 - RNA, 19 nt, Artificial Sequence
  Description of Artificial Sequence: Synthetic oligonucleotide
accaucggguaaaaccuuc

SEQ ID NO: 1782478 - RNA, 19 nt, Artificial Sequence
  Description of Artificial Sequence: Synthetic oligonucleotide
aggguguccccugaguuug

SEQ ID NO: 1782479 - RNA, 19 nt, Artificial Sequence
  Description of Artificial Sequence: Synthetic oligonucleotide
caggucuacaucugauguc

SEQ ID NO: 1782480 - RNA, 19 nt, Artificial Sequence
  Description of Artificial Sequence: Synthetic oligonucleotide
agggaagaguacucagggu

SEQ ID NO: 1782481 - RNA, 19 nt, Artificial Sequence
  Description of Artificial Sequence: Synthetic oligonucleotide
cagcgacugcaguucaugc

SEQ ID NO: 1782482 - RNA, 19 nt, Artificial Sequence
  Description of Artificial Sequence: Synthetic oligonucleotide
caccaguuguggcugugcc

SEQ ID NO: 1782483 - RNA, 19 nt, Artificial Sequence
  Description of Artificial Sequence: Synthetic oligonucleotide
ucagugucccaugccaggu

SEQ ID NO: 1782484 - RNA, 19 nt, Artificial Sequence
  Description of Artificial Sequence: Synthetic oligonucleotide
gaaagcugaccuuacgguu

SEQ ID NO: 1782485 - RNA, 19 nt, Artificial Sequence
  Description of Artificial Sequence: Synthetic oligonucleotide
uauccaaguguacgccaau

SEQ ID NO: 1782486 - RNA, 19 nt, Artificial Sequence
  Description of Artificial Sequence: Synthetic oligonucleotide
cuucuguuuugcagccgag

SEQ ID NO: 1782487 - RNA, 19 nt, Artificial Sequence
  Description of Artificial Sequence: Synthetic oligonucleotide
gacgccgggccauagugga

SEQ ID NO: 1782488 - RNA, 19 nt, Artificial Sequence
  Description of Artificial Sequence: Synthetic oligonucleotide
caacugacgcaggcgauag

SEQ ID NO: 1782489 - RNA, 19 nt, Artificial Sequence
  Description of Artificial Sequence: Synthetic oligonucleotide
aagaucguccuggcuucag

SEQ ID NO: 1782490 - RNA, 19 nt, Artificial Sequence
  Description of Artificial Sequence: Synthetic oligonucleotide
gugccauacacaggagagg

SEQ ID NO: 1782491 - RNA, 19 nt, Artificial Sequence
  Description of Artificial Sequence: Synthetic oligonucleotide
gccaacaggaagaucgucc

SEQ ID NO: 1782492 - RNA, 19 nt, Artificial Sequence
  Description of Artificial Sequence: Synthetic oligonucleotide
guuucugggcucguggcac

SEQ ID NO: 1782493 - RNA, 19 nt, Artificial Sequence
  Description of Artificial Sequence: Synthetic oligonucleotide
gcuguacuccacgugaaag

SEQ ID NO: 1782494 - RNA, 19 nt, Artificial Sequence
  Description of Artificial Sequence: Synthetic oligonucleotide
gaguuuggccgcaacugac

SEQ ID NO: 1782495 - RNA, 19 nt, Artificial Sequence
  Description of Artificial Sequence: Synthetic oligonucleotide
agaccucaguucucgcucu

SEQ ID NO: 1782496 - RNA, 19 nt, Artificial Sequence
  Description of Artificial Sequence: Synthetic oligonucleotide
cucguggcaccaguugugg

SEQ ID NO: 1782497 - RNA, 19 nt, Artificial Sequence
  Description of Artificial Sequence: Synthetic oligonucleotide
ugccacgguguguuguaug

SEQ ID NO: 1782498 - RNA, 19 nt, Artificial Sequence
  Description of Artificial Sequence: Synthetic oligonucleotide
gaagagaagcuugucuugu

SEQ ID NO: 1782499 - RNA, 19 nt, Artificial Sequence
  Description of Artificial Sequence: Synthetic oligonucleotide
ccugcuacuccguggacgc

SEQ ID NO: 1782500 - RNA, 19 nt, Artificial Sequence
  Description of Artificial Sequence: Synthetic oligonucleotide
gaagcuugucuugucaccu

SEQ ID NO: 1782501 - RNA, 19 nt, Artificial Sequence
  Description of Artificial Sequence: Synthetic oligonucleotide
cuuccagcgacugcaguuc

SEQ ID NO: 1782502 - RNA, 19 nt, Artificial Sequence
  Description of Artificial Sequence: Synthetic oligonucleotide
gacagaccucaguucucgc

SEQ ID NO: 1782503 - RNA, 19 nt, Artificial Sequence
  Description of Artificial Sequence: Synthetic oligonucleotide
guucucgcucugcugcugc

SEQ ID NO: 1782504 - RNA, 19 nt, Artificial Sequence
  Description of Artificial Sequence: Synthetic oligonucleotide
cuuugugauggaggagccc

SEQ ID NO: 1782505 - RNA, 19 nt, Artificial Sequence
  Description of Artificial Sequence: Synthetic oligonucleotide
aucguccuggcuucaggga

SEQ ID NO: 1782506 - RNA, 19 nt, Artificial Sequence
  Description of Artificial Sequence: Synthetic oligonucleotide
cugaggacuuguucagguc

SEQ ID NO: 1782507 - RNA, 19 nt, Artificial Sequence
  Description of Artificial Sequence: Synthetic oligonucleotide
gcagcgcuuccucugacag

SEQ ID NO: 1782508 - RNA, 19 nt, Artificial Sequence
  Description of Artificial Sequence: Synthetic oligonucleotide
uuccagcgacugcaguuca

SEQ ID NO: 1782509 - RNA, 19 nt, Artificial Sequence
  Description of Artificial Sequence: Synthetic oligonucleotide
ugcagcgcuuccucugaca

SEQ ID NO: 1782510 - RNA, 19 nt, Artificial Sequence
  Description of Artificial Sequence: Synthetic oligonucleotide
gucuacaucugauguccca

SEQ ID NO: 1782511 - RNA, 19 nt, Artificial Sequence
  Description of Artificial Sequence: Synthetic oligonucleotide
gggacaagccuagacagac

SEQ ID NO: 1782512 - RNA, 19 nt, Artificial Sequence
  Description of Artificial Sequence: Synthetic oligonucleotide
ggaagaucguccuggcuuc

SEQ ID NO: 1782513 - RNA, 19 nt, Artificial Sequence
  Description of Artificial Sequence: Synthetic oligonucleotide
cagagucugagucgcugug

SEQ ID NO: 1782514 - RNA, 19 nt, Artificial Sequence
  Description of Artificial Sequence: Synthetic oligonucleotide
ggacuuguucaggucaucc

SEQ ID NO: 1782515 - RNA, 19 nt, Artificial Sequence
  Description of Artificial Sequence: Synthetic oligonucleotide
accuuacgguugucacagc

SEQ ID NO: 1782516 - RNA, 19 nt, Artificial Sequence
  Description of Artificial Sequence: Synthetic oligonucleotide
cagcuuguuauguagcacu

SEQ ID NO: 1782517 - RNA, 19 nt, Artificial Sequence
  Description of Artificial Sequence: Synthetic oligonucleotide
aagcuugucuugucaccuu

SEQ ID NO: 1782518 - RNA, 19 nt, Artificial Sequence
  Description of Artificial Sequence: Synthetic oligonucleotide
gcuguggagcacaccaucg

SEQ ID NO: 1782519 - RNA, 19 nt, Artificial Sequence
  Description of Artificial Sequence: Synthetic oligonucleotide
guguggugguacuugucca

SEQ ID NO: 1782520 - RNA, 19 nt, Artificial Sequence
  Description of Artificial Sequence: Synthetic oligonucleotide
gacgcaggcgauagcagca

SEQ ID NO: 1782521 - RNA, 19 nt, Artificial Sequence
  Description of Artificial Sequence: Synthetic oligonucleotide
gucgcugugcugcccauca

SEQ ID NO: 1782522 - RNA, 19 nt, Artificial Sequence
  Description of Artificial Sequence: Synthetic oligonucleotide
acgugaaagcugaccuuac

SEQ ID NO: 1782523 - RNA, 19 nt, Artificial Sequence
  Description of Artificial Sequence: Synthetic oligonucleotide
uacuccguggacgccgggc

SEQ ID NO: 1782524 - RNA, 19 nt, Artificial Sequence
  Description of Artificial Sequence: Synthetic oligonucleotide
agccgaguggcagccacuc

SEQ ID NO: 1782525 - RNA, 19 nt, Artificial Sequence
  Description of Artificial Sequence: Synthetic oligonucleotide
gcgacugcaguucaugcuc

SEQ ID NO: 1782526 - RNA, 19 nt, Artificial Sequence
  Description of Artificial Sequence: Synthetic oligonucleotide
acagcucgggcaucugcgu

SEQ ID NO: 1782527 - RNA, 19 nt, Artificial Sequence
  Description of Artificial Sequence: Synthetic oligonucleotide
uggccgaagcgugaagaga

SEQ ID NO: 1782528 - RNA, 19 nt, Artificial Sequence
  Description of Artificial Sequence: Synthetic oligonucleotide
gccacuccuaugcacuucc

SEQ ID NO: 1782529 - RNA, 19 nt, Artificial Sequence
  Description of Artificial Sequence: Synthetic oligonucleotide
agcacagguauugcaggga

SEQ ID NO: 1782530 - RNA, 19 nt, Artificial Sequence
  Description of Artificial Sequence: Synthetic oligonucleotide
uaauagagcccuggccgaa

SEQ ID NO: 1782531 - RNA, 19 nt, Artificial Sequence
  Description of Artificial Sequence: Synthetic oligonucleotide
guuaguggugccugccaaa

SEQ ID NO: 1782532 - RNA, 19 nt, Artificial Sequence
  Description of Artificial Sequence: Synthetic oligonucleotide
ggcugcacucagaacaaag

SEQ ID NO: 1782533 - RNA, 19 nt, Artificial Sequence
  Description of Artificial Sequence: Synthetic oligonucleotide
acaagccuagacagaccuc

SEQ ID NO: 1782534 - RNA, 19 nt, Artificial Sequence
  Description of Artificial Sequence: Synthetic oligonucleotide
ggaagaguacucaggguca

SEQ ID NO: 1782535 - RNA, 19 nt, Artificial Sequence
  Description of Artificial Sequence: Synthetic oligonucleotide
gaagaaggucaguguccca

SEQ ID NO: 1782536 - RNA, 19 nt, Artificial Sequence
  Description of Artificial Sequence: Synthetic oligonucleotide
cagcgcuuccucugacagg

SEQ ID NO: 1782537 - RNA, 19 nt, Artificial Sequence
  Description of Artificial Sequence: Synthetic oligonucleotide
guccccugaguuuggccgc

SEQ ID NO: 1782538 - RNA, 19 nt, Artificial Sequence
  Description of Artificial Sequence: Synthetic oligonucleotide
agucauagccccaguuagu

SEQ ID NO: 1782539 - RNA, 19 nt, Artificial Sequence
  Description of Artificial Sequence: Synthetic oligonucleotide
aggagaggucaucuugauu

SEQ ID NO: 1782540 - RNA, 19 nt, Artificial Sequence
  Description of Artificial Sequence: Synthetic oligonucleotide
agcuguacuccacgugaaa

SEQ ID NO: 1782541 - RNA, 19 nt, Artificial Sequence
  Description of Artificial Sequence: Synthetic oligonucleotide
cagaagguagccucauucu

SEQ ID NO: 1782542 - RNA, 19 nt, Artificial Sequence
  Description of Artificial Sequence: Synthetic oligonucleotide
acgcaggcgauagcagcac

SEQ ID NO: 1782543 - RNA, 19 nt, Artificial Sequence
  Description of Artificial Sequence: Synthetic oligonucleotide
aggacuuguucaggucauc

SEQ ID NO: 1782544 - RNA, 19 nt, Artificial Sequence
  Description of Artificial Sequence: Synthetic oligonucleotide
agcacuugcuugaggccag

SEQ ID NO: 1782545 - RNA, 19 nt, Artificial Sequence
  Description of Artificial Sequence: Synthetic oligonucleotide
ccauacacaggagagguca

SEQ ID NO: 1782546 - RNA, 19 nt, Artificial Sequence
  Description of Artificial Sequence: Synthetic oligonucleotide
gucuugucaccuuugugau

SEQ ID NO: 1782547 - RNA, 19 nt, Artificial Sequence
  Description of Artificial Sequence: Synthetic oligonucleotide
guacuccacgugaaagcug

SEQ ID NO: 1782548 - RNA, 19 nt, Artificial Sequence
  Description of Artificial Sequence: Synthetic oligonucleotide
gggcaucugcgucucggcg

SEQ ID NO: 1782549 - RNA, 19 nt, Artificial Sequence
  Description of Artificial Sequence: Synthetic oligonucleotide
uagccccaguuaguggugc

SEQ ID NO: 1782550 - RNA, 19 nt, Artificial Sequence
  Description of Artificial Sequence: Synthetic oligonucleotide
ugcagaagguagccucauu

SEQ ID NO: 1782551 - RNA, 19 nt, Artificial Sequence
  Description of Artificial Sequence: Synthetic oligonucleotide
gaccucaguucucgcucug

SEQ ID NO: 1782552 - RNA, 19 nt, Artificial Sequence
  Description of Artificial Sequence: Synthetic oligonucleotide
cagaagugcuggccauccc

SEQ ID NO: 1782553 - RNA, 19 nt, Artificial Sequence
  Description of Artificial Sequence: Synthetic oligonucleotide
ucgcugugcugcccaucag

SEQ ID NO: 1782554 - RNA, 19 nt, Artificial Sequence
  Description of Artificial Sequence: Synthetic oligonucleotide
agaauguguggugguacuu

SEQ ID NO: 1782555 - RNA, 19 nt, Artificial Sequence
  Description of Artificial Sequence: Synthetic oligonucleotide
aagugcuggccauccccua

SEQ ID NO: 1782556 - RNA, 19 nt, Artificial Sequence
  Description of Artificial Sequence: Synthetic oligonucleotide
guacuuguccaggucuaca

SEQ ID NO: 1782557 - RNA, 19 nt, Artificial Sequence
  Description of Artificial Sequence: Synthetic oligonucleotide
agccacuccuaugcacuuc

SEQ ID NO: 1782558 - RNA, 19 nt, Artificial Sequence
  Description of Artificial Sequence: Synthetic oligonucleotide
uccucaccacaacggcagu

SEQ ID NO: 1782559 - RNA, 19 nt, Artificial Sequence
  Description of Artificial Sequence: Synthetic oligonucleotide
gucucggcgggcugcacuc

SEQ ID NO: 1782560 - RNA, 19 nt, Artificial Sequence
  Description of Artificial Sequence: Synthetic oligonucleotide
cacucagaacaaagugcca

SEQ ID NO: 1782561 - RNA, 19 nt, Artificial Sequence
  Description of Artificial Sequence: Synthetic oligonucleotide
cacuugcuugaggccaggg

SEQ ID NO: 1782562 - RNA, 19 nt, Artificial Sequence
  Description of Artificial Sequence: Synthetic oligonucleotide
auagccccaguuaguggug

SEQ ID NO: 1782563 - RNA, 19 nt, Artificial Sequence
  Description of Artificial Sequence: Synthetic oligonucleotide
aggagcggaugacuuucau

SEQ ID NO: 1782564 - RNA, 19 nt, Artificial Sequence
  Description of Artificial Sequence: Synthetic oligonucleotide
uccagcgacugcaguucau

SEQ ID NO: 1782565 - RNA, 19 nt, Artificial Sequence
  Description of Artificial Sequence: Synthetic oligonucleotide
ggagauggggacaagccua

SEQ ID NO: 1782566 - RNA, 19 nt, Artificial Sequence
  Description of Artificial Sequence: Synthetic oligonucleotide
cgugaaagcugaccuuacg

SEQ ID NO: 1782567 - RNA, 19 nt, Artificial Sequence
  Description of Artificial Sequence: Synthetic oligonucleotide
uggccgcaacugacgcagg

SEQ ID NO: 1782568 - RNA, 19 nt, Artificial Sequence
  Description of Artificial Sequence: Synthetic oligonucleotide
caaagugccaagcccugcu

SEQ ID NO: 1782569 - RNA, 19 nt, Artificial Sequence
  Description of Artificial Sequence: Synthetic oligonucleotide
gaguacucagggucagagu

SEQ ID NO: 1782570 - RNA, 19 nt, Artificial Sequence
  Description of Artificial Sequence: Synthetic oligonucleotide
cagugccgcagcuguacuc

SEQ ID NO: 1782571 - RNA, 19 nt, Artificial Sequence
  Description of Artificial Sequence: Synthetic oligonucleotide
gcaggcgauagcagcacag

SEQ ID NO: 1782572 - RNA, 19 nt, Artificial Sequence
  Description of Artificial Sequence: Synthetic oligonucleotide
cccgaauggccgcagugcc

SEQ ID NO: 1782573 - RNA, 19 nt, Artificial Sequence
  Description of Artificial Sequence: Synthetic oligonucleotide
cagcacaugcagaauggcu

SEQ ID NO: 1782574 - RNA, 19 nt, Artificial Sequence
  Description of Artificial Sequence: Synthetic oligonucleotide
gcgauagcagcacagguau

SEQ ID NO: 1782575 - RNA, 19 nt, Artificial Sequence
  Description of Artificial Sequence: Synthetic oligonucleotide
caccuuugugauggaggag

SEQ ID NO: 1782576 - RNA, 19 nt, Artificial Sequence
  Description of Artificial Sequence: Synthetic oligonucleotide
acgguguguuguauguaga

SEQ ID NO: 1782577 - RNA, 19 nt, Artificial Sequence
  Description of Artificial Sequence: Synthetic oligonucleotide
caagcaggcugcagaaugu

SEQ ID NO: 1782578 - RNA, 19 nt, Artificial Sequence
  Description of Artificial Sequence: Synthetic oligonucleotide
gguauugcagggaggugga

SEQ ID NO: 1782579 - RNA, 19 nt, Artificial Sequence
  Description of Artificial Sequence: Synthetic oligonucleotide
ccuuagugccccgaauggc

SEQ ID NO: 1782580 - RNA, 19 nt, Artificial Sequence
  Description of Artificial Sequence: Synthetic oligonucleotide
caguauaggagaggcccca

SEQ ID NO: 1782581 - RNA, 19 nt, Artificial Sequence
  Description of Artificial Sequence: Synthetic oligonucleotide
ugggcucguggcaccaguu

SEQ ID NO: 1782582 - RNA, 19 nt, Artificial Sequence
  Description of Artificial Sequence: Synthetic oligonucleotide
caaugcccaccaucauguc

SEQ ID NO: 1782583 - RNA, 19 nt, Artificial Sequence
  Description of Artificial Sequence: Synthetic oligonucleotide
ccgaagcgugaagagaagc

SEQ ID NO: 1782584 - RNA, 19 nt, Artificial Sequence
  Description of Artificial Sequence: Synthetic oligonucleotide
cucggcgggcugcacucag

SEQ ID NO: 1782585 - RNA, 19 nt, Artificial Sequence
  Description of Artificial Sequence: Synthetic oligonucleotide
cccaaucaaaauccucauc

SEQ ID NO: 1782586 - RNA, 19 nt, Artificial Sequence
  Description of Artificial Sequence: Synthetic oligonucleotide
gccgcaacugacgcaggcg

SEQ ID NO: 1782587 - RNA, 19 nt, Artificial Sequence
  Description of Artificial Sequence: Synthetic oligonucleotide
gaauggcuuccacgcucca

SEQ ID NO: 1782588 - RNA, 19 nt, Artificial Sequence
  Description of Artificial Sequence: Synthetic oligonucleotide
cccugcuacuccguggacg

SEQ ID NO: 1782589 - RNA, 19 nt, Artificial Sequence
  Description of Artificial Sequence: Synthetic oligonucleotide
ccgaauggccgcagugccg

SEQ ID NO: 1782590 - RNA, 19 nt, Artificial Sequence
  Description of Artificial Sequence: Synthetic oligonucleotide
gaagaucguccuggcuuca

SEQ ID NO: 1782591 - RNA, 19 nt, Artificial Sequence
  Description of Artificial Sequence: Synthetic oligonucleotide
cgguguguuguauguagac

SEQ ID NO: 1782592 - RNA, 19 nt, Artificial Sequence
  Description of Artificial Sequence: Synthetic oligonucleotide
gguguguuguauguagacu

SEQ ID NO: 1782593 - RNA, 19 nt, Artificial Sequence
  Description of Artificial Sequence: Synthetic oligonucleotide
cccaugccagguauccaag

SEQ ID NO: 1782594 - RNA, 19 nt, Artificial Sequence
  Description of Artificial Sequence: Synthetic oligonucleotide
ggacgccgggccauagugg

SEQ ID NO: 1782595 - RNA, 19 nt, Artificial Sequence
  Description of Artificial Sequence: Synthetic oligonucleotide
gccauaguggaaaggaccu

SEQ ID NO: 1782596 - RNA, 19 nt, Artificial Sequence
  Description of Artificial Sequence: Synthetic oligonucleotide
ggacaagccuagacagacc

SEQ ID NO: 1782597 - RNA, 19 nt, Artificial Sequence
  Description of Artificial Sequence: Synthetic oligonucleotide
agugccccgaauggccgca

SEQ ID NO: 1782598 - RNA, 19 nt, Artificial Sequence
  Description of Artificial Sequence: Synthetic oligonucleotide
gcugaccuuacgguuguca

SEQ ID NO: 1782599 - RNA, 19 nt, Artificial Sequence
  Description of Artificial Sequence: Synthetic oligonucleotide
ccauccccuagcuccuuag

SEQ ID NO: 1782600 - RNA, 19 nt, Artificial Sequence
  Description of Artificial Sequence: Synthetic oligonucleotide
ggucuacaucugauguccc

SEQ ID NO: 1782601 - RNA, 19 nt, Artificial Sequence
  Description of Artificial Sequence: Synthetic oligonucleotide
ccaggucuacaucugaugu

SEQ ID NO: 1782602 - RNA, 19 nt, Artificial Sequence
  Description of Artificial Sequence: Synthetic oligonucleotide
cagcuguacuccacgugaa

SEQ ID NO: 1782603 - RNA, 19 nt, Artificial Sequence
  Description of Artificial Sequence: Synthetic oligonucleotide
ccaaagccacagcucgggc

SEQ ID NO: 1782604 - RNA, 19 nt, Artificial Sequence
  Description of Artificial Sequence: Synthetic oligonucleotide
caaggguguccccugaguu

SEQ ID NO: 1782605 - RNA, 19 nt, Artificial Sequence
  Description of Artificial Sequence: Synthetic oligonucleotide
cuacuccguggacgccggg

SEQ ID NO: 1782606 - RNA, 19 nt, Artificial Sequence
  Description of Artificial Sequence: Synthetic oligonucleotide
uggcaccaguuguggcugu

SEQ ID NO: 1782607 - RNA, 19 nt, Artificial Sequence
  Description of Artificial Sequence: Synthetic oligonucleotide
ccagcgacugcaguucaug

SEQ ID NO: 1782608 - RNA, 19 nt, Artificial Sequence
  Description of Artificial Sequence: Synthetic oligonucleotide
gaggacuuguucaggucau

SEQ ID NO: 1782609 - RNA, 19 nt, Artificial Sequence
  Description of Artificial Sequence: Synthetic oligonucleotide
caggagcggaugacuuuca

SEQ ID NO: 1782610 - RNA, 19 nt, Artificial Sequence
  Description of Artificial Sequence: Synthetic oligonucleotide
ggcuuccacgcuccauggc

SEQ ID NO: 1782611 - RNA, 19 nt, Artificial Sequence
  Description of Artificial Sequence: Synthetic oligonucleotide
agucccugccacggugugu

SEQ ID NO: 1782612 - RNA, 19 nt, Artificial Sequence
  Description of Artificial Sequence: Synthetic oligonucleotide
uccguggacgccgggccau

SEQ ID NO: 1782613 - RNA, 19 nt, Artificial Sequence
  Description of Artificial Sequence: Synthetic oligonucleotide
gcccagcuuguuauguagc

SEQ ID NO: 1782614 - RNA, 19 nt, Artificial Sequence
  Description of Artificial Sequence: Synthetic oligonucleotide
gggccauaguggaaaggac

SEQ ID NO: 1782615 - RNA, 19 nt, Artificial Sequence
  Description of Artificial Sequence: Synthetic oligonucleotide
gcugcacucagaacaaagu

SEQ ID NO: 1782616 - RNA, 19 nt, Artificial Sequence
  Description of Artificial Sequence: Synthetic oligonucleotide
ggagcacaccaucggguaa

SEQ ID NO: 1782617 - RNA, 19 nt, Artificial Sequence
  Description of Artificial Sequence: Synthetic oligonucleotide
uccacgcuccauggccaac

SEQ ID NO: 1782618 - RNA, 19 nt, Artificial Sequence
  Description of Artificial Sequence: Synthetic oligonucleotide
gccccgaauggccgcagug

SEQ ID NO: 1782619 - RNA, 19 nt, Artificial Sequence
  Description of Artificial Sequence: Synthetic oligonucleotide
ucucggcgggcugcacuca

SEQ ID NO: 1782620 - RNA, 19 nt, Artificial Sequence
  Description of Artificial Sequence: Synthetic oligonucleotide
ccccgaauggccgcagugc

SEQ ID NO: 1782621 - RNA, 19 nt, Artificial Sequence
  Description of Artificial Sequence: Synthetic oligonucleotide
agcacaccaucggguaaaa

SEQ ID NO: 1782622 - RNA, 19 nt, Artificial Sequence
  Description of Artificial Sequence: Synthetic oligonucleotide
gguguccccugaguuuggc

SEQ ID NO: 1782623 - RNA, 19 nt, Artificial Sequence
  Description of Artificial Sequence: Synthetic oligonucleotide
gccgggccauaguggaaag

SEQ ID NO: 1782624 - RNA, 19 nt, Artificial Sequence
  Description of Artificial Sequence: Synthetic oligonucleotide
ccgcaacugacgcaggcga

SEQ ID NO: 1782625 - RNA, 19 nt, Artificial Sequence
  Description of Artificial Sequence: Synthetic oligonucleotide
cugcuacuccguggacgcc

SEQ ID NO: 1782626 - RNA, 19 nt, Artificial Sequence
  Description of Artificial Sequence: Synthetic oligonucleotide
gccgaagcgugaagagaag

SEQ ID NO: 1782627 - RNA, 19 nt, Artificial Sequence
  Description of Artificial Sequence: Synthetic oligonucleotide
cccucaaggguguccccug

SEQ ID NO: 1782628 - RNA, 19 nt, Artificial Sequence
  Description of Artificial Sequence: Synthetic oligonucleotide
ccuuacgguugucacagcu

SEQ ID NO: 1782629 - RNA, 19 nt, Artificial Sequence
  Description of Artificial Sequence: Synthetic oligonucleotide
cagcccagcuuguuaugua

SEQ ID NO: 1782630 - RNA, 19 nt, Artificial Sequence
  Description of Artificial Sequence: Synthetic oligonucleotide
cagagucauagccccaguu

SEQ ID NO: 1782631 - RNA, 19 nt, Artificial Sequence
  Description of Artificial Sequence: Synthetic oligonucleotide
cucugacagggccugguuu

SEQ ID NO: 1782632 - RNA, 19 nt, Artificial Sequence
  Description of Artificial Sequence: Synthetic oligonucleotide
ccaaguguacgccaauaau

SEQ ID NO: 1782633 - RNA, 19 nt, Artificial Sequence
  Description of Artificial Sequence: Synthetic oligonucleotide
aggucaucccagacccaau

SEQ ID NO: 1782634 - RNA, 19 nt, Artificial Sequence
  Description of Artificial Sequence: Synthetic oligonucleotide
gugucccaugccagguauc

SEQ ID NO: 1782635 - RNA, 19 nt, Artificial Sequence
  Description of Artificial Sequence: Synthetic oligonucleotide
caggagaggucaucuugau

SEQ ID NO: 1782636 - RNA, 19 nt, Artificial Sequence
  Description of Artificial Sequence: Synthetic oligonucleotide
gcccaguauaggagaggcc

SEQ ID NO: 1782637 - RNA, 19 nt, Artificial Sequence
  Description of Artificial Sequence: Synthetic oligonucleotide
ccccaguuaguggugccug

SEQ ID NO: 1782638 - RNA, 19 nt, Artificial Sequence
  Description of Artificial Sequence: Synthetic oligonucleotide
cgaagcgugaagagaagcu

SEQ ID NO: 1782639 - RNA, 19 nt, Artificial Sequence
  Description of Artificial Sequence: Synthetic oligonucleotide
ggccaacaggaagaucguc

SEQ ID NO: 1782640 - RNA, 19 nt, Artificial Sequence
  Description of Artificial Sequence: Synthetic oligonucleotide
ggcacaggagcggaugacu

SEQ ID NO: 1782641 - RNA, 19 nt, Artificial Sequence
  Description of Artificial Sequence: Synthetic oligonucleotide
cagugucccaugccaggua

SEQ ID NO: 1782642 - RNA, 19 nt, Artificial Sequence
  Description of Artificial Sequence: Synthetic oligonucleotide
gcaacugacgcaggcgaua

SEQ ID NO: 1782643 - RNA, 19 nt, Artificial Sequence
  Description of Artificial Sequence: Synthetic oligonucleotide
cacaggagcggaugacuuu

SEQ ID NO: 1782644 - RNA, 19 nt, Artificial Sequence
  Description of Artificial Sequence: Synthetic oligonucleotide
gucccugccacgguguguu

SEQ ID NO: 1782645 - RNA, 19 nt, Artificial Sequence
  Description of Artificial Sequence: Synthetic oligonucleotide
ccugguuucugggcucgug

SEQ ID NO: 1782646 - RNA, 19 nt, Artificial Sequence
  Description of Artificial Sequence: Synthetic oligonucleotide
cacagcacuggggauggau

SEQ ID NO: 1782647 - RNA, 19 nt, Artificial Sequence
  Description of Artificial Sequence: Synthetic oligonucleotide
ccucaccacaacggcaguc

SEQ ID NO: 1782648 - RNA, 19 nt, Artificial Sequence
  Description of Artificial Sequence: Synthetic oligonucleotide
ggguguccccugaguuugg

SEQ ID NO: 1782649 - RNA, 19 nt, Artificial Sequence
  Description of Artificial Sequence: Synthetic oligonucleotide
gcgugaagagaagcuuguc

SEQ ID NO: 1782650 - RNA, 19 nt, Artificial Sequence
  Description of Artificial Sequence: Synthetic oligonucleotide
gcucagcaaggcagcugag

SEQ ID NO: 1782651 - RNA, 19 nt, Artificial Sequence
  Description of Artificial Sequence: Synthetic oligonucleotide
ccgggccauaguggaaagg

SEQ ID NO: 1782652 - RNA, 19 nt, Artificial Sequence
  Description of Artificial Sequence: Synthetic oligonucleotide
cgggcaucugcgucucggc

SEQ ID NO: 1782653 - RNA, 19 nt, Artificial Sequence
  Description of Artificial Sequence: Synthetic oligonucleotide
ccacaacggcagucccugc

SEQ ID NO: 1782654 - RNA, 19 nt, Artificial Sequence
  Description of Artificial Sequence: Synthetic oligonucleotide
caucugcgucucggcgggc

SEQ ID NO: 1782655 - RNA, 19 nt, Artificial Sequence
  Description of Artificial Sequence: Synthetic oligonucleotide
gugccccgaauggccgcag

SEQ ID NO: 1782656 - RNA, 19 nt, Artificial Sequence
  Description of Artificial Sequence: Synthetic oligonucleotide
cgcagugccgcagcuguac

SEQ ID NO: 1782657 - RNA, 19 nt, Artificial Sequence
  Description of Artificial Sequence: Synthetic oligonucleotide
cugggcucguggcaccagu

SEQ ID NO: 1782658 - RNA, 19 nt, Artificial Sequence
  Description of Artificial Sequence: Synthetic oligonucleotide
guggacgccgggccauagu

SEQ ID NO: 1782659 - RNA, 19 nt, Artificial Sequence
  Description of Artificial Sequence: Synthetic oligonucleotide
ccaucggguaaaaccuucu

SEQ ID NO: 1782660 - RNA, 19 nt, Artificial Sequence
  Description of Artificial Sequence: Synthetic oligonucleotide
cgacugcaguucaugcuca

SEQ ID NO: 1782661 - RNA, 19 nt, Artificial Sequence
  Description of Artificial Sequence: Synthetic oligonucleotide
gcacaccaucggguaaaac

SEQ ID NO: 1782662 - RNA, 19 nt, Artificial Sequence
  Description of Artificial Sequence: Synthetic oligonucleotide
ccacgcuccauggccaaca

SEQ ID NO: 1782663 - RNA, 19 nt, Artificial Sequence
  Description of Artificial Sequence: Synthetic oligonucleotide
gcuccuuagugccccgaau

SEQ ID NO: 1782664 - RNA, 19 nt, Artificial Sequence
  Description of Artificial Sequence: Synthetic oligonucleotide
cccuggccgaagcgugaag

SEQ ID NO: 1782665 - RNA, 19 nt, Artificial Sequence
  Description of Artificial Sequence: Synthetic oligonucleotide
cagccacuccuaugcacuu

SEQ ID NO: 1782666 - RNA, 19 nt, Artificial Sequence
  Description of Artificial Sequence: Synthetic oligonucleotide
cagccgaguggcagccacu

SEQ ID NO: 1782667 - RNA, 19 nt, Artificial Sequence
  Description of Artificial Sequence: Synthetic oligonucleotide
acgccgggccauaguggaa

SEQ ID NO: 1782668 - RNA, 19 nt, Artificial Sequence
  Description of Artificial Sequence: Synthetic oligonucleotide
gcccugcuacuccguggac

SEQ ID NO: 1782669 - RNA, 19 nt, Artificial Sequence
  Description of Artificial Sequence: Synthetic oligonucleotide
gcagucccugccacggugu

SEQ ID NO: 1782670 - RNA, 19 nt, Artificial Sequence
  Description of Artificial Sequence: Synthetic oligonucleotide
cggguaaaaccuucuguuu

SEQ ID NO: 1782671 - RNA, 19 nt, Artificial Sequence
  Description of Artificial Sequence: Synthetic oligonucleotide
cgaguggcagccacuccua

SEQ ID NO: 1782672 - RNA, 19 nt, Artificial Sequence
  Description of Artificial Sequence: Synthetic oligonucleotide
gggcugcacucagaacaaa

SEQ ID NO: 1782673 - RNA, 19 nt, Artificial Sequence
  Description of Artificial Sequence: Synthetic oligonucleotide
ccacgugaaagcugaccuu

SEQ ID NO: 1782674 - RNA, 19 nt, Artificial Sequence
  Description of Artificial Sequence: Synthetic oligonucleotide
gccccaguuaguggugccu

SEQ ID NO: 1782675 - RNA, 19 nt, Artificial Sequence
  Description of Artificial Sequence: Synthetic oligonucleotide
cguggacgccgggccauag

SEQ ID NO: 1782676 - RNA, 19 nt, Artificial Sequence
  Description of Artificial Sequence: Synthetic oligonucleotide
gcccuggccgaagcgugaa

SEQ ID NO: 1782677 - RNA, 19 nt, Artificial Sequence
  Description of Artificial Sequence: Synthetic oligonucleotide
cgucucggcgggcugcacu

SEQ ID NO: 1782678 - RNA, 19 nt, Artificial Sequence
  Description of Artificial Sequence: Synthetic oligonucleotide
gcacagcacuggggaugga

SEQ ID NO: 1782679 - RNA, 19 nt, Artificial Sequence
  Description of Artificial Sequence: Synthetic oligonucleotide
ccgcagugccgcagcugua

SEQ ID NO: 1782680 - RNA, 19 nt, Artificial Sequence
  Description of Artificial Sequence: Synthetic oligonucleotide
gccugguuucugggcucgu

SEQ ID NO: 1782681 - RNA, 19 nt, Artificial Sequence
  Description of Artificial Sequence: Synthetic oligonucleotide
ggccauccccuagcuccuu

SEQ ID NO: 1782682 - RNA, 19 nt, Artificial Sequence
  Description of Artificial Sequence: Synthetic oligonucleotide
ccguggacgccgggccaua

SEQ ID NO: 1782683 - RNA, 19 nt, Artificial Sequence
  Description of Artificial Sequence: Synthetic oligonucleotide
auuaauaggacuuuuaugc

SEQ ID NO: 1782684 - RNA, 19 nt, Artificial Sequence
  Description of Artificial Sequence: Synthetic oligonucleotide
aacaauaccaacugcuugc

SEQ ID NO: 1782685 - RNA, 19 nt, Artificial Sequence
  Description of Artificial Sequence: Synthetic oligonucleotide
auuacugugacccuaaaag

SEQ ID NO: 1782686 - RNA, 19 nt, Artificial Sequence
  Description of Artificial Sequence: Synthetic oligonucleotide
uauaacacaaggaaaguag

SEQ ID NO: 1782687 - RNA, 19 nt, Artificial Sequence
  Description of Artificial Sequence: Synthetic oligonucleotide
uguguauaagaaaaguccg

SEQ ID NO: 1782688 - RNA, 19 nt, Artificial Sequence
  Description of Artificial Sequence: Synthetic oligonucleotide
aauauaagaugucuaaaca

SEQ ID NO: 1782689 - RNA, 19 nt, Artificial Sequence
  Description of Artificial Sequence: Synthetic oligonucleotide
uaaaacuuaucauagcucc

SEQ ID NO: 1782690 - RNA, 19 nt, Artificial Sequence
  Description of Artificial Sequence: Synthetic oligonucleotide
agaauaaggggauuaauag

SEQ ID NO: 1782691 - RNA, 19 nt, Artificial Sequence
  Description of Artificial Sequence: Synthetic oligonucleotide
ucauaaauaaagccgcggg

SEQ ID NO: 1782692 - RNA, 19 nt, Artificial Sequence
  Description of Artificial Sequence: Synthetic oligonucleotide
ucuuucuugaaucugagaa

SEQ ID NO: 1782693 - RNA, 19 nt, Artificial Sequence
  Description of Artificial Sequence: Synthetic oligonucleotide
auguguauaagaaaagucc

SEQ ID NO: 1782694 - RNA, 19 nt, Artificial Sequence
  Description of Artificial Sequence: Synthetic oligonucleotide
auggcuaugagacaaggac

SEQ ID NO: 1782695 - RNA, 19 nt, Artificial Sequence
  Description of Artificial Sequence: Synthetic oligonucleotide
uuggggaacuaucagaggg

SEQ ID NO: 1782696 - RNA, 19 nt, Artificial Sequence
  Description of Artificial Sequence: Synthetic oligonucleotide
agauucauaaauaaagccg

SEQ ID NO: 1782697 - RNA, 19 nt, Artificial Sequence
  Description of Artificial Sequence: Synthetic oligonucleotide
gauucauaaauaaagccgc

SEQ ID NO: 1782698 - RNA, 19 nt, Artificial Sequence
  Description of Artificial Sequence: Synthetic oligonucleotide
ugagucauggcucugagaa

SEQ ID NO: 1782699 - RNA, 19 nt, Artificial Sequence
  Description of Artificial Sequence: Synthetic oligonucleotide
uauaccagagcuaagggaa

SEQ ID NO: 1782700 - RNA, 19 nt, Artificial Sequence
  Description of Artificial Sequence: Synthetic oligonucleotide
uauaagaugucuaaacauc

SEQ ID NO: 1782701 - RNA, 19 nt, Artificial Sequence
  Description of Artificial Sequence: Synthetic oligonucleotide
aagucacuccagcaaagcc

SEQ ID NO: 1782702 - RNA, 19 nt, Artificial Sequence
  Description of Artificial Sequence: Synthetic oligonucleotide
uuauccacuccucagaagu

SEQ ID NO: 1782703 - RNA, 19 nt, Artificial Sequence
  Description of Artificial Sequence: Synthetic oligonucleotide
ugagacaaggacccgagag

SEQ ID NO: 1782704 - RNA, 19 nt, Artificial Sequence
  Description of Artificial Sequence: Synthetic oligonucleotide
agugcugcuaucccaaccc

SEQ ID NO: 1782705 - RNA, 19 nt, Artificial Sequence
  Description of Artificial Sequence: Synthetic oligonucleotide
gauuaauaggacuuuuaug

SEQ ID NO: 1782706 - RNA, 19 nt, Artificial Sequence
  Description of Artificial Sequence: Synthetic oligonucleotide
cagauucauaaauaaagcc

SEQ ID NO: 1782707 - RNA, 19 nt, Artificial Sequence
  Description of Artificial Sequence: Synthetic oligonucleotide
guugcuuaaguucuacugg

SEQ ID NO: 1782708 - RNA, 19 nt, Artificial Sequence
  Description of Artificial Sequence: Synthetic oligonucleotide
aacugcuugccauaaaacu

SEQ ID NO: 1782709 - RNA, 19 nt, Artificial Sequence
  Description of Artificial Sequence: Synthetic oligonucleotide
ugacccuaaaagaucaucc

SEQ ID NO: 1782710 - RNA, 19 nt, Artificial Sequence
  Description of Artificial Sequence: Synthetic oligonucleotide
gaugucuaaacaucgaaga

SEQ ID NO: 1782711 - RNA, 19 nt, Artificial Sequence
  Description of Artificial Sequence: Synthetic oligonucleotide
uuuaugauucaccugcuuc

SEQ ID NO: 1782712 - RNA, 19 nt, Artificial Sequence
  Description of Artificial Sequence: Synthetic oligonucleotide
uguugcuuaaguucuacug

SEQ ID NO: 1782713 - RNA, 19 nt, Artificial Sequence
  Description of Artificial Sequence: Synthetic oligonucleotide
aguguguacacccucugac

SEQ ID NO: 1782714 - RNA, 19 nt, Artificial Sequence
  Description of Artificial Sequence: Synthetic oligonucleotide
uguauaagaaaaguccgag

SEQ ID NO: 1782715 - RNA, 19 nt, Artificial Sequence
  Description of Artificial Sequence: Synthetic oligonucleotide
auaagaaaaguccgagcac

SEQ ID NO: 1782716 - RNA, 19 nt, Artificial Sequence
  Description of Artificial Sequence: Synthetic oligonucleotide
ucgaagacaccacauaucu

SEQ ID NO: 1782717 - RNA, 19 nt, Artificial Sequence
  Description of Artificial Sequence: Synthetic oligonucleotide
aguucuuuacacuggauca

SEQ ID NO: 1782718 - RNA, 19 nt, Artificial Sequence
  Description of Artificial Sequence: Synthetic oligonucleotide
cuacagaccacucugcagg

SEQ ID NO: 1782719 - RNA, 19 nt, Artificial Sequence
  Description of Artificial Sequence: Synthetic oligonucleotide
uucacuggcuuuaugauuc

SEQ ID NO: 1782720 - RNA, 19 nt, Artificial Sequence
  Description of Artificial Sequence: Synthetic oligonucleotide
acuuaucauagcuccaaac

SEQ ID NO: 1782721 - RNA, 19 nt, Artificial Sequence
  Description of Artificial Sequence: Synthetic oligonucleotide
uaagaaaaguccgagcacc

SEQ ID NO: 1782722 - RNA, 19 nt, Artificial Sequence
  Description of Artificial Sequence: Synthetic oligonucleotide
auauaagaugucuaaacau

SEQ ID NO: 1782723 - RNA, 19 nt, Artificial Sequence
  Description of Artificial Sequence: Synthetic oligonucleotide
uuaugauucaccugcuucu

SEQ ID NO: 1782724 - RNA, 19 nt, Artificial Sequence
  Description of Artificial Sequence: Synthetic oligonucleotide
cucuccauuacugugaccc

SEQ ID NO: 1782725 - RNA, 19 nt, Artificial Sequence
  Description of Artificial Sequence: Synthetic oligonucleotide
ucaccugcuucucugagag

SEQ ID NO: 1782726 - RNA, 19 nt, Artificial Sequence
  Description of Artificial Sequence: Synthetic oligonucleotide
uguguacacccucugaccc

SEQ ID NO: 1782727 - RNA, 19 nt, Artificial Sequence
  Description of Artificial Sequence: Synthetic oligonucleotide
augucuaaacaucgaagac

SEQ ID NO: 1782728 - RNA, 19 nt, Artificial Sequence
  Description of Artificial Sequence: Synthetic oligonucleotide
ucuucaauauaaaauugua

SEQ ID NO: 1782729 - RNA, 19 nt, Artificial Sequence
  Description of Artificial Sequence: Synthetic oligonucleotide
aaagcacauguguauaaga

SEQ ID NO: 1782730 - RNA, 19 nt, Artificial Sequence
  Description of Artificial Sequence: Synthetic oligonucleotide
ucauuuauccacuccucag

SEQ ID NO: 1782731 - RNA, 19 nt, Artificial Sequence
  Description of Artificial Sequence: Synthetic oligonucleotide
aaagcccuuucccuccacc

SEQ ID NO: 1782732 - RNA, 19 nt, Artificial Sequence
  Description of Artificial Sequence: Synthetic oligonucleotide
uucauaaauaaagccgcgg

SEQ ID NO: 1782733 - RNA, 19 nt, Artificial Sequence
  Description of Artificial Sequence: Synthetic oligonucleotide
uuaauaggacuuuuaugca

SEQ ID NO: 1782734 - RNA, 19 nt, Artificial Sequence
  Description of Artificial Sequence: Synthetic oligonucleotide
auaaaacuuaucauagcuc

SEQ ID NO: 1782735 - RNA, 19 nt, Artificial Sequence
  Description of Artificial Sequence: Synthetic oligonucleotide
cauaaauaaagccgcgggc

SEQ ID NO: 1782736 - RNA, 19 nt, Artificial Sequence
  Description of Artificial Sequence: Synthetic oligonucleotide
uuugguagcgaaccugcag

SEQ ID NO: 1782737 - RNA, 19 nt, Artificial Sequence
  Description of Artificial Sequence: Synthetic oligonucleotide
aaauaaagccgcgggcagc

SEQ ID NO: 1782738 - RNA, 19 nt, Artificial Sequence
  Description of Artificial Sequence: Synthetic oligonucleotide
uucccaacuccccaaagcc

SEQ ID NO: 1782739 - RNA, 19 nt, Artificial Sequence
  Description of Artificial Sequence: Synthetic oligonucleotide
gaagacaccacauaucucu

SEQ ID NO: 1782740 - RNA, 19 nt, Artificial Sequence
  Description of Artificial Sequence: Synthetic oligonucleotide
ugccauaaaacuuaucaua

SEQ ID NO: 1782741 - RNA, 19 nt, Artificial Sequence
  Description of Artificial Sequence: Synthetic oligonucleotide
uaugagacaaggacccgag

SEQ ID NO: 1782742 - RNA, 19 nt, Artificial Sequence
  Description of Artificial Sequence: Synthetic oligonucleotide
aggaucaguuuuaaaauac

SEQ ID NO: 1782743 - RNA, 19 nt, Artificial Sequence
  Description of Artificial Sequence: Synthetic oligonucleotide
uucauuuauccacuccuca

SEQ ID NO: 1782744 - RNA, 19 nt, Artificial Sequence
  Description of Artificial Sequence: Synthetic oligonucleotide
aaauggcuaugagacaagg

SEQ ID NO: 1782745 - RNA, 19 nt, Artificial Sequence
  Description of Artificial Sequence: Synthetic oligonucleotide
cuuaucauagcuccaaaca

SEQ ID NO: 1782746 - RNA, 19 nt, Artificial Sequence
  Description of Artificial Sequence: Synthetic oligonucleotide
uuacugugacccuaaaaga

SEQ ID NO: 1782747 - RNA, 19 nt, Artificial Sequence
  Description of Artificial Sequence: Synthetic oligonucleotide
auaaauaaagccgcgggca

SEQ ID NO: 1782748 - RNA, 19 nt, Artificial Sequence
  Description of Artificial Sequence: Synthetic oligonucleotide
uuuacacaaagcacaugug

SEQ ID NO: 1782749 - RNA, 19 nt, Artificial Sequence
  Description of Artificial Sequence: Synthetic oligonucleotide
uuucccuccaccauccucu

SEQ ID NO: 1782750 - RNA, 19 nt, Artificial Sequence
  Description of Artificial Sequence: Synthetic oligonucleotide
ucugucauuuccuuggcuc

SEQ ID NO: 1782751 - RNA, 19 nt, Artificial Sequence
  Description of Artificial Sequence: Synthetic oligonucleotide
uugcuuaaguucuacuggc

SEQ ID NO: 1782752 - RNA, 19 nt, Artificial Sequence
  Description of Artificial Sequence: Synthetic oligonucleotide
uccaauucauuuauccacu

SEQ ID NO: 1782753 - RNA, 19 nt, Artificial Sequence
  Description of Artificial Sequence: Synthetic oligonucleotide
uggcuaugagacaaggacc

SEQ ID NO: 1782754 - RNA, 19 nt, Artificial Sequence
  Description of Artificial Sequence: Synthetic oligonucleotide
uacaguuggggaacuauca

SEQ ID NO: 1782755 - RNA, 19 nt, Artificial Sequence
  Description of Artificial Sequence: Synthetic oligonucleotide
cuaaacaucgaagacacca

SEQ ID NO: 1782756 - RNA, 19 nt, Artificial Sequence
  Description of Artificial Sequence: Synthetic oligonucleotide
aguucuacuggcccaguuc

SEQ ID NO: 1782757 - RNA, 19 nt, Artificial Sequence
  Description of Artificial Sequence: Synthetic oligonucleotide
aaacaucgaagacaccaca

SEQ ID NO: 1782758 - RNA, 19 nt, Artificial Sequence
  Description of Artificial Sequence: Synthetic oligonucleotide
agcaaagcccuuucccucc

SEQ ID NO: 1782759 - RNA, 19 nt, Artificial Sequence
  Description of Artificial Sequence: Synthetic oligonucleotide
uaguuuagcaguguguaca

SEQ ID NO: 1782760 - RNA, 19 nt, Artificial Sequence
  Description of Artificial Sequence: Synthetic oligonucleotide
cuugugacaaggacaagug

SEQ ID NO: 1782761 - RNA, 19 nt, Artificial Sequence
  Description of Artificial Sequence: Synthetic oligonucleotide
gaugggaugugcgaggaag

SEQ ID NO: 1782762 - RNA, 19 nt, Artificial Sequence
  Description of Artificial Sequence: Synthetic oligonucleotide
aaggaaaguagagacuucu

SEQ ID NO: 1782763 - RNA, 19 nt, Artificial Sequence
  Description of Artificial Sequence: Synthetic oligonucleotide
uaaacaucgaagacaccac

SEQ ID NO: 1782764 - RNA, 19 nt, Artificial Sequence
  Description of Artificial Sequence: Synthetic oligonucleotide
gugcaaacuaguuuagcag

SEQ ID NO: 1782765 - RNA, 19 nt, Artificial Sequence
  Description of Artificial Sequence: Synthetic oligonucleotide
cuuucuugaaucugagaac

SEQ ID NO: 1782766 - RNA, 19 nt, Artificial Sequence
  Description of Artificial Sequence: Synthetic oligonucleotide
gaucaaguguucugggacc

SEQ ID NO: 1782767 - RNA, 19 nt, Artificial Sequence
  Description of Artificial Sequence: Synthetic oligonucleotide
agcagauacugaccgcugc

SEQ ID NO: 1782768 - RNA, 19 nt, Artificial Sequence
  Description of Artificial Sequence: Synthetic oligonucleotide
uaagaugucuaaacaucga

SEQ ID NO: 1782769 - RNA, 19 nt, Artificial Sequence
  Description of Artificial Sequence: Synthetic oligonucleotide
ugugguuccucuacagacc

SEQ ID NO: 1782770 - RNA, 19 nt, Artificial Sequence
  Description of Artificial Sequence: Synthetic oligonucleotide
aaauauacaguuggacgcu

SEQ ID NO: 1782771 - RNA, 19 nt, Artificial Sequence
  Description of Artificial Sequence: Synthetic oligonucleotide
guauaagaaaaguccgagc

SEQ ID NO: 1782772 - RNA, 19 nt, Artificial Sequence
  Description of Artificial Sequence: Synthetic oligonucleotide
uuuccauacuaguaaaaua

SEQ ID NO: 1782773 - RNA, 19 nt, Artificial Sequence
  Description of Artificial Sequence: Synthetic oligonucleotide
aggagaaauggcuaugaga

SEQ ID NO: 1782774 - RNA, 19 nt, Artificial Sequence
  Description of Artificial Sequence: Synthetic oligonucleotide
uuuauaacacaaggaaagu

SEQ ID NO: 1782775 - RNA, 19 nt, Artificial Sequence
  Description of Artificial Sequence: Synthetic oligonucleotide
aauauacaguuggacgcuc

SEQ ID NO: 1782776 - RNA, 19 nt, Artificial Sequence
  Description of Artificial Sequence: Synthetic oligonucleotide
gccagauucauaaauaaag

SEQ ID NO: 1782777 - RNA, 19 nt, Artificial Sequence
  Description of Artificial Sequence: Synthetic oligonucleotide
acaccaucuugcuugugac

SEQ ID NO: 1782778 - RNA, 19 nt, Artificial Sequence
  Description of Artificial Sequence: Synthetic oligonucleotide
ucuugcuugugacaaggac

SEQ ID NO: 1782779 - RNA, 19 nt, Artificial Sequence
  Description of Artificial Sequence: Synthetic oligonucleotide
agauacugaccgcugcugg

SEQ ID NO: 1782780 - RNA, 19 nt, Artificial Sequence
  Description of Artificial Sequence: Synthetic oligonucleotide
uaauaggacuuuuaugcau

SEQ ID NO: 1782781 - RNA, 19 nt, Artificial Sequence
  Description of Artificial Sequence: Synthetic oligonucleotide
cagguagugaugccaaugg

SEQ ID NO: 1782782 - RNA, 19 nt, Artificial Sequence
  Description of Artificial Sequence: Synthetic oligonucleotide
gucuaaacaucgaagacac

SEQ ID NO: 1782783 - RNA, 19 nt, Artificial Sequence
  Description of Artificial Sequence: Synthetic oligonucleotide
uacaguuggacgcucuaac

SEQ ID NO: 1782784 - RNA, 19 nt, Artificial Sequence
  Description of Artificial Sequence: Synthetic oligonucleotide
gacccgagagcacaggugc

SEQ ID NO: 1782785 - RNA, 19 nt, Artificial Sequence
  Description of Artificial Sequence: Synthetic oligonucleotide
accacgaucuggcuccagc

SEQ ID NO: 1782786 - RNA, 19 nt, Artificial Sequence
  Description of Artificial Sequence: Synthetic oligonucleotide
uuaaguucuacuggcccag

SEQ ID NO: 1782787 - RNA, 19 nt, Artificial Sequence
  Description of Artificial Sequence: Synthetic oligonucleotide
cuaaaagaucauccaauuc

SEQ ID NO: 1782788 - RNA, 19 nt, Artificial Sequence
  Description of Artificial Sequence: Synthetic oligonucleotide
cugugguuccucuacagac

SEQ ID NO: 1782789 - RNA, 19 nt, Artificial Sequence
  Description of Artificial Sequence: Synthetic oligonucleotide
acaauaccaacugcuugcc

SEQ ID NO: 1782790 - RNA, 19 nt, Artificial Sequence
  Description of Artificial Sequence: Synthetic oligonucleotide
aauaaagccgcgggcagcu

SEQ ID NO: 1782791 - RNA, 19 nt, Artificial Sequence
  Description of Artificial Sequence: Synthetic oligonucleotide
aaacuuaucauagcuccaa

SEQ ID NO: 1782792 - RNA, 19 nt, Artificial Sequence
  Description of Artificial Sequence: Synthetic oligonucleotide
cugaacugaguuucugggg

SEQ ID NO: 1782793 - RNA, 19 nt, Artificial Sequence
  Description of Artificial Sequence: Synthetic oligonucleotide
accugcagaagucacccuc

SEQ ID NO: 1782794 - RNA, 19 nt, Artificial Sequence
  Description of Artificial Sequence: Synthetic oligonucleotide
gaggguggcgucuucacug

SEQ ID NO: 1782795 - RNA, 19 nt, Artificial Sequence
  Description of Artificial Sequence: Synthetic oligonucleotide
acacauauaaaggaucagu

SEQ ID NO: 1782796 - RNA, 19 nt, Artificial Sequence
  Description of Artificial Sequence: Synthetic oligonucleotide
uuuauccacuccucagaag

SEQ ID NO: 1782797 - RNA, 19 nt, Artificial Sequence
  Description of Artificial Sequence: Synthetic oligonucleotide
cacauguguauaagaaaag

SEQ ID NO: 1782798 - RNA, 19 nt, Artificial Sequence
  Description of Artificial Sequence: Synthetic oligonucleotide
cuucaauauaaaauuguaa

SEQ ID NO: 1782799 - RNA, 19 nt, Artificial Sequence
  Description of Artificial Sequence: Synthetic oligonucleotide
uuauaacacaaggaaagua

SEQ ID NO: 1782800 - RNA, 19 nt, Artificial Sequence
  Description of Artificial Sequence: Synthetic oligonucleotide
agaugucuaaacaucgaag

SEQ ID NO: 1782801 - RNA, 19 nt, Artificial Sequence
  Description of Artificial Sequence: Synthetic oligonucleotide
aguccgagcacccuuuucu

SEQ ID NO: 1782802 - RNA, 19 nt, Artificial Sequence
  Description of Artificial Sequence: Synthetic oligonucleotide
uagcuccaaacacauauaa

SEQ ID NO: 1782803 - RNA, 19 nt, Artificial Sequence
  Description of Artificial Sequence: Synthetic oligonucleotide
aacugaguuucuggggugg

SEQ ID NO: 1782804 - RNA, 19 nt, Artificial Sequence
  Description of Artificial Sequence: Synthetic oligonucleotide
cauacuaguaaaauaauuu

SEQ ID NO: 1782805 - RNA, 19 nt, Artificial Sequence
  Description of Artificial Sequence: Synthetic oligonucleotide
gaaccugcagaagucaccc

SEQ ID NO: 1782806 - RNA, 19 nt, Artificial Sequence
  Description of Artificial Sequence: Synthetic oligonucleotide
acgaucuggcuccagcuuc

SEQ ID NO: 1782807 - RNA, 19 nt, Artificial Sequence
  Description of Artificial Sequence: Synthetic oligonucleotide
acauguguauaagaaaagu

SEQ ID NO: 1782808 - RNA, 19 nt, Artificial Sequence
  Description of Artificial Sequence: Synthetic oligonucleotide
acuaucagaggguggcguc

SEQ ID NO: 1782809 - RNA, 19 nt, Artificial Sequence
  Description of Artificial Sequence: Synthetic oligonucleotide
agcuaagggaagcagaaua

SEQ ID NO: 1782810 - RNA, 19 nt, Artificial Sequence
  Description of Artificial Sequence: Synthetic oligonucleotide
ggaaccacgaucuggcucc

SEQ ID NO: 1782811 - RNA, 19 nt, Artificial Sequence
  Description of Artificial Sequence: Synthetic oligonucleotide
cuugaaucugagaacaaaa

SEQ ID NO: 1782812 - RNA, 19 nt, Artificial Sequence
  Description of Artificial Sequence: Synthetic oligonucleotide
aguuggacgcucuaacacu

SEQ ID NO: 1782813 - RNA, 19 nt, Artificial Sequence
  Description of Artificial Sequence: Synthetic oligonucleotide
ugcuuaaguucuacuggcc

SEQ ID NO: 1782814 - RNA, 19 nt, Artificial Sequence
  Description of Artificial Sequence: Synthetic oligonucleotide
ucugcaggcaagucacucc

SEQ ID NO: 1782815 - RNA, 19 nt, Artificial Sequence
  Description of Artificial Sequence: Synthetic oligonucleotide
gauacugaccgcugcuggc

SEQ ID NO: 1782816 - RNA, 19 nt, Artificial Sequence
  Description of Artificial Sequence: Synthetic oligonucleotide
aucuucaauauaaaauugu

SEQ ID NO: 1782817 - RNA, 19 nt, Artificial Sequence
  Description of Artificial Sequence: Synthetic oligonucleotide
uugccauaaaacuuaucau

SEQ ID NO: 1782818 - RNA, 19 nt, Artificial Sequence
  Description of Artificial Sequence: Synthetic oligonucleotide
uccauacuaguaaaauaau

SEQ ID NO: 1782819 - RNA, 19 nt, Artificial Sequence
  Description of Artificial Sequence: Synthetic oligonucleotide
ugacccuccaagugcacag

SEQ ID NO: 1782820 - RNA, 19 nt, Artificial Sequence
  Description of Artificial Sequence: Synthetic oligonucleotide
gccauaaaacuuaucauag

SEQ ID NO: 1782821 - RNA, 19 nt, Artificial Sequence
  Description of Artificial Sequence: Synthetic oligonucleotide
auacugaccgcugcuggcc

SEQ ID NO: 1782822 - RNA, 19 nt, Artificial Sequence
  Description of Artificial Sequence: Synthetic oligonucleotide
aaagccagauucauaaaua

SEQ ID NO: 1782823 - RNA, 19 nt, Artificial Sequence
  Description of Artificial Sequence: Synthetic oligonucleotide
agucauggcucugagaaga

SEQ ID NO: 1782824 - RNA, 19 nt, Artificial Sequence
  Description of Artificial Sequence: Synthetic oligonucleotide
ugggacccaggacaguggg

SEQ ID NO: 1782825 - RNA, 19 nt, Artificial Sequence
  Description of Artificial Sequence: Synthetic oligonucleotide
ugguguauaccagagcuaa

SEQ ID NO: 1782826 - RNA, 19 nt, Artificial Sequence
  Description of Artificial Sequence: Synthetic oligonucleotide
agguagugaugccaauggg

SEQ ID NO: 1782827 - RNA, 19 nt, Artificial Sequence
  Description of Artificial Sequence: Synthetic oligonucleotide
cuucccaacuccccaaagc

SEQ ID NO: 1782828 - RNA, 19 nt, Artificial Sequence
  Description of Artificial Sequence: Synthetic oligonucleotide
acacaaagcacauguguau

SEQ ID NO: 1782829 - RNA, 19 nt, Artificial Sequence
  Description of Artificial Sequence: Synthetic oligonucleotide
ugcuaucccaaccccaggu

SEQ ID NO: 1782830 - RNA, 19 nt, Artificial Sequence
  Description of Artificial Sequence: Synthetic oligonucleotide
uuagcaguguguacacccu

SEQ ID NO: 1782831 - RNA, 19 nt, Artificial Sequence
  Description of Artificial Sequence: Synthetic oligonucleotide
aacuaguuuagcagugugu

SEQ ID NO: 1782832 - RNA, 19 nt, Artificial Sequence
  Description of Artificial Sequence: Synthetic oligonucleotide
aaaacuuaucauagcucca

SEQ ID NO: 1782833 - RNA, 19 nt, Artificial Sequence
  Description of Artificial Sequence: Synthetic oligonucleotide
acuaguuuagcagugugua

SEQ ID NO: 1782834 - RNA, 19 nt, Artificial Sequence
  Description of Artificial Sequence: Synthetic oligonucleotide
aaguccgagcacccuuuuc

SEQ ID NO: 1782835 - RNA, 19 nt, Artificial Sequence
  Description of Artificial Sequence: Synthetic oligonucleotide
cuaagggaagcagaauaag

SEQ ID NO: 1782836 - RNA, 19 nt, Artificial Sequence
  Description of Artificial Sequence: Synthetic oligonucleotide
cuuaaguucuacuggccca

SEQ ID NO: 1782837 - RNA, 19 nt, Artificial Sequence
  Description of Artificial Sequence: Synthetic oligonucleotide
aacuuaucauagcuccaaa

SEQ ID NO: 1782838 - RNA, 19 nt, Artificial Sequence
  Description of Artificial Sequence: Synthetic oligonucleotide
gacccuaaaagaucaucca

SEQ ID NO: 1782839 - RNA, 19 nt, Artificial Sequence
  Description of Artificial Sequence: Synthetic oligonucleotide
ugggccaugggcuuuuggu

SEQ ID NO: 1782840 - RNA, 19 nt, Artificial Sequence
  Description of Artificial Sequence: Synthetic oligonucleotide
auaacacaaggaaaguaga

SEQ ID NO: 1782841 - RNA, 19 nt, Artificial Sequence
  Description of Artificial Sequence: Synthetic oligonucleotide
ggaacuaucagaggguggc

SEQ ID NO: 1782842 - RNA, 19 nt, Artificial Sequence
  Description of Artificial Sequence: Synthetic oligonucleotide
caguuggacgcucuaacac

SEQ ID NO: 1782843 - RNA, 19 nt, Artificial Sequence
  Description of Artificial Sequence: Synthetic oligonucleotide
aggaggaaccacgaucugg

SEQ ID NO: 1782844 - RNA, 19 nt, Artificial Sequence
  Description of Artificial Sequence: Synthetic oligonucleotide
agcccaacggaccagcaga

SEQ ID NO: 1782845 - RNA, 19 nt, Artificial Sequence
  Description of Artificial Sequence: Synthetic oligonucleotide
gacaagugcugcuauccca

SEQ ID NO: 1782846 - RNA, 19 nt, Artificial Sequence
  Description of Artificial Sequence: Synthetic oligonucleotide
aacuaucagaggguggcgu

SEQ ID NO: 1782847 - RNA, 19 nt, Artificial Sequence
  Description of Artificial Sequence: Synthetic oligonucleotide
caacugcuugccauaaaac

SEQ ID NO: 1782848 - RNA, 19 nt, Artificial Sequence
  Description of Artificial Sequence: Synthetic oligonucleotide
ggaucaaguguucugggac

SEQ ID NO: 1782849 - RNA, 19 nt, Artificial Sequence
  Description of Artificial Sequence: Synthetic oligonucleotide
ggaugugcgaggaaguggg

SEQ ID NO: 1782850 - RNA, 19 nt, Artificial Sequence
  Description of Artificial Sequence: Synthetic oligonucleotide
aucgaagacaccacauauc

SEQ ID NO: 1782851 - RNA, 19 nt, Artificial Sequence
  Description of Artificial Sequence: Synthetic oligonucleotide
cuaguuuagcaguguguac

SEQ ID NO: 1782852 - RNA, 19 nt, Artificial Sequence
  Description of Artificial Sequence: Synthetic oligonucleotide
acaaagcacauguguauaa

SEQ ID NO: 1782853 - RNA, 19 nt, Artificial Sequence
  Description of Artificial Sequence: Synthetic oligonucleotide
acaguuggacgcucuaaca

SEQ ID NO: 1782854 - RNA, 19 nt, Artificial Sequence
  Description of Artificial Sequence: Synthetic oligonucleotide
cauccaauucauuuaucca

SEQ ID NO: 1782855 - RNA, 19 nt, Artificial Sequence
  Description of Artificial Sequence: Synthetic oligonucleotide
uggggaacuaucagagggu

SEQ ID NO: 1782856 - RNA, 19 nt, Artificial Sequence
  Description of Artificial Sequence: Synthetic oligonucleotide
cuggaucaaguguucuggg

SEQ ID NO: 1782857 - RNA, 19 nt, Artificial Sequence
  Description of Artificial Sequence: Synthetic oligonucleotide
aagacaccacauaucucuc

SEQ ID NO: 1782858 - RNA, 19 nt, Artificial Sequence
  Description of Artificial Sequence: Synthetic oligonucleotide
ucugagagcugaacugagu

SEQ ID NO: 1782859 - RNA, 19 nt, Artificial Sequence
  Description of Artificial Sequence: Synthetic oligonucleotide
acgcucuaacacuuauuuc

SEQ ID NO: 1782860 - RNA, 19 nt, Artificial Sequence
  Description of Artificial Sequence: Synthetic oligonucleotide
ugugcgaggaagugggguc

SEQ ID NO: 1782861 - RNA, 19 nt, Artificial Sequence
  Description of Artificial Sequence: Synthetic oligonucleotide
ggcucaguucuuuacacug

SEQ ID NO: 1782862 - RNA, 19 nt, Artificial Sequence
  Description of Artificial Sequence: Synthetic oligonucleotide
ugcagaagucacccucucc

SEQ ID NO: 1782863 - RNA, 19 nt, Artificial Sequence
  Description of Artificial Sequence: Synthetic oligonucleotide
gguagugaugccaaugggc

SEQ ID NO: 1782864 - RNA, 19 nt, Artificial Sequence
  Description of Artificial Sequence: Synthetic oligonucleotide
uaucccaaccccagguagu

SEQ ID NO: 1782865 - RNA, 19 nt, Artificial Sequence
  Description of Artificial Sequence: Synthetic oligonucleotide
uccauuacugugacccuaa

SEQ ID NO: 1782866 - RNA, 19 nt, Artificial Sequence
  Description of Artificial Sequence: Synthetic oligonucleotide
guguguacacccucugacc

SEQ ID NO: 1782867 - RNA, 19 nt, Artificial Sequence
  Description of Artificial Sequence: Synthetic oligonucleotide
uuuugguagcgaaccugca

SEQ ID NO: 1782868 - RNA, 19 nt, Artificial Sequence
  Description of Artificial Sequence: Synthetic oligonucleotide
acccuaaaagaucauccaa

SEQ ID NO: 1782869 - RNA, 19 nt, Artificial Sequence
  Description of Artificial Sequence: Synthetic oligonucleotide
gcuuaaguucuacuggccc

SEQ ID NO: 1782870 - RNA, 19 nt, Artificial Sequence
  Description of Artificial Sequence: Synthetic oligonucleotide
cauuuauccacuccucaga

SEQ ID NO: 1782871 - RNA, 19 nt, Artificial Sequence
  Description of Artificial Sequence: Synthetic oligonucleotide
gaacugaguuucuggggug

SEQ ID NO: 1782872 - RNA, 19 nt, Artificial Sequence
  Description of Artificial Sequence: Synthetic oligonucleotide
uauuuacacaaagcacaug

SEQ ID NO: 1782873 - RNA, 19 nt, Artificial Sequence
  Description of Artificial Sequence: Synthetic oligonucleotide
ucuaaacaucgaagacacc

SEQ ID NO: 1782874 - RNA, 19 nt, Artificial Sequence
  Description of Artificial Sequence: Synthetic oligonucleotide
gaguuucugggguggcagg

SEQ ID NO: 1782875 - RNA, 19 nt, Artificial Sequence
  Description of Artificial Sequence: Synthetic oligonucleotide
aacaucgaagacaccacau

SEQ ID NO: 1782876 - RNA, 19 nt, Artificial Sequence
  Description of Artificial Sequence: Synthetic oligonucleotide
augccaaugggcugggcca

SEQ ID NO: 1782877 - RNA, 19 nt, Artificial Sequence
  Description of Artificial Sequence: Synthetic oligonucleotide
cugugacccuaaaagauca

SEQ ID NO: 1782878 - RNA, 19 nt, Artificial Sequence
  Description of Artificial Sequence: Synthetic oligonucleotide
uuccucuacagaccacucu

SEQ ID NO: 1782879 - RNA, 19 nt, Artificial Sequence
  Description of Artificial Sequence: Synthetic oligonucleotide
accgcugcuggccuuagcu

SEQ ID NO: 1782880 - RNA, 19 nt, Artificial Sequence
  Description of Artificial Sequence: Synthetic oligonucleotide
uauacaguuggacgcucua

SEQ ID NO: 1782881 - RNA, 19 nt, Artificial Sequence
  Description of Artificial Sequence: Synthetic oligonucleotide
ucccaacuccccaaagcca

SEQ ID NO: 1782882 - RNA, 19 nt, Artificial Sequence
  Description of Artificial Sequence: Synthetic oligonucleotide
gaaauggcuaugagacaag

SEQ ID NO: 1782883 - RNA, 19 nt, Artificial Sequence
  Description of Artificial Sequence: Synthetic oligonucleotide
cuugagucauggcucugag

SEQ ID NO: 1782884 - RNA, 19 nt, Artificial Sequence
  Description of Artificial Sequence: Synthetic oligonucleotide
ucuugagucauggcucuga

SEQ ID NO: 1782885 - RNA, 19 nt, Artificial Sequence
  Description of Artificial Sequence: Synthetic oligonucleotide
accaucuugcuugugacaa

SEQ ID NO: 1782886 - RNA, 19 nt, Artificial Sequence
  Description of Artificial Sequence: Synthetic oligonucleotide
guagcgaaccugcagaagu

SEQ ID NO: 1782887 - RNA, 19 nt, Artificial Sequence
  Description of Artificial Sequence: Synthetic oligonucleotide
gagucauggcucugagaag

SEQ ID NO: 1782888 - RNA, 19 nt, Artificial Sequence
  Description of Artificial Sequence: Synthetic oligonucleotide
gaacuaucagaggguggcg

SEQ ID NO: 1782889 - RNA, 19 nt, Artificial Sequence
  Description of Artificial Sequence: Synthetic oligonucleotide
uggcuuuaugauucaccug

SEQ ID NO: 1782890 - RNA, 19 nt, Artificial Sequence
  Description of Artificial Sequence: Synthetic oligonucleotide
gugacaaggacaagugcug

SEQ ID NO: 1782891 - RNA, 19 nt, Artificial Sequence
  Description of Artificial Sequence: Synthetic oligonucleotide
gacgcucuaacacuuauuu

SEQ ID NO: 1782892 - RNA, 19 nt, Artificial Sequence
  Description of Artificial Sequence: Synthetic oligonucleotide
uagugaugccaaugggcug

SEQ ID NO: 1782893 - RNA, 19 nt, Artificial Sequence
  Description of Artificial Sequence: Synthetic oligonucleotide
auauaaaggaucaguuuua

SEQ ID NO: 1782894 - RNA, 19 nt, Artificial Sequence
  Description of Artificial Sequence: Synthetic oligonucleotide
gagaaauggcuaugagaca

SEQ ID NO: 1782895 - RNA, 19 nt, Artificial Sequence
  Description of Artificial Sequence: Synthetic oligonucleotide
aagcagaauaaggggauua

SEQ ID NO: 1782896 - RNA, 19 nt, Artificial Sequence
  Description of Artificial Sequence: Synthetic oligonucleotide
accacauaucucuccauua

SEQ ID NO: 1782897 - RNA, 19 nt, Artificial Sequence
  Description of Artificial Sequence: Synthetic oligonucleotide
acaucgaagacaccacaua

SEQ ID NO: 1782898 - RNA, 19 nt, Artificial Sequence
  Description of Artificial Sequence: Synthetic oligonucleotide
acaaggacccgagagcaca

SEQ ID NO: 1782899 - RNA, 19 nt, Artificial Sequence
  Description of Artificial Sequence: Synthetic oligonucleotide
gcuggugcaaacuaguuua

SEQ ID NO: 1782900 - RNA, 19 nt, Artificial Sequence
  Description of Artificial Sequence: Synthetic oligonucleotide
ugagagcugaacugaguuu

SEQ ID NO: 1782901 - RNA, 19 nt, Artificial Sequence
  Description of Artificial Sequence: Synthetic oligonucleotide
uugguguauaccagagcua

SEQ ID NO: 1782902 - RNA, 19 nt, Artificial Sequence
  Description of Artificial Sequence: Synthetic oligonucleotide
acugaguuucugggguggc

SEQ ID NO: 1782903 - RNA, 19 nt, Artificial Sequence
  Description of Artificial Sequence: Synthetic oligonucleotide
caaggucucgcucugugca

SEQ ID NO: 1782904 - RNA, 19 nt, Artificial Sequence
  Description of Artificial Sequence: Synthetic oligonucleotide
uaugauucaccugcuucuc

SEQ ID NO: 1782905 - RNA, 19 nt, Artificial Sequence
  Description of Artificial Sequence: Synthetic oligonucleotide
aggguggcgucuucacugg

SEQ ID NO: 1782906 - RNA, 19 nt, Artificial Sequence
  Description of Artificial Sequence: Synthetic oligonucleotide
caaccccagguagugaugc

SEQ ID NO: 1782907 - RNA, 19 nt, Artificial Sequence
  Description of Artificial Sequence: Synthetic oligonucleotide
agagcuaagggaagcagaa

SEQ ID NO: 1782908 - RNA, 19 nt, Artificial Sequence
  Description of Artificial Sequence: Synthetic oligonucleotide
cuggcuuuaugauucaccu

SEQ ID NO: 1782909 - RNA, 19 nt, Artificial Sequence
  Description of Artificial Sequence: Synthetic oligonucleotide
uagcgaaccugcagaaguc

SEQ ID NO: 1782910 - RNA, 19 nt, Artificial Sequence
  Description of Artificial Sequence: Synthetic oligonucleotide
ucaguucuuuacacuggau

SEQ ID NO: 1782911 - RNA, 19 nt, Artificial Sequence
  Description of Artificial Sequence: Synthetic oligonucleotide
guguauaagaaaaguccga

SEQ ID NO: 1782912 - RNA, 19 nt, Artificial Sequence
  Description of Artificial Sequence: Synthetic oligonucleotide
uaccagagcuaagggaagc

SEQ ID NO: 1782913 - RNA, 19 nt, Artificial Sequence
  Description of Artificial Sequence: Synthetic oligonucleotide
uugagucauggcucugaga

SEQ ID NO: 1782914 - RNA, 19 nt, Artificial Sequence
  Description of Artificial Sequence: Synthetic oligonucleotide
aggcaagucacuccagcaa

SEQ ID NO: 1782915 - RNA, 19 nt, Artificial Sequence
  Description of Artificial Sequence: Synthetic oligonucleotide
cacaccaucuugcuuguga

SEQ ID NO: 1782916 - RNA, 19 nt, Artificial Sequence
  Description of Artificial Sequence: Synthetic oligonucleotide
gugguuccucuacagacca

SEQ ID NO: 1782917 - RNA, 19 nt, Artificial Sequence
  Description of Artificial Sequence: Synthetic oligonucleotide
aaguucuacuggcccaguu

SEQ ID NO: 1782918 - RNA, 19 nt, Artificial Sequence
  Description of Artificial Sequence: Synthetic oligonucleotide
uggugcaaacuaguuuagc

SEQ ID NO: 1782919 - RNA, 19 nt, Artificial Sequence
  Description of Artificial Sequence: Synthetic oligonucleotide
uugguccaaaguaguugcu

SEQ ID NO: 1782920 - RNA, 19 nt, Artificial Sequence
  Description of Artificial Sequence: Synthetic oligonucleotide
ccaacggaccagcagauac

SEQ ID NO: 1782921 - RNA, 19 nt, Artificial Sequence
  Description of Artificial Sequence: Synthetic oligonucleotide
cacauauaaaggaucaguu

SEQ ID NO: 1782922 - RNA, 19 nt, Artificial Sequence
  Description of Artificial Sequence: Synthetic oligonucleotide
aaaaguccgagcacccuuu

SEQ ID NO: 1782923 - RNA, 19 nt, Artificial Sequence
  Description of Artificial Sequence: Synthetic oligonucleotide
ugguccaaaguaguugcuc

SEQ ID NO: 1782924 - RNA, 19 nt, Artificial Sequence
  Description of Artificial Sequence: Synthetic oligonucleotide
cagagcuaagggaagcaga

SEQ ID NO: 1782925 - RNA, 19 nt, Artificial Sequence
  Description of Artificial Sequence: Synthetic oligonucleotide
auaggacuuuuaugcauuu

SEQ ID NO: 1782926 - RNA, 19 nt, Artificial Sequence
  Description of Artificial Sequence: Synthetic oligonucleotide
ugcaggcaagucacuccag

SEQ ID NO: 1782927 - RNA, 19 nt, Artificial Sequence
  Description of Artificial Sequence: Synthetic oligonucleotide
cugcuugccauaaaacuua

SEQ ID NO: 1782928 - RNA, 19 nt, Artificial Sequence
  Description of Artificial Sequence: Synthetic oligonucleotide
aaggacccgagagcacagg

SEQ ID NO: 1782929 - RNA, 19 nt, Artificial Sequence
  Description of Artificial Sequence: Synthetic oligonucleotide
ucauggcucugagaagaug

SEQ ID NO: 1782930 - RNA, 19 nt, Artificial Sequence
  Description of Artificial Sequence: Synthetic oligonucleotide
caaguguucugggacccag

SEQ ID NO: 1782931 - RNA, 19 nt, Artificial Sequence
  Description of Artificial Sequence: Synthetic oligonucleotide
uguacacccucugacccuc

SEQ ID NO: 1782932 - RNA, 19 nt, Artificial Sequence
  Description of Artificial Sequence: Synthetic oligonucleotide
uggcaggagaaauggcuau

SEQ ID NO: 1782933 - RNA, 19 nt, Artificial Sequence
  Description of Artificial Sequence: Synthetic oligonucleotide
auaccaacugcuugccaua

SEQ ID NO: 1782934 - RNA, 19 nt, Artificial Sequence
  Description of Artificial Sequence: Synthetic oligonucleotide
uccaaaguaguugcucuuu

SEQ ID NO: 1782935 - RNA, 19 nt, Artificial Sequence
  Description of Artificial Sequence: Synthetic oligonucleotide
ugcuugccauaaaacuuau

SEQ ID NO: 1782936 - RNA, 19 nt, Artificial Sequence
  Description of Artificial Sequence: Synthetic oligonucleotide
uagcaguguguacacccuc

SEQ ID NO: 1782937 - RNA, 19 nt, Artificial Sequence
  Description of Artificial Sequence: Synthetic oligonucleotide
cuuucccuccaccauccuc

SEQ ID NO: 1782938 - RNA, 19 nt, Artificial Sequence
  Description of Artificial Sequence: Synthetic oligonucleotide
cugggacccaggacagugg

SEQ ID NO: 1782939 - RNA, 19 nt, Artificial Sequence
  Description of Artificial Sequence: Synthetic oligonucleotide
aggacccgagagcacaggu

SEQ ID NO: 1782940 - RNA, 19 nt, Artificial Sequence
  Description of Artificial Sequence: Synthetic oligonucleotide
ggagcugugguuccucuac

SEQ ID NO: 1782941 - RNA, 19 nt, Artificial Sequence
  Description of Artificial Sequence: Synthetic oligonucleotide
caaggacccgagagcacag

SEQ ID NO: 1782942 - RNA, 19 nt, Artificial Sequence
  Description of Artificial Sequence: Synthetic oligonucleotide
gcucugagaagaugggaug

SEQ ID NO: 1782943 - RNA, 19 nt, Artificial Sequence
  Description of Artificial Sequence: Synthetic oligonucleotide
cuggcuccagcuucucggc

SEQ ID NO: 1782944 - RNA, 19 nt, Artificial Sequence
  Description of Artificial Sequence: Synthetic oligonucleotide
ugugacccuaaaagaucau

SEQ ID NO: 1782945 - RNA, 19 nt, Artificial Sequence
  Description of Artificial Sequence: Synthetic oligonucleotide
auaccagagcuaagggaag

SEQ ID NO: 1782946 - RNA, 19 nt, Artificial Sequence
  Description of Artificial Sequence: Synthetic oligonucleotide
gaugugcgaggaagugggg

SEQ ID NO: 1782947 - RNA, 19 nt, Artificial Sequence
  Description of Artificial Sequence: Synthetic oligonucleotide
aaccugcagaagucacccu

SEQ ID NO: 1782948 - RNA, 19 nt, Artificial Sequence
  Description of Artificial Sequence: Synthetic oligonucleotide
cuaugagacaaggacccga

SEQ ID NO: 1782949 - RNA, 19 nt, Artificial Sequence
  Description of Artificial Sequence: Synthetic oligonucleotide
cucagaaguccuguucuuc

SEQ ID NO: 1782950 - RNA, 19 nt, Artificial Sequence
  Description of Artificial Sequence: Synthetic oligonucleotide
gcaaacuaguuuagcagug

SEQ ID NO: 1782951 - RNA, 19 nt, Artificial Sequence
  Description of Artificial Sequence: Synthetic oligonucleotide
guucugggacccaggacag

SEQ ID NO: 1782952 - RNA, 19 nt, Artificial Sequence
  Description of Artificial Sequence: Synthetic oligonucleotide
agcagaauaaggggauuaa

SEQ ID NO: 1782953 - RNA, 19 nt, Artificial Sequence
  Description of Artificial Sequence: Synthetic oligonucleotide
uccaagugcacaggcugcu

SEQ ID NO: 1782954 - RNA, 19 nt, Artificial Sequence
  Description of Artificial Sequence: Synthetic oligonucleotide
uccgagcacccuuuucuuc

SEQ ID NO: 1782955 - RNA, 19 nt, Artificial Sequence
  Description of Artificial Sequence: Synthetic oligonucleotide
uggguggagcugugguucc

SEQ ID NO: 1782956 - RNA, 19 nt, Artificial Sequence
  Description of Artificial Sequence: Synthetic oligonucleotide
ccacauaucucuccauuac

SEQ ID NO: 1782957 - RNA, 19 nt, Artificial Sequence
  Description of Artificial Sequence: Synthetic oligonucleotide
gugacccuaaaagaucauc

SEQ ID NO: 1782958 - RNA, 19 nt, Artificial Sequence
  Description of Artificial Sequence: Synthetic oligonucleotide
ggacccaggacagugggug

SEQ ID NO: 1782959 - RNA, 19 nt, Artificial Sequence
  Description of Artificial Sequence: Synthetic oligonucleotide
aucagaggguggcgucuuc

SEQ ID NO: 1782960 - RNA, 19 nt, Artificial Sequence
  Description of Artificial Sequence: Synthetic oligonucleotide
cucuacagaccacucugca

SEQ ID NO: 1782961 - RNA, 19 nt, Artificial Sequence
  Description of Artificial Sequence: Synthetic oligonucleotide
auauacaguuggacgcucu

SEQ ID NO: 1782962 - RNA, 19 nt, Artificial Sequence
  Description of Artificial Sequence: Synthetic oligonucleotide
cuucucugagagcugaacu

SEQ ID NO: 1782963 - RNA, 19 nt, Artificial Sequence
  Description of Artificial Sequence: Synthetic oligonucleotide
augugcgaggaaguggggu

SEQ ID NO: 1782964 - RNA, 19 nt, Artificial Sequence
  Description of Artificial Sequence: Synthetic oligonucleotide
caucgaagacaccacauau

SEQ ID NO: 1782965 - RNA, 19 nt, Artificial Sequence
  Description of Artificial Sequence: Synthetic oligonucleotide
ggacaagugcugcuauccc

SEQ ID NO: 1782966 - RNA, 19 nt, Artificial Sequence
  Description of Artificial Sequence: Synthetic oligonucleotide
ucauagcuccaaacacaua

SEQ ID NO: 1782967 - RNA, 19 nt, Artificial Sequence
  Description of Artificial Sequence: Synthetic oligonucleotide
cugcuaucccaaccccagg

SEQ ID NO: 1782968 - RNA, 19 nt, Artificial Sequence
  Description of Artificial Sequence: Synthetic oligonucleotide
cugcaggcaagucacucca

SEQ ID NO: 1782969 - RNA, 19 nt, Artificial Sequence
  Description of Artificial Sequence: Synthetic oligonucleotide
augagacaaggacccgaga

SEQ ID NO: 1782970 - RNA, 19 nt, Artificial Sequence
  Description of Artificial Sequence: Synthetic oligonucleotide
aucccaaccccagguagug

SEQ ID NO: 1782971 - RNA, 19 nt, Artificial Sequence
  Description of Artificial Sequence: Synthetic oligonucleotide
agcgaaccugcagaaguca

SEQ ID NO: 1782972 - RNA, 19 nt, Artificial Sequence
  Description of Artificial Sequence: Synthetic oligonucleotide
gaggaggaaccacgaucug

SEQ ID NO: 1782973 - RNA, 19 nt, Artificial Sequence
  Description of Artificial Sequence: Synthetic oligonucleotide
guucuuuacacuggaucaa

SEQ ID NO: 1782974 - RNA, 19 nt, Artificial Sequence
  Description of Artificial Sequence: Synthetic oligonucleotide
agcaguguguacacccucu

SEQ ID NO: 1782975 - RNA, 19 nt, Artificial Sequence
  Description of Artificial Sequence: Synthetic oligonucleotide
cagaggguggcgucuucac

SEQ ID NO: 1782976 - RNA, 19 nt, Artificial Sequence
  Description of Artificial Sequence: Synthetic oligonucleotide
auacaguuggacgcucuaa

SEQ ID NO: 1782977 - RNA, 19 nt, Artificial Sequence
  Description of Artificial Sequence: Synthetic oligonucleotide
gugcugcuaucccaacccc

SEQ ID NO: 1782978 - RNA, 19 nt, Artificial Sequence
  Description of Artificial Sequence: Synthetic oligonucleotide
cagcagauacugaccgcug

SEQ ID NO: 1782979 - RNA, 19 nt, Artificial Sequence
  Description of Artificial Sequence: Synthetic oligonucleotide
gagcacccuuuucuucuug

SEQ ID NO: 1782980 - RNA, 19 nt, Artificial Sequence
  Description of Artificial Sequence: Synthetic oligonucleotide
gagagcacaggugcccuca

SEQ ID NO: 1782981 - RNA, 19 nt, Artificial Sequence
  Description of Artificial Sequence: Synthetic oligonucleotide
ucaaguguucugggaccca

SEQ ID NO: 1782982 - RNA, 19 nt, Artificial Sequence
  Description of Artificial Sequence: Synthetic oligonucleotide
ggcaagucacuccagcaaa

SEQ ID NO: 1782983 - RNA, 19 nt, Artificial Sequence
  Description of Artificial Sequence: Synthetic oligonucleotide
uuggacgcucuaacacuua

SEQ ID NO: 1782984 - RNA, 19 nt, Artificial Sequence
  Description of Artificial Sequence: Synthetic oligonucleotide
cacauaucucuccauuacu

SEQ ID NO: 1782985 - RNA, 19 nt, Artificial Sequence
  Description of Artificial Sequence: Synthetic oligonucleotide
ggggaacuaucagagggug

SEQ ID NO: 1782986 - RNA, 19 nt, Artificial Sequence
  Description of Artificial Sequence: Synthetic oligonucleotide
gggaacuaucagagggugg

SEQ ID NO: 1782987 - RNA, 19 nt, Artificial Sequence
  Description of Artificial Sequence: Synthetic oligonucleotide
cugggccagcccaacggac

SEQ ID NO: 1782988 - RNA, 19 nt, Artificial Sequence
  Description of Artificial Sequence: Synthetic oligonucleotide
ggaggaggaaccacgaucu

SEQ ID NO: 1782989 - RNA, 19 nt, Artificial Sequence
  Description of Artificial Sequence: Synthetic oligonucleotide
cagaccacucugcaggcaa

SEQ ID NO: 1782990 - RNA, 19 nt, Artificial Sequence
  Description of Artificial Sequence: Synthetic oligonucleotide
augggaugugcgaggaagu

SEQ ID NO: 1782991 - RNA, 19 nt, Artificial Sequence
  Description of Artificial Sequence: Synthetic oligonucleotide
agcccuuucccuccaccau

SEQ ID NO: 1782992 - RNA, 19 nt, Artificial Sequence
  Description of Artificial Sequence: Synthetic oligonucleotide
uucuugagucauggcucug

SEQ ID NO: 1782993 - RNA, 19 nt, Artificial Sequence
  Description of Artificial Sequence: Synthetic oligonucleotide
ugguuccucuacagaccac

SEQ ID NO: 1782994 - RNA, 19 nt, Artificial Sequence
  Description of Artificial Sequence: Synthetic oligonucleotide
cugagagcugaacugaguu

SEQ ID NO: 1782995 - RNA, 19 nt, Artificial Sequence
  Description of Artificial Sequence: Synthetic oligonucleotide
gcuaagggaagcagaauaa

SEQ ID NO: 1782996 - RNA, 19 nt, Artificial Sequence
  Description of Artificial Sequence: Synthetic oligonucleotide
aggggauuaauaggacuuu

SEQ ID NO: 1782997 - RNA, 19 nt, Artificial Sequence
  Description of Artificial Sequence: Synthetic oligonucleotide
uaaguucuacuggcccagu

SEQ ID NO: 1782998 - RNA, 19 nt, Artificial Sequence
  Description of Artificial Sequence: Synthetic oligonucleotide
gacaaggacccgagagcac

SEQ ID NO: 1782999 - RNA, 19 nt, Artificial Sequence
  Description of Artificial Sequence: Synthetic oligonucleotide
uaggacuuuuaugcauuuu

SEQ ID NO: 1783000 - RNA, 19 nt, Artificial Sequence
  Description of Artificial Sequence: Synthetic oligonucleotide
cccuuucccuccaccaucc

SEQ ID NO: 1783001 - RNA, 19 nt, Artificial Sequence
  Description of Artificial Sequence: Synthetic oligonucleotide
gcuugugacaaggacaagu

SEQ ID NO: 1783002 - RNA, 19 nt, Artificial Sequence
  Description of Artificial Sequence: Synthetic oligonucleotide
gcuaugagacaaggacccg

SEQ ID NO: 1783003 - RNA, 19 nt, Artificial Sequence
  Description of Artificial Sequence: Synthetic oligonucleotide
gguagcgaaccugcagaag

SEQ ID NO: 1783004 - RNA, 19 nt, Artificial Sequence
  Description of Artificial Sequence: Synthetic oligonucleotide
caguguguacacccucuga

SEQ ID NO: 1783005 - RNA, 19 nt, Artificial Sequence
  Description of Artificial Sequence: Synthetic oligonucleotide
caccaucuugcuugugaca

SEQ ID NO: 1783006 - RNA, 19 nt, Artificial Sequence
  Description of Artificial Sequence: Synthetic oligonucleotide
caauaccaacugcuugcca

SEQ ID NO: 1783007 - RNA, 19 nt, Artificial Sequence
  Description of Artificial Sequence: Synthetic oligonucleotide
cgaaccugcagaagucacc

SEQ ID NO: 1783008 - RNA, 19 nt, Artificial Sequence
  Description of Artificial Sequence: Synthetic oligonucleotide
cugcagaagucacccucuc

SEQ ID NO: 1783009 - RNA, 19 nt, Artificial Sequence
  Description of Artificial Sequence: Synthetic oligonucleotide
uaucagaggguggcgucuu

SEQ ID NO: 1783010 - RNA, 19 nt, Artificial Sequence
  Description of Artificial Sequence: Synthetic oligonucleotide
auaaagccgcgggcagcuc

SEQ ID NO: 1783011 - RNA, 19 nt, Artificial Sequence
  Description of Artificial Sequence: Synthetic oligonucleotide
aggaaaguagagacuucuu

SEQ ID NO: 1783012 - RNA, 19 nt, Artificial Sequence
  Description of Artificial Sequence: Synthetic oligonucleotide
aggucucgcucugugcaca

SEQ ID NO: 1783013 - RNA, 19 nt, Artificial Sequence
  Description of Artificial Sequence: Synthetic oligonucleotide
aucuugcuugugacaagga

SEQ ID NO: 1783014 - RNA, 19 nt, Artificial Sequence
  Description of Artificial Sequence: Synthetic oligonucleotide
ccagguagugaugccaaug

SEQ ID NO: 1783015 - RNA, 19 nt, Artificial Sequence
  Description of Artificial Sequence: Synthetic oligonucleotide
ggaucaguuuuaaaauacu

SEQ ID NO: 1783016 - RNA, 19 nt, Artificial Sequence
  Description of Artificial Sequence: Synthetic oligonucleotide
caaacuaguuuagcagugu

SEQ ID NO: 1783017 - RNA, 19 nt, Artificial Sequence
  Description of Artificial Sequence: Synthetic oligonucleotide
aaccacgaucuggcuccag

SEQ ID NO: 1783018 - RNA, 19 nt, Artificial Sequence
  Description of Artificial Sequence: Synthetic oligonucleotide
ugcgaggaaguggggucac

SEQ ID NO: 1783019 - RNA, 19 nt, Artificial Sequence
  Description of Artificial Sequence: Synthetic oligonucleotide
agccgcgggcagcucuggg

SEQ ID NO: 1783020 - RNA, 19 nt, Artificial Sequence
  Description of Artificial Sequence: Synthetic oligonucleotide
cccucugacccuccaagug

SEQ ID NO: 1783021 - RNA, 19 nt, Artificial Sequence
  Description of Artificial Sequence: Synthetic oligonucleotide
cacccuuuucuucuugagu

SEQ ID NO: 1783022 - RNA, 19 nt, Artificial Sequence
  Description of Artificial Sequence: Synthetic oligonucleotide
caacggaccagcagauacu

SEQ ID NO: 1783023 - RNA, 19 nt, Artificial Sequence
  Description of Artificial Sequence: Synthetic oligonucleotide
acccaggacagugggugga

SEQ ID NO: 1783024 - RNA, 19 nt, Artificial Sequence
  Description of Artificial Sequence: Synthetic oligonucleotide
gggauuaauaggacuuuua

SEQ ID NO: 1783025 - RNA, 19 nt, Artificial Sequence
  Description of Artificial Sequence: Synthetic oligonucleotide
gguuccucuacagaccacu

SEQ ID NO: 1783026 - RNA, 19 nt, Artificial Sequence
  Description of Artificial Sequence: Synthetic oligonucleotide
ggucaccucuucccaacuc

SEQ ID NO: 1783027 - RNA, 19 nt, Artificial Sequence
  Description of Artificial Sequence: Synthetic oligonucleotide
ggacccgagagcacaggug

SEQ ID NO: 1783028 - RNA, 19 nt, Artificial Sequence
  Description of Artificial Sequence: Synthetic oligonucleotide
gugcgaggaagugggguca

SEQ ID NO: 1783029 - RNA, 19 nt, Artificial Sequence
  Description of Artificial Sequence: Synthetic oligonucleotide
cugacccuccaagugcaca

SEQ ID NO: 1783030 - RNA, 19 nt, Artificial Sequence
  Description of Artificial Sequence: Synthetic oligonucleotide
cccuaaaagaucauccaau

SEQ ID NO: 1783031 - RNA, 19 nt, Artificial Sequence
  Description of Artificial Sequence: Synthetic oligonucleotide
cuuuaugauucaccugcuu

SEQ ID NO: 1783032 - RNA, 19 nt, Artificial Sequence
  Description of Artificial Sequence: Synthetic oligonucleotide
guuggacgcucuaacacuu

SEQ ID NO: 1783033 - RNA, 19 nt, Artificial Sequence
  Description of Artificial Sequence: Synthetic oligonucleotide
ccacucugcaggcaaguca

SEQ ID NO: 1783034 - RNA, 19 nt, Artificial Sequence
  Description of Artificial Sequence: Synthetic oligonucleotide
gaagcagaauaaggggauu

SEQ ID NO: 1783035 - RNA, 19 nt, Artificial Sequence
  Description of Artificial Sequence: Synthetic oligonucleotide
uucugggacccaggacagu

SEQ ID NO: 1783036 - RNA, 19 nt, Artificial Sequence
  Description of Artificial Sequence: Synthetic oligonucleotide
ugaccgcugcuggccuuag

SEQ ID NO: 1783037 - RNA, 19 nt, Artificial Sequence
  Description of Artificial Sequence: Synthetic oligonucleotide
ggcugucgcaggaggcugg

SEQ ID NO: 1783038 - RNA, 19 nt, Artificial Sequence
  Description of Artificial Sequence: Synthetic oligonucleotide
acugaccgcugcuggccuu

SEQ ID NO: 1783039 - RNA, 19 nt, Artificial Sequence
  Description of Artificial Sequence: Synthetic oligonucleotide
cuaucagaggguggcgucu

SEQ ID NO: 1783040 - RNA, 19 nt, Artificial Sequence
  Description of Artificial Sequence: Synthetic oligonucleotide
ggucucgcucugugcacac

SEQ ID NO: 1783041 - RNA, 19 nt, Artificial Sequence
  Description of Artificial Sequence: Synthetic oligonucleotide
caccacauaucucuccauu

SEQ ID NO: 1783042 - RNA, 19 nt, Artificial Sequence
  Description of Artificial Sequence: Synthetic oligonucleotide
caggugcccucagugaaaa

SEQ ID NO: 1783043 - RNA, 19 nt, Artificial Sequence
  Description of Artificial Sequence: Synthetic oligonucleotide
cccgagagcacaggugccc

SEQ ID NO: 1783044 - RNA, 19 nt, Artificial Sequence
  Description of Artificial Sequence: Synthetic oligonucleotide
gcgaaccugcagaagucac

SEQ ID NO: 1783045 - RNA, 19 nt, Artificial Sequence
  Description of Artificial Sequence: Synthetic oligonucleotide
ugggcugggccagcccaac

SEQ ID NO: 1783046 - RNA, 19 nt, Artificial Sequence
  Description of Artificial Sequence: Synthetic oligonucleotide
ucucugggccaugggcuuu

SEQ ID NO: 1783047 - RNA, 19 nt, Artificial Sequence
  Description of Artificial Sequence: Synthetic oligonucleotide
gggcugggccagcccaacg

SEQ ID NO: 1783048 - RNA, 19 nt, Artificial Sequence
  Description of Artificial Sequence: Synthetic oligonucleotide
ggcccaguucucugggcca

SEQ ID NO: 1783049 - RNA, 19 nt, Artificial Sequence
  Description of Artificial Sequence: Synthetic oligonucleotide
gaccacucugcaggcaagu

SEQ ID NO: 1783050 - RNA, 19 nt, Artificial Sequence
  Description of Artificial Sequence: Synthetic oligonucleotide
acggaccagcagauacuga

SEQ ID NO: 1783051 - RNA, 19 nt, Artificial Sequence
  Description of Artificial Sequence: Synthetic oligonucleotide
gaaccacgaucuggcucca

SEQ ID NO: 1783052 - RNA, 19 nt, Artificial Sequence
  Description of Artificial Sequence: Synthetic oligonucleotide
cugucgcaggaggcuggag

SEQ ID NO: 1783053 - RNA, 19 nt, Artificial Sequence
  Description of Artificial Sequence: Synthetic oligonucleotide
guacacccucugacccucc

SEQ ID NO: 1783054 - RNA, 19 nt, Artificial Sequence
  Description of Artificial Sequence: Synthetic oligonucleotide
cuggccuuagcuguugcuu

SEQ ID NO: 1783055 - RNA, 19 nt, Artificial Sequence
  Description of Artificial Sequence: Synthetic oligonucleotide
ggguggcgucuucacuggc

SEQ ID NO: 1783056 - RNA, 19 nt, Artificial Sequence
  Description of Artificial Sequence: Synthetic oligonucleotide
gcagaauaaggggauuaau

SEQ ID NO: 1783057 - RNA, 19 nt, Artificial Sequence
  Description of Artificial Sequence: Synthetic oligonucleotide
ccgagcacccuuuucuucu

SEQ ID NO: 1783058 - RNA, 19 nt, Artificial Sequence
  Description of Artificial Sequence: Synthetic oligonucleotide
ccagcagauacugaccgcu

SEQ ID NO: 1783059 - RNA, 19 nt, Artificial Sequence
  Description of Artificial Sequence: Synthetic oligonucleotide
gcuugccauaaaacuuauc

SEQ ID NO: 1783060 - RNA, 19 nt, Artificial Sequence
  Description of Artificial Sequence: Synthetic oligonucleotide
cacgaucuggcuccagcuu

SEQ ID NO: 1783061 - RNA, 19 nt, Artificial Sequence
  Description of Artificial Sequence: Synthetic oligonucleotide
gguggcgucuucacuggcu

SEQ ID NO: 1783062 - RNA, 19 nt, Artificial Sequence
  Description of Artificial Sequence: Synthetic oligonucleotide
ggggauuaauaggacuuuu

SEQ ID NO: 1783063 - RNA, 19 nt, Artificial Sequence
  Description of Artificial Sequence: Synthetic oligonucleotide
ccacgaucuggcuccagcu

SEQ ID NO: 1783064 - RNA, 19 nt, Artificial Sequence
  Description of Artificial Sequence: Synthetic oligonucleotide
gcuggccuuagcuguugcu

SEQ ID NO: 1783065 - RNA, 19 nt, Artificial Sequence
  Description of Artificial Sequence: Synthetic oligonucleotide
cugaccgcugcuggccuua

SEQ ID NO: 1783066 - RNA, 19 nt, Artificial Sequence
  Description of Artificial Sequence: Synthetic oligonucleotide
cccaaccccagguagugau

SEQ ID NO: 1783067 - RNA, 19 nt, Artificial Sequence
  Description of Artificial Sequence: Synthetic oligonucleotide
ccauuacugugacccuaaa

SEQ ID NO: 1783068 - RNA, 19 nt, Artificial Sequence
  Description of Artificial Sequence: Synthetic oligonucleotide
cgagagcacaggugcccuc

SEQ ID NO: 1783069 - RNA, 19 nt, Artificial Sequence
  Description of Artificial Sequence: Synthetic oligonucleotide
cccuccaagugcacaggcu

SEQ ID NO: 1783070 - RNA, 19 nt, Artificial Sequence
  Description of Artificial Sequence: Synthetic oligonucleotide
gcacaccaucuugcuugug

SEQ ID NO: 1783071 - RNA, 19 nt, Artificial Sequence
  Description of Artificial Sequence: Synthetic oligonucleotide
ggacgcucuaacacuuauu

SEQ ID NO: 1783072 - RNA, 19 nt, Artificial Sequence
  Description of Artificial Sequence: Synthetic oligonucleotide
cgaggaaguggggucaccu

SEQ ID NO: 1783073 - RNA, 19 nt, Artificial Sequence
  Description of Artificial Sequence: Synthetic oligonucleotide
ccgcgggcagcucugggcu

SEQ ID NO: 1783074 - RNA, 19 nt, Artificial Sequence
  Description of Artificial Sequence: Synthetic oligonucleotide
gggacccaggacagugggu

SEQ ID NO: 1783075 - RNA, 19 nt, Artificial Sequence
  Description of Artificial Sequence: Synthetic oligonucleotide
cucugggccaugggcuuuu

SEQ ID NO: 1783076 - RNA, 19 nt, Artificial Sequence
  Description of Artificial Sequence: Synthetic oligonucleotide
gcugcuggccuuagcuguu

SEQ ID NO: 1783077 - RNA, 19 nt, Artificial Sequence
  Description of Artificial Sequence: Synthetic oligonucleotide
ggguggagcugugguuccu

SEQ ID NO: 1783078 - RNA, 19 nt, Artificial Sequence
  Description of Artificial Sequence: Synthetic oligonucleotide
gcgucuucacuggcuuuau

SEQ ID NO: 1783079 - RNA, 19 nt, Artificial Sequence
  Description of Artificial Sequence: Synthetic oligonucleotide
cccagguagugaugccaau

SEQ ID NO: 1783080 - RNA, 19 nt, Artificial Sequence
  Description of Artificial Sequence: Synthetic oligonucleotide
cccuacaguuggggaacua

SEQ ID NO: 1783081 - RNA, 19 nt, Artificial Sequence
  Description of Artificial Sequence: Synthetic oligonucleotide
ccuuucccuccaccauccu

SEQ ID NO: 1783082 - RNA, 19 nt, Artificial Sequence
  Description of Artificial Sequence: Synthetic oligonucleotide
ccccuacaguuggggaacu

SEQ ID NO: 1783083 - RNA, 19 nt, Artificial Sequence
  Description of Artificial Sequence: Synthetic oligonucleotide
aacacagacacuuggauuc

SEQ ID NO: 1783084 - RNA, 19 nt, Artificial Sequence
  Description of Artificial Sequence: Synthetic oligonucleotide
auaaaugaaacgcacguuc

SEQ ID NO: 1783085 - RNA, 19 nt, Artificial Sequence
  Description of Artificial Sequence: Synthetic oligonucleotide
agcuucauaaaugaaacgc

SEQ ID NO: 1783086 - RNA, 19 nt, Artificial Sequence
  Description of Artificial Sequence: Synthetic oligonucleotide
gacacuuggauucaagagg

SEQ ID NO: 1783087 - RNA, 19 nt, Artificial Sequence
  Description of Artificial Sequence: Synthetic oligonucleotide
aaugaaacgcacguucucc

SEQ ID NO: 1783088 - RNA, 19 nt, Artificial Sequence
  Description of Artificial Sequence: Synthetic oligonucleotide
aaaaucucacugcuguugg

SEQ ID NO: 1783089 - RNA, 19 nt, Artificial Sequence
  Description of Artificial Sequence: Synthetic oligonucleotide
gauucaagagggcacaagg

SEQ ID NO: 1783090 - RNA, 19 nt, Artificial Sequence
  Description of Artificial Sequence: Synthetic oligonucleotide
accaacaucaagugcaccc

SEQ ID NO: 1783091 - RNA, 19 nt, Artificial Sequence
  Description of Artificial Sequence: Synthetic oligonucleotide
ucaagguuccaacagaaca

SEQ ID NO: 1783092 - RNA, 19 nt, Artificial Sequence
  Description of Artificial Sequence: Synthetic oligonucleotide
uucauaaaugaaacgcacg

SEQ ID NO: 1783093 - RNA, 19 nt, Artificial Sequence
  Description of Artificial Sequence: Synthetic oligonucleotide
ucauaaaugaaacgcacgu

SEQ ID NO: 1783094 - RNA, 19 nt, Artificial Sequence
  Description of Artificial Sequence: Synthetic oligonucleotide
aaaggaagggccuuggcca

SEQ ID NO: 1783095 - RNA, 19 nt, Artificial Sequence
  Description of Artificial Sequence: Synthetic oligonucleotide
agaagaacagcaaguaucc

SEQ ID NO: 1783096 - RNA, 19 nt, Artificial Sequence
  Description of Artificial Sequence: Synthetic oligonucleotide
uuguagacgacccuggaga

SEQ ID NO: 1783097 - RNA, 19 nt, Artificial Sequence
  Description of Artificial Sequence: Synthetic oligonucleotide
uaaguagccaggaaggcga

SEQ ID NO: 1783098 - RNA, 19 nt, Artificial Sequence
  Description of Artificial Sequence: Synthetic oligonucleotide
aacuugagacccuggagag

SEQ ID NO: 1783099 - RNA, 19 nt, Artificial Sequence
  Description of Artificial Sequence: Synthetic oligonucleotide
uggccaucaauccugcugg

SEQ ID NO: 1783100 - RNA, 19 nt, Artificial Sequence
  Description of Artificial Sequence: Synthetic oligonucleotide
ucaaggucagccuuagugc

SEQ ID NO: 1783101 - RNA, 19 nt, Artificial Sequence
  Description of Artificial Sequence: Synthetic oligonucleotide
accuuaaguagccaggaag

SEQ ID NO: 1783102 - RNA, 19 nt, Artificial Sequence
  Description of Artificial Sequence: Synthetic oligonucleotide
aagcuucauaaaugaaacg

SEQ ID NO: 1783103 - RNA, 19 nt, Artificial Sequence
  Description of Artificial Sequence: Synthetic oligonucleotide
uuaaguagccaggaaggcg

SEQ ID NO: 1783104 - RNA, 19 nt, Artificial Sequence
  Description of Artificial Sequence: Synthetic oligonucleotide
agagacccagacuggaugc

SEQ ID NO: 1783105 - RNA, 19 nt, Artificial Sequence
  Description of Artificial Sequence: Synthetic oligonucleotide
cagguaacagcagagaggg

SEQ ID NO: 1783106 - RNA, 19 nt, Artificial Sequence
  Description of Artificial Sequence: Synthetic oligonucleotide
aguauccauggagagaccc

SEQ ID NO: 1783107 - RNA, 19 nt, Artificial Sequence
  Description of Artificial Sequence: Synthetic oligonucleotide
gcugauuccacucugaaac

SEQ ID NO: 1783108 - RNA, 19 nt, Artificial Sequence
  Description of Artificial Sequence: Synthetic oligonucleotide
aaggucuugaggcuggggu

SEQ ID NO: 1783109 - RNA, 19 nt, Artificial Sequence
  Description of Artificial Sequence: Synthetic oligonucleotide
agcugacauggccagaccc

SEQ ID NO: 1783110 - RNA, 19 nt, Artificial Sequence
  Description of Artificial Sequence: Synthetic oligonucleotide
caaguauccauggagagac

SEQ ID NO: 1783111 - RNA, 19 nt, Artificial Sequence
  Description of Artificial Sequence: Synthetic oligonucleotide
acccugaucuucuggaggc

SEQ ID NO: 1783112 - RNA, 19 nt, Artificial Sequence
  Description of Artificial Sequence: Synthetic oligonucleotide
auggccagaccccuguucc

SEQ ID NO: 1783113 - RNA, 19 nt, Artificial Sequence
  Description of Artificial Sequence: Synthetic oligonucleotide
gaaacgcacguucuccucg

SEQ ID NO: 1783114 - RNA, 19 nt, Artificial Sequence
  Description of Artificial Sequence: Synthetic oligonucleotide
uuucugaccuuaaguagcc

SEQ ID NO: 1783115 - RNA, 19 nt, Artificial Sequence
  Description of Artificial Sequence: Synthetic oligonucleotide
uucaagagggcacaaggaa

SEQ ID NO: 1783116 - RNA, 19 nt, Artificial Sequence
  Description of Artificial Sequence: Synthetic oligonucleotide
uuucuggucauucaagguu

SEQ ID NO: 1783117 - RNA, 19 nt, Artificial Sequence
  Description of Artificial Sequence: Synthetic oligonucleotide
aacugaggcaagaaagggg

SEQ ID NO: 1783118 - RNA, 19 nt, Artificial Sequence
  Description of Artificial Sequence: Synthetic oligonucleotide
aacuguccuaggcucagag

SEQ ID NO: 1783119 - RNA, 19 nt, Artificial Sequence
  Description of Artificial Sequence: Synthetic oligonucleotide
acacuuggauucaagaggg

SEQ ID NO: 1783120 - RNA, 19 nt, Artificial Sequence
  Description of Artificial Sequence: Synthetic oligonucleotide
gaacagcaaguauccaugg

SEQ ID NO: 1783121 - RNA, 19 nt, Artificial Sequence
  Description of Artificial Sequence: Synthetic oligonucleotide
ugugccggcgugaaaaucu

SEQ ID NO: 1783122 - RNA, 19 nt, Artificial Sequence
  Description of Artificial Sequence: Synthetic oligonucleotide
uccuuucugaccuuaagua

SEQ ID NO: 1783123 - RNA, 19 nt, Artificial Sequence
  Description of Artificial Sequence: Synthetic oligonucleotide
uguccaggccagaagaaca

SEQ ID NO: 1783124 - RNA, 19 nt, Artificial Sequence
  Description of Artificial Sequence: Synthetic oligonucleotide
cacauguccuaauuucugg

SEQ ID NO: 1783125 - RNA, 19 nt, Artificial Sequence
  Description of Artificial Sequence: Synthetic oligonucleotide
ucaagagggcacaaggaaa

SEQ ID NO: 1783126 - RNA, 19 nt, Artificial Sequence
  Description of Artificial Sequence: Synthetic oligonucleotide
agcaaguauccauggagag

SEQ ID NO: 1783127 - RNA, 19 nt, Artificial Sequence
  Description of Artificial Sequence: Synthetic oligonucleotide
ucucuugccguuguagacg

SEQ ID NO: 1783128 - RNA, 19 nt, Artificial Sequence
  Description of Artificial Sequence: Synthetic oligonucleotide
agccagaacuguccuaggc

SEQ ID NO: 1783129 - RNA, 19 nt, Artificial Sequence
  Description of Artificial Sequence: Synthetic oligonucleotide
cacucuaggacuucuuggc

SEQ ID NO: 1783130 - RNA, 19 nt, Artificial Sequence
  Description of Artificial Sequence: Synthetic oligonucleotide
caggugcuacccaagaugc

SEQ ID NO: 1783131 - RNA, 19 nt, Artificial Sequence
  Description of Artificial Sequence: Synthetic oligonucleotide
acguacaccccacgaaagc

SEQ ID NO: 1783132 - RNA, 19 nt, Artificial Sequence
  Description of Artificial Sequence: Synthetic oligonucleotide
cugaccuuaaguagccagg

SEQ ID NO: 1783133 - RNA, 19 nt, Artificial Sequence
  Description of Artificial Sequence: Synthetic oligonucleotide
aaucucacugcuguuggug

SEQ ID NO: 1783134 - RNA, 19 nt, Artificial Sequence
  Description of Artificial Sequence: Synthetic oligonucleotide
agugccccugcucaagggc

SEQ ID NO: 1783135 - RNA, 19 nt, Artificial Sequence
  Description of Artificial Sequence: Synthetic oligonucleotide
ugcuagagcacacucuccu

SEQ ID NO: 1783136 - RNA, 19 nt, Artificial Sequence
  Description of Artificial Sequence: Synthetic oligonucleotide
ccuuaaguagccaggaagg

SEQ ID NO: 1783137 - RNA, 19 nt, Artificial Sequence
  Description of Artificial Sequence: Synthetic oligonucleotide
aagggcacugcugugacca

SEQ ID NO: 1783138 - RNA, 19 nt, Artificial Sequence
  Description of Artificial Sequence: Synthetic oligonucleotide
uuauucacagacccucagu

SEQ ID NO: 1783139 - RNA, 19 nt, Artificial Sequence
  Description of Artificial Sequence: Synthetic oligonucleotide
auguccuaauuucugguca

SEQ ID NO: 1783140 - RNA, 19 nt, Artificial Sequence
  Description of Artificial Sequence: Synthetic oligonucleotide
acuguccuaggcucagagc

SEQ ID NO: 1783141 - RNA, 19 nt, Artificial Sequence
  Description of Artificial Sequence: Synthetic oligonucleotide
agaggagaccaacaucaag

SEQ ID NO: 1783142 - RNA, 19 nt, Artificial Sequence
  Description of Artificial Sequence: Synthetic oligonucleotide
gagagacccagacuggaug

SEQ ID NO: 1783143 - RNA, 19 nt, Artificial Sequence
  Description of Artificial Sequence: Synthetic oligonucleotide
agaacagcaaguauccaug

SEQ ID NO: 1783144 - RNA, 19 nt, Artificial Sequence
  Description of Artificial Sequence: Synthetic oligonucleotide
auuucuggucauucaaggu

SEQ ID NO: 1783145 - RNA, 19 nt, Artificial Sequence
  Description of Artificial Sequence: Synthetic oligonucleotide
uggugauccucccacguac

SEQ ID NO: 1783146 - RNA, 19 nt, Artificial Sequence
  Description of Artificial Sequence: Synthetic oligonucleotide
gagaggagaggcauggcag

SEQ ID NO: 1783147 - RNA, 19 nt, Artificial Sequence
  Description of Artificial Sequence: Synthetic oligonucleotide
guuguagacgacccuggag

SEQ ID NO: 1783148 - RNA, 19 nt, Artificial Sequence
  Description of Artificial Sequence: Synthetic oligonucleotide
cacugcugugaccacaggg

SEQ ID NO: 1783149 - RNA, 19 nt, Artificial Sequence
  Description of Artificial Sequence: Synthetic oligonucleotide
cugcacauguccuaauuuc

SEQ ID NO: 1783150 - RNA, 19 nt, Artificial Sequence
  Description of Artificial Sequence: Synthetic oligonucleotide
gcuagaggccccuucaggg

SEQ ID NO: 1783151 - RNA, 19 nt, Artificial Sequence
  Description of Artificial Sequence: Synthetic oligonucleotide
ugcacccugaucuucugga

SEQ ID NO: 1783152 - RNA, 19 nt, Artificial Sequence
  Description of Artificial Sequence: Synthetic oligonucleotide
ucgaugggcuugaaggucu

SEQ ID NO: 1783153 - RNA, 19 nt, Artificial Sequence
  Description of Artificial Sequence: Synthetic oligonucleotide
gugaaaaucucacugcugu

SEQ ID NO: 1783154 - RNA, 19 nt, Artificial Sequence
  Description of Artificial Sequence: Synthetic oligonucleotide
uguuggugggagagcgugg

SEQ ID NO: 1783155 - RNA, 19 nt, Artificial Sequence
  Description of Artificial Sequence: Synthetic oligonucleotide
acugcuguuggugggagag

SEQ ID NO: 1783156 - RNA, 19 nt, Artificial Sequence
  Description of Artificial Sequence: Synthetic oligonucleotide
agagggcacaaggaaaggg

SEQ ID NO: 1783157 - RNA, 19 nt, Artificial Sequence
  Description of Artificial Sequence: Synthetic oligonucleotide
gauuguggccugcuagagc

SEQ ID NO: 1783158 - RNA, 19 nt, Artificial Sequence
  Description of Artificial Sequence: Synthetic oligonucleotide
ugauuccacucugaaacug

SEQ ID NO: 1783159 - RNA, 19 nt, Artificial Sequence
  Description of Artificial Sequence: Synthetic oligonucleotide
caaauguccaggccagaag

SEQ ID NO: 1783160 - RNA, 19 nt, Artificial Sequence
  Description of Artificial Sequence: Synthetic oligonucleotide
gagacaggagagcugguca

SEQ ID NO: 1783161 - RNA, 19 nt, Artificial Sequence
  Description of Artificial Sequence: Synthetic oligonucleotide
uucaagguuccaacagaac

SEQ ID NO: 1783162 - RNA, 19 nt, Artificial Sequence
  Description of Artificial Sequence: Synthetic oligonucleotide
guagccaggaaggcgagag

SEQ ID NO: 1783163 - RNA, 19 nt, Artificial Sequence
  Description of Artificial Sequence: Synthetic oligonucleotide
uguagacgacccuggagac

SEQ ID NO: 1783164 - RNA, 19 nt, Artificial Sequence
  Description of Artificial Sequence: Synthetic oligonucleotide
cuugccguuguagacgacc

SEQ ID NO: 1783165 - RNA, 19 nt, Artificial Sequence
  Description of Artificial Sequence: Synthetic oligonucleotide
acgaaagccaggacaggcc

SEQ ID NO: 1783166 - RNA, 19 nt, Artificial Sequence
  Description of Artificial Sequence: Synthetic oligonucleotide
cauacuccuccacuaggcc

SEQ ID NO: 1783167 - RNA, 19 nt, Artificial Sequence
  Description of Artificial Sequence: Synthetic oligonucleotide
aaaucucacugcuguuggu

SEQ ID NO: 1783168 - RNA, 19 nt, Artificial Sequence
  Description of Artificial Sequence: Synthetic oligonucleotide
ucuaggacuucuuggcauc

SEQ ID NO: 1783169 - RNA, 19 nt, Artificial Sequence
  Description of Artificial Sequence: Synthetic oligonucleotide
cauguccuaauuucugguc

SEQ ID NO: 1783170 - RNA, 19 nt, Artificial Sequence
  Description of Artificial Sequence: Synthetic oligonucleotide
uuggauucaagagggcaca

SEQ ID NO: 1783171 - RNA, 19 nt, Artificial Sequence
  Description of Artificial Sequence: Synthetic oligonucleotide
ugaccuuaaguagccagga

SEQ ID NO: 1783172 - RNA, 19 nt, Artificial Sequence
  Description of Artificial Sequence: Synthetic oligonucleotide
augaaacgcacguucuccu

SEQ ID NO: 1783173 - RNA, 19 nt, Artificial Sequence
  Description of Artificial Sequence: Synthetic oligonucleotide
gguuccaacagaacagagg

SEQ ID NO: 1783174 - RNA, 19 nt, Artificial Sequence
  Description of Artificial Sequence: Synthetic oligonucleotide
uugggaaccuucuccacau

SEQ ID NO: 1783175 - RNA, 19 nt, Artificial Sequence
  Description of Artificial Sequence: Synthetic oligonucleotide
ucaagggcacugcugugac

SEQ ID NO: 1783176 - RNA, 19 nt, Artificial Sequence
  Description of Artificial Sequence: Synthetic oligonucleotide
aaacgcacguucuccucgu

SEQ ID NO: 1783177 - RNA, 19 nt, Artificial Sequence
  Description of Artificial Sequence: Synthetic oligonucleotide
accggaacagaggagacca

SEQ ID NO: 1783178 - RNA, 19 nt, Artificial Sequence
  Description of Artificial Sequence: Synthetic oligonucleotide
ccagacuggaugcaggugg

SEQ ID NO: 1783179 - RNA, 19 nt, Artificial Sequence
  Description of Artificial Sequence: Synthetic oligonucleotide
aggucagccuuagugcccc

SEQ ID NO: 1783180 - RNA, 19 nt, Artificial Sequence
  Description of Artificial Sequence: Synthetic oligonucleotide
uaggcucagagcugauucc

SEQ ID NO: 1783181 - RNA, 19 nt, Artificial Sequence
  Description of Artificial Sequence: Synthetic oligonucleotide
uguccuaggcucagagcug

SEQ ID NO: 1783182 - RNA, 19 nt, Artificial Sequence
  Description of Artificial Sequence: Synthetic oligonucleotide
ucugaaacugaggcaagaa

SEQ ID NO: 1783183 - RNA, 19 nt, Artificial Sequence
  Description of Artificial Sequence: Synthetic oligonucleotide
auguccaggccagaagaac

SEQ ID NO: 1783184 - RNA, 19 nt, Artificial Sequence
  Description of Artificial Sequence: Synthetic oligonucleotide
aggagaccaggccugguug

SEQ ID NO: 1783185 - RNA, 19 nt, Artificial Sequence
  Description of Artificial Sequence: Synthetic oligonucleotide
cacgaaagccaggacaggc

SEQ ID NO: 1783186 - RNA, 19 nt, Artificial Sequence
  Description of Artificial Sequence: Synthetic oligonucleotide
cuugaaggucuugaggcug

SEQ ID NO: 1783187 - RNA, 19 nt, Artificial Sequence
  Description of Artificial Sequence: Synthetic oligonucleotide
cauccugcguguuccggcg

SEQ ID NO: 1783188 - RNA, 19 nt, Artificial Sequence
  Description of Artificial Sequence: Synthetic oligonucleotide
gucauucaagguuccaaca

SEQ ID NO: 1783189 - RNA, 19 nt, Artificial Sequence
  Description of Artificial Sequence: Synthetic oligonucleotide
uccuaauuucuggucauuc

SEQ ID NO: 1783190 - RNA, 19 nt, Artificial Sequence
  Description of Artificial Sequence: Synthetic oligonucleotide
cauucaagguuccaacaga

SEQ ID NO: 1783191 - RNA, 19 nt, Artificial Sequence
  Description of Artificial Sequence: Synthetic oligonucleotide
cuucuggaggccaggggag

SEQ ID NO: 1783192 - RNA, 19 nt, Artificial Sequence
  Description of Artificial Sequence: Synthetic oligonucleotide
guaacagcagagaggguug

SEQ ID NO: 1783193 - RNA, 19 nt, Artificial Sequence
  Description of Artificial Sequence: Synthetic oligonucleotide
uguccuaauuucuggucau

SEQ ID NO: 1783194 - RNA, 19 nt, Artificial Sequence
  Description of Artificial Sequence: Synthetic oligonucleotide
gcacucuaggacuucuugg

SEQ ID NO: 1783195 - RNA, 19 nt, Artificial Sequence
  Description of Artificial Sequence: Synthetic oligonucleotide
uucaggucacucaggucga

SEQ ID NO: 1783196 - RNA, 19 nt, Artificial Sequence
  Description of Artificial Sequence: Synthetic oligonucleotide
ggcgugaaaaucucacugc

SEQ ID NO: 1783197 - RNA, 19 nt, Artificial Sequence
  Description of Artificial Sequence: Synthetic oligonucleotide
cacguacaccccacgaaag

SEQ ID NO: 1783198 - RNA, 19 nt, Artificial Sequence
  Description of Artificial Sequence: Synthetic oligonucleotide
ggucauucaagguuccaac

SEQ ID NO: 1783199 - RNA, 19 nt, Artificial Sequence
  Description of Artificial Sequence: Synthetic oligonucleotide
ucauugcuggggugucugg

SEQ ID NO: 1783200 - RNA, 19 nt, Artificial Sequence
  Description of Artificial Sequence: Synthetic oligonucleotide
aaguauccauggagagacc

SEQ ID NO: 1783201 - RNA, 19 nt, Artificial Sequence
  Description of Artificial Sequence: Synthetic oligonucleotide
cuucagggagccagaacug

SEQ ID NO: 1783202 - RNA, 19 nt, Artificial Sequence
  Description of Artificial Sequence: Synthetic oligonucleotide
agagccaccggaacagagg

SEQ ID NO: 1783203 - RNA, 19 nt, Artificial Sequence
  Description of Artificial Sequence: Synthetic oligonucleotide
gagccaccggaacagagga

SEQ ID NO: 1783204 - RNA, 19 nt, Artificial Sequence
  Description of Artificial Sequence: Synthetic oligonucleotide
agaccaacaucaagugcac

SEQ ID NO: 1783205 - RNA, 19 nt, Artificial Sequence
  Description of Artificial Sequence: Synthetic oligonucleotide
agaggcauggcagguaaca

SEQ ID NO: 1783206 - RNA, 19 nt, Artificial Sequence
  Description of Artificial Sequence: Synthetic oligonucleotide
ucgugugccggcgugaaaa

SEQ ID NO: 1783207 - RNA, 19 nt, Artificial Sequence
  Description of Artificial Sequence: Synthetic oligonucleotide
auucaagagggcacaagga

SEQ ID NO: 1783208 - RNA, 19 nt, Artificial Sequence
  Description of Artificial Sequence: Synthetic oligonucleotide
cagcaaguauccauggaga

SEQ ID NO: 1783209 - RNA, 19 nt, Artificial Sequence
  Description of Artificial Sequence: Synthetic oligonucleotide
ucaacacccugccaagcuu

SEQ ID NO: 1783210 - RNA, 19 nt, Artificial Sequence
  Description of Artificial Sequence: Synthetic oligonucleotide
ugaaaaucucacugcuguu

SEQ ID NO: 1783211 - RNA, 19 nt, Artificial Sequence
  Description of Artificial Sequence: Synthetic oligonucleotide
uagugccccugcucaaggg

SEQ ID NO: 1783212 - RNA, 19 nt, Artificial Sequence
  Description of Artificial Sequence: Synthetic oligonucleotide
caagaugcagcuggccagg

SEQ ID NO: 1783213 - RNA, 19 nt, Artificial Sequence
  Description of Artificial Sequence: Synthetic oligonucleotide
cccgccuuuauucacagac

SEQ ID NO: 1783214 - RNA, 19 nt, Artificial Sequence
  Description of Artificial Sequence: Synthetic oligonucleotide
cuguccuaggcucagagcu

SEQ ID NO: 1783215 - RNA, 19 nt, Artificial Sequence
  Description of Artificial Sequence: Synthetic oligonucleotide
gagacccuggagaggaaag

SEQ ID NO: 1783216 - RNA, 19 nt, Artificial Sequence
  Description of Artificial Sequence: Synthetic oligonucleotide
ggcgcuucaggucacucag

SEQ ID NO: 1783217 - RNA, 19 nt, Artificial Sequence
  Description of Artificial Sequence: Synthetic oligonucleotide
ugaaacgcacguucuccuc

SEQ ID NO: 1783218 - RNA, 19 nt, Artificial Sequence
  Description of Artificial Sequence: Synthetic oligonucleotide
cagacccucagucuccaac

SEQ ID NO: 1783219 - RNA, 19 nt, Artificial Sequence
  Description of Artificial Sequence: Synthetic oligonucleotide
cccacgaaagccaggacag

SEQ ID NO: 1783220 - RNA, 19 nt, Artificial Sequence
  Description of Artificial Sequence: Synthetic oligonucleotide
auuccacucugaaacugag

SEQ ID NO: 1783221 - RNA, 19 nt, Artificial Sequence
  Description of Artificial Sequence: Synthetic oligonucleotide
caacacccugccaagcuuc

SEQ ID NO: 1783222 - RNA, 19 nt, Artificial Sequence
  Description of Artificial Sequence: Synthetic oligonucleotide
caggagcugacauggccag

SEQ ID NO: 1783223 - RNA, 19 nt, Artificial Sequence
  Description of Artificial Sequence: Synthetic oligonucleotide
agaacuguccuaggcucag

SEQ ID NO: 1783224 - RNA, 19 nt, Artificial Sequence
  Description of Artificial Sequence: Synthetic oligonucleotide
aagugcacccugaucuucu

SEQ ID NO: 1783225 - RNA, 19 nt, Artificial Sequence
  Description of Artificial Sequence: Synthetic oligonucleotide
ggagaccaacaucaagugc

SEQ ID NO: 1783226 - RNA, 19 nt, Artificial Sequence
  Description of Artificial Sequence: Synthetic oligonucleotide
uccacuaggccccgcucac

SEQ ID NO: 1783227 - RNA, 19 nt, Artificial Sequence
  Description of Artificial Sequence: Synthetic oligonucleotide
aaaggggcaaguggacagu

SEQ ID NO: 1783228 - RNA, 19 nt, Artificial Sequence
  Description of Artificial Sequence: Synthetic oligonucleotide
agcugauuccacucugaaa

SEQ ID NO: 1783229 - RNA, 19 nt, Artificial Sequence
  Description of Artificial Sequence: Synthetic oligonucleotide
acuugagacccuggagagg

SEQ ID NO: 1783230 - RNA, 19 nt, Artificial Sequence
  Description of Artificial Sequence: Synthetic oligonucleotide
cuuagugccccugcucaag

SEQ ID NO: 1783231 - RNA, 19 nt, Artificial Sequence
  Description of Artificial Sequence: Synthetic oligonucleotide
aggaaggcgagaggagagg

SEQ ID NO: 1783232 - RNA, 19 nt, Artificial Sequence
  Description of Artificial Sequence: Synthetic oligonucleotide
uucuccucgugugccggcg

SEQ ID NO: 1783233 - RNA, 19 nt, Artificial Sequence
  Description of Artificial Sequence: Synthetic oligonucleotide
uuggugauccucccacgua

SEQ ID NO: 1783234 - RNA, 19 nt, Artificial Sequence
  Description of Artificial Sequence: Synthetic oligonucleotide
gcuacagguaccaggagac

SEQ ID NO: 1783235 - RNA, 19 nt, Artificial Sequence
  Description of Artificial Sequence: Synthetic oligonucleotide
ccuuuauucacagacccuc

SEQ ID NO: 1783236 - RNA, 19 nt, Artificial Sequence
  Description of Artificial Sequence: Synthetic oligonucleotide
gcuucauaaaugaaacgca

SEQ ID NO: 1783237 - RNA, 19 nt, Artificial Sequence
  Description of Artificial Sequence: Synthetic oligonucleotide
aagggccuuggccaucaau

SEQ ID NO: 1783238 - RNA, 19 nt, Artificial Sequence
  Description of Artificial Sequence: Synthetic oligonucleotide
gaacagaggagaccaacau

SEQ ID NO: 1783239 - RNA, 19 nt, Artificial Sequence
  Description of Artificial Sequence: Synthetic oligonucleotide
gugccacccgccuuuauuc

SEQ ID NO: 1783240 - RNA, 19 nt, Artificial Sequence
  Description of Artificial Sequence: Synthetic oligonucleotide
ccaagaugcagcuggccag

SEQ ID NO: 1783241 - RNA, 19 nt, Artificial Sequence
  Description of Artificial Sequence: Synthetic oligonucleotide
cugcuagagcacacucucc

SEQ ID NO: 1783242 - RNA, 19 nt, Artificial Sequence
  Description of Artificial Sequence: Synthetic oligonucleotide
agugccacccgccuuuauu

SEQ ID NO: 1783243 - RNA, 19 nt, Artificial Sequence
  Description of Artificial Sequence: Synthetic oligonucleotide
ccaggugcuacccaagaug

SEQ ID NO: 1783244 - RNA, 19 nt, Artificial Sequence
  Description of Artificial Sequence: Synthetic oligonucleotide
ugaaggucuugaggcuggg

SEQ ID NO: 1783245 - RNA, 19 nt, Artificial Sequence
  Description of Artificial Sequence: Synthetic oligonucleotide
ggcacucuaggacuucuug

SEQ ID NO: 1783246 - RNA, 19 nt, Artificial Sequence
  Description of Artificial Sequence: Synthetic oligonucleotide
caggggcaacuugagaccc

SEQ ID NO: 1783247 - RNA, 19 nt, Artificial Sequence
  Description of Artificial Sequence: Synthetic oligonucleotide
gugcacccugaucuucugg

SEQ ID NO: 1783248 - RNA, 19 nt, Artificial Sequence
  Description of Artificial Sequence: Synthetic oligonucleotide
gucauugcuggggugucug

SEQ ID NO: 1783249 - RNA, 19 nt, Artificial Sequence
  Description of Artificial Sequence: Synthetic oligonucleotide
cacuuggauucaagagggc

SEQ ID NO: 1783250 - RNA, 19 nt, Artificial Sequence
  Description of Artificial Sequence: Synthetic oligonucleotide
guaccaggagaccaggccu

SEQ ID NO: 1783251 - RNA, 19 nt, Artificial Sequence
  Description of Artificial Sequence: Synthetic oligonucleotide
ugagacccuggagaggaaa

SEQ ID NO: 1783252 - RNA, 19 nt, Artificial Sequence
  Description of Artificial Sequence: Synthetic oligonucleotide
aacgcacguucuccucgug

SEQ ID NO: 1783253 - RNA, 19 nt, Artificial Sequence
  Description of Artificial Sequence: Synthetic oligonucleotide
cugcucaagggcacugcug

SEQ ID NO: 1783254 - RNA, 19 nt, Artificial Sequence
  Description of Artificial Sequence: Synthetic oligonucleotide
gacccucagucuccaacac

SEQ ID NO: 1783255 - RNA, 19 nt, Artificial Sequence
  Description of Artificial Sequence: Synthetic oligonucleotide
ccugcuagagcacacucuc

SEQ ID NO: 1783256 - RNA, 19 nt, Artificial Sequence
  Description of Artificial Sequence: Synthetic oligonucleotide
agugcacccugaucuucug

SEQ ID NO: 1783257 - RNA, 19 nt, Artificial Sequence
  Description of Artificial Sequence: Synthetic oligonucleotide
cgccuuuauucacagaccc

SEQ ID NO: 1783258 - RNA, 19 nt, Artificial Sequence
  Description of Artificial Sequence: Synthetic oligonucleotide
ggauccugcggccucgccc

SEQ ID NO: 1783259 - RNA, 19 nt, Artificial Sequence
  Description of Artificial Sequence: Synthetic oligonucleotide
ugccacccgccuuuauuca

SEQ ID NO: 1783260 - RNA, 19 nt, Artificial Sequence
  Description of Artificial Sequence: Synthetic oligonucleotide
gaagaacagcaaguaucca

SEQ ID NO: 1783261 - RNA, 19 nt, Artificial Sequence
  Description of Artificial Sequence: Synthetic oligonucleotide
gagcugauuccacucugaa

SEQ ID NO: 1783262 - RNA, 19 nt, Artificial Sequence
  Description of Artificial Sequence: Synthetic oligonucleotide
gauccugcggccucgcccu

SEQ ID NO: 1783263 - RNA, 19 nt, Artificial Sequence
  Description of Artificial Sequence: Synthetic oligonucleotide
cuagaggccccuucaggga

SEQ ID NO: 1783264 - RNA, 19 nt, Artificial Sequence
  Description of Artificial Sequence: Synthetic oligonucleotide
uccugcguguuccggcgcu

SEQ ID NO: 1783265 - RNA, 19 nt, Artificial Sequence
  Description of Artificial Sequence: Synthetic oligonucleotide
gggugucugguccuggcgc

SEQ ID NO: 1783266 - RNA, 19 nt, Artificial Sequence
  Description of Artificial Sequence: Synthetic oligonucleotide
ugggguugggaaccuucuc

SEQ ID NO: 1783267 - RNA, 19 nt, Artificial Sequence
  Description of Artificial Sequence: Synthetic oligonucleotide
uguuucucuugccguugua

SEQ ID NO: 1783268 - RNA, 19 nt, Artificial Sequence
  Description of Artificial Sequence: Synthetic oligonucleotide
acgcacguucuccucgugu

SEQ ID NO: 1783269 - RNA, 19 nt, Artificial Sequence
  Description of Artificial Sequence: Synthetic oligonucleotide
ugcguguuccggcgcuuca

SEQ ID NO: 1783270 - RNA, 19 nt, Artificial Sequence
  Description of Artificial Sequence: Synthetic oligonucleotide
ugccguuguagacgacccu

SEQ ID NO: 1783271 - RNA, 19 nt, Artificial Sequence
  Description of Artificial Sequence: Synthetic oligonucleotide
ggcaacuugagacccugga

SEQ ID NO: 1783272 - RNA, 19 nt, Artificial Sequence
  Description of Artificial Sequence: Synthetic oligonucleotide
cacccgccuuuauucacag

SEQ ID NO: 1783273 - RNA, 19 nt, Artificial Sequence
  Description of Artificial Sequence: Synthetic oligonucleotide
ggcaaguggacagugggga

SEQ ID NO: 1783274 - RNA, 19 nt, Artificial Sequence
  Description of Artificial Sequence: Synthetic oligonucleotide
gaccaacaucaagugcacc

SEQ ID NO: 1783275 - RNA, 19 nt, Artificial Sequence
  Description of Artificial Sequence: Synthetic oligonucleotide
ggagaccaggccugguugc

SEQ ID NO: 1783276 - RNA, 19 nt, Artificial Sequence
  Description of Artificial Sequence: Synthetic oligonucleotide
agagcugauuccacucuga

SEQ ID NO: 1783277 - RNA, 19 nt, Artificial Sequence
  Description of Artificial Sequence: Synthetic oligonucleotide
ggaaaggaagggccuuggc

SEQ ID NO: 1783278 - RNA, 19 nt, Artificial Sequence
  Description of Artificial Sequence: Synthetic oligonucleotide
ggagcugacauggccagac

SEQ ID NO: 1783279 - RNA, 19 nt, Artificial Sequence
  Description of Artificial Sequence: Synthetic oligonucleotide
ugccggcgugaaaaucuca

SEQ ID NO: 1783280 - RNA, 19 nt, Artificial Sequence
  Description of Artificial Sequence: Synthetic oligonucleotide
caccagacagcuggcugcg

SEQ ID NO: 1783281 - RNA, 19 nt, Artificial Sequence
  Description of Artificial Sequence: Synthetic oligonucleotide
ggauucaagagggcacaag

SEQ ID NO: 1783282 - RNA, 19 nt, Artificial Sequence
  Description of Artificial Sequence: Synthetic oligonucleotide
ugcuggauccugcggccuc

SEQ ID NO: 1783283 - RNA, 19 nt, Artificial Sequence
  Description of Artificial Sequence: Synthetic oligonucleotide
ggaacagaggagaccaaca

SEQ ID NO: 1783284 - RNA, 19 nt, Artificial Sequence
  Description of Artificial Sequence: Synthetic oligonucleotide
guauccauggagagaccca

SEQ ID NO: 1783285 - RNA, 19 nt, Artificial Sequence
  Description of Artificial Sequence: Synthetic oligonucleotide
caagggcacugcugugacc

SEQ ID NO: 1783286 - RNA, 19 nt, Artificial Sequence
  Description of Artificial Sequence: Synthetic oligonucleotide
gcugacauggccagacccc

SEQ ID NO: 1783287 - RNA, 19 nt, Artificial Sequence
  Description of Artificial Sequence: Synthetic oligonucleotide
guacaccccacgaaagcca

SEQ ID NO: 1783288 - RNA, 19 nt, Artificial Sequence
  Description of Artificial Sequence: Synthetic oligonucleotide
ggugggagagcgugggcug

SEQ ID NO: 1783289 - RNA, 19 nt, Artificial Sequence
  Description of Artificial Sequence: Synthetic oligonucleotide
ggauuguggccugcuagag

SEQ ID NO: 1783290 - RNA, 19 nt, Artificial Sequence
  Description of Artificial Sequence: Synthetic oligonucleotide
agggcacugcugugaccac

SEQ ID NO: 1783291 - RNA, 19 nt, Artificial Sequence
  Description of Artificial Sequence: Synthetic oligonucleotide
gaugcaggugggacugcac

SEQ ID NO: 1783292 - RNA, 19 nt, Artificial Sequence
  Description of Artificial Sequence: Synthetic oligonucleotide
aggguugggucggcagggc

SEQ ID NO: 1783293 - RNA, 19 nt, Artificial Sequence
  Description of Artificial Sequence: Synthetic oligonucleotide
gguaacagcagagaggguu

SEQ ID NO: 1783294 - RNA, 19 nt, Artificial Sequence
  Description of Artificial Sequence: Synthetic oligonucleotide
caccggaacagaggagacc

SEQ ID NO: 1783295 - RNA, 19 nt, Artificial Sequence
  Description of Artificial Sequence: Synthetic oligonucleotide
gcauccugcguguuccggc

SEQ ID NO: 1783296 - RNA, 19 nt, Artificial Sequence
  Description of Artificial Sequence: Synthetic oligonucleotide
caagugcacccugaucuuc

SEQ ID NO: 1783297 - RNA, 19 nt, Artificial Sequence
  Description of Artificial Sequence: Synthetic oligonucleotide
gagcgugggcugcuguuuc

SEQ ID NO: 1783298 - RNA, 19 nt, Artificial Sequence
  Description of Artificial Sequence: Synthetic oligonucleotide
uggauucaagagggcacaa

SEQ ID NO: 1783299 - RNA, 19 nt, Artificial Sequence
  Description of Artificial Sequence: Synthetic oligonucleotide
gcagagaggguugggucgg

SEQ ID NO: 1783300 - RNA, 19 nt, Artificial Sequence
  Description of Artificial Sequence: Synthetic oligonucleotide
ggagaggcauggcagguaa

SEQ ID NO: 1783301 - RNA, 19 nt, Artificial Sequence
  Description of Artificial Sequence: Synthetic oligonucleotide
cucccacguacaccccacg

SEQ ID NO: 1783302 - RNA, 19 nt, Artificial Sequence
  Description of Artificial Sequence: Synthetic oligonucleotide
cacuaggccccgcucacca

SEQ ID NO: 1783303 - RNA, 19 nt, Artificial Sequence
  Description of Artificial Sequence: Synthetic oligonucleotide
uggggauuguggccugcua

SEQ ID NO: 1783304 - RNA, 19 nt, Artificial Sequence
  Description of Artificial Sequence: Synthetic oligonucleotide
gccguuguagacgacccug

SEQ ID NO: 1783305 - RNA, 19 nt, Artificial Sequence
  Description of Artificial Sequence: Synthetic oligonucleotide
gcgcuuggcugcuggaucc

SEQ ID NO: 1783306 - RNA, 19 nt, Artificial Sequence
  Description of Artificial Sequence: Synthetic oligonucleotide
cucuaggacuucuuggcau

SEQ ID NO: 1783307 - RNA, 19 nt, Artificial Sequence
  Description of Artificial Sequence: Synthetic oligonucleotide
cucugaaacugaggcaaga

SEQ ID NO: 1783308 - RNA, 19 nt, Artificial Sequence
  Description of Artificial Sequence: Synthetic oligonucleotide
ccgccuuuauucacagacc

SEQ ID NO: 1783309 - RNA, 19 nt, Artificial Sequence
  Description of Artificial Sequence: Synthetic oligonucleotide
gggcaaguggacagugggg

SEQ ID NO: 1783310 - RNA, 19 nt, Artificial Sequence
  Description of Artificial Sequence: Synthetic oligonucleotide
cgugaaaaucucacugcug

SEQ ID NO: 1783311 - RNA, 19 nt, Artificial Sequence
  Description of Artificial Sequence: Synthetic oligonucleotide
cggcgugaaaaucucacug

SEQ ID NO: 1783312 - RNA, 19 nt, Artificial Sequence
  Description of Artificial Sequence: Synthetic oligonucleotide
gcaaguauccauggagaga

SEQ ID NO: 1783313 - RNA, 19 nt, Artificial Sequence
  Description of Artificial Sequence: Synthetic oligonucleotide
cuuggugauccucccacgu

SEQ ID NO: 1783314 - RNA, 19 nt, Artificial Sequence
  Description of Artificial Sequence: Synthetic oligonucleotide
gacugcacauguccuaauu

SEQ ID NO: 1783315 - RNA, 19 nt, Artificial Sequence
  Description of Artificial Sequence: Synthetic oligonucleotide
cucaacacccugccaagcu

SEQ ID NO: 1783316 - RNA, 19 nt, Artificial Sequence
  Description of Artificial Sequence: Synthetic oligonucleotide
cguacaccccacgaaagcc

SEQ ID NO: 1783317 - RNA, 19 nt, Artificial Sequence
  Description of Artificial Sequence: Synthetic oligonucleotide
gccugguugcuagaggccc

SEQ ID NO: 1783318 - RNA, 19 nt, Artificial Sequence
  Description of Artificial Sequence: Synthetic oligonucleotide
gagacccagacuggaugca

SEQ ID NO: 1783319 - RNA, 19 nt, Artificial Sequence
  Description of Artificial Sequence: Synthetic oligonucleotide
gccaccggaacagaggaga

SEQ ID NO: 1783320 - RNA, 19 nt, Artificial Sequence
  Description of Artificial Sequence: Synthetic oligonucleotide
gguugcuagaggccccuuc

SEQ ID NO: 1783321 - RNA, 19 nt, Artificial Sequence
  Description of Artificial Sequence: Synthetic oligonucleotide
caccccacgaaagccagga

SEQ ID NO: 1783322 - RNA, 19 nt, Artificial Sequence
  Description of Artificial Sequence: Synthetic oligonucleotide
ugggucggcagggccaggu

SEQ ID NO: 1783323 - RNA, 19 nt, Artificial Sequence
  Description of Artificial Sequence: Synthetic oligonucleotide
cugauuccacucugaaacu

SEQ ID NO: 1783324 - RNA, 19 nt, Artificial Sequence
  Description of Artificial Sequence: Synthetic oligonucleotide
gcgccaggcacucuaggac

SEQ ID NO: 1783325 - RNA, 19 nt, Artificial Sequence
  Description of Artificial Sequence: Synthetic oligonucleotide
ucuugccguuguagacgac

SEQ ID NO: 1783326 - RNA, 19 nt, Artificial Sequence
  Description of Artificial Sequence: Synthetic oligonucleotide
ccagaagcagagccaccgg

SEQ ID NO: 1783327 - RNA, 19 nt, Artificial Sequence
  Description of Artificial Sequence: Synthetic oligonucleotide
gucccgcucaacacccugc

SEQ ID NO: 1783328 - RNA, 19 nt, Artificial Sequence
  Description of Artificial Sequence: Synthetic oligonucleotide
guagacgacccuggagaca

SEQ ID NO: 1783329 - RNA, 19 nt, Artificial Sequence
  Description of Artificial Sequence: Synthetic oligonucleotide
acccuggagaggaaaggaa

SEQ ID NO: 1783330 - RNA, 19 nt, Artificial Sequence
  Description of Artificial Sequence: Synthetic oligonucleotide
uccucgugugccggcguga

SEQ ID NO: 1783331 - RNA, 19 nt, Artificial Sequence
  Description of Artificial Sequence: Synthetic oligonucleotide
acagggcuacagguaccag

SEQ ID NO: 1783332 - RNA, 19 nt, Artificial Sequence
  Description of Artificial Sequence: Synthetic oligonucleotide
gcgugaaaaucucacugcu

SEQ ID NO: 1783333 - RNA, 19 nt, Artificial Sequence
  Description of Artificial Sequence: Synthetic oligonucleotide
cauaaaugaaacgcacguu

SEQ ID NO: 1783334 - RNA, 19 nt, Artificial Sequence
  Description of Artificial Sequence: Synthetic oligonucleotide
ugggaaccuucuccacaua

SEQ ID NO: 1783335 - RNA, 19 nt, Artificial Sequence
  Description of Artificial Sequence: Synthetic oligonucleotide
agagcgugggcugcuguuu

SEQ ID NO: 1783336 - RNA, 19 nt, Artificial Sequence
  Description of Artificial Sequence: Synthetic oligonucleotide
gagaggcauggcagguaac

SEQ ID NO: 1783337 - RNA, 19 nt, Artificial Sequence
  Description of Artificial Sequence: Synthetic oligonucleotide
cucuggggauuguggccug

SEQ ID NO: 1783338 - RNA, 19 nt, Artificial Sequence
  Description of Artificial Sequence: Synthetic oligonucleotide
agagaggguugggucggca

SEQ ID NO: 1783339 - RNA, 19 nt, Artificial Sequence
  Description of Artificial Sequence: Synthetic oligonucleotide
acgacccuggagacaggag

SEQ ID NO: 1783340 - RNA, 19 nt, Artificial Sequence
  Description of Artificial Sequence: Synthetic oligonucleotide
cagaggagaccaacaucaa

SEQ ID NO: 1783341 - RNA, 19 nt, Artificial Sequence
  Description of Artificial Sequence: Synthetic oligonucleotide
ccccacgaaagccaggaca

SEQ ID NO: 1783342 - RNA, 19 nt, Artificial Sequence
  Description of Artificial Sequence: Synthetic oligonucleotide
gccggcgugaaaaucucac

SEQ ID NO: 1783343 - RNA, 19 nt, Artificial Sequence
  Description of Artificial Sequence: Synthetic oligonucleotide
gccagaagaacagcaagua

SEQ ID NO: 1783344 - RNA, 19 nt, Artificial Sequence
  Description of Artificial Sequence: Synthetic oligonucleotide
ccuucaaggucagccuuag

SEQ ID NO: 1783345 - RNA, 19 nt, Artificial Sequence
  Description of Artificial Sequence: Synthetic oligonucleotide
gugggagagcgugggcugc

SEQ ID NO: 1783346 - RNA, 19 nt, Artificial Sequence
  Description of Artificial Sequence: Synthetic oligonucleotide
ggguugggucggcagggcc

SEQ ID NO: 1783347 - RNA, 19 nt, Artificial Sequence
  Description of Artificial Sequence: Synthetic oligonucleotide
ggcauccugcguguuccgg

SEQ ID NO: 1783348 - RNA, 19 nt, Artificial Sequence
  Description of Artificial Sequence: Synthetic oligonucleotide
ggggcaacuugagacccug

SEQ ID NO: 1783349 - RNA, 19 nt, Artificial Sequence
  Description of Artificial Sequence: Synthetic oligonucleotide
ggccugcuagagcacacuc

SEQ ID NO: 1783350 - RNA, 19 nt, Artificial Sequence
  Description of Artificial Sequence: Synthetic oligonucleotide
acaccccacgaaagccagg

SEQ ID NO: 1783351 - RNA, 19 nt, Artificial Sequence
  Description of Artificial Sequence: Synthetic oligonucleotide
uggcgcuuggcugcuggau

SEQ ID NO: 1783352 - RNA, 19 nt, Artificial Sequence
  Description of Artificial Sequence: Synthetic oligonucleotide
gcuggauccugcggccucg

SEQ ID NO: 1783353 - RNA, 19 nt, Artificial Sequence
  Description of Artificial Sequence: Synthetic oligonucleotide
gugccccugcucaagggca

SEQ ID NO: 1783354 - RNA, 19 nt, Artificial Sequence
  Description of Artificial Sequence: Synthetic oligonucleotide
uccuaggcucagagcugau

SEQ ID NO: 1783355 - RNA, 19 nt, Artificial Sequence
  Description of Artificial Sequence: Synthetic oligonucleotide
cugcugugaccacagggcu

SEQ ID NO: 1783356 - RNA, 19 nt, Artificial Sequence
  Description of Artificial Sequence: Synthetic oligonucleotide
caggacaggccuggcagca

SEQ ID NO: 1783357 - RNA, 19 nt, Artificial Sequence
  Description of Artificial Sequence: Synthetic oligonucleotide
gaacuguccuaggcucaga

SEQ ID NO: 1783358 - RNA, 19 nt, Artificial Sequence
  Description of Artificial Sequence: Synthetic oligonucleotide
auccauggagagacccaga

SEQ ID NO: 1783359 - RNA, 19 nt, Artificial Sequence
  Description of Artificial Sequence: Synthetic oligonucleotide
cguguuccggcgcuucagg

SEQ ID NO: 1783360 - RNA, 19 nt, Artificial Sequence
  Description of Artificial Sequence: Synthetic oligonucleotide
cucaggucgaugggcuuga

SEQ ID NO: 1783361 - RNA, 19 nt, Artificial Sequence
  Description of Artificial Sequence: Synthetic oligonucleotide
ucaggucacucaggucgau

SEQ ID NO: 1783362 - RNA, 19 nt, Artificial Sequence
  Description of Artificial Sequence: Synthetic oligonucleotide
aggugcuacccaagaugca

SEQ ID NO: 1783363 - RNA, 19 nt, Artificial Sequence
  Description of Artificial Sequence: Synthetic oligonucleotide
ccacucugaaacugaggca

SEQ ID NO: 1783364 - RNA, 19 nt, Artificial Sequence
  Description of Artificial Sequence: Synthetic oligonucleotide
gcucaacacccugccaagc

SEQ ID NO: 1783365 - RNA, 19 nt, Artificial Sequence
  Description of Artificial Sequence: Synthetic oligonucleotide
ggccaucaauccugcuggc

SEQ ID NO: 1783366 - RNA, 19 nt, Artificial Sequence
  Description of Artificial Sequence: Synthetic oligonucleotide
ccaccggaacagaggagac

SEQ ID NO: 1783367 - RNA, 19 nt, Artificial Sequence
  Description of Artificial Sequence: Synthetic oligonucleotide
ccacguacaccccacgaaa

SEQ ID NO: 1783368 - RNA, 19 nt, Artificial Sequence
  Description of Artificial Sequence: Synthetic oligonucleotide
gccacccgccuuuauucac

SEQ ID NO: 1783369 - RNA, 19 nt, Artificial Sequence
  Description of Artificial Sequence: Synthetic oligonucleotide
cgagaggagaggcauggca

SEQ ID NO: 1783370 - RNA, 19 nt, Artificial Sequence
  Description of Artificial Sequence: Synthetic oligonucleotide
ggccaggugcuacccaaga

SEQ ID NO: 1783371 - RNA, 19 nt, Artificial Sequence
  Description of Artificial Sequence: Synthetic oligonucleotide
gugugccggcgugaaaauc

SEQ ID NO: 1783372 - RNA, 19 nt, Artificial Sequence
  Description of Artificial Sequence: Synthetic oligonucleotide
guguuccggcgcuucaggu

SEQ ID NO: 1783373 - RNA, 19 nt, Artificial Sequence
  Description of Artificial Sequence: Synthetic oligonucleotide
acccgccuuuauucacaga

SEQ ID NO: 1783374 - RNA, 19 nt, Artificial Sequence
  Description of Artificial Sequence: Synthetic oligonucleotide
gagagcgugggcugcuguu

SEQ ID NO: 1783375 - RNA, 19 nt, Artificial Sequence
  Description of Artificial Sequence: Synthetic oligonucleotide
gcgcaggucccgcucaaca

SEQ ID NO: 1783376 - RNA, 19 nt, Artificial Sequence
  Description of Artificial Sequence: Synthetic oligonucleotide
ugcgcaggucccgcucaac

SEQ ID NO: 1783377 - RNA, 19 nt, Artificial Sequence
  Description of Artificial Sequence: Synthetic oligonucleotide
gugccggcgugaaaaucuc

SEQ ID NO: 1783378 - RNA, 19 nt, Artificial Sequence
  Description of Artificial Sequence: Synthetic oligonucleotide
auccugcggccucgcccuc

SEQ ID NO: 1783379 - RNA, 19 nt, Artificial Sequence
  Description of Artificial Sequence: Synthetic oligonucleotide
cugacauggccagaccccu

SEQ ID NO: 1783380 - RNA, 19 nt, Artificial Sequence
  Description of Artificial Sequence: Synthetic oligonucleotide
gcucagagcugauuccacu

SEQ ID NO: 1783381 - RNA, 19 nt, Artificial Sequence
  Description of Artificial Sequence: Synthetic oligonucleotide
ggcucagagcugauuccac

SEQ ID NO: 1783382 - RNA, 19 nt, Artificial Sequence
  Description of Artificial Sequence: Synthetic oligonucleotide
cagagaggguugggucggc

SEQ ID NO: 1783383 - RNA, 19 nt, Artificial Sequence
  Description of Artificial Sequence: Synthetic oligonucleotide
augcagcuggccaggggaa

SEQ ID NO: 1783384 - RNA, 19 nt, Artificial Sequence
  Description of Artificial Sequence: Synthetic oligonucleotide
ggaugcaggugggacugca

SEQ ID NO: 1783385 - RNA, 19 nt, Artificial Sequence
  Description of Artificial Sequence: Synthetic oligonucleotide
cacugcuguuggugggaga

SEQ ID NO: 1783386 - RNA, 19 nt, Artificial Sequence
  Description of Artificial Sequence: Synthetic oligonucleotide
gggcaacuugagacccugg

SEQ ID NO: 1783387 - RNA, 19 nt, Artificial Sequence
  Description of Artificial Sequence: Synthetic oligonucleotide
gagaccaggccugguugcu

SEQ ID NO: 1783388 - RNA, 19 nt, Artificial Sequence
  Description of Artificial Sequence: Synthetic oligonucleotide
cauugcuggggugucuggu

SEQ ID NO: 1783389 - RNA, 19 nt, Artificial Sequence
  Description of Artificial Sequence: Synthetic oligonucleotide
aggggcaacuugagacccu

SEQ ID NO: 1783390 - RNA, 19 nt, Artificial Sequence
  Description of Artificial Sequence: Synthetic oligonucleotide
ccacgaaagccaggacagg

SEQ ID NO: 1783391 - RNA, 19 nt, Artificial Sequence
  Description of Artificial Sequence: Synthetic oligonucleotide
cugcguguuccggcgcuuc

SEQ ID NO: 1783392 - RNA, 19 nt, Artificial Sequence
  Description of Artificial Sequence: Synthetic oligonucleotide
agaccaggccugguugcua

SEQ ID NO: 1783393 - RNA, 19 nt, Artificial Sequence
  Description of Artificial Sequence: Synthetic oligonucleotide
gcguguuccggcgcuucag

SEQ ID NO: 1783394 - RNA, 19 nt, Artificial Sequence
  Description of Artificial Sequence: Synthetic oligonucleotide
ccacccgccuuuauucaca

SEQ ID NO: 1783395 - RNA, 19 nt, Artificial Sequence
  Description of Artificial Sequence: Synthetic oligonucleotide
cacagacacuuggauucaa

SEQ ID NO: 1783396 - RNA, 19 nt, Artificial Sequence
  Description of Artificial Sequence: Synthetic oligonucleotide
cuggcgcuuggcugcugga

SEQ ID NO: 1783397 - RNA, 19 nt, Artificial Sequence
  Description of Artificial Sequence: Synthetic oligonucleotide
gcccuccucgccgccaccg

SEQ ID NO: 1783398 - RNA, 19 nt, Artificial Sequence
  Description of Artificial Sequence: Synthetic oligonucleotide
uccggcgcuucaggucacu

SEQ ID NO: 1783399 - RNA, 19 nt, Artificial Sequence
  Description of Artificial Sequence: Synthetic oligonucleotide
cccacguacaccccacgaa

SEQ ID NO: 1783400 - RNA, 19 nt, Artificial Sequence
  Description of Artificial Sequence: Synthetic oligonucleotide
cccugaucuucuggaggcc

SEQ ID NO: 1783401 - RNA, 19 nt, Artificial Sequence
  Description of Artificial Sequence: Synthetic oligonucleotide
ccaacaucaagugcacccu

SEQ ID NO: 1783402 - RNA, 19 nt, Artificial Sequence
  Description of Artificial Sequence: Synthetic oligonucleotide
aggcacucuaggacuucuu

SEQ ID NO: 1783403 - RNA, 19 nt, Artificial Sequence
  Description of Artificial Sequence: Synthetic oligonucleotide
cccagacuggaugcaggug

SEQ ID NO: 1783404 - RNA, 19 nt, Artificial Sequence
  Description of Artificial Sequence: Synthetic oligonucleotide
gcaaguggacaguggggau

SEQ ID NO: 1783405 - RNA, 19 nt, Artificial Sequence
  Description of Artificial Sequence: Synthetic oligonucleotide
caggcacucuaggacuucu

SEQ ID NO: 1783406 - RNA, 19 nt, Artificial Sequence
  Description of Artificial Sequence: Synthetic oligonucleotide
ugguugcuagaggccccuu

SEQ ID NO: 1783407 - RNA, 19 nt, Artificial Sequence
  Description of Artificial Sequence: Synthetic oligonucleotide
ggggcgccaggcacucuag

SEQ ID NO: 1783408 - RNA, 19 nt, Artificial Sequence
  Description of Artificial Sequence: Synthetic oligonucleotide
cgaaagccaggacaggccu

SEQ ID NO: 1783409 - RNA, 19 nt, Artificial Sequence
  Description of Artificial Sequence: Synthetic oligonucleotide
ggagagcgugggcugcugu

SEQ ID NO: 1783410 - RNA, 19 nt, Artificial Sequence
  Description of Artificial Sequence: Synthetic oligonucleotide
ggaggggcgccaggcacuc

SEQ ID NO: 1783411 - RNA, 19 nt, Artificial Sequence
  Description of Artificial Sequence: Synthetic oligonucleotide
cguuguagacgacccugga

SEQ ID NO: 1783412 - RNA, 19 nt, Artificial Sequence
  Description of Artificial Sequence: Synthetic oligonucleotide
cucgugugccggcgugaaa

SEQ ID NO: 1783413 - RNA, 19 nt, Artificial Sequence
  Description of Artificial Sequence: Synthetic oligonucleotide
gccaggugcuacccaagau

SEQ ID NO: 1783414 - RNA, 19 nt, Artificial Sequence
  Description of Artificial Sequence: Synthetic oligonucleotide
gccugcuagagcacacucu

SEQ ID NO: 1783415 - RNA, 19 nt, Artificial Sequence
  Description of Artificial Sequence: Synthetic oligonucleotide
ggagagacccagacuggau

SEQ ID NO: 1783416 - RNA, 19 nt, Artificial Sequence
  Description of Artificial Sequence: Synthetic oligonucleotide
gcgugggcugcuguuucuc

SEQ ID NO: 1783417 - RNA, 19 nt, Artificial Sequence
  Description of Artificial Sequence: Synthetic oligonucleotide
cugcgcaggucccgcucaa

SEQ ID NO: 1783418 - RNA, 19 nt, Artificial Sequence
  Description of Artificial Sequence: Synthetic oligonucleotide
cucgcccuccucgccgcca

SEQ ID NO: 1783419 - RNA, 19 nt, Artificial Sequence
  Description of Artificial Sequence: Synthetic oligonucleotide
ccggcgugaaaaucucacu

SEQ ID NO: 1783420 - RNA, 19 nt, Artificial Sequence
  Description of Artificial Sequence: Synthetic oligonucleotide
ccaggcacucuaggacuuc

SEQ ID NO: 1783421 - RNA, 19 nt, Artificial Sequence
  Description of Artificial Sequence: Synthetic oligonucleotide
cccuccucgccgccaccgc

SEQ ID NO: 1783422 - RNA, 19 nt, Artificial Sequence
  Description of Artificial Sequence: Synthetic oligonucleotide
cccuggagacaggagagcu

SEQ ID NO: 1783423 - RNA, 19 nt, Artificial Sequence
  Description of Artificial Sequence: Synthetic oligonucleotide
ggacugcacauguccuaau

SEQ ID NO: 1783424 - RNA, 19 nt, Artificial Sequence
  Description of Artificial Sequence: Synthetic oligonucleotide
ccccugcucaagggcacug

SEQ ID NO: 1783425 - RNA, 19 nt, Artificial Sequence
  Description of Artificial Sequence: Synthetic oligonucleotide
cccagugacaggggcaacu

SEQ ID NO: 1783426 - RNA, 19 nt, Artificial Sequence
  Description of Artificial Sequence: Synthetic oligonucleotide
gggaggggcgccaggcacu

SEQ ID NO: 1783427 - RNA, 19 nt, Artificial Sequence
  Description of Artificial Sequence: Synthetic oligonucleotide
gcuguuggugggagagcgu

SEQ ID NO: 1783428 - RNA, 19 nt, Artificial Sequence
  Description of Artificial Sequence: Synthetic oligonucleotide
gccccuucagggagccaga

SEQ ID NO: 1783429 - RNA, 19 nt, Artificial Sequence
  Description of Artificial Sequence: Synthetic oligonucleotide
ccggaacagaggagaccaa

SEQ ID NO: 1783430 - RNA, 19 nt, Artificial Sequence
  Description of Artificial Sequence: Synthetic oligonucleotide
cccaaauguccaggccaga

SEQ ID NO: 1783431 - RNA, 19 nt, Artificial Sequence
  Description of Artificial Sequence: Synthetic oligonucleotide
cugcggccucgcccuccuc

SEQ ID NO: 1783432 - RNA, 19 nt, Artificial Sequence
  Description of Artificial Sequence: Synthetic oligonucleotide
ccggcgcuucaggucacuc

SEQ ID NO: 1783433 - RNA, 19 nt, Artificial Sequence
  Description of Artificial Sequence: Synthetic oligonucleotide
guccuggcgcuuggcugcu

SEQ ID NO: 1783434 - RNA, 19 nt, Artificial Sequence
  Description of Artificial Sequence: Synthetic oligonucleotide
ccucgugugccggcgugaa

SEQ ID NO: 1783435 - RNA, 19 nt, Artificial Sequence
  Description of Artificial Sequence: Synthetic oligonucleotide
ggucagccuuagugccccu

SEQ ID NO: 1783436 - RNA, 19 nt, Artificial Sequence
  Description of Artificial Sequence: Synthetic oligonucleotide
cagugccacccgccuuuau

SEQ ID NO: 1783437 - RNA, 19 nt, Artificial Sequence
  Description of Artificial Sequence: Synthetic oligonucleotide
gccccugcucaagggcacu

SEQ ID NO: 1783438 - RNA, 19 nt, Artificial Sequence
  Description of Artificial Sequence: Synthetic oligonucleotide
ccagugccacccgccuuua

SEQ ID NO: 1783439 - RNA, 19 nt, Artificial Sequence
  Description of Artificial Sequence: Synthetic oligonucleotide
ccugcguguuccggcgcuu

SEQ ID NO: 1783440 - RNA, 19 nt, Artificial Sequence
  Description of Artificial Sequence: Synthetic oligonucleotide
uauauauauauauauaucu

SEQ ID NO: 1783441 - RNA, 19 nt, Artificial Sequence
  Description of Artificial Sequence: Synthetic oligonucleotide
acuguuuugaggcuggagc

SEQ ID NO: 1783442 - RNA, 19 nt, Artificial Sequence
  Description of Artificial Sequence: Synthetic oligonucleotide
agcuguguaguauucagcc

SEQ ID NO: 1783443 - RNA, 19 nt, Artificial Sequence
  Description of Artificial Sequence: Synthetic oligonucleotide
ugucuuuucuuaaauauac

SEQ ID NO: 1783444 - RNA, 19 nt, Artificial Sequence
  Description of Artificial Sequence: Synthetic oligonucleotide
uguuaaagaggucuucggg

SEQ ID NO: 1783445 - RNA, 19 nt, Artificial Sequence
  Description of Artificial Sequence: Synthetic oligonucleotide
agguguaucgcauucggcc

SEQ ID NO: 1783446 - RNA, 19 nt, Artificial Sequence
  Description of Artificial Sequence: Synthetic oligonucleotide
aagaacauguuaaagaggu

SEQ ID NO: 1783447 - RNA, 19 nt, Artificial Sequence
  Description of Artificial Sequence: Synthetic oligonucleotide
guuaaagaggucuucgggg

SEQ ID NO: 1783448 - RNA, 19 nt, Artificial Sequence
  Description of Artificial Sequence: Synthetic oligonucleotide
gauauagucaucuuccaca

SEQ ID NO: 1783449 - RNA, 19 nt, Artificial Sequence
  Description of Artificial Sequence: Synthetic oligonucleotide
cugaguacagcauaugccg

SEQ ID NO: 1783450 - RNA, 19 nt, Artificial Sequence
  Description of Artificial Sequence: Synthetic oligonucleotide
aaaguagcgggcccgguac

SEQ ID NO: 1783451 - RNA, 19 nt, Artificial Sequence
  Description of Artificial Sequence: Synthetic oligonucleotide
uauauauauauauaucuuu

SEQ ID NO: 1783452 - RNA, 19 nt, Artificial Sequence
  Description of Artificial Sequence: Synthetic oligonucleotide
ucuaaguuacauucucugg

SEQ ID NO: 1783453 - RNA, 19 nt, Artificial Sequence
  Description of Artificial Sequence: Synthetic oligonucleotide
gaacuauccaugcagggag

SEQ ID NO: 1783454 - RNA, 19 nt, Artificial Sequence
  Description of Artificial Sequence: Synthetic oligonucleotide
gucgucaccaaacuggucg

SEQ ID NO: 1783455 - RNA, 19 nt, Artificial Sequence
  Description of Artificial Sequence: Synthetic oligonucleotide
uagacauggacguuacugg

SEQ ID NO: 1783456 - RNA, 19 nt, Artificial Sequence
  Description of Artificial Sequence: Synthetic oligonucleotide
aaagccucgguggaagucc

SEQ ID NO: 1783457 - RNA, 19 nt, Artificial Sequence
  Description of Artificial Sequence: Synthetic oligonucleotide
ucaccaaaauucuccaggg

SEQ ID NO: 1783458 - RNA, 19 nt, Artificial Sequence
  Description of Artificial Sequence: Synthetic oligonucleotide
uucuaaguuacauucucug

SEQ ID NO: 1783459 - RNA, 19 nt, Artificial Sequence
  Description of Artificial Sequence: Synthetic oligonucleotide
gucaccaaaauucuccagg

SEQ ID NO: 1783460 - RNA, 19 nt, Artificial Sequence
  Description of Artificial Sequence: Synthetic oligonucleotide
uauuccuuggcccaugccu

SEQ ID NO: 1783461 - RNA, 19 nt, Artificial Sequence
  Description of Artificial Sequence: Synthetic oligonucleotide
ucugugucaccaaaguagc

SEQ ID NO: 1783462 - RNA, 19 nt, Artificial Sequence
  Description of Artificial Sequence: Synthetic oligonucleotide
guacacgacgcucaggugg

SEQ ID NO: 1783463 - RNA, 19 nt, Artificial Sequence
  Description of Artificial Sequence: Synthetic oligonucleotide
auaagaaugaggaugggca

SEQ ID NO: 1783464 - RNA, 19 nt, Artificial Sequence
  Description of Artificial Sequence: Synthetic oligonucleotide
uauauauauauaucuuuau

SEQ ID NO: 1783465 - RNA, 19 nt, Artificial Sequence
  Description of Artificial Sequence: Synthetic oligonucleotide
ucugcugguagguguaucg

SEQ ID NO: 1783466 - RNA, 19 nt, Artificial Sequence
  Description of Artificial Sequence: Synthetic oligonucleotide
uaguacacgacgcucaggu

SEQ ID NO: 1783467 - RNA, 19 nt, Artificial Sequence
  Description of Artificial Sequence: Synthetic oligonucleotide
uucagguccauuuucauuu

SEQ ID NO: 1783468 - RNA, 19 nt, Artificial Sequence
  Description of Artificial Sequence: Synthetic oligonucleotide
guguauucgucagagaagg

SEQ ID NO: 1783469 - RNA, 19 nt, Artificial Sequence
  Description of Artificial Sequence: Synthetic oligonucleotide
uuuuacauucuacuuucgu

SEQ ID NO: 1783470 - RNA, 19 nt, Artificial Sequence
  Description of Artificial Sequence: Synthetic oligonucleotide
auauauauauaucuuuaua

SEQ ID NO: 1783471 - RNA, 19 nt, Artificial Sequence
  Description of Artificial Sequence: Synthetic oligonucleotide
aacuggucguacuguuucc

SEQ ID NO: 1783472 - RNA, 19 nt, Artificial Sequence
  Description of Artificial Sequence: Synthetic oligonucleotide
ugcugaguacagcauaugc

SEQ ID NO: 1783473 - RNA, 19 nt, Artificial Sequence
  Description of Artificial Sequence: Synthetic oligonucleotide
uuuacauucuacuuucguu

SEQ ID NO: 1783474 - RNA, 19 nt, Artificial Sequence
  Description of Artificial Sequence: Synthetic oligonucleotide
uggauugcugaguacagca

SEQ ID NO: 1783475 - RNA, 19 nt, Artificial Sequence
  Description of Artificial Sequence: Synthetic oligonucleotide
uguaugucuuuucuuaaau

SEQ ID NO: 1783476 - RNA, 19 nt, Artificial Sequence
  Description of Artificial Sequence: Synthetic oligonucleotide
aggaaaaccaccaccaaag

SEQ ID NO: 1783477 - RNA, 19 nt, Artificial Sequence
  Description of Artificial Sequence: Synthetic oligonucleotide
gugccgauggcuuuaaaag

SEQ ID NO: 1783478 - RNA, 19 nt, Artificial Sequence
  Description of Artificial Sequence: Synthetic oligonucleotide
accaugagcuggcugagcg

SEQ ID NO: 1783479 - RNA, 19 nt, Artificial Sequence
  Description of Artificial Sequence: Synthetic oligonucleotide
auguuaaagaggucuucgg

SEQ ID NO: 1783480 - RNA, 19 nt, Artificial Sequence
  Description of Artificial Sequence: Synthetic oligonucleotide
caguccaucaccuuggcuc

SEQ ID NO: 1783481 - RNA, 19 nt, Artificial Sequence
  Description of Artificial Sequence: Synthetic oligonucleotide
ucaguuggacaaauacucc

SEQ ID NO: 1783482 - RNA, 19 nt, Artificial Sequence
  Description of Artificial Sequence: Synthetic oligonucleotide
ugugugucaccaaaauucu

SEQ ID NO: 1783483 - RNA, 19 nt, Artificial Sequence
  Description of Artificial Sequence: Synthetic oligonucleotide
cauguuaaagaggucuucg

SEQ ID NO: 1783484 - RNA, 19 nt, Artificial Sequence
  Description of Artificial Sequence: Synthetic oligonucleotide
ugcugcaaguuuuacauuc

SEQ ID NO: 1783485 - RNA, 19 nt, Artificial Sequence
  Description of Artificial Sequence: Synthetic oligonucleotide
uccacauuccguucaacug

SEQ ID NO: 1783486 - RNA, 19 nt, Artificial Sequence
  Description of Artificial Sequence: Synthetic oligonucleotide
guagacauggacguuacug

SEQ ID NO: 1783487 - RNA, 19 nt, Artificial Sequence
  Description of Artificial Sequence: Synthetic oligonucleotide
ucgcuuguggacauggccc

SEQ ID NO: 1783488 - RNA, 19 nt, Artificial Sequence
  Description of Artificial Sequence: Synthetic oligonucleotide
cuaaguuacauucucugga

SEQ ID NO: 1783489 - RNA, 19 nt, Artificial Sequence
  Description of Artificial Sequence: Synthetic oligonucleotide
cuguuuugaggcuggagcc

SEQ ID NO: 1783490 - RNA, 19 nt, Artificial Sequence
  Description of Artificial Sequence: Synthetic oligonucleotide
ucuguauccuaggagcccg

SEQ ID NO: 1783491 - RNA, 19 nt, Artificial Sequence
  Description of Artificial Sequence: Synthetic oligonucleotide
ugcaaguuuuacauucuac

SEQ ID NO: 1783492 - RNA, 19 nt, Artificial Sequence
  Description of Artificial Sequence: Synthetic oligonucleotide
acauggacguuacuggaag

SEQ ID NO: 1783493 - RNA, 19 nt, Artificial Sequence
  Description of Artificial Sequence: Synthetic oligonucleotide
guagguguaucgcauucgg

SEQ ID NO: 1783494 - RNA, 19 nt, Artificial Sequence
  Description of Artificial Sequence: Synthetic oligonucleotide
acauucuacuuucguugcc

SEQ ID NO: 1783495 - RNA, 19 nt, Artificial Sequence
  Description of Artificial Sequence: Synthetic oligonucleotide
uaaguuacauucucuggaa

SEQ ID NO: 1783496 - RNA, 19 nt, Artificial Sequence
  Description of Artificial Sequence: Synthetic oligonucleotide
auuccguucaacuguuuug

SEQ ID NO: 1783497 - RNA, 19 nt, Artificial Sequence
  Description of Artificial Sequence: Synthetic oligonucleotide
uucucuauuccuuggccca

SEQ ID NO: 1783498 - RNA, 19 nt, Artificial Sequence
  Description of Artificial Sequence: Synthetic oligonucleotide
aguauucagccuucagguc

SEQ ID NO: 1783499 - RNA, 19 nt, Artificial Sequence
  Description of Artificial Sequence: Synthetic oligonucleotide
uuaaaagcuuccguggcac

SEQ ID NO: 1783500 - RNA, 19 nt, Artificial Sequence
  Description of Artificial Sequence: Synthetic oligonucleotide
aguacagcauaugccgugc

SEQ ID NO: 1783501 - RNA, 19 nt, Artificial Sequence
  Description of Artificial Sequence: Synthetic oligonucleotide
guuggacaaauacuccuag

SEQ ID NO: 1783502 - RNA, 19 nt, Artificial Sequence
  Description of Artificial Sequence: Synthetic oligonucleotide
gugucaccaaaguagcggg

SEQ ID NO: 1783503 - RNA, 19 nt, Artificial Sequence
  Description of Artificial Sequence: Synthetic oligonucleotide
auauauauauauaucuuua

SEQ ID NO: 1783504 - RNA, 19 nt, Artificial Sequence
  Description of Artificial Sequence: Synthetic oligonucleotide
acauaugcauuucuaaguu

SEQ ID NO: 1783505 - RNA, 19 nt, Artificial Sequence
  Description of Artificial Sequence: Synthetic oligonucleotide
aucgcauucggccauugcu

SEQ ID NO: 1783506 - RNA, 19 nt, Artificial Sequence
  Description of Artificial Sequence: Synthetic oligonucleotide
acaaauacuccuagcccgc

SEQ ID NO: 1783507 - RNA, 19 nt, Artificial Sequence
  Description of Artificial Sequence: Synthetic oligonucleotide
ugccgauggcuuuaaaagc

SEQ ID NO: 1783508 - RNA, 19 nt, Artificial Sequence
  Description of Artificial Sequence: Synthetic oligonucleotide
aauacuccuagcccgccau

SEQ ID NO: 1783509 - RNA, 19 nt, Artificial Sequence
  Description of Artificial Sequence: Synthetic oligonucleotide
aguuacauucucuggaauu

SEQ ID NO: 1783510 - RNA, 19 nt, Artificial Sequence
  Description of Artificial Sequence: Synthetic oligonucleotide
ucggagguuggcgauauag

SEQ ID NO: 1783511 - RNA, 19 nt, Artificial Sequence
  Description of Artificial Sequence: Synthetic oligonucleotide
ucagugacucgcuugugga

SEQ ID NO: 1783512 - RNA, 19 nt, Artificial Sequence
  Description of Artificial Sequence: Synthetic oligonucleotide
augguuucuguauccuagg

SEQ ID NO: 1783513 - RNA, 19 nt, Artificial Sequence
  Description of Artificial Sequence: Synthetic oligonucleotide
uggacauggcccacugacg

SEQ ID NO: 1783514 - RNA, 19 nt, Artificial Sequence
  Description of Artificial Sequence: Synthetic oligonucleotide
uuacuggaaggaaaaccac

SEQ ID NO: 1783515 - RNA, 19 nt, Artificial Sequence
  Description of Artificial Sequence: Synthetic oligonucleotide
ucgcauucggccauugcug

SEQ ID NO: 1783516 - RNA, 19 nt, Artificial Sequence
  Description of Artificial Sequence: Synthetic oligonucleotide
guuguuucggagguuggcg

SEQ ID NO: 1783517 - RNA, 19 nt, Artificial Sequence
  Description of Artificial Sequence: Synthetic oligonucleotide
ggcuuuaaaagcuuccgug

SEQ ID NO: 1783518 - RNA, 19 nt, Artificial Sequence
  Description of Artificial Sequence: Synthetic oligonucleotide
gucagugacucgcuugugg

SEQ ID NO: 1783519 - RNA, 19 nt, Artificial Sequence
  Description of Artificial Sequence: Synthetic oligonucleotide
gaacauguuaaagaggucu

SEQ ID NO: 1783520 - RNA, 19 nt, Artificial Sequence
  Description of Artificial Sequence: Synthetic oligonucleotide
uauccuaggagcccgugau

SEQ ID NO: 1783521 - RNA, 19 nt, Artificial Sequence
  Description of Artificial Sequence: Synthetic oligonucleotide
aggaggaggacagacagug

SEQ ID NO: 1783522 - RNA, 19 nt, Artificial Sequence
  Description of Artificial Sequence: Synthetic oligonucleotide
uucaaagccucgguggaag

SEQ ID NO: 1783523 - RNA, 19 nt, Artificial Sequence
  Description of Artificial Sequence: Synthetic oligonucleotide
aguuguuucggagguuggc

SEQ ID NO: 1783524 - RNA, 19 nt, Artificial Sequence
  Description of Artificial Sequence: Synthetic oligonucleotide
cagaacuauccaugcaggg

SEQ ID NO: 1783525 - RNA, 19 nt, Artificial Sequence
  Description of Artificial Sequence: Synthetic oligonucleotide
auauauauauauauaucuu

SEQ ID NO: 1783526 - RNA, 19 nt, Artificial Sequence
  Description of Artificial Sequence: Synthetic oligonucleotide
uucaacuguuuugaggcug

SEQ ID NO: 1783527 - RNA, 19 nt, Artificial Sequence
  Description of Artificial Sequence: Synthetic oligonucleotide
ucuguccguccucagagcu

SEQ ID NO: 1783528 - RNA, 19 nt, Artificial Sequence
  Description of Artificial Sequence: Synthetic oligonucleotide
uguguaugucuuuucuuaa

SEQ ID NO: 1783529 - RNA, 19 nt, Artificial Sequence
  Description of Artificial Sequence: Synthetic oligonucleotide
uccagcaguuguuucggag

SEQ ID NO: 1783530 - RNA, 19 nt, Artificial Sequence
  Description of Artificial Sequence: Synthetic oligonucleotide
uucuccuguaaggagaggu

SEQ ID NO: 1783531 - RNA, 19 nt, Artificial Sequence
  Description of Artificial Sequence: Synthetic oligonucleotide
uccuagcccgccaucaccc

SEQ ID NO: 1783532 - RNA, 19 nt, Artificial Sequence
  Description of Artificial Sequence: Synthetic oligonucleotide
accaccaaagaacauguua

SEQ ID NO: 1783533 - RNA, 19 nt, Artificial Sequence
  Description of Artificial Sequence: Synthetic oligonucleotide
uuccguucaacuguuuuga

SEQ ID NO: 1783534 - RNA, 19 nt, Artificial Sequence
  Description of Artificial Sequence: Synthetic oligonucleotide
aaauacuccuagcccgcca

SEQ ID NO: 1783535 - RNA, 19 nt, Artificial Sequence
  Description of Artificial Sequence: Synthetic oligonucleotide
acuauccaugcagggaggc

SEQ ID NO: 1783536 - RNA, 19 nt, Artificial Sequence
  Description of Artificial Sequence: Synthetic oligonucleotide
guuacauucucuggaauuc

SEQ ID NO: 1783537 - RNA, 19 nt, Artificial Sequence
  Description of Artificial Sequence: Synthetic oligonucleotide
gaguacagcauaugccgug

SEQ ID NO: 1783538 - RNA, 19 nt, Artificial Sequence
  Description of Artificial Sequence: Synthetic oligonucleotide
guggacauggcccacugac

SEQ ID NO: 1783539 - RNA, 19 nt, Artificial Sequence
  Description of Artificial Sequence: Synthetic oligonucleotide
gcauaugccgugccgaugg

SEQ ID NO: 1783540 - RNA, 19 nt, Artificial Sequence
  Description of Artificial Sequence: Synthetic oligonucleotide
aaguuacauucucuggaau

SEQ ID NO: 1783541 - RNA, 19 nt, Artificial Sequence
  Description of Artificial Sequence: Synthetic oligonucleotide
ugaguacagcauaugccgu

SEQ ID NO: 1783542 - RNA, 19 nt, Artificial Sequence
  Description of Artificial Sequence: Synthetic oligonucleotide
agggauuucauaguuugga

SEQ ID NO: 1783543 - RNA, 19 nt, Artificial Sequence
  Description of Artificial Sequence: Synthetic oligonucleotide
ggacaaauacuccuagccc

SEQ ID NO: 1783544 - RNA, 19 nt, Artificial Sequence
  Description of Artificial Sequence: Synthetic oligonucleotide
ggcgauauagucaucuucc

SEQ ID NO: 1783545 - RNA, 19 nt, Artificial Sequence
  Description of Artificial Sequence: Synthetic oligonucleotide
uggcgauauagucaucuuc

SEQ ID NO: 1783546 - RNA, 19 nt, Artificial Sequence
  Description of Artificial Sequence: Synthetic oligonucleotide
agguuggcgauauagucau

SEQ ID NO: 1783547 - RNA, 19 nt, Artificial Sequence
  Description of Artificial Sequence: Synthetic oligonucleotide
uuguuucggagguuggcga

SEQ ID NO: 1783548 - RNA, 19 nt, Artificial Sequence
  Description of Artificial Sequence: Synthetic oligonucleotide
uugucgucaccaaacuggu

SEQ ID NO: 1783549 - RNA, 19 nt, Artificial Sequence
  Description of Artificial Sequence: Synthetic oligonucleotide
cucgcuuguggacauggcc

SEQ ID NO: 1783550 - RNA, 19 nt, Artificial Sequence
  Description of Artificial Sequence: Synthetic oligonucleotide
uguguaguauucagccuuc

SEQ ID NO: 1783551 - RNA, 19 nt, Artificial Sequence
  Description of Artificial Sequence: Synthetic oligonucleotide
agaacuauccaugcaggga

SEQ ID NO: 1783552 - RNA, 19 nt, Artificial Sequence
  Description of Artificial Sequence: Synthetic oligonucleotide
uacagcaagccuuccuucu

SEQ ID NO: 1783553 - RNA, 19 nt, Artificial Sequence
  Description of Artificial Sequence: Synthetic oligonucleotide
cuaggagcccgugaugugg

SEQ ID NO: 1783554 - RNA, 19 nt, Artificial Sequence
  Description of Artificial Sequence: Synthetic oligonucleotide
agacauggacguuacugga

SEQ ID NO: 1783555 - RNA, 19 nt, Artificial Sequence
  Description of Artificial Sequence: Synthetic oligonucleotide
uagcccgccaucacccugg

SEQ ID NO: 1783556 - RNA, 19 nt, Artificial Sequence
  Description of Artificial Sequence: Synthetic oligonucleotide
agacauuugcugcaaguuu

SEQ ID NO: 1783557 - RNA, 19 nt, Artificial Sequence
  Description of Artificial Sequence: Synthetic oligonucleotide
uccuguaaggagaggugac

SEQ ID NO: 1783558 - RNA, 19 nt, Artificial Sequence
  Description of Artificial Sequence: Synthetic oligonucleotide
gacucgcuuguggacaugg

SEQ ID NO: 1783559 - RNA, 19 nt, Artificial Sequence
  Description of Artificial Sequence: Synthetic oligonucleotide
ugucugugucaccaaagua

SEQ ID NO: 1783560 - RNA, 19 nt, Artificial Sequence
  Description of Artificial Sequence: Synthetic oligonucleotide
cauggacguuacuggaagg

SEQ ID NO: 1783561 - RNA, 19 nt, Artificial Sequence
  Description of Artificial Sequence: Synthetic oligonucleotide
uagguguaucgcauucggc

SEQ ID NO: 1783562 - RNA, 19 nt, Artificial Sequence
  Description of Artificial Sequence: Synthetic oligonucleotide
aacuauccaugcagggagg

SEQ ID NO: 1783563 - RNA, 19 nt, Artificial Sequence
  Description of Artificial Sequence: Synthetic oligonucleotide
uucguugccaugguuucug

SEQ ID NO: 1783564 - RNA, 19 nt, Artificial Sequence
  Description of Artificial Sequence: Synthetic oligonucleotide
ugcugguagguguaucgca

SEQ ID NO: 1783565 - RNA, 19 nt, Artificial Sequence
  Description of Artificial Sequence: Synthetic oligonucleotide
ucugccuggcuucuccugu

SEQ ID NO: 1783566 - RNA, 19 nt, Artificial Sequence
  Description of Artificial Sequence: Synthetic oligonucleotide
uccuaggagcccgugaugu

SEQ ID NO: 1783567 - RNA, 19 nt, Artificial Sequence
  Description of Artificial Sequence: Synthetic oligonucleotide
ucugugguacaugucugug

SEQ ID NO: 1783568 - RNA, 19 nt, Artificial Sequence
  Description of Artificial Sequence: Synthetic oligonucleotide
uacacgacgcucagguggu

SEQ ID NO: 1783569 - RNA, 19 nt, Artificial Sequence
  Description of Artificial Sequence: Synthetic oligonucleotide
cuuccguggcaccaggcgc

SEQ ID NO: 1783570 - RNA, 19 nt, Artificial Sequence
  Description of Artificial Sequence: Synthetic oligonucleotide
ugguagguguaucgcauuc

SEQ ID NO: 1783571 - RNA, 19 nt, Artificial Sequence
  Description of Artificial Sequence: Synthetic oligonucleotide
acagugggguguccccucc

SEQ ID NO: 1783572 - RNA, 19 nt, Artificial Sequence
  Description of Artificial Sequence: Synthetic oligonucleotide
uuacauucucuggaauucu

SEQ ID NO: 1783573 - RNA, 19 nt, Artificial Sequence
  Description of Artificial Sequence: Synthetic oligonucleotide
uaugccgugccgauggcuu

SEQ ID NO: 1783574 - RNA, 19 nt, Artificial Sequence
  Description of Artificial Sequence: Synthetic oligonucleotide
uucuguauccuaggagccc

SEQ ID NO: 1783575 - RNA, 19 nt, Artificial Sequence
  Description of Artificial Sequence: Synthetic oligonucleotide
gagguuggcgauauaguca

SEQ ID NO: 1783576 - RNA, 19 nt, Artificial Sequence
  Description of Artificial Sequence: Synthetic oligonucleotide
ucgucagagaaggugucug

SEQ ID NO: 1783577 - RNA, 19 nt, Artificial Sequence
  Description of Artificial Sequence: Synthetic oligonucleotide
uuccguggcaccaggcgca

SEQ ID NO: 1783578 - RNA, 19 nt, Artificial Sequence
  Description of Artificial Sequence: Synthetic oligonucleotide
ucguacuguuuccuuuucu

SEQ ID NO: 1783579 - RNA, 19 nt, Artificial Sequence
  Description of Artificial Sequence: Synthetic oligonucleotide
cugugucaccaaaguagcg

SEQ ID NO: 1783580 - RNA, 19 nt, Artificial Sequence
  Description of Artificial Sequence: Synthetic oligonucleotide
agugacucgcuuguggaca

SEQ ID NO: 1783581 - RNA, 19 nt, Artificial Sequence
  Description of Artificial Sequence: Synthetic oligonucleotide
cauucggccauugcuguag

SEQ ID NO: 1783582 - RNA, 19 nt, Artificial Sequence
  Description of Artificial Sequence: Synthetic oligonucleotide
uucuacuuucguugccaug

SEQ ID NO: 1783583 - RNA, 19 nt, Artificial Sequence
  Description of Artificial Sequence: Synthetic oligonucleotide
uuguggacauggcccacug

SEQ ID NO: 1783584 - RNA, 19 nt, Artificial Sequence
  Description of Artificial Sequence: Synthetic oligonucleotide
ggaaggaaaaccaccacca

SEQ ID NO: 1783585 - RNA, 19 nt, Artificial Sequence
  Description of Artificial Sequence: Synthetic oligonucleotide
cagacuguagggugggcug

SEQ ID NO: 1783586 - RNA, 19 nt, Artificial Sequence
  Description of Artificial Sequence: Synthetic oligonucleotide
acauggcccacugacgguc

SEQ ID NO: 1783587 - RNA, 19 nt, Artificial Sequence
  Description of Artificial Sequence: Synthetic oligonucleotide
gucaccaaaguagcgggcc

SEQ ID NO: 1783588 - RNA, 19 nt, Artificial Sequence
  Description of Artificial Sequence: Synthetic oligonucleotide
uguuuugaggcuggagccu

SEQ ID NO: 1783589 - RNA, 19 nt, Artificial Sequence
  Description of Artificial Sequence: Synthetic oligonucleotide
aagcaacccugcagcaggc

SEQ ID NO: 1783590 - RNA, 19 nt, Artificial Sequence
  Description of Artificial Sequence: Synthetic oligonucleotide
uaucgcauucggccauugc

SEQ ID NO: 1783591 - RNA, 19 nt, Artificial Sequence
  Description of Artificial Sequence: Synthetic oligonucleotide
cagguggucagugacucgc

SEQ ID NO: 1783592 - RNA, 19 nt, Artificial Sequence
  Description of Artificial Sequence: Synthetic oligonucleotide
uguauucgucagagaaggu

SEQ ID NO: 1783593 - RNA, 19 nt, Artificial Sequence
  Description of Artificial Sequence: Synthetic oligonucleotide
augaggaugggcaucaguu

SEQ ID NO: 1783594 - RNA, 19 nt, Artificial Sequence
  Description of Artificial Sequence: Synthetic oligonucleotide
cugcuuuucuuuccagcag

SEQ ID NO: 1783595 - RNA, 19 nt, Artificial Sequence
  Description of Artificial Sequence: Synthetic oligonucleotide
ccagaacuauccaugcagg

SEQ ID NO: 1783596 - RNA, 19 nt, Artificial Sequence
  Description of Artificial Sequence: Synthetic oligonucleotide
ccagcaguuguuucggagg

SEQ ID NO: 1783597 - RNA, 19 nt, Artificial Sequence
  Description of Artificial Sequence: Synthetic oligonucleotide
gacguuacuggaaggaaaa

SEQ ID NO: 1783598 - RNA, 19 nt, Artificial Sequence
  Description of Artificial Sequence: Synthetic oligonucleotide
aagccucgguggaaguccc

SEQ ID NO: 1783599 - RNA, 19 nt, Artificial Sequence
  Description of Artificial Sequence: Synthetic oligonucleotide
agaacauguuaaagagguc

SEQ ID NO: 1783600 - RNA, 19 nt, Artificial Sequence
  Description of Artificial Sequence: Synthetic oligonucleotide
gcugaguacagcauaugcc

SEQ ID NO: 1783601 - RNA, 19 nt, Artificial Sequence
  Description of Artificial Sequence: Synthetic oligonucleotide
guggucagugacucgcuug

SEQ ID NO: 1783602 - RNA, 19 nt, Artificial Sequence
  Description of Artificial Sequence: Synthetic oligonucleotide
cuguagacauggacguuac

SEQ ID NO: 1783603 - RNA, 19 nt, Artificial Sequence
  Description of Artificial Sequence: Synthetic oligonucleotide
acagcauaugccgugccga

SEQ ID NO: 1783604 - RNA, 19 nt, Artificial Sequence
  Description of Artificial Sequence: Synthetic oligonucleotide
acuuucguugccaugguuu

SEQ ID NO: 1783605 - RNA, 19 nt, Artificial Sequence
  Description of Artificial Sequence: Synthetic oligonucleotide
auggacguuacuggaagga

SEQ ID NO: 1783606 - RNA, 19 nt, Artificial Sequence
  Description of Artificial Sequence: Synthetic oligonucleotide
ucaccuuggcucagugugu

SEQ ID NO: 1783607 - RNA, 19 nt, Artificial Sequence
  Description of Artificial Sequence: Synthetic oligonucleotide
aggacagacaguggggugu

SEQ ID NO: 1783608 - RNA, 19 nt, Artificial Sequence
  Description of Artificial Sequence: Synthetic oligonucleotide
caucaguuggacaaauacu

SEQ ID NO: 1783609 - RNA, 19 nt, Artificial Sequence
  Description of Artificial Sequence: Synthetic oligonucleotide
auaguacacgacgcucagg

SEQ ID NO: 1783610 - RNA, 19 nt, Artificial Sequence
  Description of Artificial Sequence: Synthetic oligonucleotide
uguuucggagguuggcgau

SEQ ID NO: 1783611 - RNA, 19 nt, Artificial Sequence
  Description of Artificial Sequence: Synthetic oligonucleotide
guuuugaggcuggagccug

SEQ ID NO: 1783612 - RNA, 19 nt, Artificial Sequence
  Description of Artificial Sequence: Synthetic oligonucleotide
aguacacgacgcucaggug

SEQ ID NO: 1783613 - RNA, 19 nt, Artificial Sequence
  Description of Artificial Sequence: Synthetic oligonucleotide
cacugguugagagagggca

SEQ ID NO: 1783614 - RNA, 19 nt, Artificial Sequence
  Description of Artificial Sequence: Synthetic oligonucleotide
ucgucaccaaacuggucgu

SEQ ID NO: 1783615 - RNA, 19 nt, Artificial Sequence
  Description of Artificial Sequence: Synthetic oligonucleotide
auucuacuuucguugccau

SEQ ID NO: 1783616 - RNA, 19 nt, Artificial Sequence
  Description of Artificial Sequence: Synthetic oligonucleotide
auucgucagagaagguguc

SEQ ID NO: 1783617 - RNA, 19 nt, Artificial Sequence
  Description of Artificial Sequence: Synthetic oligonucleotide
ucaaagccucgguggaagu

SEQ ID NO: 1783618 - RNA, 19 nt, Artificial Sequence
  Description of Artificial Sequence: Synthetic oligonucleotide
gguagguguaucgcauucg

SEQ ID NO: 1783619 - RNA, 19 nt, Artificial Sequence
  Description of Artificial Sequence: Synthetic oligonucleotide
ugagcgcugacacgaggau

SEQ ID NO: 1783620 - RNA, 19 nt, Artificial Sequence
  Description of Artificial Sequence: Synthetic oligonucleotide
acgacgcucagguggucag

SEQ ID NO: 1783621 - RNA, 19 nt, Artificial Sequence
  Description of Artificial Sequence: Synthetic oligonucleotide
cuccuagcccgccaucacc

SEQ ID NO: 1783622 - RNA, 19 nt, Artificial Sequence
  Description of Artificial Sequence: Synthetic oligonucleotide
ugcaccucugacagccgac

SEQ ID NO: 1783623 - RNA, 19 nt, Artificial Sequence
  Description of Artificial Sequence: Synthetic oligonucleotide
uuuugaggcuggagccugu

SEQ ID NO: 1783624 - RNA, 19 nt, Artificial Sequence
  Description of Artificial Sequence: Synthetic oligonucleotide
ucacccugguucucccugc

SEQ ID NO: 1783625 - RNA, 19 nt, Artificial Sequence
  Description of Artificial Sequence: Synthetic oligonucleotide
cagagcuuucugcauucac

SEQ ID NO: 1783626 - RNA, 19 nt, Artificial Sequence
  Description of Artificial Sequence: Synthetic oligonucleotide
uggucguacuguuuccuuu

SEQ ID NO: 1783627 - RNA, 19 nt, Artificial Sequence
  Description of Artificial Sequence: Synthetic oligonucleotide
uggacguuacuggaaggaa

SEQ ID NO: 1783628 - RNA, 19 nt, Artificial Sequence
  Description of Artificial Sequence: Synthetic oligonucleotide
gguguaucgcauucggcca

SEQ ID NO: 1783629 - RNA, 19 nt, Artificial Sequence
  Description of Artificial Sequence: Synthetic oligonucleotide
cuggauugcugaguacagc

SEQ ID NO: 1783630 - RNA, 19 nt, Artificial Sequence
  Description of Artificial Sequence: Synthetic oligonucleotide
uuuggaccuggguggugug

SEQ ID NO: 1783631 - RNA, 19 nt, Artificial Sequence
  Description of Artificial Sequence: Synthetic oligonucleotide
gcuuccguggcaccaggcg

SEQ ID NO: 1783632 - RNA, 19 nt, Artificial Sequence
  Description of Artificial Sequence: Synthetic oligonucleotide
uagcgggcccgguacagca

SEQ ID NO: 1783633 - RNA, 19 nt, Artificial Sequence
  Description of Artificial Sequence: Synthetic oligonucleotide
gacgcucagguggucagug

SEQ ID NO: 1783634 - RNA, 19 nt, Artificial Sequence
  Description of Artificial Sequence: Synthetic oligonucleotide
uucgucagagaaggugucu

SEQ ID NO: 1783635 - RNA, 19 nt, Artificial Sequence
  Description of Artificial Sequence: Synthetic oligonucleotide
aaguagcgggcccgguaca

SEQ ID NO: 1783636 - RNA, 19 nt, Artificial Sequence
  Description of Artificial Sequence: Synthetic oligonucleotide
cugagcgcugacacgagga

SEQ ID NO: 1783637 - RNA, 19 nt, Artificial Sequence
  Description of Artificial Sequence: Synthetic oligonucleotide
gucugccacauaguacacg

SEQ ID NO: 1783638 - RNA, 19 nt, Artificial Sequence
  Description of Artificial Sequence: Synthetic oligonucleotide
cauaugcauuucuaaguua

SEQ ID NO: 1783639 - RNA, 19 nt, Artificial Sequence
  Description of Artificial Sequence: Synthetic oligonucleotide
auauacaguccaucaccuu

SEQ ID NO: 1783640 - RNA, 19 nt, Artificial Sequence
  Description of Artificial Sequence: Synthetic oligonucleotide
cucagugugugucaccaaa

SEQ ID NO: 1783641 - RNA, 19 nt, Artificial Sequence
  Description of Artificial Sequence: Synthetic oligonucleotide
cuauccaugcagggaggcc

SEQ ID NO: 1783642 - RNA, 19 nt, Artificial Sequence
  Description of Artificial Sequence: Synthetic oligonucleotide
accaaaguagcgggcccgg

SEQ ID NO: 1783643 - RNA, 19 nt, Artificial Sequence
  Description of Artificial Sequence: Synthetic oligonucleotide
uguauccuaggagcccgug

SEQ ID NO: 1783644 - RNA, 19 nt, Artificial Sequence
  Description of Artificial Sequence: Synthetic oligonucleotide
acacgaggauaagaaugag

SEQ ID NO: 1783645 - RNA, 19 nt, Artificial Sequence
  Description of Artificial Sequence: Synthetic oligonucleotide
gcaguuguuucggagguug

SEQ ID NO: 1783646 - RNA, 19 nt, Artificial Sequence
  Description of Artificial Sequence: Synthetic oligonucleotide
uggagccuguguauucguc

SEQ ID NO: 1783647 - RNA, 19 nt, Artificial Sequence
  Description of Artificial Sequence: Synthetic oligonucleotide
uuugaggcuggagccugug

SEQ ID NO: 1783648 - RNA, 19 nt, Artificial Sequence
  Description of Artificial Sequence: Synthetic oligonucleotide
caaauacuccuagcccgcc

SEQ ID NO: 1783649 - RNA, 19 nt, Artificial Sequence
  Description of Artificial Sequence: Synthetic oligonucleotide
aguccccguggcuguggcc

SEQ ID NO: 1783650 - RNA, 19 nt, Artificial Sequence
  Description of Artificial Sequence: Synthetic oligonucleotide
aguuggacaaauacuccua

SEQ ID NO: 1783651 - RNA, 19 nt, Artificial Sequence
  Description of Artificial Sequence: Synthetic oligonucleotide
cagugacucgcuuguggac

SEQ ID NO: 1783652 - RNA, 19 nt, Artificial Sequence
  Description of Artificial Sequence: Synthetic oligonucleotide
aaggugucugccacauagu

SEQ ID NO: 1783653 - RNA, 19 nt, Artificial Sequence
  Description of Artificial Sequence: Synthetic oligonucleotide
uguccguccucagagcuuu

SEQ ID NO: 1783654 - RNA, 19 nt, Artificial Sequence
  Description of Artificial Sequence: Synthetic oligonucleotide
acaguccaucaccuuggcu

SEQ ID NO: 1783655 - RNA, 19 nt, Artificial Sequence
  Description of Artificial Sequence: Synthetic oligonucleotide
caguuggacaaauacuccu

SEQ ID NO: 1783656 - RNA, 19 nt, Artificial Sequence
  Description of Artificial Sequence: Synthetic oligonucleotide
uuucggagguuggcgauau

SEQ ID NO: 1783657 - RNA, 19 nt, Artificial Sequence
  Description of Artificial Sequence: Synthetic oligonucleotide
cauuugcugcaaguuuuac

SEQ ID NO: 1783658 - RNA, 19 nt, Artificial Sequence
  Description of Artificial Sequence: Synthetic oligonucleotide
uuucguugccaugguuucu

SEQ ID NO: 1783659 - RNA, 19 nt, Artificial Sequence
  Description of Artificial Sequence: Synthetic oligonucleotide
auccuaggagcccgugaug

SEQ ID NO: 1783660 - RNA, 19 nt, Artificial Sequence
  Description of Artificial Sequence: Synthetic oligonucleotide
cuuggcucaguguguguca

SEQ ID NO: 1783661 - RNA, 19 nt, Artificial Sequence
  Description of Artificial Sequence: Synthetic oligonucleotide
cuuggcccaugccucugcc

SEQ ID NO: 1783662 - RNA, 19 nt, Artificial Sequence
  Description of Artificial Sequence: Synthetic oligonucleotide
uacuuucguugccaugguu

SEQ ID NO: 1783663 - RNA, 19 nt, Artificial Sequence
  Description of Artificial Sequence: Synthetic oligonucleotide
acuggucguacuguuuccu

SEQ ID NO: 1783664 - RNA, 19 nt, Artificial Sequence
  Description of Artificial Sequence: Synthetic oligonucleotide
gaaguccccguggcugugg

SEQ ID NO: 1783665 - RNA, 19 nt, Artificial Sequence
  Description of Artificial Sequence: Synthetic oligonucleotide
gagcccgugauguggagcu

SEQ ID NO: 1783666 - RNA, 19 nt, Artificial Sequence
  Description of Artificial Sequence: Synthetic oligonucleotide
uuggcgauauagucaucuu

SEQ ID NO: 1783667 - RNA, 19 nt, Artificial Sequence
  Description of Artificial Sequence: Synthetic oligonucleotide
uuggcucagugugugucac

SEQ ID NO: 1783668 - RNA, 19 nt, Artificial Sequence
  Description of Artificial Sequence: Synthetic oligonucleotide
aguagcgggcccgguacag

SEQ ID NO: 1783669 - RNA, 19 nt, Artificial Sequence
  Description of Artificial Sequence: Synthetic oligonucleotide
gacauggacguuacuggaa

SEQ ID NO: 1783670 - RNA, 19 nt, Artificial Sequence
  Description of Artificial Sequence: Synthetic oligonucleotide
acucgcuuguggacauggc

SEQ ID NO: 1783671 - RNA, 19 nt, Artificial Sequence
  Description of Artificial Sequence: Synthetic oligonucleotide
cccacugacggucucgggc

SEQ ID NO: 1783672 - RNA, 19 nt, Artificial Sequence
  Description of Artificial Sequence: Synthetic oligonucleotide
ggcccagaacuauccaugc

SEQ ID NO: 1783673 - RNA, 19 nt, Artificial Sequence
  Description of Artificial Sequence: Synthetic oligonucleotide
ugucgucaccaaacugguc

SEQ ID NO: 1783674 - RNA, 19 nt, Artificial Sequence
  Description of Artificial Sequence: Synthetic oligonucleotide
gcucuugucgucaccaaac

SEQ ID NO: 1783675 - RNA, 19 nt, Artificial Sequence
  Description of Artificial Sequence: Synthetic oligonucleotide
gccugcaccucugacagcc

SEQ ID NO: 1783676 - RNA, 19 nt, Artificial Sequence
  Description of Artificial Sequence: Synthetic oligonucleotide
ugguugagagagggcagcu

SEQ ID NO: 1783677 - RNA, 19 nt, Artificial Sequence
  Description of Artificial Sequence: Synthetic oligonucleotide
cuguguaguauucagccuu

SEQ ID NO: 1783678 - RNA, 19 nt, Artificial Sequence
  Description of Artificial Sequence: Synthetic oligonucleotide
agccgacugcagcucgggg

SEQ ID NO: 1783679 - RNA, 19 nt, Artificial Sequence
  Description of Artificial Sequence: Synthetic oligonucleotide
uggcccacugacggucucg

SEQ ID NO: 1783680 - RNA, 19 nt, Artificial Sequence
  Description of Artificial Sequence: Synthetic oligonucleotide
ggaagcaacccugcagcag

SEQ ID NO: 1783681 - RNA, 19 nt, Artificial Sequence
  Description of Artificial Sequence: Synthetic oligonucleotide
ggugucugccacauaguac

SEQ ID NO: 1783682 - RNA, 19 nt, Artificial Sequence
  Description of Artificial Sequence: Synthetic oligonucleotide
guaaggagaggugacuggu

SEQ ID NO: 1783683 - RNA, 19 nt, Artificial Sequence
  Description of Artificial Sequence: Synthetic oligonucleotide
agcuuccguggcaccaggc

SEQ ID NO: 1783684 - RNA, 19 nt, Artificial Sequence
  Description of Artificial Sequence: Synthetic oligonucleotide
cauaugccgugccgauggc

SEQ ID NO: 1783685 - RNA, 19 nt, Artificial Sequence
  Description of Artificial Sequence: Synthetic oligonucleotide
ugguguggcuggcccagaa

SEQ ID NO: 1783686 - RNA, 19 nt, Artificial Sequence
  Description of Artificial Sequence: Synthetic oligonucleotide
caaagccucgguggaaguc

SEQ ID NO: 1783687 - RNA, 19 nt, Artificial Sequence
  Description of Artificial Sequence: Synthetic oligonucleotide
agcauaugccgugccgaug

SEQ ID NO: 1783688 - RNA, 19 nt, Artificial Sequence
  Description of Artificial Sequence: Synthetic oligonucleotide
cuagcccgccaucacccug

SEQ ID NO: 1783689 - RNA, 19 nt, Artificial Sequence
  Description of Artificial Sequence: Synthetic oligonucleotide
uggcucagugugugucacc

SEQ ID NO: 1783690 - RNA, 19 nt, Artificial Sequence
  Description of Artificial Sequence: Synthetic oligonucleotide
auaugccgugccgauggcu

SEQ ID NO: 1783691 - RNA, 19 nt, Artificial Sequence
  Description of Artificial Sequence: Synthetic oligonucleotide
gcugagcgcugacacgagg

SEQ ID NO: 1783692 - RNA, 19 nt, Artificial Sequence
  Description of Artificial Sequence: Synthetic oligonucleotide
agccuguguauucgucaga

SEQ ID NO: 1783693 - RNA, 19 nt, Artificial Sequence
  Description of Artificial Sequence: Synthetic oligonucleotide
gucguacuguuuccuuuuc

SEQ ID NO: 1783694 - RNA, 19 nt, Artificial Sequence
  Description of Artificial Sequence: Synthetic oligonucleotide
ucguugccaugguuucugu

SEQ ID NO: 1783695 - RNA, 19 nt, Artificial Sequence
  Description of Artificial Sequence: Synthetic oligonucleotide
cguggcaccaggcgcaugg

SEQ ID NO: 1783696 - RNA, 19 nt, Artificial Sequence
  Description of Artificial Sequence: Synthetic oligonucleotide
uccguccucagagcuuucu

SEQ ID NO: 1783697 - RNA, 19 nt, Artificial Sequence
  Description of Artificial Sequence: Synthetic oligonucleotide
cacccugguucucccugcg

SEQ ID NO: 1783698 - RNA, 19 nt, Artificial Sequence
  Description of Artificial Sequence: Synthetic oligonucleotide
agacagugggguguccccu

SEQ ID NO: 1783699 - RNA, 19 nt, Artificial Sequence
  Description of Artificial Sequence: Synthetic oligonucleotide
cuggcucuugucgucacca

SEQ ID NO: 1783700 - RNA, 19 nt, Artificial Sequence
  Description of Artificial Sequence: Synthetic oligonucleotide
cgauauagucaucuuccac

SEQ ID NO: 1783701 - RNA, 19 nt, Artificial Sequence
  Description of Artificial Sequence: Synthetic oligonucleotide
caccucugacagccgacug

SEQ ID NO: 1783702 - RNA, 19 nt, Artificial Sequence
  Description of Artificial Sequence: Synthetic oligonucleotide
aggaugggcaucaguugga

SEQ ID NO: 1783703 - RNA, 19 nt, Artificial Sequence
  Description of Artificial Sequence: Synthetic oligonucleotide
ugggcaucaguuggacaaa

SEQ ID NO: 1783704 - RNA, 19 nt, Artificial Sequence
  Description of Artificial Sequence: Synthetic oligonucleotide
gcgauauagucaucuucca

SEQ ID NO: 1783705 - RNA, 19 nt, Artificial Sequence
  Description of Artificial Sequence: Synthetic oligonucleotide
caaaguagcgggcccggua

SEQ ID NO: 1783706 - RNA, 19 nt, Artificial Sequence
  Description of Artificial Sequence: Synthetic oligonucleotide
cucuauuccuuggcccaug

SEQ ID NO: 1783707 - RNA, 19 nt, Artificial Sequence
  Description of Artificial Sequence: Synthetic oligonucleotide
auaugucuauuuacauaua

SEQ ID NO: 1783708 - RNA, 19 nt, Artificial Sequence
  Description of Artificial Sequence: Synthetic oligonucleotide
ggcaccaggcgcaugguuc

SEQ ID NO: 1783709 - RNA, 19 nt, Artificial Sequence
  Description of Artificial Sequence: Synthetic oligonucleotide
cuguagggugggcuggaca

SEQ ID NO: 1783710 - RNA, 19 nt, Artificial Sequence
  Description of Artificial Sequence: Synthetic oligonucleotide
gcucagacuguaggguggg

SEQ ID NO: 1783711 - RNA, 19 nt, Artificial Sequence
  Description of Artificial Sequence: Synthetic oligonucleotide
ugacagccgacugcagcuc

SEQ ID NO: 1783712 - RNA, 19 nt, Artificial Sequence
  Description of Artificial Sequence: Synthetic oligonucleotide
caugagcuggcugagcgcu

SEQ ID NO: 1783713 - RNA, 19 nt, Artificial Sequence
  Description of Artificial Sequence: Synthetic oligonucleotide
gcuguagacauggacguua

SEQ ID NO: 1783714 - RNA, 19 nt, Artificial Sequence
  Description of Artificial Sequence: Synthetic oligonucleotide
aguuuggaccuggguggug

SEQ ID NO: 1783715 - RNA, 19 nt, Artificial Sequence
  Description of Artificial Sequence: Synthetic oligonucleotide
uguaucgcauucggccauu

SEQ ID NO: 1783716 - RNA, 19 nt, Artificial Sequence
  Description of Artificial Sequence: Synthetic oligonucleotide
guaucgcauucggccauug

SEQ ID NO: 1783717 - RNA, 19 nt, Artificial Sequence
  Description of Artificial Sequence: Synthetic oligonucleotide
acgcucagguggucaguga

SEQ ID NO: 1783718 - RNA, 19 nt, Artificial Sequence
  Description of Artificial Sequence: Synthetic oligonucleotide
accaggcgcaugguucuug

SEQ ID NO: 1783719 - RNA, 19 nt, Artificial Sequence
  Description of Artificial Sequence: Synthetic oligonucleotide
ggacguuacuggaaggaaa

SEQ ID NO: 1783720 - RNA, 19 nt, Artificial Sequence
  Description of Artificial Sequence: Synthetic oligonucleotide
ccgacugcagcucggggug

SEQ ID NO: 1783721 - RNA, 19 nt, Artificial Sequence
  Description of Artificial Sequence: Synthetic oligonucleotide
auccaugcagggaggccug

SEQ ID NO: 1783722 - RNA, 19 nt, Artificial Sequence
  Description of Artificial Sequence: Synthetic oligonucleotide
cauuccguucaacuguuuu

SEQ ID NO: 1783723 - RNA, 19 nt, Artificial Sequence
  Description of Artificial Sequence: Synthetic oligonucleotide
cucuugucgucaccaaacu

SEQ ID NO: 1783724 - RNA, 19 nt, Artificial Sequence
  Description of Artificial Sequence: Synthetic oligonucleotide
cuuucugcauucacugguu

SEQ ID NO: 1783725 - RNA, 19 nt, Artificial Sequence
  Description of Artificial Sequence: Synthetic oligonucleotide
ccaugagcuggcugagcgc

SEQ ID NO: 1783726 - RNA, 19 nt, Artificial Sequence
  Description of Artificial Sequence: Synthetic oligonucleotide
cucugugguacaugucugu

SEQ ID NO: 1783727 - RNA, 19 nt, Artificial Sequence
  Description of Artificial Sequence: Synthetic oligonucleotide
cugacacgaggauaagaau

SEQ ID NO: 1783728 - RNA, 19 nt, Artificial Sequence
  Description of Artificial Sequence: Synthetic oligonucleotide
cagccgacugcagcucggg

SEQ ID NO: 1783729 - RNA, 19 nt, Artificial Sequence
  Description of Artificial Sequence: Synthetic oligonucleotide
ugcagcucggggugcccau

SEQ ID NO: 1783730 - RNA, 19 nt, Artificial Sequence
  Description of Artificial Sequence: Synthetic oligonucleotide
gguguggcuggcccagaac

SEQ ID NO: 1783731 - RNA, 19 nt, Artificial Sequence
  Description of Artificial Sequence: Synthetic oligonucleotide
cagcaguuguuucggaggu

SEQ ID NO: 1783732 - RNA, 19 nt, Artificial Sequence
  Description of Artificial Sequence: Synthetic oligonucleotide
cgucagagaaggugucugc

SEQ ID NO: 1783733 - RNA, 19 nt, Artificial Sequence
  Description of Artificial Sequence: Synthetic oligonucleotide
guagcgggcccgguacagc

SEQ ID NO: 1783734 - RNA, 19 nt, Artificial Sequence
  Description of Artificial Sequence: Synthetic oligonucleotide
acugacggucucgggcuca

SEQ ID NO: 1783735 - RNA, 19 nt, Artificial Sequence
  Description of Artificial Sequence: Synthetic oligonucleotide
cagugggguguccccuccc

SEQ ID NO: 1783736 - RNA, 19 nt, Artificial Sequence
  Description of Artificial Sequence: Synthetic oligonucleotide
ggaugggcaucaguuggac

SEQ ID NO: 1783737 - RNA, 19 nt, Artificial Sequence
  Description of Artificial Sequence: Synthetic oligonucleotide
cucugcugguagguguauc

SEQ ID NO: 1783738 - RNA, 19 nt, Artificial Sequence
  Description of Artificial Sequence: Synthetic oligonucleotide
ugacucgcuuguggacaug

SEQ ID NO: 1783739 - RNA, 19 nt, Artificial Sequence
  Description of Artificial Sequence: Synthetic oligonucleotide
agccucgguggaagucccc

SEQ ID NO: 1783740 - RNA, 19 nt, Artificial Sequence
  Description of Artificial Sequence: Synthetic oligonucleotide
agagggcagcuguguagua

SEQ ID NO: 1783741 - RNA, 19 nt, Artificial Sequence
  Description of Artificial Sequence: Synthetic oligonucleotide
cccgguacagcaagccuuc

SEQ ID NO: 1783742 - RNA, 19 nt, Artificial Sequence
  Description of Artificial Sequence: Synthetic oligonucleotide
cugacggucucgggcucag

SEQ ID NO: 1783743 - RNA, 19 nt, Artificial Sequence
  Description of Artificial Sequence: Synthetic oligonucleotide
ccuuggcucaguguguguc

SEQ ID NO: 1783744 - RNA, 19 nt, Artificial Sequence
  Description of Artificial Sequence: Synthetic oligonucleotide
ggcccacugacggucucgg

SEQ ID NO: 1783745 - RNA, 19 nt, Artificial Sequence
  Description of Artificial Sequence: Synthetic oligonucleotide
cagacauuugcugcaaguu

SEQ ID NO: 1783746 - RNA, 19 nt, Artificial Sequence
  Description of Artificial Sequence: Synthetic oligonucleotide
ggcuguggccaugucgggc

SEQ ID NO: 1783747 - RNA, 19 nt, Artificial Sequence
  Description of Artificial Sequence: Synthetic oligonucleotide
gagcgcugacacgaggaua

SEQ ID NO: 1783748 - RNA, 19 nt, Artificial Sequence
  Description of Artificial Sequence: Synthetic oligonucleotide
gcuguguaguauucagccu

SEQ ID NO: 1783749 - RNA, 19 nt, Artificial Sequence
  Description of Artificial Sequence: Synthetic oligonucleotide
cacgacgcucaggugguca

SEQ ID NO: 1783750 - RNA, 19 nt, Artificial Sequence
  Description of Artificial Sequence: Synthetic oligonucleotide
cacauuccguucaacuguu

SEQ ID NO: 1783751 - RNA, 19 nt, Artificial Sequence
  Description of Artificial Sequence: Synthetic oligonucleotide
ccuaggagcccgugaugug

SEQ ID NO: 1783752 - RNA, 19 nt, Artificial Sequence
  Description of Artificial Sequence: Synthetic oligonucleotide
guguaucgcauucggccau

SEQ ID NO: 1783753 - RNA, 19 nt, Artificial Sequence
  Description of Artificial Sequence: Synthetic oligonucleotide
cacugacggucucgggcuc

SEQ ID NO: 1783754 - RNA, 19 nt, Artificial Sequence
  Description of Artificial Sequence: Synthetic oligonucleotide
guuucggagguuggcgaua

SEQ ID NO: 1783755 - RNA, 19 nt, Artificial Sequence
  Description of Artificial Sequence: Synthetic oligonucleotide
gagcuggcugagcgcugac

SEQ ID NO: 1783756 - RNA, 19 nt, Artificial Sequence
  Description of Artificial Sequence: Synthetic oligonucleotide
cugccucugcugguaggug

SEQ ID NO: 1783757 - RNA, 19 nt, Artificial Sequence
  Description of Artificial Sequence: Synthetic oligonucleotide
uucggagguuggcgauaua

SEQ ID NO: 1783758 - RNA, 19 nt, Artificial Sequence
  Description of Artificial Sequence: Synthetic oligonucleotide
cgugccgauggcuuuaaaa

SEQ ID NO: 1783759 - RNA, 19 nt, Artificial Sequence
  Description of Artificial Sequence: Synthetic oligonucleotide
ugccagccccgggagggga

SEQ ID NO: 1783760 - RNA, 19 nt, Artificial Sequence
  Description of Artificial Sequence: Synthetic oligonucleotide
acacgacgcucaggugguc

SEQ ID NO: 1783761 - RNA, 19 nt, Artificial Sequence
  Description of Artificial Sequence: Synthetic oligonucleotide
ggucguacuguuuccuuuu

SEQ ID NO: 1783762 - RNA, 19 nt, Artificial Sequence
  Description of Artificial Sequence: Synthetic oligonucleotide
gugacucgcuuguggacau

SEQ ID NO: 1783763 - RNA, 19 nt, Artificial Sequence
  Description of Artificial Sequence: Synthetic oligonucleotide
ccugcgguccugccucugc

SEQ ID NO: 1783764 - RNA, 19 nt, Artificial Sequence
  Description of Artificial Sequence: Synthetic oligonucleotide
cuacuuucguugccauggu

SEQ ID NO: 1783765 - RNA, 19 nt, Artificial Sequence
  Description of Artificial Sequence: Synthetic oligonucleotide
cuuguggacauggcccacu

SEQ ID NO: 1783766 - RNA, 19 nt, Artificial Sequence
  Description of Artificial Sequence: Synthetic oligonucleotide
ggucagugacucgcuugug

SEQ ID NO: 1783767 - RNA, 19 nt, Artificial Sequence
  Description of Artificial Sequence: Synthetic oligonucleotide
ggugcccaucuucugugcu

SEQ ID NO: 1783768 - RNA, 19 nt, Artificial Sequence
  Description of Artificial Sequence: Synthetic oligonucleotide
cgguggaaguccccguggc

SEQ ID NO: 1783769 - RNA, 19 nt, Artificial Sequence
  Description of Artificial Sequence: Synthetic oligonucleotide
ugacggucucgggcucaga

SEQ ID NO: 1783770 - RNA, 19 nt, Artificial Sequence
  Description of Artificial Sequence: Synthetic oligonucleotide
gucucgggcucagacugua

SEQ ID NO: 1783771 - RNA, 19 nt, Artificial Sequence
  Description of Artificial Sequence: Synthetic oligonucleotide
uccguggcaccaggcgcau

SEQ ID NO: 1783772 - RNA, 19 nt, Artificial Sequence
  Description of Artificial Sequence: Synthetic oligonucleotide
gcaccaggcgcaugguucu

SEQ ID NO: 1783773 - RNA, 19 nt, Artificial Sequence
  Description of Artificial Sequence: Synthetic oligonucleotide
agcucggggugcccaucuu

SEQ ID NO: 1783774 - RNA, 19 nt, Artificial Sequence
  Description of Artificial Sequence: Synthetic oligonucleotide
guggcuggcccagaacuau

SEQ ID NO: 1783775 - RNA, 19 nt, Artificial Sequence
  Description of Artificial Sequence: Synthetic oligonucleotide
cagcauaugccgugccgau

SEQ ID NO: 1783776 - RNA, 19 nt, Artificial Sequence
  Description of Artificial Sequence: Synthetic oligonucleotide
ccaugguuucuguauccua

SEQ ID NO: 1783777 - RNA, 19 nt, Artificial Sequence
  Description of Artificial Sequence: Synthetic oligonucleotide
cuggucguacuguuuccuu

SEQ ID NO: 1783778 - RNA, 19 nt, Artificial Sequence
  Description of Artificial Sequence: Synthetic oligonucleotide
ccacugacggucucgggcu

SEQ ID NO: 1783779 - RNA, 19 nt, Artificial Sequence
  Description of Artificial Sequence: Synthetic oligonucleotide
ggcugagcgcugacacgag

SEQ ID NO: 1783780 - RNA, 19 nt, Artificial Sequence
  Description of Artificial Sequence: Synthetic oligonucleotide
ccacauaguacacgacgcu

SEQ ID NO: 1783781 - RNA, 19 nt, Artificial Sequence
  Description of Artificial Sequence: Synthetic oligonucleotide
cuguauccuaggagcccgu

SEQ ID NO: 1783782 - RNA, 19 nt, Artificial Sequence
  Description of Artificial Sequence: Synthetic oligonucleotide
uggccaugucgggcagccu

SEQ ID NO: 1783783 - RNA, 19 nt, Artificial Sequence
  Description of Artificial Sequence: Synthetic oligonucleotide
ggauugcugaguacagcau

SEQ ID NO: 1783784 - RNA, 19 nt, Artificial Sequence
  Description of Artificial Sequence: Synthetic oligonucleotide
gccccgggaggggaggaag

SEQ ID NO: 1783785 - RNA, 19 nt, Artificial Sequence
  Description of Artificial Sequence: Synthetic oligonucleotide
caucacccugguucucccu

SEQ ID NO: 1783786 - RNA, 19 nt, Artificial Sequence
  Description of Artificial Sequence: Synthetic oligonucleotide
gcauucggccauugcugua

SEQ ID NO: 1783787 - RNA, 19 nt, Artificial Sequence
  Description of Artificial Sequence: Synthetic oligonucleotide
ccuguaaggagaggugacu

SEQ ID NO: 1783788 - RNA, 19 nt, Artificial Sequence
  Description of Artificial Sequence: Synthetic oligonucleotide
cuguccguccucagagcuu

SEQ ID NO: 1783789 - RNA, 19 nt, Artificial Sequence
  Description of Artificial Sequence: Synthetic oligonucleotide
agcgggcccgguacagcaa

SEQ ID NO: 1783790 - RNA, 19 nt, Artificial Sequence
  Description of Artificial Sequence: Synthetic oligonucleotide
gguuggcgauauagucauc

SEQ ID NO: 1783791 - RNA, 19 nt, Artificial Sequence
  Description of Artificial Sequence: Synthetic oligonucleotide
gcgcugacacgaggauaag

SEQ ID NO: 1783792 - RNA, 19 nt, Artificial Sequence
  Description of Artificial Sequence: Synthetic oligonucleotide
cgaggauaagaaugaggau

SEQ ID NO: 1783793 - RNA, 19 nt, Artificial Sequence
  Description of Artificial Sequence: Synthetic oligonucleotide
agcccgugauguggagcuu

SEQ ID NO: 1783794 - RNA, 19 nt, Artificial Sequence
  Description of Artificial Sequence: Synthetic oligonucleotide
cggagguuggcgauauagu

SEQ ID NO: 1783795 - RNA, 19 nt, Artificial Sequence
  Description of Artificial Sequence: Synthetic oligonucleotide
cagcaggcuuucuguccgu

SEQ ID NO: 1783796 - RNA, 19 nt, Artificial Sequence
  Description of Artificial Sequence: Synthetic oligonucleotide
ccaggcgcaugguucuugu

SEQ ID NO: 1783797 - RNA, 19 nt, Artificial Sequence
  Description of Artificial Sequence: Synthetic oligonucleotide
ccgauggcuuuaaaagcuu

SEQ ID NO: 1783798 - RNA, 19 nt, Artificial Sequence
  Description of Artificial Sequence: Synthetic oligonucleotide
guccguccucagagcuuuc

SEQ ID NO: 1783799 - RNA, 19 nt, Artificial Sequence
  Description of Artificial Sequence: Synthetic oligonucleotide
ccgccaucacccugguucu

SEQ ID NO: 1783800 - RNA, 19 nt, Artificial Sequence
  Description of Artificial Sequence: Synthetic oligonucleotide
cccgugauguggagcuucu

SEQ ID NO: 1783801 - RNA, 19 nt, Artificial Sequence
  Description of Artificial Sequence: Synthetic oligonucleotide
ggucucgggcucagacugu

SEQ ID NO: 1783802 - RNA, 19 nt, Artificial Sequence
  Description of Artificial Sequence: Synthetic oligonucleotide
ccuagcccgccaucacccu

SEQ ID NO: 1783803 - RNA, 19 nt, Artificial Sequence
  Description of Artificial Sequence: Synthetic oligonucleotide
gccgugccgauggcuuuaa

SEQ ID NO: 1783804 - RNA, 19 nt, Artificial Sequence
  Description of Artificial Sequence: Synthetic oligonucleotide
cccugcgguccugccucug

SEQ ID NO: 1783805 - RNA, 19 nt, Artificial Sequence
  Description of Artificial Sequence: Synthetic oligonucleotide
ccguggcaccaggcgcaug

SEQ ID NO: 1783806 - RNA, 19 nt, Artificial Sequence
  Description of Artificial Sequence: Synthetic oligonucleotide
cgccaucacccugguucuc

SEQ ID NO: 1783807 - RNA, 19 nt, Artificial Sequence
  Description of Artificial Sequence: Synthetic oligonucleotide
caccaggcgcaugguucuu

SEQ ID NO: 1783808 - RNA, 19 nt, Artificial Sequence
  Description of Artificial Sequence: Synthetic oligonucleotide
ccgugccgauggcuuuaaa

SEQ ID NO: 1783809 - RNA, 19 nt, Artificial Sequence
  Description of Artificial Sequence: Synthetic oligonucleotide
cgacgcucagguggucagu

SEQ ID NO: 1783810 - RNA, 19 nt, Artificial Sequence
  Description of Artificial Sequence: Synthetic oligonucleotide
gcccgccaucacccugguu

SEQ ID NO: 1783811 - RNA, 19 nt, Artificial Sequence
  Description of Artificial Sequence: Synthetic oligonucleotide
aacuggauggauuaugugg

SEQ ID NO: 1783812 - RNA, 19 nt, Artificial Sequence
  Description of Artificial Sequence: Synthetic oligonucleotide
aaaugacauggcuagagac

SEQ ID NO: 1783813 - RNA, 19 nt, Artificial Sequence
  Description of Artificial Sequence: Synthetic oligonucleotide
gaaguagucaucuucuucg

SEQ ID NO: 1783814 - RNA, 19 nt, Artificial Sequence
  Description of Artificial Sequence: Synthetic oligonucleotide
aagauaaaagguccugggc

SEQ ID NO: 1783815 - RNA, 19 nt, Artificial Sequence
  Description of Artificial Sequence: Synthetic oligonucleotide
uauaaaacgacauccauuc

SEQ ID NO: 1783816 - RNA, 19 nt, Artificial Sequence
  Description of Artificial Sequence: Synthetic oligonucleotide
aaauauugcuaugaagggc

SEQ ID NO: 1783817 - RNA, 19 nt, Artificial Sequence
  Description of Artificial Sequence: Synthetic oligonucleotide
ugauuuauauaaaacgaca

SEQ ID NO: 1783818 - RNA, 19 nt, Artificial Sequence
  Description of Artificial Sequence: Synthetic oligonucleotide
uugaguaccaggaacagga

SEQ ID NO: 1783819 - RNA, 19 nt, Artificial Sequence
  Description of Artificial Sequence: Synthetic oligonucleotide
ugcuguucauuuauaaccg

SEQ ID NO: 1783820 - RNA, 19 nt, Artificial Sequence
  Description of Artificial Sequence: Synthetic oligonucleotide
agaacaaagaauuuggguu

SEQ ID NO: 1783821 - RNA, 19 nt, Artificial Sequence
  Description of Artificial Sequence: Synthetic oligonucleotide
agugagacggaucuccugc

SEQ ID NO: 1783822 - RNA, 19 nt, Artificial Sequence
  Description of Artificial Sequence: Synthetic oligonucleotide
uguugguccagccagcggg

SEQ ID NO: 1783823 - RNA, 19 nt, Artificial Sequence
  Description of Artificial Sequence: Synthetic oligonucleotide
aacaggacgccucccaccc

SEQ ID NO: 1783824 - RNA, 19 nt, Artificial Sequence
  Description of Artificial Sequence: Synthetic oligonucleotide
augaccaccacgcggagcc

SEQ ID NO: 1783825 - RNA, 19 nt, Artificial Sequence
  Description of Artificial Sequence: Synthetic oligonucleotide
uuugauaccugcucuagug

SEQ ID NO: 1783826 - RNA, 19 nt, Artificial Sequence
  Description of Artificial Sequence: Synthetic oligonucleotide
aaugucuuugugaaccgcc

SEQ ID NO: 1783827 - RNA, 19 nt, Artificial Sequence
  Description of Artificial Sequence: Synthetic oligonucleotide
uucauuuauaaccggugag

SEQ ID NO: 1783828 - RNA, 19 nt, Artificial Sequence
  Description of Artificial Sequence: Synthetic oligonucleotide
uauggcaagauaaaagguc

SEQ ID NO: 1783829 - RNA, 19 nt, Artificial Sequence
  Description of Artificial Sequence: Synthetic oligonucleotide
auuuaaugggcuuugcugu

SEQ ID NO: 1783830 - RNA, 19 nt, Artificial Sequence
  Description of Artificial Sequence: Synthetic oligonucleotide
agauaaaagguccugggca

SEQ ID NO: 1783831 - RNA, 19 nt, Artificial Sequence
  Description of Artificial Sequence: Synthetic oligonucleotide
aguaccaggaacaggacgc

SEQ ID NO: 1783832 - RNA, 19 nt, Artificial Sequence
  Description of Artificial Sequence: Synthetic oligonucleotide
uuggauaaaguagaauggg

SEQ ID NO: 1783833 - RNA, 19 nt, Artificial Sequence
  Description of Artificial Sequence: Synthetic oligonucleotide
uuuucugaggaaaacgcgu

SEQ ID NO: 1783834 - RNA, 19 nt, Artificial Sequence
  Description of Artificial Sequence: Synthetic oligonucleotide
uguucauuuauaaccggug

SEQ ID NO: 1783835 - RNA, 19 nt, Artificial Sequence
  Description of Artificial Sequence: Synthetic oligonucleotide
aaaacauccccgccuccgc

SEQ ID NO: 1783836 - RNA, 19 nt, Artificial Sequence
  Description of Artificial Sequence: Synthetic oligonucleotide
auggcuagagacuuucugg

SEQ ID NO: 1783837 - RNA, 19 nt, Artificial Sequence
  Description of Artificial Sequence: Synthetic oligonucleotide
aaccaccaugucaagaucc

SEQ ID NO: 1783838 - RNA, 19 nt, Artificial Sequence
  Description of Artificial Sequence: Synthetic oligonucleotide
uuuuaaaguugguucagga

SEQ ID NO: 1783839 - RNA, 19 nt, Artificial Sequence
  Description of Artificial Sequence: Synthetic oligonucleotide
cauggcauggaugaggucg

SEQ ID NO: 1783840 - RNA, 19 nt, Artificial Sequence
  Description of Artificial Sequence: Synthetic oligonucleotide
gaggaaaacgcguccaggg

SEQ ID NO: 1783841 - RNA, 19 nt, Artificial Sequence
  Description of Artificial Sequence: Synthetic oligonucleotide
ugggaauugaguaccagga

SEQ ID NO: 1783842 - RNA, 19 nt, Artificial Sequence
  Description of Artificial Sequence: Synthetic oligonucleotide
uggauaaaguagaaugggc

SEQ ID NO: 1783843 - RNA, 19 nt, Artificial Sequence
  Description of Artificial Sequence: Synthetic oligonucleotide
uucgucuaugcucugcagg

SEQ ID NO: 1783844 - RNA, 19 nt, Artificial Sequence
  Description of Artificial Sequence: Synthetic oligonucleotide
caggauucaggauaggacc

SEQ ID NO: 1783845 - RNA, 19 nt, Artificial Sequence
  Description of Artificial Sequence: Synthetic oligonucleotide
agugaugaccaccacgcgg

SEQ ID NO: 1783846 - RNA, 19 nt, Artificial Sequence
  Description of Artificial Sequence: Synthetic oligonucleotide
aaguagaaugggccuuucc

SEQ ID NO: 1783847 - RNA, 19 nt, Artificial Sequence
  Description of Artificial Sequence: Synthetic oligonucleotide
ucuacucaaauauugcuau

SEQ ID NO: 1783848 - RNA, 19 nt, Artificial Sequence
  Description of Artificial Sequence: Synthetic oligonucleotide
agcuuucucagugagacgg

SEQ ID NO: 1783849 - RNA, 19 nt, Artificial Sequence
  Description of Artificial Sequence: Synthetic oligonucleotide
ucaucuaagcuguaguaac

SEQ ID NO: 1783850 - RNA, 19 nt, Artificial Sequence
  Description of Artificial Sequence: Synthetic oligonucleotide
uuuauaaccggugaguuuu

SEQ ID NO: 1783851 - RNA, 19 nt, Artificial Sequence
  Description of Artificial Sequence: Synthetic oligonucleotide
aguagaaugggccuuucca

SEQ ID NO: 1783852 - RNA, 19 nt, Artificial Sequence
  Description of Artificial Sequence: Synthetic oligonucleotide
ggugucuuugccuagcugg

SEQ ID NO: 1783853 - RNA, 19 nt, Artificial Sequence
  Description of Artificial Sequence: Synthetic oligonucleotide
uuauggcaagauaaaaggu

SEQ ID NO: 1783854 - RNA, 19 nt, Artificial Sequence
  Description of Artificial Sequence: Synthetic oligonucleotide
aacggugaaugauuuucuc

SEQ ID NO: 1783855 - RNA, 19 nt, Artificial Sequence
  Description of Artificial Sequence: Synthetic oligonucleotide
ugggcaugaaaacuggaug

SEQ ID NO: 1783856 - RNA, 19 nt, Artificial Sequence
  Description of Artificial Sequence: Synthetic oligonucleotide
uuuaguacuugcugcaggu

SEQ ID NO: 1783857 - RNA, 19 nt, Artificial Sequence
  Description of Artificial Sequence: Synthetic oligonucleotide
uccuuuucugaggaaaacg

SEQ ID NO: 1783858 - RNA, 19 nt, Artificial Sequence
  Description of Artificial Sequence: Synthetic oligonucleotide
acuggauggauuauguggg

SEQ ID NO: 1783859 - RNA, 19 nt, Artificial Sequence
  Description of Artificial Sequence: Synthetic oligonucleotide
uaaacauuauggcaagaua

SEQ ID NO: 1783860 - RNA, 19 nt, Artificial Sequence
  Description of Artificial Sequence: Synthetic oligonucleotide
augguugccacugacgaac

SEQ ID NO: 1783861 - RNA, 19 nt, Artificial Sequence
  Description of Artificial Sequence: Synthetic oligonucleotide
uugugaaccgccuuuagua

SEQ ID NO: 1783862 - RNA, 19 nt, Artificial Sequence
  Description of Artificial Sequence: Synthetic oligonucleotide
uacucaaauauugcuauga

SEQ ID NO: 1783863 - RNA, 19 nt, Artificial Sequence
  Description of Artificial Sequence: Synthetic oligonucleotide
ucaagauccugguagguuc

SEQ ID NO: 1783864 - RNA, 19 nt, Artificial Sequence
  Description of Artificial Sequence: Synthetic oligonucleotide
ucauuuauaaccggugagu

SEQ ID NO: 1783865 - RNA, 19 nt, Artificial Sequence
  Description of Artificial Sequence: Synthetic oligonucleotide
ugucacaauccccagugga

SEQ ID NO: 1783866 - RNA, 19 nt, Artificial Sequence
  Description of Artificial Sequence: Synthetic oligonucleotide
aaguagucaucuccccacg

SEQ ID NO: 1783867 - RNA, 19 nt, Artificial Sequence
  Description of Artificial Sequence: Synthetic oligonucleotide
aaugacauggcuagagacu

SEQ ID NO: 1783868 - RNA, 19 nt, Artificial Sequence
  Description of Artificial Sequence: Synthetic oligonucleotide
caucuaagcuguaguaacg

SEQ ID NO: 1783869 - RNA, 19 nt, Artificial Sequence
  Description of Artificial Sequence: Synthetic oligonucleotide
aauugaguaccaggaacag

SEQ ID NO: 1783870 - RNA, 19 nt, Artificial Sequence
  Description of Artificial Sequence: Synthetic oligonucleotide
uagugaacuugucugccag

SEQ ID NO: 1783871 - RNA, 19 nt, Artificial Sequence
  Description of Artificial Sequence: Synthetic oligonucleotide
cuuuaguacuugcugcagg

SEQ ID NO: 1783872 - RNA, 19 nt, Artificial Sequence
  Description of Artificial Sequence: Synthetic oligonucleotide
gacguugccuaagucaugg

SEQ ID NO: 1783873 - RNA, 19 nt, Artificial Sequence
  Description of Artificial Sequence: Synthetic oligonucleotide
aaacuggauggauuaugug

SEQ ID NO: 1783874 - RNA, 19 nt, Artificial Sequence
  Description of Artificial Sequence: Synthetic oligonucleotide
uuugugaaccgccuuuagu

SEQ ID NO: 1783875 - RNA, 19 nt, Artificial Sequence
  Description of Artificial Sequence: Synthetic oligonucleotide
uguaguaacggugaaugau

SEQ ID NO: 1783876 - RNA, 19 nt, Artificial Sequence
  Description of Artificial Sequence: Synthetic oligonucleotide
gaaaacauccccgccuccg

SEQ ID NO: 1783877 - RNA, 19 nt, Artificial Sequence
  Description of Artificial Sequence: Synthetic oligonucleotide
aaucacuccuucaucagcu

SEQ ID NO: 1783878 - RNA, 19 nt, Artificial Sequence
  Description of Artificial Sequence: Synthetic oligonucleotide
augaaaacuggauggauua

SEQ ID NO: 1783879 - RNA, 19 nt, Artificial Sequence
  Description of Artificial Sequence: Synthetic oligonucleotide
gggcaugaaaacuggaugg

SEQ ID NO: 1783880 - RNA, 19 nt, Artificial Sequence
  Description of Artificial Sequence: Synthetic oligonucleotide
gaggucgccacaaagaaca

SEQ ID NO: 1783881 - RNA, 19 nt, Artificial Sequence
  Description of Artificial Sequence: Synthetic oligonucleotide
gaauugaguaccaggaaca

SEQ ID NO: 1783882 - RNA, 19 nt, Artificial Sequence
  Description of Artificial Sequence: Synthetic oligonucleotide
gauaaaguagaaugggccu

SEQ ID NO: 1783883 - RNA, 19 nt, Artificial Sequence
  Description of Artificial Sequence: Synthetic oligonucleotide
ugugguaguggcccgagaa

SEQ ID NO: 1783884 - RNA, 19 nt, Artificial Sequence
  Description of Artificial Sequence: Synthetic oligonucleotide
uguggaaaacauccccgcc

SEQ ID NO: 1783885 - RNA, 19 nt, Artificial Sequence
  Description of Artificial Sequence: Synthetic oligonucleotide
accgccauugucacaaucc

SEQ ID NO: 1783886 - RNA, 19 nt, Artificial Sequence
  Description of Artificial Sequence: Synthetic oligonucleotide
guugccuaagucaugguug

SEQ ID NO: 1783887 - RNA, 19 nt, Artificial Sequence
  Description of Artificial Sequence: Synthetic oligonucleotide
ucgucaauuccucucuugu

SEQ ID NO: 1783888 - RNA, 19 nt, Artificial Sequence
  Description of Artificial Sequence: Synthetic oligonucleotide
ggauaaaguagaaugggcc

SEQ ID NO: 1783889 - RNA, 19 nt, Artificial Sequence
  Description of Artificial Sequence: Synthetic oligonucleotide
aggauucaggauaggaccc

SEQ ID NO: 1783890 - RNA, 19 nt, Artificial Sequence
  Description of Artificial Sequence: Synthetic oligonucleotide
ucuucgucuaugcucugca

SEQ ID NO: 1783891 - RNA, 19 nt, Artificial Sequence
  Description of Artificial Sequence: Synthetic oligonucleotide
ucgucuaugcucugcagga

SEQ ID NO: 1783892 - RNA, 19 nt, Artificial Sequence
  Description of Artificial Sequence: Synthetic oligonucleotide
uugauaccugcucuaguga

SEQ ID NO: 1783893 - RNA, 19 nt, Artificial Sequence
  Description of Artificial Sequence: Synthetic oligonucleotide
cucuguggaaaacaucccc

SEQ ID NO: 1783894 - RNA, 19 nt, Artificial Sequence
  Description of Artificial Sequence: Synthetic oligonucleotide
aaccgccuuuaguacuugc

SEQ ID NO: 1783895 - RNA, 19 nt, Artificial Sequence
  Description of Artificial Sequence: Synthetic oligonucleotide
aaguccuucacggucucag

SEQ ID NO: 1783896 - RNA, 19 nt, Artificial Sequence
  Description of Artificial Sequence: Synthetic oligonucleotide
agucaugguugccacugac

SEQ ID NO: 1783897 - RNA, 19 nt, Artificial Sequence
  Description of Artificial Sequence: Synthetic oligonucleotide
ucuagugaacuugucugcc

SEQ ID NO: 1783898 - RNA, 19 nt, Artificial Sequence
  Description of Artificial Sequence: Synthetic oligonucleotide
aacgacauccauucacaaa

SEQ ID NO: 1783899 - RNA, 19 nt, Artificial Sequence
  Description of Artificial Sequence: Synthetic oligonucleotide
uccgcaaaugacauggcua

SEQ ID NO: 1783900 - RNA, 19 nt, Artificial Sequence
  Description of Artificial Sequence: Synthetic oligonucleotide
ugaggaaaacgcguccagg

SEQ ID NO: 1783901 - RNA, 19 nt, Artificial Sequence
  Description of Artificial Sequence: Synthetic oligonucleotide
caguuguugguccagccag

SEQ ID NO: 1783902 - RNA, 19 nt, Artificial Sequence
  Description of Artificial Sequence: Synthetic oligonucleotide
ugugaaccgccuuuaguac

SEQ ID NO: 1783903 - RNA, 19 nt, Artificial Sequence
  Description of Artificial Sequence: Synthetic oligonucleotide
cucuagugaacuugucugc

SEQ ID NO: 1783904 - RNA, 19 nt, Artificial Sequence
  Description of Artificial Sequence: Synthetic oligonucleotide
uucacaaacccgccugucu

SEQ ID NO: 1783905 - RNA, 19 nt, Artificial Sequence
  Description of Artificial Sequence: Synthetic oligonucleotide
acugacgaacaccagugga

SEQ ID NO: 1783906 - RNA, 19 nt, Artificial Sequence
  Description of Artificial Sequence: Synthetic oligonucleotide
uuggggcucagcuuguuga

SEQ ID NO: 1783907 - RNA, 19 nt, Artificial Sequence
  Description of Artificial Sequence: Synthetic oligonucleotide
agguccugggcaugaaaac

SEQ ID NO: 1783908 - RNA, 19 nt, Artificial Sequence
  Description of Artificial Sequence: Synthetic oligonucleotide
ccuuuucugaggaaaacgc

SEQ ID NO: 1783909 - RNA, 19 nt, Artificial Sequence
  Description of Artificial Sequence: Synthetic oligonucleotide
acggugaaugauuuucuca

SEQ ID NO: 1783910 - RNA, 19 nt, Artificial Sequence
  Description of Artificial Sequence: Synthetic oligonucleotide
aucguagaagaacugggaa

SEQ ID NO: 1783911 - RNA, 19 nt, Artificial Sequence
  Description of Artificial Sequence: Synthetic oligonucleotide
ugauaccugcucuagugaa

SEQ ID NO: 1783912 - RNA, 19 nt, Artificial Sequence
  Description of Artificial Sequence: Synthetic oligonucleotide
ucacaauccccaguggacc

SEQ ID NO: 1783913 - RNA, 19 nt, Artificial Sequence
  Description of Artificial Sequence: Synthetic oligonucleotide
uaaauuuaaugggcuuugc

SEQ ID NO: 1783914 - RNA, 19 nt, Artificial Sequence
  Description of Artificial Sequence: Synthetic oligonucleotide
uggaaaacauccccgccuc

SEQ ID NO: 1783915 - RNA, 19 nt, Artificial Sequence
  Description of Artificial Sequence: Synthetic oligonucleotide
gcucuagugaacuugucug

SEQ ID NO: 1783916 - RNA, 19 nt, Artificial Sequence
  Description of Artificial Sequence: Synthetic oligonucleotide
auugaguaccaggaacagg

SEQ ID NO: 1783917 - RNA, 19 nt, Artificial Sequence
  Description of Artificial Sequence: Synthetic oligonucleotide
gagacggaucuccugcucc

SEQ ID NO: 1783918 - RNA, 19 nt, Artificial Sequence
  Description of Artificial Sequence: Synthetic oligonucleotide
ugcuaugaagggcuguaaa

SEQ ID NO: 1783919 - RNA, 19 nt, Artificial Sequence
  Description of Artificial Sequence: Synthetic oligonucleotide
uaaugggcuuugcuguuca

SEQ ID NO: 1783920 - RNA, 19 nt, Artificial Sequence
  Description of Artificial Sequence: Synthetic oligonucleotide
cauggcuagagacuuucug

SEQ ID NO: 1783921 - RNA, 19 nt, Artificial Sequence
  Description of Artificial Sequence: Synthetic oligonucleotide
augaggucgccacaaagaa

SEQ ID NO: 1783922 - RNA, 19 nt, Artificial Sequence
  Description of Artificial Sequence: Synthetic oligonucleotide
ucacaaacccgccugucua

SEQ ID NO: 1783923 - RNA, 19 nt, Artificial Sequence
  Description of Artificial Sequence: Synthetic oligonucleotide
cuaugaagggcuguaaaca

SEQ ID NO: 1783924 - RNA, 19 nt, Artificial Sequence
  Description of Artificial Sequence: Synthetic oligonucleotide
acucaaauauugcuaugaa

SEQ ID NO: 1783925 - RNA, 19 nt, Artificial Sequence
  Description of Artificial Sequence: Synthetic oligonucleotide
ugaaaccaccaugucaaga

SEQ ID NO: 1783926 - RNA, 19 nt, Artificial Sequence
  Description of Artificial Sequence: Synthetic oligonucleotide
agacuuucuggccuugccu

SEQ ID NO: 1783927 - RNA, 19 nt, Artificial Sequence
  Description of Artificial Sequence: Synthetic oligonucleotide
ucgucgucaauuccucucu

SEQ ID NO: 1783928 - RNA, 19 nt, Artificial Sequence
  Description of Artificial Sequence: Synthetic oligonucleotide
auuuauaaccggugaguuu

SEQ ID NO: 1783929 - RNA, 19 nt, Artificial Sequence
  Description of Artificial Sequence: Synthetic oligonucleotide
cuagcuggcacccgauagc

SEQ ID NO: 1783930 - RNA, 19 nt, Artificial Sequence
  Description of Artificial Sequence: Synthetic oligonucleotide
uccuucacggucucagcug

SEQ ID NO: 1783931 - RNA, 19 nt, Artificial Sequence
  Description of Artificial Sequence: Synthetic oligonucleotide
ucacggucucagcuguggg

SEQ ID NO: 1783932 - RNA, 19 nt, Artificial Sequence
  Description of Artificial Sequence: Synthetic oligonucleotide
uaguaacggugaaugauuu

SEQ ID NO: 1783933 - RNA, 19 nt, Artificial Sequence
  Description of Artificial Sequence: Synthetic oligonucleotide
acgaacaccaguggaaugu

SEQ ID NO: 1783934 - RNA, 19 nt, Artificial Sequence
  Description of Artificial Sequence: Synthetic oligonucleotide
gugcagggcacuuggaggc

SEQ ID NO: 1783935 - RNA, 19 nt, Artificial Sequence
  Description of Artificial Sequence: Synthetic oligonucleotide
gcaagauaaaagguccugg

SEQ ID NO: 1783936 - RNA, 19 nt, Artificial Sequence
  Description of Artificial Sequence: Synthetic oligonucleotide
ugaggucgccacaaagaac

SEQ ID NO: 1783937 - RNA, 19 nt, Artificial Sequence
  Description of Artificial Sequence: Synthetic oligonucleotide
aguggaccaggccuucauc

SEQ ID NO: 1783938 - RNA, 19 nt, Artificial Sequence
  Description of Artificial Sequence: Synthetic oligonucleotide
aaacauccccgccuccgca

SEQ ID NO: 1783939 - RNA, 19 nt, Artificial Sequence
  Description of Artificial Sequence: Synthetic oligonucleotide
ucuuugccuagcuggcacc

SEQ ID NO: 1783940 - RNA, 19 nt, Artificial Sequence
  Description of Artificial Sequence: Synthetic oligonucleotide
aauggcaugcuggcaccuc

SEQ ID NO: 1783941 - RNA, 19 nt, Artificial Sequence
  Description of Artificial Sequence: Synthetic oligonucleotide
uggcaagauaaaagguccu

SEQ ID NO: 1783942 - RNA, 19 nt, Artificial Sequence
  Description of Artificial Sequence: Synthetic oligonucleotide
ggaaugucuuugugaaccg

SEQ ID NO: 1783943 - RNA, 19 nt, Artificial Sequence
  Description of Artificial Sequence: Synthetic oligonucleotide
auaaaacgacauccauuca

SEQ ID NO: 1783944 - RNA, 19 nt, Artificial Sequence
  Description of Artificial Sequence: Synthetic oligonucleotide
uucaggucgucgucaauuc

SEQ ID NO: 1783945 - RNA, 19 nt, Artificial Sequence
  Description of Artificial Sequence: Synthetic oligonucleotide
agcccaugggugucuuugc

SEQ ID NO: 1783946 - RNA, 19 nt, Artificial Sequence
  Description of Artificial Sequence: Synthetic oligonucleotide
gcuaugaagggcuguaaac

SEQ ID NO: 1783947 - RNA, 19 nt, Artificial Sequence
  Description of Artificial Sequence: Synthetic oligonucleotide
cuuugcuguucauuuauaa

SEQ ID NO: 1783948 - RNA, 19 nt, Artificial Sequence
  Description of Artificial Sequence: Synthetic oligonucleotide
gcuguaaacauuauggcaa

SEQ ID NO: 1783949 - RNA, 19 nt, Artificial Sequence
  Description of Artificial Sequence: Synthetic oligonucleotide
uuuaaugggcuuugcuguu

SEQ ID NO: 1783950 - RNA, 19 nt, Artificial Sequence
  Description of Artificial Sequence: Synthetic oligonucleotide
gucaugguugccacugacg

SEQ ID NO: 1783951 - RNA, 19 nt, Artificial Sequence
  Description of Artificial Sequence: Synthetic oligonucleotide
aucaccgccauugucacaa

SEQ ID NO: 1783952 - RNA, 19 nt, Artificial Sequence
  Description of Artificial Sequence: Synthetic oligonucleotide
cccgauagcagaugaaacc

SEQ ID NO: 1783953 - RNA, 19 nt, Artificial Sequence
  Description of Artificial Sequence: Synthetic oligonucleotide
auaccugcucuagugaacu

SEQ ID NO: 1783954 - RNA, 19 nt, Artificial Sequence
  Description of Artificial Sequence: Synthetic oligonucleotide
aagguccugggcaugaaaa

SEQ ID NO: 1783955 - RNA, 19 nt, Artificial Sequence
  Description of Artificial Sequence: Synthetic oligonucleotide
gccuccgcaaaugacaugg

SEQ ID NO: 1783956 - RNA, 19 nt, Artificial Sequence
  Description of Artificial Sequence: Synthetic oligonucleotide
acccgauagcagaugaaac

SEQ ID NO: 1783957 - RNA, 19 nt, Artificial Sequence
  Description of Artificial Sequence: Synthetic oligonucleotide
auggcauggaugaggucgc

SEQ ID NO: 1783958 - RNA, 19 nt, Artificial Sequence
  Description of Artificial Sequence: Synthetic oligonucleotide
aggaaaacgcguccagggu

SEQ ID NO: 1783959 - RNA, 19 nt, Artificial Sequence
  Description of Artificial Sequence: Synthetic oligonucleotide
cuacucaaauauugcuaug

SEQ ID NO: 1783960 - RNA, 19 nt, Artificial Sequence
  Description of Artificial Sequence: Synthetic oligonucleotide
ugaaccgccuuuaguacuu

SEQ ID NO: 1783961 - RNA, 19 nt, Artificial Sequence
  Description of Artificial Sequence: Synthetic oligonucleotide
gauucaggauaggacccag

SEQ ID NO: 1783962 - RNA, 19 nt, Artificial Sequence
  Description of Artificial Sequence: Synthetic oligonucleotide
cacggucucagcugugggg

SEQ ID NO: 1783963 - RNA, 19 nt, Artificial Sequence
  Description of Artificial Sequence: Synthetic oligonucleotide
ucgccacaaagaacaaaga

SEQ ID NO: 1783964 - RNA, 19 nt, Artificial Sequence
  Description of Artificial Sequence: Synthetic oligonucleotide
gacgaacaccaguggaaug

SEQ ID NO: 1783965 - RNA, 19 nt, Artificial Sequence
  Description of Artificial Sequence: Synthetic oligonucleotide
guuguugguccagccagcg

SEQ ID NO: 1783966 - RNA, 19 nt, Artificial Sequence
  Description of Artificial Sequence: Synthetic oligonucleotide
gaaugucuuugugaaccgc

SEQ ID NO: 1783967 - RNA, 19 nt, Artificial Sequence
  Description of Artificial Sequence: Synthetic oligonucleotide
ggcaucguagaagaacugg

SEQ ID NO: 1783968 - RNA, 19 nt, Artificial Sequence
  Description of Artificial Sequence: Synthetic oligonucleotide
gaacagcgggaugugcugg

SEQ ID NO: 1783969 - RNA, 19 nt, Artificial Sequence
  Description of Artificial Sequence: Synthetic oligonucleotide
aguuguugguccagccagc

SEQ ID NO: 1783970 - RNA, 19 nt, Artificial Sequence
  Description of Artificial Sequence: Synthetic oligonucleotide
cuuugugaaccgccuuuag

SEQ ID NO: 1783971 - RNA, 19 nt, Artificial Sequence
  Description of Artificial Sequence: Synthetic oligonucleotide
cuccacaccgccccgcacg

SEQ ID NO: 1783972 - RNA, 19 nt, Artificial Sequence
  Description of Artificial Sequence: Synthetic oligonucleotide
agagacuuucuggccuugc

SEQ ID NO: 1783973 - RNA, 19 nt, Artificial Sequence
  Description of Artificial Sequence: Synthetic oligonucleotide
ugaguaccaggaacaggac

SEQ ID NO: 1783974 - RNA, 19 nt, Artificial Sequence
  Description of Artificial Sequence: Synthetic oligonucleotide
caggauaggacccagcacu

SEQ ID NO: 1783975 - RNA, 19 nt, Artificial Sequence
  Description of Artificial Sequence: Synthetic oligonucleotide
aauccccaguggaccaggc

SEQ ID NO: 1783976 - RNA, 19 nt, Artificial Sequence
  Description of Artificial Sequence: Synthetic oligonucleotide
gauaccugcucuagugaac

SEQ ID NO: 1783977 - RNA, 19 nt, Artificial Sequence
  Description of Artificial Sequence: Synthetic oligonucleotide
ugcccugcgaugcucaguu

SEQ ID NO: 1783978 - RNA, 19 nt, Artificial Sequence
  Description of Artificial Sequence: Synthetic oligonucleotide
gucaucuccccacgucugg

SEQ ID NO: 1783979 - RNA, 19 nt, Artificial Sequence
  Description of Artificial Sequence: Synthetic oligonucleotide
cugaggaaaacgcguccag

SEQ ID NO: 1783980 - RNA, 19 nt, Artificial Sequence
  Description of Artificial Sequence: Synthetic oligonucleotide
cagugcagggcacuuggag

SEQ ID NO: 1783981 - RNA, 19 nt, Artificial Sequence
  Description of Artificial Sequence: Synthetic oligonucleotide
agauccugguagguucccc

SEQ ID NO: 1783982 - RNA, 19 nt, Artificial Sequence
  Description of Artificial Sequence: Synthetic oligonucleotide
augacauggcuagagacuu

SEQ ID NO: 1783983 - RNA, 19 nt, Artificial Sequence
  Description of Artificial Sequence: Synthetic oligonucleotide
aguagucaucuccccacgu

SEQ ID NO: 1783984 - RNA, 19 nt, Artificial Sequence
  Description of Artificial Sequence: Synthetic oligonucleotide
ggaugaggucgccacaaag

SEQ ID NO: 1783985 - RNA, 19 nt, Artificial Sequence
  Description of Artificial Sequence: Synthetic oligonucleotide
ggugaaugauuuucucagc

SEQ ID NO: 1783986 - RNA, 19 nt, Artificial Sequence
  Description of Artificial Sequence: Synthetic oligonucleotide
aagucaugguugccacuga

SEQ ID NO: 1783987 - RNA, 19 nt, Artificial Sequence
  Description of Artificial Sequence: Synthetic oligonucleotide
ugacgaacaccaguggaau

SEQ ID NO: 1783988 - RNA, 19 nt, Artificial Sequence
  Description of Artificial Sequence: Synthetic oligonucleotide
ggagagacuccacaccgcc

SEQ ID NO: 1783989 - RNA, 19 nt, Artificial Sequence
  Description of Artificial Sequence: Synthetic oligonucleotide
gucgucaauuccucucuug

SEQ ID NO: 1783990 - RNA, 19 nt, Artificial Sequence
  Description of Artificial Sequence: Synthetic oligonucleotide
ccgcaaaugacauggcuag

SEQ ID NO: 1783991 - RNA, 19 nt, Artificial Sequence
  Description of Artificial Sequence: Synthetic oligonucleotide
uuccuuuucugaggaaaac

SEQ ID NO: 1783992 - RNA, 19 nt, Artificial Sequence
  Description of Artificial Sequence: Synthetic oligonucleotide
gagguugaaguagucaucu

SEQ ID NO: 1783993 - RNA, 19 nt, Artificial Sequence
  Description of Artificial Sequence: Synthetic oligonucleotide
cacugacgaacaccagugg

SEQ ID NO: 1783994 - RNA, 19 nt, Artificial Sequence
  Description of Artificial Sequence: Synthetic oligonucleotide
gagcccaugggugucuuug

SEQ ID NO: 1783995 - RNA, 19 nt, Artificial Sequence
  Description of Artificial Sequence: Synthetic oligonucleotide
uggagggcgggagagacuc

SEQ ID NO: 1783996 - RNA, 19 nt, Artificial Sequence
  Description of Artificial Sequence: Synthetic oligonucleotide
acggaucuccugcucccac

SEQ ID NO: 1783997 - RNA, 19 nt, Artificial Sequence
  Description of Artificial Sequence: Synthetic oligonucleotide
uauugcuaugaagggcugu

SEQ ID NO: 1783998 - RNA, 19 nt, Artificial Sequence
  Description of Artificial Sequence: Synthetic oligonucleotide
gucgucgucaauuccucuc

SEQ ID NO: 1783999 - RNA, 19 nt, Artificial Sequence
  Description of Artificial Sequence: Synthetic oligonucleotide
gucacaauccccaguggac

SEQ ID NO: 1784000 - RNA, 19 nt, Artificial Sequence
  Description of Artificial Sequence: Synthetic oligonucleotide
caauuccucucuuguucag

SEQ ID NO: 1784001 - RNA, 19 nt, Artificial Sequence
  Description of Artificial Sequence: Synthetic oligonucleotide
cugacgaacaccaguggaa

SEQ ID NO: 1784002 - RNA, 19 nt, Artificial Sequence
  Description of Artificial Sequence: Synthetic oligonucleotide
uucuucgucuaugcucugc

SEQ ID NO: 1784003 - RNA, 19 nt, Artificial Sequence
  Description of Artificial Sequence: Synthetic oligonucleotide
aacauccccgccuccgcaa

SEQ ID NO: 1784004 - RNA, 19 nt, Artificial Sequence
  Description of Artificial Sequence: Synthetic oligonucleotide
gaggcaucguagaagaacu

SEQ ID NO: 1784005 - RNA, 19 nt, Artificial Sequence
  Description of Artificial Sequence: Synthetic oligonucleotide
gaguuccuggcauggcaug

SEQ ID NO: 1784006 - RNA, 19 nt, Artificial Sequence
  Description of Artificial Sequence: Synthetic oligonucleotide
uuucuggccuugccugggc

SEQ ID NO: 1784007 - RNA, 19 nt, Artificial Sequence
  Description of Artificial Sequence: Synthetic oligonucleotide
acuuggaggcaucguagaa

SEQ ID NO: 1784008 - RNA, 19 nt, Artificial Sequence
  Description of Artificial Sequence: Synthetic oligonucleotide
accugcucuagugaacuug

SEQ ID NO: 1784009 - RNA, 19 nt, Artificial Sequence
  Description of Artificial Sequence: Synthetic oligonucleotide
uagcuggcacccgauagca

SEQ ID NO: 1784010 - RNA, 19 nt, Artificial Sequence
  Description of Artificial Sequence: Synthetic oligonucleotide
ugaugaccaccacgcggag

SEQ ID NO: 1784011 - RNA, 19 nt, Artificial Sequence
  Description of Artificial Sequence: Synthetic oligonucleotide
guagaagaacugggaauug

SEQ ID NO: 1784012 - RNA, 19 nt, Artificial Sequence
  Description of Artificial Sequence: Synthetic oligonucleotide
uuugccuagcuggcacccg

SEQ ID NO: 1784013 - RNA, 19 nt, Artificial Sequence
  Description of Artificial Sequence: Synthetic oligonucleotide
cacgcggagcccaugggug

SEQ ID NO: 1784014 - RNA, 19 nt, Artificial Sequence
  Description of Artificial Sequence: Synthetic oligonucleotide
auggcaugcuggcaccucu

SEQ ID NO: 1784015 - RNA, 19 nt, Artificial Sequence
  Description of Artificial Sequence: Synthetic oligonucleotide
ccugcucccacucaucacc

SEQ ID NO: 1784016 - RNA, 19 nt, Artificial Sequence
  Description of Artificial Sequence: Synthetic oligonucleotide
ugguccagccagcgggucc

SEQ ID NO: 1784017 - RNA, 19 nt, Artificial Sequence
  Description of Artificial Sequence: Synthetic oligonucleotide
auugcuaugaagggcugua

SEQ ID NO: 1784018 - RNA, 19 nt, Artificial Sequence
  Description of Artificial Sequence: Synthetic oligonucleotide
cuuugccuagcuggcaccc

SEQ ID NO: 1784019 - RNA, 19 nt, Artificial Sequence
  Description of Artificial Sequence: Synthetic oligonucleotide
uugguucaggauucaggau

SEQ ID NO: 1784020 - RNA, 19 nt, Artificial Sequence
  Description of Artificial Sequence: Synthetic oligonucleotide
uuaaugggcuuugcuguuc

SEQ ID NO: 1784021 - RNA, 19 nt, Artificial Sequence
  Description of Artificial Sequence: Synthetic oligonucleotide
ugucuuugugaaccgccuu

SEQ ID NO: 1784022 - RNA, 19 nt, Artificial Sequence
  Description of Artificial Sequence: Synthetic oligonucleotide
gacgccucccacccagaag

SEQ ID NO: 1784023 - RNA, 19 nt, Artificial Sequence
  Description of Artificial Sequence: Synthetic oligonucleotide
cacaaacccgccugucuac

SEQ ID NO: 1784024 - RNA, 19 nt, Artificial Sequence
  Description of Artificial Sequence: Synthetic oligonucleotide
ucuuugugaaccgccuuua

SEQ ID NO: 1784025 - RNA, 19 nt, Artificial Sequence
  Description of Artificial Sequence: Synthetic oligonucleotide
ugucaagauccugguaggu

SEQ ID NO: 1784026 - RNA, 19 nt, Artificial Sequence
  Description of Artificial Sequence: Synthetic oligonucleotide
gagacuccacaccgccccg

SEQ ID NO: 1784027 - RNA, 19 nt, Artificial Sequence
  Description of Artificial Sequence: Synthetic oligonucleotide
aguaacggugaaugauuuu

SEQ ID NO: 1784028 - RNA, 19 nt, Artificial Sequence
  Description of Artificial Sequence: Synthetic oligonucleotide
guaaacauuauggcaagau

SEQ ID NO: 1784029 - RNA, 19 nt, Artificial Sequence
  Description of Artificial Sequence: Synthetic oligonucleotide
cuagugaacuugucugcca

SEQ ID NO: 1784030 - RNA, 19 nt, Artificial Sequence
  Description of Artificial Sequence: Synthetic oligonucleotide
ggggacguugccuaaguca

SEQ ID NO: 1784031 - RNA, 19 nt, Artificial Sequence
  Description of Artificial Sequence: Synthetic oligonucleotide
aguacuugcugcagguccu

SEQ ID NO: 1784032 - RNA, 19 nt, Artificial Sequence
  Description of Artificial Sequence: Synthetic oligonucleotide
uccacaccgccccgcacgc

SEQ ID NO: 1784033 - RNA, 19 nt, Artificial Sequence
  Description of Artificial Sequence: Synthetic oligonucleotide
cuuucuggccuugccuggg

SEQ ID NO: 1784034 - RNA, 19 nt, Artificial Sequence
  Description of Artificial Sequence: Synthetic oligonucleotide
guggaaaacauccccgccu

SEQ ID NO: 1784035 - RNA, 19 nt, Artificial Sequence
  Description of Artificial Sequence: Synthetic oligonucleotide
uuaguacuugcugcagguc

SEQ ID NO: 1784036 - RNA, 19 nt, Artificial Sequence
  Description of Artificial Sequence: Synthetic oligonucleotide
ugguugccacugacgaaca

SEQ ID NO: 1784037 - RNA, 19 nt, Artificial Sequence
  Description of Artificial Sequence: Synthetic oligonucleotide
acggucucagcugugggga

SEQ ID NO: 1784038 - RNA, 19 nt, Artificial Sequence
  Description of Artificial Sequence: Synthetic oligonucleotide
gugguaguggcccgagaac

SEQ ID NO: 1784039 - RNA, 19 nt, Artificial Sequence
  Description of Artificial Sequence: Synthetic oligonucleotide
guagaaugggccuuuccau

SEQ ID NO: 1784040 - RNA, 19 nt, Artificial Sequence
  Description of Artificial Sequence: Synthetic oligonucleotide
caggacgccucccacccag

SEQ ID NO: 1784041 - RNA, 19 nt, Artificial Sequence
  Description of Artificial Sequence: Synthetic oligonucleotide
uaggacccagcacuuugau

SEQ ID NO: 1784042 - RNA, 19 nt, Artificial Sequence
  Description of Artificial Sequence: Synthetic oligonucleotide
cuguucauuuauaaccggu

SEQ ID NO: 1784043 - RNA, 19 nt, Artificial Sequence
  Description of Artificial Sequence: Synthetic oligonucleotide
ccuaagucaugguugccac

SEQ ID NO: 1784044 - RNA, 19 nt, Artificial Sequence
  Description of Artificial Sequence: Synthetic oligonucleotide
cacaccgccccgcacgccc

SEQ ID NO: 1784045 - RNA, 19 nt, Artificial Sequence
  Description of Artificial Sequence: Synthetic oligonucleotide
cagugaugaccaccacgcg

SEQ ID NO: 1784046 - RNA, 19 nt, Artificial Sequence
  Description of Artificial Sequence: Synthetic oligonucleotide
caccacgcggagcccaugg

SEQ ID NO: 1784047 - RNA, 19 nt, Artificial Sequence
  Description of Artificial Sequence: Synthetic oligonucleotide
cacguucuguggagggcgg

SEQ ID NO: 1784048 - RNA, 19 nt, Artificial Sequence
  Description of Artificial Sequence: Synthetic oligonucleotide
caugaaaacuggauggauu

SEQ ID NO: 1784049 - RNA, 19 nt, Artificial Sequence
  Description of Artificial Sequence: Synthetic oligonucleotide
uggcaugcuggcaccucug

SEQ ID NO: 1784050 - RNA, 19 nt, Artificial Sequence
  Description of Artificial Sequence: Synthetic oligonucleotide
cagcuuucucagugagacg

SEQ ID NO: 1784051 - RNA, 19 nt, Artificial Sequence
  Description of Artificial Sequence: Synthetic oligonucleotide
gaugaccaccacgcggagc

SEQ ID NO: 1784052 - RNA, 19 nt, Artificial Sequence
  Description of Artificial Sequence: Synthetic oligonucleotide
ggcuagagacuuucuggcc

SEQ ID NO: 1784053 - RNA, 19 nt, Artificial Sequence
  Description of Artificial Sequence: Synthetic oligonucleotide
aacccgccugucuacucaa

SEQ ID NO: 1784054 - RNA, 19 nt, Artificial Sequence
  Description of Artificial Sequence: Synthetic oligonucleotide
aaugggcuuugcuguucau

SEQ ID NO: 1784055 - RNA, 19 nt, Artificial Sequence
  Description of Artificial Sequence: Synthetic oligonucleotide
guggaaugucuuugugaac

SEQ ID NO: 1784056 - RNA, 19 nt, Artificial Sequence
  Description of Artificial Sequence: Synthetic oligonucleotide
accacgcggagcccauggg

SEQ ID NO: 1784057 - RNA, 19 nt, Artificial Sequence
  Description of Artificial Sequence: Synthetic oligonucleotide
ccuagcuggcacccgauag

SEQ ID NO: 1784058 - RNA, 19 nt, Artificial Sequence
  Description of Artificial Sequence: Synthetic oligonucleotide
aggucgucgucaauuccuc

SEQ ID NO: 1784059 - RNA, 19 nt, Artificial Sequence
  Description of Artificial Sequence: Synthetic oligonucleotide
agggaguuccuggcauggc

SEQ ID NO: 1784060 - RNA, 19 nt, Artificial Sequence
  Description of Artificial Sequence: Synthetic oligonucleotide
agacuccacaccgccccgc

SEQ ID NO: 1784061 - RNA, 19 nt, Artificial Sequence
  Description of Artificial Sequence: Synthetic oligonucleotide
auggaugaggucgccacaa

SEQ ID NO: 1784062 - RNA, 19 nt, Artificial Sequence
  Description of Artificial Sequence: Synthetic oligonucleotide
augucuuugugaaccgccu

SEQ ID NO: 1784063 - RNA, 19 nt, Artificial Sequence
  Description of Artificial Sequence: Synthetic oligonucleotide
gagagacuccacaccgccc

SEQ ID NO: 1784064 - RNA, 19 nt, Artificial Sequence
  Description of Artificial Sequence: Synthetic oligonucleotide
cagugagacggaucuccug

SEQ ID NO: 1784065 - RNA, 19 nt, Artificial Sequence
  Description of Artificial Sequence: Synthetic oligonucleotide
ccacucaucaccgccauug

SEQ ID NO: 1784066 - RNA, 19 nt, Artificial Sequence
  Description of Artificial Sequence: Synthetic oligonucleotide
cacaauccccaguggacca

SEQ ID NO: 1784067 - RNA, 19 nt, Artificial Sequence
  Description of Artificial Sequence: Synthetic oligonucleotide
uuccuggcauggcauggau

SEQ ID NO: 1784068 - RNA, 19 nt, Artificial Sequence
  Description of Artificial Sequence: Synthetic oligonucleotide
gcuggcacccgauagcaga

SEQ ID NO: 1784069 - RNA, 19 nt, Artificial Sequence
  Description of Artificial Sequence: Synthetic oligonucleotide
caauccccaguggaccagg

SEQ ID NO: 1784070 - RNA, 19 nt, Artificial Sequence
  Description of Artificial Sequence: Synthetic oligonucleotide
acaauccccaguggaccag

SEQ ID NO: 1784071 - RNA, 19 nt, Artificial Sequence
  Description of Artificial Sequence: Synthetic oligonucleotide
uggggacguugccuaaguc

SEQ ID NO: 1784072 - RNA, 19 nt, Artificial Sequence
  Description of Artificial Sequence: Synthetic oligonucleotide
accgccuuuaguacuugcu

SEQ ID NO: 1784073 - RNA, 19 nt, Artificial Sequence
  Description of Artificial Sequence: Synthetic oligonucleotide
cgggagagacuccacaccg

SEQ ID NO: 1784074 - RNA, 19 nt, Artificial Sequence
  Description of Artificial Sequence: Synthetic oligonucleotide
gcuagagacuuucuggccu

SEQ ID NO: 1784075 - RNA, 19 nt, Artificial Sequence
  Description of Artificial Sequence: Synthetic oligonucleotide
cagcacuuugauuuauaua

SEQ ID NO: 1784076 - RNA, 19 nt, Artificial Sequence
  Description of Artificial Sequence: Synthetic oligonucleotide
ggcgggagagacuccacac

SEQ ID NO: 1784077 - RNA, 19 nt, Artificial Sequence
  Description of Artificial Sequence: Synthetic oligonucleotide
ggaacaggacgccucccac

SEQ ID NO: 1784078 - RNA, 19 nt, Artificial Sequence
  Description of Artificial Sequence: Synthetic oligonucleotide
cagcgggaugugcuggaag

SEQ ID NO: 1784079 - RNA, 19 nt, Artificial Sequence
  Description of Artificial Sequence: Synthetic oligonucleotide
acgcguccaggguccugcc

SEQ ID NO: 1784080 - RNA, 19 nt, Artificial Sequence
  Description of Artificial Sequence: Synthetic oligonucleotide
ugacauggcuagagacuuu

SEQ ID NO: 1784081 - RNA, 19 nt, Artificial Sequence
  Description of Artificial Sequence: Synthetic oligonucleotide
gugaaccgccuuuaguacu

SEQ ID NO: 1784082 - RNA, 19 nt, Artificial Sequence
  Description of Artificial Sequence: Synthetic oligonucleotide
cugcgaugcucaguuguug

SEQ ID NO: 1784083 - RNA, 19 nt, Artificial Sequence
  Description of Artificial Sequence: Synthetic oligonucleotide
gggucugcgccuuggauaa

SEQ ID NO: 1784084 - RNA, 19 nt, Artificial Sequence
  Description of Artificial Sequence: Synthetic oligonucleotide
ugccuaagucaugguugcc

SEQ ID NO: 1784085 - RNA, 19 nt, Artificial Sequence
  Description of Artificial Sequence: Synthetic oligonucleotide
ccgccauugucacaauccc

SEQ ID NO: 1784086 - RNA, 19 nt, Artificial Sequence
  Description of Artificial Sequence: Synthetic oligonucleotide
uugccugggcacguucugu

SEQ ID NO: 1784087 - RNA, 19 nt, Artificial Sequence
  Description of Artificial Sequence: Synthetic oligonucleotide
ccaggaacaggacgccucc

SEQ ID NO: 1784088 - RNA, 19 nt, Artificial Sequence
  Description of Artificial Sequence: Synthetic oligonucleotide
acgcggagcccaugggugu

SEQ ID NO: 1784089 - RNA, 19 nt, Artificial Sequence
  Description of Artificial Sequence: Synthetic oligonucleotide
ggcaugaaaacuggaugga

SEQ ID NO: 1784090 - RNA, 19 nt, Artificial Sequence
  Description of Artificial Sequence: Synthetic oligonucleotide
ggcacccgauagcagauga

SEQ ID NO: 1784091 - RNA, 19 nt, Artificial Sequence
  Description of Artificial Sequence: Synthetic oligonucleotide
gggaauugaguaccaggaa

SEQ ID NO: 1784092 - RNA, 19 nt, Artificial Sequence
  Description of Artificial Sequence: Synthetic oligonucleotide
ccgccuuuaguacuugcug

SEQ ID NO: 1784093 - RNA, 19 nt, Artificial Sequence
  Description of Artificial Sequence: Synthetic oligonucleotide
agguugaaguagucaucuu

SEQ ID NO: 1784094 - RNA, 19 nt, Artificial Sequence
  Description of Artificial Sequence: Synthetic oligonucleotide
guaguggcccgagaacaca

SEQ ID NO: 1784095 - RNA, 19 nt, Artificial Sequence
  Description of Artificial Sequence: Synthetic oligonucleotide
gacuccacaccgccccgca

SEQ ID NO: 1784096 - RNA, 19 nt, Artificial Sequence
  Description of Artificial Sequence: Synthetic oligonucleotide
gcgggagagacuccacacc

SEQ ID NO: 1784097 - RNA, 19 nt, Artificial Sequence
  Description of Artificial Sequence: Synthetic oligonucleotide
cuucacggucucagcugug

SEQ ID NO: 1784098 - RNA, 19 nt, Artificial Sequence
  Description of Artificial Sequence: Synthetic oligonucleotide
ccgauagcagaugaaacca

SEQ ID NO: 1784099 - RNA, 19 nt, Artificial Sequence
  Description of Artificial Sequence: Synthetic oligonucleotide
gcgccuuggauaaaguaga

SEQ ID NO: 1784100 - RNA, 19 nt, Artificial Sequence
  Description of Artificial Sequence: Synthetic oligonucleotide
gaaccgccuuuaguacuug

SEQ ID NO: 1784101 - RNA, 19 nt, Artificial Sequence
  Description of Artificial Sequence: Synthetic oligonucleotide
acguucuguggagggcggg

SEQ ID NO: 1784102 - RNA, 19 nt, Artificial Sequence
  Description of Artificial Sequence: Synthetic oligonucleotide
cugcucuagugaacuuguc

SEQ ID NO: 1784103 - RNA, 19 nt, Artificial Sequence
  Description of Artificial Sequence: Synthetic oligonucleotide
gucuuugugaaccgccuuu

SEQ ID NO: 1784104 - RNA, 19 nt, Artificial Sequence
  Description of Artificial Sequence: Synthetic oligonucleotide
aaacgcguccaggguccug

SEQ ID NO: 1784105 - RNA, 19 nt, Artificial Sequence
  Description of Artificial Sequence: Synthetic oligonucleotide
gccuaagucaugguugcca

SEQ ID NO: 1784106 - RNA, 19 nt, Artificial Sequence
  Description of Artificial Sequence: Synthetic oligonucleotide
ggcaugcuggcaccucugc

SEQ ID NO: 1784107 - RNA, 19 nt, Artificial Sequence
  Description of Artificial Sequence: Synthetic oligonucleotide
uccugugguaguggcccga

SEQ ID NO: 1784108 - RNA, 19 nt, Artificial Sequence
  Description of Artificial Sequence: Synthetic oligonucleotide
ugccuagcuggcacccgau

SEQ ID NO: 1784109 - RNA, 19 nt, Artificial Sequence
  Description of Artificial Sequence: Synthetic oligonucleotide
ucucagugagacggaucuc

SEQ ID NO: 1784110 - RNA, 19 nt, Artificial Sequence
  Description of Artificial Sequence: Synthetic oligonucleotide
ccuuuaguacuugcugcag

SEQ ID NO: 1784111 - RNA, 19 nt, Artificial Sequence
  Description of Artificial Sequence: Synthetic oligonucleotide
acguugccuaagucauggu

SEQ ID NO: 1784112 - RNA, 19 nt, Artificial Sequence
  Description of Artificial Sequence: Synthetic oligonucleotide
ccacgucuggcagaagucc

SEQ ID NO: 1784113 - RNA, 19 nt, Artificial Sequence
  Description of Artificial Sequence: Synthetic oligonucleotide
caccgccauugucacaauc

SEQ ID NO: 1784114 - RNA, 19 nt, Artificial Sequence
  Description of Artificial Sequence: Synthetic oligonucleotide
auuuggguuuggggcucag

SEQ ID NO: 1784115 - RNA, 19 nt, Artificial Sequence
  Description of Artificial Sequence: Synthetic oligonucleotide
gguaguggcccgagaacac

SEQ ID NO: 1784116 - RNA, 19 nt, Artificial Sequence
  Description of Artificial Sequence: Synthetic oligonucleotide
ggggucugcgccuuggaua

SEQ ID NO: 1784117 - RNA, 19 nt, Artificial Sequence
  Description of Artificial Sequence: Synthetic oligonucleotide
cugcgccuuggauaaagua

SEQ ID NO: 1784118 - RNA, 19 nt, Artificial Sequence
  Description of Artificial Sequence: Synthetic oligonucleotide
acauccccgccuccgcaaa

SEQ ID NO: 1784119 - RNA, 19 nt, Artificial Sequence
  Description of Artificial Sequence: Synthetic oligonucleotide
uggcacccgauagcagaug

SEQ ID NO: 1784120 - RNA, 19 nt, Artificial Sequence
  Description of Artificial Sequence: Synthetic oligonucleotide
gcccaugggugucuuugcc

SEQ ID NO: 1784121 - RNA, 19 nt, Artificial Sequence
  Description of Artificial Sequence: Synthetic oligonucleotide
gggccugcuucagugcagg

SEQ ID NO: 1784122 - RNA, 19 nt, Artificial Sequence
  Description of Artificial Sequence: Synthetic oligonucleotide
aggauaggacccagcacuu

SEQ ID NO: 1784123 - RNA, 19 nt, Artificial Sequence
  Description of Artificial Sequence: Synthetic oligonucleotide
cuaagucaugguugccacu

SEQ ID NO: 1784124 - RNA, 19 nt, Artificial Sequence
  Description of Artificial Sequence: Synthetic oligonucleotide
gccacugacgaacaccagu

SEQ ID NO: 1784125 - RNA, 19 nt, Artificial Sequence
  Description of Artificial Sequence: Synthetic oligonucleotide
cuccgcaaaugacauggcu

SEQ ID NO: 1784126 - RNA, 19 nt, Artificial Sequence
  Description of Artificial Sequence: Synthetic oligonucleotide
ggauucaggauaggaccca

SEQ ID NO: 1784127 - RNA, 19 nt, Artificial Sequence
  Description of Artificial Sequence: Synthetic oligonucleotide
uggcauggaugaggucgcc

SEQ ID NO: 1784128 - RNA, 19 nt, Artificial Sequence
  Description of Artificial Sequence: Synthetic oligonucleotide
acaggacgccucccaccca

SEQ ID NO: 1784129 - RNA, 19 nt, Artificial Sequence
  Description of Artificial Sequence: Synthetic oligonucleotide
cccgccuccgcaaaugaca

SEQ ID NO: 1784130 - RNA, 19 nt, Artificial Sequence
  Description of Artificial Sequence: Synthetic oligonucleotide
cgccauugucacaaucccc

SEQ ID NO: 1784131 - RNA, 19 nt, Artificial Sequence
  Description of Artificial Sequence: Synthetic oligonucleotide
agggcgggagagacuccac

SEQ ID NO: 1784132 - RNA, 19 nt, Artificial Sequence
  Description of Artificial Sequence: Synthetic oligonucleotide
cagggcacuuggaggcauc

SEQ ID NO: 1784133 - RNA, 19 nt, Artificial Sequence
  Description of Artificial Sequence: Synthetic oligonucleotide
ccugccccgggcucugugg

SEQ ID NO: 1784134 - RNA, 19 nt, Artificial Sequence
  Description of Artificial Sequence: Synthetic oligonucleotide
cacgucuggcagaaguccu

SEQ ID NO: 1784135 - RNA, 19 nt, Artificial Sequence
  Description of Artificial Sequence: Synthetic oligonucleotide
cuagagacuuucuggccuu

SEQ ID NO: 1784136 - RNA, 19 nt, Artificial Sequence
  Description of Artificial Sequence: Synthetic oligonucleotide
cccacgucuggcagaaguc

SEQ ID NO: 1784137 - RNA, 19 nt, Artificial Sequence
  Description of Artificial Sequence: Synthetic oligonucleotide
agcuggcacccgauagcag

SEQ ID NO: 1784138 - RNA, 19 nt, Artificial Sequence
  Description of Artificial Sequence: Synthetic oligonucleotide
ggcccgagaacacagcuuu

SEQ ID NO: 1784139 - RNA, 19 nt, Artificial Sequence
  Description of Artificial Sequence: Synthetic oligonucleotide
ugaccaccacgcggagccc

SEQ ID NO: 1784140 - RNA, 19 nt, Artificial Sequence
  Description of Artificial Sequence: Synthetic oligonucleotide
gggacguugccuaagucau

SEQ ID NO: 1784141 - RNA, 19 nt, Artificial Sequence
  Description of Artificial Sequence: Synthetic oligonucleotide
uggccuugccugggcacgu

SEQ ID NO: 1784142 - RNA, 19 nt, Artificial Sequence
  Description of Artificial Sequence: Synthetic oligonucleotide
ccuccgcaaaugacauggc

SEQ ID NO: 1784143 - RNA, 19 nt, Artificial Sequence
  Description of Artificial Sequence: Synthetic oligonucleotide
gggcgggagagacuccaca

SEQ ID NO: 1784144 - RNA, 19 nt, Artificial Sequence
  Description of Artificial Sequence: Synthetic oligonucleotide
acagcgggaugugcuggaa

SEQ ID NO: 1784145 - RNA, 19 nt, Artificial Sequence
  Description of Artificial Sequence: Synthetic oligonucleotide
cuuucucagugagacggau

SEQ ID NO: 1784146 - RNA, 19 nt, Artificial Sequence
  Description of Artificial Sequence: Synthetic oligonucleotide
acgucuggcagaaguccuu

SEQ ID NO: 1784147 - RNA, 19 nt, Artificial Sequence
  Description of Artificial Sequence: Synthetic oligonucleotide
ggacguugccuaagucaug

SEQ ID NO: 1784148 - RNA, 19 nt, Artificial Sequence
  Description of Artificial Sequence: Synthetic oligonucleotide
cugccccgggcucugugga

SEQ ID NO: 1784149 - RNA, 19 nt, Artificial Sequence
  Description of Artificial Sequence: Synthetic oligonucleotide
ggcauggaugaggucgcca

SEQ ID NO: 1784150 - RNA, 19 nt, Artificial Sequence
  Description of Artificial Sequence: Synthetic oligonucleotide
cuggcacccgauagcagau

SEQ ID NO: 1784151 - RNA, 19 nt, Artificial Sequence
  Description of Artificial Sequence: Synthetic oligonucleotide
cugugguaguggcccgaga

SEQ ID NO: 1784152 - RNA, 19 nt, Artificial Sequence
  Description of Artificial Sequence: Synthetic oligonucleotide
cccgagaacacagcuuuga

SEQ ID NO: 1784153 - RNA, 19 nt, Artificial Sequence
  Description of Artificial Sequence: Synthetic oligonucleotide
guugguccagccagcgggu

SEQ ID NO: 1784154 - RNA, 19 nt, Artificial Sequence
  Description of Artificial Sequence: Synthetic oligonucleotide
cuccccacgucuggcagaa

SEQ ID NO: 1784155 - RNA, 19 nt, Artificial Sequence
  Description of Artificial Sequence: Synthetic oligonucleotide
ccugugguaguggcccgag

SEQ ID NO: 1784156 - RNA, 19 nt, Artificial Sequence
  Description of Artificial Sequence: Synthetic oligonucleotide
gccccgccggaacaguuuc

SEQ ID NO: 1784157 - RNA, 19 nt, Artificial Sequence
  Description of Artificial Sequence: Synthetic oligonucleotide
cccgccggaacaguuucug

SEQ ID NO: 1784158 - RNA, 19 nt, Artificial Sequence
  Description of Artificial Sequence: Synthetic oligonucleotide
cuguggggacguugccuaa

SEQ ID NO: 1784159 - RNA, 19 nt, Artificial Sequence
  Description of Artificial Sequence: Synthetic oligonucleotide
aggucgccacaaagaacaa

SEQ ID NO: 1784160 - RNA, 19 nt, Artificial Sequence
  Description of Artificial Sequence: Synthetic oligonucleotide
caccucugcugcccugcga

SEQ ID NO: 1784161 - RNA, 19 nt, Artificial Sequence
  Description of Artificial Sequence: Synthetic oligonucleotide
gcgaugcucaguuguuggu

SEQ ID NO: 1784162 - RNA, 19 nt, Artificial Sequence
  Description of Artificial Sequence: Synthetic oligonucleotide
cguagaagaacugggaauu

SEQ ID NO: 1784163 - RNA, 19 nt, Artificial Sequence
  Description of Artificial Sequence: Synthetic oligonucleotide
gcuuugcuguucauuuaua

SEQ ID NO: 1784164 - RNA, 19 nt, Artificial Sequence
  Description of Artificial Sequence: Synthetic oligonucleotide
ggacgccucccacccagaa

SEQ ID NO: 1784165 - RNA, 19 nt, Artificial Sequence
  Description of Artificial Sequence: Synthetic oligonucleotide
ggucgucgucaauuccucu

SEQ ID NO: 1784166 - RNA, 19 nt, Artificial Sequence
  Description of Artificial Sequence: Synthetic oligonucleotide
cgaacaccaguggaauguc

SEQ ID NO: 1784167 - RNA, 19 nt, Artificial Sequence
  Description of Artificial Sequence: Synthetic oligonucleotide
uccccacgucuggcagaag

SEQ ID NO: 1784168 - RNA, 19 nt, Artificial Sequence
  Description of Artificial Sequence: Synthetic oligonucleotide
caguggaccaggccuucau

SEQ ID NO: 1784169 - RNA, 19 nt, Artificial Sequence
  Description of Artificial Sequence: Synthetic oligonucleotide
cccugcgaugcucaguugu

SEQ ID NO: 1784170 - RNA, 19 nt, Artificial Sequence
  Description of Artificial Sequence: Synthetic oligonucleotide
aggacgccucccacccaga

SEQ ID NO: 1784171 - RNA, 19 nt, Artificial Sequence
  Description of Artificial Sequence: Synthetic oligonucleotide
ccgggcucuguggaaaaca

SEQ ID NO: 1784172 - RNA, 19 nt, Artificial Sequence
  Description of Artificial Sequence: Synthetic oligonucleotide
ccccacgucuggcagaagu

SEQ ID NO: 1784173 - RNA, 19 nt, Artificial Sequence
  Description of Artificial Sequence: Synthetic oligonucleotide
gcccgagaacacagcuuug

SEQ ID NO: 1784174 - RNA, 19 nt, Artificial Sequence
  Description of Artificial Sequence: Synthetic oligonucleotide
gccuuggauaaaguagaau

SEQ ID NO: 1784175 - RNA, 19 nt, Artificial Sequence
  Description of Artificial Sequence: Synthetic oligonucleotide
gcacgccccgccggaacag

SEQ ID NO: 1784176 - RNA, 19 nt, Artificial Sequence
  Description of Artificial Sequence: Synthetic oligonucleotide
gcccugcgaugcucaguug

SEQ ID NO: 1784177 - RNA, 19 nt, Artificial Sequence
  Description of Artificial Sequence: Synthetic oligonucleotide
gcacccgauagcagaugaa

SEQ ID NO: 1784178 - RNA, 19 nt, Artificial Sequence
  Description of Artificial Sequence: Synthetic oligonucleotide
gccuagcuggcacccgaua

SEQ ID NO: 1784179 - RNA, 19 nt, Artificial Sequence
  Description of Artificial Sequence: Synthetic oligonucleotide
acccgccugucuacucaaa

SEQ ID NO: 1784180 - RNA, 19 nt, Artificial Sequence
  Description of Artificial Sequence: Synthetic oligonucleotide
guacuugcugcagguccuu

SEQ ID NO: 1784181 - RNA, 19 nt, Artificial Sequence
  Description of Artificial Sequence: Synthetic oligonucleotide
cguugccuaagucaugguu

SEQ ID NO: 1784182 - RNA, 19 nt, Artificial Sequence
  Description of Artificial Sequence: Synthetic oligonucleotide
ccgagaacacagcuuugau

SEQ ID NO: 1784183 - RNA, 19 nt, Artificial Sequence
  Description of Artificial Sequence: Synthetic oligonucleotide
acgccccgccggaacaguu

SEQ ID NO: 1784184 - RNA, 19 nt, Artificial Sequence
  Description of Artificial Sequence: Synthetic oligonucleotide
cgccuuggauaaaguagaa

SEQ ID NO: 1784185 - RNA, 19 nt, Artificial Sequence
  Description of Artificial Sequence: Synthetic oligonucleotide
guuuggggcucagcuuguu

SEQ ID NO: 1784186 - RNA, 19 nt, Artificial Sequence
  Description of Artificial Sequence: Synthetic oligonucleotide
ccacgcggagcccaugggu

SEQ ID NO: 1784187 - RNA, 19 nt, Artificial Sequence
  Description of Artificial Sequence: Synthetic oligonucleotide
cccgggcucuguggaaaac

SEQ ID NO: 1784188 - RNA, 19 nt, Artificial Sequence
  Description of Artificial Sequence: Synthetic oligonucleotide
gccccgggcucuguggaaa

SEQ ID NO: 1784189 - RNA, 19 nt, Artificial Sequence
  Description of Artificial Sequence: Synthetic oligonucleotide
cauccccgccuccgcaaau

SEQ ID NO: 1784190 - RNA, 19 nt, Artificial Sequence
  Description of Artificial Sequence: Synthetic oligonucleotide
cgccuccgcaaaugacaug

SEQ ID NO: 1784191 - RNA, 19 nt, Artificial Sequence
  Description of Artificial Sequence: Synthetic oligonucleotide
cgucaauuccucucuuguu

SEQ ID NO: 1784192 - RNA, 19 nt, Artificial Sequence
  Description of Artificial Sequence: Synthetic oligonucleotide
cgcaaaugacauggcuaga

SEQ ID NO: 1784193 - RNA, 19 nt, Artificial Sequence
  Description of Artificial Sequence: Synthetic oligonucleotide
cccgccugucuacucaaau

SEQ ID NO: 1784194 - RNA, 19 nt, Artificial Sequence
  Description of Artificial Sequence: Synthetic oligonucleotide
gggcacuuggaggcaucgu

SEQ ID NO: 1784195 - RNA, 19 nt, Artificial Sequence
  Description of Artificial Sequence: Synthetic oligonucleotide
cgcggagcccauggguguc

SEQ ID NO: 1784196 - RNA, 19 nt, Artificial Sequence
  Description of Artificial Sequence: Synthetic oligonucleotide
ggagcccaugggugucuuu

SEQ ID NO: 1784197 - RNA, 19 nt, Artificial Sequence
  Description of Artificial Sequence: Synthetic oligonucleotide
cacgccccgccggaacagu

SEQ ID NO: 1784198 - RNA, 19 nt, Artificial Sequence
  Description of Artificial Sequence: Synthetic oligonucleotide
ggucugcgccuuggauaaa

SEQ ID NO: 1784199 - RNA, 19 nt, Artificial Sequence
  Description of Artificial Sequence: Synthetic oligonucleotide
gcggagcccaugggugucu

SEQ ID NO: 1784200 - RNA, 19 nt, Artificial Sequence
  Description of Artificial Sequence: Synthetic oligonucleotide
ccccgccggaacaguuucu

SEQ ID NO: 1784201 - RNA, 19 nt, Artificial Sequence
  Description of Artificial Sequence: Synthetic oligonucleotide
cgucgucaauuccucucuu

SEQ ID NO: 1784202 - RNA, 19 nt, Artificial Sequence
  Description of Artificial Sequence: Synthetic oligonucleotide
ggccuugccugggcacguu

SEQ ID NO: 1784203 - RNA, 19 nt, Artificial Sequence
  Description of Artificial Sequence: Synthetic oligonucleotide
gcggguccugggccugcuu

SEQ ID NO: 1784204 - RNA, 19 nt, Artificial Sequence
  Description of Artificial Sequence: Synthetic oligonucleotide
cgccccgccggaacaguuu

SEQ ID NO: 1784205 - RNA, 19 nt, Artificial Sequence
  Description of Artificial Sequence: Synthetic oligonucleotide
agaaacaauacuucuaacc

SEQ ID NO: 1784206 - RNA, 19 nt, Artificial Sequence
  Description of Artificial Sequence: Synthetic oligonucleotide
aagaccucuaacuuagucc

SEQ ID NO: 1784207 - RNA, 19 nt, Artificial Sequence
  Description of Artificial Sequence: Synthetic oligonucleotide
aagauuuauggaaagacgc

SEQ ID NO: 1784208 - RNA, 19 nt, Artificial Sequence
  Description of Artificial Sequence: Synthetic oligonucleotide
cauuuugaaaggaaaaucg

SEQ ID NO: 1784209 - RNA, 19 nt, Artificial Sequence
  Description of Artificial Sequence: Synthetic oligonucleotide
auugguuaaagcugguugc

SEQ ID NO: 1784210 - RNA, 19 nt, Artificial Sequence
  Description of Artificial Sequence: Synthetic oligonucleotide
cuaacuuaguccuugacug

SEQ ID NO: 1784211 - RNA, 19 nt, Artificial Sequence
  Description of Artificial Sequence: Synthetic oligonucleotide
auuauuacaacagcuguac

SEQ ID NO: 1784212 - RNA, 19 nt, Artificial Sequence
  Description of Artificial Sequence: Synthetic oligonucleotide
aaaggaaagaccaucaaga

SEQ ID NO: 1784213 - RNA, 19 nt, Artificial Sequence
  Description of Artificial Sequence: Synthetic oligonucleotide
uuagaaacaauacuucuaa

SEQ ID NO: 1784214 - RNA, 19 nt, Artificial Sequence
  Description of Artificial Sequence: Synthetic oligonucleotide
uaaccaugcauacaaaaca

SEQ ID NO: 1784215 - RNA, 19 nt, Artificial Sequence
  Description of Artificial Sequence: Synthetic oligonucleotide
uccucuuauaauuacauaa

SEQ ID NO: 1784216 - RNA, 19 nt, Artificial Sequence
  Description of Artificial Sequence: Synthetic oligonucleotide
uaggucauuauuacaacag

SEQ ID NO: 1784217 - RNA, 19 nt, Artificial Sequence
  Description of Artificial Sequence: Synthetic oligonucleotide
uacaauucacuacacuucc

SEQ ID NO: 1784218 - RNA, 19 nt, Artificial Sequence
  Description of Artificial Sequence: Synthetic oligonucleotide
uucagaaucgucagggaag

SEQ ID NO: 1784219 - RNA, 19 nt, Artificial Sequence
  Description of Artificial Sequence: Synthetic oligonucleotide
gacacguuaccauagggag

SEQ ID NO: 1784220 - RNA, 19 nt, Artificial Sequence
  Description of Artificial Sequence: Synthetic oligonucleotide
gaagauuuauggaaagacg

SEQ ID NO: 1784221 - RNA, 19 nt, Artificial Sequence
  Description of Artificial Sequence: Synthetic oligonucleotide
aaacgaugcccauacgggg

SEQ ID NO: 1784222 - RNA, 19 nt, Artificial Sequence
  Description of Artificial Sequence: Synthetic oligonucleotide
uguacaauucacuacacuu

SEQ ID NO: 1784223 - RNA, 19 nt, Artificial Sequence
  Description of Artificial Sequence: Synthetic oligonucleotide
uguugcauagcccaggguc

SEQ ID NO: 1784224 - RNA, 19 nt, Artificial Sequence
  Description of Artificial Sequence: Synthetic oligonucleotide
uuuauggaaagacgcagca

SEQ ID NO: 1784225 - RNA, 19 nt, Artificial Sequence
  Description of Artificial Sequence: Synthetic oligonucleotide
aaaggaaaaucgaaucuuc

SEQ ID NO: 1784226 - RNA, 19 nt, Artificial Sequence
  Description of Artificial Sequence: Synthetic oligonucleotide
aggucauuauuacaacagc

SEQ ID NO: 1784227 - RNA, 19 nt, Artificial Sequence
  Description of Artificial Sequence: Synthetic oligonucleotide
ugaaauguauacagggugu

SEQ ID NO: 1784228 - RNA, 19 nt, Artificial Sequence
  Description of Artificial Sequence: Synthetic oligonucleotide
ugcagauagaccaggaaac

SEQ ID NO: 1784229 - RNA, 19 nt, Artificial Sequence
  Description of Artificial Sequence: Synthetic oligonucleotide
uaucucuccccaaagaccu

SEQ ID NO: 1784230 - RNA, 19 nt, Artificial Sequence
  Description of Artificial Sequence: Synthetic oligonucleotide
ugucagggcacuaucgggg

SEQ ID NO: 1784231 - RNA, 19 nt, Artificial Sequence
  Description of Artificial Sequence: Synthetic oligonucleotide
auguaaaccuuucuuuccg

SEQ ID NO: 1784232 - RNA, 19 nt, Artificial Sequence
  Description of Artificial Sequence: Synthetic oligonucleotide
uugacuguaaaggaaagac

SEQ ID NO: 1784233 - RNA, 19 nt, Artificial Sequence
  Description of Artificial Sequence: Synthetic oligonucleotide
gauuuauggaaagacgcag

SEQ ID NO: 1784234 - RNA, 19 nt, Artificial Sequence
  Description of Artificial Sequence: Synthetic oligonucleotide
uuucuuuccguuucccacg

SEQ ID NO: 1784235 - RNA, 19 nt, Artificial Sequence
  Description of Artificial Sequence: Synthetic oligonucleotide
gaaacgaugcccauacggg

SEQ ID NO: 1784236 - RNA, 19 nt, Artificial Sequence
  Description of Artificial Sequence: Synthetic oligonucleotide
cuaaccaugcauacaaaac

SEQ ID NO: 1784237 - RNA, 19 nt, Artificial Sequence
  Description of Artificial Sequence: Synthetic oligonucleotide
aauucacuacacuuccucu

SEQ ID NO: 1784238 - RNA, 19 nt, Artificial Sequence
  Description of Artificial Sequence: Synthetic oligonucleotide
ucugaaauguauacagggu

SEQ ID NO: 1784239 - RNA, 19 nt, Artificial Sequence
  Description of Artificial Sequence: Synthetic oligonucleotide
cugaaauguauacagggug

SEQ ID NO: 1784240 - RNA, 19 nt, Artificial Sequence
  Description of Artificial Sequence: Synthetic oligonucleotide
ugacuguaaaggaaagacc

SEQ ID NO: 1784241 - RNA, 19 nt, Artificial Sequence
  Description of Artificial Sequence: Synthetic oligonucleotide
uacacuuccucuuauaauu

SEQ ID NO: 1784242 - RNA, 19 nt, Artificial Sequence
  Description of Artificial Sequence: Synthetic oligonucleotide
ugugccaaagccauguaaa

SEQ ID NO: 1784243 - RNA, 19 nt, Artificial Sequence
  Description of Artificial Sequence: Synthetic oligonucleotide
uccugcugacuucugaggg

SEQ ID NO: 1784244 - RNA, 19 nt, Artificial Sequence
  Description of Artificial Sequence: Synthetic oligonucleotide
cauugguuaaagcugguug

SEQ ID NO: 1784245 - RNA, 19 nt, Artificial Sequence
  Description of Artificial Sequence: Synthetic oligonucleotide
ucuggacuuggaaacagug

SEQ ID NO: 1784246 - RNA, 19 nt, Artificial Sequence
  Description of Artificial Sequence: Synthetic oligonucleotide
auuuauggaaagacgcagc

SEQ ID NO: 1784247 - RNA, 19 nt, Artificial Sequence
  Description of Artificial Sequence: Synthetic oligonucleotide
ggaaacgaugcccauacgg

SEQ ID NO: 1784248 - RNA, 19 nt, Artificial Sequence
  Description of Artificial Sequence: Synthetic oligonucleotide
gaggcagcgagagauaccg

SEQ ID NO: 1784249 - RNA, 19 nt, Artificial Sequence
  Description of Artificial Sequence: Synthetic oligonucleotide
ucuaaccaugcauacaaaa

SEQ ID NO: 1784250 - RNA, 19 nt, Artificial Sequence
  Description of Artificial Sequence: Synthetic oligonucleotide
cagggcaagggaaucaugg

SEQ ID NO: 1784251 - RNA, 19 nt, Artificial Sequence
  Description of Artificial Sequence: Synthetic oligonucleotide
cuaucucuccccaaagacc

SEQ ID NO: 1784252 - RNA, 19 nt, Artificial Sequence
  Description of Artificial Sequence: Synthetic oligonucleotide
uggguuguugcauagccca

SEQ ID NO: 1784253 - RNA, 19 nt, Artificial Sequence
  Description of Artificial Sequence: Synthetic oligonucleotide
uccgguauggcuguagcgg

SEQ ID NO: 1784254 - RNA, 19 nt, Artificial Sequence
  Description of Artificial Sequence: Synthetic oligonucleotide
aaagacgcagcagaggccu

SEQ ID NO: 1784255 - RNA, 19 nt, Artificial Sequence
  Description of Artificial Sequence: Synthetic oligonucleotide
aaagccauguaaaccuuuc

SEQ ID NO: 1784256 - RNA, 19 nt, Artificial Sequence
  Description of Artificial Sequence: Synthetic oligonucleotide
auaggucauuauuacaaca

SEQ ID NO: 1784257 - RNA, 19 nt, Artificial Sequence
  Description of Artificial Sequence: Synthetic oligonucleotide
augcccgagaaccucaggg

SEQ ID NO: 1784258 - RNA, 19 nt, Artificial Sequence
  Description of Artificial Sequence: Synthetic oligonucleotide
auagaccaggaaacgaugc

SEQ ID NO: 1784259 - RNA, 19 nt, Artificial Sequence
  Description of Artificial Sequence: Synthetic oligonucleotide
ugacuugccguccaguccu

SEQ ID NO: 1784260 - RNA, 19 nt, Artificial Sequence
  Description of Artificial Sequence: Synthetic oligonucleotide
ugacccugcgggaagggcg

SEQ ID NO: 1784261 - RNA, 19 nt, Artificial Sequence
  Description of Artificial Sequence: Synthetic oligonucleotide
ggaaagacgcagcagaggc

SEQ ID NO: 1784262 - RNA, 19 nt, Artificial Sequence
  Description of Artificial Sequence: Synthetic oligonucleotide
aaagaccaucaagagagug

SEQ ID NO: 1784263 - RNA, 19 nt, Artificial Sequence
  Description of Artificial Sequence: Synthetic oligonucleotide
uacaacagcuguacaauuc

SEQ ID NO: 1784264 - RNA, 19 nt, Artificial Sequence
  Description of Artificial Sequence: Synthetic oligonucleotide
auuagaaauaggucauuau

SEQ ID NO: 1784265 - RNA, 19 nt, Artificial Sequence
  Description of Artificial Sequence: Synthetic oligonucleotide
ugugcucucucccggaggc

SEQ ID NO: 1784266 - RNA, 19 nt, Artificial Sequence
  Description of Artificial Sequence: Synthetic oligonucleotide
agggccgcacuccagacac

SEQ ID NO: 1784267 - RNA, 19 nt, Artificial Sequence
  Description of Artificial Sequence: Synthetic oligonucleotide
caucaagagagugaaggcc

SEQ ID NO: 1784268 - RNA, 19 nt, Artificial Sequence
  Description of Artificial Sequence: Synthetic oligonucleotide
cacaugacugguuucccgg

SEQ ID NO: 1784269 - RNA, 19 nt, Artificial Sequence
  Description of Artificial Sequence: Synthetic oligonucleotide
agggcaagggaaucauggc

SEQ ID NO: 1784270 - RNA, 19 nt, Artificial Sequence
  Description of Artificial Sequence: Synthetic oligonucleotide
uucuuuccguuucccacgg

SEQ ID NO: 1784271 - RNA, 19 nt, Artificial Sequence
  Description of Artificial Sequence: Synthetic oligonucleotide
uguuggugccugcaaguag

SEQ ID NO: 1784272 - RNA, 19 nt, Artificial Sequence
  Description of Artificial Sequence: Synthetic oligonucleotide
cuuuccguuucccacggcc

SEQ ID NO: 1784273 - RNA, 19 nt, Artificial Sequence
  Description of Artificial Sequence: Synthetic oligonucleotide
guuguugcauagcccaggg

SEQ ID NO: 1784274 - RNA, 19 nt, Artificial Sequence
  Description of Artificial Sequence: Synthetic oligonucleotide
aggaaagaccaucaagaga

SEQ ID NO: 1784275 - RNA, 19 nt, Artificial Sequence
  Description of Artificial Sequence: Synthetic oligonucleotide
uuauuacaacagcuguaca

SEQ ID NO: 1784276 - RNA, 19 nt, Artificial Sequence
  Description of Artificial Sequence: Synthetic oligonucleotide
aguaguguggugucugcug

SEQ ID NO: 1784277 - RNA, 19 nt, Artificial Sequence
  Description of Artificial Sequence: Synthetic oligonucleotide
uugacuugccguccagucc

SEQ ID NO: 1784278 - RNA, 19 nt, Artificial Sequence
  Description of Artificial Sequence: Synthetic oligonucleotide
ugcauuuugaaaggaaaau

SEQ ID NO: 1784279 - RNA, 19 nt, Artificial Sequence
  Description of Artificial Sequence: Synthetic oligonucleotide
aagagagugaaggccagcu

SEQ ID NO: 1784280 - RNA, 19 nt, Artificial Sequence
  Description of Artificial Sequence: Synthetic oligonucleotide
uauuagaaauaggucauua

SEQ ID NO: 1784281 - RNA, 19 nt, Artificial Sequence
  Description of Artificial Sequence: Synthetic oligonucleotide
ucaagagagugaaggccag

SEQ ID NO: 1784282 - RNA, 19 nt, Artificial Sequence
  Description of Artificial Sequence: Synthetic oligonucleotide
acagcuguacaauucacua

SEQ ID NO: 1784283 - RNA, 19 nt, Artificial Sequence
  Description of Artificial Sequence: Synthetic oligonucleotide
gaaauguauacagggugug

SEQ ID NO: 1784284 - RNA, 19 nt, Artificial Sequence
  Description of Artificial Sequence: Synthetic oligonucleotide
uagcggaugcccgagaacc

SEQ ID NO: 1784285 - RNA, 19 nt, Artificial Sequence
  Description of Artificial Sequence: Synthetic oligonucleotide
auuuugaaaggaaaaucga

SEQ ID NO: 1784286 - RNA, 19 nt, Artificial Sequence
  Description of Artificial Sequence: Synthetic oligonucleotide
ggaaaaucgaaucuucaga

SEQ ID NO: 1784287 - RNA, 19 nt, Artificial Sequence
  Description of Artificial Sequence: Synthetic oligonucleotide
caauucacuacacuuccuc

SEQ ID NO: 1784288 - RNA, 19 nt, Artificial Sequence
  Description of Artificial Sequence: Synthetic oligonucleotide
ugucagucgguagaguacc

SEQ ID NO: 1784289 - RNA, 19 nt, Artificial Sequence
  Description of Artificial Sequence: Synthetic oligonucleotide
ggaagauuuauggaaagac

SEQ ID NO: 1784290 - RNA, 19 nt, Artificial Sequence
  Description of Artificial Sequence: Synthetic oligonucleotide
aaagcugguugccucugga

SEQ ID NO: 1784291 - RNA, 19 nt, Artificial Sequence
  Description of Artificial Sequence: Synthetic oligonucleotide
auacagggugugccaaagc

SEQ ID NO: 1784292 - RNA, 19 nt, Artificial Sequence
  Description of Artificial Sequence: Synthetic oligonucleotide
ccaaagaccucuaacuuag

SEQ ID NO: 1784293 - RNA, 19 nt, Artificial Sequence
  Description of Artificial Sequence: Synthetic oligonucleotide
uugucagucgguagaguac

SEQ ID NO: 1784294 - RNA, 19 nt, Artificial Sequence
  Description of Artificial Sequence: Synthetic oligonucleotide
uacuucuaaccaugcauac

SEQ ID NO: 1784295 - RNA, 19 nt, Artificial Sequence
  Description of Artificial Sequence: Synthetic oligonucleotide
uuauggaaagacgcagcag

SEQ ID NO: 1784296 - RNA, 19 nt, Artificial Sequence
  Description of Artificial Sequence: Synthetic oligonucleotide
aaggaaaaucgaaucuuca

SEQ ID NO: 1784297 - RNA, 19 nt, Artificial Sequence
  Description of Artificial Sequence: Synthetic oligonucleotide
aagcgugggguggagcacc

SEQ ID NO: 1784298 - RNA, 19 nt, Artificial Sequence
  Description of Artificial Sequence: Synthetic oligonucleotide
ugccgaucaugacugaagu

SEQ ID NO: 1784299 - RNA, 19 nt, Artificial Sequence
  Description of Artificial Sequence: Synthetic oligonucleotide
acauaaaaucuucucuuua

SEQ ID NO: 1784300 - RNA, 19 nt, Artificial Sequence
  Description of Artificial Sequence: Synthetic oligonucleotide
auagggaguucugaaaugu

SEQ ID NO: 1784301 - RNA, 19 nt, Artificial Sequence
  Description of Artificial Sequence: Synthetic oligonucleotide
ugggacguggggaagcgug

SEQ ID NO: 1784302 - RNA, 19 nt, Artificial Sequence
  Description of Artificial Sequence: Synthetic oligonucleotide
ucgucagggaagauuuaug

SEQ ID NO: 1784303 - RNA, 19 nt, Artificial Sequence
  Description of Artificial Sequence: Synthetic oligonucleotide
ucacugugcagagauguug

SEQ ID NO: 1784304 - RNA, 19 nt, Artificial Sequence
  Description of Artificial Sequence: Synthetic oligonucleotide
uucacuacacuuccucuua

SEQ ID NO: 1784305 - RNA, 19 nt, Artificial Sequence
  Description of Artificial Sequence: Synthetic oligonucleotide
ucagaaucgucagggaaga

SEQ ID NO: 1784306 - RNA, 19 nt, Artificial Sequence
  Description of Artificial Sequence: Synthetic oligonucleotide
aagccauguaaaccuuucu

SEQ ID NO: 1784307 - RNA, 19 nt, Artificial Sequence
  Description of Artificial Sequence: Synthetic oligonucleotide
uggauaggcuggcucagca

SEQ ID NO: 1784308 - RNA, 19 nt, Artificial Sequence
  Description of Artificial Sequence: Synthetic oligonucleotide
guaguguggugucugcugc

SEQ ID NO: 1784309 - RNA, 19 nt, Artificial Sequence
  Description of Artificial Sequence: Synthetic oligonucleotide
gaaacaguggccuggcucu

SEQ ID NO: 1784310 - RNA, 19 nt, Artificial Sequence
  Description of Artificial Sequence: Synthetic oligonucleotide
uugguuaaagcugguugcc

SEQ ID NO: 1784311 - RNA, 19 nt, Artificial Sequence
  Description of Artificial Sequence: Synthetic oligonucleotide
ggaguucugaaauguauac

SEQ ID NO: 1784312 - RNA, 19 nt, Artificial Sequence
  Description of Artificial Sequence: Synthetic oligonucleotide
aucaagagagugaaggcca

SEQ ID NO: 1784313 - RNA, 19 nt, Artificial Sequence
  Description of Artificial Sequence: Synthetic oligonucleotide
cagacacguuaccauaggg

SEQ ID NO: 1784314 - RNA, 19 nt, Artificial Sequence
  Description of Artificial Sequence: Synthetic oligonucleotide
cagucgguagaguacccgg

SEQ ID NO: 1784315 - RNA, 19 nt, Artificial Sequence
  Description of Artificial Sequence: Synthetic oligonucleotide
cuugacuugccguccaguc

SEQ ID NO: 1784316 - RNA, 19 nt, Artificial Sequence
  Description of Artificial Sequence: Synthetic oligonucleotide
ggugccugcaaguagugug

SEQ ID NO: 1784317 - RNA, 19 nt, Artificial Sequence
  Description of Artificial Sequence: Synthetic oligonucleotide
ucagucgguagaguacccg

SEQ ID NO: 1784318 - RNA, 19 nt, Artificial Sequence
  Description of Artificial Sequence: Synthetic oligonucleotide
uguagcggaugcccgagaa

SEQ ID NO: 1784319 - RNA, 19 nt, Artificial Sequence
  Description of Artificial Sequence: Synthetic oligonucleotide
cagugucagggcacuaucg

SEQ ID NO: 1784320 - RNA, 19 nt, Artificial Sequence
  Description of Artificial Sequence: Synthetic oligonucleotide
caggacccgggcaucaugg

SEQ ID NO: 1784321 - RNA, 19 nt, Artificial Sequence
  Description of Artificial Sequence: Synthetic oligonucleotide
aagggaaucauggccagua

SEQ ID NO: 1784322 - RNA, 19 nt, Artificial Sequence
  Description of Artificial Sequence: Synthetic oligonucleotide
agauuuauggaaagacgca

SEQ ID NO: 1784323 - RNA, 19 nt, Artificial Sequence
  Description of Artificial Sequence: Synthetic oligonucleotide
auaccgccucugcagauag

SEQ ID NO: 1784324 - RNA, 19 nt, Artificial Sequence
  Description of Artificial Sequence: Synthetic oligonucleotide
auguauacagggugugcca

SEQ ID NO: 1784325 - RNA, 19 nt, Artificial Sequence
  Description of Artificial Sequence: Synthetic oligonucleotide
ugugcguacuugacuugcc

SEQ ID NO: 1784326 - RNA, 19 nt, Artificial Sequence
  Description of Artificial Sequence: Synthetic oligonucleotide
auucacuacacuuccucuu

SEQ ID NO: 1784327 - RNA, 19 nt, Artificial Sequence
  Description of Artificial Sequence: Synthetic oligonucleotide
gaucaugacugaagucagg

SEQ ID NO: 1784328 - RNA, 19 nt, Artificial Sequence
  Description of Artificial Sequence: Synthetic oligonucleotide
ugcguacuugacuugccgu

SEQ ID NO: 1784329 - RNA, 19 nt, Artificial Sequence
  Description of Artificial Sequence: Synthetic oligonucleotide
ugcccgagaaccucagggc

SEQ ID NO: 1784330 - RNA, 19 nt, Artificial Sequence
  Description of Artificial Sequence: Synthetic oligonucleotide
gacucugacagccggcuga

SEQ ID NO: 1784331 - RNA, 19 nt, Artificial Sequence
  Description of Artificial Sequence: Synthetic oligonucleotide
agccauguaaaccuuucuu

SEQ ID NO: 1784332 - RNA, 19 nt, Artificial Sequence
  Description of Artificial Sequence: Synthetic oligonucleotide
gugcguacuugacuugccg

SEQ ID NO: 1784333 - RNA, 19 nt, Artificial Sequence
  Description of Artificial Sequence: Synthetic oligonucleotide
agcacaugacugguuuccc

SEQ ID NO: 1784334 - RNA, 19 nt, Artificial Sequence
  Description of Artificial Sequence: Synthetic oligonucleotide
agaccaucaagagagugaa

SEQ ID NO: 1784335 - RNA, 19 nt, Artificial Sequence
  Description of Artificial Sequence: Synthetic oligonucleotide
agauagaccaggaaacgau

SEQ ID NO: 1784336 - RNA, 19 nt, Artificial Sequence
  Description of Artificial Sequence: Synthetic oligonucleotide
aacuuaguccuugacugua

SEQ ID NO: 1784337 - RNA, 19 nt, Artificial Sequence
  Description of Artificial Sequence: Synthetic oligonucleotide
cuggguuguugcauagccc

SEQ ID NO: 1784338 - RNA, 19 nt, Artificial Sequence
  Description of Artificial Sequence: Synthetic oligonucleotide
ucgguagaguacccggugu

SEQ ID NO: 1784339 - RNA, 19 nt, Artificial Sequence
  Description of Artificial Sequence: Synthetic oligonucleotide
cacuuccucuuauaauuac

SEQ ID NO: 1784340 - RNA, 19 nt, Artificial Sequence
  Description of Artificial Sequence: Synthetic oligonucleotide
acuccagacacguuaccau

SEQ ID NO: 1784341 - RNA, 19 nt, Artificial Sequence
  Description of Artificial Sequence: Synthetic oligonucleotide
gaccuuugucagucgguag

SEQ ID NO: 1784342 - RNA, 19 nt, Artificial Sequence
  Description of Artificial Sequence: Synthetic oligonucleotide
caaguaguguggugucugc

SEQ ID NO: 1784343 - RNA, 19 nt, Artificial Sequence
  Description of Artificial Sequence: Synthetic oligonucleotide
uguauacagggugugccaa

SEQ ID NO: 1784344 - RNA, 19 nt, Artificial Sequence
  Description of Artificial Sequence: Synthetic oligonucleotide
aggccuuaccaggauggcc

SEQ ID NO: 1784345 - RNA, 19 nt, Artificial Sequence
  Description of Artificial Sequence: Synthetic oligonucleotide
gcuggguuguugcauagcc

SEQ ID NO: 1784346 - RNA, 19 nt, Artificial Sequence
  Description of Artificial Sequence: Synthetic oligonucleotide
cgucagggaagauuuaugg

SEQ ID NO: 1784347 - RNA, 19 nt, Artificial Sequence
  Description of Artificial Sequence: Synthetic oligonucleotide
gacuucugagggcugccug

SEQ ID NO: 1784348 - RNA, 19 nt, Artificial Sequence
  Description of Artificial Sequence: Synthetic oligonucleotide
cuaucgggguggcugcugg

SEQ ID NO: 1784349 - RNA, 19 nt, Artificial Sequence
  Description of Artificial Sequence: Synthetic oligonucleotide
gaaagacgcagcagaggcc

SEQ ID NO: 1784350 - RNA, 19 nt, Artificial Sequence
  Description of Artificial Sequence: Synthetic oligonucleotide
accucuaacuuaguccuug

SEQ ID NO: 1784351 - RNA, 19 nt, Artificial Sequence
  Description of Artificial Sequence: Synthetic oligonucleotide
ucugugcguacuugacuug

SEQ ID NO: 1784352 - RNA, 19 nt, Artificial Sequence
  Description of Artificial Sequence: Synthetic oligonucleotide
ugcgagucuggacuuggaa

SEQ ID NO: 1784353 - RNA, 19 nt, Artificial Sequence
  Description of Artificial Sequence: Synthetic oligonucleotide
uuccucuuauaauuacaua

SEQ ID NO: 1784354 - RNA, 19 nt, Artificial Sequence
  Description of Artificial Sequence: Synthetic oligonucleotide
ggcagcgagagauaccgcc

SEQ ID NO: 1784355 - RNA, 19 nt, Artificial Sequence
  Description of Artificial Sequence: Synthetic oligonucleotide
agaaucgucagggaagauu

SEQ ID NO: 1784356 - RNA, 19 nt, Artificial Sequence
  Description of Artificial Sequence: Synthetic oligonucleotide
auacuucuaaccaugcaua

SEQ ID NO: 1784357 - RNA, 19 nt, Artificial Sequence
  Description of Artificial Sequence: Synthetic oligonucleotide
uacuugacuugccguccag

SEQ ID NO: 1784358 - RNA, 19 nt, Artificial Sequence
  Description of Artificial Sequence: Synthetic oligonucleotide
guuaccauagggaguucug

SEQ ID NO: 1784359 - RNA, 19 nt, Artificial Sequence
  Description of Artificial Sequence: Synthetic oligonucleotide
caacagcuguacaauucac

SEQ ID NO: 1784360 - RNA, 19 nt, Artificial Sequence
  Description of Artificial Sequence: Synthetic oligonucleotide
aaguaguguggugucugcu

SEQ ID NO: 1784361 - RNA, 19 nt, Artificial Sequence
  Description of Artificial Sequence: Synthetic oligonucleotide
gggcaagggaaucauggcc

SEQ ID NO: 1784362 - RNA, 19 nt, Artificial Sequence
  Description of Artificial Sequence: Synthetic oligonucleotide
uggugucugcugcugcgcc

SEQ ID NO: 1784363 - RNA, 19 nt, Artificial Sequence
  Description of Artificial Sequence: Synthetic oligonucleotide
caggacgagggguggaggc

SEQ ID NO: 1784364 - RNA, 19 nt, Artificial Sequence
  Description of Artificial Sequence: Synthetic oligonucleotide
acuucuaaccaugcauaca

SEQ ID NO: 1784365 - RNA, 19 nt, Artificial Sequence
  Description of Artificial Sequence: Synthetic oligonucleotide
gugccugcaaguagugugg

SEQ ID NO: 1784366 - RNA, 19 nt, Artificial Sequence
  Description of Artificial Sequence: Synthetic oligonucleotide
gaugcccgagaaccucagg

SEQ ID NO: 1784367 - RNA, 19 nt, Artificial Sequence
  Description of Artificial Sequence: Synthetic oligonucleotide
ccagcuagggcuugggacc

SEQ ID NO: 1784368 - RNA, 19 nt, Artificial Sequence
  Description of Artificial Sequence: Synthetic oligonucleotide
gacguggggaagcgugggg

SEQ ID NO: 1784369 - RNA, 19 nt, Artificial Sequence
  Description of Artificial Sequence: Synthetic oligonucleotide
cuccccaaagaccucuaac

SEQ ID NO: 1784370 - RNA, 19 nt, Artificial Sequence
  Description of Artificial Sequence: Synthetic oligonucleotide
uggcaucacaggacccggg

SEQ ID NO: 1784371 - RNA, 19 nt, Artificial Sequence
  Description of Artificial Sequence: Synthetic oligonucleotide
uuccguuucccacggccac

SEQ ID NO: 1784372 - RNA, 19 nt, Artificial Sequence
  Description of Artificial Sequence: Synthetic oligonucleotide
gagauaccgccucugcaga

SEQ ID NO: 1784373 - RNA, 19 nt, Artificial Sequence
  Description of Artificial Sequence: Synthetic oligonucleotide
cucuaacuuaguccuugac

SEQ ID NO: 1784374 - RNA, 19 nt, Artificial Sequence
  Description of Artificial Sequence: Synthetic oligonucleotide
gguuaaagcugguugccuc

SEQ ID NO: 1784375 - RNA, 19 nt, Artificial Sequence
  Description of Artificial Sequence: Synthetic oligonucleotide
ugcucucucccggaggcag

SEQ ID NO: 1784376 - RNA, 19 nt, Artificial Sequence
  Description of Artificial Sequence: Synthetic oligonucleotide
guauggcuguagcggaugc

SEQ ID NO: 1784377 - RNA, 19 nt, Artificial Sequence
  Description of Artificial Sequence: Synthetic oligonucleotide
gcagauagaccaggaaacg

SEQ ID NO: 1784378 - RNA, 19 nt, Artificial Sequence
  Description of Artificial Sequence: Synthetic oligonucleotide
cuuaccaggauggccagca

SEQ ID NO: 1784379 - RNA, 19 nt, Artificial Sequence
  Description of Artificial Sequence: Synthetic oligonucleotide
gucgguagaguacccggug

SEQ ID NO: 1784380 - RNA, 19 nt, Artificial Sequence
  Description of Artificial Sequence: Synthetic oligonucleotide
uugguuccuguccgguaug

SEQ ID NO: 1784381 - RNA, 19 nt, Artificial Sequence
  Description of Artificial Sequence: Synthetic oligonucleotide
cagggcacuaucggggugg

SEQ ID NO: 1784382 - RNA, 19 nt, Artificial Sequence
  Description of Artificial Sequence: Synthetic oligonucleotide
aggaaacgaugcccauacg

SEQ ID NO: 1784383 - RNA, 19 nt, Artificial Sequence
  Description of Artificial Sequence: Synthetic oligonucleotide
cugugcguacuugacuugc

SEQ ID NO: 1784384 - RNA, 19 nt, Artificial Sequence
  Description of Artificial Sequence: Synthetic oligonucleotide
ugggguggagcaccgccug

SEQ ID NO: 1784385 - RNA, 19 nt, Artificial Sequence
  Description of Artificial Sequence: Synthetic oligonucleotide
ucacuacacuuccucuuau

SEQ ID NO: 1784386 - RNA, 19 nt, Artificial Sequence
  Description of Artificial Sequence: Synthetic oligonucleotide
uagggaguucugaaaugua

SEQ ID NO: 1784387 - RNA, 19 nt, Artificial Sequence
  Description of Artificial Sequence: Synthetic oligonucleotide
ugguuccuguccgguaugg

SEQ ID NO: 1784388 - RNA, 19 nt, Artificial Sequence
  Description of Artificial Sequence: Synthetic oligonucleotide
ggcacuaucgggguggcug

SEQ ID NO: 1784389 - RNA, 19 nt, Artificial Sequence
  Description of Artificial Sequence: Synthetic oligonucleotide
guaaggcucaggccuggug

SEQ ID NO: 1784390 - RNA, 19 nt, Artificial Sequence
  Description of Artificial Sequence: Synthetic oligonucleotide
uccauugguuaaagcuggu

SEQ ID NO: 1784391 - RNA, 19 nt, Artificial Sequence
  Description of Artificial Sequence: Synthetic oligonucleotide
caauacuucuaaccaugca

SEQ ID NO: 1784392 - RNA, 19 nt, Artificial Sequence
  Description of Artificial Sequence: Synthetic oligonucleotide
agaguacccggugugcucu

SEQ ID NO: 1784393 - RNA, 19 nt, Artificial Sequence
  Description of Artificial Sequence: Synthetic oligonucleotide
aucagcaggacgaggggug

SEQ ID NO: 1784394 - RNA, 19 nt, Artificial Sequence
  Description of Artificial Sequence: Synthetic oligonucleotide
cuuccucuuauaauuacau

SEQ ID NO: 1784395 - RNA, 19 nt, Artificial Sequence
  Description of Artificial Sequence: Synthetic oligonucleotide
ucagggcacuaucggggug

SEQ ID NO: 1784396 - RNA, 19 nt, Artificial Sequence
  Description of Artificial Sequence: Synthetic oligonucleotide
gacuuggaaacaguggccu

SEQ ID NO: 1784397 - RNA, 19 nt, Artificial Sequence
  Description of Artificial Sequence: Synthetic oligonucleotide
gcacaugacugguuucccg

SEQ ID NO: 1784398 - RNA, 19 nt, Artificial Sequence
  Description of Artificial Sequence: Synthetic oligonucleotide
aucgucagggaagauuuau

SEQ ID NO: 1784399 - RNA, 19 nt, Artificial Sequence
  Description of Artificial Sequence: Synthetic oligonucleotide
agccugcucucucuaucuc

SEQ ID NO: 1784400 - RNA, 19 nt, Artificial Sequence
  Description of Artificial Sequence: Synthetic oligonucleotide
guauuccugcucucucccc

SEQ ID NO: 1784401 - RNA, 19 nt, Artificial Sequence
  Description of Artificial Sequence: Synthetic oligonucleotide
uacccggugugcucucucc

SEQ ID NO: 1784402 - RNA, 19 nt, Artificial Sequence
  Description of Artificial Sequence: Synthetic oligonucleotide
caggauggccagcacauga

SEQ ID NO: 1784403 - RNA, 19 nt, Artificial Sequence
  Description of Artificial Sequence: Synthetic oligonucleotide
uggcauccugagagguggg

SEQ ID NO: 1784404 - RNA, 19 nt, Artificial Sequence
  Description of Artificial Sequence: Synthetic oligonucleotide
uugcauagcccaggguccc

SEQ ID NO: 1784405 - RNA, 19 nt, Artificial Sequence
  Description of Artificial Sequence: Synthetic oligonucleotide
acugugcagagauguuggu

SEQ ID NO: 1784406 - RNA, 19 nt, Artificial Sequence
  Description of Artificial Sequence: Synthetic oligonucleotide
ugcaaguaguguggugucu

SEQ ID NO: 1784407 - RNA, 19 nt, Artificial Sequence
  Description of Artificial Sequence: Synthetic oligonucleotide
cuggcacuggcuggcaucc

SEQ ID NO: 1784408 - RNA, 19 nt, Artificial Sequence
  Description of Artificial Sequence: Synthetic oligonucleotide
cugcaaguagugugguguc

SEQ ID NO: 1784409 - RNA, 19 nt, Artificial Sequence
  Description of Artificial Sequence: Synthetic oligonucleotide
aggacccgggcaucauggg

SEQ ID NO: 1784410 - RNA, 19 nt, Artificial Sequence
  Description of Artificial Sequence: Synthetic oligonucleotide
agagaaggagcgaguccgg

SEQ ID NO: 1784411 - RNA, 19 nt, Artificial Sequence
  Description of Artificial Sequence: Synthetic oligonucleotide
ucccgggcugcugagagaa

SEQ ID NO: 1784412 - RNA, 19 nt, Artificial Sequence
  Description of Artificial Sequence: Synthetic oligonucleotide
ggcaagggaaucauggcca

SEQ ID NO: 1784413 - RNA, 19 nt, Artificial Sequence
  Description of Artificial Sequence: Synthetic oligonucleotide
uccuguccgguauggcugu

SEQ ID NO: 1784414 - RNA, 19 nt, Artificial Sequence
  Description of Artificial Sequence: Synthetic oligonucleotide
guuccuguccgguauggcu

SEQ ID NO: 1784415 - RNA, 19 nt, Artificial Sequence
  Description of Artificial Sequence: Synthetic oligonucleotide
cagauagaccaggaaacga

SEQ ID NO: 1784416 - RNA, 19 nt, Artificial Sequence
  Description of Artificial Sequence: Synthetic oligonucleotide
agcgagagauaccgccucu

SEQ ID NO: 1784417 - RNA, 19 nt, Artificial Sequence
  Description of Artificial Sequence: Synthetic oligonucleotide
aucacaggacccgggcauc

SEQ ID NO: 1784418 - RNA, 19 nt, Artificial Sequence
  Description of Artificial Sequence: Synthetic oligonucleotide
ccucuuauaauuacauaaa

SEQ ID NO: 1784419 - RNA, 19 nt, Artificial Sequence
  Description of Artificial Sequence: Synthetic oligonucleotide
aggacucugacagccggcu

SEQ ID NO: 1784420 - RNA, 19 nt, Artificial Sequence
  Description of Artificial Sequence: Synthetic oligonucleotide
aaacaguggccuggcucug

SEQ ID NO: 1784421 - RNA, 19 nt, Artificial Sequence
  Description of Artificial Sequence: Synthetic oligonucleotide
ggcaucacaggacccgggc

SEQ ID NO: 1784422 - RNA, 19 nt, Artificial Sequence
  Description of Artificial Sequence: Synthetic oligonucleotide
ucuuuccguuucccacggc

SEQ ID NO: 1784423 - RNA, 19 nt, Artificial Sequence
  Description of Artificial Sequence: Synthetic oligonucleotide
guagcggaugcccgagaac

SEQ ID NO: 1784424 - RNA, 19 nt, Artificial Sequence
  Description of Artificial Sequence: Synthetic oligonucleotide
ccaugcauacaaaacaaua

SEQ ID NO: 1784425 - RNA, 19 nt, Artificial Sequence
  Description of Artificial Sequence: Synthetic oligonucleotide
ucucucuaucucuccccaa

SEQ ID NO: 1784426 - RNA, 19 nt, Artificial Sequence
  Description of Artificial Sequence: Synthetic oligonucleotide
gggcacuugguuccugucc

SEQ ID NO: 1784427 - RNA, 19 nt, Artificial Sequence
  Description of Artificial Sequence: Synthetic oligonucleotide
cuuaguccuugacuguaaa

SEQ ID NO: 1784428 - RNA, 19 nt, Artificial Sequence
  Description of Artificial Sequence: Synthetic oligonucleotide
agcaggacgagggguggag

SEQ ID NO: 1784429 - RNA, 19 nt, Artificial Sequence
  Description of Artificial Sequence: Synthetic oligonucleotide
ggacuuggaaacaguggcc

SEQ ID NO: 1784430 - RNA, 19 nt, Artificial Sequence
  Description of Artificial Sequence: Synthetic oligonucleotide
gcaaguaguguggugucug

SEQ ID NO: 1784431 - RNA, 19 nt, Artificial Sequence
  Description of Artificial Sequence: Synthetic oligonucleotide
acaauucacuacacuuccu

SEQ ID NO: 1784432 - RNA, 19 nt, Artificial Sequence
  Description of Artificial Sequence: Synthetic oligonucleotide
aucgggguggcugcuggag

SEQ ID NO: 1784433 - RNA, 19 nt, Artificial Sequence
  Description of Artificial Sequence: Synthetic oligonucleotide
acacguuaccauagggagu

SEQ ID NO: 1784434 - RNA, 19 nt, Artificial Sequence
  Description of Artificial Sequence: Synthetic oligonucleotide
acuugccguccaguccugc

SEQ ID NO: 1784435 - RNA, 19 nt, Artificial Sequence
  Description of Artificial Sequence: Synthetic oligonucleotide
guacuugacuugccgucca

SEQ ID NO: 1784436 - RNA, 19 nt, Artificial Sequence
  Description of Artificial Sequence: Synthetic oligonucleotide
cucucucccggaggcagcg

SEQ ID NO: 1784437 - RNA, 19 nt, Artificial Sequence
  Description of Artificial Sequence: Synthetic oligonucleotide
cugguugccucuggacucc

SEQ ID NO: 1784438 - RNA, 19 nt, Artificial Sequence
  Description of Artificial Sequence: Synthetic oligonucleotide
agggaaucauggccaguau

SEQ ID NO: 1784439 - RNA, 19 nt, Artificial Sequence
  Description of Artificial Sequence: Synthetic oligonucleotide
ggccuuaccaggauggcca

SEQ ID NO: 1784440 - RNA, 19 nt, Artificial Sequence
  Description of Artificial Sequence: Synthetic oligonucleotide
ggugcgagucuggacuugg

SEQ ID NO: 1784441 - RNA, 19 nt, Artificial Sequence
  Description of Artificial Sequence: Synthetic oligonucleotide
cgaucaugacugaagucag

SEQ ID NO: 1784442 - RNA, 19 nt, Artificial Sequence
  Description of Artificial Sequence: Synthetic oligonucleotide
cagggugcgagucuggacu

SEQ ID NO: 1784443 - RNA, 19 nt, Artificial Sequence
  Description of Artificial Sequence: Synthetic oligonucleotide
caguggugauggcugggac

SEQ ID NO: 1784444 - RNA, 19 nt, Artificial Sequence
  Description of Artificial Sequence: Synthetic oligonucleotide
cugagggcugccuggcauc

SEQ ID NO: 1784445 - RNA, 19 nt, Artificial Sequence
  Description of Artificial Sequence: Synthetic oligonucleotide
guauacagggugugccaaa

SEQ ID NO: 1784446 - RNA, 19 nt, Artificial Sequence
  Description of Artificial Sequence: Synthetic oligonucleotide
ucacaggacccgggcauca

SEQ ID NO: 1784447 - RNA, 19 nt, Artificial Sequence
  Description of Artificial Sequence: Synthetic oligonucleotide
cucugugcguacuugacuu

SEQ ID NO: 1784448 - RNA, 19 nt, Artificial Sequence
  Description of Artificial Sequence: Synthetic oligonucleotide
gaggccuuaccaggauggc

SEQ ID NO: 1784449 - RNA, 19 nt, Artificial Sequence
  Description of Artificial Sequence: Synthetic oligonucleotide
acguggggaagcguggggu

SEQ ID NO: 1784450 - RNA, 19 nt, Artificial Sequence
  Description of Artificial Sequence: Synthetic oligonucleotide
agucgguagaguacccggu

SEQ ID NO: 1784451 - RNA, 19 nt, Artificial Sequence
  Description of Artificial Sequence: Synthetic oligonucleotide
cuacacuuccucuuauaau

SEQ ID NO: 1784452 - RNA, 19 nt, Artificial Sequence
  Description of Artificial Sequence: Synthetic oligonucleotide
caggccuggugggagcacg

SEQ ID NO: 1784453 - RNA, 19 nt, Artificial Sequence
  Description of Artificial Sequence: Synthetic oligonucleotide
agggcacuaucgggguggc

SEQ ID NO: 1784454 - RNA, 19 nt, Artificial Sequence
  Description of Artificial Sequence: Synthetic oligonucleotide
uucugccagggccgcacuc

SEQ ID NO: 1784455 - RNA, 19 nt, Artificial Sequence
  Description of Artificial Sequence: Synthetic oligonucleotide
gguauggcuguagcggaug

SEQ ID NO: 1784456 - RNA, 19 nt, Artificial Sequence
  Description of Artificial Sequence: Synthetic oligonucleotide
gaagcgugggguggagcac

SEQ ID NO: 1784457 - RNA, 19 nt, Artificial Sequence
  Description of Artificial Sequence: Synthetic oligonucleotide
uaucgggguggcugcugga

SEQ ID NO: 1784458 - RNA, 19 nt, Artificial Sequence
  Description of Artificial Sequence: Synthetic oligonucleotide
gcguacuugacuugccguc

SEQ ID NO: 1784459 - RNA, 19 nt, Artificial Sequence
  Description of Artificial Sequence: Synthetic oligonucleotide
gcgagucuggacuuggaaa

SEQ ID NO: 1784460 - RNA, 19 nt, Artificial Sequence
  Description of Artificial Sequence: Synthetic oligonucleotide
gcauccugagaggugggag

SEQ ID NO: 1784461 - RNA, 19 nt, Artificial Sequence
  Description of Artificial Sequence: Synthetic oligonucleotide
ggacccgggcaucaugggc

SEQ ID NO: 1784462 - RNA, 19 nt, Artificial Sequence
  Description of Artificial Sequence: Synthetic oligonucleotide
acuuaguccuugacuguaa

SEQ ID NO: 1784463 - RNA, 19 nt, Artificial Sequence
  Description of Artificial Sequence: Synthetic oligonucleotide
ggcguuggggcuguggcug

SEQ ID NO: 1784464 - RNA, 19 nt, Artificial Sequence
  Description of Artificial Sequence: Synthetic oligonucleotide
acuaucgggguggcugcug

SEQ ID NO: 1784465 - RNA, 19 nt, Artificial Sequence
  Description of Artificial Sequence: Synthetic oligonucleotide
gauaccgccucugcagaua

SEQ ID NO: 1784466 - RNA, 19 nt, Artificial Sequence
  Description of Artificial Sequence: Synthetic oligonucleotide
gcacuaucgggguggcugc

SEQ ID NO: 1784467 - RNA, 19 nt, Artificial Sequence
  Description of Artificial Sequence: Synthetic oligonucleotide
cuguacaauucacuacacu

SEQ ID NO: 1784468 - RNA, 19 nt, Artificial Sequence
  Description of Artificial Sequence: Synthetic oligonucleotide
gcaucaugggcuggauagg

SEQ ID NO: 1784469 - RNA, 19 nt, Artificial Sequence
  Description of Artificial Sequence: Synthetic oligonucleotide
ccuuugucagucgguagag

SEQ ID NO: 1784470 - RNA, 19 nt, Artificial Sequence
  Description of Artificial Sequence: Synthetic oligonucleotide
caccucuuccauugguuaa

SEQ ID NO: 1784471 - RNA, 19 nt, Artificial Sequence
  Description of Artificial Sequence: Synthetic oligonucleotide
gacccgggcaucaugggcu

SEQ ID NO: 1784472 - RNA, 19 nt, Artificial Sequence
  Description of Artificial Sequence: Synthetic oligonucleotide
uggggaagcguggggugga

SEQ ID NO: 1784473 - RNA, 19 nt, Artificial Sequence
  Description of Artificial Sequence: Synthetic oligonucleotide
ugccugcaaguaguguggu

SEQ ID NO: 1784474 - RNA, 19 nt, Artificial Sequence
  Description of Artificial Sequence: Synthetic oligonucleotide
aaucgucagggaagauuua

SEQ ID NO: 1784475 - RNA, 19 nt, Artificial Sequence
  Description of Artificial Sequence: Synthetic oligonucleotide
uggugccugcaaguagugu

SEQ ID NO: 1784476 - RNA, 19 nt, Artificial Sequence
  Description of Artificial Sequence: Synthetic oligonucleotide
uggcugugugggcuggguu

SEQ ID NO: 1784477 - RNA, 19 nt, Artificial Sequence
  Description of Artificial Sequence: Synthetic oligonucleotide
cacguuaccauagggaguu

SEQ ID NO: 1784478 - RNA, 19 nt, Artificial Sequence
  Description of Artificial Sequence: Synthetic oligonucleotide
gucagucgguagaguaccc

SEQ ID NO: 1784479 - RNA, 19 nt, Artificial Sequence
  Description of Artificial Sequence: Synthetic oligonucleotide
ugguuucccggaggacugc

SEQ ID NO: 1784480 - RNA, 19 nt, Artificial Sequence
  Description of Artificial Sequence: Synthetic oligonucleotide
caccgccugccccaucagc

SEQ ID NO: 1784481 - RNA, 19 nt, Artificial Sequence
  Description of Artificial Sequence: Synthetic oligonucleotide
aggacgagggguggaggca

SEQ ID NO: 1784482 - RNA, 19 nt, Artificial Sequence
  Description of Artificial Sequence: Synthetic oligonucleotide
cuguccgguauggcuguag

SEQ ID NO: 1784483 - RNA, 19 nt, Artificial Sequence
  Description of Artificial Sequence: Synthetic oligonucleotide
cagggugugccaaagccau

SEQ ID NO: 1784484 - RNA, 19 nt, Artificial Sequence
  Description of Artificial Sequence: Synthetic oligonucleotide
agggugcgagucuggacuu

SEQ ID NO: 1784485 - RNA, 19 nt, Artificial Sequence
  Description of Artificial Sequence: Synthetic oligonucleotide
gacugguuucccggaggac

SEQ ID NO: 1784486 - RNA, 19 nt, Artificial Sequence
  Description of Artificial Sequence: Synthetic oligonucleotide
cgccucugcagauagacca

SEQ ID NO: 1784487 - RNA, 19 nt, Artificial Sequence
  Description of Artificial Sequence: Synthetic oligonucleotide
guagaguacccggugugcu

SEQ ID NO: 1784488 - RNA, 19 nt, Artificial Sequence
  Description of Artificial Sequence: Synthetic oligonucleotide
gggaguucugaaauguaua

SEQ ID NO: 1784489 - RNA, 19 nt, Artificial Sequence
  Description of Artificial Sequence: Synthetic oligonucleotide
gcuguacaauucacuacac

SEQ ID NO: 1784490 - RNA, 19 nt, Artificial Sequence
  Description of Artificial Sequence: Synthetic oligonucleotide
gggacguggggaagcgugg

SEQ ID NO: 1784491 - RNA, 19 nt, Artificial Sequence
  Description of Artificial Sequence: Synthetic oligonucleotide
caucacaggacccgggcau

SEQ ID NO: 1784492 - RNA, 19 nt, Artificial Sequence
  Description of Artificial Sequence: Synthetic oligonucleotide
cccggugugcucucucccg

SEQ ID NO: 1784493 - RNA, 19 nt, Artificial Sequence
  Description of Artificial Sequence: Synthetic oligonucleotide
gaaagaccaucaagagagu

SEQ ID NO: 1784494 - RNA, 19 nt, Artificial Sequence
  Description of Artificial Sequence: Synthetic oligonucleotide
agcgugggguggagcaccg

SEQ ID NO: 1784495 - RNA, 19 nt, Artificial Sequence
  Description of Artificial Sequence: Synthetic oligonucleotide
gcuguagcggaugcccgag

SEQ ID NO: 1784496 - RNA, 19 nt, Artificial Sequence
  Description of Artificial Sequence: Synthetic oligonucleotide
gcucacugugcagagaugu

SEQ ID NO: 1784497 - RNA, 19 nt, Artificial Sequence
  Description of Artificial Sequence: Synthetic oligonucleotide
gcugggacguggggaagcg

SEQ ID NO: 1784498 - RNA, 19 nt, Artificial Sequence
  Description of Artificial Sequence: Synthetic oligonucleotide
cccaaagaccucuaacuua

SEQ ID NO: 1784499 - RNA, 19 nt, Artificial Sequence
  Description of Artificial Sequence: Synthetic oligonucleotide
cgagagauaccgccucugc

SEQ ID NO: 1784500 - RNA, 19 nt, Artificial Sequence
  Description of Artificial Sequence: Synthetic oligonucleotide
gucagggcacuaucggggu

SEQ ID NO: 1784501 - RNA, 19 nt, Artificial Sequence
  Description of Artificial Sequence: Synthetic oligonucleotide
ccagugucagggcacuauc

SEQ ID NO: 1784502 - RNA, 19 nt, Artificial Sequence
  Description of Artificial Sequence: Synthetic oligonucleotide
gcaucacaggacccgggca

SEQ ID NO: 1784503 - RNA, 19 nt, Artificial Sequence
  Description of Artificial Sequence: Synthetic oligonucleotide
guacccggugugcucucuc

SEQ ID NO: 1784504 - RNA, 19 nt, Artificial Sequence
  Description of Artificial Sequence: Synthetic oligonucleotide
agguggagagaaggagcga

SEQ ID NO: 1784505 - RNA, 19 nt, Artificial Sequence
  Description of Artificial Sequence: Synthetic oligonucleotide
acguuaccauagggaguuc

SEQ ID NO: 1784506 - RNA, 19 nt, Artificial Sequence
  Description of Artificial Sequence: Synthetic oligonucleotide
gccuuaccaggauggccag

SEQ ID NO: 1784507 - RNA, 19 nt, Artificial Sequence
  Description of Artificial Sequence: Synthetic oligonucleotide
agcggaugcccgagaaccu

SEQ ID NO: 1784508 - RNA, 19 nt, Artificial Sequence
  Description of Artificial Sequence: Synthetic oligonucleotide
ggguuguugcauagcccag

SEQ ID NO: 1784509 - RNA, 19 nt, Artificial Sequence
  Description of Artificial Sequence: Synthetic oligonucleotide
ccggugugcucucucccgg

SEQ ID NO: 1784510 - RNA, 19 nt, Artificial Sequence
  Description of Artificial Sequence: Synthetic oligonucleotide
gccucugcagauagaccag

SEQ ID NO: 1784511 - RNA, 19 nt, Artificial Sequence
  Description of Artificial Sequence: Synthetic oligonucleotide
aguacccggugugcucucu

SEQ ID NO: 1784512 - RNA, 19 nt, Artificial Sequence
  Description of Artificial Sequence: Synthetic oligonucleotide
gaguacccggugugcucuc

SEQ ID NO: 1784513 - RNA, 19 nt, Artificial Sequence
  Description of Artificial Sequence: Synthetic oligonucleotide
ccugcaaguaguguggugu

SEQ ID NO: 1784514 - RNA, 19 nt, Artificial Sequence
  Description of Artificial Sequence: Synthetic oligonucleotide
ggacucugacagccggcug

SEQ ID NO: 1784515 - RNA, 19 nt, Artificial Sequence
  Description of Artificial Sequence: Synthetic oligonucleotide
ccagcacaugacugguuuc

SEQ ID NO: 1784516 - RNA, 19 nt, Artificial Sequence
  Description of Artificial Sequence: Synthetic oligonucleotide
gcaggacgagggguggagg

SEQ ID NO: 1784517 - RNA, 19 nt, Artificial Sequence
  Description of Artificial Sequence: Synthetic oligonucleotide
ggcucugugcguacuugac

SEQ ID NO: 1784518 - RNA, 19 nt, Artificial Sequence
  Description of Artificial Sequence: Synthetic oligonucleotide
ggacgagggguggaggcac

SEQ ID NO: 1784519 - RNA, 19 nt, Artificial Sequence
  Description of Artificial Sequence: Synthetic oligonucleotide
gacuugccguccaguccug

SEQ ID NO: 1784520 - RNA, 19 nt, Artificial Sequence
  Description of Artificial Sequence: Synthetic oligonucleotide
gguuccuguccgguauggc

SEQ ID NO: 1784521 - RNA, 19 nt, Artificial Sequence
  Description of Artificial Sequence: Synthetic oligonucleotide
ggaugcccgagaaccucag

SEQ ID NO: 1784522 - RNA, 19 nt, Artificial Sequence
  Description of Artificial Sequence: Synthetic oligonucleotide
gcucaggccuggugggagc

SEQ ID NO: 1784523 - RNA, 19 nt, Artificial Sequence
  Description of Artificial Sequence: Synthetic oligonucleotide
gccugagcugccgaucaug

SEQ ID NO: 1784524 - RNA, 19 nt, Artificial Sequence
  Description of Artificial Sequence: Synthetic oligonucleotide
gggaagggcguuggggcug

SEQ ID NO: 1784525 - RNA, 19 nt, Artificial Sequence
  Description of Artificial Sequence: Synthetic oligonucleotide
gcgagagauaccgccucug

SEQ ID NO: 1784526 - RNA, 19 nt, Artificial Sequence
  Description of Artificial Sequence: Synthetic oligonucleotide
gcuggagaccugaggacuc

SEQ ID NO: 1784527 - RNA, 19 nt, Artificial Sequence
  Description of Artificial Sequence: Synthetic oligonucleotide
gggugugccaaagccaugu

SEQ ID NO: 1784528 - RNA, 19 nt, Artificial Sequence
  Description of Artificial Sequence: Synthetic oligonucleotide
ccagggugcgagucuggac

SEQ ID NO: 1784529 - RNA, 19 nt, Artificial Sequence
  Description of Artificial Sequence: Synthetic oligonucleotide
agggugugccaaagccaug

SEQ ID NO: 1784530 - RNA, 19 nt, Artificial Sequence
  Description of Artificial Sequence: Synthetic oligonucleotide
ccgccucugcagauagacc

SEQ ID NO: 1784531 - RNA, 19 nt, Artificial Sequence
  Description of Artificial Sequence: Synthetic oligonucleotide
ggcuggguuguugcauagc

SEQ ID NO: 1784532 - RNA, 19 nt, Artificial Sequence
  Description of Artificial Sequence: Synthetic oligonucleotide
cagggccgcacuccagaca

SEQ ID NO: 1784533 - RNA, 19 nt, Artificial Sequence
  Description of Artificial Sequence: Synthetic oligonucleotide
ccgguauggcuguagcgga

SEQ ID NO: 1784534 - RNA, 19 nt, Artificial Sequence
  Description of Artificial Sequence: Synthetic oligonucleotide
caaagaccucuaacuuagu

SEQ ID NO: 1784535 - RNA, 19 nt, Artificial Sequence
  Description of Artificial Sequence: Synthetic oligonucleotide
ccucuaacuuaguccuuga

SEQ ID NO: 1784536 - RNA, 19 nt, Artificial Sequence
  Description of Artificial Sequence: Synthetic oligonucleotide
cuguagcggaugcccgaga

SEQ ID NO: 1784537 - RNA, 19 nt, Artificial Sequence
  Description of Artificial Sequence: Synthetic oligonucleotide
ccguuucccacggccaccc

SEQ ID NO: 1784538 - RNA, 19 nt, Artificial Sequence
  Description of Artificial Sequence: Synthetic oligonucleotide
gggguggagcaccgccugc

SEQ ID NO: 1784539 - RNA, 19 nt, Artificial Sequence
  Description of Artificial Sequence: Synthetic oligonucleotide
ccaccucuuccauugguua

SEQ ID NO: 1784540 - RNA, 19 nt, Artificial Sequence
  Description of Artificial Sequence: Synthetic oligonucleotide
cuuugucagucgguagagu

SEQ ID NO: 1784541 - RNA, 19 nt, Artificial Sequence
  Description of Artificial Sequence: Synthetic oligonucleotide
ccggaggacugcagccugc

SEQ ID NO: 1784542 - RNA, 19 nt, Artificial Sequence
  Description of Artificial Sequence: Synthetic oligonucleotide
ccgccugccccaucagcag

SEQ ID NO: 1784543 - RNA, 19 nt, Artificial Sequence
  Description of Artificial Sequence: Synthetic oligonucleotide
cucacugugcagagauguu

SEQ ID NO: 1784544 - RNA, 19 nt, Artificial Sequence
  Description of Artificial Sequence: Synthetic oligonucleotide
cccggaggacugcagccug

SEQ ID NO: 1784545 - RNA, 19 nt, Artificial Sequence
  Description of Artificial Sequence: Synthetic oligonucleotide
cucagggcaagggaaucau

SEQ ID NO: 1784546 - RNA, 19 nt, Artificial Sequence
  Description of Artificial Sequence: Synthetic oligonucleotide
ccgcacuccagacacguua

SEQ ID NO: 1784547 - RNA, 19 nt, Artificial Sequence
  Description of Artificial Sequence: Synthetic oligonucleotide
ggccaguauuccugcucuc

SEQ ID NO: 1784548 - RNA, 19 nt, Artificial Sequence
  Description of Artificial Sequence: Synthetic oligonucleotide
ccucuggacuccaguguca

SEQ ID NO: 1784549 - RNA, 19 nt, Artificial Sequence
  Description of Artificial Sequence: Synthetic oligonucleotide
gagggcugccuggcaucac

SEQ ID NO: 1784550 - RNA, 19 nt, Artificial Sequence
  Description of Artificial Sequence: Synthetic oligonucleotide
gcugccgaucaugacugaa

SEQ ID NO: 1784551 - RNA, 19 nt, Artificial Sequence
  Description of Artificial Sequence: Synthetic oligonucleotide
gugcgagucuggacuugga

SEQ ID NO: 1784552 - RNA, 19 nt, Artificial Sequence
  Description of Artificial Sequence: Synthetic oligonucleotide
gcggaugcccgagaaccuc

SEQ ID NO: 1784553 - RNA, 19 nt, Artificial Sequence
  Description of Artificial Sequence: Synthetic oligonucleotide
cggaggcagcgagagauac

SEQ ID NO: 1784554 - RNA, 19 nt, Artificial Sequence
  Description of Artificial Sequence: Synthetic oligonucleotide
cccgagaaccucagggcaa

SEQ ID NO: 1784555 - RNA, 19 nt, Artificial Sequence
  Description of Artificial Sequence: Synthetic oligonucleotide
cacuugguuccuguccggu

SEQ ID NO: 1784556 - RNA, 19 nt, Artificial Sequence
  Description of Artificial Sequence: Synthetic oligonucleotide
gcagcgagagauaccgccu

SEQ ID NO: 1784557 - RNA, 19 nt, Artificial Sequence
  Description of Artificial Sequence: Synthetic oligonucleotide
ggggaagcgugggguggag

SEQ ID NO: 1784558 - RNA, 19 nt, Artificial Sequence
  Description of Artificial Sequence: Synthetic oligonucleotide
gggugcgagucuggacuug

SEQ ID NO: 1784559 - RNA, 19 nt, Artificial Sequence
  Description of Artificial Sequence: Synthetic oligonucleotide
ccucagggcaagggaauca

SEQ ID NO: 1784560 - RNA, 19 nt, Artificial Sequence
  Description of Artificial Sequence: Synthetic oligonucleotide
ggcuggcauccugagaggu

SEQ ID NO: 1784561 - RNA, 19 nt, Artificial Sequence
  Description of Artificial Sequence: Synthetic oligonucleotide
gcuugggaccuuugucagu

SEQ ID NO: 1784562 - RNA, 19 nt, Artificial Sequence
  Description of Artificial Sequence: Synthetic oligonucleotide
caagggaaucauggccagu

SEQ ID NO: 1784563 - RNA, 19 nt, Artificial Sequence
  Description of Artificial Sequence: Synthetic oligonucleotide
ggccuggcucugugcguac

SEQ ID NO: 1784564 - RNA, 19 nt, Artificial Sequence
  Description of Artificial Sequence: Synthetic oligonucleotide
ccccaaagaccucuaacuu

SEQ ID NO: 1784565 - RNA, 19 nt, Artificial Sequence
  Description of Artificial Sequence: Synthetic oligonucleotide
cgaguccggcugcucacug

SEQ ID NO: 1784566 - RNA, 19 nt, Artificial Sequence
  Description of Artificial Sequence: Synthetic oligonucleotide
gccguccaguccugcugac

SEQ ID NO: 1784567 - RNA, 19 nt, Artificial Sequence
  Description of Artificial Sequence: Synthetic oligonucleotide
ggagcgaguccggcugcuc

SEQ ID NO: 1784568 - RNA, 19 nt, Artificial Sequence
  Description of Artificial Sequence: Synthetic oligonucleotide
gggcguuggggcuguggcu

SEQ ID NO: 1784569 - RNA, 19 nt, Artificial Sequence
  Description of Artificial Sequence: Synthetic oligonucleotide
ccaaagccauguaaaccuu

SEQ ID NO: 1784570 - RNA, 19 nt, Artificial Sequence
  Description of Artificial Sequence: Synthetic oligonucleotide
cguuaccauagggaguucu

SEQ ID NO: 1784571 - RNA, 19 nt, Artificial Sequence
  Description of Artificial Sequence: Synthetic oligonucleotide
cacuaucgggguggcugcu

SEQ ID NO: 1784572 - RNA, 19 nt, Artificial Sequence
  Description of Artificial Sequence: Synthetic oligonucleotide
cccugcgggaagggcguug

SEQ ID NO: 1784573 - RNA, 19 nt, Artificial Sequence
  Description of Artificial Sequence: Synthetic oligonucleotide
ccggcugacccugcgggaa

SEQ ID NO: 1784574 - RNA, 19 nt, Artificial Sequence
  Description of Artificial Sequence: Synthetic oligonucleotide
cugggacguggggaagcgu

SEQ ID NO: 1784575 - RNA, 19 nt, Artificial Sequence
  Description of Artificial Sequence: Synthetic oligonucleotide
gcgugggguggagcaccgc

SEQ ID NO: 1784576 - RNA, 19 nt, Artificial Sequence
  Description of Artificial Sequence: Synthetic oligonucleotide
ccggaggcagcgagagaua

SEQ ID NO: 1784577 - RNA, 19 nt, Artificial Sequence
  Description of Artificial Sequence: Synthetic oligonucleotide
cacaggacccgggcaucau

SEQ ID NO: 1784578 - RNA, 19 nt, Artificial Sequence
  Description of Artificial Sequence: Synthetic oligonucleotide
ccccaccucuuccauuggu

SEQ ID NO: 1784579 - RNA, 19 nt, Artificial Sequence
  Description of Artificial Sequence: Synthetic oligonucleotide
gcgaguccggcugcucacu

SEQ ID NO: 1784580 - RNA, 19 nt, Artificial Sequence
  Description of Artificial Sequence: Synthetic oligonucleotide
cgguauggcuguagcggau

SEQ ID NO: 1784581 - RNA, 19 nt, Artificial Sequence
  Description of Artificial Sequence: Synthetic oligonucleotide
cugugugggcuggguuguu

SEQ ID NO: 1784582 - RNA, 19 nt, Artificial Sequence
  Description of Artificial Sequence: Synthetic oligonucleotide
gggcacuaucgggguggcu

SEQ ID NO: 1784583 - RNA, 19 nt, Artificial Sequence
  Description of Artificial Sequence: Synthetic oligonucleotide
ccuguccgguauggcugua

SEQ ID NO: 1784584 - RNA, 19 nt, Artificial Sequence
  Description of Artificial Sequence: Synthetic oligonucleotide
gccgcacuccagacacguu

SEQ ID NO: 1784585 - RNA, 19 nt, Artificial Sequence
  Description of Artificial Sequence: Synthetic oligonucleotide
auaagcagcacccagaucc

SEQ ID NO: 1784586 - RNA, 19 nt, Artificial Sequence
  Description of Artificial Sequence: Synthetic oligonucleotide
aaauauguaccuugugacc

SEQ ID NO: 1784587 - RNA, 19 nt, Artificial Sequence
  Description of Artificial Sequence: Synthetic oligonucleotide
uuauuguugucaaaguugg

SEQ ID NO: 1784588 - RNA, 19 nt, Artificial Sequence
  Description of Artificial Sequence: Synthetic oligonucleotide
acuagcuugacauuagggc

SEQ ID NO: 1784589 - RNA, 19 nt, Artificial Sequence
  Description of Artificial Sequence: Synthetic oligonucleotide
auccaagugaguuaugucc

SEQ ID NO: 1784590 - RNA, 19 nt, Artificial Sequence
  Description of Artificial Sequence: Synthetic oligonucleotide
ucuuauagaaaucucgccc

SEQ ID NO: 1784591 - RNA, 19 nt, Artificial Sequence
  Description of Artificial Sequence: Synthetic oligonucleotide
auauacuucuucuaaagug

SEQ ID NO: 1784592 - RNA, 19 nt, Artificial Sequence
  Description of Artificial Sequence: Synthetic oligonucleotide
cuuauagaaaucucgcccg

SEQ ID NO: 1784593 - RNA, 19 nt, Artificial Sequence
  Description of Artificial Sequence: Synthetic oligonucleotide
ucuagaucuacgaugauau

SEQ ID NO: 1784594 - RNA, 19 nt, Artificial Sequence
  Description of Artificial Sequence: Synthetic oligonucleotide
guaaguaucauacugcuuc

SEQ ID NO: 1784595 - RNA, 19 nt, Artificial Sequence
  Description of Artificial Sequence: Synthetic oligonucleotide
aaaaucuccaaagaagugu

SEQ ID NO: 1784596 - RNA, 19 nt, Artificial Sequence
  Description of Artificial Sequence: Synthetic oligonucleotide
acuacuuccacaaaauuuc

SEQ ID NO: 1784597 - RNA, 19 nt, Artificial Sequence
  Description of Artificial Sequence: Synthetic oligonucleotide
aauauguaccuugugacca

SEQ ID NO: 1784598 - RNA, 19 nt, Artificial Sequence
  Description of Artificial Sequence: Synthetic oligonucleotide
uuugauucggaaucguaag

SEQ ID NO: 1784599 - RNA, 19 nt, Artificial Sequence
  Description of Artificial Sequence: Synthetic oligonucleotide
guuauguccaucucaaagc

SEQ ID NO: 1784600 - RNA, 19 nt, Artificial Sequence
  Description of Artificial Sequence: Synthetic oligonucleotide
ucuaacuacuuccacaaaa

SEQ ID NO: 1784601 - RNA, 19 nt, Artificial Sequence
  Description of Artificial Sequence: Synthetic oligonucleotide
uuauguccaucucaaagcc

SEQ ID NO: 1784602 - RNA, 19 nt, Artificial Sequence
  Description of Artificial Sequence: Synthetic oligonucleotide
uccaauaaagggauacucc

SEQ ID NO: 1784603 - RNA, 19 nt, Artificial Sequence
  Description of Artificial Sequence: Synthetic oligonucleotide
aagcuguagggcuaguuuc

SEQ ID NO: 1784604 - RNA, 19 nt, Artificial Sequence
  Description of Artificial Sequence: Synthetic oligonucleotide
aaagggauacuccaugcca

SEQ ID NO: 1784605 - RNA, 19 nt, Artificial Sequence
  Description of Artificial Sequence: Synthetic oligonucleotide
aaaucauccccucuccucu

SEQ ID NO: 1784606 - RNA, 19 nt, Artificial Sequence
  Description of Artificial Sequence: Synthetic oligonucleotide
uaccuugugaccauccaag

SEQ ID NO: 1784607 - RNA, 19 nt, Artificial Sequence
  Description of Artificial Sequence: Synthetic oligonucleotide
ucugacagaaccucauaag

SEQ ID NO: 1784608 - RNA, 19 nt, Artificial Sequence
  Description of Artificial Sequence: Synthetic oligonucleotide
gaucuuauagaaaucucgc

SEQ ID NO: 1784609 - RNA, 19 nt, Artificial Sequence
  Description of Artificial Sequence: Synthetic oligonucleotide
uuauagaaaucucgcccgg

SEQ ID NO: 1784610 - RNA, 19 nt, Artificial Sequence
  Description of Artificial Sequence: Synthetic oligonucleotide
uagaucuacgaugauauca

SEQ ID NO: 1784611 - RNA, 19 nt, Artificial Sequence
  Description of Artificial Sequence: Synthetic oligonucleotide
ugauaucacuuccucuugg

SEQ ID NO: 1784612 - RNA, 19 nt, Artificial Sequence
  Description of Artificial Sequence: Synthetic oligonucleotide
uuuacggaggcacuccgag

SEQ ID NO: 1784613 - RNA, 19 nt, Artificial Sequence
  Description of Artificial Sequence: Synthetic oligonucleotide
ucuacgaugauaucacuuc

SEQ ID NO: 1784614 - RNA, 19 nt, Artificial Sequence
  Description of Artificial Sequence: Synthetic oligonucleotide
uuccccguaaguaucauac

SEQ ID NO: 1784615 - RNA, 19 nt, Artificial Sequence
  Description of Artificial Sequence: Synthetic oligonucleotide
aucguaagucuccagguuc

SEQ ID NO: 1784616 - RNA, 19 nt, Artificial Sequence
  Description of Artificial Sequence: Synthetic oligonucleotide
aaaguccaauuucucucac

SEQ ID NO: 1784617 - RNA, 19 nt, Artificial Sequence
  Description of Artificial Sequence: Synthetic oligonucleotide
agaucuacgaugauaucac

SEQ ID NO: 1784618 - RNA, 19 nt, Artificial Sequence
  Description of Artificial Sequence: Synthetic oligonucleotide
gacauuagggcacucguca

SEQ ID NO: 1784619 - RNA, 19 nt, Artificial Sequence
  Description of Artificial Sequence: Synthetic oligonucleotide
uucggaaucguaagucucc

SEQ ID NO: 1784620 - RNA, 19 nt, Artificial Sequence
  Description of Artificial Sequence: Synthetic oligonucleotide
uucuaaagugacuucuaga

SEQ ID NO: 1784621 - RNA, 19 nt, Artificial Sequence
  Description of Artificial Sequence: Synthetic oligonucleotide
uacaaaucauccccucucc

SEQ ID NO: 1784622 - RNA, 19 nt, Artificial Sequence
  Description of Artificial Sequence: Synthetic oligonucleotide
ucaacuagugagacuguca

SEQ ID NO: 1784623 - RNA, 19 nt, Artificial Sequence
  Description of Artificial Sequence: Synthetic oligonucleotide
uccucucaaauauacggug

SEQ ID NO: 1784624 - RNA, 19 nt, Artificial Sequence
  Description of Artificial Sequence: Synthetic oligonucleotide
aagccaaaaucuccaaaga

SEQ ID NO: 1784625 - RNA, 19 nt, Artificial Sequence
  Description of Artificial Sequence: Synthetic oligonucleotide
cuugugaccauccaaguga

SEQ ID NO: 1784626 - RNA, 19 nt, Artificial Sequence
  Description of Artificial Sequence: Synthetic oligonucleotide
ggaaucguaagucuccagg

SEQ ID NO: 1784627 - RNA, 19 nt, Artificial Sequence
  Description of Artificial Sequence: Synthetic oligonucleotide
acgaugauaucacuuccuc

SEQ ID NO: 1784628 - RNA, 19 nt, Artificial Sequence
  Description of Artificial Sequence: Synthetic oligonucleotide
gagacugucacauuugugu

SEQ ID NO: 1784629 - RNA, 19 nt, Artificial Sequence
  Description of Artificial Sequence: Synthetic oligonucleotide
cuugacaacuuugauucgg

SEQ ID NO: 1784630 - RNA, 19 nt, Artificial Sequence
  Description of Artificial Sequence: Synthetic oligonucleotide
ugugguucucaucuccugc

SEQ ID NO: 1784631 - RNA, 19 nt, Artificial Sequence
  Description of Artificial Sequence: Synthetic oligonucleotide
uugacauuagggcacucgu

SEQ ID NO: 1784632 - RNA, 19 nt, Artificial Sequence
  Description of Artificial Sequence: Synthetic oligonucleotide
ugauccuuguuugaguagc

SEQ ID NO: 1784633 - RNA, 19 nt, Artificial Sequence
  Description of Artificial Sequence: Synthetic oligonucleotide
uucucucacuccuaguagc

SEQ ID NO: 1784634 - RNA, 19 nt, Artificial Sequence
  Description of Artificial Sequence: Synthetic oligonucleotide
cagagccucaacuagugag

SEQ ID NO: 1784635 - RNA, 19 nt, Artificial Sequence
  Description of Artificial Sequence: Synthetic oligonucleotide
auguccuuuacggaggcac

SEQ ID NO: 1784636 - RNA, 19 nt, Artificial Sequence
  Description of Artificial Sequence: Synthetic oligonucleotide
uuguuucuaacuacuucca

SEQ ID NO: 1784637 - RNA, 19 nt, Artificial Sequence
  Description of Artificial Sequence: Synthetic oligonucleotide
ugucccgggaaauauguac

SEQ ID NO: 1784638 - RNA, 19 nt, Artificial Sequence
  Description of Artificial Sequence: Synthetic oligonucleotide
cuagcuugacauuagggca

SEQ ID NO: 1784639 - RNA, 19 nt, Artificial Sequence
  Description of Artificial Sequence: Synthetic oligonucleotide
cacuagcuugacauuaggg

SEQ ID NO: 1784640 - RNA, 19 nt, Artificial Sequence
  Description of Artificial Sequence: Synthetic oligonucleotide
agggcuaguuuccuguagg

SEQ ID NO: 1784641 - RNA, 19 nt, Artificial Sequence
  Description of Artificial Sequence: Synthetic oligonucleotide
cuucuaaagugacuucuag

SEQ ID NO: 1784642 - RNA, 19 nt, Artificial Sequence
  Description of Artificial Sequence: Synthetic oligonucleotide
acuagugagacugucacau

SEQ ID NO: 1784643 - RNA, 19 nt, Artificial Sequence
  Description of Artificial Sequence: Synthetic oligonucleotide
caacuagugagacugucac

SEQ ID NO: 1784644 - RNA, 19 nt, Artificial Sequence
  Description of Artificial Sequence: Synthetic oligonucleotide
acacccaagaucuuauaga

SEQ ID NO: 1784645 - RNA, 19 nt, Artificial Sequence
  Description of Artificial Sequence: Synthetic oligonucleotide
gaaccucauaagcagcacc

SEQ ID NO: 1784646 - RNA, 19 nt, Artificial Sequence
  Description of Artificial Sequence: Synthetic oligonucleotide
auauuucuguccugcugac

SEQ ID NO: 1784647 - RNA, 19 nt, Artificial Sequence
  Description of Artificial Sequence: Synthetic oligonucleotide
acaaaccaccuccuggguc

SEQ ID NO: 1784648 - RNA, 19 nt, Artificial Sequence
  Description of Artificial Sequence: Synthetic oligonucleotide
uugauucggaaucguaagu

SEQ ID NO: 1784649 - RNA, 19 nt, Artificial Sequence
  Description of Artificial Sequence: Synthetic oligonucleotide
gcauauacuucuucuaaag

SEQ ID NO: 1784650 - RNA, 19 nt, Artificial Sequence
  Description of Artificial Sequence: Synthetic oligonucleotide
agugaguuauguccaucuc

SEQ ID NO: 1784651 - RNA, 19 nt, Artificial Sequence
  Description of Artificial Sequence: Synthetic oligonucleotide
uacgaugauaucacuuccu

SEQ ID NO: 1784652 - RNA, 19 nt, Artificial Sequence
  Description of Artificial Sequence: Synthetic oligonucleotide
guuccggucaggaugaagc

SEQ ID NO: 1784653 - RNA, 19 nt, Artificial Sequence
  Description of Artificial Sequence: Synthetic oligonucleotide
gaugauaucacuuccucuu

SEQ ID NO: 1784654 - RNA, 19 nt, Artificial Sequence
  Description of Artificial Sequence: Synthetic oligonucleotide
cuacgaugauaucacuucc

SEQ ID NO: 1784655 - RNA, 19 nt, Artificial Sequence
  Description of Artificial Sequence: Synthetic oligonucleotide
cucaaauauacggugcuug

SEQ ID NO: 1784656 - RNA, 19 nt, Artificial Sequence
  Description of Artificial Sequence: Synthetic oligonucleotide
agugauuaucaaagagccc

SEQ ID NO: 1784657 - RNA, 19 nt, Artificial Sequence
  Description of Artificial Sequence: Synthetic oligonucleotide
aauuucucucacuccuagu

SEQ ID NO: 1784658 - RNA, 19 nt, Artificial Sequence
  Description of Artificial Sequence: Synthetic oligonucleotide
acauuagggcacucgucac

SEQ ID NO: 1784659 - RNA, 19 nt, Artificial Sequence
  Description of Artificial Sequence: Synthetic oligonucleotide
aucauacugcuuccguuuc

SEQ ID NO: 1784660 - RNA, 19 nt, Artificial Sequence
  Description of Artificial Sequence: Synthetic oligonucleotide
uaucauacugcuuccguuu

SEQ ID NO: 1784661 - RNA, 19 nt, Artificial Sequence
  Description of Artificial Sequence: Synthetic oligonucleotide
uagugagacugucacauuu

SEQ ID NO: 1784662 - RNA, 19 nt, Artificial Sequence
  Description of Artificial Sequence: Synthetic oligonucleotide
cuugacauuagggcacucg

SEQ ID NO: 1784663 - RNA, 19 nt, Artificial Sequence
  Description of Artificial Sequence: Synthetic oligonucleotide
uggucccgcacucucagcc

SEQ ID NO: 1784664 - RNA, 19 nt, Artificial Sequence
  Description of Artificial Sequence: Synthetic oligonucleotide
aaucguaagucuccagguu

SEQ ID NO: 1784665 - RNA, 19 nt, Artificial Sequence
  Description of Artificial Sequence: Synthetic oligonucleotide
ugauucggaaucguaaguc

SEQ ID NO: 1784666 - RNA, 19 nt, Artificial Sequence
  Description of Artificial Sequence: Synthetic oligonucleotide
uguaccuugugaccaucca

SEQ ID NO: 1784667 - RNA, 19 nt, Artificial Sequence
  Description of Artificial Sequence: Synthetic oligonucleotide
caguccauuguauaccuuc

SEQ ID NO: 1784668 - RNA, 19 nt, Artificial Sequence
  Description of Artificial Sequence: Synthetic oligonucleotide
guacaaaucauccccucuc

SEQ ID NO: 1784669 - RNA, 19 nt, Artificial Sequence
  Description of Artificial Sequence: Synthetic oligonucleotide
ucguaagucuccagguucu

SEQ ID NO: 1784670 - RNA, 19 nt, Artificial Sequence
  Description of Artificial Sequence: Synthetic oligonucleotide
aagugacuucuagaucuac

SEQ ID NO: 1784671 - RNA, 19 nt, Artificial Sequence
  Description of Artificial Sequence: Synthetic oligonucleotide
uuggggaucgucaggguuc

SEQ ID NO: 1784672 - RNA, 19 nt, Artificial Sequence
  Description of Artificial Sequence: Synthetic oligonucleotide
aacuagugagacugucaca

SEQ ID NO: 1784673 - RNA, 19 nt, Artificial Sequence
  Description of Artificial Sequence: Synthetic oligonucleotide
ugcaguccauuguauaccu

SEQ ID NO: 1784674 - RNA, 19 nt, Artificial Sequence
  Description of Artificial Sequence: Synthetic oligonucleotide
ugugugguucucaucuccu

SEQ ID NO: 1784675 - RNA, 19 nt, Artificial Sequence
  Description of Artificial Sequence: Synthetic oligonucleotide
gugaguuauguccaucuca

SEQ ID NO: 1784676 - RNA, 19 nt, Artificial Sequence
  Description of Artificial Sequence: Synthetic oligonucleotide
uucugcggggccauggugu

SEQ ID NO: 1784677 - RNA, 19 nt, Artificial Sequence
  Description of Artificial Sequence: Synthetic oligonucleotide
ucuucuaaagugacuucua

SEQ ID NO: 1784678 - RNA, 19 nt, Artificial Sequence
  Description of Artificial Sequence: Synthetic oligonucleotide
uacuccaugccaucucuca

SEQ ID NO: 1784679 - RNA, 19 nt, Artificial Sequence
  Description of Artificial Sequence: Synthetic oligonucleotide
caggguuccggucaggaug

SEQ ID NO: 1784680 - RNA, 19 nt, Artificial Sequence
  Description of Artificial Sequence: Synthetic oligonucleotide
ucuacuucuaguguucguu

SEQ ID NO: 1784681 - RNA, 19 nt, Artificial Sequence
  Description of Artificial Sequence: Synthetic oligonucleotide
aucuggaagcgcccugggc

SEQ ID NO: 1784682 - RNA, 19 nt, Artificial Sequence
  Description of Artificial Sequence: Synthetic oligonucleotide
uacuucuaguguucguucu

SEQ ID NO: 1784683 - RNA, 19 nt, Artificial Sequence
  Description of Artificial Sequence: Synthetic oligonucleotide
auucggaaucguaagucuc

SEQ ID NO: 1784684 - RNA, 19 nt, Artificial Sequence
  Description of Artificial Sequence: Synthetic oligonucleotide
agguucuauuucuacuucu

SEQ ID NO: 1784685 - RNA, 19 nt, Artificial Sequence
  Description of Artificial Sequence: Synthetic oligonucleotide
gacugucacauuuguguac

SEQ ID NO: 1784686 - RNA, 19 nt, Artificial Sequence
  Description of Artificial Sequence: Synthetic oligonucleotide
ucucgcccggccaucacag

SEQ ID NO: 1784687 - RNA, 19 nt, Artificial Sequence
  Description of Artificial Sequence: Synthetic oligonucleotide
cucuccucucaaauauacg

SEQ ID NO: 1784688 - RNA, 19 nt, Artificial Sequence
  Description of Artificial Sequence: Synthetic oligonucleotide
aucucaaagccaaccagag

SEQ ID NO: 1784689 - RNA, 19 nt, Artificial Sequence
  Description of Artificial Sequence: Synthetic oligonucleotide
uucuagaucuacgaugaua

SEQ ID NO: 1784690 - RNA, 19 nt, Artificial Sequence
  Description of Artificial Sequence: Synthetic oligonucleotide
uagggcuaguuuccuguag

SEQ ID NO: 1784691 - RNA, 19 nt, Artificial Sequence
  Description of Artificial Sequence: Synthetic oligonucleotide
uucguucuucauucacuag

SEQ ID NO: 1784692 - RNA, 19 nt, Artificial Sequence
  Description of Artificial Sequence: Synthetic oligonucleotide
caugggagcucugaugacc

SEQ ID NO: 1784693 - RNA, 19 nt, Artificial Sequence
  Description of Artificial Sequence: Synthetic oligonucleotide
ugagaggccgccucacgcc

SEQ ID NO: 1784694 - RNA, 19 nt, Artificial Sequence
  Description of Artificial Sequence: Synthetic oligonucleotide
caacuuugauucggaaucg

SEQ ID NO: 1784695 - RNA, 19 nt, Artificial Sequence
  Description of Artificial Sequence: Synthetic oligonucleotide
caggcuuguuucuaacuac

SEQ ID NO: 1784696 - RNA, 19 nt, Artificial Sequence
  Description of Artificial Sequence: Synthetic oligonucleotide
cuacuucuaguguucguuc

SEQ ID NO: 1784697 - RNA, 19 nt, Artificial Sequence
  Description of Artificial Sequence: Synthetic oligonucleotide
ugacauuagggcacucguc

SEQ ID NO: 1784698 - RNA, 19 nt, Artificial Sequence
  Description of Artificial Sequence: Synthetic oligonucleotide
agggcacucgucacaaacc

SEQ ID NO: 1784699 - RNA, 19 nt, Artificial Sequence
  Description of Artificial Sequence: Synthetic oligonucleotide
cuccaauaaagggauacuc

SEQ ID NO: 1784700 - RNA, 19 nt, Artificial Sequence
  Description of Artificial Sequence: Synthetic oligonucleotide
ucucacaccagguucuauu

SEQ ID NO: 1784701 - RNA, 19 nt, Artificial Sequence
  Description of Artificial Sequence: Synthetic oligonucleotide
gugguucucaucuccugcc

SEQ ID NO: 1784702 - RNA, 19 nt, Artificial Sequence
  Description of Artificial Sequence: Synthetic oligonucleotide
caaaguccaauuucucuca

SEQ ID NO: 1784703 - RNA, 19 nt, Artificial Sequence
  Description of Artificial Sequence: Synthetic oligonucleotide
gauucggaaucguaagucu

SEQ ID NO: 1784704 - RNA, 19 nt, Artificial Sequence
  Description of Artificial Sequence: Synthetic oligonucleotide
agaaccucauaagcagcac

SEQ ID NO: 1784705 - RNA, 19 nt, Artificial Sequence
  Description of Artificial Sequence: Synthetic oligonucleotide
ugcacugauccuuguuuga

SEQ ID NO: 1784706 - RNA, 19 nt, Artificial Sequence
  Description of Artificial Sequence: Synthetic oligonucleotide
aaucucgcccggccaucac

SEQ ID NO: 1784707 - RNA, 19 nt, Artificial Sequence
  Description of Artificial Sequence: Synthetic oligonucleotide
cugcacugauccuuguuug

SEQ ID NO: 1784708 - RNA, 19 nt, Artificial Sequence
  Description of Artificial Sequence: Synthetic oligonucleotide
cugaccagcccuuccggcc

SEQ ID NO: 1784709 - RNA, 19 nt, Artificial Sequence
  Description of Artificial Sequence: Synthetic oligonucleotide
uguccuuuacggaggcacu

SEQ ID NO: 1784710 - RNA, 19 nt, Artificial Sequence
  Description of Artificial Sequence: Synthetic oligonucleotide
cacccaagaucuuauagaa

SEQ ID NO: 1784711 - RNA, 19 nt, Artificial Sequence
  Description of Artificial Sequence: Synthetic oligonucleotide
cuucuuccccguaaguauc

SEQ ID NO: 1784712 - RNA, 19 nt, Artificial Sequence
  Description of Artificial Sequence: Synthetic oligonucleotide
ucaaaguugggaagcccuu

SEQ ID NO: 1784713 - RNA, 19 nt, Artificial Sequence
  Description of Artificial Sequence: Synthetic oligonucleotide
cugguaaccuugucccggg

SEQ ID NO: 1784714 - RNA, 19 nt, Artificial Sequence
  Description of Artificial Sequence: Synthetic oligonucleotide
aucacagccccgaugaggu

SEQ ID NO: 1784715 - RNA, 19 nt, Artificial Sequence
  Description of Artificial Sequence: Synthetic oligonucleotide
aacuuugauucggaaucgu

SEQ ID NO: 1784716 - RNA, 19 nt, Artificial Sequence
  Description of Artificial Sequence: Synthetic oligonucleotide
cauccaagugaguuauguc

SEQ ID NO: 1784717 - RNA, 19 nt, Artificial Sequence
  Description of Artificial Sequence: Synthetic oligonucleotide
guccaauuucucucacucc

SEQ ID NO: 1784718 - RNA, 19 nt, Artificial Sequence
  Description of Artificial Sequence: Synthetic oligonucleotide
agcacccagauccuggaau

SEQ ID NO: 1784719 - RNA, 19 nt, Artificial Sequence
  Description of Artificial Sequence: Synthetic oligonucleotide
acucgucacaaaccaccuc

SEQ ID NO: 1784720 - RNA, 19 nt, Artificial Sequence
  Description of Artificial Sequence: Synthetic oligonucleotide
ugaccauccaagugaguua

SEQ ID NO: 1784721 - RNA, 19 nt, Artificial Sequence
  Description of Artificial Sequence: Synthetic oligonucleotide
gucugacagaaccucauaa

SEQ ID NO: 1784722 - RNA, 19 nt, Artificial Sequence
  Description of Artificial Sequence: Synthetic oligonucleotide
cccguaaguaucauacugc

SEQ ID NO: 1784723 - RNA, 19 nt, Artificial Sequence
  Description of Artificial Sequence: Synthetic oligonucleotide
ucccgggaaauauguaccu

SEQ ID NO: 1784724 - RNA, 19 nt, Artificial Sequence
  Description of Artificial Sequence: Synthetic oligonucleotide
agugagacugucacauuug

SEQ ID NO: 1784725 - RNA, 19 nt, Artificial Sequence
  Description of Artificial Sequence: Synthetic oligonucleotide
cugcugaccagcccuuccg

SEQ ID NO: 1784726 - RNA, 19 nt, Artificial Sequence
  Description of Artificial Sequence: Synthetic oligonucleotide
ucacaccagguucuauuuc

SEQ ID NO: 1784727 - RNA, 19 nt, Artificial Sequence
  Description of Artificial Sequence: Synthetic oligonucleotide
cagaaccucauaagcagca

SEQ ID NO: 1784728 - RNA, 19 nt, Artificial Sequence
  Description of Artificial Sequence: Synthetic oligonucleotide
uccuaguagcccugcaguc

SEQ ID NO: 1784729 - RNA, 19 nt, Artificial Sequence
  Description of Artificial Sequence: Synthetic oligonucleotide
cuaacuacuuccacaaaau

SEQ ID NO: 1784730 - RNA, 19 nt, Artificial Sequence
  Description of Artificial Sequence: Synthetic oligonucleotide
uccuuuacggaggcacucc

SEQ ID NO: 1784731 - RNA, 19 nt, Artificial Sequence
  Description of Artificial Sequence: Synthetic oligonucleotide
ggcacuccgaggcacaccc

SEQ ID NO: 1784732 - RNA, 19 nt, Artificial Sequence
  Description of Artificial Sequence: Synthetic oligonucleotide
ucgucacaaaccaccuccu

SEQ ID NO: 1784733 - RNA, 19 nt, Artificial Sequence
  Description of Artificial Sequence: Synthetic oligonucleotide
gagacagcuagcgcgcccc

SEQ ID NO: 1784734 - RNA, 19 nt, Artificial Sequence
  Description of Artificial Sequence: Synthetic oligonucleotide
auauguaccuugugaccau

SEQ ID NO: 1784735 - RNA, 19 nt, Artificial Sequence
  Description of Artificial Sequence: Synthetic oligonucleotide
gucccgggaaauauguacc

SEQ ID NO: 1784736 - RNA, 19 nt, Artificial Sequence
  Description of Artificial Sequence: Synthetic oligonucleotide
uuccggucaggaugaagcu

SEQ ID NO: 1784737 - RNA, 19 nt, Artificial Sequence
  Description of Artificial Sequence: Synthetic oligonucleotide
guaaccuugucccgggaaa

SEQ ID NO: 1784738 - RNA, 19 nt, Artificial Sequence
  Description of Artificial Sequence: Synthetic oligonucleotide
ugucugacagaaccucaua

SEQ ID NO: 1784739 - RNA, 19 nt, Artificial Sequence
  Description of Artificial Sequence: Synthetic oligonucleotide
ccucucaaauauacggugc

SEQ ID NO: 1784740 - RNA, 19 nt, Artificial Sequence
  Description of Artificial Sequence: Synthetic oligonucleotide
uucuaacuacuuccacaaa

SEQ ID NO: 1784741 - RNA, 19 nt, Artificial Sequence
  Description of Artificial Sequence: Synthetic oligonucleotide
gaauuucuccugggcuugg

SEQ ID NO: 1784742 - RNA, 19 nt, Artificial Sequence
  Description of Artificial Sequence: Synthetic oligonucleotide
cuaguagcccugcagucca

SEQ ID NO: 1784743 - RNA, 19 nt, Artificial Sequence
  Description of Artificial Sequence: Synthetic oligonucleotide
agagccucaacuagugaga

SEQ ID NO: 1784744 - RNA, 19 nt, Artificial Sequence
  Description of Artificial Sequence: Synthetic oligonucleotide
ccugcaguccauuguauac

SEQ ID NO: 1784745 - RNA, 19 nt, Artificial Sequence
  Description of Artificial Sequence: Synthetic oligonucleotide
cuucuaguguucguucuuc

SEQ ID NO: 1784746 - RNA, 19 nt, Artificial Sequence
  Description of Artificial Sequence: Synthetic oligonucleotide
ucucuugccgggccgccga

SEQ ID NO: 1784747 - RNA, 19 nt, Artificial Sequence
  Description of Artificial Sequence: Synthetic oligonucleotide
cauauacuucuucuaaagu

SEQ ID NO: 1784748 - RNA, 19 nt, Artificial Sequence
  Description of Artificial Sequence: Synthetic oligonucleotide
ucgucaggguuccggucag

SEQ ID NO: 1784749 - RNA, 19 nt, Artificial Sequence
  Description of Artificial Sequence: Synthetic oligonucleotide
gagaggccgccucacgccc

SEQ ID NO: 1784750 - RNA, 19 nt, Artificial Sequence
  Description of Artificial Sequence: Synthetic oligonucleotide
ucggaaucguaagucucca

SEQ ID NO: 1784751 - RNA, 19 nt, Artificial Sequence
  Description of Artificial Sequence: Synthetic oligonucleotide
caccagguucuauuucuac

SEQ ID NO: 1784752 - RNA, 19 nt, Artificial Sequence
  Description of Artificial Sequence: Synthetic oligonucleotide
aaaucucgcccggccauca

SEQ ID NO: 1784753 - RNA, 19 nt, Artificial Sequence
  Description of Artificial Sequence: Synthetic oligonucleotide
aaagagcccuugauguuau

SEQ ID NO: 1784754 - RNA, 19 nt, Artificial Sequence
  Description of Artificial Sequence: Synthetic oligonucleotide
cuagaucuacgaugauauc

SEQ ID NO: 1784755 - RNA, 19 nt, Artificial Sequence
  Description of Artificial Sequence: Synthetic oligonucleotide
uccggucaggaugaagcug

SEQ ID NO: 1784756 - RNA, 19 nt, Artificial Sequence
  Description of Artificial Sequence: Synthetic oligonucleotide
aguccauuguauaccuucu

SEQ ID NO: 1784757 - RNA, 19 nt, Artificial Sequence
  Description of Artificial Sequence: Synthetic oligonucleotide
gcuaguuuccuguaggccu

SEQ ID NO: 1784758 - RNA, 19 nt, Artificial Sequence
  Description of Artificial Sequence: Synthetic oligonucleotide
gcacucgucacaaaccacc

SEQ ID NO: 1784759 - RNA, 19 nt, Artificial Sequence
  Description of Artificial Sequence: Synthetic oligonucleotide
ucacgcccgggucucuugc

SEQ ID NO: 1784760 - RNA, 19 nt, Artificial Sequence
  Description of Artificial Sequence: Synthetic oligonucleotide
gcucugaugaccaucuuuc

SEQ ID NO: 1784761 - RNA, 19 nt, Artificial Sequence
  Description of Artificial Sequence: Synthetic oligonucleotide
aucuacgaugauaucacuu

SEQ ID NO: 1784762 - RNA, 19 nt, Artificial Sequence
  Description of Artificial Sequence: Synthetic oligonucleotide
ugccgacaguugcauuucc

SEQ ID NO: 1784763 - RNA, 19 nt, Artificial Sequence
  Description of Artificial Sequence: Synthetic oligonucleotide
guguacaaaucauccccuc

SEQ ID NO: 1784764 - RNA, 19 nt, Artificial Sequence
  Description of Artificial Sequence: Synthetic oligonucleotide
ccgggaaauauguaccuug

SEQ ID NO: 1784765 - RNA, 19 nt, Artificial Sequence
  Description of Artificial Sequence: Synthetic oligonucleotide
guaccuugugaccauccaa

SEQ ID NO: 1784766 - RNA, 19 nt, Artificial Sequence
  Description of Artificial Sequence: Synthetic oligonucleotide
gagccucaacuagugagac

SEQ ID NO: 1784767 - RNA, 19 nt, Artificial Sequence
  Description of Artificial Sequence: Synthetic oligonucleotide
uccgaggcacacccaagau

SEQ ID NO: 1784768 - RNA, 19 nt, Artificial Sequence
  Description of Artificial Sequence: Synthetic oligonucleotide
ugcgucugcugaccagccc

SEQ ID NO: 1784769 - RNA, 19 nt, Artificial Sequence
  Description of Artificial Sequence: Synthetic oligonucleotide
ccucuccucucaaauauac

SEQ ID NO: 1784770 - RNA, 19 nt, Artificial Sequence
  Description of Artificial Sequence: Synthetic oligonucleotide
accagagccucaacuagug

SEQ ID NO: 1784771 - RNA, 19 nt, Artificial Sequence
  Description of Artificial Sequence: Synthetic oligonucleotide
ucucaaauauacggugcuu

SEQ ID NO: 1784772 - RNA, 19 nt, Artificial Sequence
  Description of Artificial Sequence: Synthetic oligonucleotide
agcccuugauguuauuguu

SEQ ID NO: 1784773 - RNA, 19 nt, Artificial Sequence
  Description of Artificial Sequence: Synthetic oligonucleotide
uccccguaaguaucauacu

SEQ ID NO: 1784774 - RNA, 19 nt, Artificial Sequence
  Description of Artificial Sequence: Synthetic oligonucleotide
cauuagggcacucgucaca

SEQ ID NO: 1784775 - RNA, 19 nt, Artificial Sequence
  Description of Artificial Sequence: Synthetic oligonucleotide
gaucgucaggguuccgguc

SEQ ID NO: 1784776 - RNA, 19 nt, Artificial Sequence
  Description of Artificial Sequence: Synthetic oligonucleotide
caucuggaagcgcccuggg

SEQ ID NO: 1784777 - RNA, 19 nt, Artificial Sequence
  Description of Artificial Sequence: Synthetic oligonucleotide
ccccguaaguaucauacug

SEQ ID NO: 1784778 - RNA, 19 nt, Artificial Sequence
  Description of Artificial Sequence: Synthetic oligonucleotide
acgcccgggucucuugccg

SEQ ID NO: 1784779 - RNA, 19 nt, Artificial Sequence
  Description of Artificial Sequence: Synthetic oligonucleotide
ugcggggccauggugucgc

SEQ ID NO: 1784780 - RNA, 19 nt, Artificial Sequence
  Description of Artificial Sequence: Synthetic oligonucleotide
cuugccgggccgccgagac

SEQ ID NO: 1784781 - RNA, 19 nt, Artificial Sequence
  Description of Artificial Sequence: Synthetic oligonucleotide
ccauuguauaccuucugca

SEQ ID NO: 1784782 - RNA, 19 nt, Artificial Sequence
  Description of Artificial Sequence: Synthetic oligonucleotide
uggggaucgucaggguucc

SEQ ID NO: 1784783 - RNA, 19 nt, Artificial Sequence
  Description of Artificial Sequence: Synthetic oligonucleotide
auacuccaugccaucucuc

SEQ ID NO: 1784784 - RNA, 19 nt, Artificial Sequence
  Description of Artificial Sequence: Synthetic oligonucleotide
ugucgccuggucccgcacu

SEQ ID NO: 1784785 - RNA, 19 nt, Artificial Sequence
  Description of Artificial Sequence: Synthetic oligonucleotide
gcuugacaacuuugauucg

SEQ ID NO: 1784786 - RNA, 19 nt, Artificial Sequence
  Description of Artificial Sequence: Synthetic oligonucleotide
aucucgcccggccaucaca

SEQ ID NO: 1784787 - RNA, 19 nt, Artificial Sequence
  Description of Artificial Sequence: Synthetic oligonucleotide
guucugcggggccauggug

SEQ ID NO: 1784788 - RNA, 19 nt, Artificial Sequence
  Description of Artificial Sequence: Synthetic oligonucleotide
gggaucgucaggguuccgg

SEQ ID NO: 1784789 - RNA, 19 nt, Artificial Sequence
  Description of Artificial Sequence: Synthetic oligonucleotide
caagugaguuauguccauc

SEQ ID NO: 1784790 - RNA, 19 nt, Artificial Sequence
  Description of Artificial Sequence: Synthetic oligonucleotide
gucaaaguugggaagcccu

SEQ ID NO: 1784791 - RNA, 19 nt, Artificial Sequence
  Description of Artificial Sequence: Synthetic oligonucleotide
cucucaaauauacggugcu

SEQ ID NO: 1784792 - RNA, 19 nt, Artificial Sequence
  Description of Artificial Sequence: Synthetic oligonucleotide
cuccauccacaugagguuc

SEQ ID NO: 1784793 - RNA, 19 nt, Artificial Sequence
  Description of Artificial Sequence: Synthetic oligonucleotide
ccugguaaccuugucccgg

SEQ ID NO: 1784794 - RNA, 19 nt, Artificial Sequence
  Description of Artificial Sequence: Synthetic oligonucleotide
cgccgagacagcuagcgcg

SEQ ID NO: 1784795 - RNA, 19 nt, Artificial Sequence
  Description of Artificial Sequence: Synthetic oligonucleotide
gaucuacgaugauaucacu

SEQ ID NO: 1784796 - RNA, 19 nt, Artificial Sequence
  Description of Artificial Sequence: Synthetic oligonucleotide
cucugaugaccaucuuuca

SEQ ID NO: 1784797 - RNA, 19 nt, Artificial Sequence
  Description of Artificial Sequence: Synthetic oligonucleotide
caaagagcccuugauguua

SEQ ID NO: 1784798 - RNA, 19 nt, Artificial Sequence
  Description of Artificial Sequence: Synthetic oligonucleotide
gggcuaguuuccuguaggc

SEQ ID NO: 1784799 - RNA, 19 nt, Artificial Sequence
  Description of Artificial Sequence: Synthetic oligonucleotide
cuuuacggaggcacuccga

SEQ ID NO: 1784800 - RNA, 19 nt, Artificial Sequence
  Description of Artificial Sequence: Synthetic oligonucleotide
acuuugauucggaaucgua

SEQ ID NO: 1784801 - RNA, 19 nt, Artificial Sequence
  Description of Artificial Sequence: Synthetic oligonucleotide
ccuugugaccauccaagug

SEQ ID NO: 1784802 - RNA, 19 nt, Artificial Sequence
  Description of Artificial Sequence: Synthetic oligonucleotide
ucugcggggccaugguguc

SEQ ID NO: 1784803 - RNA, 19 nt, Artificial Sequence
  Description of Artificial Sequence: Synthetic oligonucleotide
cugcgucugcugaccagcc

SEQ ID NO: 1784804 - RNA, 19 nt, Artificial Sequence
  Description of Artificial Sequence: Synthetic oligonucleotide
agccucaacuagugagacu

SEQ ID NO: 1784805 - RNA, 19 nt, Artificial Sequence
  Description of Artificial Sequence: Synthetic oligonucleotide
aggguuccggucaggauga

SEQ ID NO: 1784806 - RNA, 19 nt, Artificial Sequence
  Description of Artificial Sequence: Synthetic oligonucleotide
uugggaagcccuuccccuu

SEQ ID NO: 1784807 - RNA, 19 nt, Artificial Sequence
  Description of Artificial Sequence: Synthetic oligonucleotide
ugguaaccuugucccggga

SEQ ID NO: 1784808 - RNA, 19 nt, Artificial Sequence
  Description of Artificial Sequence: Synthetic oligonucleotide
cuccucucaaauauacggu

SEQ ID NO: 1784809 - RNA, 19 nt, Artificial Sequence
  Description of Artificial Sequence: Synthetic oligonucleotide
uugucccgggaaauaugua

SEQ ID NO: 1784810 - RNA, 19 nt, Artificial Sequence
  Description of Artificial Sequence: Synthetic oligonucleotide
ggcuaguuuccuguaggcc

SEQ ID NO: 1784811 - RNA, 19 nt, Artificial Sequence
  Description of Artificial Sequence: Synthetic oligonucleotide
uccccucuccucucaaaua

SEQ ID NO: 1784812 - RNA, 19 nt, Artificial Sequence
  Description of Artificial Sequence: Synthetic oligonucleotide
caauaaagggauacuccau

SEQ ID NO: 1784813 - RNA, 19 nt, Artificial Sequence
  Description of Artificial Sequence: Synthetic oligonucleotide
ccuaguagcccugcagucc

SEQ ID NO: 1784814 - RNA, 19 nt, Artificial Sequence
  Description of Artificial Sequence: Synthetic oligonucleotide
gugaccauccaagugaguu

SEQ ID NO: 1784815 - RNA, 19 nt, Artificial Sequence
  Description of Artificial Sequence: Synthetic oligonucleotide
uccccaugggagcucugau

SEQ ID NO: 1784816 - RNA, 19 nt, Artificial Sequence
  Description of Artificial Sequence: Synthetic oligonucleotide
acggugcuugacaacuuug

SEQ ID NO: 1784817 - RNA, 19 nt, Artificial Sequence
  Description of Artificial Sequence: Synthetic oligonucleotide
accuugucccgggaaauau

SEQ ID NO: 1784818 - RNA, 19 nt, Artificial Sequence
  Description of Artificial Sequence: Synthetic oligonucleotide
gcugacgaggggcuccucc

SEQ ID NO: 1784819 - RNA, 19 nt, Artificial Sequence
  Description of Artificial Sequence: Synthetic oligonucleotide
gaaaucucgcccggccauc

SEQ ID NO: 1784820 - RNA, 19 nt, Artificial Sequence
  Description of Artificial Sequence: Synthetic oligonucleotide
aggcacuccgaggcacacc

SEQ ID NO: 1784821 - RNA, 19 nt, Artificial Sequence
  Description of Artificial Sequence: Synthetic oligonucleotide
auggugucgccuggucccg

SEQ ID NO: 1784822 - RNA, 19 nt, Artificial Sequence
  Description of Artificial Sequence: Synthetic oligonucleotide
ucccgugccgcugcgucug

SEQ ID NO: 1784823 - RNA, 19 nt, Artificial Sequence
  Description of Artificial Sequence: Synthetic oligonucleotide
ccauggugucgccuggucc

SEQ ID NO: 1784824 - RNA, 19 nt, Artificial Sequence
  Description of Artificial Sequence: Synthetic oligonucleotide
agaaggugcuuagguucug

SEQ ID NO: 1784825 - RNA, 19 nt, Artificial Sequence
  Description of Artificial Sequence: Synthetic oligonucleotide
uuagggcacucgucacaaa

SEQ ID NO: 1784826 - RNA, 19 nt, Artificial Sequence
  Description of Artificial Sequence: Synthetic oligonucleotide
gcugcgucugcugaccagc

SEQ ID NO: 1784827 - RNA, 19 nt, Artificial Sequence
  Description of Artificial Sequence: Synthetic oligonucleotide
gguaaccuugucccgggaa

SEQ ID NO: 1784828 - RNA, 19 nt, Artificial Sequence
  Description of Artificial Sequence: Synthetic oligonucleotide
gccgacaguugcauuuccg

SEQ ID NO: 1784829 - RNA, 19 nt, Artificial Sequence
  Description of Artificial Sequence: Synthetic oligonucleotide
guccuuuacggaggcacuc

SEQ ID NO: 1784830 - RNA, 19 nt, Artificial Sequence
  Description of Artificial Sequence: Synthetic oligonucleotide
gacgaggggcuccuccaaa

SEQ ID NO: 1784831 - RNA, 19 nt, Artificial Sequence
  Description of Artificial Sequence: Synthetic oligonucleotide
cucacgcccgggucucuug

SEQ ID NO: 1784832 - RNA, 19 nt, Artificial Sequence
  Description of Artificial Sequence: Synthetic oligonucleotide
cacgcccgggucucuugcc

SEQ ID NO: 1784833 - RNA, 19 nt, Artificial Sequence
  Description of Artificial Sequence: Synthetic oligonucleotide
cacugauccuuguuugagu

SEQ ID NO: 1784834 - RNA, 19 nt, Artificial Sequence
  Description of Artificial Sequence: Synthetic oligonucleotide
cgaggcacacccaagaucu

SEQ ID NO: 1784835 - RNA, 19 nt, Artificial Sequence
  Description of Artificial Sequence: Synthetic oligonucleotide
gucucuugccgggccgccg

SEQ ID NO: 1784836 - RNA, 19 nt, Artificial Sequence
  Description of Artificial Sequence: Synthetic oligonucleotide
guagggcuaguuuccugua

SEQ ID NO: 1784837 - RNA, 19 nt, Artificial Sequence
  Description of Artificial Sequence: Synthetic oligonucleotide
aagagcccuugauguuauu

SEQ ID NO: 1784838 - RNA, 19 nt, Artificial Sequence
  Description of Artificial Sequence: Synthetic oligonucleotide
gucgccuggucccgcacuc

SEQ ID NO: 1784839 - RNA, 19 nt, Artificial Sequence
  Description of Artificial Sequence: Synthetic oligonucleotide
gucccgcacucucagccuc

SEQ ID NO: 1784840 - RNA, 19 nt, Artificial Sequence
  Description of Artificial Sequence: Synthetic oligonucleotide
cugccgacaguugcauuuc

SEQ ID NO: 1784841 - RNA, 19 nt, Artificial Sequence
  Description of Artificial Sequence: Synthetic oligonucleotide
gaggcacuccgaggcacac

SEQ ID NO: 1784842 - RNA, 19 nt, Artificial Sequence
  Description of Artificial Sequence: Synthetic oligonucleotide
cucacaccagguucuauuu

SEQ ID NO: 1784843 - RNA, 19 nt, Artificial Sequence
  Description of Artificial Sequence: Synthetic oligonucleotide
cacucgucacaaaccaccu

SEQ ID NO: 1784844 - RNA, 19 nt, Artificial Sequence
  Description of Artificial Sequence: Synthetic oligonucleotide
ggagcucugaugaccaucu

SEQ ID NO: 1784845 - RNA, 19 nt, Artificial Sequence
  Description of Artificial Sequence: Synthetic oligonucleotide
gguuccggucaggaugaag

SEQ ID NO: 1784846 - RNA, 19 nt, Artificial Sequence
  Description of Artificial Sequence: Synthetic oligonucleotide
uugccgggccgccgagaca

SEQ ID NO: 1784847 - RNA, 19 nt, Artificial Sequence
  Description of Artificial Sequence: Synthetic oligonucleotide
ccgaggcacacccaagauc

SEQ ID NO: 1784848 - RNA, 19 nt, Artificial Sequence
  Description of Artificial Sequence: Synthetic oligonucleotide
cuuccccguaaguaucaua

SEQ ID NO: 1784849 - RNA, 19 nt, Artificial Sequence
  Description of Artificial Sequence: Synthetic oligonucleotide
ucuugccgggccgccgaga

SEQ ID NO: 1784850 - RNA, 19 nt, Artificial Sequence
  Description of Artificial Sequence: Synthetic oligonucleotide
ccugcugacgaggggcucc

SEQ ID NO: 1784851 - RNA, 19 nt, Artificial Sequence
  Description of Artificial Sequence: Synthetic oligonucleotide
guccccaugggagcucuga

SEQ ID NO: 1784852 - RNA, 19 nt, Artificial Sequence
  Description of Artificial Sequence: Synthetic oligonucleotide
ccguaaguaucauacugcu

SEQ ID NO: 1784853 - RNA, 19 nt, Artificial Sequence
  Description of Artificial Sequence: Synthetic oligonucleotide
guauaccuucugcacugau

SEQ ID NO: 1784854 - RNA, 19 nt, Artificial Sequence
  Description of Artificial Sequence: Synthetic oligonucleotide
gggucaucuggaagcgccc

SEQ ID NO: 1784855 - RNA, 19 nt, Artificial Sequence
  Description of Artificial Sequence: Synthetic oligonucleotide
ggaucgucaggguuccggu

SEQ ID NO: 1784856 - RNA, 19 nt, Artificial Sequence
  Description of Artificial Sequence: Synthetic oligonucleotide
uccugccgacaguugcauu

SEQ ID NO: 1784857 - RNA, 19 nt, Artificial Sequence
  Description of Artificial Sequence: Synthetic oligonucleotide
cagcccuuccggcccugag

SEQ ID NO: 1784858 - RNA, 19 nt, Artificial Sequence
  Description of Artificial Sequence: Synthetic oligonucleotide
ggcuccuggccugguaacc

SEQ ID NO: 1784859 - RNA, 19 nt, Artificial Sequence
  Description of Artificial Sequence: Synthetic oligonucleotide
auacggugcuugacaacuu

SEQ ID NO: 1784860 - RNA, 19 nt, Artificial Sequence
  Description of Artificial Sequence: Synthetic oligonucleotide
ggcacucgucacaaaccac

SEQ ID NO: 1784861 - RNA, 19 nt, Artificial Sequence
  Description of Artificial Sequence: Synthetic oligonucleotide
gcgucugcugaccagcccu

SEQ ID NO: 1784862 - RNA, 19 nt, Artificial Sequence
  Description of Artificial Sequence: Synthetic oligonucleotide
aguagcugcuugacaccuu

SEQ ID NO: 1784863 - RNA, 19 nt, Artificial Sequence
  Description of Artificial Sequence: Synthetic oligonucleotide
gugucgccuggucccgcac

SEQ ID NO: 1784864 - RNA, 19 nt, Artificial Sequence
  Description of Artificial Sequence: Synthetic oligonucleotide
cacaaaccaccuccugggu

SEQ ID NO: 1784865 - RNA, 19 nt, Artificial Sequence
  Description of Artificial Sequence: Synthetic oligonucleotide
ggcccugagaggccgccuc

SEQ ID NO: 1784866 - RNA, 19 nt, Artificial Sequence
  Description of Artificial Sequence: Synthetic oligonucleotide
cggugcuugacaacuuuga

SEQ ID NO: 1784867 - RNA, 19 nt, Artificial Sequence
  Description of Artificial Sequence: Synthetic oligonucleotide
ccauccaagugaguuaugu

SEQ ID NO: 1784868 - RNA, 19 nt, Artificial Sequence
  Description of Artificial Sequence: Synthetic oligonucleotide
ggugucgccuggucccgca

SEQ ID NO: 1784869 - RNA, 19 nt, Artificial Sequence
  Description of Artificial Sequence: Synthetic oligonucleotide
cggaaucguaagucuccag

SEQ ID NO: 1784870 - RNA, 19 nt, Artificial Sequence
  Description of Artificial Sequence: Synthetic oligonucleotide
aguuuccuguaggccuuuu

SEQ ID NO: 1784871 - RNA, 19 nt, Artificial Sequence
  Description of Artificial Sequence: Synthetic oligonucleotide
cuagugagacugucacauu

SEQ ID NO: 1784872 - RNA, 19 nt, Artificial Sequence
  Description of Artificial Sequence: Synthetic oligonucleotide
cgagacagcuagcgcgccc

SEQ ID NO: 1784873 - RNA, 19 nt, Artificial Sequence
  Description of Artificial Sequence: Synthetic oligonucleotide
cuucugcacugauccuugu

SEQ ID NO: 1784874 - RNA, 19 nt, Artificial Sequence
  Description of Artificial Sequence: Synthetic oligonucleotide
ccugccgacaguugcauuu

SEQ ID NO: 1784875 - RNA, 19 nt, Artificial Sequence
  Description of Artificial Sequence: Synthetic oligonucleotide
gcacccagauccuggaauu

SEQ ID NO: 1784876 - RNA, 19 nt, Artificial Sequence
  Description of Artificial Sequence: Synthetic oligonucleotide
ccgggucucuugccgggcc

SEQ ID NO: 1784877 - RNA, 19 nt, Artificial Sequence
  Description of Artificial Sequence: Synthetic oligonucleotide
ccgccgagacagcuagcgc

SEQ ID NO: 1784878 - RNA, 19 nt, Artificial Sequence
  Description of Artificial Sequence: Synthetic oligonucleotide
cgaugauaucacuuccucu

SEQ ID NO: 1784879 - RNA, 19 nt, Artificial Sequence
  Description of Artificial Sequence: Synthetic oligonucleotide
ccagagccucaacuaguga

SEQ ID NO: 1784880 - RNA, 19 nt, Artificial Sequence
  Description of Artificial Sequence: Synthetic oligonucleotide
gccgccucacgcccggguc

SEQ ID NO: 1784881 - RNA, 19 nt, Artificial Sequence
  Description of Artificial Sequence: Synthetic oligonucleotide
ugggcccagcugugugguu

SEQ ID NO: 1784882 - RNA, 19 nt, Artificial Sequence
  Description of Artificial Sequence: Synthetic oligonucleotide
ggucccgcacucucagccu

SEQ ID NO: 1784883 - RNA, 19 nt, Artificial Sequence
  Description of Artificial Sequence: Synthetic oligonucleotide
cgcugcgucugcugaccag

SEQ ID NO: 1784884 - RNA, 19 nt, Artificial Sequence
  Description of Artificial Sequence: Synthetic oligonucleotide
ccgagacagcuagcgcgcc

SEQ ID NO: 1784885 - RNA, 19 nt, Artificial Sequence
  Description of Artificial Sequence: Synthetic oligonucleotide
cucccgugccgcugcgucu

SEQ ID NO: 1784886 - RNA, 19 nt, Artificial Sequence
  Description of Artificial Sequence: Synthetic oligonucleotide
ccaucucucacaccagguu

SEQ ID NO: 1784887 - RNA, 19 nt, Artificial Sequence
  Description of Artificial Sequence: Synthetic oligonucleotide
gcuugacauuagggcacuc

SEQ ID NO: 1784888 - RNA, 19 nt, Artificial Sequence
  Description of Artificial Sequence: Synthetic oligonucleotide
ggggaucgucaggguuccg

SEQ ID NO: 1784889 - RNA, 19 nt, Artificial Sequence
  Description of Artificial Sequence: Synthetic oligonucleotide
cccucuccucucaaauaua

SEQ ID NO: 1784890 - RNA, 19 nt, Artificial Sequence
  Description of Artificial Sequence: Synthetic oligonucleotide
cuccugccgacaguugcau

SEQ ID NO: 1784891 - RNA, 19 nt, Artificial Sequence
  Description of Artificial Sequence: Synthetic oligonucleotide
cugcugacgaggggcuccu

SEQ ID NO: 1784892 - RNA, 19 nt, Artificial Sequence
  Description of Artificial Sequence: Synthetic oligonucleotide
cacccagauccuggaauuu

SEQ ID NO: 1784893 - RNA, 19 nt, Artificial Sequence
  Description of Artificial Sequence: Synthetic oligonucleotide
gcacuccgaggcacaccca

SEQ ID NO: 1784894 - RNA, 19 nt, Artificial Sequence
  Description of Artificial Sequence: Synthetic oligonucleotide
gcaguccauuguauaccuu

SEQ ID NO: 1784895 - RNA, 19 nt, Artificial Sequence
  Description of Artificial Sequence: Synthetic oligonucleotide
cccgggaaauauguaccuu

SEQ ID NO: 1784896 - RNA, 19 nt, Artificial Sequence
  Description of Artificial Sequence: Synthetic oligonucleotide
ccagcccuuccggcccuga

SEQ ID NO: 1784897 - RNA, 19 nt, Artificial Sequence
  Description of Artificial Sequence: Synthetic oligonucleotide
cgucugcugaccagcccuu

SEQ ID NO: 1784898 - RNA, 19 nt, Artificial Sequence
  Description of Artificial Sequence: Synthetic oligonucleotide
uguuguuucauaaaauucc

SEQ ID NO: 1784899 - RNA, 19 nt, Artificial Sequence
  Description of Artificial Sequence: Synthetic oligonucleotide
aauuucaaguuauugcagg

SEQ ID NO: 1784900 - RNA, 19 nt, Artificial Sequence
  Description of Artificial Sequence: Synthetic oligonucleotide
aauuauaguacugauuuuc

SEQ ID NO: 1784901 - RNA, 19 nt, Artificial Sequence
  Description of Artificial Sequence: Synthetic oligonucleotide
uauguuuagggcaagaugu

SEQ ID NO: 1784902 - RNA, 19 nt, Artificial Sequence
  Description of Artificial Sequence: Synthetic oligonucleotide
aagugauuugcucauagag

SEQ ID NO: 1784903 - RNA, 19 nt, Artificial Sequence
  Description of Artificial Sequence: Synthetic oligonucleotide
aucaauuugaaguuaaucu

SEQ ID NO: 1784904 - RNA, 19 nt, Artificial Sequence
  Description of Artificial Sequence: Synthetic oligonucleotide
aaaaucaugacaaaauucu

SEQ ID NO: 1784905 - RNA, 19 nt, Artificial Sequence
  Description of Artificial Sequence: Synthetic oligonucleotide
uuugucuuaaaccacaguc

SEQ ID NO: 1784906 - RNA, 19 nt, Artificial Sequence
  Description of Artificial Sequence: Synthetic oligonucleotide
uguuucauaaaauuccugc

SEQ ID NO: 1784907 - RNA, 19 nt, Artificial Sequence
  Description of Artificial Sequence: Synthetic oligonucleotide
acauguuuaaauuuaacca

SEQ ID NO: 1784908 - RNA, 19 nt, Artificial Sequence
  Description of Artificial Sequence: Synthetic oligonucleotide
uguuucagugcuuugaacc

SEQ ID NO: 1784909 - RNA, 19 nt, Artificial Sequence
  Description of Artificial Sequence: Synthetic oligonucleotide
uaaauuuaaccaacgguag

SEQ ID NO: 1784910 - RNA, 19 nt, Artificial Sequence
  Description of Artificial Sequence: Synthetic oligonucleotide
ucugccauaacuccaauca

SEQ ID NO: 1784911 - RNA, 19 nt, Artificial Sequence
  Description of Artificial Sequence: Synthetic oligonucleotide
uguuuaaauuuaaccaacg

SEQ ID NO: 1784912 - RNA, 19 nt, Artificial Sequence
  Description of Artificial Sequence: Synthetic oligonucleotide
cauagaguugcuuuuaagc

SEQ ID NO: 1784913 - RNA, 19 nt, Artificial Sequence
  Description of Artificial Sequence: Synthetic oligonucleotide
aaucaauuugaaguuaauc

SEQ ID NO: 1784914 - RNA, 19 nt, Artificial Sequence
  Description of Artificial Sequence: Synthetic oligonucleotide
agaguuacuaucuucggag

SEQ ID NO: 1784915 - RNA, 19 nt, Artificial Sequence
  Description of Artificial Sequence: Synthetic oligonucleotide
auuauuacgguguuguaug

SEQ ID NO: 1784916 - RNA, 19 nt, Artificial Sequence
  Description of Artificial Sequence: Synthetic oligonucleotide
uacauuugaaucuccaaag

SEQ ID NO: 1784917 - RNA, 19 nt, Artificial Sequence
  Description of Artificial Sequence: Synthetic oligonucleotide
uuuuccaaauccacguugg

SEQ ID NO: 1784918 - RNA, 19 nt, Artificial Sequence
  Description of Artificial Sequence: Synthetic oligonucleotide
ugauagauuauuacggugu

SEQ ID NO: 1784919 - RNA, 19 nt, Artificial Sequence
  Description of Artificial Sequence: Synthetic oligonucleotide
aaucaugacaaaauucuuc

SEQ ID NO: 1784920 - RNA, 19 nt, Artificial Sequence
  Description of Artificial Sequence: Synthetic oligonucleotide
uugaucaucuguuucagug

SEQ ID NO: 1784921 - RNA, 19 nt, Artificial Sequence
  Description of Artificial Sequence: Synthetic oligonucleotide
uucggaguacuccaggucg

SEQ ID NO: 1784922 - RNA, 19 nt, Artificial Sequence
  Description of Artificial Sequence: Synthetic oligonucleotide
acucucaugacacaccaac

SEQ ID NO: 1784923 - RNA, 19 nt, Artificial Sequence
  Description of Artificial Sequence: Synthetic oligonucleotide
uuuucuugggauaaaugca

SEQ ID NO: 1784924 - RNA, 19 nt, Artificial Sequence
  Description of Artificial Sequence: Synthetic oligonucleotide
aaagcauagauuucuaaua

SEQ ID NO: 1784925 - RNA, 19 nt, Artificial Sequence
  Description of Artificial Sequence: Synthetic oligonucleotide
cacagcauaaaucccaugg

SEQ ID NO: 1784926 - RNA, 19 nt, Artificial Sequence
  Description of Artificial Sequence: Synthetic oligonucleotide
agacugauguaacuggcgc

SEQ ID NO: 1784927 - RNA, 19 nt, Artificial Sequence
  Description of Artificial Sequence: Synthetic oligonucleotide
auuaagccaguuuacugac

SEQ ID NO: 1784928 - RNA, 19 nt, Artificial Sequence
  Description of Artificial Sequence: Synthetic oligonucleotide
agucugacaagacugaugu

SEQ ID NO: 1784929 - RNA, 19 nt, Artificial Sequence
  Description of Artificial Sequence: Synthetic oligonucleotide
uucuuagcaucuuucaaag

SEQ ID NO: 1784930 - RNA, 19 nt, Artificial Sequence
  Description of Artificial Sequence: Synthetic oligonucleotide
guugacuugaucaauucgg

SEQ ID NO: 1784931 - RNA, 19 nt, Artificial Sequence
  Description of Artificial Sequence: Synthetic oligonucleotide
caugaaaucauccuccaug

SEQ ID NO: 1784932 - RNA, 19 nt, Artificial Sequence
  Description of Artificial Sequence: Synthetic oligonucleotide
gaauuuaguugguuggucc

SEQ ID NO: 1784933 - RNA, 19 nt, Artificial Sequence
  Description of Artificial Sequence: Synthetic oligonucleotide
ugauuuuccaaauccacgu

SEQ ID NO: 1784934 - RNA, 19 nt, Artificial Sequence
  Description of Artificial Sequence: Synthetic oligonucleotide
uuugaagcuuuccauauuc

SEQ ID NO: 1784935 - RNA, 19 nt, Artificial Sequence
  Description of Artificial Sequence: Synthetic oligonucleotide
ucucaugacacaccaaccc

SEQ ID NO: 1784936 - RNA, 19 nt, Artificial Sequence
  Description of Artificial Sequence: Synthetic oligonucleotide
ugaagugauuugcucauag

SEQ ID NO: 1784937 - RNA, 19 nt, Artificial Sequence
  Description of Artificial Sequence: Synthetic oligonucleotide
ucucugaugacacccauga

SEQ ID NO: 1784938 - RNA, 19 nt, Artificial Sequence
  Description of Artificial Sequence: Synthetic oligonucleotide
aucaugacaaaauucuuca

SEQ ID NO: 1784939 - RNA, 19 nt, Artificial Sequence
  Description of Artificial Sequence: Synthetic oligonucleotide
auuauaguacugauuuucc

SEQ ID NO: 1784940 - RNA, 19 nt, Artificial Sequence
  Description of Artificial Sequence: Synthetic oligonucleotide
uucuuagaaagucuuacaa

SEQ ID NO: 1784941 - RNA, 19 nt, Artificial Sequence
  Description of Artificial Sequence: Synthetic oligonucleotide
ucuaucauucuuagcaucu

SEQ ID NO: 1784942 - RNA, 19 nt, Artificial Sequence
  Description of Artificial Sequence: Synthetic oligonucleotide
aauucggccaugaauagug

SEQ ID NO: 1784943 - RNA, 19 nt, Artificial Sequence
  Description of Artificial Sequence: Synthetic oligonucleotide
aguuuugccuuuccagucc

SEQ ID NO: 1784944 - RNA, 19 nt, Artificial Sequence
  Description of Artificial Sequence: Synthetic oligonucleotide
ucuccauuaagccaguuua

SEQ ID NO: 1784945 - RNA, 19 nt, Artificial Sequence
  Description of Artificial Sequence: Synthetic oligonucleotide
uuuuggaaacugcuuagug

SEQ ID NO: 1784946 - RNA, 19 nt, Artificial Sequence
  Description of Artificial Sequence: Synthetic oligonucleotide
aauuuaguugguuggucca

SEQ ID NO: 1784947 - RNA, 19 nt, Artificial Sequence
  Description of Artificial Sequence: Synthetic oligonucleotide
caauuugaaguuaaucuug

SEQ ID NO: 1784948 - RNA, 19 nt, Artificial Sequence
  Description of Artificial Sequence: Synthetic oligonucleotide
ugaugauccaguucaagga

SEQ ID NO: 1784949 - RNA, 19 nt, Artificial Sequence
  Description of Artificial Sequence: Synthetic oligonucleotide
auaaaugcagcagcaaaac

SEQ ID NO: 1784950 - RNA, 19 nt, Artificial Sequence
  Description of Artificial Sequence: Synthetic oligonucleotide
uuucuaauaacuggguacc

SEQ ID NO: 1784951 - RNA, 19 nt, Artificial Sequence
  Description of Artificial Sequence: Synthetic oligonucleotide
accuucgaguuccaaaacc

SEQ ID NO: 1784952 - RNA, 19 nt, Artificial Sequence
  Description of Artificial Sequence: Synthetic oligonucleotide
aagcauagauuucuaauaa

SEQ ID NO: 1784953 - RNA, 19 nt, Artificial Sequence
  Description of Artificial Sequence: Synthetic oligonucleotide
cuuagaaagucuuacaaaa

SEQ ID NO: 1784954 - RNA, 19 nt, Artificial Sequence
  Description of Artificial Sequence: Synthetic oligonucleotide
uaagccaguuuacugacca

SEQ ID NO: 1784955 - RNA, 19 nt, Artificial Sequence
  Description of Artificial Sequence: Synthetic oligonucleotide
aguacugauuuuccaaauc

SEQ ID NO: 1784956 - RNA, 19 nt, Artificial Sequence
  Description of Artificial Sequence: Synthetic oligonucleotide
uuaucuucuuagaaagucu

SEQ ID NO: 1784957 - RNA, 19 nt, Artificial Sequence
  Description of Artificial Sequence: Synthetic oligonucleotide
uagauuauuacgguguugu

SEQ ID NO: 1784958 - RNA, 19 nt, Artificial Sequence
  Description of Artificial Sequence: Synthetic oligonucleotide
uugucuuaaaccacagucu

SEQ ID NO: 1784959 - RNA, 19 nt, Artificial Sequence
  Description of Artificial Sequence: Synthetic oligonucleotide
agcauagauuucuaauaac

SEQ ID NO: 1784960 - RNA, 19 nt, Artificial Sequence
  Description of Artificial Sequence: Synthetic oligonucleotide
caguaaaucaauuugaagu

SEQ ID NO: 1784961 - RNA, 19 nt, Artificial Sequence
  Description of Artificial Sequence: Synthetic oligonucleotide
cagucuaucauucuuagca

SEQ ID NO: 1784962 - RNA, 19 nt, Artificial Sequence
  Description of Artificial Sequence: Synthetic oligonucleotide
aguguuaucuucuuagaaa

SEQ ID NO: 1784963 - RNA, 19 nt, Artificial Sequence
  Description of Artificial Sequence: Synthetic oligonucleotide
ucuuucaaugcuuuggaau

SEQ ID NO: 1784964 - RNA, 19 nt, Artificial Sequence
  Description of Artificial Sequence: Synthetic oligonucleotide
uaucuagugcaguguaucg

SEQ ID NO: 1784965 - RNA, 19 nt, Artificial Sequence
  Description of Artificial Sequence: Synthetic oligonucleotide
aggaacaacauguuuaaau

SEQ ID NO: 1784966 - RNA, 19 nt, Artificial Sequence
  Description of Artificial Sequence: Synthetic oligonucleotide
uuauuugugagagaauuuc

SEQ ID NO: 1784967 - RNA, 19 nt, Artificial Sequence
  Description of Artificial Sequence: Synthetic oligonucleotide
gacuugaucaauucggcca

SEQ ID NO: 1784968 - RNA, 19 nt, Artificial Sequence
  Description of Artificial Sequence: Synthetic oligonucleotide
uugaaucuccaaagcauag

SEQ ID NO: 1784969 - RNA, 19 nt, Artificial Sequence
  Description of Artificial Sequence: Synthetic oligonucleotide
ugacacaccaacccacagg

SEQ ID NO: 1784970 - RNA, 19 nt, Artificial Sequence
  Description of Artificial Sequence: Synthetic oligonucleotide
ugcagguuauuugugagag

SEQ ID NO: 1784971 - RNA, 19 nt, Artificial Sequence
  Description of Artificial Sequence: Synthetic oligonucleotide
gauuugcucauagaguugc

SEQ ID NO: 1784972 - RNA, 19 nt, Artificial Sequence
  Description of Artificial Sequence: Synthetic oligonucleotide
ugcuguguacauuugaauc

SEQ ID NO: 1784973 - RNA, 19 nt, Artificial Sequence
  Description of Artificial Sequence: Synthetic oligonucleotide
ucuuagaaagucuuacaaa

SEQ ID NO: 1784974 - RNA, 19 nt, Artificial Sequence
  Description of Artificial Sequence: Synthetic oligonucleotide
uugacuugaucaauucggc

SEQ ID NO: 1784975 - RNA, 19 nt, Artificial Sequence
  Description of Artificial Sequence: Synthetic oligonucleotide
uuugaaucuccaaagcaua

SEQ ID NO: 1784976 - RNA, 19 nt, Artificial Sequence
  Description of Artificial Sequence: Synthetic oligonucleotide
aguguuguuucauaaaauu

SEQ ID NO: 1784977 - RNA, 19 nt, Artificial Sequence
  Description of Artificial Sequence: Synthetic oligonucleotide
uguaacuggcgcaaaauuu

SEQ ID NO: 1784978 - RNA, 19 nt, Artificial Sequence
  Description of Artificial Sequence: Synthetic oligonucleotide
uugugagagaauuucugca

SEQ ID NO: 1784979 - RNA, 19 nt, Artificial Sequence
  Description of Artificial Sequence: Synthetic oligonucleotide
augauagauuauuacggug

SEQ ID NO: 1784980 - RNA, 19 nt, Artificial Sequence
  Description of Artificial Sequence: Synthetic oligonucleotide
uguuguauguuuagggcaa

SEQ ID NO: 1784981 - RNA, 19 nt, Artificial Sequence
  Description of Artificial Sequence: Synthetic oligonucleotide
ucuucuuagaaagucuuac

SEQ ID NO: 1784982 - RNA, 19 nt, Artificial Sequence
  Description of Artificial Sequence: Synthetic oligonucleotide
caugaauaguguuaucuuc

SEQ ID NO: 1784983 - RNA, 19 nt, Artificial Sequence
  Description of Artificial Sequence: Synthetic oligonucleotide
aagcuuguucuccauuaag

SEQ ID NO: 1784984 - RNA, 19 nt, Artificial Sequence
  Description of Artificial Sequence: Synthetic oligonucleotide
ucaacacagcauaaauccc

SEQ ID NO: 1784985 - RNA, 19 nt, Artificial Sequence
  Description of Artificial Sequence: Synthetic oligonucleotide
ugucaacacagcauaaauc

SEQ ID NO: 1784986 - RNA, 19 nt, Artificial Sequence
  Description of Artificial Sequence: Synthetic oligonucleotide
ugguccauuuaucuagugc

SEQ ID NO: 1784987 - RNA, 19 nt, Artificial Sequence
  Description of Artificial Sequence: Synthetic oligonucleotide
aauuucgccuucucucaag

SEQ ID NO: 1784988 - RNA, 19 nt, Artificial Sequence
  Description of Artificial Sequence: Synthetic oligonucleotide
ucagaguuacuaucuucgg

SEQ ID NO: 1784989 - RNA, 19 nt, Artificial Sequence
  Description of Artificial Sequence: Synthetic oligonucleotide
ugucuuaaaccacagucua

SEQ ID NO: 1784990 - RNA, 19 nt, Artificial Sequence
  Description of Artificial Sequence: Synthetic oligonucleotide
guauguuuagggcaagaug

SEQ ID NO: 1784991 - RNA, 19 nt, Artificial Sequence
  Description of Artificial Sequence: Synthetic oligonucleotide
uggagauuaaagcuguuuu

SEQ ID NO: 1784992 - RNA, 19 nt, Artificial Sequence
  Description of Artificial Sequence: Synthetic oligonucleotide
cagagaauuuaguugguug

SEQ ID NO: 1784993 - RNA, 19 nt, Artificial Sequence
  Description of Artificial Sequence: Synthetic oligonucleotide
gacaagacugauguaacug

SEQ ID NO: 1784994 - RNA, 19 nt, Artificial Sequence
  Description of Artificial Sequence: Synthetic oligonucleotide
aacccacaggaguuuugcc

SEQ ID NO: 1784995 - RNA, 19 nt, Artificial Sequence
  Description of Artificial Sequence: Synthetic oligonucleotide
uuccaaaaccuuuuggaaa

SEQ ID NO: 1784996 - RNA, 19 nt, Artificial Sequence
  Description of Artificial Sequence: Synthetic oligonucleotide
cuugaugugaagugauuug

SEQ ID NO: 1784997 - RNA, 19 nt, Artificial Sequence
  Description of Artificial Sequence: Synthetic oligonucleotide
ugucaguguguuuaaaauc

SEQ ID NO: 1784998 - RNA, 19 nt, Artificial Sequence
  Description of Artificial Sequence: Synthetic oligonucleotide
cuucauucuggucauguug

SEQ ID NO: 1784999 - RNA, 19 nt, Artificial Sequence
  Description of Artificial Sequence: Synthetic oligonucleotide
ucauagaguugcuuuuaag

SEQ ID NO: 1785000 - RNA, 19 nt, Artificial Sequence
  Description of Artificial Sequence: Synthetic oligonucleotide
aguguaucgggcaccaccc

SEQ ID NO: 1785001 - RNA, 19 nt, Artificial Sequence
  Description of Artificial Sequence: Synthetic oligonucleotide
ugccauaacuccaaucacu

SEQ ID NO: 1785002 - RNA, 19 nt, Artificial Sequence
  Description of Artificial Sequence: Synthetic oligonucleotide
ugcuuagugcugcuuuugg

SEQ ID NO: 1785003 - RNA, 19 nt, Artificial Sequence
  Description of Artificial Sequence: Synthetic oligonucleotide
ugaucagugggugagggga

SEQ ID NO: 1785004 - RNA, 19 nt, Artificial Sequence
  Description of Artificial Sequence: Synthetic oligonucleotide
auuucaaguuauugcaggu

SEQ ID NO: 1785005 - RNA, 19 nt, Artificial Sequence
  Description of Artificial Sequence: Synthetic oligonucleotide
cauuaagccaguuuacuga

SEQ ID NO: 1785006 - RNA, 19 nt, Artificial Sequence
  Description of Artificial Sequence: Synthetic oligonucleotide
gacacccaugaucaguggg

SEQ ID NO: 1785007 - RNA, 19 nt, Artificial Sequence
  Description of Artificial Sequence: Synthetic oligonucleotide
aaaccuuuuggaaacugcu

SEQ ID NO: 1785008 - RNA, 19 nt, Artificial Sequence
  Description of Artificial Sequence: Synthetic oligonucleotide
aagacugauguaacuggcg

SEQ ID NO: 1785009 - RNA, 19 nt, Artificial Sequence
  Description of Artificial Sequence: Synthetic oligonucleotide
cacugaugccuuaagcacg

SEQ ID NO: 1785010 - RNA, 19 nt, Artificial Sequence
  Description of Artificial Sequence: Synthetic oligonucleotide
guuucauaaaauuccugca

SEQ ID NO: 1785011 - RNA, 19 nt, Artificial Sequence
  Description of Artificial Sequence: Synthetic oligonucleotide
ugugcuguguacauuugaa

SEQ ID NO: 1785012 - RNA, 19 nt, Artificial Sequence
  Description of Artificial Sequence: Synthetic oligonucleotide
uuauugcagguuauuugug

SEQ ID NO: 1785013 - RNA, 19 nt, Artificial Sequence
  Description of Artificial Sequence: Synthetic oligonucleotide
ucaccuucgaguuccaaaa

SEQ ID NO: 1785014 - RNA, 19 nt, Artificial Sequence
  Description of Artificial Sequence: Synthetic oligonucleotide
ucaauucggccaugaauag

SEQ ID NO: 1785015 - RNA, 19 nt, Artificial Sequence
  Description of Artificial Sequence: Synthetic oligonucleotide
ucuugggauaaaugcagca

SEQ ID NO: 1785016 - RNA, 19 nt, Artificial Sequence
  Description of Artificial Sequence: Synthetic oligonucleotide
uaguguuaucuucuuagaa

SEQ ID NO: 1785017 - RNA, 19 nt, Artificial Sequence
  Description of Artificial Sequence: Synthetic oligonucleotide
cccaugauagauuauuacg

SEQ ID NO: 1785018 - RNA, 19 nt, Artificial Sequence
  Description of Artificial Sequence: Synthetic oligonucleotide
auaguacugauuuuccaaa

SEQ ID NO: 1785019 - RNA, 19 nt, Artificial Sequence
  Description of Artificial Sequence: Synthetic oligonucleotide
ugagagaauuucugcagga

SEQ ID NO: 1785020 - RNA, 19 nt, Artificial Sequence
  Description of Artificial Sequence: Synthetic oligonucleotide
ugcuuuugggucaucuucu

SEQ ID NO: 1785021 - RNA, 19 nt, Artificial Sequence
  Description of Artificial Sequence: Synthetic oligonucleotide
aaggaguugguugacuuga

SEQ ID NO: 1785022 - RNA, 19 nt, Artificial Sequence
  Description of Artificial Sequence: Synthetic oligonucleotide
aucgcacaugaaaucaucc

SEQ ID NO: 1785023 - RNA, 19 nt, Artificial Sequence
  Description of Artificial Sequence: Synthetic oligonucleotide
ucucgcucuaaauauaauu

SEQ ID NO: 1785024 - RNA, 19 nt, Artificial Sequence
  Description of Artificial Sequence: Synthetic oligonucleotide
caagacugauguaacuggc

SEQ ID NO: 1785025 - RNA, 19 nt, Artificial Sequence
  Description of Artificial Sequence: Synthetic oligonucleotide
cuuaagcacgccugcaaag

SEQ ID NO: 1785026 - RNA, 19 nt, Artificial Sequence
  Description of Artificial Sequence: Synthetic oligonucleotide
ugacuugaucaauucggcc

SEQ ID NO: 1785027 - RNA, 19 nt, Artificial Sequence
  Description of Artificial Sequence: Synthetic oligonucleotide
ugugaagugauuugcucau

SEQ ID NO: 1785028 - RNA, 19 nt, Artificial Sequence
  Description of Artificial Sequence: Synthetic oligonucleotide
agaauuuaguugguugguc

SEQ ID NO: 1785029 - RNA, 19 nt, Artificial Sequence
  Description of Artificial Sequence: Synthetic oligonucleotide
aucaauucggccaugaaua

SEQ ID NO: 1785030 - RNA, 19 nt, Artificial Sequence
  Description of Artificial Sequence: Synthetic oligonucleotide
caguucaaggaguugguug

SEQ ID NO: 1785031 - RNA, 19 nt, Artificial Sequence
  Description of Artificial Sequence: Synthetic oligonucleotide
gauaaaugcagcagcaaaa

SEQ ID NO: 1785032 - RNA, 19 nt, Artificial Sequence
  Description of Artificial Sequence: Synthetic oligonucleotide
gaugccuuaagcacgccug

SEQ ID NO: 1785033 - RNA, 19 nt, Artificial Sequence
  Description of Artificial Sequence: Synthetic oligonucleotide
uguuaucuucuuagaaagu

SEQ ID NO: 1785034 - RNA, 19 nt, Artificial Sequence
  Description of Artificial Sequence: Synthetic oligonucleotide
aucauucuuagcaucuuuc

SEQ ID NO: 1785035 - RNA, 19 nt, Artificial Sequence
  Description of Artificial Sequence: Synthetic oligonucleotide
aggaucacaucucugcacu

SEQ ID NO: 1785036 - RNA, 19 nt, Artificial Sequence
  Description of Artificial Sequence: Synthetic oligonucleotide
guuauugcagguuauuugu

SEQ ID NO: 1785037 - RNA, 19 nt, Artificial Sequence
  Description of Artificial Sequence: Synthetic oligonucleotide
aguugguugguccauuuau

SEQ ID NO: 1785038 - RNA, 19 nt, Artificial Sequence
  Description of Artificial Sequence: Synthetic oligonucleotide
acugaugccuuaagcacgc

SEQ ID NO: 1785039 - RNA, 19 nt, Artificial Sequence
  Description of Artificial Sequence: Synthetic oligonucleotide
guacauuugaaucuccaaa

SEQ ID NO: 1785040 - RNA, 19 nt, Artificial Sequence
  Description of Artificial Sequence: Synthetic oligonucleotide
aguccuuaaggaucacauc

SEQ ID NO: 1785041 - RNA, 19 nt, Artificial Sequence
  Description of Artificial Sequence: Synthetic oligonucleotide
uguguacauuugaaucucc

SEQ ID NO: 1785042 - RNA, 19 nt, Artificial Sequence
  Description of Artificial Sequence: Synthetic oligonucleotide
uuaucuagugcaguguauc

SEQ ID NO: 1785043 - RNA, 19 nt, Artificial Sequence
  Description of Artificial Sequence: Synthetic oligonucleotide
ggaauuauaguacugauuu

SEQ ID NO: 1785044 - RNA, 19 nt, Artificial Sequence
  Description of Artificial Sequence: Synthetic oligonucleotide
auuugaaucuccaaagcau

SEQ ID NO: 1785045 - RNA, 19 nt, Artificial Sequence
  Description of Artificial Sequence: Synthetic oligonucleotide
gguguuguauguuuagggc

SEQ ID NO: 1785046 - RNA, 19 nt, Artificial Sequence
  Description of Artificial Sequence: Synthetic oligonucleotide
ugauuugcucauagaguug

SEQ ID NO: 1785047 - RNA, 19 nt, Artificial Sequence
  Description of Artificial Sequence: Synthetic oligonucleotide
uggaauuauaguacugauu

SEQ ID NO: 1785048 - RNA, 19 nt, Artificial Sequence
  Description of Artificial Sequence: Synthetic oligonucleotide
auuugugagagaauuucug

SEQ ID NO: 1785049 - RNA, 19 nt, Artificial Sequence
  Description of Artificial Sequence: Synthetic oligonucleotide
auuacgguguuguauguuu

SEQ ID NO: 1785050 - RNA, 19 nt, Artificial Sequence
  Description of Artificial Sequence: Synthetic oligonucleotide
guguguuuaaaaucaugac

SEQ ID NO: 1785051 - RNA, 19 nt, Artificial Sequence
  Description of Artificial Sequence: Synthetic oligonucleotide
augccuuaagcacgccugc

SEQ ID NO: 1785052 - RNA, 19 nt, Artificial Sequence
  Description of Artificial Sequence: Synthetic oligonucleotide
auaguguuaucuucuuaga

SEQ ID NO: 1785053 - RNA, 19 nt, Artificial Sequence
  Description of Artificial Sequence: Synthetic oligonucleotide
augucaacacagcauaaau

SEQ ID NO: 1785054 - RNA, 19 nt, Artificial Sequence
  Description of Artificial Sequence: Synthetic oligonucleotide
uuuaucuagugcaguguau

SEQ ID NO: 1785055 - RNA, 19 nt, Artificial Sequence
  Description of Artificial Sequence: Synthetic oligonucleotide
gguugacuugaucaauucg

SEQ ID NO: 1785056 - RNA, 19 nt, Artificial Sequence
  Description of Artificial Sequence: Synthetic oligonucleotide
guguuguauguuuagggca

SEQ ID NO: 1785057 - RNA, 19 nt, Artificial Sequence
  Description of Artificial Sequence: Synthetic oligonucleotide
acagcauaaaucccauggu

SEQ ID NO: 1785058 - RNA, 19 nt, Artificial Sequence
  Description of Artificial Sequence: Synthetic oligonucleotide
uucgccuucucucaaguuu

SEQ ID NO: 1785059 - RNA, 19 nt, Artificial Sequence
  Description of Artificial Sequence: Synthetic oligonucleotide
aaagcuuguucuccauuaa

SEQ ID NO: 1785060 - RNA, 19 nt, Artificial Sequence
  Description of Artificial Sequence: Synthetic oligonucleotide
aacuccaaucacucucaug

SEQ ID NO: 1785061 - RNA, 19 nt, Artificial Sequence
  Description of Artificial Sequence: Synthetic oligonucleotide
aacgguagugugucagugu

SEQ ID NO: 1785062 - RNA, 19 nt, Artificial Sequence
  Description of Artificial Sequence: Synthetic oligonucleotide
acgguagugugucagugug

SEQ ID NO: 1785063 - RNA, 19 nt, Artificial Sequence
  Description of Artificial Sequence: Synthetic oligonucleotide
uacgguguuguauguuuag

SEQ ID NO: 1785064 - RNA, 19 nt, Artificial Sequence
  Description of Artificial Sequence: Synthetic oligonucleotide
ugguucagagaauuuaguu

SEQ ID NO: 1785065 - RNA, 19 nt, Artificial Sequence
  Description of Artificial Sequence: Synthetic oligonucleotide
cagcauaaaucccauggug

SEQ ID NO: 1785066 - RNA, 19 nt, Artificial Sequence
  Description of Artificial Sequence: Synthetic oligonucleotide
caguguaucgggcaccacc

SEQ ID NO: 1785067 - RNA, 19 nt, Artificial Sequence
  Description of Artificial Sequence: Synthetic oligonucleotide
uuagugcugcuuuuggguc

SEQ ID NO: 1785068 - RNA, 19 nt, Artificial Sequence
  Description of Artificial Sequence: Synthetic oligonucleotide
agugauuugcucauagagu

SEQ ID NO: 1785069 - RNA, 19 nt, Artificial Sequence
  Description of Artificial Sequence: Synthetic oligonucleotide
ucaaguuauugcagguuau

SEQ ID NO: 1785070 - RNA, 19 nt, Artificial Sequence
  Description of Artificial Sequence: Synthetic oligonucleotide
uucgaguuccaaaaccuuu

SEQ ID NO: 1785071 - RNA, 19 nt, Artificial Sequence
  Description of Artificial Sequence: Synthetic oligonucleotide
aucuagugcaguguaucgg

SEQ ID NO: 1785072 - RNA, 19 nt, Artificial Sequence
  Description of Artificial Sequence: Synthetic oligonucleotide
uagaguugcuuuuaagcuu

SEQ ID NO: 1785073 - RNA, 19 nt, Artificial Sequence
  Description of Artificial Sequence: Synthetic oligonucleotide
acgccugcaaagcuuguuc

SEQ ID NO: 1785074 - RNA, 19 nt, Artificial Sequence
  Description of Artificial Sequence: Synthetic oligonucleotide
uuaagccaguuuacugacc

SEQ ID NO: 1785075 - RNA, 19 nt, Artificial Sequence
  Description of Artificial Sequence: Synthetic oligonucleotide
accuuuuggaaacugcuua

SEQ ID NO: 1785076 - RNA, 19 nt, Artificial Sequence
  Description of Artificial Sequence: Synthetic oligonucleotide
caacacagcauaaauccca

SEQ ID NO: 1785077 - RNA, 19 nt, Artificial Sequence
  Description of Artificial Sequence: Synthetic oligonucleotide
uguuuagggcaagauguca

SEQ ID NO: 1785078 - RNA, 19 nt, Artificial Sequence
  Description of Artificial Sequence: Synthetic oligonucleotide
aucuucggaguacuccagg

SEQ ID NO: 1785079 - RNA, 19 nt, Artificial Sequence
  Description of Artificial Sequence: Synthetic oligonucleotide
uagugugucaguguguuua

SEQ ID NO: 1785080 - RNA, 19 nt, Artificial Sequence
  Description of Artificial Sequence: Synthetic oligonucleotide
ugauguaacuggcgcaaaa

SEQ ID NO: 1785081 - RNA, 19 nt, Artificial Sequence
  Description of Artificial Sequence: Synthetic oligonucleotide
ucggccaugaauaguguua

SEQ ID NO: 1785082 - RNA, 19 nt, Artificial Sequence
  Description of Artificial Sequence: Synthetic oligonucleotide
uccauuaagccaguuuacu

SEQ ID NO: 1785083 - RNA, 19 nt, Artificial Sequence
  Description of Artificial Sequence: Synthetic oligonucleotide
uguaucgggcaccaccccu

SEQ ID NO: 1785084 - RNA, 19 nt, Artificial Sequence
  Description of Artificial Sequence: Synthetic oligonucleotide
uaagcacgccugcaaagcu

SEQ ID NO: 1785085 - RNA, 19 nt, Artificial Sequence
  Description of Artificial Sequence: Synthetic oligonucleotide
ucccuucucaccuucgagu

SEQ ID NO: 1785086 - RNA, 19 nt, Artificial Sequence
  Description of Artificial Sequence: Synthetic oligonucleotide
ugacaagacugauguaacu

SEQ ID NO: 1785087 - RNA, 19 nt, Artificial Sequence
  Description of Artificial Sequence: Synthetic oligonucleotide
ucgcacaugaaaucauccu

SEQ ID NO: 1785088 - RNA, 19 nt, Artificial Sequence
  Description of Artificial Sequence: Synthetic oligonucleotide
aaguuauugcagguuauuu

SEQ ID NO: 1785089 - RNA, 19 nt, Artificial Sequence
  Description of Artificial Sequence: Synthetic oligonucleotide
ucaaggaguugguugacuu

SEQ ID NO: 1785090 - RNA, 19 nt, Artificial Sequence
  Description of Artificial Sequence: Synthetic oligonucleotide
ugaugccuuaagcacgccu

SEQ ID NO: 1785091 - RNA, 19 nt, Artificial Sequence
  Description of Artificial Sequence: Synthetic oligonucleotide
caugaucagugggugaggg

SEQ ID NO: 1785092 - RNA, 19 nt, Artificial Sequence
  Description of Artificial Sequence: Synthetic oligonucleotide
ucuucggaguacuccaggu

SEQ ID NO: 1785093 - RNA, 19 nt, Artificial Sequence
  Description of Artificial Sequence: Synthetic oligonucleotide
uuauuacgguguuguaugu

SEQ ID NO: 1785094 - RNA, 19 nt, Artificial Sequence
  Description of Artificial Sequence: Synthetic oligonucleotide
uguauguuuagggcaagau

SEQ ID NO: 1785095 - RNA, 19 nt, Artificial Sequence
  Description of Artificial Sequence: Synthetic oligonucleotide
uugguugacuugaucaauu

SEQ ID NO: 1785096 - RNA, 19 nt, Artificial Sequence
  Description of Artificial Sequence: Synthetic oligonucleotide
agucuaucauucuuagcau

SEQ ID NO: 1785097 - RNA, 19 nt, Artificial Sequence
  Description of Artificial Sequence: Synthetic oligonucleotide
aaauuucgccuucucucaa

SEQ ID NO: 1785098 - RNA, 19 nt, Artificial Sequence
  Description of Artificial Sequence: Synthetic oligonucleotide
uaucauucuuagcaucuuu

SEQ ID NO: 1785099 - RNA, 19 nt, Artificial Sequence
  Description of Artificial Sequence: Synthetic oligonucleotide
cugcaguaaaucaauuuga

SEQ ID NO: 1785100 - RNA, 19 nt, Artificial Sequence
  Description of Artificial Sequence: Synthetic oligonucleotide
caaauuucgccuucucuca

SEQ ID NO: 1785101 - RNA, 19 nt, Artificial Sequence
  Description of Artificial Sequence: Synthetic oligonucleotide
ccaaucacucucaugacac

SEQ ID NO: 1785102 - RNA, 19 nt, Artificial Sequence
  Description of Artificial Sequence: Synthetic oligonucleotide
uuucagugcuuugaacccc

SEQ ID NO: 1785103 - RNA, 19 nt, Artificial Sequence
  Description of Artificial Sequence: Synthetic oligonucleotide
ucgcucuaaauauaauuuu

SEQ ID NO: 1785104 - RNA, 19 nt, Artificial Sequence
  Description of Artificial Sequence: Synthetic oligonucleotide
uaaccaacgguaguguguc

SEQ ID NO: 1785105 - RNA, 19 nt, Artificial Sequence
  Description of Artificial Sequence: Synthetic oligonucleotide
uuuucaaauuucgccuucu

SEQ ID NO: 1785106 - RNA, 19 nt, Artificial Sequence
  Description of Artificial Sequence: Synthetic oligonucleotide
acacaaaccaguugaucaa

SEQ ID NO: 1785107 - RNA, 19 nt, Artificial Sequence
  Description of Artificial Sequence: Synthetic oligonucleotide
gaucaauucggccaugaau

SEQ ID NO: 1785108 - RNA, 19 nt, Artificial Sequence
  Description of Artificial Sequence: Synthetic oligonucleotide
auccacguugggcucagag

SEQ ID NO: 1785109 - RNA, 19 nt, Artificial Sequence
  Description of Artificial Sequence: Synthetic oligonucleotide
uucagagaauuuaguuggu

SEQ ID NO: 1785110 - RNA, 19 nt, Artificial Sequence
  Description of Artificial Sequence: Synthetic oligonucleotide
augaucagugggugagggg

SEQ ID NO: 1785111 - RNA, 19 nt, Artificial Sequence
  Description of Artificial Sequence: Synthetic oligonucleotide
ucuccaaagcauagauuuc

SEQ ID NO: 1785112 - RNA, 19 nt, Artificial Sequence
  Description of Artificial Sequence: Synthetic oligonucleotide
auuucgccuucucucaagu

SEQ ID NO: 1785113 - RNA, 19 nt, Artificial Sequence
  Description of Artificial Sequence: Synthetic oligonucleotide
ugggcucagaguuacuauc

SEQ ID NO: 1785114 - RNA, 19 nt, Artificial Sequence
  Description of Artificial Sequence: Synthetic oligonucleotide
uccaguucaaggaguuggu

SEQ ID NO: 1785115 - RNA, 19 nt, Artificial Sequence
  Description of Artificial Sequence: Synthetic oligonucleotide
aaaacacaaaccaguugau

SEQ ID NO: 1785116 - RNA, 19 nt, Artificial Sequence
  Description of Artificial Sequence: Synthetic oligonucleotide
uccugcaguaaaucaauuu

SEQ ID NO: 1785117 - RNA, 19 nt, Artificial Sequence
  Description of Artificial Sequence: Synthetic oligonucleotide
caucaucgcacaugaaauc

SEQ ID NO: 1785118 - RNA, 19 nt, Artificial Sequence
  Description of Artificial Sequence: Synthetic oligonucleotide
uagugcaguguaucgggca

SEQ ID NO: 1785119 - RNA, 19 nt, Artificial Sequence
  Description of Artificial Sequence: Synthetic oligonucleotide
uuuugaagcuuuccauauu

SEQ ID NO: 1785120 - RNA, 19 nt, Artificial Sequence
  Description of Artificial Sequence: Synthetic oligonucleotide
cuucuuagaaagucuuaca

SEQ ID NO: 1785121 - RNA, 19 nt, Artificial Sequence
  Description of Artificial Sequence: Synthetic oligonucleotide
uccauuuaucuagugcagu

SEQ ID NO: 1785122 - RNA, 19 nt, Artificial Sequence
  Description of Artificial Sequence: Synthetic oligonucleotide
aguuacuaucuucggagua

SEQ ID NO: 1785123 - RNA, 19 nt, Artificial Sequence
  Description of Artificial Sequence: Synthetic oligonucleotide
cuccauuaagccaguuuac

SEQ ID NO: 1785124 - RNA, 19 nt, Artificial Sequence
  Description of Artificial Sequence: Synthetic oligonucleotide
uccacguugggcucagagu

SEQ ID NO: 1785125 - RNA, 19 nt, Artificial Sequence
  Description of Artificial Sequence: Synthetic oligonucleotide
uuacuaucuucggaguacu

SEQ ID NO: 1785126 - RNA, 19 nt, Artificial Sequence
  Description of Artificial Sequence: Synthetic oligonucleotide
ucugcaggaacaacauguu

SEQ ID NO: 1785127 - RNA, 19 nt, Artificial Sequence
  Description of Artificial Sequence: Synthetic oligonucleotide
augacacccaugaucagug

SEQ ID NO: 1785128 - RNA, 19 nt, Artificial Sequence
  Description of Artificial Sequence: Synthetic oligonucleotide
gacugauguaacuggcgca

SEQ ID NO: 1785129 - RNA, 19 nt, Artificial Sequence
  Description of Artificial Sequence: Synthetic oligonucleotide
aaaucaauuugaaguuaau

SEQ ID NO: 1785130 - RNA, 19 nt, Artificial Sequence
  Description of Artificial Sequence: Synthetic oligonucleotide
ugguugacuugaucaauuc

SEQ ID NO: 1785131 - RNA, 19 nt, Artificial Sequence
  Description of Artificial Sequence: Synthetic oligonucleotide
cuagugcaguguaucgggc

SEQ ID NO: 1785132 - RNA, 19 nt, Artificial Sequence
  Description of Artificial Sequence: Synthetic oligonucleotide
auaaaucccaugguguuuu

SEQ ID NO: 1785133 - RNA, 19 nt, Artificial Sequence
  Description of Artificial Sequence: Synthetic oligonucleotide
auagauuauuacgguguug

SEQ ID NO: 1785134 - RNA, 19 nt, Artificial Sequence
  Description of Artificial Sequence: Synthetic oligonucleotide
cagguuauuugugagagaa

SEQ ID NO: 1785135 - RNA, 19 nt, Artificial Sequence
  Description of Artificial Sequence: Synthetic oligonucleotide
acuugaugugaagugauuu

SEQ ID NO: 1785136 - RNA, 19 nt, Artificial Sequence
  Description of Artificial Sequence: Synthetic oligonucleotide
auaacuccaaucacucuca

SEQ ID NO: 1785137 - RNA, 19 nt, Artificial Sequence
  Description of Artificial Sequence: Synthetic oligonucleotide
ucagugggugaggggaugg

SEQ ID NO: 1785138 - RNA, 19 nt, Artificial Sequence
  Description of Artificial Sequence: Synthetic oligonucleotide
ucagacaucuuggccggag

SEQ ID NO: 1785139 - RNA, 19 nt, Artificial Sequence
  Description of Artificial Sequence: Synthetic oligonucleotide
ucuaauaacuggguaccuu

SEQ ID NO: 1785140 - RNA, 19 nt, Artificial Sequence
  Description of Artificial Sequence: Synthetic oligonucleotide
cagucugacaagacugaug

SEQ ID NO: 1785141 - RNA, 19 nt, Artificial Sequence
  Description of Artificial Sequence: Synthetic oligonucleotide
uagugcugcuuuuggguca

SEQ ID NO: 1785142 - RNA, 19 nt, Artificial Sequence
  Description of Artificial Sequence: Synthetic oligonucleotide
accaacgguagugugucag

SEQ ID NO: 1785143 - RNA, 19 nt, Artificial Sequence
  Description of Artificial Sequence: Synthetic oligonucleotide
caucgcacaugaaaucauc

SEQ ID NO: 1785144 - RNA, 19 nt, Artificial Sequence
  Description of Artificial Sequence: Synthetic oligonucleotide
ugaucaauucggccaugaa

SEQ ID NO: 1785145 - RNA, 19 nt, Artificial Sequence
  Description of Artificial Sequence: Synthetic oligonucleotide
cuuagugcugcuuuugggu

SEQ ID NO: 1785146 - RNA, 19 nt, Artificial Sequence
  Description of Artificial Sequence: Synthetic oligonucleotide
ugacacccaugaucagugg

SEQ ID NO: 1785147 - RNA, 19 nt, Artificial Sequence
  Description of Artificial Sequence: Synthetic oligonucleotide
acgguguuguauguuuagg

SEQ ID NO: 1785148 - RNA, 19 nt, Artificial Sequence
  Description of Artificial Sequence: Synthetic oligonucleotide
uuacgguguuguauguuua

SEQ ID NO: 1785149 - RNA, 19 nt, Artificial Sequence
  Description of Artificial Sequence: Synthetic oligonucleotide
ggauaaaugcagcagcaaa

SEQ ID NO: 1785150 - RNA, 19 nt, Artificial Sequence
  Description of Artificial Sequence: Synthetic oligonucleotide
ugcccaugauagauuauua

SEQ ID NO: 1785151 - RNA, 19 nt, Artificial Sequence
  Description of Artificial Sequence: Synthetic oligonucleotide
ugcucauagaguugcuuuu

SEQ ID NO: 1785152 - RNA, 19 nt, Artificial Sequence
  Description of Artificial Sequence: Synthetic oligonucleotide
acugauguaacuggcgcaa

SEQ ID NO: 1785153 - RNA, 19 nt, Artificial Sequence
  Description of Artificial Sequence: Synthetic oligonucleotide
gaugucaacacagcauaaa

SEQ ID NO: 1785154 - RNA, 19 nt, Artificial Sequence
  Description of Artificial Sequence: Synthetic oligonucleotide
auguuuagggcaagauguc

SEQ ID NO: 1785155 - RNA, 19 nt, Artificial Sequence
  Description of Artificial Sequence: Synthetic oligonucleotide
acguugggcucagaguuac

SEQ ID NO: 1785156 - RNA, 19 nt, Artificial Sequence
  Description of Artificial Sequence: Synthetic oligonucleotide
caaaaccuuuuggaaacug

SEQ ID NO: 1785157 - RNA, 19 nt, Artificial Sequence
  Description of Artificial Sequence: Synthetic oligonucleotide
cauucuggucauguugccc

SEQ ID NO: 1785158 - RNA, 19 nt, Artificial Sequence
  Description of Artificial Sequence: Synthetic oligonucleotide
ugggcagacuugaugugaa

SEQ ID NO: 1785159 - RNA, 19 nt, Artificial Sequence
  Description of Artificial Sequence: Synthetic oligonucleotide
caugauagauuauuacggu

SEQ ID NO: 1785160 - RNA, 19 nt, Artificial Sequence
  Description of Artificial Sequence: Synthetic oligonucleotide
ccauuuaucuagugcagug

SEQ ID NO: 1785161 - RNA, 19 nt, Artificial Sequence
  Description of Artificial Sequence: Synthetic oligonucleotide
caacccacaggaguuuugc

SEQ ID NO: 1785162 - RNA, 19 nt, Artificial Sequence
  Description of Artificial Sequence: Synthetic oligonucleotide
gaauaguguuaucuucuua

SEQ ID NO: 1785163 - RNA, 19 nt, Artificial Sequence
  Description of Artificial Sequence: Synthetic oligonucleotide
ucgccuucucucaaguuuu

SEQ ID NO: 1785164 - RNA, 19 nt, Artificial Sequence
  Description of Artificial Sequence: Synthetic oligonucleotide
uucugccauaacuccaauc

SEQ ID NO: 1785165 - RNA, 19 nt, Artificial Sequence
  Description of Artificial Sequence: Synthetic oligonucleotide
uugcccaugauagauuauu

SEQ ID NO: 1785166 - RNA, 19 nt, Artificial Sequence
  Description of Artificial Sequence: Synthetic oligonucleotide
cucaugacacaccaaccca

SEQ ID NO: 1785167 - RNA, 19 nt, Artificial Sequence
  Description of Artificial Sequence: Synthetic oligonucleotide
uuaguugguugguccauuu

SEQ ID NO: 1785168 - RNA, 19 nt, Artificial Sequence
  Description of Artificial Sequence: Synthetic oligonucleotide
ccauuaagccaguuuacug

SEQ ID NO: 1785169 - RNA, 19 nt, Artificial Sequence
  Description of Artificial Sequence: Synthetic oligonucleotide
cuucucgcucuaaauauaa

SEQ ID NO: 1785170 - RNA, 19 nt, Artificial Sequence
  Description of Artificial Sequence: Synthetic oligonucleotide
acaacauguuuaaauuuaa

SEQ ID NO: 1785171 - RNA, 19 nt, Artificial Sequence
  Description of Artificial Sequence: Synthetic oligonucleotide
cauaaaauuccugcaguaa

SEQ ID NO: 1785172 - RNA, 19 nt, Artificial Sequence
  Description of Artificial Sequence: Synthetic oligonucleotide
guccauuuaucuagugcag

SEQ ID NO: 1785173 - RNA, 19 nt, Artificial Sequence
  Description of Artificial Sequence: Synthetic oligonucleotide
agaguugcuuuuaagcuuu

SEQ ID NO: 1785174 - RNA, 19 nt, Artificial Sequence
  Description of Artificial Sequence: Synthetic oligonucleotide
cagcaaaacacaaaccagu

SEQ ID NO: 1785175 - RNA, 19 nt, Artificial Sequence
  Description of Artificial Sequence: Synthetic oligonucleotide
ucaaugcuuuggaauuaua

SEQ ID NO: 1785176 - RNA, 19 nt, Artificial Sequence
  Description of Artificial Sequence: Synthetic oligonucleotide
uugggcucagaguuacuau

SEQ ID NO: 1785177 - RNA, 19 nt, Artificial Sequence
  Description of Artificial Sequence: Synthetic oligonucleotide
cugccauaacuccaaucac

SEQ ID NO: 1785178 - RNA, 19 nt, Artificial Sequence
  Description of Artificial Sequence: Synthetic oligonucleotide
ucggaguacuccaggucgu

SEQ ID NO: 1785179 - RNA, 19 nt, Artificial Sequence
  Description of Artificial Sequence: Synthetic oligonucleotide
cucgcucuaaauauaauuu

SEQ ID NO: 1785180 - RNA, 19 nt, Artificial Sequence
  Description of Artificial Sequence: Synthetic oligonucleotide
uuaccaccacauucucuga

SEQ ID NO: 1785181 - RNA, 19 nt, Artificial Sequence
  Description of Artificial Sequence: Synthetic oligonucleotide
ggaacaacauguuuaaauu

SEQ ID NO: 1785182 - RNA, 19 nt, Artificial Sequence
  Description of Artificial Sequence: Synthetic oligonucleotide
uaaaucccaugguguuuug

SEQ ID NO: 1785183 - RNA, 19 nt, Artificial Sequence
  Description of Artificial Sequence: Synthetic oligonucleotide
ucagagaauuuaguugguu

SEQ ID NO: 1785184 - RNA, 19 nt, Artificial Sequence
  Description of Artificial Sequence: Synthetic oligonucleotide
uucucgcucuaaauauaau

SEQ ID NO: 1785185 - RNA, 19 nt, Artificial Sequence
  Description of Artificial Sequence: Synthetic oligonucleotide
gauagauuauuacgguguu

SEQ ID NO: 1785186 - RNA, 19 nt, Artificial Sequence
  Description of Artificial Sequence: Synthetic oligonucleotide
auucucugaugacacccau

SEQ ID NO: 1785187 - RNA, 19 nt, Artificial Sequence
  Description of Artificial Sequence: Synthetic oligonucleotide
guugguugguccauuuauc

SEQ ID NO: 1785188 - RNA, 19 nt, Artificial Sequence
  Description of Artificial Sequence: Synthetic oligonucleotide
ugcaguguaucgggcacca

SEQ ID NO: 1785189 - RNA, 19 nt, Artificial Sequence
  Description of Artificial Sequence: Synthetic oligonucleotide
gaugacacccaugaucagu

SEQ ID NO: 1785190 - RNA, 19 nt, Artificial Sequence
  Description of Artificial Sequence: Synthetic oligonucleotide
agugugucaguguguuuaa

SEQ ID NO: 1785191 - RNA, 19 nt, Artificial Sequence
  Description of Artificial Sequence: Synthetic oligonucleotide
cgguguuguauguuuaggg

SEQ ID NO: 1785192 - RNA, 19 nt, Artificial Sequence
  Description of Artificial Sequence: Synthetic oligonucleotide
gcacuucugccauaacucc

SEQ ID NO: 1785193 - RNA, 19 nt, Artificial Sequence
  Description of Artificial Sequence: Synthetic oligonucleotide
acugcuuagugcugcuuuu

SEQ ID NO: 1785194 - RNA, 19 nt, Artificial Sequence
  Description of Artificial Sequence: Synthetic oligonucleotide
gcauagauuucuaauaacu

SEQ ID NO: 1785195 - RNA, 19 nt, Artificial Sequence
  Description of Artificial Sequence: Synthetic oligonucleotide
uacuaucuucggaguacuc

SEQ ID NO: 1785196 - RNA, 19 nt, Artificial Sequence
  Description of Artificial Sequence: Synthetic oligonucleotide
cucaccuucgaguuccaaa

SEQ ID NO: 1785197 - RNA, 19 nt, Artificial Sequence
  Description of Artificial Sequence: Synthetic oligonucleotide
augggcagacuugauguga

SEQ ID NO: 1785198 - RNA, 19 nt, Artificial Sequence
  Description of Artificial Sequence: Synthetic oligonucleotide
caacgguagugugucagug

SEQ ID NO: 1785199 - RNA, 19 nt, Artificial Sequence
  Description of Artificial Sequence: Synthetic oligonucleotide
guuguauguuuagggcaag

SEQ ID NO: 1785200 - RNA, 19 nt, Artificial Sequence
  Description of Artificial Sequence: Synthetic oligonucleotide
agauuauuacgguguugua

SEQ ID NO: 1785201 - RNA, 19 nt, Artificial Sequence
  Description of Artificial Sequence: Synthetic oligonucleotide
ugcaaagcuuguucuccau

SEQ ID NO: 1785202 - RNA, 19 nt, Artificial Sequence
  Description of Artificial Sequence: Synthetic oligonucleotide
gggaugggcagacuugaug

SEQ ID NO: 1785203 - RNA, 19 nt, Artificial Sequence
  Description of Artificial Sequence: Synthetic oligonucleotide
uuuaguugguugguccauu

SEQ ID NO: 1785204 - RNA, 19 nt, Artificial Sequence
  Description of Artificial Sequence: Synthetic oligonucleotide
gaggggaugggcagacuug

SEQ ID NO: 1785205 - RNA, 19 nt, Artificial Sequence
  Description of Artificial Sequence: Synthetic oligonucleotide
agacuugaugugaagugau

SEQ ID NO: 1785206 - RNA, 19 nt, Artificial Sequence
  Description of Artificial Sequence: Synthetic oligonucleotide
auuuaguugguugguccau

SEQ ID NO: 1785207 - RNA, 19 nt, Artificial Sequence
  Description of Artificial Sequence: Synthetic oligonucleotide
cagacuugaugugaaguga

SEQ ID NO: 1785208 - RNA, 19 nt, Artificial Sequence
  Description of Artificial Sequence: Synthetic oligonucleotide
uauuacgguguuguauguu

SEQ ID NO: 1785209 - RNA, 19 nt, Artificial Sequence
  Description of Artificial Sequence: Synthetic oligonucleotide
uucggccaugaauaguguu

SEQ ID NO: 1785210 - RNA, 19 nt, Artificial Sequence
  Description of Artificial Sequence: Synthetic oligonucleotide
gagaauuuaguugguuggu

SEQ ID NO: 1785211 - RNA, 19 nt, Artificial Sequence
  Description of Artificial Sequence: Synthetic oligonucleotide
cacuucugccauaacucca

SEQ ID NO: 1785212 - RNA, 19 nt, Artificial Sequence
  Description of Artificial Sequence: Synthetic oligonucleotide
uugggucaucuucuuucaa

SEQ ID NO: 1785213 - RNA, 19 nt, Artificial Sequence
  Description of Artificial Sequence: Synthetic oligonucleotide
ucagucugacaagacugau

SEQ ID NO: 1785214 - RNA, 19 nt, Artificial Sequence
  Description of Artificial Sequence: Synthetic oligonucleotide
gaguuacuaucuucggagu

SEQ ID NO: 1785215 - RNA, 19 nt, Artificial Sequence
  Description of Artificial Sequence: Synthetic oligonucleotide
gaauuauaguacugauuuu

SEQ ID NO: 1785216 - RNA, 19 nt, Artificial Sequence
  Description of Artificial Sequence: Synthetic oligonucleotide
ggucauguugcccaugaua

SEQ ID NO: 1785217 - RNA, 19 nt, Artificial Sequence
  Description of Artificial Sequence: Synthetic oligonucleotide
agcacgccugcaaagcuug

SEQ ID NO: 1785218 - RNA, 19 nt, Artificial Sequence
  Description of Artificial Sequence: Synthetic oligonucleotide
ggaguuuugccuuuccagu

SEQ ID NO: 1785219 - RNA, 19 nt, Artificial Sequence
  Description of Artificial Sequence: Synthetic oligonucleotide
gaguacuccaggucguagu

SEQ ID NO: 1785220 - RNA, 19 nt, Artificial Sequence
  Description of Artificial Sequence: Synthetic oligonucleotide
gauguaacuggcgcaaaau

SEQ ID NO: 1785221 - RNA, 19 nt, Artificial Sequence
  Description of Artificial Sequence: Synthetic oligonucleotide
caccacauucucugaugac

SEQ ID NO: 1785222 - RNA, 19 nt, Artificial Sequence
  Description of Artificial Sequence: Synthetic oligonucleotide
cuuuccaguccuuaaggau

SEQ ID NO: 1785223 - RNA, 19 nt, Artificial Sequence
  Description of Artificial Sequence: Synthetic oligonucleotide
gcaggaacaacauguuuaa

SEQ ID NO: 1785224 - RNA, 19 nt, Artificial Sequence
  Description of Artificial Sequence: Synthetic oligonucleotide
aaccaacgguaguguguca

SEQ ID NO: 1785225 - RNA, 19 nt, Artificial Sequence
  Description of Artificial Sequence: Synthetic oligonucleotide
caucuuggccggagcgggg

SEQ ID NO: 1785226 - RNA, 19 nt, Artificial Sequence
  Description of Artificial Sequence: Synthetic oligonucleotide
guacuccaggucguagucc

SEQ ID NO: 1785227 - RNA, 19 nt, Artificial Sequence
  Description of Artificial Sequence: Synthetic oligonucleotide
guaacuggcgcaaaauuuu

SEQ ID NO: 1785228 - RNA, 19 nt, Artificial Sequence
  Description of Artificial Sequence: Synthetic oligonucleotide
cucauagaguugcuuuuaa

SEQ ID NO: 1785229 - RNA, 19 nt, Artificial Sequence
  Description of Artificial Sequence: Synthetic oligonucleotide
gcucagaguuacuaucuuc

SEQ ID NO: 1785230 - RNA, 19 nt, Artificial Sequence
  Description of Artificial Sequence: Synthetic oligonucleotide
caccuucgaguuccaaaac

SEQ ID NO: 1785231 - RNA, 19 nt, Artificial Sequence
  Description of Artificial Sequence: Synthetic oligonucleotide
acccaugaucaguggguga

SEQ ID NO: 1785232 - RNA, 19 nt, Artificial Sequence
  Description of Artificial Sequence: Synthetic oligonucleotide
cugugcuguguacauuuga

SEQ ID NO: 1785233 - RNA, 19 nt, Artificial Sequence
  Description of Artificial Sequence: Synthetic oligonucleotide
ugccuuaagcacgccugca

SEQ ID NO: 1785234 - RNA, 19 nt, Artificial Sequence
  Description of Artificial Sequence: Synthetic oligonucleotide
cacccaugaucagugggug

SEQ ID NO: 1785235 - RNA, 19 nt, Artificial Sequence
  Description of Artificial Sequence: Synthetic oligonucleotide
uuucgccuucucucaaguu

SEQ ID NO: 1785236 - RNA, 19 nt, Artificial Sequence
  Description of Artificial Sequence: Synthetic oligonucleotide
ggcaccaccccucuucuga

SEQ ID NO: 1785237 - RNA, 19 nt, Artificial Sequence
  Description of Artificial Sequence: Synthetic oligonucleotide
gccaguuuacugaccacag

SEQ ID NO: 1785238 - RNA, 19 nt, Artificial Sequence
  Description of Artificial Sequence: Synthetic oligonucleotide
uccaggucguaguccuccu

SEQ ID NO: 1785239 - RNA, 19 nt, Artificial Sequence
  Description of Artificial Sequence: Synthetic oligonucleotide
ucuggucauguugcccaug

SEQ ID NO: 1785240 - RNA, 19 nt, Artificial Sequence
  Description of Artificial Sequence: Synthetic oligonucleotide
guugggcucagaguuacua

SEQ ID NO: 1785241 - RNA, 19 nt, Artificial Sequence
  Description of Artificial Sequence: Synthetic oligonucleotide
cauguugcccaugauagau

SEQ ID NO: 1785242 - RNA, 19 nt, Artificial Sequence
  Description of Artificial Sequence: Synthetic oligonucleotide
cugcuuagugcugcuuuug

SEQ ID NO: 1785243 - RNA, 19 nt, Artificial Sequence
  Description of Artificial Sequence: Synthetic oligonucleotide
guuugucuuaaaccacagu

SEQ ID NO: 1785244 - RNA, 19 nt, Artificial Sequence
  Description of Artificial Sequence: Synthetic oligonucleotide
caggaguuuugccuuucca

SEQ ID NO: 1785245 - RNA, 19 nt, Artificial Sequence
  Description of Artificial Sequence: Synthetic oligonucleotide
guguaucgggcaccacccc

SEQ ID NO: 1785246 - RNA, 19 nt, Artificial Sequence
  Description of Artificial Sequence: Synthetic oligonucleotide
ggaucacaucucugcacug

SEQ ID NO: 1785247 - RNA, 19 nt, Artificial Sequence
  Description of Artificial Sequence: Synthetic oligonucleotide
aucagugggugaggggaug

SEQ ID NO: 1785248 - RNA, 19 nt, Artificial Sequence
  Description of Artificial Sequence: Synthetic oligonucleotide
cauuuaucuagugcagugu

SEQ ID NO: 1785249 - RNA, 19 nt, Artificial Sequence
  Description of Artificial Sequence: Synthetic oligonucleotide
ggaguugguugacuugauc

SEQ ID NO: 1785250 - RNA, 19 nt, Artificial Sequence
  Description of Artificial Sequence: Synthetic oligonucleotide
aagcacgccugcaaagcuu

SEQ ID NO: 1785251 - RNA, 19 nt, Artificial Sequence
  Description of Artificial Sequence: Synthetic oligonucleotide
uggucauguugcccaugau

SEQ ID NO: 1785252 - RNA, 19 nt, Artificial Sequence
  Description of Artificial Sequence: Synthetic oligonucleotide
uucucaccuucgaguucca

SEQ ID NO: 1785253 - RNA, 19 nt, Artificial Sequence
  Description of Artificial Sequence: Synthetic oligonucleotide
gguuuucuucuggagauua

SEQ ID NO: 1785254 - RNA, 19 nt, Artificial Sequence
  Description of Artificial Sequence: Synthetic oligonucleotide
ggaguacuccaggucguag

SEQ ID NO: 1785255 - RNA, 19 nt, Artificial Sequence
  Description of Artificial Sequence: Synthetic oligonucleotide
auuugcucauagaguugcu

SEQ ID NO: 1785256 - RNA, 19 nt, Artificial Sequence
  Description of Artificial Sequence: Synthetic oligonucleotide
caguguuguuucauaaaau

SEQ ID NO: 1785257 - RNA, 19 nt, Artificial Sequence
  Description of Artificial Sequence: Synthetic oligonucleotide
cuuuuggaaacugcuuagu

SEQ ID NO: 1785258 - RNA, 19 nt, Artificial Sequence
  Description of Artificial Sequence: Synthetic oligonucleotide
augcagcagcaaaacacaa

SEQ ID NO: 1785259 - RNA, 19 nt, Artificial Sequence
  Description of Artificial Sequence: Synthetic oligonucleotide
caccccucuucugaugauc

SEQ ID NO: 1785260 - RNA, 19 nt, Artificial Sequence
  Description of Artificial Sequence: Synthetic oligonucleotide
guugguugacuugaucaau

SEQ ID NO: 1785261 - RNA, 19 nt, Artificial Sequence
  Description of Artificial Sequence: Synthetic oligonucleotide
caccaccccucuucugaug

SEQ ID NO: 1785262 - RNA, 19 nt, Artificial Sequence
  Description of Artificial Sequence: Synthetic oligonucleotide
gggcagacuugaugugaag

SEQ ID NO: 1785263 - RNA, 19 nt, Artificial Sequence
  Description of Artificial Sequence: Synthetic oligonucleotide
cauauucuucucgcucuaa

SEQ ID NO: 1785264 - RNA, 19 nt, Artificial Sequence
  Description of Artificial Sequence: Synthetic oligonucleotide
ggcagacuugaugugaagu

SEQ ID NO: 1785265 - RNA, 19 nt, Artificial Sequence
  Description of Artificial Sequence: Synthetic oligonucleotide
ucucaccuucgaguuccaa

SEQ ID NO: 1785266 - RNA, 19 nt, Artificial Sequence
  Description of Artificial Sequence: Synthetic oligonucleotide
ccaagcuuuguguuugucu

SEQ ID NO: 1785267 - RNA, 19 nt, Artificial Sequence
  Description of Artificial Sequence: Synthetic oligonucleotide
ggucguaguccuccucauc

SEQ ID NO: 1785268 - RNA, 19 nt, Artificial Sequence
  Description of Artificial Sequence: Synthetic oligonucleotide
accaacccacaggaguuuu

SEQ ID NO: 1785269 - RNA, 19 nt, Artificial Sequence
  Description of Artificial Sequence: Synthetic oligonucleotide
ccaacccacaggaguuuug

SEQ ID NO: 1785270 - RNA, 19 nt, Artificial Sequence
  Description of Artificial Sequence: Synthetic oligonucleotide
gggauaaaugcagcagcaa

SEQ ID NO: 1785271 - RNA, 19 nt, Artificial Sequence
  Description of Artificial Sequence: Synthetic oligonucleotide
ccuuaagcacgccugcaaa

SEQ ID NO: 1785272 - RNA, 19 nt, Artificial Sequence
  Description of Artificial Sequence: Synthetic oligonucleotide
cugaugccuuaagcacgcc

SEQ ID NO: 1785273 - RNA, 19 nt, Artificial Sequence
  Description of Artificial Sequence: Synthetic oligonucleotide
cauaaaucccaugguguuu

SEQ ID NO: 1785274 - RNA, 19 nt, Artificial Sequence
  Description of Artificial Sequence: Synthetic oligonucleotide
cuggagauuaaagcuguuu

SEQ ID NO: 1785275 - RNA, 19 nt, Artificial Sequence
  Description of Artificial Sequence: Synthetic oligonucleotide
aggaguugguugacuugau

SEQ ID NO: 1785276 - RNA, 19 nt, Artificial Sequence
  Description of Artificial Sequence: Synthetic oligonucleotide
cacucucaugacacaccaa

SEQ ID NO: 1785277 - RNA, 19 nt, Artificial Sequence
  Description of Artificial Sequence: Synthetic oligonucleotide
gacuugaugugaagugauu

SEQ ID NO: 1785278 - RNA, 19 nt, Artificial Sequence
  Description of Artificial Sequence: Synthetic oligonucleotide
cacguugggcucagaguua

SEQ ID NO: 1785279 - RNA, 19 nt, Artificial Sequence
  Description of Artificial Sequence: Synthetic oligonucleotide
caauucggccaugaauagu

SEQ ID NO: 1785280 - RNA, 19 nt, Artificial Sequence
  Description of Artificial Sequence: Synthetic oligonucleotide
ggccaugaauaguguuauc

SEQ ID NO: 1785281 - RNA, 19 nt, Artificial Sequence
  Description of Artificial Sequence: Synthetic oligonucleotide
gcucauagaguugcuuuua

SEQ ID NO: 1785282 - RNA, 19 nt, Artificial Sequence
  Description of Artificial Sequence: Synthetic oligonucleotide
ccacguugggcucagaguu

SEQ ID NO: 1785283 - RNA, 19 nt, Artificial Sequence
  Description of Artificial Sequence: Synthetic oligonucleotide
gugaagugauuugcucaua

SEQ ID NO: 1785284 - RNA, 19 nt, Artificial Sequence
  Description of Artificial Sequence: Synthetic oligonucleotide
cugauguaacuggcgcaaa

SEQ ID NO: 1785285 - RNA, 19 nt, Artificial Sequence
  Description of Artificial Sequence: Synthetic oligonucleotide
cuaucauucuuagcaucuu

SEQ ID NO: 1785286 - RNA, 19 nt, Artificial Sequence
  Description of Artificial Sequence: Synthetic oligonucleotide
aucgggcaccaccccucuu

SEQ ID NO: 1785287 - RNA, 19 nt, Artificial Sequence
  Description of Artificial Sequence: Synthetic oligonucleotide
ccaacgguagugugucagu

SEQ ID NO: 1785288 - RNA, 19 nt, Artificial Sequence
  Description of Artificial Sequence: Synthetic oligonucleotide
gcaccaccccucuucugau

SEQ ID NO: 1785289 - RNA, 19 nt, Artificial Sequence
  Description of Artificial Sequence: Synthetic oligonucleotide
cacgccugcaaagcuuguu

SEQ ID NO: 1785290 - RNA, 19 nt, Artificial Sequence
  Description of Artificial Sequence: Synthetic oligonucleotide
ccucaucaucgcacaugaa

SEQ ID NO: 1785291 - RNA, 19 nt, Artificial Sequence
  Description of Artificial Sequence: Synthetic oligonucleotide
gugaggggaugggcagacu

SEQ ID NO: 1785292 - RNA, 19 nt, Artificial Sequence
  Description of Artificial Sequence: Synthetic oligonucleotide
caccaacccacaggaguuu

SEQ ID NO: 1785293 - RNA, 19 nt, Artificial Sequence
  Description of Artificial Sequence: Synthetic oligonucleotide
ccaguucaaggaguugguu

SEQ ID NO: 1785294 - RNA, 19 nt, Artificial Sequence
  Description of Artificial Sequence: Synthetic oligonucleotide
cggccaugaauaguguuau

SEQ ID NO: 1785295 - RNA, 19 nt, Artificial Sequence
  Description of Artificial Sequence: Synthetic oligonucleotide
gcacgccugcaaagcuugu

SEQ ID NO: 1785296 - RNA, 19 nt, Artificial Sequence
  Description of Artificial Sequence: Synthetic oligonucleotide
cggaguacuccaggucgua

SEQ ID NO: 1785297 - RNA, 19 nt, Artificial Sequence
  Description of Artificial Sequence: Synthetic oligonucleotide
cguugggcucagaguuacu

SEQ ID NO: 1785298 - RNA, 19 nt, Artificial Sequence
  Description of Artificial Sequence: Synthetic oligonucleotide
uuaaauaguacauugaugc

SEQ ID NO: 1785299 - RNA, 19 nt, Artificial Sequence
  Description of Artificial Sequence: Synthetic oligonucleotide
ugucaagucaaucagaagc

SEQ ID NO: 1785300 - RNA, 19 nt, Artificial Sequence
  Description of Artificial Sequence: Synthetic oligonucleotide
aauuauaagcuuccuguac

SEQ ID NO: 1785301 - RNA, 19 nt, Artificial Sequence
  Description of Artificial Sequence: Synthetic oligonucleotide
aauccuguagauuaaaacu

SEQ ID NO: 1785302 - RNA, 19 nt, Artificial Sequence
  Description of Artificial Sequence: Synthetic oligonucleotide
gaguauauacuccugaggg

SEQ ID NO: 1785303 - RNA, 19 nt, Artificial Sequence
  Description of Artificial Sequence: Synthetic oligonucleotide
uguaagagaacacagcuac

SEQ ID NO: 1785304 - RNA, 19 nt, Artificial Sequence
  Description of Artificial Sequence: Synthetic oligonucleotide
uuaaguauacacuacagau

SEQ ID NO: 1785305 - RNA, 19 nt, Artificial Sequence
  Description of Artificial Sequence: Synthetic oligonucleotide
ucuuguaacagucauuagc

SEQ ID NO: 1785306 - RNA, 19 nt, Artificial Sequence
  Description of Artificial Sequence: Synthetic oligonucleotide
caagacaucaucaaauugc

SEQ ID NO: 1785307 - RNA, 19 nt, Artificial Sequence
  Description of Artificial Sequence: Synthetic oligonucleotide
ugaauaguagaacuggccc

SEQ ID NO: 1785308 - RNA, 19 nt, Artificial Sequence
  Description of Artificial Sequence: Synthetic oligonucleotide
aaaagucucucccagcuag

SEQ ID NO: 1785309 - RNA, 19 nt, Artificial Sequence
  Description of Artificial Sequence: Synthetic oligonucleotide
agaaucaucuggaaaaugc

SEQ ID NO: 1785310 - RNA, 19 nt, Artificial Sequence
  Description of Artificial Sequence: Synthetic oligonucleotide
uuaaauuauaagcuuccug

SEQ ID NO: 1785311 - RNA, 19 nt, Artificial Sequence
  Description of Artificial Sequence: Synthetic oligonucleotide
aaguauacacuacagauuu

SEQ ID NO: 1785312 - RNA, 19 nt, Artificial Sequence
  Description of Artificial Sequence: Synthetic oligonucleotide
ucuguaagagaacacagcu

SEQ ID NO: 1785313 - RNA, 19 nt, Artificial Sequence
  Description of Artificial Sequence: Synthetic oligonucleotide
aaauugcuuaagcaggaag

SEQ ID NO: 1785314 - RNA, 19 nt, Artificial Sequence
  Description of Artificial Sequence: Synthetic oligonucleotide
uaucguaucacauucacua

SEQ ID NO: 1785315 - RNA, 19 nt, Artificial Sequence
  Description of Artificial Sequence: Synthetic oligonucleotide
uagaaguaaacucuuaaaa

SEQ ID NO: 1785316 - RNA, 19 nt, Artificial Sequence
  Description of Artificial Sequence: Synthetic oligonucleotide
uuaaaguuaaagaugucau

SEQ ID NO: 1785317 - RNA, 19 nt, Artificial Sequence
  Description of Artificial Sequence: Synthetic oligonucleotide
ugcuuaagcaggaagaaac

SEQ ID NO: 1785318 - RNA, 19 nt, Artificial Sequence
  Description of Artificial Sequence: Synthetic oligonucleotide
uuaacuuuaacuagccuuc

SEQ ID NO: 1785319 - RNA, 19 nt, Artificial Sequence
  Description of Artificial Sequence: Synthetic oligonucleotide
caucaaauugcuuaagcag

SEQ ID NO: 1785320 - RNA, 19 nt, Artificial Sequence
  Description of Artificial Sequence: Synthetic oligonucleotide
uguagauuaaaacuuuaaa

SEQ ID NO: 1785321 - RNA, 19 nt, Artificial Sequence
  Description of Artificial Sequence: Synthetic oligonucleotide
cagucauuagcaaugaggc

SEQ ID NO: 1785322 - RNA, 19 nt, Artificial Sequence
  Description of Artificial Sequence: Synthetic oligonucleotide
aacucccuugaguauauac

SEQ ID NO: 1785323 - RNA, 19 nt, Artificial Sequence
  Description of Artificial Sequence: Synthetic oligonucleotide
gaugcuauagacuguacac

SEQ ID NO: 1785324 - RNA, 19 nt, Artificial Sequence
  Description of Artificial Sequence: Synthetic oligonucleotide
cucuaggacaucaaaagcc

SEQ ID NO: 1785325 - RNA, 19 nt, Artificial Sequence
  Description of Artificial Sequence: Synthetic oligonucleotide
uuaacaacucccuugagua

SEQ ID NO: 1785326 - RNA, 19 nt, Artificial Sequence
  Description of Artificial Sequence: Synthetic oligonucleotide
ugauuaaauuauaagcuuc

SEQ ID NO: 1785327 - RNA, 19 nt, Artificial Sequence
  Description of Artificial Sequence: Synthetic oligonucleotide
acacuacagauuuaaauag

SEQ ID NO: 1785328 - RNA, 19 nt, Artificial Sequence
  Description of Artificial Sequence: Synthetic oligonucleotide
gauuccaugacagccaagg

SEQ ID NO: 1785329 - RNA, 19 nt, Artificial Sequence
  Description of Artificial Sequence: Synthetic oligonucleotide
guagauuaaaacuuuaaaa

SEQ ID NO: 1785330 - RNA, 19 nt, Artificial Sequence
  Description of Artificial Sequence: Synthetic oligonucleotide
ccuugauuaaauuauaagc

SEQ ID NO: 1785331 - RNA, 19 nt, Artificial Sequence
  Description of Artificial Sequence: Synthetic oligonucleotide
auuaaaguuaaagauguca

SEQ ID NO: 1785332 - RNA, 19 nt, Artificial Sequence
  Description of Artificial Sequence: Synthetic oligonucleotide
cauguuuccgucucaaucc

SEQ ID NO: 1785333 - RNA, 19 nt, Artificial Sequence
  Description of Artificial Sequence: Synthetic oligonucleotide
uccuugauuaaauuauaag

SEQ ID NO: 1785334 - RNA, 19 nt, Artificial Sequence
  Description of Artificial Sequence: Synthetic oligonucleotide
acauuacacauucccacgc

SEQ ID NO: 1785335 - RNA, 19 nt, Artificial Sequence
  Description of Artificial Sequence: Synthetic oligonucleotide
agacaugaaaaugucaggg

SEQ ID NO: 1785336 - RNA, 19 nt, Artificial Sequence
  Description of Artificial Sequence: Synthetic oligonucleotide
aguaaaucuaaaacucugc

SEQ ID NO: 1785337 - RNA, 19 nt, Artificial Sequence
  Description of Artificial Sequence: Synthetic oligonucleotide
aguugagguaaaucaagac

SEQ ID NO: 1785338 - RNA, 19 nt, Artificial Sequence
  Description of Artificial Sequence: Synthetic oligonucleotide
uuccuguacaucaucuugg

SEQ ID NO: 1785339 - RNA, 19 nt, Artificial Sequence
  Description of Artificial Sequence: Synthetic oligonucleotide
aucagaagcaauuaucccu

SEQ ID NO: 1785340 - RNA, 19 nt, Artificial Sequence
  Description of Artificial Sequence: Synthetic oligonucleotide
auuauaagcuuccuguaca

SEQ ID NO: 1785341 - RNA, 19 nt, Artificial Sequence
  Description of Artificial Sequence: Synthetic oligonucleotide
ucauuguagaaguaaacuc

SEQ ID NO: 1785342 - RNA, 19 nt, Artificial Sequence
  Description of Artificial Sequence: Synthetic oligonucleotide
uagacuguacacauuacac

SEQ ID NO: 1785343 - RNA, 19 nt, Artificial Sequence
  Description of Artificial Sequence: Synthetic oligonucleotide
aucaaauugcuuaagcagg

SEQ ID NO: 1785344 - RNA, 19 nt, Artificial Sequence
  Description of Artificial Sequence: Synthetic oligonucleotide
uguagaaguaaacucuuaa

SEQ ID NO: 1785345 - RNA, 19 nt, Artificial Sequence
  Description of Artificial Sequence: Synthetic oligonucleotide
uugggcauaauuaaaguua

SEQ ID NO: 1785346 - RNA, 19 nt, Artificial Sequence
  Description of Artificial Sequence: Synthetic oligonucleotide
ucauaugaucccucgaacc

SEQ ID NO: 1785347 - RNA, 19 nt, Artificial Sequence
  Description of Artificial Sequence: Synthetic oligonucleotide
ugauccuccuaccaacugg

SEQ ID NO: 1785348 - RNA, 19 nt, Artificial Sequence
  Description of Artificial Sequence: Synthetic oligonucleotide
aguauauacuccugagggg

SEQ ID NO: 1785349 - RNA, 19 nt, Artificial Sequence
  Description of Artificial Sequence: Synthetic oligonucleotide
cuuguaacagucauuagca

SEQ ID NO: 1785350 - RNA, 19 nt, Artificial Sequence
  Description of Artificial Sequence: Synthetic oligonucleotide
gaaacaggaagccaugcac

SEQ ID NO: 1785351 - RNA, 19 nt, Artificial Sequence
  Description of Artificial Sequence: Synthetic oligonucleotide
cauaauuaaaguuaaagau

SEQ ID NO: 1785352 - RNA, 19 nt, Artificial Sequence
  Description of Artificial Sequence: Synthetic oligonucleotide
acagucauuagcaaugagg

SEQ ID NO: 1785353 - RNA, 19 nt, Artificial Sequence
  Description of Artificial Sequence: Synthetic oligonucleotide
ucuaggacaucaaaagccu

SEQ ID NO: 1785354 - RNA, 19 nt, Artificial Sequence
  Description of Artificial Sequence: Synthetic oligonucleotide
uuucauaugaucccucgaa

SEQ ID NO: 1785355 - RNA, 19 nt, Artificial Sequence
  Description of Artificial Sequence: Synthetic oligonucleotide
cucucuaggacaucaaaag

SEQ ID NO: 1785356 - RNA, 19 nt, Artificial Sequence
  Description of Artificial Sequence: Synthetic oligonucleotide
cuugauuaaauuauaagcu

SEQ ID NO: 1785357 - RNA, 19 nt, Artificial Sequence
  Description of Artificial Sequence: Synthetic oligonucleotide
aguacauugaugcuauaga

SEQ ID NO: 1785358 - RNA, 19 nt, Artificial Sequence
  Description of Artificial Sequence: Synthetic oligonucleotide
uguaagaggcugaaggacu

SEQ ID NO: 1785359 - RNA, 19 nt, Artificial Sequence
  Description of Artificial Sequence: Synthetic oligonucleotide
uaucccuccuuacagaacu

SEQ ID NO: 1785360 - RNA, 19 nt, Artificial Sequence
  Description of Artificial Sequence: Synthetic oligonucleotide
uacauugaugcuauagacu

SEQ ID NO: 1785361 - RNA, 19 nt, Artificial Sequence
  Description of Artificial Sequence: Synthetic oligonucleotide
aaguaaaucuaaaacucug

SEQ ID NO: 1785362 - RNA, 19 nt, Artificial Sequence
  Description of Artificial Sequence: Synthetic oligonucleotide
ugcgcuuaacuuuaacuag

SEQ ID NO: 1785363 - RNA, 19 nt, Artificial Sequence
  Description of Artificial Sequence: Synthetic oligonucleotide
acuuuaacuagccuucaug

SEQ ID NO: 1785364 - RNA, 19 nt, Artificial Sequence
  Description of Artificial Sequence: Synthetic oligonucleotide
gucauuagcaaugaggcug

SEQ ID NO: 1785365 - RNA, 19 nt, Artificial Sequence
  Description of Artificial Sequence: Synthetic oligonucleotide
aaugucaggguucugggua

SEQ ID NO: 1785366 - RNA, 19 nt, Artificial Sequence
  Description of Artificial Sequence: Synthetic oligonucleotide
ucaaauugcuuaagcagga

SEQ ID NO: 1785367 - RNA, 19 nt, Artificial Sequence
  Description of Artificial Sequence: Synthetic oligonucleotide
ucauguuuccgucucaauc

SEQ ID NO: 1785368 - RNA, 19 nt, Artificial Sequence
  Description of Artificial Sequence: Synthetic oligonucleotide
uuggcugaauaguagaacu

SEQ ID NO: 1785369 - RNA, 19 nt, Artificial Sequence
  Description of Artificial Sequence: Synthetic oligonucleotide
agcuacgaagccugaagcc

SEQ ID NO: 1785370 - RNA, 19 nt, Artificial Sequence
  Description of Artificial Sequence: Synthetic oligonucleotide
uacacauuacacauuccca

SEQ ID NO: 1785371 - RNA, 19 nt, Artificial Sequence
  Description of Artificial Sequence: Synthetic oligonucleotide
agugagauuccaugacagc

SEQ ID NO: 1785372 - RNA, 19 nt, Artificial Sequence
  Description of Artificial Sequence: Synthetic oligonucleotide
ugaugcuauagacuguaca

SEQ ID NO: 1785373 - RNA, 19 nt, Artificial Sequence
  Description of Artificial Sequence: Synthetic oligonucleotide
uugauuaaauuauaagcuu

SEQ ID NO: 1785374 - RNA, 19 nt, Artificial Sequence
  Description of Artificial Sequence: Synthetic oligonucleotide
ucaagacaugaaaauguca

SEQ ID NO: 1785375 - RNA, 19 nt, Artificial Sequence
  Description of Artificial Sequence: Synthetic oligonucleotide
ucagaagcaauuaucccuc

SEQ ID NO: 1785376 - RNA, 19 nt, Artificial Sequence
  Description of Artificial Sequence: Synthetic oligonucleotide
aaauaguacauugaugcua

SEQ ID NO: 1785377 - RNA, 19 nt, Artificial Sequence
  Description of Artificial Sequence: Synthetic oligonucleotide
uguaacagucauuagcaau

SEQ ID NO: 1785378 - RNA, 19 nt, Artificial Sequence
  Description of Artificial Sequence: Synthetic oligonucleotide
uaagagaacacagcuacga

SEQ ID NO: 1785379 - RNA, 19 nt, Artificial Sequence
  Description of Artificial Sequence: Synthetic oligonucleotide
ucguaucacauucacuagc

SEQ ID NO: 1785380 - RNA, 19 nt, Artificial Sequence
  Description of Artificial Sequence: Synthetic oligonucleotide
caauccuguagauuaaaac

SEQ ID NO: 1785381 - RNA, 19 nt, Artificial Sequence
  Description of Artificial Sequence: Synthetic oligonucleotide
aauaguacauugaugcuau

SEQ ID NO: 1785382 - RNA, 19 nt, Artificial Sequence
  Description of Artificial Sequence: Synthetic oligonucleotide
caauuaucccuccuuacag

SEQ ID NO: 1785383 - RNA, 19 nt, Artificial Sequence
  Description of Artificial Sequence: Synthetic oligonucleotide
uggguugucaucuguaaga

SEQ ID NO: 1785384 - RNA, 19 nt, Artificial Sequence
  Description of Artificial Sequence: Synthetic oligonucleotide
aucccucgaacccauuucc

SEQ ID NO: 1785385 - RNA, 19 nt, Artificial Sequence
  Description of Artificial Sequence: Synthetic oligonucleotide
ugagauuccaugacagcca

SEQ ID NO: 1785386 - RNA, 19 nt, Artificial Sequence
  Description of Artificial Sequence: Synthetic oligonucleotide
uacaucaguguaaaugagu

SEQ ID NO: 1785387 - RNA, 19 nt, Artificial Sequence
  Description of Artificial Sequence: Synthetic oligonucleotide
ucaucuguaagagaacaca

SEQ ID NO: 1785388 - RNA, 19 nt, Artificial Sequence
  Description of Artificial Sequence: Synthetic oligonucleotide
aaaccucauaggaaaguac

SEQ ID NO: 1785389 - RNA, 19 nt, Artificial Sequence
  Description of Artificial Sequence: Synthetic oligonucleotide
cuguacaucaucuuggcga

SEQ ID NO: 1785390 - RNA, 19 nt, Artificial Sequence
  Description of Artificial Sequence: Synthetic oligonucleotide
agcaauuaucccuccuuac

SEQ ID NO: 1785391 - RNA, 19 nt, Artificial Sequence
  Description of Artificial Sequence: Synthetic oligonucleotide
auagagugagauuccauga

SEQ ID NO: 1785392 - RNA, 19 nt, Artificial Sequence
  Description of Artificial Sequence: Synthetic oligonucleotide
caucuguaagagaacacag

SEQ ID NO: 1785393 - RNA, 19 nt, Artificial Sequence
  Description of Artificial Sequence: Synthetic oligonucleotide
agcaaugaggcuguaagag

SEQ ID NO: 1785394 - RNA, 19 nt, Artificial Sequence
  Description of Artificial Sequence: Synthetic oligonucleotide
uaguacauugaugcuauag

SEQ ID NO: 1785395 - RNA, 19 nt, Artificial Sequence
  Description of Artificial Sequence: Synthetic oligonucleotide
ggcauaauuaaaguuaaag

SEQ ID NO: 1785396 - RNA, 19 nt, Artificial Sequence
  Description of Artificial Sequence: Synthetic oligonucleotide
aucauuguagaaguaaacu

SEQ ID NO: 1785397 - RNA, 19 nt, Artificial Sequence
  Description of Artificial Sequence: Synthetic oligonucleotide
agaacacagcuacgaagcc

SEQ ID NO: 1785398 - RNA, 19 nt, Artificial Sequence
  Description of Artificial Sequence: Synthetic oligonucleotide
uucaggaaaauacuuugua

SEQ ID NO: 1785399 - RNA, 19 nt, Artificial Sequence
  Description of Artificial Sequence: Synthetic oligonucleotide
uguaaaugagugucuuuca

SEQ ID NO: 1785400 - RNA, 19 nt, Artificial Sequence
  Description of Artificial Sequence: Synthetic oligonucleotide
cacauuacacauucccacg

SEQ ID NO: 1785401 - RNA, 19 nt, Artificial Sequence
  Description of Artificial Sequence: Synthetic oligonucleotide
uaaauaguacauugaugcu

SEQ ID NO: 1785402 - RNA, 19 nt, Artificial Sequence
  Description of Artificial Sequence: Synthetic oligonucleotide
uacuuauuucuuaaguaua

SEQ ID NO: 1785403 - RNA, 19 nt, Artificial Sequence
  Description of Artificial Sequence: Synthetic oligonucleotide
uucauaugaucccucgaac

SEQ ID NO: 1785404 - RNA, 19 nt, Artificial Sequence
  Description of Artificial Sequence: Synthetic oligonucleotide
auaggaaaguacaucagug

SEQ ID NO: 1785405 - RNA, 19 nt, Artificial Sequence
  Description of Artificial Sequence: Synthetic oligonucleotide
gaaucaucuggaaaaugcc

SEQ ID NO: 1785406 - RNA, 19 nt, Artificial Sequence
  Description of Artificial Sequence: Synthetic oligonucleotide
aacugcaugcgcuuaacuu

SEQ ID NO: 1785407 - RNA, 19 nt, Artificial Sequence
  Description of Artificial Sequence: Synthetic oligonucleotide
acuagcugauccuccuacc

SEQ ID NO: 1785408 - RNA, 19 nt, Artificial Sequence
  Description of Artificial Sequence: Synthetic oligonucleotide
ggaaaaugcccacacaggc

SEQ ID NO: 1785409 - RNA, 19 nt, Artificial Sequence
  Description of Artificial Sequence: Synthetic oligonucleotide
gcauaauuaaaguuaaaga

SEQ ID NO: 1785410 - RNA, 19 nt, Artificial Sequence
  Description of Artificial Sequence: Synthetic oligonucleotide
aauuaaaguuaaagauguc

SEQ ID NO: 1785411 - RNA, 19 nt, Artificial Sequence
  Description of Artificial Sequence: Synthetic oligonucleotide
ugggcauaauuaaaguuaa

SEQ ID NO: 1785412 - RNA, 19 nt, Artificial Sequence
  Description of Artificial Sequence: Synthetic oligonucleotide
acagcuacgaagccugaag

SEQ ID NO: 1785413 - RNA, 19 nt, Artificial Sequence
  Description of Artificial Sequence: Synthetic oligonucleotide
guugucaucuguaagagaa

SEQ ID NO: 1785414 - RNA, 19 nt, Artificial Sequence
  Description of Artificial Sequence: Synthetic oligonucleotide
uuuucauaugaucccucga

SEQ ID NO: 1785415 - RNA, 19 nt, Artificial Sequence
  Description of Artificial Sequence: Synthetic oligonucleotide
cuuacagaacugcaugcgc

SEQ ID NO: 1785416 - RNA, 19 nt, Artificial Sequence
  Description of Artificial Sequence: Synthetic oligonucleotide
gauuuaaauaguacauuga

SEQ ID NO: 1785417 - RNA, 19 nt, Artificial Sequence
  Description of Artificial Sequence: Synthetic oligonucleotide
ugucaucuguaagagaaca

SEQ ID NO: 1785418 - RNA, 19 nt, Artificial Sequence
  Description of Artificial Sequence: Synthetic oligonucleotide
aaccucauaggaaaguaca

SEQ ID NO: 1785419 - RNA, 19 nt, Artificial Sequence
  Description of Artificial Sequence: Synthetic oligonucleotide
gaauagacauccuucccuc

SEQ ID NO: 1785420 - RNA, 19 nt, Artificial Sequence
  Description of Artificial Sequence: Synthetic oligonucleotide
agacuguacacauuacaca

SEQ ID NO: 1785421 - RNA, 19 nt, Artificial Sequence
  Description of Artificial Sequence: Synthetic oligonucleotide
gugagauuccaugacagcc

SEQ ID NO: 1785422 - RNA, 19 nt, Artificial Sequence
  Description of Artificial Sequence: Synthetic oligonucleotide
ugcuauagacuguacacau

SEQ ID NO: 1785423 - RNA, 19 nt, Artificial Sequence
  Description of Artificial Sequence: Synthetic oligonucleotide
ucauuagcaaugaggcugu

SEQ ID NO: 1785424 - RNA, 19 nt, Artificial Sequence
  Description of Artificial Sequence: Synthetic oligonucleotide
gucucucccagcuagaauc

SEQ ID NO: 1785425 - RNA, 19 nt, Artificial Sequence
  Description of Artificial Sequence: Synthetic oligonucleotide
acaugaaaaugucaggguu

SEQ ID NO: 1785426 - RNA, 19 nt, Artificial Sequence
  Description of Artificial Sequence: Synthetic oligonucleotide
uaacuagccuucauguuuc

SEQ ID NO: 1785427 - RNA, 19 nt, Artificial Sequence
  Description of Artificial Sequence: Synthetic oligonucleotide
caucauuguagaaguaaac

SEQ ID NO: 1785428 - RNA, 19 nt, Artificial Sequence
  Description of Artificial Sequence: Synthetic oligonucleotide
gguaaaucaagacaucauc

SEQ ID NO: 1785429 - RNA, 19 nt, Artificial Sequence
  Description of Artificial Sequence: Synthetic oligonucleotide
gagugagauuccaugacag

SEQ ID NO: 1785430 - RNA, 19 nt, Artificial Sequence
  Description of Artificial Sequence: Synthetic oligonucleotide
aacuagccuucauguuucc

SEQ ID NO: 1785431 - RNA, 19 nt, Artificial Sequence
  Description of Artificial Sequence: Synthetic oligonucleotide
cugguaucguaucacauuc

SEQ ID NO: 1785432 - RNA, 19 nt, Artificial Sequence
  Description of Artificial Sequence: Synthetic oligonucleotide
cuuaagcaggaagaaacag

SEQ ID NO: 1785433 - RNA, 19 nt, Artificial Sequence
  Description of Artificial Sequence: Synthetic oligonucleotide
ggucguaggcuccagaucc

SEQ ID NO: 1785434 - RNA, 19 nt, Artificial Sequence
  Description of Artificial Sequence: Synthetic oligonucleotide
aguauucgggguugggauc

SEQ ID NO: 1785435 - RNA, 19 nt, Artificial Sequence
  Description of Artificial Sequence: Synthetic oligonucleotide
gcaauuuucauaugauccc

SEQ ID NO: 1785436 - RNA, 19 nt, Artificial Sequence
  Description of Artificial Sequence: Synthetic oligonucleotide
ucaguguaaaugagugucu

SEQ ID NO: 1785437 - RNA, 19 nt, Artificial Sequence
  Description of Artificial Sequence: Synthetic oligonucleotide
aucuaaaacucugcugugg

SEQ ID NO: 1785438 - RNA, 19 nt, Artificial Sequence
  Description of Artificial Sequence: Synthetic oligonucleotide
gcuagaaucaucuggaaaa

SEQ ID NO: 1785439 - RNA, 19 nt, Artificial Sequence
  Description of Artificial Sequence: Synthetic oligonucleotide
agagugagauuccaugaca

SEQ ID NO: 1785440 - RNA, 19 nt, Artificial Sequence
  Description of Artificial Sequence: Synthetic oligonucleotide
ugccuucccaguauucggg

SEQ ID NO: 1785441 - RNA, 19 nt, Artificial Sequence
  Description of Artificial Sequence: Synthetic oligonucleotide
uucccucaagacaugaaaa

SEQ ID NO: 1785442 - RNA, 19 nt, Artificial Sequence
  Description of Artificial Sequence: Synthetic oligonucleotide
uuccgucucaauccuguag

SEQ ID NO: 1785443 - RNA, 19 nt, Artificial Sequence
  Description of Artificial Sequence: Synthetic oligonucleotide
ucccuugaguauauacucc

SEQ ID NO: 1785444 - RNA, 19 nt, Artificial Sequence
  Description of Artificial Sequence: Synthetic oligonucleotide
auuaucccuccuuacagaa

SEQ ID NO: 1785445 - RNA, 19 nt, Artificial Sequence
  Description of Artificial Sequence: Synthetic oligonucleotide
augcgcuuaacuuuaacua

SEQ ID NO: 1785446 - RNA, 19 nt, Artificial Sequence
  Description of Artificial Sequence: Synthetic oligonucleotide
agauccuugauuaaauuau

SEQ ID NO: 1785447 - RNA, 19 nt, Artificial Sequence
  Description of Artificial Sequence: Synthetic oligonucleotide
aaaaccucauaggaaagua

SEQ ID NO: 1785448 - RNA, 19 nt, Artificial Sequence
  Description of Artificial Sequence: Synthetic oligonucleotide
cucccuugaguauauacuc

SEQ ID NO: 1785449 - RNA, 19 nt, Artificial Sequence
  Description of Artificial Sequence: Synthetic oligonucleotide
cucaagacaugaaaauguc

SEQ ID NO: 1785450 - RNA, 19 nt, Artificial Sequence
  Description of Artificial Sequence: Synthetic oligonucleotide
uggcugaauaguagaacug

SEQ ID NO: 1785451 - RNA, 19 nt, Artificial Sequence
  Description of Artificial Sequence: Synthetic oligonucleotide
cauuguagaaguaaacucu

SEQ ID NO: 1785452 - RNA, 19 nt, Artificial Sequence
  Description of Artificial Sequence: Synthetic oligonucleotide
ucaauccuguagauuaaaa

SEQ ID NO: 1785453 - RNA, 19 nt, Artificial Sequence
  Description of Artificial Sequence: Synthetic oligonucleotide
uggcgaagguaguaaauca

SEQ ID NO: 1785454 - RNA, 19 nt, Artificial Sequence
  Description of Artificial Sequence: Synthetic oligonucleotide
uauagacuguacacauuac

SEQ ID NO: 1785455 - RNA, 19 nt, Artificial Sequence
  Description of Artificial Sequence: Synthetic oligonucleotide
aggaaaguacaucagugua

SEQ ID NO: 1785456 - RNA, 19 nt, Artificial Sequence
  Description of Artificial Sequence: Synthetic oligonucleotide
aagggcugcguuaacaacu

SEQ ID NO: 1785457 - RNA, 19 nt, Artificial Sequence
  Description of Artificial Sequence: Synthetic oligonucleotide
acaggcugcacuguucuac

SEQ ID NO: 1785458 - RNA, 19 nt, Artificial Sequence
  Description of Artificial Sequence: Synthetic oligonucleotide
aagcaauuaucccuccuua

SEQ ID NO: 1785459 - RNA, 19 nt, Artificial Sequence
  Description of Artificial Sequence: Synthetic oligonucleotide
aguuaaagaugucaucauu

SEQ ID NO: 1785460 - RNA, 19 nt, Artificial Sequence
  Description of Artificial Sequence: Synthetic oligonucleotide
auuacacauucccacgccu

SEQ ID NO: 1785461 - RNA, 19 nt, Artificial Sequence
  Description of Artificial Sequence: Synthetic oligonucleotide
agcccugucaagucaauca

SEQ ID NO: 1785462 - RNA, 19 nt, Artificial Sequence
  Description of Artificial Sequence: Synthetic oligonucleotide
aucguaucacauucacuag

SEQ ID NO: 1785463 - RNA, 19 nt, Artificial Sequence
  Description of Artificial Sequence: Synthetic oligonucleotide
uagacauccuucccucaag

SEQ ID NO: 1785464 - RNA, 19 nt, Artificial Sequence
  Description of Artificial Sequence: Synthetic oligonucleotide
ucuauagagugagauucca

SEQ ID NO: 1785465 - RNA, 19 nt, Artificial Sequence
  Description of Artificial Sequence: Synthetic oligonucleotide
acugcaugcgcuuaacuuu

SEQ ID NO: 1785466 - RNA, 19 nt, Artificial Sequence
  Description of Artificial Sequence: Synthetic oligonucleotide
aagagaacacagcuacgaa

SEQ ID NO: 1785467 - RNA, 19 nt, Artificial Sequence
  Description of Artificial Sequence: Synthetic oligonucleotide
uuauaagcuuccuguacau

SEQ ID NO: 1785468 - RNA, 19 nt, Artificial Sequence
  Description of Artificial Sequence: Synthetic oligonucleotide
uauacacuacagauuuaaa

SEQ ID NO: 1785469 - RNA, 19 nt, Artificial Sequence
  Description of Artificial Sequence: Synthetic oligonucleotide
cuauagacuguacacauua

SEQ ID NO: 1785470 - RNA, 19 nt, Artificial Sequence
  Description of Artificial Sequence: Synthetic oligonucleotide
guguaaaugagugucuuuc

SEQ ID NO: 1785471 - RNA, 19 nt, Artificial Sequence
  Description of Artificial Sequence: Synthetic oligonucleotide
guagaaguaaacucuuaaa

SEQ ID NO: 1785472 - RNA, 19 nt, Artificial Sequence
  Description of Artificial Sequence: Synthetic oligonucleotide
aucaagacaucaucaaauu

SEQ ID NO: 1785473 - RNA, 19 nt, Artificial Sequence
  Description of Artificial Sequence: Synthetic oligonucleotide
auuaaauuauaagcuuccu

SEQ ID NO: 1785474 - RNA, 19 nt, Artificial Sequence
  Description of Artificial Sequence: Synthetic oligonucleotide
aaugagugucuuucaggaa

SEQ ID NO: 1785475 - RNA, 19 nt, Artificial Sequence
  Description of Artificial Sequence: Synthetic oligonucleotide
auucacuagcugauccucc

SEQ ID NO: 1785476 - RNA, 19 nt, Artificial Sequence
  Description of Artificial Sequence: Synthetic oligonucleotide
guaaaucuaaaacucugcu

SEQ ID NO: 1785477 - RNA, 19 nt, Artificial Sequence
  Description of Artificial Sequence: Synthetic oligonucleotide
cauuacacauucccacgcc

SEQ ID NO: 1785478 - RNA, 19 nt, Artificial Sequence
  Description of Artificial Sequence: Synthetic oligonucleotide
auauacuccugaggggucg

SEQ ID NO: 1785479 - RNA, 19 nt, Artificial Sequence
  Description of Artificial Sequence: Synthetic oligonucleotide
ugagguaaaucaagacauc

SEQ ID NO: 1785480 - RNA, 19 nt, Artificial Sequence
  Description of Artificial Sequence: Synthetic oligonucleotide
aacuuuaacuagccuucau

SEQ ID NO: 1785481 - RNA, 19 nt, Artificial Sequence
  Description of Artificial Sequence: Synthetic oligonucleotide
cacacaggcaccucuuuug

SEQ ID NO: 1785482 - RNA, 19 nt, Artificial Sequence
  Description of Artificial Sequence: Synthetic oligonucleotide
ggcugaauaguagaacugg

SEQ ID NO: 1785483 - RNA, 19 nt, Artificial Sequence
  Description of Artificial Sequence: Synthetic oligonucleotide
aacaacucccuugaguaua

SEQ ID NO: 1785484 - RNA, 19 nt, Artificial Sequence
  Description of Artificial Sequence: Synthetic oligonucleotide
caggaaaauacuuuguagu

SEQ ID NO: 1785485 - RNA, 19 nt, Artificial Sequence
  Description of Artificial Sequence: Synthetic oligonucleotide
ucccucaagacaugaaaau

SEQ ID NO: 1785486 - RNA, 19 nt, Artificial Sequence
  Description of Artificial Sequence: Synthetic oligonucleotide
guauacacuacagauuuaa

SEQ ID NO: 1785487 - RNA, 19 nt, Artificial Sequence
  Description of Artificial Sequence: Synthetic oligonucleotide
ugaagcccugucaagucaa

SEQ ID NO: 1785488 - RNA, 19 nt, Artificial Sequence
  Description of Artificial Sequence: Synthetic oligonucleotide
uauauacuccugagggguc

SEQ ID NO: 1785489 - RNA, 19 nt, Artificial Sequence
  Description of Artificial Sequence: Synthetic oligonucleotide
guuaacaacucccuugagu

SEQ ID NO: 1785490 - RNA, 19 nt, Artificial Sequence
  Description of Artificial Sequence: Synthetic oligonucleotide
agcuagaaucaucuggaaa

SEQ ID NO: 1785491 - RNA, 19 nt, Artificial Sequence
  Description of Artificial Sequence: Synthetic oligonucleotide
uagcaaugaggcuguaaga

SEQ ID NO: 1785492 - RNA, 19 nt, Artificial Sequence
  Description of Artificial Sequence: Synthetic oligonucleotide
uuggcgaagguaguaaauc

SEQ ID NO: 1785493 - RNA, 19 nt, Artificial Sequence
  Description of Artificial Sequence: Synthetic oligonucleotide
acucgccagaagcuuuggc

SEQ ID NO: 1785494 - RNA, 19 nt, Artificial Sequence
  Description of Artificial Sequence: Synthetic oligonucleotide
cagcuacgaagccugaagc

SEQ ID NO: 1785495 - RNA, 19 nt, Artificial Sequence
  Description of Artificial Sequence: Synthetic oligonucleotide
agucauuagcaaugaggcu

SEQ ID NO: 1785496 - RNA, 19 nt, Artificial Sequence
  Description of Artificial Sequence: Synthetic oligonucleotide
uugggauccagccucucua

SEQ ID NO: 1785497 - RNA, 19 nt, Artificial Sequence
  Description of Artificial Sequence: Synthetic oligonucleotide
acgccugggccuuucuccc

SEQ ID NO: 1785498 - RNA, 19 nt, Artificial Sequence
  Description of Artificial Sequence: Synthetic oligonucleotide
auugaugcuauagacugua

SEQ ID NO: 1785499 - RNA, 19 nt, Artificial Sequence
  Description of Artificial Sequence: Synthetic oligonucleotide
acuacagauuuaaauagua

SEQ ID NO: 1785500 - RNA, 19 nt, Artificial Sequence
  Description of Artificial Sequence: Synthetic oligonucleotide
gguaucguaucacauucac

SEQ ID NO: 1785501 - RNA, 19 nt, Artificial Sequence
  Description of Artificial Sequence: Synthetic oligonucleotide
gucaagucaaucagaagca

SEQ ID NO: 1785502 - RNA, 19 nt, Artificial Sequence
  Description of Artificial Sequence: Synthetic oligonucleotide
gaaaaugcccacacaggca

SEQ ID NO: 1785503 - RNA, 19 nt, Artificial Sequence
  Description of Artificial Sequence: Synthetic oligonucleotide
caucuuguaacagucauua

SEQ ID NO: 1785504 - RNA, 19 nt, Artificial Sequence
  Description of Artificial Sequence: Synthetic oligonucleotide
cugggcaauuuucauauga

SEQ ID NO: 1785505 - RNA, 19 nt, Artificial Sequence
  Description of Artificial Sequence: Synthetic oligonucleotide
auugcuuaagcaggaagaa

SEQ ID NO: 1785506 - RNA, 19 nt, Artificial Sequence
  Description of Artificial Sequence: Synthetic oligonucleotide
cccagcuagaaucaucugg

SEQ ID NO: 1785507 - RNA, 19 nt, Artificial Sequence
  Description of Artificial Sequence: Synthetic oligonucleotide
gucuugggaaaacacacaa

SEQ ID NO: 1785508 - RNA, 19 nt, Artificial Sequence
  Description of Artificial Sequence: Synthetic oligonucleotide
uaugaucccucgaacccau

SEQ ID NO: 1785509 - RNA, 19 nt, Artificial Sequence
  Description of Artificial Sequence: Synthetic oligonucleotide
ugguaucguaucacauuca

SEQ ID NO: 1785510 - RNA, 19 nt, Artificial Sequence
  Description of Artificial Sequence: Synthetic oligonucleotide
aaaguacaucaguguaaau

SEQ ID NO: 1785511 - RNA, 19 nt, Artificial Sequence
  Description of Artificial Sequence: Synthetic oligonucleotide
agaaguugagguaaaucaa

SEQ ID NO: 1785512 - RNA, 19 nt, Artificial Sequence
  Description of Artificial Sequence: Synthetic oligonucleotide
agaagcaauuaucccuccu

SEQ ID NO: 1785513 - RNA, 19 nt, Artificial Sequence
  Description of Artificial Sequence: Synthetic oligonucleotide
uuaucccuccuuacagaac

SEQ ID NO: 1785514 - RNA, 19 nt, Artificial Sequence
  Description of Artificial Sequence: Synthetic oligonucleotide
gaucccucgaacccauuuc

SEQ ID NO: 1785515 - RNA, 19 nt, Artificial Sequence
  Description of Artificial Sequence: Synthetic oligonucleotide
guauucgggguugggaucc

SEQ ID NO: 1785516 - RNA, 19 nt, Artificial Sequence
  Description of Artificial Sequence: Synthetic oligonucleotide
ugggauccagccucucuag

SEQ ID NO: 1785517 - RNA, 19 nt, Artificial Sequence
  Description of Artificial Sequence: Synthetic oligonucleotide
uuguagaaguaaacucuua

SEQ ID NO: 1785518 - RNA, 19 nt, Artificial Sequence
  Description of Artificial Sequence: Synthetic oligonucleotide
ucuuggcgaagguaguaaa

SEQ ID NO: 1785519 - RNA, 19 nt, Artificial Sequence
  Description of Artificial Sequence: Synthetic oligonucleotide
gacauccuucccucaagac

SEQ ID NO: 1785520 - RNA, 19 nt, Artificial Sequence
  Description of Artificial Sequence: Synthetic oligonucleotide
aagcccugucaagucaauc

SEQ ID NO: 1785521 - RNA, 19 nt, Artificial Sequence
  Description of Artificial Sequence: Synthetic oligonucleotide
cuguagauuaaaacuuuaa

SEQ ID NO: 1785522 - RNA, 19 nt, Artificial Sequence
  Description of Artificial Sequence: Synthetic oligonucleotide
augcuauagacuguacaca

SEQ ID NO: 1785523 - RNA, 19 nt, Artificial Sequence
  Description of Artificial Sequence: Synthetic oligonucleotide
cacuagcugauccuccuac

SEQ ID NO: 1785524 - RNA, 19 nt, Artificial Sequence
  Description of Artificial Sequence: Synthetic oligonucleotide
guauauacuccugaggggu

SEQ ID NO: 1785525 - RNA, 19 nt, Artificial Sequence
  Description of Artificial Sequence: Synthetic oligonucleotide
uguuuccgucucaauccug

SEQ ID NO: 1785526 - RNA, 19 nt, Artificial Sequence
  Description of Artificial Sequence: Synthetic oligonucleotide
auguuuccgucucaauccu

SEQ ID NO: 1785527 - RNA, 19 nt, Artificial Sequence
  Description of Artificial Sequence: Synthetic oligonucleotide
agugaguucccuggacagg

SEQ ID NO: 1785528 - RNA, 19 nt, Artificial Sequence
  Description of Artificial Sequence: Synthetic oligonucleotide
auaugaucccucgaaccca

SEQ ID NO: 1785529 - RNA, 19 nt, Artificial Sequence
  Description of Artificial Sequence: Synthetic oligonucleotide
auuguagaaguaaacucuu

SEQ ID NO: 1785530 - RNA, 19 nt, Artificial Sequence
  Description of Artificial Sequence: Synthetic oligonucleotide
uaacuuuaacuagccuuca

SEQ ID NO: 1785531 - RNA, 19 nt, Artificial Sequence
  Description of Artificial Sequence: Synthetic oligonucleotide
ugaucccucgaacccauuu

SEQ ID NO: 1785532 - RNA, 19 nt, Artificial Sequence
  Description of Artificial Sequence: Synthetic oligonucleotide
uggcccaucuuguaacagu

SEQ ID NO: 1785533 - RNA, 19 nt, Artificial Sequence
  Description of Artificial Sequence: Synthetic oligonucleotide
guaucacauucacuagcug

SEQ ID NO: 1785534 - RNA, 19 nt, Artificial Sequence
  Description of Artificial Sequence: Synthetic oligonucleotide
ucgccagaagcuuuggcuu

SEQ ID NO: 1785535 - RNA, 19 nt, Artificial Sequence
  Description of Artificial Sequence: Synthetic oligonucleotide
caugcgcuuaacuuuaacu

SEQ ID NO: 1785536 - RNA, 19 nt, Artificial Sequence
  Description of Artificial Sequence: Synthetic oligonucleotide
gauccuccuaccaacugga

SEQ ID NO: 1785537 - RNA, 19 nt, Artificial Sequence
  Description of Artificial Sequence: Synthetic oligonucleotide
guaggcuccagauccuuga

SEQ ID NO: 1785538 - RNA, 19 nt, Artificial Sequence
  Description of Artificial Sequence: Synthetic oligonucleotide
cauaggaaaguacaucagu

SEQ ID NO: 1785539 - RNA, 19 nt, Artificial Sequence
  Description of Artificial Sequence: Synthetic oligonucleotide
gcaauuaucccuccuuaca

SEQ ID NO: 1785540 - RNA, 19 nt, Artificial Sequence
  Description of Artificial Sequence: Synthetic oligonucleotide
ccucgaacccauuuccugg

SEQ ID NO: 1785541 - RNA, 19 nt, Artificial Sequence
  Description of Artificial Sequence: Synthetic oligonucleotide
uaacaacucccuugaguau

SEQ ID NO: 1785542 - RNA, 19 nt, Artificial Sequence
  Description of Artificial Sequence: Synthetic oligonucleotide
uggcuugggcauaauuaaa

SEQ ID NO: 1785543 - RNA, 19 nt, Artificial Sequence
  Description of Artificial Sequence: Synthetic oligonucleotide
acuagccuucauguuuccg

SEQ ID NO: 1785544 - RNA, 19 nt, Artificial Sequence
  Description of Artificial Sequence: Synthetic oligonucleotide
ucuggguaguaaacucaaa

SEQ ID NO: 1785545 - RNA, 19 nt, Artificial Sequence
  Description of Artificial Sequence: Synthetic oligonucleotide
acagagugaguucccugga

SEQ ID NO: 1785546 - RNA, 19 nt, Artificial Sequence
  Description of Artificial Sequence: Synthetic oligonucleotide
gagauuccaugacagccaa

SEQ ID NO: 1785547 - RNA, 19 nt, Artificial Sequence
  Description of Artificial Sequence: Synthetic oligonucleotide
caagggcugcguuaacaac

SEQ ID NO: 1785548 - RNA, 19 nt, Artificial Sequence
  Description of Artificial Sequence: Synthetic oligonucleotide
cuagcugauccuccuacca

SEQ ID NO: 1785549 - RNA, 19 nt, Artificial Sequence
  Description of Artificial Sequence: Synthetic oligonucleotide
gcuacgaagccugaagccc

SEQ ID NO: 1785550 - RNA, 19 nt, Artificial Sequence
  Description of Artificial Sequence: Synthetic oligonucleotide
uacgaagccugaagcccug

SEQ ID NO: 1785551 - RNA, 19 nt, Artificial Sequence
  Description of Artificial Sequence: Synthetic oligonucleotide
uugcuuaagcaggaagaaa

SEQ ID NO: 1785552 - RNA, 19 nt, Artificial Sequence
  Description of Artificial Sequence: Synthetic oligonucleotide
gggaauagacauccuuccc

SEQ ID NO: 1785553 - RNA, 19 nt, Artificial Sequence
  Description of Artificial Sequence: Synthetic oligonucleotide
cagaagcaauuaucccucc

SEQ ID NO: 1785554 - RNA, 19 nt, Artificial Sequence
  Description of Artificial Sequence: Synthetic oligonucleotide
ggaauagacauccuucccu

SEQ ID NO: 1785555 - RNA, 19 nt, Artificial Sequence
  Description of Artificial Sequence: Synthetic oligonucleotide
cacaggcaccucuuuugcc

SEQ ID NO: 1785556 - RNA, 19 nt, Artificial Sequence
  Description of Artificial Sequence: Synthetic oligonucleotide
ugucaucauuguagaagua

SEQ ID NO: 1785557 - RNA, 19 nt, Artificial Sequence
  Description of Artificial Sequence: Synthetic oligonucleotide
cuccugaggggucguaggc

SEQ ID NO: 1785558 - RNA, 19 nt, Artificial Sequence
  Description of Artificial Sequence: Synthetic oligonucleotide
agaugucaucauuguagaa

SEQ ID NO: 1785559 - RNA, 19 nt, Artificial Sequence
  Description of Artificial Sequence: Synthetic oligonucleotide
agugucuuucaggaaaaua

SEQ ID NO: 1785560 - RNA, 19 nt, Artificial Sequence
  Description of Artificial Sequence: Synthetic oligonucleotide
agguaaaucaagacaucau

SEQ ID NO: 1785561 - RNA, 19 nt, Artificial Sequence
  Description of Artificial Sequence: Synthetic oligonucleotide
auccuugauuaaauuauaa

SEQ ID NO: 1785562 - RNA, 19 nt, Artificial Sequence
  Description of Artificial Sequence: Synthetic oligonucleotide
gacagccaaggcugccggg

SEQ ID NO: 1785563 - RNA, 19 nt, Artificial Sequence
  Description of Artificial Sequence: Synthetic oligonucleotide
ucccucgaacccauuuccu

SEQ ID NO: 1785564 - RNA, 19 nt, Artificial Sequence
  Description of Artificial Sequence: Synthetic oligonucleotide
agggcugcguuaacaacuc

SEQ ID NO: 1785565 - RNA, 19 nt, Artificial Sequence
  Description of Artificial Sequence: Synthetic oligonucleotide
gggcaauuuucauaugauc

SEQ ID NO: 1785566 - RNA, 19 nt, Artificial Sequence
  Description of Artificial Sequence: Synthetic oligonucleotide
gcugaauaguagaacuggc

SEQ ID NO: 1785567 - RNA, 19 nt, Artificial Sequence
  Description of Artificial Sequence: Synthetic oligonucleotide
aaggacucgccagaagcuu

SEQ ID NO: 1785568 - RNA, 19 nt, Artificial Sequence
  Description of Artificial Sequence: Synthetic oligonucleotide
auuagcaaugaggcuguaa

SEQ ID NO: 1785569 - RNA, 19 nt, Artificial Sequence
  Description of Artificial Sequence: Synthetic oligonucleotide
cugauccuccuaccaacug

SEQ ID NO: 1785570 - RNA, 19 nt, Artificial Sequence
  Description of Artificial Sequence: Synthetic oligonucleotide
ucaggguucuggguaguaa

SEQ ID NO: 1785571 - RNA, 19 nt, Artificial Sequence
  Description of Artificial Sequence: Synthetic oligonucleotide
ugaguucccuggacaggcu

SEQ ID NO: 1785572 - RNA, 19 nt, Artificial Sequence
  Description of Artificial Sequence: Synthetic oligonucleotide
gggguugggauccagccuc

SEQ ID NO: 1785573 - RNA, 19 nt, Artificial Sequence
  Description of Artificial Sequence: Synthetic oligonucleotide
auaguagaacuggcccauc

SEQ ID NO: 1785574 - RNA, 19 nt, Artificial Sequence
  Description of Artificial Sequence: Synthetic oligonucleotide
gcccugucaagucaaucag

SEQ ID NO: 1785575 - RNA, 19 nt, Artificial Sequence
  Description of Artificial Sequence: Synthetic oligonucleotide
ggcugcguuaacaacuccc

SEQ ID NO: 1785576 - RNA, 19 nt, Artificial Sequence
  Description of Artificial Sequence: Synthetic oligonucleotide
cucgccagaagcuuuggcu

SEQ ID NO: 1785577 - RNA, 19 nt, Artificial Sequence
  Description of Artificial Sequence: Synthetic oligonucleotide
gucaaucagaagcaauuau

SEQ ID NO: 1785578 - RNA, 19 nt, Artificial Sequence
  Description of Artificial Sequence: Synthetic oligonucleotide
ggaaaguacaucaguguaa

SEQ ID NO: 1785579 - RNA, 19 nt, Artificial Sequence
  Description of Artificial Sequence: Synthetic oligonucleotide
cagaagcuuuggcuugggc

SEQ ID NO: 1785580 - RNA, 19 nt, Artificial Sequence
  Description of Artificial Sequence: Synthetic oligonucleotide
gcguuaacaacucccuuga

SEQ ID NO: 1785581 - RNA, 19 nt, Artificial Sequence
  Description of Artificial Sequence: Synthetic oligonucleotide
agucucucccagcuagaau

SEQ ID NO: 1785582 - RNA, 19 nt, Artificial Sequence
  Description of Artificial Sequence: Synthetic oligonucleotide
agccuucauguuuccgucu

SEQ ID NO: 1785583 - RNA, 19 nt, Artificial Sequence
  Description of Artificial Sequence: Synthetic oligonucleotide
ggauccagccucucuagga

SEQ ID NO: 1785584 - RNA, 19 nt, Artificial Sequence
  Description of Artificial Sequence: Synthetic oligonucleotide
cacuacagauuuaaauagu

SEQ ID NO: 1785585 - RNA, 19 nt, Artificial Sequence
  Description of Artificial Sequence: Synthetic oligonucleotide
cugaagcccugucaaguca

SEQ ID NO: 1785586 - RNA, 19 nt, Artificial Sequence
  Description of Artificial Sequence: Synthetic oligonucleotide
ucccagcuagaaucaucug

SEQ ID NO: 1785587 - RNA, 19 nt, Artificial Sequence
  Description of Artificial Sequence: Synthetic oligonucleotide
cugaggggucguaggcucc

SEQ ID NO: 1785588 - RNA, 19 nt, Artificial Sequence
  Description of Artificial Sequence: Synthetic oligonucleotide
gcgcuuaacuuuaacuagc

SEQ ID NO: 1785589 - RNA, 19 nt, Artificial Sequence
  Description of Artificial Sequence: Synthetic oligonucleotide
caggguucuggguaguaaa

SEQ ID NO: 1785590 - RNA, 19 nt, Artificial Sequence
  Description of Artificial Sequence: Synthetic oligonucleotide
ccaugcacugccucccugg

SEQ ID NO: 1785591 - RNA, 19 nt, Artificial Sequence
  Description of Artificial Sequence: Synthetic oligonucleotide
ggcgaagguaguaaaucac

SEQ ID NO: 1785592 - RNA, 19 nt, Artificial Sequence
  Description of Artificial Sequence: Synthetic oligonucleotide
uauacuccugaggggucgu

SEQ ID NO: 1785593 - RNA, 19 nt, Artificial Sequence
  Description of Artificial Sequence: Synthetic oligonucleotide
cgcuuaacuuuaacuagcc

SEQ ID NO: 1785594 - RNA, 19 nt, Artificial Sequence
  Description of Artificial Sequence: Synthetic oligonucleotide
gacucgccagaagcuuugg

SEQ ID NO: 1785595 - RNA, 19 nt, Artificial Sequence
  Description of Artificial Sequence: Synthetic oligonucleotide
uuuccgucucaauccugua

SEQ ID NO: 1785596 - RNA, 19 nt, Artificial Sequence
  Description of Artificial Sequence: Synthetic oligonucleotide
gaaggacucgccagaagcu

SEQ ID NO: 1785597 - RNA, 19 nt, Artificial Sequence
  Description of Artificial Sequence: Synthetic oligonucleotide
ucccaguauucgggguugg

SEQ ID NO: 1785598 - RNA, 19 nt, Artificial Sequence
  Description of Artificial Sequence: Synthetic oligonucleotide
cccucaagacaugaaaaug

SEQ ID NO: 1785599 - RNA, 19 nt, Artificial Sequence
  Description of Artificial Sequence: Synthetic oligonucleotide
gccuucccaguauucgggg

SEQ ID NO: 1785600 - RNA, 19 nt, Artificial Sequence
  Description of Artificial Sequence: Synthetic oligonucleotide
gggauccagccucucuagg

SEQ ID NO: 1785601 - RNA, 19 nt, Artificial Sequence
  Description of Artificial Sequence: Synthetic oligonucleotide
cugcaugcgcuuaacuuua

SEQ ID NO: 1785602 - RNA, 19 nt, Artificial Sequence
  Description of Artificial Sequence: Synthetic oligonucleotide
ugaggggucguaggcucca

SEQ ID NO: 1785603 - RNA, 19 nt, Artificial Sequence
  Description of Artificial Sequence: Synthetic oligonucleotide
gaacugcaugcgcuuaacu

SEQ ID NO: 1785604 - RNA, 19 nt, Artificial Sequence
  Description of Artificial Sequence: Synthetic oligonucleotide
guuuccgucucaauccugu

SEQ ID NO: 1785605 - RNA, 19 nt, Artificial Sequence
  Description of Artificial Sequence: Synthetic oligonucleotide
ugcaugcgcuuaacuuuaa

SEQ ID NO: 1785606 - RNA, 19 nt, Artificial Sequence
  Description of Artificial Sequence: Synthetic oligonucleotide
caguauucgggguugggau

SEQ ID NO: 1785607 - RNA, 19 nt, Artificial Sequence
  Description of Artificial Sequence: Synthetic oligonucleotide
cuacgaagccugaagcccu

SEQ ID NO: 1785608 - RNA, 19 nt, Artificial Sequence
  Description of Artificial Sequence: Synthetic oligonucleotide
gaggcuguaagaggcugaa

SEQ ID NO: 1785609 - RNA, 19 nt, Artificial Sequence
  Description of Artificial Sequence: Synthetic oligonucleotide
ugccucccugguaucguau

SEQ ID NO: 1785610 - RNA, 19 nt, Artificial Sequence
  Description of Artificial Sequence: Synthetic oligonucleotide
cuggcccaucuuguaacag

SEQ ID NO: 1785611 - RNA, 19 nt, Artificial Sequence
  Description of Artificial Sequence: Synthetic oligonucleotide
caucaguguaaaugagugu

SEQ ID NO: 1785612 - RNA, 19 nt, Artificial Sequence
  Description of Artificial Sequence: Synthetic oligonucleotide
cuucauguuuccgucucaa

SEQ ID NO: 1785613 - RNA, 19 nt, Artificial Sequence
  Description of Artificial Sequence: Synthetic oligonucleotide
acaacucccuugaguauau

SEQ ID NO: 1785614 - RNA, 19 nt, Artificial Sequence
  Description of Artificial Sequence: Synthetic oligonucleotide
gguugucaucuguaagaga

SEQ ID NO: 1785615 - RNA, 19 nt, Artificial Sequence
  Description of Artificial Sequence: Synthetic oligonucleotide
cuccagauccuugauuaaa

SEQ ID NO: 1785616 - RNA, 19 nt, Artificial Sequence
  Description of Artificial Sequence: Synthetic oligonucleotide
cuauagagugagauuccau

SEQ ID NO: 1785617 - RNA, 19 nt, Artificial Sequence
  Description of Artificial Sequence: Synthetic oligonucleotide
aggcuccagauccuugauu

SEQ ID NO: 1785618 - RNA, 19 nt, Artificial Sequence
  Description of Artificial Sequence: Synthetic oligonucleotide
ccucucuaggacaucaaaa

SEQ ID NO: 1785619 - RNA, 19 nt, Artificial Sequence
  Description of Artificial Sequence: Synthetic oligonucleotide
cugcugggcaauuuucaua

SEQ ID NO: 1785620 - RNA, 19 nt, Artificial Sequence
  Description of Artificial Sequence: Synthetic oligonucleotide
ccugaagcccugucaaguc

SEQ ID NO: 1785621 - RNA, 19 nt, Artificial Sequence
  Description of Artificial Sequence: Synthetic oligonucleotide
cagauuuaaauaguacauu

SEQ ID NO: 1785622 - RNA, 19 nt, Artificial Sequence
  Description of Artificial Sequence: Synthetic oligonucleotide
cuuggcgaagguaguaaau

SEQ ID NO: 1785623 - RNA, 19 nt, Artificial Sequence
  Description of Artificial Sequence: Synthetic oligonucleotide
cauugaugcuauagacugu

SEQ ID NO: 1785624 - RNA, 19 nt, Artificial Sequence
  Description of Artificial Sequence: Synthetic oligonucleotide
agauuccaugacagccaag

SEQ ID NO: 1785625 - RNA, 19 nt, Artificial Sequence
  Description of Artificial Sequence: Synthetic oligonucleotide
cccucgaacccauuuccug

SEQ ID NO: 1785626 - RNA, 19 nt, Artificial Sequence
  Description of Artificial Sequence: Synthetic oligonucleotide
cucaauccuguagauuaaa

SEQ ID NO: 1785627 - RNA, 19 nt, Artificial Sequence
  Description of Artificial Sequence: Synthetic oligonucleotide
aguauacacuacagauuua

SEQ ID NO: 1785628 - RNA, 19 nt, Artificial Sequence
  Description of Artificial Sequence: Synthetic oligonucleotide
guaucguaucacauucacu

SEQ ID NO: 1785629 - RNA, 19 nt, Artificial Sequence
  Description of Artificial Sequence: Synthetic oligonucleotide
gccuucauguuuccgucuc

SEQ ID NO: 1785630 - RNA, 19 nt, Artificial Sequence
  Description of Artificial Sequence: Synthetic oligonucleotide
aggggucguaggcuccaga

SEQ ID NO: 1785631 - RNA, 19 nt, Artificial Sequence
  Description of Artificial Sequence: Synthetic oligonucleotide
aagcuuuggcuugggcaua

SEQ ID NO: 1785632 - RNA, 19 nt, Artificial Sequence
  Description of Artificial Sequence: Synthetic oligonucleotide
cagaacugcaugcgcuuaa

SEQ ID NO: 1785633 - RNA, 19 nt, Artificial Sequence
  Description of Artificial Sequence: Synthetic oligonucleotide
caccucuuuugccuuccca

SEQ ID NO: 1785634 - RNA, 19 nt, Artificial Sequence
  Description of Artificial Sequence: Synthetic oligonucleotide
agccaugcacugccucccu

SEQ ID NO: 1785635 - RNA, 19 nt, Artificial Sequence
  Description of Artificial Sequence: Synthetic oligonucleotide
auucgggguugggauccag

SEQ ID NO: 1785636 - RNA, 19 nt, Artificial Sequence
  Description of Artificial Sequence: Synthetic oligonucleotide
uauucgggguugggaucca

SEQ ID NO: 1785637 - RNA, 19 nt, Artificial Sequence
  Description of Artificial Sequence: Synthetic oligonucleotide
cuggccaagggcugcguua

SEQ ID NO: 1785638 - RNA, 19 nt, Artificial Sequence
  Description of Artificial Sequence: Synthetic oligonucleotide
caucaucuuggcgaaggua

SEQ ID NO: 1785639 - RNA, 19 nt, Artificial Sequence
  Description of Artificial Sequence: Synthetic oligonucleotide
gcaugcgcuuaacuuuaac

SEQ ID NO: 1785640 - RNA, 19 nt, Artificial Sequence
  Description of Artificial Sequence: Synthetic oligonucleotide
cagcuagaaucaucuggaa

SEQ ID NO: 1785641 - RNA, 19 nt, Artificial Sequence
  Description of Artificial Sequence: Synthetic oligonucleotide
ggacucgccagaagcuuug

SEQ ID NO: 1785642 - RNA, 19 nt, Artificial Sequence
  Description of Artificial Sequence: Synthetic oligonucleotide
gggucguaggcuccagauc

SEQ ID NO: 1785643 - RNA, 19 nt, Artificial Sequence
  Description of Artificial Sequence: Synthetic oligonucleotide
aucccuccuuacagaacug

SEQ ID NO: 1785644 - RNA, 19 nt, Artificial Sequence
  Description of Artificial Sequence: Synthetic oligonucleotide
ucguaggcuccagauccuu

SEQ ID NO: 1785645 - RNA, 19 nt, Artificial Sequence
  Description of Artificial Sequence: Synthetic oligonucleotide
ccaagggcugcguuaacaa

SEQ ID NO: 1785646 - RNA, 19 nt, Artificial Sequence
  Description of Artificial Sequence: Synthetic oligonucleotide
gcuuaacuuuaacuagccu

SEQ ID NO: 1785647 - RNA, 19 nt, Artificial Sequence
  Description of Artificial Sequence: Synthetic oligonucleotide
aggacucgccagaagcuuu

SEQ ID NO: 1785648 - RNA, 19 nt, Artificial Sequence
  Description of Artificial Sequence: Synthetic oligonucleotide
cauucccacgccugggccu

SEQ ID NO: 1785649 - RNA, 19 nt, Artificial Sequence
  Description of Artificial Sequence: Synthetic oligonucleotide
gcugggcaauuuucauaug

SEQ ID NO: 1785650 - RNA, 19 nt, Artificial Sequence
  Description of Artificial Sequence: Synthetic oligonucleotide
cguaucacauucacuagcu

SEQ ID NO: 1785651 - RNA, 19 nt, Artificial Sequence
  Description of Artificial Sequence: Synthetic oligonucleotide
cuaggacaucaaaagccuu

SEQ ID NO: 1785652 - RNA, 19 nt, Artificial Sequence
  Description of Artificial Sequence: Synthetic oligonucleotide
gcugcguuaacaacucccu

SEQ ID NO: 1785653 - RNA, 19 nt, Artificial Sequence
  Description of Artificial Sequence: Synthetic oligonucleotide
ccaguauucgggguuggga

SEQ ID NO: 1785654 - RNA, 19 nt, Artificial Sequence
  Description of Artificial Sequence: Synthetic oligonucleotide
aggcugccgggcauuggug

SEQ ID NO: 1785655 - RNA, 19 nt, Artificial Sequence
  Description of Artificial Sequence: Synthetic oligonucleotide
gggcugcguuaacaacucc

SEQ ID NO: 1785656 - RNA, 19 nt, Artificial Sequence
  Description of Artificial Sequence: Synthetic oligonucleotide
acgaagccugaagcccugu

SEQ ID NO: 1785657 - RNA, 19 nt, Artificial Sequence
  Description of Artificial Sequence: Synthetic oligonucleotide
ggguucuggguaguaaacu

SEQ ID NO: 1785658 - RNA, 19 nt, Artificial Sequence
  Description of Artificial Sequence: Synthetic oligonucleotide
cguuaacaacucccuugag

SEQ ID NO: 1785659 - RNA, 19 nt, Artificial Sequence
  Description of Artificial Sequence: Synthetic oligonucleotide
gccaugcacugccucccug

SEQ ID NO: 1785660 - RNA, 19 nt, Artificial Sequence
  Description of Artificial Sequence: Synthetic oligonucleotide
cacagcuacgaagccugaa

SEQ ID NO: 1785661 - RNA, 19 nt, Artificial Sequence
  Description of Artificial Sequence: Synthetic oligonucleotide
caguguaaaugagugucuu

SEQ ID NO: 1785662 - RNA, 19 nt, Artificial Sequence
  Description of Artificial Sequence: Synthetic oligonucleotide
ggggucguaggcuccagau

SEQ ID NO: 1785663 - RNA, 19 nt, Artificial Sequence
  Description of Artificial Sequence: Synthetic oligonucleotide
cccaguauucgggguuggg

SEQ ID NO: 1785664 - RNA, 19 nt, Artificial Sequence
  Description of Artificial Sequence: Synthetic oligonucleotide
gccucccugguaucguauc

SEQ ID NO: 1785665 - RNA, 19 nt, Artificial Sequence
  Description of Artificial Sequence: Synthetic oligonucleotide
acacagcuacgaagccuga

SEQ ID NO: 1785666 - RNA, 19 nt, Artificial Sequence
  Description of Artificial Sequence: Synthetic oligonucleotide
caugcacugccucccuggu

SEQ ID NO: 1785667 - RNA, 19 nt, Artificial Sequence
  Description of Artificial Sequence: Synthetic oligonucleotide
uccuggccaagggcugcgu

SEQ ID NO: 1785668 - RNA, 19 nt, Artificial Sequence
  Description of Artificial Sequence: Synthetic oligonucleotide
gagugucuuucaggaaaau

SEQ ID NO: 1785669 - RNA, 19 nt, Artificial Sequence
  Description of Artificial Sequence: Synthetic oligonucleotide
agccucucuaggacaucaa

SEQ ID NO: 1785670 - RNA, 19 nt, Artificial Sequence
  Description of Artificial Sequence: Synthetic oligonucleotide
auccuccuaccaacuggaa

SEQ ID NO: 1785671 - RNA, 19 nt, Artificial Sequence
  Description of Artificial Sequence: Synthetic oligonucleotide
ccuccuuacagaacugcau

SEQ ID NO: 1785672 - RNA, 19 nt, Artificial Sequence
  Description of Artificial Sequence: Synthetic oligonucleotide
auacuccugaggggucgua

SEQ ID NO: 1785673 - RNA, 19 nt, Artificial Sequence
  Description of Artificial Sequence: Synthetic oligonucleotide
cugccucccugguaucgua

SEQ ID NO: 1785674 - RNA, 19 nt, Artificial Sequence
  Description of Artificial Sequence: Synthetic oligonucleotide
gucaggguucuggguagua

SEQ ID NO: 1785675 - RNA, 19 nt, Artificial Sequence
  Description of Artificial Sequence: Synthetic oligonucleotide
gaagcccugucaagucaau

SEQ ID NO: 1785676 - RNA, 19 nt, Artificial Sequence
  Description of Artificial Sequence: Synthetic oligonucleotide
gcccaucuuguaacaguca

SEQ ID NO: 1785677 - RNA, 19 nt, Artificial Sequence
  Description of Artificial Sequence: Synthetic oligonucleotide
gcugauccuccuaccaacu

SEQ ID NO: 1785678 - RNA, 19 nt, Artificial Sequence
  Description of Artificial Sequence: Synthetic oligonucleotide
cugcguuaacaacucccuu

SEQ ID NO: 1785679 - RNA, 19 nt, Artificial Sequence
  Description of Artificial Sequence: Synthetic oligonucleotide
gcugccgggcauugguggu

SEQ ID NO: 1785680 - RNA, 19 nt, Artificial Sequence
  Description of Artificial Sequence: Synthetic oligonucleotide
gguugggauccagccucuc

SEQ ID NO: 1785681 - RNA, 19 nt, Artificial Sequence
  Description of Artificial Sequence: Synthetic oligonucleotide
cauuagcaaugaggcugua

SEQ ID NO: 1785682 - RNA, 19 nt, Artificial Sequence
  Description of Artificial Sequence: Synthetic oligonucleotide
augaucccucgaacccauu

SEQ ID NO: 1785683 - RNA, 19 nt, Artificial Sequence
  Description of Artificial Sequence: Synthetic oligonucleotide
gcacugccucccugguauc

SEQ ID NO: 1785684 - RNA, 19 nt, Artificial Sequence
  Description of Artificial Sequence: Synthetic oligonucleotide
cccugguaucguaucacau

SEQ ID NO: 1785685 - RNA, 19 nt, Artificial Sequence
  Description of Artificial Sequence: Synthetic oligonucleotide
cucucccagcuagaaucau

SEQ ID NO: 1785686 - RNA, 19 nt, Artificial Sequence
  Description of Artificial Sequence: Synthetic oligonucleotide
ccgucucaauccuguagau

SEQ ID NO: 1785687 - RNA, 19 nt, Artificial Sequence
  Description of Artificial Sequence: Synthetic oligonucleotide
uucccacgccugggccuuu

SEQ ID NO: 1785688 - RNA, 19 nt, Artificial Sequence
  Description of Artificial Sequence: Synthetic oligonucleotide
ggguugggauccagccucu

SEQ ID NO: 1785689 - RNA, 19 nt, Artificial Sequence
  Description of Artificial Sequence: Synthetic oligonucleotide
ccccuggguugucaucugu

SEQ ID NO: 1785690 - RNA, 19 nt, Artificial Sequence
  Description of Artificial Sequence: Synthetic oligonucleotide
cgucucaauccuguagauu

SEQ ID NO: 1785691 - RNA, 19 nt, Artificial Sequence
  Description of Artificial Sequence: Synthetic oligonucleotide
ccuggccaagggcugcguu

SEQ ID NO: 1785692 - RNA, 19 nt, Artificial Sequence
  Description of Artificial Sequence: Synthetic oligonucleotide
cccacgccugggccuuucu

SEQ ID NO: 1785693 - RNA, 19 nt, Artificial Sequence
  Description of Artificial Sequence: Synthetic oligonucleotide
acuaguuucauauuuaucc

SEQ ID NO: 1785694 - RNA, 19 nt, Artificial Sequence
  Description of Artificial Sequence: Synthetic oligonucleotide
aauagcuaucuuuagauuc

SEQ ID NO: 1785695 - RNA, 19 nt, Artificial Sequence
  Description of Artificial Sequence: Synthetic oligonucleotide
aaaauuaguauugaaugcc

SEQ ID NO: 1785696 - RNA, 19 nt, Artificial Sequence
  Description of Artificial Sequence: Synthetic oligonucleotide
ucagaaauaguucagaugu

SEQ ID NO: 1785697 - RNA, 19 nt, Artificial Sequence
  Description of Artificial Sequence: Synthetic oligonucleotide
acuaaaauugaauuuauug

SEQ ID NO: 1785698 - RNA, 19 nt, Artificial Sequence
  Description of Artificial Sequence: Synthetic oligonucleotide
auuacuggaagaaagauac

SEQ ID NO: 1785699 - RNA, 19 nt, Artificial Sequence
  Description of Artificial Sequence: Synthetic oligonucleotide
uuuguuaaugcuuuggcag

SEQ ID NO: 1785700 - RNA, 19 nt, Artificial Sequence
  Description of Artificial Sequence: Synthetic oligonucleotide
aauccaacguucuggaagc

SEQ ID NO: 1785701 - RNA, 19 nt, Artificial Sequence
  Description of Artificial Sequence: Synthetic oligonucleotide
aaagcaaaggagcucuugc

SEQ ID NO: 1785702 - RNA, 19 nt, Artificial Sequence
  Description of Artificial Sequence: Synthetic oligonucleotide
aaauaguucagauguauug

SEQ ID NO: 1785703 - RNA, 19 nt, Artificial Sequence
  Description of Artificial Sequence: Synthetic oligonucleotide
ugaguuucacacaagaugc

SEQ ID NO: 1785704 - RNA, 19 nt, Artificial Sequence
  Description of Artificial Sequence: Synthetic oligonucleotide
uaucuuuagauucuguuag

SEQ ID NO: 1785705 - RNA, 19 nt, Artificial Sequence
  Description of Artificial Sequence: Synthetic oligonucleotide
aaauccaacguucuggaag

SEQ ID NO: 1785706 - RNA, 19 nt, Artificial Sequence
  Description of Artificial Sequence: Synthetic oligonucleotide
aagguaaucaauuauggaa

SEQ ID NO: 1785707 - RNA, 19 nt, Artificial Sequence
  Description of Artificial Sequence: Synthetic oligonucleotide
uguauaacaucuccaauag

SEQ ID NO: 1785708 - RNA, 19 nt, Artificial Sequence
  Description of Artificial Sequence: Synthetic oligonucleotide
auaguuuaaaaguggggcc

SEQ ID NO: 1785709 - RNA, 19 nt, Artificial Sequence
  Description of Artificial Sequence: Synthetic oligonucleotide
ucagaaaucagaaauaguu

SEQ ID NO: 1785710 - RNA, 19 nt, Artificial Sequence
  Description of Artificial Sequence: Synthetic oligonucleotide
aaaucuuucuuugaggauc

SEQ ID NO: 1785711 - RNA, 19 nt, Artificial Sequence
  Description of Artificial Sequence: Synthetic oligonucleotide
aagugaguaucauucacac

SEQ ID NO: 1785712 - RNA, 19 nt, Artificial Sequence
  Description of Artificial Sequence: Synthetic oligonucleotide
aauuauaguuuaaaagugg

SEQ ID NO: 1785713 - RNA, 19 nt, Artificial Sequence
  Description of Artificial Sequence: Synthetic oligonucleotide
gguaagaacauuuaucugg

SEQ ID NO: 1785714 - RNA, 19 nt, Artificial Sequence
  Description of Artificial Sequence: Synthetic oligonucleotide
gauacuaagauuugcuugc

SEQ ID NO: 1785715 - RNA, 19 nt, Artificial Sequence
  Description of Artificial Sequence: Synthetic oligonucleotide
uuuagauucuguuagugca

SEQ ID NO: 1785716 - RNA, 19 nt, Artificial Sequence
  Description of Artificial Sequence: Synthetic oligonucleotide
aacucagucaauccgguuc

SEQ ID NO: 1785717 - RNA, 19 nt, Artificial Sequence
  Description of Artificial Sequence: Synthetic oligonucleotide
uaaaauuaguauugaaugc

SEQ ID NO: 1785718 - RNA, 19 nt, Artificial Sequence
  Description of Artificial Sequence: Synthetic oligonucleotide
aggaaauucaagcagaacu

SEQ ID NO: 1785719 - RNA, 19 nt, Artificial Sequence
  Description of Artificial Sequence: Synthetic oligonucleotide
uaaucaauuauggaaaagc

SEQ ID NO: 1785720 - RNA, 19 nt, Artificial Sequence
  Description of Artificial Sequence: Synthetic oligonucleotide
aagaguaccaucuucugga

SEQ ID NO: 1785721 - RNA, 19 nt, Artificial Sequence
  Description of Artificial Sequence: Synthetic oligonucleotide
aaauuauaguuuaaaagug

SEQ ID NO: 1785722 - RNA, 19 nt, Artificial Sequence
  Description of Artificial Sequence: Synthetic oligonucleotide
uuuauugaguuucacacaa

SEQ ID NO: 1785723 - RNA, 19 nt, Artificial Sequence
  Description of Artificial Sequence: Synthetic oligonucleotide
auaguucagauguauugcc

SEQ ID NO: 1785724 - RNA, 19 nt, Artificial Sequence
  Description of Artificial Sequence: Synthetic oligonucleotide
aaaucauuagaaacccucc

SEQ ID NO: 1785725 - RNA, 19 nt, Artificial Sequence
  Description of Artificial Sequence: Synthetic oligonucleotide
uuuggaaagaguuugugaa

SEQ ID NO: 1785726 - RNA, 19 nt, Artificial Sequence
  Description of Artificial Sequence: Synthetic oligonucleotide
auucaagcagaacugaaag

SEQ ID NO: 1785727 - RNA, 19 nt, Artificial Sequence
  Description of Artificial Sequence: Synthetic oligonucleotide
gugaguaucauucacacuc

SEQ ID NO: 1785728 - RNA, 19 nt, Artificial Sequence
  Description of Artificial Sequence: Synthetic oligonucleotide
acgcaaaagaaauaaaaug

SEQ ID NO: 1785729 - RNA, 19 nt, Artificial Sequence
  Description of Artificial Sequence: Synthetic oligonucleotide
aguaccaucuucuggacag

SEQ ID NO: 1785730 - RNA, 19 nt, Artificial Sequence
  Description of Artificial Sequence: Synthetic oligonucleotide
caaaccaucuaaaacuugc

SEQ ID NO: 1785731 - RNA, 19 nt, Artificial Sequence
  Description of Artificial Sequence: Synthetic oligonucleotide
aagcaucaagacuaguuuc

SEQ ID NO: 1785732 - RNA, 19 nt, Artificial Sequence
  Description of Artificial Sequence: Synthetic oligonucleotide
ugagaguugaguuucacaa

SEQ ID NO: 1785733 - RNA, 19 nt, Artificial Sequence
  Description of Artificial Sequence: Synthetic oligonucleotide
uaagaguaccaucuucugg

SEQ ID NO: 1785734 - RNA, 19 nt, Artificial Sequence
  Description of Artificial Sequence: Synthetic oligonucleotide
uauguccuuauacugaaga

SEQ ID NO: 1785735 - RNA, 19 nt, Artificial Sequence
  Description of Artificial Sequence: Synthetic oligonucleotide
auuauaguuuaaaaguggg

SEQ ID NO: 1785736 - RNA, 19 nt, Artificial Sequence
  Description of Artificial Sequence: Synthetic oligonucleotide
ucuuguucugauuagggcu

SEQ ID NO: 1785737 - RNA, 19 nt, Artificial Sequence
  Description of Artificial Sequence: Synthetic oligonucleotide
agauacuaagauuugcuug

SEQ ID NO: 1785738 - RNA, 19 nt, Artificial Sequence
  Description of Artificial Sequence: Synthetic oligonucleotide
aggcaaaccaucuaaaacu

SEQ ID NO: 1785739 - RNA, 19 nt, Artificial Sequence
  Description of Artificial Sequence: Synthetic oligonucleotide
aucaagacuaguuucauau

SEQ ID NO: 1785740 - RNA, 19 nt, Artificial Sequence
  Description of Artificial Sequence: Synthetic oligonucleotide
agaagugaguaucauucac

SEQ ID NO: 1785741 - RNA, 19 nt, Artificial Sequence
  Description of Artificial Sequence: Synthetic oligonucleotide
acaaaucuuucuuugagga

SEQ ID NO: 1785742 - RNA, 19 nt, Artificial Sequence
  Description of Artificial Sequence: Synthetic oligonucleotide
cagaguuaaggccagaggc

SEQ ID NO: 1785743 - RNA, 19 nt, Artificial Sequence
  Description of Artificial Sequence: Synthetic oligonucleotide
ugaaagagacaucuaggcc

SEQ ID NO: 1785744 - RNA, 19 nt, Artificial Sequence
  Description of Artificial Sequence: Synthetic oligonucleotide
aaagguaaucaauuaugga

SEQ ID NO: 1785745 - RNA, 19 nt, Artificial Sequence
  Description of Artificial Sequence: Synthetic oligonucleotide
auauuuauccaggcaaacc

SEQ ID NO: 1785746 - RNA, 19 nt, Artificial Sequence
  Description of Artificial Sequence: Synthetic oligonucleotide
ugcacuuauaaaauuagua

SEQ ID NO: 1785747 - RNA, 19 nt, Artificial Sequence
  Description of Artificial Sequence: Synthetic oligonucleotide
aauuauggaaaagcuucac

SEQ ID NO: 1785748 - RNA, 19 nt, Artificial Sequence
  Description of Artificial Sequence: Synthetic oligonucleotide
aguuucacaagggagacag

SEQ ID NO: 1785749 - RNA, 19 nt, Artificial Sequence
  Description of Artificial Sequence: Synthetic oligonucleotide
aaaugcuguuaagaguacc

SEQ ID NO: 1785750 - RNA, 19 nt, Artificial Sequence
  Description of Artificial Sequence: Synthetic oligonucleotide
ucauuagaaacccuccugu

SEQ ID NO: 1785751 - RNA, 19 nt, Artificial Sequence
  Description of Artificial Sequence: Synthetic oligonucleotide
aaucauuagaaacccuccu

SEQ ID NO: 1785752 - RNA, 19 nt, Artificial Sequence
  Description of Artificial Sequence: Synthetic oligonucleotide
aaagauacuaagauuugcu

SEQ ID NO: 1785753 - RNA, 19 nt, Artificial Sequence
  Description of Artificial Sequence: Synthetic oligonucleotide
uaaaacuugccaucugugc

SEQ ID NO: 1785754 - RNA, 19 nt, Artificial Sequence
  Description of Artificial Sequence: Synthetic oligonucleotide
caaaucauuagaaacccuc

SEQ ID NO: 1785755 - RNA, 19 nt, Artificial Sequence
  Description of Artificial Sequence: Synthetic oligonucleotide
aggcauguauaacaucucc

SEQ ID NO: 1785756 - RNA, 19 nt, Artificial Sequence
  Description of Artificial Sequence: Synthetic oligonucleotide
uacgcaaaagaaauaaaau

SEQ ID NO: 1785757 - RNA, 19 nt, Artificial Sequence
  Description of Artificial Sequence: Synthetic oligonucleotide
aaucaauuauggaaaagcu

SEQ ID NO: 1785758 - RNA, 19 nt, Artificial Sequence
  Description of Artificial Sequence: Synthetic oligonucleotide
acucagucaauccgguucc

SEQ ID NO: 1785759 - RNA, 19 nt, Artificial Sequence
  Description of Artificial Sequence: Synthetic oligonucleotide
aaaccaucuaaaacuugcc

SEQ ID NO: 1785760 - RNA, 19 nt, Artificial Sequence
  Description of Artificial Sequence: Synthetic oligonucleotide
ugaggaaaauccaacguuc

SEQ ID NO: 1785761 - RNA, 19 nt, Artificial Sequence
  Description of Artificial Sequence: Synthetic oligonucleotide
auugaaugccauuaugaca

SEQ ID NO: 1785762 - RNA, 19 nt, Artificial Sequence
  Description of Artificial Sequence: Synthetic oligonucleotide
cuuuagauucuguuagugc

SEQ ID NO: 1785763 - RNA, 19 nt, Artificial Sequence
  Description of Artificial Sequence: Synthetic oligonucleotide
agaacauuuaucuggacuu

SEQ ID NO: 1785764 - RNA, 19 nt, Artificial Sequence
  Description of Artificial Sequence: Synthetic oligonucleotide
uuucauauuuauccaggca

SEQ ID NO: 1785765 - RNA, 19 nt, Artificial Sequence
  Description of Artificial Sequence: Synthetic oligonucleotide
aaaaccuuugcaugagagu

SEQ ID NO: 1785766 - RNA, 19 nt, Artificial Sequence
  Description of Artificial Sequence: Synthetic oligonucleotide
agauguauugccaaggaug

SEQ ID NO: 1785767 - RNA, 19 nt, Artificial Sequence
  Description of Artificial Sequence: Synthetic oligonucleotide
cacaaacucagucaauccg

SEQ ID NO: 1785768 - RNA, 19 nt, Artificial Sequence
  Description of Artificial Sequence: Synthetic oligonucleotide
uuuggcaaggcuuucucca

SEQ ID NO: 1785769 - RNA, 19 nt, Artificial Sequence
  Description of Artificial Sequence: Synthetic oligonucleotide
aguauugaaugccauuaug

SEQ ID NO: 1785770 - RNA, 19 nt, Artificial Sequence
  Description of Artificial Sequence: Synthetic oligonucleotide
aguugcaauggacacuuuc

SEQ ID NO: 1785771 - RNA, 19 nt, Artificial Sequence
  Description of Artificial Sequence: Synthetic oligonucleotide
aucucuaacaaaucuuucu

SEQ ID NO: 1785772 - RNA, 19 nt, Artificial Sequence
  Description of Artificial Sequence: Synthetic oligonucleotide
uucacaguuucccagguau

SEQ ID NO: 1785773 - RNA, 19 nt, Artificial Sequence
  Description of Artificial Sequence: Synthetic oligonucleotide
uccaauagcuaucuuuaga

SEQ ID NO: 1785774 - RNA, 19 nt, Artificial Sequence
  Description of Artificial Sequence: Synthetic oligonucleotide
auguauaacaucuccaaua

SEQ ID NO: 1785775 - RNA, 19 nt, Artificial Sequence
  Description of Artificial Sequence: Synthetic oligonucleotide
uccuguauuucaaaugccu

SEQ ID NO: 1785776 - RNA, 19 nt, Artificial Sequence
  Description of Artificial Sequence: Synthetic oligonucleotide
gaaagauacuaagauuugc

SEQ ID NO: 1785777 - RNA, 19 nt, Artificial Sequence
  Description of Artificial Sequence: Synthetic oligonucleotide
aaaacuguaugagacugga

SEQ ID NO: 1785778 - RNA, 19 nt, Artificial Sequence
  Description of Artificial Sequence: Synthetic oligonucleotide
uuaguauugaaugccauua

SEQ ID NO: 1785779 - RNA, 19 nt, Artificial Sequence
  Description of Artificial Sequence: Synthetic oligonucleotide
uaugacagaagugaguauc

SEQ ID NO: 1785780 - RNA, 19 nt, Artificial Sequence
  Description of Artificial Sequence: Synthetic oligonucleotide
guucagaaaucagaaauag

SEQ ID NO: 1785781 - RNA, 19 nt, Artificial Sequence
  Description of Artificial Sequence: Synthetic oligonucleotide
ucuaucucuaacaaaucuu

SEQ ID NO: 1785782 - RNA, 19 nt, Artificial Sequence
  Description of Artificial Sequence: Synthetic oligonucleotide
agcauuuguggucugggag

SEQ ID NO: 1785783 - RNA, 19 nt, Artificial Sequence
  Description of Artificial Sequence: Synthetic oligonucleotide
agcaucccagaguuaaggc

SEQ ID NO: 1785784 - RNA, 19 nt, Artificial Sequence
  Description of Artificial Sequence: Synthetic oligonucleotide
aguuucauauuuauccagg

SEQ ID NO: 1785785 - RNA, 19 nt, Artificial Sequence
  Description of Artificial Sequence: Synthetic oligonucleotide
uguuaagaguaccaucuuc

SEQ ID NO: 1785786 - RNA, 19 nt, Artificial Sequence
  Description of Artificial Sequence: Synthetic oligonucleotide
uaaaaguggggccccacug

SEQ ID NO: 1785787 - RNA, 19 nt, Artificial Sequence
  Description of Artificial Sequence: Synthetic oligonucleotide
agaguuaaggccagaggcc

SEQ ID NO: 1785788 - RNA, 19 nt, Artificial Sequence
  Description of Artificial Sequence: Synthetic oligonucleotide
uuccuaguugcaauggaca

SEQ ID NO: 1785789 - RNA, 19 nt, Artificial Sequence
  Description of Artificial Sequence: Synthetic oligonucleotide
aaauuaguauugaaugcca

SEQ ID NO: 1785790 - RNA, 19 nt, Artificial Sequence
  Description of Artificial Sequence: Synthetic oligonucleotide
aucauuagaaacccuccug

SEQ ID NO: 1785791 - RNA, 19 nt, Artificial Sequence
  Description of Artificial Sequence: Synthetic oligonucleotide
uuagaaacccuccuguauu

SEQ ID NO: 1785792 - RNA, 19 nt, Artificial Sequence
  Description of Artificial Sequence: Synthetic oligonucleotide
uggaaagguaaucaauuau

SEQ ID NO: 1785793 - RNA, 19 nt, Artificial Sequence
  Description of Artificial Sequence: Synthetic oligonucleotide
aaugcuguuaagaguacca

SEQ ID NO: 1785794 - RNA, 19 nt, Artificial Sequence
  Description of Artificial Sequence: Synthetic oligonucleotide
acaaacucagucaauccgg

SEQ ID NO: 1785795 - RNA, 19 nt, Artificial Sequence
  Description of Artificial Sequence: Synthetic oligonucleotide
ggaaaauccaacguucugg

SEQ ID NO: 1785796 - RNA, 19 nt, Artificial Sequence
  Description of Artificial Sequence: Synthetic oligonucleotide
acuaagauuugcuugccau

SEQ ID NO: 1785797 - RNA, 19 nt, Artificial Sequence
  Description of Artificial Sequence: Synthetic oligonucleotide
agaucugccuuucugccag

SEQ ID NO: 1785798 - RNA, 19 nt, Artificial Sequence
  Description of Artificial Sequence: Synthetic oligonucleotide
ugaguaucauucacacucc

SEQ ID NO: 1785799 - RNA, 19 nt, Artificial Sequence
  Description of Artificial Sequence: Synthetic oligonucleotide
cuguagaagaaaugcauuc

SEQ ID NO: 1785800 - RNA, 19 nt, Artificial Sequence
  Description of Artificial Sequence: Synthetic oligonucleotide
auccgguucccacagauug

SEQ ID NO: 1785801 - RNA, 19 nt, Artificial Sequence
  Description of Artificial Sequence: Synthetic oligonucleotide
ucuuuagauucuguuagug

SEQ ID NO: 1785802 - RNA, 19 nt, Artificial Sequence
  Description of Artificial Sequence: Synthetic oligonucleotide
uuugcuugccauuaauaau

SEQ ID NO: 1785803 - RNA, 19 nt, Artificial Sequence
  Description of Artificial Sequence: Synthetic oligonucleotide
gaguuaaggccagaggccg

SEQ ID NO: 1785804 - RNA, 19 nt, Artificial Sequence
  Description of Artificial Sequence: Synthetic oligonucleotide
aguuucacacaagaugcac

SEQ ID NO: 1785805 - RNA, 19 nt, Artificial Sequence
  Description of Artificial Sequence: Synthetic oligonucleotide
ucuggacuuauauuuaaua

SEQ ID NO: 1785806 - RNA, 19 nt, Artificial Sequence
  Description of Artificial Sequence: Synthetic oligonucleotide
auugugaaccugucuaucu

SEQ ID NO: 1785807 - RNA, 19 nt, Artificial Sequence
  Description of Artificial Sequence: Synthetic oligonucleotide
cuuguucugauuagggcug

SEQ ID NO: 1785808 - RNA, 19 nt, Artificial Sequence
  Description of Artificial Sequence: Synthetic oligonucleotide
uguagaagaaaugcauucu

SEQ ID NO: 1785809 - RNA, 19 nt, Artificial Sequence
  Description of Artificial Sequence: Synthetic oligonucleotide
aaaaguggggccccacuga

SEQ ID NO: 1785810 - RNA, 19 nt, Artificial Sequence
  Description of Artificial Sequence: Synthetic oligonucleotide
cuaaaacuugccaucugug

SEQ ID NO: 1785811 - RNA, 19 nt, Artificial Sequence
  Description of Artificial Sequence: Synthetic oligonucleotide
ucuguuagugcaaaucauu

SEQ ID NO: 1785812 - RNA, 19 nt, Artificial Sequence
  Description of Artificial Sequence: Synthetic oligonucleotide
ucacacaagaugcacuuau

SEQ ID NO: 1785813 - RNA, 19 nt, Artificial Sequence
  Description of Artificial Sequence: Synthetic oligonucleotide
aagcaaaggagcucuugca

SEQ ID NO: 1785814 - RNA, 19 nt, Artificial Sequence
  Description of Artificial Sequence: Synthetic oligonucleotide
ugcaauggacacuuucuug

SEQ ID NO: 1785815 - RNA, 19 nt, Artificial Sequence
  Description of Artificial Sequence: Synthetic oligonucleotide
aguuuaaaaguggggcccc

SEQ ID NO: 1785816 - RNA, 19 nt, Artificial Sequence
  Description of Artificial Sequence: Synthetic oligonucleotide
uucagaaaucagaaauagu

SEQ ID NO: 1785817 - RNA, 19 nt, Artificial Sequence
  Description of Artificial Sequence: Synthetic oligonucleotide
uuguuaaugcuuuggcaga

SEQ ID NO: 1785818 - RNA, 19 nt, Artificial Sequence
  Description of Artificial Sequence: Synthetic oligonucleotide
gugguaagaacauuuaucu

SEQ ID NO: 1785819 - RNA, 19 nt, Artificial Sequence
  Description of Artificial Sequence: Synthetic oligonucleotide
auuagaaacccuccuguau

SEQ ID NO: 1785820 - RNA, 19 nt, Artificial Sequence
  Description of Artificial Sequence: Synthetic oligonucleotide
auguccuuauacugaagag

SEQ ID NO: 1785821 - RNA, 19 nt, Artificial Sequence
  Description of Artificial Sequence: Synthetic oligonucleotide
ugcccaaaaccuuugcaug

SEQ ID NO: 1785822 - RNA, 19 nt, Artificial Sequence
  Description of Artificial Sequence: Synthetic oligonucleotide
cuguuggccaagcaggagg

SEQ ID NO: 1785823 - RNA, 19 nt, Artificial Sequence
  Description of Artificial Sequence: Synthetic oligonucleotide
uuuacaaggcauguauaac

SEQ ID NO: 1785824 - RNA, 19 nt, Artificial Sequence
  Description of Artificial Sequence: Synthetic oligonucleotide
aaugccuaagccaaagcau

SEQ ID NO: 1785825 - RNA, 19 nt, Artificial Sequence
  Description of Artificial Sequence: Synthetic oligonucleotide
uuauugaguuucacacaag

SEQ ID NO: 1785826 - RNA, 19 nt, Artificial Sequence
  Description of Artificial Sequence: Synthetic oligonucleotide
aagcaggaggaaaauguuc

SEQ ID NO: 1785827 - RNA, 19 nt, Artificial Sequence
  Description of Artificial Sequence: Synthetic oligonucleotide
uaacaucuccaauagcuau

SEQ ID NO: 1785828 - RNA, 19 nt, Artificial Sequence
  Description of Artificial Sequence: Synthetic oligonucleotide
caggcaaaccaucuaaaac

SEQ ID NO: 1785829 - RNA, 19 nt, Artificial Sequence
  Description of Artificial Sequence: Synthetic oligonucleotide
ugugaaccugucuaucucu

SEQ ID NO: 1785830 - RNA, 19 nt, Artificial Sequence
  Description of Artificial Sequence: Synthetic oligonucleotide
guauuucaaaugccuaagc

SEQ ID NO: 1785831 - RNA, 19 nt, Artificial Sequence
  Description of Artificial Sequence: Synthetic oligonucleotide
aauucaagcagaacugaaa

SEQ ID NO: 1785832 - RNA, 19 nt, Artificial Sequence
  Description of Artificial Sequence: Synthetic oligonucleotide
acguucuggaagcccaggc

SEQ ID NO: 1785833 - RNA, 19 nt, Artificial Sequence
  Description of Artificial Sequence: Synthetic oligonucleotide
uguuaauuuuaaacuuaaa

SEQ ID NO: 1785834 - RNA, 19 nt, Artificial Sequence
  Description of Artificial Sequence: Synthetic oligonucleotide
uuaaaaguggggccccacu

SEQ ID NO: 1785835 - RNA, 19 nt, Artificial Sequence
  Description of Artificial Sequence: Synthetic oligonucleotide
ggaaagguaaucaauuaug

SEQ ID NO: 1785836 - RNA, 19 nt, Artificial Sequence
  Description of Artificial Sequence: Synthetic oligonucleotide
cugauuagggcuguguuug

SEQ ID NO: 1785837 - RNA, 19 nt, Artificial Sequence
  Description of Artificial Sequence: Synthetic oligonucleotide
uacuggaagaaagauacua

SEQ ID NO: 1785838 - RNA, 19 nt, Artificial Sequence
  Description of Artificial Sequence: Synthetic oligonucleotide
uucuccacacuguuccuag

SEQ ID NO: 1785839 - RNA, 19 nt, Artificial Sequence
  Description of Artificial Sequence: Synthetic oligonucleotide
guuuggaaagaguuuguga

SEQ ID NO: 1785840 - RNA, 19 nt, Artificial Sequence
  Description of Artificial Sequence: Synthetic oligonucleotide
uguuccuaguugcaaugga

SEQ ID NO: 1785841 - RNA, 19 nt, Artificial Sequence
  Description of Artificial Sequence: Synthetic oligonucleotide
cuaguuucauauuuaucca

SEQ ID NO: 1785842 - RNA, 19 nt, Artificial Sequence
  Description of Artificial Sequence: Synthetic oligonucleotide
aguucagauguauugccaa

SEQ ID NO: 1785843 - RNA, 19 nt, Artificial Sequence
  Description of Artificial Sequence: Synthetic oligonucleotide
uccuaguugcaauggacac

SEQ ID NO: 1785844 - RNA, 19 nt, Artificial Sequence
  Description of Artificial Sequence: Synthetic oligonucleotide
agaaauaguucagauguau

SEQ ID NO: 1785845 - RNA, 19 nt, Artificial Sequence
  Description of Artificial Sequence: Synthetic oligonucleotide
agaguaccaucuucuggac

SEQ ID NO: 1785846 - RNA, 19 nt, Artificial Sequence
  Description of Artificial Sequence: Synthetic oligonucleotide
gagacuggaaagguaauca

SEQ ID NO: 1785847 - RNA, 19 nt, Artificial Sequence
  Description of Artificial Sequence: Synthetic oligonucleotide
auacuaagauuugcuugcc

SEQ ID NO: 1785848 - RNA, 19 nt, Artificial Sequence
  Description of Artificial Sequence: Synthetic oligonucleotide
guaaucaauuauggaaaag

SEQ ID NO: 1785849 - RNA, 19 nt, Artificial Sequence
  Description of Artificial Sequence: Synthetic oligonucleotide
caaggcauguauaacaucu

SEQ ID NO: 1785850 - RNA, 19 nt, Artificial Sequence
  Description of Artificial Sequence: Synthetic oligonucleotide
cuggacuuauauuuaauaa

SEQ ID NO: 1785851 - RNA, 19 nt, Artificial Sequence
  Description of Artificial Sequence: Synthetic oligonucleotide
agguaaucaauuauggaaa

SEQ ID NO: 1785852 - RNA, 19 nt, Artificial Sequence
  Description of Artificial Sequence: Synthetic oligonucleotide
aucuaggccauguucuugu

SEQ ID NO: 1785853 - RNA, 19 nt, Artificial Sequence
  Description of Artificial Sequence: Synthetic oligonucleotide
auuagggcuguguuuggca

SEQ ID NO: 1785854 - RNA, 19 nt, Artificial Sequence
  Description of Artificial Sequence: Synthetic oligonucleotide
aggaaaauccaacguucug

SEQ ID NO: 1785855 - RNA, 19 nt, Artificial Sequence
  Description of Artificial Sequence: Synthetic oligonucleotide
aauuaguauugaaugccau

SEQ ID NO: 1785856 - RNA, 19 nt, Artificial Sequence
  Description of Artificial Sequence: Synthetic oligonucleotide
auacugaagaggccuugag

SEQ ID NO: 1785857 - RNA, 19 nt, Artificial Sequence
  Description of Artificial Sequence: Synthetic oligonucleotide
augccuaagccaaagcauc

SEQ ID NO: 1785858 - RNA, 19 nt, Artificial Sequence
  Description of Artificial Sequence: Synthetic oligonucleotide
uuggaaagaguuugugaaa

SEQ ID NO: 1785859 - RNA, 19 nt, Artificial Sequence
  Description of Artificial Sequence: Synthetic oligonucleotide
caucccagaguuaaggcca

SEQ ID NO: 1785860 - RNA, 19 nt, Artificial Sequence
  Description of Artificial Sequence: Synthetic oligonucleotide
gaguugaguuucacaaggg

SEQ ID NO: 1785861 - RNA, 19 nt, Artificial Sequence
  Description of Artificial Sequence: Synthetic oligonucleotide
agccaaagcaucaagacua

SEQ ID NO: 1785862 - RNA, 19 nt, Artificial Sequence
  Description of Artificial Sequence: Synthetic oligonucleotide
augagaguugaguuucaca

SEQ ID NO: 1785863 - RNA, 19 nt, Artificial Sequence
  Description of Artificial Sequence: Synthetic oligonucleotide
agcaggaggaaaauguuca

SEQ ID NO: 1785864 - RNA, 19 nt, Artificial Sequence
  Description of Artificial Sequence: Synthetic oligonucleotide
acagauugugaaccugucu

SEQ ID NO: 1785865 - RNA, 19 nt, Artificial Sequence
  Description of Artificial Sequence: Synthetic oligonucleotide
aaauucaagcagaacugaa

SEQ ID NO: 1785866 - RNA, 19 nt, Artificial Sequence
  Description of Artificial Sequence: Synthetic oligonucleotide
uugugaaccugucuaucuc

SEQ ID NO: 1785867 - RNA, 19 nt, Artificial Sequence
  Description of Artificial Sequence: Synthetic oligonucleotide
ugcuguuaagaguaccauc

SEQ ID NO: 1785868 - RNA, 19 nt, Artificial Sequence
  Description of Artificial Sequence: Synthetic oligonucleotide
cuaucuuuagauucuguua

SEQ ID NO: 1785869 - RNA, 19 nt, Artificial Sequence
  Description of Artificial Sequence: Synthetic oligonucleotide
auagcuaucuuuagauucu

SEQ ID NO: 1785870 - RNA, 19 nt, Artificial Sequence
  Description of Artificial Sequence: Synthetic oligonucleotide
ugucuaucucuaacaaauc

SEQ ID NO: 1785871 - RNA, 19 nt, Artificial Sequence
  Description of Artificial Sequence: Synthetic oligonucleotide
ccuugaggaaaauccaacg

SEQ ID NO: 1785872 - RNA, 19 nt, Artificial Sequence
  Description of Artificial Sequence: Synthetic oligonucleotide
gucaauccgguucccacag

SEQ ID NO: 1785873 - RNA, 19 nt, Artificial Sequence
  Description of Artificial Sequence: Synthetic oligonucleotide
gaguaucauucacacuccc

SEQ ID NO: 1785874 - RNA, 19 nt, Artificial Sequence
  Description of Artificial Sequence: Synthetic oligonucleotide
uaguauugaaugccauuau

SEQ ID NO: 1785875 - RNA, 19 nt, Artificial Sequence
  Description of Artificial Sequence: Synthetic oligonucleotide
ugccuaagccaaagcauca

SEQ ID NO: 1785876 - RNA, 19 nt, Artificial Sequence
  Description of Artificial Sequence: Synthetic oligonucleotide
ugauuagggcuguguuugg

SEQ ID NO: 1785877 - RNA, 19 nt, Artificial Sequence
  Description of Artificial Sequence: Synthetic oligonucleotide
aaaguggggccccacugaa

SEQ ID NO: 1785878 - RNA, 19 nt, Artificial Sequence
  Description of Artificial Sequence: Synthetic oligonucleotide
agaaagauacuaagauuug

SEQ ID NO: 1785879 - RNA, 19 nt, Artificial Sequence
  Description of Artificial Sequence: Synthetic oligonucleotide
aaaauccaacguucuggaa

SEQ ID NO: 1785880 - RNA, 19 nt, Artificial Sequence
  Description of Artificial Sequence: Synthetic oligonucleotide
uggugguaagaacauuuau

SEQ ID NO: 1785881 - RNA, 19 nt, Artificial Sequence
  Description of Artificial Sequence: Synthetic oligonucleotide
cugucuaucucuaacaaau

SEQ ID NO: 1785882 - RNA, 19 nt, Artificial Sequence
  Description of Artificial Sequence: Synthetic oligonucleotide
gaaagaguuugugaaaacu

SEQ ID NO: 1785883 - RNA, 19 nt, Artificial Sequence
  Description of Artificial Sequence: Synthetic oligonucleotide
ggaagaaagauacuaagau

SEQ ID NO: 1785884 - RNA, 19 nt, Artificial Sequence
  Description of Artificial Sequence: Synthetic oligonucleotide
gccauuaugacagaaguga

SEQ ID NO: 1785885 - RNA, 19 nt, Artificial Sequence
  Description of Artificial Sequence: Synthetic oligonucleotide
cauauuuauccaggcaaac

SEQ ID NO: 1785886 - RNA, 19 nt, Artificial Sequence
  Description of Artificial Sequence: Synthetic oligonucleotide
uauacugaagaggccuuga

SEQ ID NO: 1785887 - RNA, 19 nt, Artificial Sequence
  Description of Artificial Sequence: Synthetic oligonucleotide
cuccuguauuucaaaugcc

SEQ ID NO: 1785888 - RNA, 19 nt, Artificial Sequence
  Description of Artificial Sequence: Synthetic oligonucleotide
agauugugaaccugucuau

SEQ ID NO: 1785889 - RNA, 19 nt, Artificial Sequence
  Description of Artificial Sequence: Synthetic oligonucleotide
caauuauggaaaagcuuca

SEQ ID NO: 1785890 - RNA, 19 nt, Artificial Sequence
  Description of Artificial Sequence: Synthetic oligonucleotide
aagacuaguuucauauuua

SEQ ID NO: 1785891 - RNA, 19 nt, Artificial Sequence
  Description of Artificial Sequence: Synthetic oligonucleotide
ucagcaucccagaguuaag

SEQ ID NO: 1785892 - RNA, 19 nt, Artificial Sequence
  Description of Artificial Sequence: Synthetic oligonucleotide
cuguauuucaaaugccuaa

SEQ ID NO: 1785893 - RNA, 19 nt, Artificial Sequence
  Description of Artificial Sequence: Synthetic oligonucleotide
uugcaauggacacuuucuu

SEQ ID NO: 1785894 - RNA, 19 nt, Artificial Sequence
  Description of Artificial Sequence: Synthetic oligonucleotide
ggaucuguguuucaauuca

SEQ ID NO: 1785895 - RNA, 19 nt, Artificial Sequence
  Description of Artificial Sequence: Synthetic oligonucleotide
agucaauccgguucccaca

SEQ ID NO: 1785896 - RNA, 19 nt, Artificial Sequence
  Description of Artificial Sequence: Synthetic oligonucleotide
cagauugugaaccugucua

SEQ ID NO: 1785897 - RNA, 19 nt, Artificial Sequence
  Description of Artificial Sequence: Synthetic oligonucleotide
agauuugcuugccauuaau

SEQ ID NO: 1785898 - RNA, 19 nt, Artificial Sequence
  Description of Artificial Sequence: Synthetic oligonucleotide
acauuacuggaagaaagau

SEQ ID NO: 1785899 - RNA, 19 nt, Artificial Sequence
  Description of Artificial Sequence: Synthetic oligonucleotide
cauuuguggucugggagcc

SEQ ID NO: 1785900 - RNA, 19 nt, Artificial Sequence
  Description of Artificial Sequence: Synthetic oligonucleotide
agaugcacuuauaaaauua

SEQ ID NO: 1785901 - RNA, 19 nt, Artificial Sequence
  Description of Artificial Sequence: Synthetic oligonucleotide
agcaucaagacuaguuuca

SEQ ID NO: 1785902 - RNA, 19 nt, Artificial Sequence
  Description of Artificial Sequence: Synthetic oligonucleotide
ggugguaagaacauuuauc

SEQ ID NO: 1785903 - RNA, 19 nt, Artificial Sequence
  Description of Artificial Sequence: Synthetic oligonucleotide
aacguucuggaagcccagg

SEQ ID NO: 1785904 - RNA, 19 nt, Artificial Sequence
  Description of Artificial Sequence: Synthetic oligonucleotide
uccaggcaaaccaucuaaa

SEQ ID NO: 1785905 - RNA, 19 nt, Artificial Sequence
  Description of Artificial Sequence: Synthetic oligonucleotide
uuacuggaagaaagauacu

SEQ ID NO: 1785906 - RNA, 19 nt, Artificial Sequence
  Description of Artificial Sequence: Synthetic oligonucleotide
uaagaacauuuaucuggac

SEQ ID NO: 1785907 - RNA, 19 nt, Artificial Sequence
  Description of Artificial Sequence: Synthetic oligonucleotide
ugcuguuggccaagcagga

SEQ ID NO: 1785908 - RNA, 19 nt, Artificial Sequence
  Description of Artificial Sequence: Synthetic oligonucleotide
gucuaucucuaacaaaucu

SEQ ID NO: 1785909 - RNA, 19 nt, Artificial Sequence
  Description of Artificial Sequence: Synthetic oligonucleotide
aaccuuugcaugagaguug

SEQ ID NO: 1785910 - RNA, 19 nt, Artificial Sequence
  Description of Artificial Sequence: Synthetic oligonucleotide
cagcaucccagaguuaagg

SEQ ID NO: 1785911 - RNA, 19 nt, Artificial Sequence
  Description of Artificial Sequence: Synthetic oligonucleotide
cuccaauagcuaucuuuag

SEQ ID NO: 1785912 - RNA, 19 nt, Artificial Sequence
  Description of Artificial Sequence: Synthetic oligonucleotide
gauuagggcuguguuuggc

SEQ ID NO: 1785913 - RNA, 19 nt, Artificial Sequence
  Description of Artificial Sequence: Synthetic oligonucleotide
uuaugacagaagugaguau

SEQ ID NO: 1785914 - RNA, 19 nt, Artificial Sequence
  Description of Artificial Sequence: Synthetic oligonucleotide
cagucaauccgguucccac

SEQ ID NO: 1785915 - RNA, 19 nt, Artificial Sequence
  Description of Artificial Sequence: Synthetic oligonucleotide
gauugugaaccugucuauc

SEQ ID NO: 1785916 - RNA, 19 nt, Artificial Sequence
  Description of Artificial Sequence: Synthetic oligonucleotide
acuggaagaaagauacuaa

SEQ ID NO: 1785917 - RNA, 19 nt, Artificial Sequence
  Description of Artificial Sequence: Synthetic oligonucleotide
guuccuaguugcaauggac

SEQ ID NO: 1785918 - RNA, 19 nt, Artificial Sequence
  Description of Artificial Sequence: Synthetic oligonucleotide
uguguccuggcagaccagc

SEQ ID NO: 1785919 - RNA, 19 nt, Artificial Sequence
  Description of Artificial Sequence: Synthetic oligonucleotide
aguucagaaaucagaaaua

SEQ ID NO: 1785920 - RNA, 19 nt, Artificial Sequence
  Description of Artificial Sequence: Synthetic oligonucleotide
agaggccuugaggaaaauc

SEQ ID NO: 1785921 - RNA, 19 nt, Artificial Sequence
  Description of Artificial Sequence: Synthetic oligonucleotide
uugaggaucuguguuucaa

SEQ ID NO: 1785922 - RNA, 19 nt, Artificial Sequence
  Description of Artificial Sequence: Synthetic oligonucleotide
aaguuuggaaagaguuugu

SEQ ID NO: 1785923 - RNA, 19 nt, Artificial Sequence
  Description of Artificial Sequence: Synthetic oligonucleotide
uguuaaugcuuuggcagau

SEQ ID NO: 1785924 - RNA, 19 nt, Artificial Sequence
  Description of Artificial Sequence: Synthetic oligonucleotide
cuguuccuaguugcaaugg

SEQ ID NO: 1785925 - RNA, 19 nt, Artificial Sequence
  Description of Artificial Sequence: Synthetic oligonucleotide
ucaagacuaguuucauauu

SEQ ID NO: 1785926 - RNA, 19 nt, Artificial Sequence
  Description of Artificial Sequence: Synthetic oligonucleotide
agguauguccuuauacuga

SEQ ID NO: 1785927 - RNA, 19 nt, Artificial Sequence
  Description of Artificial Sequence: Synthetic oligonucleotide
gcauucuucagaaaacaac

SEQ ID NO: 1785928 - RNA, 19 nt, Artificial Sequence
  Description of Artificial Sequence: Synthetic oligonucleotide
uccaacguucuggaagccc

SEQ ID NO: 1785929 - RNA, 19 nt, Artificial Sequence
  Description of Artificial Sequence: Synthetic oligonucleotide
uagaaacccuccuguauuu

SEQ ID NO: 1785930 - RNA, 19 nt, Artificial Sequence
  Description of Artificial Sequence: Synthetic oligonucleotide
uagauucuguuagugcaaa

SEQ ID NO: 1785931 - RNA, 19 nt, Artificial Sequence
  Description of Artificial Sequence: Synthetic oligonucleotide
agaaacccuccuguauuuc

SEQ ID NO: 1785932 - RNA, 19 nt, Artificial Sequence
  Description of Artificial Sequence: Synthetic oligonucleotide
ucccaacagcaucuguaga

SEQ ID NO: 1785933 - RNA, 19 nt, Artificial Sequence
  Description of Artificial Sequence: Synthetic oligonucleotide
cuugaggaaaauccaacgu

SEQ ID NO: 1785934 - RNA, 19 nt, Artificial Sequence
  Description of Artificial Sequence: Synthetic oligonucleotide
ccauuaugacagaagugag

SEQ ID NO: 1785935 - RNA, 19 nt, Artificial Sequence
  Description of Artificial Sequence: Synthetic oligonucleotide
cugccaggccacauuacug

SEQ ID NO: 1785936 - RNA, 19 nt, Artificial Sequence
  Description of Artificial Sequence: Synthetic oligonucleotide
ugaaccugucuaucucuaa

SEQ ID NO: 1785937 - RNA, 19 nt, Artificial Sequence
  Description of Artificial Sequence: Synthetic oligonucleotide
cuaucucuaacaaaucuuu

SEQ ID NO: 1785938 - RNA, 19 nt, Artificial Sequence
  Description of Artificial Sequence: Synthetic oligonucleotide
aacccuccuguauuucaaa

SEQ ID NO: 1785939 - RNA, 19 nt, Artificial Sequence
  Description of Artificial Sequence: Synthetic oligonucleotide
caaagcaaaggagcucuug

SEQ ID NO: 1785940 - RNA, 19 nt, Artificial Sequence
  Description of Artificial Sequence: Synthetic oligonucleotide
gaaaugcuguuaagaguac

SEQ ID NO: 1785941 - RNA, 19 nt, Artificial Sequence
  Description of Artificial Sequence: Synthetic oligonucleotide
uggcagauggagucaaguu

SEQ ID NO: 1785942 - RNA, 19 nt, Artificial Sequence
  Description of Artificial Sequence: Synthetic oligonucleotide
ugccaucugugcccaaaac

SEQ ID NO: 1785943 - RNA, 19 nt, Artificial Sequence
  Description of Artificial Sequence: Synthetic oligonucleotide
ggagacagcaaaggaaaug

SEQ ID NO: 1785944 - RNA, 19 nt, Artificial Sequence
  Description of Artificial Sequence: Synthetic oligonucleotide
augauucuggugguaagaa

SEQ ID NO: 1785945 - RNA, 19 nt, Artificial Sequence
  Description of Artificial Sequence: Synthetic oligonucleotide
gguauguccuuauacugaa

SEQ ID NO: 1785946 - RNA, 19 nt, Artificial Sequence
  Description of Artificial Sequence: Synthetic oligonucleotide
cacagauugugaaccuguc

SEQ ID NO: 1785947 - RNA, 19 nt, Artificial Sequence
  Description of Artificial Sequence: Synthetic oligonucleotide
aggcaaagcaaaggagcuc

SEQ ID NO: 1785948 - RNA, 19 nt, Artificial Sequence
  Description of Artificial Sequence: Synthetic oligonucleotide
cagugcucuggcugggugc

SEQ ID NO: 1785949 - RNA, 19 nt, Artificial Sequence
  Description of Artificial Sequence: Synthetic oligonucleotide
cauuaugacagaagugagu

SEQ ID NO: 1785950 - RNA, 19 nt, Artificial Sequence
  Description of Artificial Sequence: Synthetic oligonucleotide
uagcuaucuuuagauucug

SEQ ID NO: 1785951 - RNA, 19 nt, Artificial Sequence
  Description of Artificial Sequence: Synthetic oligonucleotide
ggaaagaguuugugaaaac

SEQ ID NO: 1785952 - RNA, 19 nt, Artificial Sequence
  Description of Artificial Sequence: Synthetic oligonucleotide
uccgguucccacagauugu

SEQ ID NO: 1785953 - RNA, 19 nt, Artificial Sequence
  Description of Artificial Sequence: Synthetic oligonucleotide
guuaaggccagaggccggc

SEQ ID NO: 1785954 - RNA, 19 nt, Artificial Sequence
  Description of Artificial Sequence: Synthetic oligonucleotide
guugcaauggacacuuucu

SEQ ID NO: 1785955 - RNA, 19 nt, Artificial Sequence
  Description of Artificial Sequence: Synthetic oligonucleotide
ugaaugccauuaugacaga

SEQ ID NO: 1785956 - RNA, 19 nt, Artificial Sequence
  Description of Artificial Sequence: Synthetic oligonucleotide
uugccaucugugcccaaaa

SEQ ID NO: 1785957 - RNA, 19 nt, Artificial Sequence
  Description of Artificial Sequence: Synthetic oligonucleotide
gaguaccaucuucuggaca

SEQ ID NO: 1785958 - RNA, 19 nt, Artificial Sequence
  Description of Artificial Sequence: Synthetic oligonucleotide
caagacuaguuucauauuu

SEQ ID NO: 1785959 - RNA, 19 nt, Artificial Sequence
  Description of Artificial Sequence: Synthetic oligonucleotide
acccaucagcaucccagag

SEQ ID NO: 1785960 - RNA, 19 nt, Artificial Sequence
  Description of Artificial Sequence: Synthetic oligonucleotide
agaguuugugaaaacugua

SEQ ID NO: 1785961 - RNA, 19 nt, Artificial Sequence
  Description of Artificial Sequence: Synthetic oligonucleotide
uuaaggccagaggccggcg

SEQ ID NO: 1785962 - RNA, 19 nt, Artificial Sequence
  Description of Artificial Sequence: Synthetic oligonucleotide
ccacaaacucagucaaucc

SEQ ID NO: 1785963 - RNA, 19 nt, Artificial Sequence
  Description of Artificial Sequence: Synthetic oligonucleotide
ggacaguucagaaaucaga

SEQ ID NO: 1785964 - RNA, 19 nt, Artificial Sequence
  Description of Artificial Sequence: Synthetic oligonucleotide
gcaauggacacuuucuugu

SEQ ID NO: 1785965 - RNA, 19 nt, Artificial Sequence
  Description of Artificial Sequence: Synthetic oligonucleotide
guuaaugcuuuggcagaug

SEQ ID NO: 1785966 - RNA, 19 nt, Artificial Sequence
  Description of Artificial Sequence: Synthetic oligonucleotide
ccgagaucugccuuucugc

SEQ ID NO: 1785967 - RNA, 19 nt, Artificial Sequence
  Description of Artificial Sequence: Synthetic oligonucleotide
ucccacagauugugaaccu

SEQ ID NO: 1785968 - RNA, 19 nt, Artificial Sequence
  Description of Artificial Sequence: Synthetic oligonucleotide
uggggccccacugaaacaa

SEQ ID NO: 1785969 - RNA, 19 nt, Artificial Sequence
  Description of Artificial Sequence: Synthetic oligonucleotide
aguuaaggccagaggccgg

SEQ ID NO: 1785970 - RNA, 19 nt, Artificial Sequence
  Description of Artificial Sequence: Synthetic oligonucleotide
cuuugcaugagaguugagu

SEQ ID NO: 1785971 - RNA, 19 nt, Artificial Sequence
  Description of Artificial Sequence: Synthetic oligonucleotide
agauucuguuagugcaaau

SEQ ID NO: 1785972 - RNA, 19 nt, Artificial Sequence
  Description of Artificial Sequence: Synthetic oligonucleotide
gaguuugugaaaacuguau

SEQ ID NO: 1785973 - RNA, 19 nt, Artificial Sequence
  Description of Artificial Sequence: Synthetic oligonucleotide
caacguucuggaagcccag

SEQ ID NO: 1785974 - RNA, 19 nt, Artificial Sequence
  Description of Artificial Sequence: Synthetic oligonucleotide
uuucccagguauguccuua

SEQ ID NO: 1785975 - RNA, 19 nt, Artificial Sequence
  Description of Artificial Sequence: Synthetic oligonucleotide
gaucugccuuucugccagg

SEQ ID NO: 1785976 - RNA, 19 nt, Artificial Sequence
  Description of Artificial Sequence: Synthetic oligonucleotide
cccagguauguccuuauac

SEQ ID NO: 1785977 - RNA, 19 nt, Artificial Sequence
  Description of Artificial Sequence: Synthetic oligonucleotide
ccuaagccaaagcaucaag

SEQ ID NO: 1785978 - RNA, 19 nt, Artificial Sequence
  Description of Artificial Sequence: Synthetic oligonucleotide
cauuagaaacccuccugua

SEQ ID NO: 1785979 - RNA, 19 nt, Artificial Sequence
  Description of Artificial Sequence: Synthetic oligonucleotide
ugacagaagugaguaucau

SEQ ID NO: 1785980 - RNA, 19 nt, Artificial Sequence
  Description of Artificial Sequence: Synthetic oligonucleotide
ucaauccgguucccacaga

SEQ ID NO: 1785981 - RNA, 19 nt, Artificial Sequence
  Description of Artificial Sequence: Synthetic oligonucleotide
gaaugccauuaugacagaa

SEQ ID NO: 1785982 - RNA, 19 nt, Artificial Sequence
  Description of Artificial Sequence: Synthetic oligonucleotide
cacacuguuccuaguugca

SEQ ID NO: 1785983 - RNA, 19 nt, Artificial Sequence
  Description of Artificial Sequence: Synthetic oligonucleotide
gacagaagugaguaucauu

SEQ ID NO: 1785984 - RNA, 19 nt, Artificial Sequence
  Description of Artificial Sequence: Synthetic oligonucleotide
guauguccuuauacugaag

SEQ ID NO: 1785985 - RNA, 19 nt, Artificial Sequence
  Description of Artificial Sequence: Synthetic oligonucleotide
aaacuguaugagacuggaa

SEQ ID NO: 1785986 - RNA, 19 nt, Artificial Sequence
  Description of Artificial Sequence: Synthetic oligonucleotide
gaggaaaauccaacguucu

SEQ ID NO: 1785987 - RNA, 19 nt, Artificial Sequence
  Description of Artificial Sequence: Synthetic oligonucleotide
gccacaaacucagucaauc

SEQ ID NO: 1785988 - RNA, 19 nt, Artificial Sequence
  Description of Artificial Sequence: Synthetic oligonucleotide
gguucccacagauugugaa

SEQ ID NO: 1785989 - RNA, 19 nt, Artificial Sequence
  Description of Artificial Sequence: Synthetic oligonucleotide
ggcauguauaacaucucca

SEQ ID NO: 1785990 - RNA, 19 nt, Artificial Sequence
  Description of Artificial Sequence: Synthetic oligonucleotide
uguucugauuagggcugug

SEQ ID NO: 1785991 - RNA, 19 nt, Artificial Sequence
  Description of Artificial Sequence: Synthetic oligonucleotide
ccaauagcuaucuuuagau

SEQ ID NO: 1785992 - RNA, 19 nt, Artificial Sequence
  Description of Artificial Sequence: Synthetic oligonucleotide
gcaaguguguccuggcaga

SEQ ID NO: 1785993 - RNA, 19 nt, Artificial Sequence
  Description of Artificial Sequence: Synthetic oligonucleotide
aaggaugauucugguggua

SEQ ID NO: 1785994 - RNA, 19 nt, Artificial Sequence
  Description of Artificial Sequence: Synthetic oligonucleotide
cagccacaaacucagucaa

SEQ ID NO: 1785995 - RNA, 19 nt, Artificial Sequence
  Description of Artificial Sequence: Synthetic oligonucleotide
uuguucugauuagggcugu

SEQ ID NO: 1785996 - RNA, 19 nt, Artificial Sequence
  Description of Artificial Sequence: Synthetic oligonucleotide
cuaguugcaauggacacuu

SEQ ID NO: 1785997 - RNA, 19 nt, Artificial Sequence
  Description of Artificial Sequence: Synthetic oligonucleotide
cuggugguaagaacauuua

SEQ ID NO: 1785998 - RNA, 19 nt, Artificial Sequence
  Description of Artificial Sequence: Synthetic oligonucleotide
gcccaaaaccuuugcauga

SEQ ID NO: 1785999 - RNA, 19 nt, Artificial Sequence
  Description of Artificial Sequence: Synthetic oligonucleotide
uucacacaagaugcacuua

SEQ ID NO: 1786000 - RNA, 19 nt, Artificial Sequence
  Description of Artificial Sequence: Synthetic oligonucleotide
caaguguguccuggcagac

SEQ ID NO: 1786001 - RNA, 19 nt, Artificial Sequence
  Description of Artificial Sequence: Synthetic oligonucleotide
caucuaaaacuugccaucu

SEQ ID NO: 1786002 - RNA, 19 nt, Artificial Sequence
  Description of Artificial Sequence: Synthetic oligonucleotide
acacuguuccuaguugcaa

SEQ ID NO: 1786003 - RNA, 19 nt, Artificial Sequence
  Description of Artificial Sequence: Synthetic oligonucleotide
caaacucagucaauccggu

SEQ ID NO: 1786004 - RNA, 19 nt, Artificial Sequence
  Description of Artificial Sequence: Synthetic oligonucleotide
ccaacguucuggaagccca

SEQ ID NO: 1786005 - RNA, 19 nt, Artificial Sequence
  Description of Artificial Sequence: Synthetic oligonucleotide
cagaaauaguucagaugua

SEQ ID NO: 1786006 - RNA, 19 nt, Artificial Sequence
  Description of Artificial Sequence: Synthetic oligonucleotide
ggcaaagcaaaggagcucu

SEQ ID NO: 1786007 - RNA, 19 nt, Artificial Sequence
  Description of Artificial Sequence: Synthetic oligonucleotide
aauccgguucccacagauu

SEQ ID NO: 1786008 - RNA, 19 nt, Artificial Sequence
  Description of Artificial Sequence: Synthetic oligonucleotide
guaugagacuggaaaggua

SEQ ID NO: 1786009 - RNA, 19 nt, Artificial Sequence
  Description of Artificial Sequence: Synthetic oligonucleotide
cccaacagcaucuguagaa

SEQ ID NO: 1786010 - RNA, 19 nt, Artificial Sequence
  Description of Artificial Sequence: Synthetic oligonucleotide
uggaagugccacugcuguu

SEQ ID NO: 1786011 - RNA, 19 nt, Artificial Sequence
  Description of Artificial Sequence: Synthetic oligonucleotide
cagcauuuguggucuggga

SEQ ID NO: 1786012 - RNA, 19 nt, Artificial Sequence
  Description of Artificial Sequence: Synthetic oligonucleotide
ggagucaaguuuggaaaga

SEQ ID NO: 1786013 - RNA, 19 nt, Artificial Sequence
  Description of Artificial Sequence: Synthetic oligonucleotide
uucuggugguaagaacauu

SEQ ID NO: 1786014 - RNA, 19 nt, Artificial Sequence
  Description of Artificial Sequence: Synthetic oligonucleotide
ggcagauggagucaaguuu

SEQ ID NO: 1786015 - RNA, 19 nt, Artificial Sequence
  Description of Artificial Sequence: Synthetic oligonucleotide
gcaaaggagcucuugcagu

SEQ ID NO: 1786016 - RNA, 19 nt, Artificial Sequence
  Description of Artificial Sequence: Synthetic oligonucleotide
cucagucaauccgguuccc

SEQ ID NO: 1786017 - RNA, 19 nt, Artificial Sequence
  Description of Artificial Sequence: Synthetic oligonucleotide
caauagcuaucuuuagauu

SEQ ID NO: 1786018 - RNA, 19 nt, Artificial Sequence
  Description of Artificial Sequence: Synthetic oligonucleotide
cccgagaucugccuuucug

SEQ ID NO: 1786019 - RNA, 19 nt, Artificial Sequence
  Description of Artificial Sequence: Synthetic oligonucleotide
ccuuauacugaagaggccu

SEQ ID NO: 1786020 - RNA, 19 nt, Artificial Sequence
  Description of Artificial Sequence: Synthetic oligonucleotide
ucccgagaucugccuuucu

SEQ ID NO: 1786021 - RNA, 19 nt, Artificial Sequence
  Description of Artificial Sequence: Synthetic oligonucleotide
cccaaaaccuuugcaugag

SEQ ID NO: 1786022 - RNA, 19 nt, Artificial Sequence
  Description of Artificial Sequence: Synthetic oligonucleotide
caauccgguucccacagau

SEQ ID NO: 1786023 - RNA, 19 nt, Artificial Sequence
  Description of Artificial Sequence: Synthetic oligonucleotide
gaccagcauuuguggucug

SEQ ID NO: 1786024 - RNA, 19 nt, Artificial Sequence
  Description of Artificial Sequence: Synthetic oligonucleotide
auguauugccaaggaugau

SEQ ID NO: 1786025 - RNA, 19 nt, Artificial Sequence
  Description of Artificial Sequence: Synthetic oligonucleotide
cagauguauugccaaggau

SEQ ID NO: 1786026 - RNA, 19 nt, Artificial Sequence
  Description of Artificial Sequence: Synthetic oligonucleotide
gugaaccugucuaucucua

SEQ ID NO: 1786027 - RNA, 19 nt, Artificial Sequence
  Description of Artificial Sequence: Synthetic oligonucleotide
gaggccggcgcugucccga

SEQ ID NO: 1786028 - RNA, 19 nt, Artificial Sequence
  Description of Artificial Sequence: Synthetic oligonucleotide
ccgguucccacagauugug

SEQ ID NO: 1786029 - RNA, 19 nt, Artificial Sequence
  Description of Artificial Sequence: Synthetic oligonucleotide
ccaucagcaucccagaguu

SEQ ID NO: 1786030 - RNA, 19 nt, Artificial Sequence
  Description of Artificial Sequence: Synthetic oligonucleotide
ggcaaaccaucuaaaacuu

SEQ ID NO: 1786031 - RNA, 19 nt, Artificial Sequence
  Description of Artificial Sequence: Synthetic oligonucleotide
cuuucugccaggccacauu

SEQ ID NO: 1786032 - RNA, 19 nt, Artificial Sequence
  Description of Artificial Sequence: Synthetic oligonucleotide
cacugcuguuggccaagca

SEQ ID NO: 1786033 - RNA, 19 nt, Artificial Sequence
  Description of Artificial Sequence: Synthetic oligonucleotide
gucccgagaucugccuuuc

SEQ ID NO: 1786034 - RNA, 19 nt, Artificial Sequence
  Description of Artificial Sequence: Synthetic oligonucleotide
cuguuaagaguaccaucuu

SEQ ID NO: 1786035 - RNA, 19 nt, Artificial Sequence
  Description of Artificial Sequence: Synthetic oligonucleotide
cguucuggaagcccaggca

SEQ ID NO: 1786036 - RNA, 19 nt, Artificial Sequence
  Description of Artificial Sequence: Synthetic oligonucleotide
caucagcaucccagaguua

SEQ ID NO: 1786037 - RNA, 19 nt, Artificial Sequence
  Description of Artificial Sequence: Synthetic oligonucleotide
ggcgcugucccgagaucug

SEQ ID NO: 1786038 - RNA, 19 nt, Artificial Sequence
  Description of Artificial Sequence: Synthetic oligonucleotide
gcgcugucccgagaucugc

SEQ ID NO: 1786039 - RNA, 19 nt, Artificial Sequence
  Description of Artificial Sequence: Synthetic oligonucleotide
gccuaagccaaagcaucaa

SEQ ID NO: 1786040 - RNA, 19 nt, Artificial Sequence
  Description of Artificial Sequence: Synthetic oligonucleotide
gcaaggcuuucuccacacu

SEQ ID NO: 1786041 - RNA, 19 nt, Artificial Sequence
  Description of Artificial Sequence: Synthetic oligonucleotide
gccggcgcugucccgagau

SEQ ID NO: 1786042 - RNA, 19 nt, Artificial Sequence
  Description of Artificial Sequence: Synthetic oligonucleotide
ggggccccacugaaacaaa

SEQ ID NO: 1786043 - RNA, 19 nt, Artificial Sequence
  Description of Artificial Sequence: Synthetic oligonucleotide
ccggcgcugucccgagauc

SEQ ID NO: 1786044 - RNA, 19 nt, Artificial Sequence
  Description of Artificial Sequence: Synthetic oligonucleotide
gcaaagcaaaggagcucuu

SEQ ID NO: 1786045 - RNA, 19 nt, Artificial Sequence
  Description of Artificial Sequence: Synthetic oligonucleotide
ggccggcgcugucccgaga

SEQ ID NO: 1786046 - RNA, 19 nt, Artificial Sequence
  Description of Artificial Sequence: Synthetic oligonucleotide
ggccagaggccggcgcugu

SEQ ID NO: 1786047 - RNA, 19 nt, Artificial Sequence
  Description of Artificial Sequence: Synthetic oligonucleotide
cggcgcugucccgagaucu

SEQ ID NO: 1786048 - RNA, 19 nt, Artificial Sequence
  Description of Artificial Sequence: Synthetic oligonucleotide
auuucguuaggacacaugg

SEQ ID NO: 1786049 - RNA, 19 nt, Artificial Sequence
  Description of Artificial Sequence: Synthetic oligonucleotide
ucuauuuugaugaugcugu

SEQ ID NO: 1786050 - RNA, 19 nt, Artificial Sequence
  Description of Artificial Sequence: Synthetic oligonucleotide
auuuugaugaugcuguggg

SEQ ID NO: 1786051 - RNA, 19 nt, Artificial Sequence
  Description of Artificial Sequence: Synthetic oligonucleotide
aaauccucaugacuguggc

SEQ ID NO: 1786052 - RNA, 19 nt, Artificial Sequence
  Description of Artificial Sequence: Synthetic oligonucleotide
ugcucuauuuugaugaugc

SEQ ID NO: 1786053 - RNA, 19 nt, Artificial Sequence
  Description of Artificial Sequence: Synthetic oligonucleotide
uuuuccaccgacaguauag

SEQ ID NO: 1786054 - RNA, 19 nt, Artificial Sequence
  Description of Artificial Sequence: Synthetic oligonucleotide
uccugugcuagaaucaugg

SEQ ID NO: 1786055 - RNA, 19 nt, Artificial Sequence
  Description of Artificial Sequence: Synthetic oligonucleotide
ucauagaugagcagcugcg

SEQ ID NO: 1786056 - RNA, 19 nt, Artificial Sequence
  Description of Artificial Sequence: Synthetic oligonucleotide
ugugcuagaaucaugggau

SEQ ID NO: 1786057 - RNA, 19 nt, Artificial Sequence
  Description of Artificial Sequence: Synthetic oligonucleotide
uagucaagaggucacauca

SEQ ID NO: 1786058 - RNA, 19 nt, Artificial Sequence
  Description of Artificial Sequence: Synthetic oligonucleotide
uucgaaacaggauauaguc

SEQ ID NO: 1786059 - RNA, 19 nt, Artificial Sequence
  Description of Artificial Sequence: Synthetic oligonucleotide
uuuauuagucaagagguca

SEQ ID NO: 1786060 - RNA, 19 nt, Artificial Sequence
  Description of Artificial Sequence: Synthetic oligonucleotide
ucgucuuucagccagucca

SEQ ID NO: 1786061 - RNA, 19 nt, Artificial Sequence
  Description of Artificial Sequence: Synthetic oligonucleotide
gacaguauagccgugcagg

SEQ ID NO: 1786062 - RNA, 19 nt, Artificial Sequence
  Description of Artificial Sequence: Synthetic oligonucleotide
aaucacgccaucuccagug

SEQ ID NO: 1786063 - RNA, 19 nt, Artificial Sequence
  Description of Artificial Sequence: Synthetic oligonucleotide
uccaccgacaguauagccg

SEQ ID NO: 1786064 - RNA, 19 nt, Artificial Sequence
  Description of Artificial Sequence: Synthetic oligonucleotide
uggucuucguaccacaucc

SEQ ID NO: 1786065 - RNA, 19 nt, Artificial Sequence
  Description of Artificial Sequence: Synthetic oligonucleotide
acucugaucuuccagagcu

SEQ ID NO: 1786066 - RNA, 19 nt, Artificial Sequence
  Description of Artificial Sequence: Synthetic oligonucleotide
uucguuaggacacaugguc

SEQ ID NO: 1786067 - RNA, 19 nt, Artificial Sequence
  Description of Artificial Sequence: Synthetic oligonucleotide
ggugugaucauacaugucc

SEQ ID NO: 1786068 - RNA, 19 nt, Artificial Sequence
  Description of Artificial Sequence: Synthetic oligonucleotide
aaggugaccucguccaugg

SEQ ID NO: 1786069 - RNA, 19 nt, Artificial Sequence
  Description of Artificial Sequence: Synthetic oligonucleotide
augggauguaccuuguuuc

SEQ ID NO: 1786070 - RNA, 19 nt, Artificial Sequence
  Description of Artificial Sequence: Synthetic oligonucleotide
aacauucaaccguuccugg

SEQ ID NO: 1786071 - RNA, 19 nt, Artificial Sequence
  Description of Artificial Sequence: Synthetic oligonucleotide
uguugagggcaacauuucg

SEQ ID NO: 1786072 - RNA, 19 nt, Artificial Sequence
  Description of Artificial Sequence: Synthetic oligonucleotide
ucaagaggucacaucagag

SEQ ID NO: 1786073 - RNA, 19 nt, Artificial Sequence
  Description of Artificial Sequence: Synthetic oligonucleotide
caacauuucguuaggacac

SEQ ID NO: 1786074 - RNA, 19 nt, Artificial Sequence
  Description of Artificial Sequence: Synthetic oligonucleotide
uccagcgaguccaaggagg

SEQ ID NO: 1786075 - RNA, 19 nt, Artificial Sequence
  Description of Artificial Sequence: Synthetic oligonucleotide
uucagcugcaaacagcacu

SEQ ID NO: 1786076 - RNA, 19 nt, Artificial Sequence
  Description of Artificial Sequence: Synthetic oligonucleotide
gucgguuaagucaucaucg

SEQ ID NO: 1786077 - RNA, 19 nt, Artificial Sequence
  Description of Artificial Sequence: Synthetic oligonucleotide
uuauuagucaagaggucac

SEQ ID NO: 1786078 - RNA, 19 nt, Artificial Sequence
  Description of Artificial Sequence: Synthetic oligonucleotide
agccuggagggacaaaucc

SEQ ID NO: 1786079 - RNA, 19 nt, Artificial Sequence
  Description of Artificial Sequence: Synthetic oligonucleotide
acaggugacauccaagugu

SEQ ID NO: 1786080 - RNA, 19 nt, Artificial Sequence
  Description of Artificial Sequence: Synthetic oligonucleotide
ucagauagcacagugucac

SEQ ID NO: 1786081 - RNA, 19 nt, Artificial Sequence
  Description of Artificial Sequence: Synthetic oligonucleotide
auagaugagcagcugcggg

SEQ ID NO: 1786082 - RNA, 19 nt, Artificial Sequence
  Description of Artificial Sequence: Synthetic oligonucleotide
uguguggcgacaucucugg

SEQ ID NO: 1786083 - RNA, 19 nt, Artificial Sequence
  Description of Artificial Sequence: Synthetic oligonucleotide
acaguauagccgugcaggc

SEQ ID NO: 1786084 - RNA, 19 nt, Artificial Sequence
  Description of Artificial Sequence: Synthetic oligonucleotide
gaacacuucagcugcaaac

SEQ ID NO: 1786085 - RNA, 19 nt, Artificial Sequence
  Description of Artificial Sequence: Synthetic oligonucleotide
gugaucguaggcuucacag

SEQ ID NO: 1786086 - RNA, 19 nt, Artificial Sequence
  Description of Artificial Sequence: Synthetic oligonucleotide
accuguuuugccuaccauc

SEQ ID NO: 1786087 - RNA, 19 nt, Artificial Sequence
  Description of Artificial Sequence: Synthetic oligonucleotide
uauuuugaugaugcugugg

SEQ ID NO: 1786088 - RNA, 19 nt, Artificial Sequence
  Description of Artificial Sequence: Synthetic oligonucleotide
acuuuugaaggugaccucg

SEQ ID NO: 1786089 - RNA, 19 nt, Artificial Sequence
  Description of Artificial Sequence: Synthetic oligonucleotide
ucaucguagaacacuucag

SEQ ID NO: 1786090 - RNA, 19 nt, Artificial Sequence
  Description of Artificial Sequence: Synthetic oligonucleotide
aagagucccgacuccacag

SEQ ID NO: 1786091 - RNA, 19 nt, Artificial Sequence
  Description of Artificial Sequence: Synthetic oligonucleotide
uuaaucacgccaucuccag

SEQ ID NO: 1786092 - RNA, 19 nt, Artificial Sequence
  Description of Artificial Sequence: Synthetic oligonucleotide
aacacuucagcugcaaaca

SEQ ID NO: 1786093 - RNA, 19 nt, Artificial Sequence
  Description of Artificial Sequence: Synthetic oligonucleotide
ucguagaacacuucagcug

SEQ ID NO: 1786094 - RNA, 19 nt, Artificial Sequence
  Description of Artificial Sequence: Synthetic oligonucleotide
uggucaggaggucugugcg

SEQ ID NO: 1786095 - RNA, 19 nt, Artificial Sequence
  Description of Artificial Sequence: Synthetic oligonucleotide
caucguagaacacuucagc

SEQ ID NO: 1786096 - RNA, 19 nt, Artificial Sequence
  Description of Artificial Sequence: Synthetic oligonucleotide
gguuaagucaucaucguag

SEQ ID NO: 1786097 - RNA, 19 nt, Artificial Sequence
  Description of Artificial Sequence: Synthetic oligonucleotide
aucguagaacacuucagcu

SEQ ID NO: 1786098 - RNA, 19 nt, Artificial Sequence
  Description of Artificial Sequence: Synthetic oligonucleotide
uucugacccagcaggagag

SEQ ID NO: 1786099 - RNA, 19 nt, Artificial Sequence
  Description of Artificial Sequence: Synthetic oligonucleotide
ugaucauacaugucccuga

SEQ ID NO: 1786100 - RNA, 19 nt, Artificial Sequence
  Description of Artificial Sequence: Synthetic oligonucleotide
caaauccucaugacugugg

SEQ ID NO: 1786101 - RNA, 19 nt, Artificial Sequence
  Description of Artificial Sequence: Synthetic oligonucleotide
uacgagguggacaucagau

SEQ ID NO: 1786102 - RNA, 19 nt, Artificial Sequence
  Description of Artificial Sequence: Synthetic oligonucleotide
gaggucgucuuucagccag

SEQ ID NO: 1786103 - RNA, 19 nt, Artificial Sequence
  Description of Artificial Sequence: Synthetic oligonucleotide
aggugacucaugcuguugg

SEQ ID NO: 1786104 - RNA, 19 nt, Artificial Sequence
  Description of Artificial Sequence: Synthetic oligonucleotide
uagaaucaugggauguacc

SEQ ID NO: 1786105 - RNA, 19 nt, Artificial Sequence
  Description of Artificial Sequence: Synthetic oligonucleotide
uguccaagagucccgacuc

SEQ ID NO: 1786106 - RNA, 19 nt, Artificial Sequence
  Description of Artificial Sequence: Synthetic oligonucleotide
uguuuugccuaccauccuc

SEQ ID NO: 1786107 - RNA, 19 nt, Artificial Sequence
  Description of Artificial Sequence: Synthetic oligonucleotide
caucagaggugacucaugc

SEQ ID NO: 1786108 - RNA, 19 nt, Artificial Sequence
  Description of Artificial Sequence: Synthetic oligonucleotide
ucguuaggacacaugguca

SEQ ID NO: 1786109 - RNA, 19 nt, Artificial Sequence
  Description of Artificial Sequence: Synthetic oligonucleotide
ucaucaucguagaacacuu

SEQ ID NO: 1786110 - RNA, 19 nt, Artificial Sequence
  Description of Artificial Sequence: Synthetic oligonucleotide
gaugcgcucauagaugagc

SEQ ID NO: 1786111 - RNA, 19 nt, Artificial Sequence
  Description of Artificial Sequence: Synthetic oligonucleotide
gauguaccuuguuucuugc

SEQ ID NO: 1786112 - RNA, 19 nt, Artificial Sequence
  Description of Artificial Sequence: Synthetic oligonucleotide
ggaggcacggaagugaucg

SEQ ID NO: 1786113 - RNA, 19 nt, Artificial Sequence
  Description of Artificial Sequence: Synthetic oligonucleotide
aagugucgcagugugaagu

SEQ ID NO: 1786114 - RNA, 19 nt, Artificial Sequence
  Description of Artificial Sequence: Synthetic oligonucleotide
gucauccccagccuggagg

SEQ ID NO: 1786115 - RNA, 19 nt, Artificial Sequence
  Description of Artificial Sequence: Synthetic oligonucleotide
agcgaguccaaggaggcac

SEQ ID NO: 1786116 - RNA, 19 nt, Artificial Sequence
  Description of Artificial Sequence: Synthetic oligonucleotide
aagaggucccuucgaaaca

SEQ ID NO: 1786117 - RNA, 19 nt, Artificial Sequence
  Description of Artificial Sequence: Synthetic oligonucleotide
agcucguggucuucguacc

SEQ ID NO: 1786118 - RNA, 19 nt, Artificial Sequence
  Description of Artificial Sequence: Synthetic oligonucleotide
agcgcagccugccaucagc

SEQ ID NO: 1786119 - RNA, 19 nt, Artificial Sequence
  Description of Artificial Sequence: Synthetic oligonucleotide
ucagucuguggacgagucg

SEQ ID NO: 1786120 - RNA, 19 nt, Artificial Sequence
  Description of Artificial Sequence: Synthetic oligonucleotide
ucguaggcuucacagguga

SEQ ID NO: 1786121 - RNA, 19 nt, Artificial Sequence
  Description of Artificial Sequence: Synthetic oligonucleotide
uuucguuaggacacauggu

SEQ ID NO: 1786122 - RNA, 19 nt, Artificial Sequence
  Description of Artificial Sequence: Synthetic oligonucleotide
gagggacaaauccucauga

SEQ ID NO: 1786123 - RNA, 19 nt, Artificial Sequence
  Description of Artificial Sequence: Synthetic oligonucleotide
uagaugagcagcugcggga

SEQ ID NO: 1786124 - RNA, 19 nt, Artificial Sequence
  Description of Artificial Sequence: Synthetic oligonucleotide
uuagucaagaggucacauc

SEQ ID NO: 1786125 - RNA, 19 nt, Artificial Sequence
  Description of Artificial Sequence: Synthetic oligonucleotide
uguggcgacaucucuggga

SEQ ID NO: 1786126 - RNA, 19 nt, Artificial Sequence
  Description of Artificial Sequence: Synthetic oligonucleotide
gaucauacaugucccugac

SEQ ID NO: 1786127 - RNA, 19 nt, Artificial Sequence
  Description of Artificial Sequence: Synthetic oligonucleotide
cuuaaucacgccaucucca

SEQ ID NO: 1786128 - RNA, 19 nt, Artificial Sequence
  Description of Artificial Sequence: Synthetic oligonucleotide
uauagucugccaggaagag

SEQ ID NO: 1786129 - RNA, 19 nt, Artificial Sequence
  Description of Artificial Sequence: Synthetic oligonucleotide
gaguguguccaagaguccc

SEQ ID NO: 1786130 - RNA, 19 nt, Artificial Sequence
  Description of Artificial Sequence: Synthetic oligonucleotide
agcuccagcacagugcauc

SEQ ID NO: 1786131 - RNA, 19 nt, Artificial Sequence
  Description of Artificial Sequence: Synthetic oligonucleotide
uccacagguuccaccauga

SEQ ID NO: 1786132 - RNA, 19 nt, Artificial Sequence
  Description of Artificial Sequence: Synthetic oligonucleotide
auucaaccguuccuggaug

SEQ ID NO: 1786133 - RNA, 19 nt, Artificial Sequence
  Description of Artificial Sequence: Synthetic oligonucleotide
cacaggagcuugaacuggg

SEQ ID NO: 1786134 - RNA, 19 nt, Artificial Sequence
  Description of Artificial Sequence: Synthetic oligonucleotide
cauccuuggaagagguccc

SEQ ID NO: 1786135 - RNA, 19 nt, Artificial Sequence
  Description of Artificial Sequence: Synthetic oligonucleotide
cacuucagcugcaaacagc

SEQ ID NO: 1786136 - RNA, 19 nt, Artificial Sequence
  Description of Artificial Sequence: Synthetic oligonucleotide
uguacgagguggacaucag

SEQ ID NO: 1786137 - RNA, 19 nt, Artificial Sequence
  Description of Artificial Sequence: Synthetic oligonucleotide
acaggaagacugguugccc

SEQ ID NO: 1786138 - RNA, 19 nt, Artificial Sequence
  Description of Artificial Sequence: Synthetic oligonucleotide
ugugaucauacaugucccu

SEQ ID NO: 1786139 - RNA, 19 nt, Artificial Sequence
  Description of Artificial Sequence: Synthetic oligonucleotide
gaucguaggcuucacaggu

SEQ ID NO: 1786140 - RNA, 19 nt, Artificial Sequence
  Description of Artificial Sequence: Synthetic oligonucleotide
agugucacuuuugaaggug

SEQ ID NO: 1786141 - RNA, 19 nt, Artificial Sequence
  Description of Artificial Sequence: Synthetic oligonucleotide
acacuucagcugcaaacag

SEQ ID NO: 1786142 - RNA, 19 nt, Artificial Sequence
  Description of Artificial Sequence: Synthetic oligonucleotide
aggucuuuauuagucaaga

SEQ ID NO: 1786143 - RNA, 19 nt, Artificial Sequence
  Description of Artificial Sequence: Synthetic oligonucleotide
ugggauguaccuuguuucu

SEQ ID NO: 1786144 - RNA, 19 nt, Artificial Sequence
  Description of Artificial Sequence: Synthetic oligonucleotide
agagguguggccaugguau

SEQ ID NO: 1786145 - RNA, 19 nt, Artificial Sequence
  Description of Artificial Sequence: Synthetic oligonucleotide
aguccaaggaggcacggaa

SEQ ID NO: 1786146 - RNA, 19 nt, Artificial Sequence
  Description of Artificial Sequence: Synthetic oligonucleotide
accgacaguauagccgugc

SEQ ID NO: 1786147 - RNA, 19 nt, Artificial Sequence
  Description of Artificial Sequence: Synthetic oligonucleotide
gacaggaagacugguugcc

SEQ ID NO: 1786148 - RNA, 19 nt, Artificial Sequence
  Description of Artificial Sequence: Synthetic oligonucleotide
uguggccaugguaugcucu

SEQ ID NO: 1786149 - RNA, 19 nt, Artificial Sequence
  Description of Artificial Sequence: Synthetic oligonucleotide
uauuagucaagaggucaca

SEQ ID NO: 1786150 - RNA, 19 nt, Artificial Sequence
  Description of Artificial Sequence: Synthetic oligonucleotide
cuagaaucaugggauguac

SEQ ID NO: 1786151 - RNA, 19 nt, Artificial Sequence
  Description of Artificial Sequence: Synthetic oligonucleotide
ugaggugucucugguuggg

SEQ ID NO: 1786152 - RNA, 19 nt, Artificial Sequence
  Description of Artificial Sequence: Synthetic oligonucleotide
guguuaaacagggcgucgg

SEQ ID NO: 1786153 - RNA, 19 nt, Artificial Sequence
  Description of Artificial Sequence: Synthetic oligonucleotide
cauagaugagcagcugcgg

SEQ ID NO: 1786154 - RNA, 19 nt, Artificial Sequence
  Description of Artificial Sequence: Synthetic oligonucleotide
uuuucagucuguggacgag

SEQ ID NO: 1786155 - RNA, 19 nt, Artificial Sequence
  Description of Artificial Sequence: Synthetic oligonucleotide
agagucccgacuccacagg

SEQ ID NO: 1786156 - RNA, 19 nt, Artificial Sequence
  Description of Artificial Sequence: Synthetic oligonucleotide
ucgguuaagucaucaucgu

SEQ ID NO: 1786157 - RNA, 19 nt, Artificial Sequence
  Description of Artificial Sequence: Synthetic oligonucleotide
ggauguaccuuguuucuug

SEQ ID NO: 1786158 - RNA, 19 nt, Artificial Sequence
  Description of Artificial Sequence: Synthetic oligonucleotide
uucagucuguggacgaguc

SEQ ID NO: 1786159 - RNA, 19 nt, Artificial Sequence
  Description of Artificial Sequence: Synthetic oligonucleotide
uuuccaccgacaguauagc

SEQ ID NO: 1786160 - RNA, 19 nt, Artificial Sequence
  Description of Artificial Sequence: Synthetic oligonucleotide
cguagaacacuucagcugc

SEQ ID NO: 1786161 - RNA, 19 nt, Artificial Sequence
  Description of Artificial Sequence: Synthetic oligonucleotide
guggcgacaucucugggac

SEQ ID NO: 1786162 - RNA, 19 nt, Artificial Sequence
  Description of Artificial Sequence: Synthetic oligonucleotide
cuauuuugaugaugcugug

SEQ ID NO: 1786163 - RNA, 19 nt, Artificial Sequence
  Description of Artificial Sequence: Synthetic oligonucleotide
cugugcuagaaucauggga

SEQ ID NO: 1786164 - RNA, 19 nt, Artificial Sequence
  Description of Artificial Sequence: Synthetic oligonucleotide
agaggucccuucgaaacag

SEQ ID NO: 1786165 - RNA, 19 nt, Artificial Sequence
  Description of Artificial Sequence: Synthetic oligonucleotide
ggcuucacaggugacaucc

SEQ ID NO: 1786166 - RNA, 19 nt, Artificial Sequence
  Description of Artificial Sequence: Synthetic oligonucleotide
cuucguaccacauccaggu

SEQ ID NO: 1786167 - RNA, 19 nt, Artificial Sequence
  Description of Artificial Sequence: Synthetic oligonucleotide
ugcuagaaucaugggaugu

SEQ ID NO: 1786168 - RNA, 19 nt, Artificial Sequence
  Description of Artificial Sequence: Synthetic oligonucleotide
cauucagccgcaccaugag

SEQ ID NO: 1786169 - RNA, 19 nt, Artificial Sequence
  Description of Artificial Sequence: Synthetic oligonucleotide
gacugguugccccaugcca

SEQ ID NO: 1786170 - RNA, 19 nt, Artificial Sequence
  Description of Artificial Sequence: Synthetic oligonucleotide
acauucaaccguuccugga

SEQ ID NO: 1786171 - RNA, 19 nt, Artificial Sequence
  Description of Artificial Sequence: Synthetic oligonucleotide
cauuucguuaggacacaug

SEQ ID NO: 1786172 - RNA, 19 nt, Artificial Sequence
  Description of Artificial Sequence: Synthetic oligonucleotide
ggagaggucuccugugugg

SEQ ID NO: 1786173 - RNA, 19 nt, Artificial Sequence
  Description of Artificial Sequence: Synthetic oligonucleotide
gugugaucauacauguccc

SEQ ID NO: 1786174 - RNA, 19 nt, Artificial Sequence
  Description of Artificial Sequence: Synthetic oligonucleotide
ucccaggaggucaucuucu

SEQ ID NO: 1786175 - RNA, 19 nt, Artificial Sequence
  Description of Artificial Sequence: Synthetic oligonucleotide
gucaagaggucacaucaga

SEQ ID NO: 1786176 - RNA, 19 nt, Artificial Sequence
  Description of Artificial Sequence: Synthetic oligonucleotide
aucacgccaucuccagugg

SEQ ID NO: 1786177 - RNA, 19 nt, Artificial Sequence
  Description of Artificial Sequence: Synthetic oligonucleotide
uuccaccgacaguauagcc

SEQ ID NO: 1786178 - RNA, 19 nt, Artificial Sequence
  Description of Artificial Sequence: Synthetic oligonucleotide
guaggucuuuauuagucaa

SEQ ID NO: 1786179 - RNA, 19 nt, Artificial Sequence
  Description of Artificial Sequence: Synthetic oligonucleotide
aacauuucguuaggacaca

SEQ ID NO: 1786180 - RNA, 19 nt, Artificial Sequence
  Description of Artificial Sequence: Synthetic oligonucleotide
ccucugaccagcugaaggg

SEQ ID NO: 1786181 - RNA, 19 nt, Artificial Sequence
  Description of Artificial Sequence: Synthetic oligonucleotide
ggucuuuauuagucaagag

SEQ ID NO: 1786182 - RNA, 19 nt, Artificial Sequence
  Description of Artificial Sequence: Synthetic oligonucleotide
gacgagucgggagagcgug

SEQ ID NO: 1786183 - RNA, 19 nt, Artificial Sequence
  Description of Artificial Sequence: Synthetic oligonucleotide
gucccuucgaaacaggaua

SEQ ID NO: 1786184 - RNA, 19 nt, Artificial Sequence
  Description of Artificial Sequence: Synthetic oligonucleotide
uaaucacgccaucuccagu

SEQ ID NO: 1786185 - RNA, 19 nt, Artificial Sequence
  Description of Artificial Sequence: Synthetic oligonucleotide
ugcuggguugggaucagaa

SEQ ID NO: 1786186 - RNA, 19 nt, Artificial Sequence
  Description of Artificial Sequence: Synthetic oligonucleotide
uuccugugcuagaaucaug

SEQ ID NO: 1786187 - RNA, 19 nt, Artificial Sequence
  Description of Artificial Sequence: Synthetic oligonucleotide
gugaucauacaugucccug

SEQ ID NO: 1786188 - RNA, 19 nt, Artificial Sequence
  Description of Artificial Sequence: Synthetic oligonucleotide
ucucugggaccacuguccu

SEQ ID NO: 1786189 - RNA, 19 nt, Artificial Sequence
  Description of Artificial Sequence: Synthetic oligonucleotide
cagcucguggucuucguac

SEQ ID NO: 1786190 - RNA, 19 nt, Artificial Sequence
  Description of Artificial Sequence: Synthetic oligonucleotide
agguguggccaugguaugc

SEQ ID NO: 1786191 - RNA, 19 nt, Artificial Sequence
  Description of Artificial Sequence: Synthetic oligonucleotide
aacagggcgucgguuaagu

SEQ ID NO: 1786192 - RNA, 19 nt, Artificial Sequence
  Description of Artificial Sequence: Synthetic oligonucleotide
agugaucguaggcuucaca

SEQ ID NO: 1786193 - RNA, 19 nt, Artificial Sequence
  Description of Artificial Sequence: Synthetic oligonucleotide
uaugcucuauuuugaugau

SEQ ID NO: 1786194 - RNA, 19 nt, Artificial Sequence
  Description of Artificial Sequence: Synthetic oligonucleotide
aguguguccaagagucccg

SEQ ID NO: 1786195 - RNA, 19 nt, Artificial Sequence
  Description of Artificial Sequence: Synthetic oligonucleotide
gaagugaucguaggcuuca

SEQ ID NO: 1786196 - RNA, 19 nt, Artificial Sequence
  Description of Artificial Sequence: Synthetic oligonucleotide
gggaacauucaaccguucc

SEQ ID NO: 1786197 - RNA, 19 nt, Artificial Sequence
  Description of Artificial Sequence: Synthetic oligonucleotide
gucccgacuccacaggagc

SEQ ID NO: 1786198 - RNA, 19 nt, Artificial Sequence
  Description of Artificial Sequence: Synthetic oligonucleotide
ggcaacauuucguuaggac

SEQ ID NO: 1786199 - RNA, 19 nt, Artificial Sequence
  Description of Artificial Sequence: Synthetic oligonucleotide
auuagucaagaggucacau

SEQ ID NO: 1786200 - RNA, 19 nt, Artificial Sequence
  Description of Artificial Sequence: Synthetic oligonucleotide
aagcagcucguggucuucg

SEQ ID NO: 1786201 - RNA, 19 nt, Artificial Sequence
  Description of Artificial Sequence: Synthetic oligonucleotide
uguggacgagucgggagag

SEQ ID NO: 1786202 - RNA, 19 nt, Artificial Sequence
  Description of Artificial Sequence: Synthetic oligonucleotide
aggauauagucugccagga

SEQ ID NO: 1786203 - RNA, 19 nt, Artificial Sequence
  Description of Artificial Sequence: Synthetic oligonucleotide
aagugaucguaggcuucac

SEQ ID NO: 1786204 - RNA, 19 nt, Artificial Sequence
  Description of Artificial Sequence: Synthetic oligonucleotide
uuucagucuguggacgagu

SEQ ID NO: 1786205 - RNA, 19 nt, Artificial Sequence
  Description of Artificial Sequence: Synthetic oligonucleotide
cuuugggaucugugcagag

SEQ ID NO: 1786206 - RNA, 19 nt, Artificial Sequence
  Description of Artificial Sequence: Synthetic oligonucleotide
acaaauccucaugacugug

SEQ ID NO: 1786207 - RNA, 19 nt, Artificial Sequence
  Description of Artificial Sequence: Synthetic oligonucleotide
cagggcgucgguuaaguca

SEQ ID NO: 1786208 - RNA, 19 nt, Artificial Sequence
  Description of Artificial Sequence: Synthetic oligonucleotide
uuuugccuaccauccucca

SEQ ID NO: 1786209 - RNA, 19 nt, Artificial Sequence
  Description of Artificial Sequence: Synthetic oligonucleotide
uccaagagucccgacucca

SEQ ID NO: 1786210 - RNA, 19 nt, Artificial Sequence
  Description of Artificial Sequence: Synthetic oligonucleotide
cucugaccagcugaagggg

SEQ ID NO: 1786211 - RNA, 19 nt, Artificial Sequence
  Description of Artificial Sequence: Synthetic oligonucleotide
agagcguguuaaacagggc

SEQ ID NO: 1786212 - RNA, 19 nt, Artificial Sequence
  Description of Artificial Sequence: Synthetic oligonucleotide
accucguccauggcuggcc

SEQ ID NO: 1786213 - RNA, 19 nt, Artificial Sequence
  Description of Artificial Sequence: Synthetic oligonucleotide
agaacacuucagcugcaaa

SEQ ID NO: 1786214 - RNA, 19 nt, Artificial Sequence
  Description of Artificial Sequence: Synthetic oligonucleotide
agcguguuaaacagggcgu

SEQ ID NO: 1786215 - RNA, 19 nt, Artificial Sequence
  Description of Artificial Sequence: Synthetic oligonucleotide
guggugugaucauacaugu

SEQ ID NO: 1786216 - RNA, 19 nt, Artificial Sequence
  Description of Artificial Sequence: Synthetic oligonucleotide
ugaccuuaaucacgccauc

SEQ ID NO: 1786217 - RNA, 19 nt, Artificial Sequence
  Description of Artificial Sequence: Synthetic oligonucleotide
uggagggacaaauccucau

SEQ ID NO: 1786218 - RNA, 19 nt, Artificial Sequence
  Description of Artificial Sequence: Synthetic oligonucleotide
gaagagggcgcccggccac

SEQ ID NO: 1786219 - RNA, 19 nt, Artificial Sequence
  Description of Artificial Sequence: Synthetic oligonucleotide
agucaagaggucacaucag

SEQ ID NO: 1786220 - RNA, 19 nt, Artificial Sequence
  Description of Artificial Sequence: Synthetic oligonucleotide
caggagcuugaacugggac

SEQ ID NO: 1786221 - RNA, 19 nt, Artificial Sequence
  Description of Artificial Sequence: Synthetic oligonucleotide
aaacagggcgucgguuaag

SEQ ID NO: 1786222 - RNA, 19 nt, Artificial Sequence
  Description of Artificial Sequence: Synthetic oligonucleotide
ucguggucuucguaccaca

SEQ ID NO: 1786223 - RNA, 19 nt, Artificial Sequence
  Description of Artificial Sequence: Synthetic oligonucleotide
cacucugaucuuccagagc

SEQ ID NO: 1786224 - RNA, 19 nt, Artificial Sequence
  Description of Artificial Sequence: Synthetic oligonucleotide
cuucgaaacaggauauagu

SEQ ID NO: 1786225 - RNA, 19 nt, Artificial Sequence
  Description of Artificial Sequence: Synthetic oligonucleotide
ucgggagagcguguuaaac

SEQ ID NO: 1786226 - RNA, 19 nt, Artificial Sequence
  Description of Artificial Sequence: Synthetic oligonucleotide
ccuucgaaacaggauauag

SEQ ID NO: 1786227 - RNA, 19 nt, Artificial Sequence
  Description of Artificial Sequence: Synthetic oligonucleotide
gagguguggccaugguaug

SEQ ID NO: 1786228 - RNA, 19 nt, Artificial Sequence
  Description of Artificial Sequence: Synthetic oligonucleotide
ugacccagcaggagagguc

SEQ ID NO: 1786229 - RNA, 19 nt, Artificial Sequence
  Description of Artificial Sequence: Synthetic oligonucleotide
agugucgcagugugaaguu

SEQ ID NO: 1786230 - RNA, 19 nt, Artificial Sequence
  Description of Artificial Sequence: Synthetic oligonucleotide
guguacgagguggacauca

SEQ ID NO: 1786231 - RNA, 19 nt, Artificial Sequence
  Description of Artificial Sequence: Synthetic oligonucleotide
ucccgacuccacaggagcu

SEQ ID NO: 1786232 - RNA, 19 nt, Artificial Sequence
  Description of Artificial Sequence: Synthetic oligonucleotide
acuuugggaucugugcaga

SEQ ID NO: 1786233 - RNA, 19 nt, Artificial Sequence
  Description of Artificial Sequence: Synthetic oligonucleotide
gucaucaucguagaacacu

SEQ ID NO: 1786234 - RNA, 19 nt, Artificial Sequence
  Description of Artificial Sequence: Synthetic oligonucleotide
caucaucguagaacacuuc

SEQ ID NO: 1786235 - RNA, 19 nt, Artificial Sequence
  Description of Artificial Sequence: Synthetic oligonucleotide
cucccaggaggucaucuuc

SEQ ID NO: 1786236 - RNA, 19 nt, Artificial Sequence
  Description of Artificial Sequence: Synthetic oligonucleotide
ccaggggaacauucaaccg

SEQ ID NO: 1786237 - RNA, 19 nt, Artificial Sequence
  Description of Artificial Sequence: Synthetic oligonucleotide
gucgucuuucagccagucc

SEQ ID NO: 1786238 - RNA, 19 nt, Artificial Sequence
  Description of Artificial Sequence: Synthetic oligonucleotide
uggugugaucauacauguc

SEQ ID NO: 1786239 - RNA, 19 nt, Artificial Sequence
  Description of Artificial Sequence: Synthetic oligonucleotide
ugccacaaugcuggcaagu

SEQ ID NO: 1786240 - RNA, 19 nt, Artificial Sequence
  Description of Artificial Sequence: Synthetic oligonucleotide
caaggaggcacggaaguga

SEQ ID NO: 1786241 - RNA, 19 nt, Artificial Sequence
  Description of Artificial Sequence: Synthetic oligonucleotide
agugugaaguugaaccuuu

SEQ ID NO: 1786242 - RNA, 19 nt, Artificial Sequence
  Description of Artificial Sequence: Synthetic oligonucleotide
acgagguggacaucagaua

SEQ ID NO: 1786243 - RNA, 19 nt, Artificial Sequence
  Description of Artificial Sequence: Synthetic oligonucleotide
agucgggagagcguguuaa

SEQ ID NO: 1786244 - RNA, 19 nt, Artificial Sequence
  Description of Artificial Sequence: Synthetic oligonucleotide
gagucccgacuccacagga

SEQ ID NO: 1786245 - RNA, 19 nt, Artificial Sequence
  Description of Artificial Sequence: Synthetic oligonucleotide
gcccauguuauucuuggga

SEQ ID NO: 1786246 - RNA, 19 nt, Artificial Sequence
  Description of Artificial Sequence: Synthetic oligonucleotide
cuggcaaguccugugccug

SEQ ID NO: 1786247 - RNA, 19 nt, Artificial Sequence
  Description of Artificial Sequence: Synthetic oligonucleotide
cuguggacgagucgggaga

SEQ ID NO: 1786248 - RNA, 19 nt, Artificial Sequence
  Description of Artificial Sequence: Synthetic oligonucleotide
agggcgcccggccacaccu

SEQ ID NO: 1786249 - RNA, 19 nt, Artificial Sequence
  Description of Artificial Sequence: Synthetic oligonucleotide
uguguccaagagucccgac

SEQ ID NO: 1786250 - RNA, 19 nt, Artificial Sequence
  Description of Artificial Sequence: Synthetic oligonucleotide
caagagucccgacuccaca

SEQ ID NO: 1786251 - RNA, 19 nt, Artificial Sequence
  Description of Artificial Sequence: Synthetic oligonucleotide
ggagagcguguuaaacagg

SEQ ID NO: 1786252 - RNA, 19 nt, Artificial Sequence
  Description of Artificial Sequence: Synthetic oligonucleotide
agggcgucgguuaagucau

SEQ ID NO: 1786253 - RNA, 19 nt, Artificial Sequence
  Description of Artificial Sequence: Synthetic oligonucleotide
uuugguggguaggucuuua

SEQ ID NO: 1786254 - RNA, 19 nt, Artificial Sequence
  Description of Artificial Sequence: Synthetic oligonucleotide
cagcuccuugaccuuaauc

SEQ ID NO: 1786255 - RNA, 19 nt, Artificial Sequence
  Description of Artificial Sequence: Synthetic oligonucleotide
ucaugggauguaccuuguu

SEQ ID NO: 1786256 - RNA, 19 nt, Artificial Sequence
  Description of Artificial Sequence: Synthetic oligonucleotide
caggggaacauucaaccgu

SEQ ID NO: 1786257 - RNA, 19 nt, Artificial Sequence
  Description of Artificial Sequence: Synthetic oligonucleotide
ggcacggaagugaucguag

SEQ ID NO: 1786258 - RNA, 19 nt, Artificial Sequence
  Description of Artificial Sequence: Synthetic oligonucleotide
ccagcgaguccaaggaggc

SEQ ID NO: 1786259 - RNA, 19 nt, Artificial Sequence
  Description of Artificial Sequence: Synthetic oligonucleotide
ugaccagcugaaggggacu

SEQ ID NO: 1786260 - RNA, 19 nt, Artificial Sequence
  Description of Artificial Sequence: Synthetic oligonucleotide
uugggaucagaagcagcuc

SEQ ID NO: 1786261 - RNA, 19 nt, Artificial Sequence
  Description of Artificial Sequence: Synthetic oligonucleotide
gucugugcguggcugccac

SEQ ID NO: 1786262 - RNA, 19 nt, Artificial Sequence
  Description of Artificial Sequence: Synthetic oligonucleotide
ccacaaugcuggcaagucc

SEQ ID NO: 1786263 - RNA, 19 nt, Artificial Sequence
  Description of Artificial Sequence: Synthetic oligonucleotide
agaggucgucuuucagcca

SEQ ID NO: 1786264 - RNA, 19 nt, Artificial Sequence
  Description of Artificial Sequence: Synthetic oligonucleotide
cuggagggacaaauccuca

SEQ ID NO: 1786265 - RNA, 19 nt, Artificial Sequence
  Description of Artificial Sequence: Synthetic oligonucleotide
agccgcaccaugagguguc

SEQ ID NO: 1786266 - RNA, 19 nt, Artificial Sequence
  Description of Artificial Sequence: Synthetic oligonucleotide
guguggcgacaucucuggg

SEQ ID NO: 1786267 - RNA, 19 nt, Artificial Sequence
  Description of Artificial Sequence: Synthetic oligonucleotide
cucguggucuucguaccac

SEQ ID NO: 1786268 - RNA, 19 nt, Artificial Sequence
  Description of Artificial Sequence: Synthetic oligonucleotide
guguccaagagucccgacu

SEQ ID NO: 1786269 - RNA, 19 nt, Artificial Sequence
  Description of Artificial Sequence: Synthetic oligonucleotide
ccacucugaucuuccagag

SEQ ID NO: 1786270 - RNA, 19 nt, Artificial Sequence
  Description of Artificial Sequence: Synthetic oligonucleotide
cuguggccacuuucugacc

SEQ ID NO: 1786271 - RNA, 19 nt, Artificial Sequence
  Description of Artificial Sequence: Synthetic oligonucleotide
guccugugccugcaccaag

SEQ ID NO: 1786272 - RNA, 19 nt, Artificial Sequence
  Description of Artificial Sequence: Synthetic oligonucleotide
caggaggucugugcguggc

SEQ ID NO: 1786273 - RNA, 19 nt, Artificial Sequence
  Description of Artificial Sequence: Synthetic oligonucleotide
aggggaacauucaaccguu

SEQ ID NO: 1786274 - RNA, 19 nt, Artificial Sequence
  Description of Artificial Sequence: Synthetic oligonucleotide
acauuucguuaggacacau

SEQ ID NO: 1786275 - RNA, 19 nt, Artificial Sequence
  Description of Artificial Sequence: Synthetic oligonucleotide
aucguaggcuucacaggug

SEQ ID NO: 1786276 - RNA, 19 nt, Artificial Sequence
  Description of Artificial Sequence: Synthetic oligonucleotide
gguugggaucagaagcagc

SEQ ID NO: 1786277 - RNA, 19 nt, Artificial Sequence
  Description of Artificial Sequence: Synthetic oligonucleotide
caugggauguaccuuguuu

SEQ ID NO: 1786278 - RNA, 19 nt, Artificial Sequence
  Description of Artificial Sequence: Synthetic oligonucleotide
cagccuggagggacaaauc

SEQ ID NO: 1786279 - RNA, 19 nt, Artificial Sequence
  Description of Artificial Sequence: Synthetic oligonucleotide
ggcgacaucucugggacca

SEQ ID NO: 1786280 - RNA, 19 nt, Artificial Sequence
  Description of Artificial Sequence: Synthetic oligonucleotide
gaucugugcagaggucguc

SEQ ID NO: 1786281 - RNA, 19 nt, Artificial Sequence
  Description of Artificial Sequence: Synthetic oligonucleotide
uggcgacaucucugggacc

SEQ ID NO: 1786282 - RNA, 19 nt, Artificial Sequence
  Description of Artificial Sequence: Synthetic oligonucleotide
acucaugcuguugguucca

SEQ ID NO: 1786283 - RNA, 19 nt, Artificial Sequence
  Description of Artificial Sequence: Synthetic oligonucleotide
cagcaggagaggucuccug

SEQ ID NO: 1786284 - RNA, 19 nt, Artificial Sequence
  Description of Artificial Sequence: Synthetic oligonucleotide
uccauggcuggcccauguu

SEQ ID NO: 1786285 - RNA, 19 nt, Artificial Sequence
  Description of Artificial Sequence: Synthetic oligonucleotide
gugucgcagugugaaguug

SEQ ID NO: 1786286 - RNA, 19 nt, Artificial Sequence
  Description of Artificial Sequence: Synthetic oligonucleotide
caugaagcgcagccugcca

SEQ ID NO: 1786287 - RNA, 19 nt, Artificial Sequence
  Description of Artificial Sequence: Synthetic oligonucleotide
accuuguuucuugcaggcu

SEQ ID NO: 1786288 - RNA, 19 nt, Artificial Sequence
  Description of Artificial Sequence: Synthetic oligonucleotide
cgucgguuaagucaucauc

SEQ ID NO: 1786289 - RNA, 19 nt, Artificial Sequence
  Description of Artificial Sequence: Synthetic oligonucleotide
uauagccgugcaggcauuu

SEQ ID NO: 1786290 - RNA, 19 nt, Artificial Sequence
  Description of Artificial Sequence: Synthetic oligonucleotide
ggugaccucguccauggcu

SEQ ID NO: 1786291 - RNA, 19 nt, Artificial Sequence
  Description of Artificial Sequence: Synthetic oligonucleotide
ugccauucagccgcaccau

SEQ ID NO: 1786292 - RNA, 19 nt, Artificial Sequence
  Description of Artificial Sequence: Synthetic oligonucleotide
aggugacauccaagugucg

SEQ ID NO: 1786293 - RNA, 19 nt, Artificial Sequence
  Description of Artificial Sequence: Synthetic oligonucleotide
cauggcuggcccauguuau

SEQ ID NO: 1786294 - RNA, 19 nt, Artificial Sequence
  Description of Artificial Sequence: Synthetic oligonucleotide
gccccaugccauucagccg

SEQ ID NO: 1786295 - RNA, 19 nt, Artificial Sequence
  Description of Artificial Sequence: Synthetic oligonucleotide
gagcagcugcgggaaggag

SEQ ID NO: 1786296 - RNA, 19 nt, Artificial Sequence
  Description of Artificial Sequence: Synthetic oligonucleotide
accguuccuggauggugau

SEQ ID NO: 1786297 - RNA, 19 nt, Artificial Sequence
  Description of Artificial Sequence: Synthetic oligonucleotide
ccacaggagcuugaacugg

SEQ ID NO: 1786298 - RNA, 19 nt, Artificial Sequence
  Description of Artificial Sequence: Synthetic oligonucleotide
guagaacacuucagcugca

SEQ ID NO: 1786299 - RNA, 19 nt, Artificial Sequence
  Description of Artificial Sequence: Synthetic oligonucleotide
caguauagccgugcaggca

SEQ ID NO: 1786300 - RNA, 19 nt, Artificial Sequence
  Description of Artificial Sequence: Synthetic oligonucleotide
gacuccacaggagcuugaa

SEQ ID NO: 1786301 - RNA, 19 nt, Artificial Sequence
  Description of Artificial Sequence: Synthetic oligonucleotide
ggguguacgagguggacau

SEQ ID NO: 1786302 - RNA, 19 nt, Artificial Sequence
  Description of Artificial Sequence: Synthetic oligonucleotide
cucaugcuguugguuccac

SEQ ID NO: 1786303 - RNA, 19 nt, Artificial Sequence
  Description of Artificial Sequence: Synthetic oligonucleotide
gaguccaaggaggcacgga

SEQ ID NO: 1786304 - RNA, 19 nt, Artificial Sequence
  Description of Artificial Sequence: Synthetic oligonucleotide
ccauucagccgcaccauga

SEQ ID NO: 1786305 - RNA, 19 nt, Artificial Sequence
  Description of Artificial Sequence: Synthetic oligonucleotide
cucugggaccacuguccuc

SEQ ID NO: 1786306 - RNA, 19 nt, Artificial Sequence
  Description of Artificial Sequence: Synthetic oligonucleotide
ggauauagucugccaggaa

SEQ ID NO: 1786307 - RNA, 19 nt, Artificial Sequence
  Description of Artificial Sequence: Synthetic oligonucleotide
ggggacuuugggaucugug

SEQ ID NO: 1786308 - RNA, 19 nt, Artificial Sequence
  Description of Artificial Sequence: Synthetic oligonucleotide
ccaagugucgcagugugaa

SEQ ID NO: 1786309 - RNA, 19 nt, Artificial Sequence
  Description of Artificial Sequence: Synthetic oligonucleotide
aggaggcacggaagugauc

SEQ ID NO: 1786310 - RNA, 19 nt, Artificial Sequence
  Description of Artificial Sequence: Synthetic oligonucleotide
gccauucagccgcaccaug

SEQ ID NO: 1786311 - RNA, 19 nt, Artificial Sequence
  Description of Artificial Sequence: Synthetic oligonucleotide
guguguccaagagucccga

SEQ ID NO: 1786312 - RNA, 19 nt, Artificial Sequence
  Description of Artificial Sequence: Synthetic oligonucleotide
cguguuaaacagggcgucg

SEQ ID NO: 1786313 - RNA, 19 nt, Artificial Sequence
  Description of Artificial Sequence: Synthetic oligonucleotide
ggaagagggcgcccggcca

SEQ ID NO: 1786314 - RNA, 19 nt, Artificial Sequence
  Description of Artificial Sequence: Synthetic oligonucleotide
gcuagaaucaugggaugua

SEQ ID NO: 1786315 - RNA, 19 nt, Artificial Sequence
  Description of Artificial Sequence: Synthetic oligonucleotide
ccaugaagcgcagccugcc

SEQ ID NO: 1786316 - RNA, 19 nt, Artificial Sequence
  Description of Artificial Sequence: Synthetic oligonucleotide
gccggaugcgcucauagau

SEQ ID NO: 1786317 - RNA, 19 nt, Artificial Sequence
  Description of Artificial Sequence: Synthetic oligonucleotide
guuaaacagggcgucgguu

SEQ ID NO: 1786318 - RNA, 19 nt, Artificial Sequence
  Description of Artificial Sequence: Synthetic oligonucleotide
gucuguggacgagucggga

SEQ ID NO: 1786319 - RNA, 19 nt, Artificial Sequence
  Description of Artificial Sequence: Synthetic oligonucleotide
gucgggagagcguguuaaa

SEQ ID NO: 1786320 - RNA, 19 nt, Artificial Sequence
  Description of Artificial Sequence: Synthetic oligonucleotide
gagggcgcccggccacacc

SEQ ID NO: 1786321 - RNA, 19 nt, Artificial Sequence
  Description of Artificial Sequence: Synthetic oligonucleotide
cagugucacuuuugaaggu

SEQ ID NO: 1786322 - RNA, 19 nt, Artificial Sequence
  Description of Artificial Sequence: Synthetic oligonucleotide
gggguguacgagguggaca

SEQ ID NO: 1786323 - RNA, 19 nt, Artificial Sequence
  Description of Artificial Sequence: Synthetic oligonucleotide
gcguguuaaacagggcguc

SEQ ID NO: 1786324 - RNA, 19 nt, Artificial Sequence
  Description of Artificial Sequence: Synthetic oligonucleotide
cugugcguggcugccacaa

SEQ ID NO: 1786325 - RNA, 19 nt, Artificial Sequence
  Description of Artificial Sequence: Synthetic oligonucleotide
ccggccacaccuguuuugc

SEQ ID NO: 1786326 - RNA, 19 nt, Artificial Sequence
  Description of Artificial Sequence: Synthetic oligonucleotide
cgggagagcguguuaaaca

SEQ ID NO: 1786327 - RNA, 19 nt, Artificial Sequence
  Description of Artificial Sequence: Synthetic oligonucleotide
ggccacaccuguuuugccu

SEQ ID NO: 1786328 - RNA, 19 nt, Artificial Sequence
  Description of Artificial Sequence: Synthetic oligonucleotide
ggucacaucagaggugacu

SEQ ID NO: 1786329 - RNA, 19 nt, Artificial Sequence
  Description of Artificial Sequence: Synthetic oligonucleotide
cacaucagaggugacucau

SEQ ID NO: 1786330 - RNA, 19 nt, Artificial Sequence
  Description of Artificial Sequence: Synthetic oligonucleotide
gaacugggacaggaagacu

SEQ ID NO: 1786331 - RNA, 19 nt, Artificial Sequence
  Description of Artificial Sequence: Synthetic oligonucleotide
auagccgugcaggcauuuu

SEQ ID NO: 1786332 - RNA, 19 nt, Artificial Sequence
  Description of Artificial Sequence: Synthetic oligonucleotide
caccgacaguauagccgug

SEQ ID NO: 1786333 - RNA, 19 nt, Artificial Sequence
  Description of Artificial Sequence: Synthetic oligonucleotide
gccuaccauccuccagagg

SEQ ID NO: 1786334 - RNA, 19 nt, Artificial Sequence
  Description of Artificial Sequence: Synthetic oligonucleotide
ccaccgacaguauagccgu

SEQ ID NO: 1786335 - RNA, 19 nt, Artificial Sequence
  Description of Artificial Sequence: Synthetic oligonucleotide
gagucgggagagcguguua

SEQ ID NO: 1786336 - RNA, 19 nt, Artificial Sequence
  Description of Artificial Sequence: Synthetic oligonucleotide
ggcgucgguuaagucauca

SEQ ID NO: 1786337 - RNA, 19 nt, Artificial Sequence
  Description of Artificial Sequence: Synthetic oligonucleotide
cgacaguauagccgugcag

SEQ ID NO: 1786338 - RNA, 19 nt, Artificial Sequence
  Description of Artificial Sequence: Synthetic oligonucleotide
gccacaccuguuuugccua

SEQ ID NO: 1786339 - RNA, 19 nt, Artificial Sequence
  Description of Artificial Sequence: Synthetic oligonucleotide
guggacgagucgggagagc

SEQ ID NO: 1786340 - RNA, 19 nt, Artificial Sequence
  Description of Artificial Sequence: Synthetic oligonucleotide
gucgcagugugaaguugaa

SEQ ID NO: 1786341 - RNA, 19 nt, Artificial Sequence
  Description of Artificial Sequence: Synthetic oligonucleotide
ccucguccauggcuggccc

SEQ ID NO: 1786342 - RNA, 19 nt, Artificial Sequence
  Description of Artificial Sequence: Synthetic oligonucleotide
gcaaguccugugccugcac

SEQ ID NO: 1786343 - RNA, 19 nt, Artificial Sequence
  Description of Artificial Sequence: Synthetic oligonucleotide
cugcgggaaggaggccucc

SEQ ID NO: 1786344 - RNA, 19 nt, Artificial Sequence
  Description of Artificial Sequence: Synthetic oligonucleotide
gcucguggucuucguacca

SEQ ID NO: 1786345 - RNA, 19 nt, Artificial Sequence
  Description of Artificial Sequence: Synthetic oligonucleotide
agccccugaguguguccaa

SEQ ID NO: 1786346 - RNA, 19 nt, Artificial Sequence
  Description of Artificial Sequence: Synthetic oligonucleotide
ggucuucguaccacaucca

SEQ ID NO: 1786347 - RNA, 19 nt, Artificial Sequence
  Description of Artificial Sequence: Synthetic oligonucleotide
gcgggaaggaggccuccac

SEQ ID NO: 1786348 - RNA, 19 nt, Artificial Sequence
  Description of Artificial Sequence: Synthetic oligonucleotide
aggucgucuuucagccagu

SEQ ID NO: 1786349 - RNA, 19 nt, Artificial Sequence
  Description of Artificial Sequence: Synthetic oligonucleotide
gcuggcaaguccugugccu

SEQ ID NO: 1786350 - RNA, 19 nt, Artificial Sequence
  Description of Artificial Sequence: Synthetic oligonucleotide
guaccacauccaggucccc

SEQ ID NO: 1786351 - RNA, 19 nt, Artificial Sequence
  Description of Artificial Sequence: Synthetic oligonucleotide
ugccugcaccaagcuccag

SEQ ID NO: 1786352 - RNA, 19 nt, Artificial Sequence
  Description of Artificial Sequence: Synthetic oligonucleotide
ggucgucuuucagccaguc

SEQ ID NO: 1786353 - RNA, 19 nt, Artificial Sequence
  Description of Artificial Sequence: Synthetic oligonucleotide
acgagucgggagagcgugu

SEQ ID NO: 1786354 - RNA, 19 nt, Artificial Sequence
  Description of Artificial Sequence: Synthetic oligonucleotide
ggucaggaggucugugcgu

SEQ ID NO: 1786355 - RNA, 19 nt, Artificial Sequence
  Description of Artificial Sequence: Synthetic oligonucleotide
gcuugaacugggacaggaa

SEQ ID NO: 1786356 - RNA, 19 nt, Artificial Sequence
  Description of Artificial Sequence: Synthetic oligonucleotide
ccgacaguauagccgugca

SEQ ID NO: 1786357 - RNA, 19 nt, Artificial Sequence
  Description of Artificial Sequence: Synthetic oligonucleotide
ccgacuccacaggagcuug

SEQ ID NO: 1786358 - RNA, 19 nt, Artificial Sequence
  Description of Artificial Sequence: Synthetic oligonucleotide
ggaucugugcagaggucgu

SEQ ID NO: 1786359 - RNA, 19 nt, Artificial Sequence
  Description of Artificial Sequence: Synthetic oligonucleotide
ggggaacauucaaccguuc

SEQ ID NO: 1786360 - RNA, 19 nt, Artificial Sequence
  Description of Artificial Sequence: Synthetic oligonucleotide
caucucccaggaggucauc

SEQ ID NO: 1786361 - RNA, 19 nt, Artificial Sequence
  Description of Artificial Sequence: Synthetic oligonucleotide
gggcaguucucuugcuccu

SEQ ID NO: 1786362 - RNA, 19 nt, Artificial Sequence
  Description of Artificial Sequence: Synthetic oligonucleotide
cagcgaguccaaggaggca

SEQ ID NO: 1786363 - RNA, 19 nt, Artificial Sequence
  Description of Artificial Sequence: Synthetic oligonucleotide
caccuguuuugccuaccau

SEQ ID NO: 1786364 - RNA, 19 nt, Artificial Sequence
  Description of Artificial Sequence: Synthetic oligonucleotide
cgaguccaaggaggcacgg

SEQ ID NO: 1786365 - RNA, 19 nt, Artificial Sequence
  Description of Artificial Sequence: Synthetic oligonucleotide
ccccugaguguguccaaga

SEQ ID NO: 1786366 - RNA, 19 nt, Artificial Sequence
  Description of Artificial Sequence: Synthetic oligonucleotide
gguguacgagguggacauc

SEQ ID NO: 1786367 - RNA, 19 nt, Artificial Sequence
  Description of Artificial Sequence: Synthetic oligonucleotide
cugguugccccaugccauu

SEQ ID NO: 1786368 - RNA, 19 nt, Artificial Sequence
  Description of Artificial Sequence: Synthetic oligonucleotide
ccaugguaugcucuauuuu

SEQ ID NO: 1786369 - RNA, 19 nt, Artificial Sequence
  Description of Artificial Sequence: Synthetic oligonucleotide
cgguuaagucaucaucgua

SEQ ID NO: 1786370 - RNA, 19 nt, Artificial Sequence
  Description of Artificial Sequence: Synthetic oligonucleotide
cggccacaccuguuuugcc

SEQ ID NO: 1786371 - RNA, 19 nt, Artificial Sequence
  Description of Artificial Sequence: Synthetic oligonucleotide
gggauguaccuuguuucuu

SEQ ID NO: 1786372 - RNA, 19 nt, Artificial Sequence
  Description of Artificial Sequence: Synthetic oligonucleotide
guauagccgugcaggcauu

SEQ ID NO: 1786373 - RNA, 19 nt, Artificial Sequence
  Description of Artificial Sequence: Synthetic oligonucleotide
cuccagcacagugcauccu

SEQ ID NO: 1786374 - RNA, 19 nt, Artificial Sequence
  Description of Artificial Sequence: Synthetic oligonucleotide
gcgacaucucugggaccac

SEQ ID NO: 1786375 - RNA, 19 nt, Artificial Sequence
  Description of Artificial Sequence: Synthetic oligonucleotide
ggacgagucgggagagcgu

SEQ ID NO: 1786376 - RNA, 19 nt, Artificial Sequence
  Description of Artificial Sequence: Synthetic oligonucleotide
cccaugccauucagccgca

SEQ ID NO: 1786377 - RNA, 19 nt, Artificial Sequence
  Description of Artificial Sequence: Synthetic oligonucleotide
ccaugaggugucucugguu

SEQ ID NO: 1786378 - RNA, 19 nt, Artificial Sequence
  Description of Artificial Sequence: Synthetic oligonucleotide
cccuucgaaacaggauaua

SEQ ID NO: 1786379 - RNA, 19 nt, Artificial Sequence
  Description of Artificial Sequence: Synthetic oligonucleotide
cgacuccacaggagcuuga

SEQ ID NO: 1786380 - RNA, 19 nt, Artificial Sequence
  Description of Artificial Sequence: Synthetic oligonucleotide
cguggucuucguaccacau

SEQ ID NO: 1786381 - RNA, 19 nt, Artificial Sequence
  Description of Artificial Sequence: Synthetic oligonucleotide
ccagagguguggccauggu

SEQ ID NO: 1786382 - RNA, 19 nt, Artificial Sequence
  Description of Artificial Sequence: Synthetic oligonucleotide
gggcgcccggccacaccug

SEQ ID NO: 1786383 - RNA, 19 nt, Artificial Sequence
  Description of Artificial Sequence: Synthetic oligonucleotide
gggcgucgguuaagucauc

SEQ ID NO: 1786384 - RNA, 19 nt, Artificial Sequence
  Description of Artificial Sequence: Synthetic oligonucleotide
gcccggccacaccuguuuu

SEQ ID NO: 1786385 - RNA, 19 nt, Artificial Sequence
  Description of Artificial Sequence: Synthetic oligonucleotide
cgacaucucugggaccacu

SEQ ID NO: 1786386 - RNA, 19 nt, Artificial Sequence
  Description of Artificial Sequence: Synthetic oligonucleotide
gccgcaccaugaggugucu

SEQ ID NO: 1786387 - RNA, 19 nt, Artificial Sequence
  Description of Artificial Sequence: Synthetic oligonucleotide
cgagucgggagagcguguu

SEQ ID NO: 1786388 - RNA, 19 nt, Artificial Sequence
  Description of Artificial Sequence: Synthetic oligonucleotide
cgcccggccacaccuguuu

SEQ ID NO: 1786389 - RNA, 19 nt, Artificial Sequence
  Description of Artificial Sequence: Synthetic oligonucleotide
gcgcccggccacaccuguu

SEQ ID NO: 1786390 - RNA, 19 nt, Artificial Sequence
  Description of Artificial Sequence: Synthetic oligonucleotide
aaaaugauaucacagacuc

SEQ ID NO: 1786391 - RNA, 19 nt, Artificial Sequence
  Description of Artificial Sequence: Synthetic oligonucleotide
gaucauuucacuuagacag

SEQ ID NO: 1786392 - RNA, 19 nt, Artificial Sequence
  Description of Artificial Sequence: Synthetic oligonucleotide
uauacauaaccauaguugg

SEQ ID NO: 1786393 - RNA, 19 nt, Artificial Sequence
  Description of Artificial Sequence: Synthetic oligonucleotide
gauauucucauauuuacag

SEQ ID NO: 1786394 - RNA, 19 nt, Artificial Sequence
  Description of Artificial Sequence: Synthetic oligonucleotide
uuuucuuagaccuuucagg

SEQ ID NO: 1786395 - RNA, 19 nt, Artificial Sequence
  Description of Artificial Sequence: Synthetic oligonucleotide
gagauaacaaauuuugcag

SEQ ID NO: 1786396 - RNA, 19 nt, Artificial Sequence
  Description of Artificial Sequence: Synthetic oligonucleotide
aaagagauaacaaauuuug

SEQ ID NO: 1786397 - RNA, 19 nt, Artificial Sequence
  Description of Artificial Sequence: Synthetic oligonucleotide
uuguuaaguauacauaacc

SEQ ID NO: 1786398 - RNA, 19 nt, Artificial Sequence
  Description of Artificial Sequence: Synthetic oligonucleotide
uguugauuauaauucaaag

SEQ ID NO: 1786399 - RNA, 19 nt, Artificial Sequence
  Description of Artificial Sequence: Synthetic oligonucleotide
uguuaaguauacauaacca

SEQ ID NO: 1786400 - RNA, 19 nt, Artificial Sequence
  Description of Artificial Sequence: Synthetic oligonucleotide
uuuucgauagucauuguac

SEQ ID NO: 1786401 - RNA, 19 nt, Artificial Sequence
  Description of Artificial Sequence: Synthetic oligonucleotide
uucacuagacuccacauca

SEQ ID NO: 1786402 - RNA, 19 nt, Artificial Sequence
  Description of Artificial Sequence: Synthetic oligonucleotide
aauucaaacuccccauuuc

SEQ ID NO: 1786403 - RNA, 19 nt, Artificial Sequence
  Description of Artificial Sequence: Synthetic oligonucleotide
uuuaugaacucaacaauga

SEQ ID NO: 1786404 - RNA, 19 nt, Artificial Sequence
  Description of Artificial Sequence: Synthetic oligonucleotide
aaagcauuccucuuuccag

SEQ ID NO: 1786405 - RNA, 19 nt, Artificial Sequence
  Description of Artificial Sequence: Synthetic oligonucleotide
aaauuuugcagcucuguca

SEQ ID NO: 1786406 - RNA, 19 nt, Artificial Sequence
  Description of Artificial Sequence: Synthetic oligonucleotide
gaccuggggauuuagagcg

SEQ ID NO: 1786407 - RNA, 19 nt, Artificial Sequence
  Description of Artificial Sequence: Synthetic oligonucleotide
uucucauauuuacaggagg

SEQ ID NO: 1786408 - RNA, 19 nt, Artificial Sequence
  Description of Artificial Sequence: Synthetic oligonucleotide
acaaaccuuaauuccaugg

SEQ ID NO: 1786409 - RNA, 19 nt, Artificial Sequence
  Description of Artificial Sequence: Synthetic oligonucleotide
ucgacuacaaguucagccg

SEQ ID NO: 1786410 - RNA, 19 nt, Artificial Sequence
  Description of Artificial Sequence: Synthetic oligonucleotide
agauacugaggguuggugc

SEQ ID NO: 1786411 - RNA, 19 nt, Artificial Sequence
  Description of Artificial Sequence: Synthetic oligonucleotide
uuaaguauacauaaccaua

SEQ ID NO: 1786412 - RNA, 19 nt, Artificial Sequence
  Description of Artificial Sequence: Synthetic oligonucleotide
ucuuagaccuuucaggaga

SEQ ID NO: 1786413 - RNA, 19 nt, Artificial Sequence
  Description of Artificial Sequence: Synthetic oligonucleotide
uuucuuagaccuuucagga

SEQ ID NO: 1786414 - RNA, 19 nt, Artificial Sequence
  Description of Artificial Sequence: Synthetic oligonucleotide
acaaugauaucuuucucag

SEQ ID NO: 1786415 - RNA, 19 nt, Artificial Sequence
  Description of Artificial Sequence: Synthetic oligonucleotide
ugauucauagauucgaguc

SEQ ID NO: 1786416 - RNA, 19 nt, Artificial Sequence
  Description of Artificial Sequence: Synthetic oligonucleotide
uguggcuuuucuuagaccu

SEQ ID NO: 1786417 - RNA, 19 nt, Artificial Sequence
  Description of Artificial Sequence: Synthetic oligonucleotide
uucacuuagacagauauuc

SEQ ID NO: 1786418 - RNA, 19 nt, Artificial Sequence
  Description of Artificial Sequence: Synthetic oligonucleotide
aauuuugcagcucugucau

SEQ ID NO: 1786419 - RNA, 19 nt, Artificial Sequence
  Description of Artificial Sequence: Synthetic oligonucleotide
aagagauaacaaauuuugc

SEQ ID NO: 1786420 - RNA, 19 nt, Artificial Sequence
  Description of Artificial Sequence: Synthetic oligonucleotide
guauacauaaccauaguug

SEQ ID NO: 1786421 - RNA, 19 nt, Artificial Sequence
  Description of Artificial Sequence: Synthetic oligonucleotide
ucuugaucauuucacuuag

SEQ ID NO: 1786422 - RNA, 19 nt, Artificial Sequence
  Description of Artificial Sequence: Synthetic oligonucleotide
aacucaucuacaugcauca

SEQ ID NO: 1786423 - RNA, 19 nt, Artificial Sequence
  Description of Artificial Sequence: Synthetic oligonucleotide
ucuacaugcaucaauucaa

SEQ ID NO: 1786424 - RNA, 19 nt, Artificial Sequence
  Description of Artificial Sequence: Synthetic oligonucleotide
uugaucauuucacuuagac

SEQ ID NO: 1786425 - RNA, 19 nt, Artificial Sequence
  Description of Artificial Sequence: Synthetic oligonucleotide
uuugauucauagauucgag

SEQ ID NO: 1786426 - RNA, 19 nt, Artificial Sequence
  Description of Artificial Sequence: Synthetic oligonucleotide
auguuuccaccauagacac

SEQ ID NO: 1786427 - RNA, 19 nt, Artificial Sequence
  Description of Artificial Sequence: Synthetic oligonucleotide
aaaccuuaauuccauggcu

SEQ ID NO: 1786428 - RNA, 19 nt, Artificial Sequence
  Description of Artificial Sequence: Synthetic oligonucleotide
acuaacucgaggcuccagc

SEQ ID NO: 1786429 - RNA, 19 nt, Artificial Sequence
  Description of Artificial Sequence: Synthetic oligonucleotide
cuuccaaagcacuaacucg

SEQ ID NO: 1786430 - RNA, 19 nt, Artificial Sequence
  Description of Artificial Sequence: Synthetic oligonucleotide
uucuccaccagauacugag

SEQ ID NO: 1786431 - RNA, 19 nt, Artificial Sequence
  Description of Artificial Sequence: Synthetic oligonucleotide
cucauagcugccuaaagag

SEQ ID NO: 1786432 - RNA, 19 nt, Artificial Sequence
  Description of Artificial Sequence: Synthetic oligonucleotide
acccacaaaccuuaauucc

SEQ ID NO: 1786433 - RNA, 19 nt, Artificial Sequence
  Description of Artificial Sequence: Synthetic oligonucleotide
uagacagauauucucauau

SEQ ID NO: 1786434 - RNA, 19 nt, Artificial Sequence
  Description of Artificial Sequence: Synthetic oligonucleotide
ucaaagagauaacaaauuu

SEQ ID NO: 1786435 - RNA, 19 nt, Artificial Sequence
  Description of Artificial Sequence: Synthetic oligonucleotide
agcaaucaauugcaguucc

SEQ ID NO: 1786436 - RNA, 19 nt, Artificial Sequence
  Description of Artificial Sequence: Synthetic oligonucleotide
aagggcuucuucuuuuggg

SEQ ID NO: 1786437 - RNA, 19 nt, Artificial Sequence
  Description of Artificial Sequence: Synthetic oligonucleotide
uuccaaagcacuaacucga

SEQ ID NO: 1786438 - RNA, 19 nt, Artificial Sequence
  Description of Artificial Sequence: Synthetic oligonucleotide
aaacuccccauuucgguuc

SEQ ID NO: 1786439 - RNA, 19 nt, Artificial Sequence
  Description of Artificial Sequence: Synthetic oligonucleotide
guugauuauaauucaaaga

SEQ ID NO: 1786440 - RNA, 19 nt, Artificial Sequence
  Description of Artificial Sequence: Synthetic oligonucleotide
aaguccaaagcauuccucu

SEQ ID NO: 1786441 - RNA, 19 nt, Artificial Sequence
  Description of Artificial Sequence: Synthetic oligonucleotide
auaucacagacucucucac

SEQ ID NO: 1786442 - RNA, 19 nt, Artificial Sequence
  Description of Artificial Sequence: Synthetic oligonucleotide
aaucaauugcaguuccugu

SEQ ID NO: 1786443 - RNA, 19 nt, Artificial Sequence
  Description of Artificial Sequence: Synthetic oligonucleotide
uucaaacuccccauuucgg

SEQ ID NO: 1786444 - RNA, 19 nt, Artificial Sequence
  Description of Artificial Sequence: Synthetic oligonucleotide
uacaaguucagccguaagu

SEQ ID NO: 1786445 - RNA, 19 nt, Artificial Sequence
  Description of Artificial Sequence: Synthetic oligonucleotide
uguagcguagugcagggga

SEQ ID NO: 1786446 - RNA, 19 nt, Artificial Sequence
  Description of Artificial Sequence: Synthetic oligonucleotide
cagauauucucauauuuac

SEQ ID NO: 1786447 - RNA, 19 nt, Artificial Sequence
  Description of Artificial Sequence: Synthetic oligonucleotide
aagguuaaacacaggaaag

SEQ ID NO: 1786448 - RNA, 19 nt, Artificial Sequence
  Description of Artificial Sequence: Synthetic oligonucleotide
ucaauugcaguuccuguca

SEQ ID NO: 1786449 - RNA, 19 nt, Artificial Sequence
  Description of Artificial Sequence: Synthetic oligonucleotide
auucauagauucgaguccg

SEQ ID NO: 1786450 - RNA, 19 nt, Artificial Sequence
  Description of Artificial Sequence: Synthetic oligonucleotide
auaauucaaagagauaaca

SEQ ID NO: 1786451 - RNA, 19 nt, Artificial Sequence
  Description of Artificial Sequence: Synthetic oligonucleotide
uccuaugccuuucucggcg

SEQ ID NO: 1786452 - RNA, 19 nt, Artificial Sequence
  Description of Artificial Sequence: Synthetic oligonucleotide
auaaaucaauccauuacuc

SEQ ID NO: 1786453 - RNA, 19 nt, Artificial Sequence
  Description of Artificial Sequence: Synthetic oligonucleotide
auagcguuucuguagccgg

SEQ ID NO: 1786454 - RNA, 19 nt, Artificial Sequence
  Description of Artificial Sequence: Synthetic oligonucleotide
gucgacuacaaguucagcc

SEQ ID NO: 1786455 - RNA, 19 nt, Artificial Sequence
  Description of Artificial Sequence: Synthetic oligonucleotide
uccauaucuucuuccaaag

SEQ ID NO: 1786456 - RNA, 19 nt, Artificial Sequence
  Description of Artificial Sequence: Synthetic oligonucleotide
uuggcuuuauguuuccacc

SEQ ID NO: 1786457 - RNA, 19 nt, Artificial Sequence
  Description of Artificial Sequence: Synthetic oligonucleotide
agcucugucauguuaauau

SEQ ID NO: 1786458 - RNA, 19 nt, Artificial Sequence
  Description of Artificial Sequence: Synthetic oligonucleotide
ucaucuacaugcaucaauu

SEQ ID NO: 1786459 - RNA, 19 nt, Artificial Sequence
  Description of Artificial Sequence: Synthetic oligonucleotide
ucaagguuaaacacaggaa

SEQ ID NO: 1786460 - RNA, 19 nt, Artificial Sequence
  Description of Artificial Sequence: Synthetic oligonucleotide
uuucgauagucauuguaca

SEQ ID NO: 1786461 - RNA, 19 nt, Artificial Sequence
  Description of Artificial Sequence: Synthetic oligonucleotide
aacaugcggacauacuuga

SEQ ID NO: 1786462 - RNA, 19 nt, Artificial Sequence
  Description of Artificial Sequence: Synthetic oligonucleotide
augaacucaacaaugauau

SEQ ID NO: 1786463 - RNA, 19 nt, Artificial Sequence
  Description of Artificial Sequence: Synthetic oligonucleotide
auaucuucuuccaaagcac

SEQ ID NO: 1786464 - RNA, 19 nt, Artificial Sequence
  Description of Artificial Sequence: Synthetic oligonucleotide
aucuacaugcaucaauuca

SEQ ID NO: 1786465 - RNA, 19 nt, Artificial Sequence
  Description of Artificial Sequence: Synthetic oligonucleotide
uguagcaaucaauugcagu

SEQ ID NO: 1786466 - RNA, 19 nt, Artificial Sequence
  Description of Artificial Sequence: Synthetic oligonucleotide
uccauuacucauuuccucu

SEQ ID NO: 1786467 - RNA, 19 nt, Artificial Sequence
  Description of Artificial Sequence: Synthetic oligonucleotide
agauguugauuauaauuca

SEQ ID NO: 1786468 - RNA, 19 nt, Artificial Sequence
  Description of Artificial Sequence: Synthetic oligonucleotide
cuuguagcaaucaauugca

SEQ ID NO: 1786469 - RNA, 19 nt, Artificial Sequence
  Description of Artificial Sequence: Synthetic oligonucleotide
agguuaaacacaggaaagg

SEQ ID NO: 1786470 - RNA, 19 nt, Artificial Sequence
  Description of Artificial Sequence: Synthetic oligonucleotide
uccuugaccguacgguucg

SEQ ID NO: 1786471 - RNA, 19 nt, Artificial Sequence
  Description of Artificial Sequence: Synthetic oligonucleotide
ucaaugaacucaucuacau

SEQ ID NO: 1786472 - RNA, 19 nt, Artificial Sequence
  Description of Artificial Sequence: Synthetic oligonucleotide
uucuucacuagacuccaca

SEQ ID NO: 1786473 - RNA, 19 nt, Artificial Sequence
  Description of Artificial Sequence: Synthetic oligonucleotide
aacucgaggcuccagcugu

SEQ ID NO: 1786474 - RNA, 19 nt, Artificial Sequence
  Description of Artificial Sequence: Synthetic oligonucleotide
aaguauacauaaccauagu

SEQ ID NO: 1786475 - RNA, 19 nt, Artificial Sequence
  Description of Artificial Sequence: Synthetic oligonucleotide
cucgguagcuucuucuucg

SEQ ID NO: 1786476 - RNA, 19 nt, Artificial Sequence
  Description of Artificial Sequence: Synthetic oligonucleotide
auuguacaaagguuccaag

SEQ ID NO: 1786477 - RNA, 19 nt, Artificial Sequence
  Description of Artificial Sequence: Synthetic oligonucleotide
uguagccggggcaaaauga

SEQ ID NO: 1786478 - RNA, 19 nt, Artificial Sequence
  Description of Artificial Sequence: Synthetic oligonucleotide
cuuguuaaguauacauaac

SEQ ID NO: 1786479 - RNA, 19 nt, Artificial Sequence
  Description of Artificial Sequence: Synthetic oligonucleotide
auccauuacucauuuccuc

SEQ ID NO: 1786480 - RNA, 19 nt, Artificial Sequence
  Description of Artificial Sequence: Synthetic oligonucleotide
cugugggcauccuugaccg

SEQ ID NO: 1786481 - RNA, 19 nt, Artificial Sequence
  Description of Artificial Sequence: Synthetic oligonucleotide
auaaccauaguugguuagg

SEQ ID NO: 1786482 - RNA, 19 nt, Artificial Sequence
  Description of Artificial Sequence: Synthetic oligonucleotide
ugugcagaaguucaucaau

SEQ ID NO: 1786483 - RNA, 19 nt, Artificial Sequence
  Description of Artificial Sequence: Synthetic oligonucleotide
uuuauguuuccaccauaga

SEQ ID NO: 1786484 - RNA, 19 nt, Artificial Sequence
  Description of Artificial Sequence: Synthetic oligonucleotide
aauacucauagcugccuaa

SEQ ID NO: 1786485 - RNA, 19 nt, Artificial Sequence
  Description of Artificial Sequence: Synthetic oligonucleotide
caagguuaaacacaggaaa

SEQ ID NO: 1786486 - RNA, 19 nt, Artificial Sequence
  Description of Artificial Sequence: Synthetic oligonucleotide
uugauucauagauucgagu

SEQ ID NO: 1786487 - RNA, 19 nt, Artificial Sequence
  Description of Artificial Sequence: Synthetic oligonucleotide
ucugugacuacggugguga

SEQ ID NO: 1786488 - RNA, 19 nt, Artificial Sequence
  Description of Artificial Sequence: Synthetic oligonucleotide
gucagccucauguaaagug

SEQ ID NO: 1786489 - RNA, 19 nt, Artificial Sequence
  Description of Artificial Sequence: Synthetic oligonucleotide
uacuuguagcaaucaauug

SEQ ID NO: 1786490 - RNA, 19 nt, Artificial Sequence
  Description of Artificial Sequence: Synthetic oligonucleotide
gauagucauuguacaaagg

SEQ ID NO: 1786491 - RNA, 19 nt, Artificial Sequence
  Description of Artificial Sequence: Synthetic oligonucleotide
uuucucagguugaauuuga

SEQ ID NO: 1786492 - RNA, 19 nt, Artificial Sequence
  Description of Artificial Sequence: Synthetic oligonucleotide
cauaaccauaguugguuag

SEQ ID NO: 1786493 - RNA, 19 nt, Artificial Sequence
  Description of Artificial Sequence: Synthetic oligonucleotide
uucggugaucaggugaugg

SEQ ID NO: 1786494 - RNA, 19 nt, Artificial Sequence
  Description of Artificial Sequence: Synthetic oligonucleotide
uugucgacuacaaguucag

SEQ ID NO: 1786495 - RNA, 19 nt, Artificial Sequence
  Description of Artificial Sequence: Synthetic oligonucleotide
uccuguagcguagugcagg

SEQ ID NO: 1786496 - RNA, 19 nt, Artificial Sequence
  Description of Artificial Sequence: Synthetic oligonucleotide
gcaaaaugauaucacagac

SEQ ID NO: 1786497 - RNA, 19 nt, Artificial Sequence
  Description of Artificial Sequence: Synthetic oligonucleotide
aauccauuacucauuuccu

SEQ ID NO: 1786498 - RNA, 19 nt, Artificial Sequence
  Description of Artificial Sequence: Synthetic oligonucleotide
uagucauuguacaaagguu

SEQ ID NO: 1786499 - RNA, 19 nt, Artificial Sequence
  Description of Artificial Sequence: Synthetic oligonucleotide
aaauacucauagcugccua

SEQ ID NO: 1786500 - RNA, 19 nt, Artificial Sequence
  Description of Artificial Sequence: Synthetic oligonucleotide
uacauaaccauaguugguu

SEQ ID NO: 1786501 - RNA, 19 nt, Artificial Sequence
  Description of Artificial Sequence: Synthetic oligonucleotide
cacauagcguuucuguagc

SEQ ID NO: 1786502 - RNA, 19 nt, Artificial Sequence
  Description of Artificial Sequence: Synthetic oligonucleotide
ucgggaccugcuucgaugg

SEQ ID NO: 1786503 - RNA, 19 nt, Artificial Sequence
  Description of Artificial Sequence: Synthetic oligonucleotide
agcacuaacucgaggcucc

SEQ ID NO: 1786504 - RNA, 19 nt, Artificial Sequence
  Description of Artificial Sequence: Synthetic oligonucleotide
caacaugcggacauacuug

SEQ ID NO: 1786505 - RNA, 19 nt, Artificial Sequence
  Description of Artificial Sequence: Synthetic oligonucleotide
acuuagacagauauucuca

SEQ ID NO: 1786506 - RNA, 19 nt, Artificial Sequence
  Description of Artificial Sequence: Synthetic oligonucleotide
cuuguggcuuuucuuagac

SEQ ID NO: 1786507 - RNA, 19 nt, Artificial Sequence
  Description of Artificial Sequence: Synthetic oligonucleotide
caaugauaucuuucucagg

SEQ ID NO: 1786508 - RNA, 19 nt, Artificial Sequence
  Description of Artificial Sequence: Synthetic oligonucleotide
uuguagcaaucaauugcag

SEQ ID NO: 1786509 - RNA, 19 nt, Artificial Sequence
  Description of Artificial Sequence: Synthetic oligonucleotide
uucgauagucauuguacaa

SEQ ID NO: 1786510 - RNA, 19 nt, Artificial Sequence
  Description of Artificial Sequence: Synthetic oligonucleotide
caaauuuugcagcucuguc

SEQ ID NO: 1786511 - RNA, 19 nt, Artificial Sequence
  Description of Artificial Sequence: Synthetic oligonucleotide
aggugauggcacucuuucc

SEQ ID NO: 1786512 - RNA, 19 nt, Artificial Sequence
  Description of Artificial Sequence: Synthetic oligonucleotide
uagacaccacccacaaacc

SEQ ID NO: 1786513 - RNA, 19 nt, Artificial Sequence
  Description of Artificial Sequence: Synthetic oligonucleotide
uccaaagcacuaacucgag

SEQ ID NO: 1786514 - RNA, 19 nt, Artificial Sequence
  Description of Artificial Sequence: Synthetic oligonucleotide
uagauucgaguccgaauga

SEQ ID NO: 1786515 - RNA, 19 nt, Artificial Sequence
  Description of Artificial Sequence: Synthetic oligonucleotide
cuuugauucauagauucga

SEQ ID NO: 1786516 - RNA, 19 nt, Artificial Sequence
  Description of Artificial Sequence: Synthetic oligonucleotide
cauuacucauuuccucucc

SEQ ID NO: 1786517 - RNA, 19 nt, Artificial Sequence
  Description of Artificial Sequence: Synthetic oligonucleotide
gaacucaucuacaugcauc

SEQ ID NO: 1786518 - RNA, 19 nt, Artificial Sequence
  Description of Artificial Sequence: Synthetic oligonucleotide
uccaaguacuuguagcaau

SEQ ID NO: 1786519 - RNA, 19 nt, Artificial Sequence
  Description of Artificial Sequence: Synthetic oligonucleotide
cucacugugcagaaguuca

SEQ ID NO: 1786520 - RNA, 19 nt, Artificial Sequence
  Description of Artificial Sequence: Synthetic oligonucleotide
cauagcguuucuguagccg

SEQ ID NO: 1786521 - RNA, 19 nt, Artificial Sequence
  Description of Artificial Sequence: Synthetic oligonucleotide
ucuucacuagacuccacau

SEQ ID NO: 1786522 - RNA, 19 nt, Artificial Sequence
  Description of Artificial Sequence: Synthetic oligonucleotide
acuuugauucauagauucg

SEQ ID NO: 1786523 - RNA, 19 nt, Artificial Sequence
  Description of Artificial Sequence: Synthetic oligonucleotide
uacgguucgccauuuuaga

SEQ ID NO: 1786524 - RNA, 19 nt, Artificial Sequence
  Description of Artificial Sequence: Synthetic oligonucleotide
acuccuaugucugugacua

SEQ ID NO: 1786525 - RNA, 19 nt, Artificial Sequence
  Description of Artificial Sequence: Synthetic oligonucleotide
augcggacauacuugaaau

SEQ ID NO: 1786526 - RNA, 19 nt, Artificial Sequence
  Description of Artificial Sequence: Synthetic oligonucleotide
auauuuacaggaggccauc

SEQ ID NO: 1786527 - RNA, 19 nt, Artificial Sequence
  Description of Artificial Sequence: Synthetic oligonucleotide
guagcaaucaauugcaguu

SEQ ID NO: 1786528 - RNA, 19 nt, Artificial Sequence
  Description of Artificial Sequence: Synthetic oligonucleotide
cuuagaccuuucaggagac

SEQ ID NO: 1786529 - RNA, 19 nt, Artificial Sequence
  Description of Artificial Sequence: Synthetic oligonucleotide
uagcguuucuguagccggg

SEQ ID NO: 1786530 - RNA, 19 nt, Artificial Sequence
  Description of Artificial Sequence: Synthetic oligonucleotide
ugaacucaucuacaugcau

SEQ ID NO: 1786531 - RNA, 19 nt, Artificial Sequence
  Description of Artificial Sequence: Synthetic oligonucleotide
aacucaacaaugauaucuu

SEQ ID NO: 1786532 - RNA, 19 nt, Artificial Sequence
  Description of Artificial Sequence: Synthetic oligonucleotide
uucucggcggggagaaggg

SEQ ID NO: 1786533 - RNA, 19 nt, Artificial Sequence
  Description of Artificial Sequence: Synthetic oligonucleotide
uuucgguucuggcucuuga

SEQ ID NO: 1786534 - RNA, 19 nt, Artificial Sequence
  Description of Artificial Sequence: Synthetic oligonucleotide
aaucaauccauuacucauu

SEQ ID NO: 1786535 - RNA, 19 nt, Artificial Sequence
  Description of Artificial Sequence: Synthetic oligonucleotide
guacgguucgccauuuuag

SEQ ID NO: 1786536 - RNA, 19 nt, Artificial Sequence
  Description of Artificial Sequence: Synthetic oligonucleotide
gucauuguacaaagguucc

SEQ ID NO: 1786537 - RNA, 19 nt, Artificial Sequence
  Description of Artificial Sequence: Synthetic oligonucleotide
aacaaauuuugcagcucug

SEQ ID NO: 1786538 - RNA, 19 nt, Artificial Sequence
  Description of Artificial Sequence: Synthetic oligonucleotide
uucgauggcgucguggacu

SEQ ID NO: 1786539 - RNA, 19 nt, Artificial Sequence
  Description of Artificial Sequence: Synthetic oligonucleotide
uaacucgaggcuccagcug

SEQ ID NO: 1786540 - RNA, 19 nt, Artificial Sequence
  Description of Artificial Sequence: Synthetic oligonucleotide
uuagacagauauucucaua

SEQ ID NO: 1786541 - RNA, 19 nt, Artificial Sequence
  Description of Artificial Sequence: Synthetic oligonucleotide
agauauucucauauuuaca

SEQ ID NO: 1786542 - RNA, 19 nt, Artificial Sequence
  Description of Artificial Sequence: Synthetic oligonucleotide
gauguugauuauaauucaa

SEQ ID NO: 1786543 - RNA, 19 nt, Artificial Sequence
  Description of Artificial Sequence: Synthetic oligonucleotide
ucuuguggcuuuucuuaga

SEQ ID NO: 1786544 - RNA, 19 nt, Artificial Sequence
  Description of Artificial Sequence: Synthetic oligonucleotide
uugaccguacgguucgcca

SEQ ID NO: 1786545 - RNA, 19 nt, Artificial Sequence
  Description of Artificial Sequence: Synthetic oligonucleotide
ucauuucacuuagacagau

SEQ ID NO: 1786546 - RNA, 19 nt, Artificial Sequence
  Description of Artificial Sequence: Synthetic oligonucleotide
uccaagucucgguagcuuc

SEQ ID NO: 1786547 - RNA, 19 nt, Artificial Sequence
  Description of Artificial Sequence: Synthetic oligonucleotide
aaccuuaauuccauggcuu

SEQ ID NO: 1786548 - RNA, 19 nt, Artificial Sequence
  Description of Artificial Sequence: Synthetic oligonucleotide
uuucacuuagacagauauu

SEQ ID NO: 1786549 - RNA, 19 nt, Artificial Sequence
  Description of Artificial Sequence: Synthetic oligonucleotide
ccaaccaaacaauaacuug

SEQ ID NO: 1786550 - RNA, 19 nt, Artificial Sequence
  Description of Artificial Sequence: Synthetic oligonucleotide
agaagggcuucuucuuuug

SEQ ID NO: 1786551 - RNA, 19 nt, Artificial Sequence
  Description of Artificial Sequence: Synthetic oligonucleotide
uagcugccuaaagagaucu

SEQ ID NO: 1786552 - RNA, 19 nt, Artificial Sequence
  Description of Artificial Sequence: Synthetic oligonucleotide
gcacauagcguuucuguag

SEQ ID NO: 1786553 - RNA, 19 nt, Artificial Sequence
  Description of Artificial Sequence: Synthetic oligonucleotide
uagagcgggaucugugucu

SEQ ID NO: 1786554 - RNA, 19 nt, Artificial Sequence
  Description of Artificial Sequence: Synthetic oligonucleotide
gacuacgguggugaccugg

SEQ ID NO: 1786555 - RNA, 19 nt, Artificial Sequence
  Description of Artificial Sequence: Synthetic oligonucleotide
cacccuucaaagauguuga

SEQ ID NO: 1786556 - RNA, 19 nt, Artificial Sequence
  Description of Artificial Sequence: Synthetic oligonucleotide
caaaaugauaucacagacu

SEQ ID NO: 1786557 - RNA, 19 nt, Artificial Sequence
  Description of Artificial Sequence: Synthetic oligonucleotide
uuguggcuuuucuuagacc

SEQ ID NO: 1786558 - RNA, 19 nt, Artificial Sequence
  Description of Artificial Sequence: Synthetic oligonucleotide
cuucaagguuaaacacagg

SEQ ID NO: 1786559 - RNA, 19 nt, Artificial Sequence
  Description of Artificial Sequence: Synthetic oligonucleotide
ugccuaaagagaucuugau

SEQ ID NO: 1786560 - RNA, 19 nt, Artificial Sequence
  Description of Artificial Sequence: Synthetic oligonucleotide
cagccucauguaaagugcc

SEQ ID NO: 1786561 - RNA, 19 nt, Artificial Sequence
  Description of Artificial Sequence: Synthetic oligonucleotide
ugggagaccgacuccgacu

SEQ ID NO: 1786562 - RNA, 19 nt, Artificial Sequence
  Description of Artificial Sequence: Synthetic oligonucleotide
ugugacuacgguggugacc

SEQ ID NO: 1786563 - RNA, 19 nt, Artificial Sequence
  Description of Artificial Sequence: Synthetic oligonucleotide
ccuuguuaaguauacauaa

SEQ ID NO: 1786564 - RNA, 19 nt, Artificial Sequence
  Description of Artificial Sequence: Synthetic oligonucleotide
uaugccuuucucggcgggg

SEQ ID NO: 1786565 - RNA, 19 nt, Artificial Sequence
  Description of Artificial Sequence: Synthetic oligonucleotide
acagauauucucauauuua

SEQ ID NO: 1786566 - RNA, 19 nt, Artificial Sequence
  Description of Artificial Sequence: Synthetic oligonucleotide
uggcccuuguuaaguauac

SEQ ID NO: 1786567 - RNA, 19 nt, Artificial Sequence
  Description of Artificial Sequence: Synthetic oligonucleotide
gacauacuugaaaucuuca

SEQ ID NO: 1786568 - RNA, 19 nt, Artificial Sequence
  Description of Artificial Sequence: Synthetic oligonucleotide
caucuacaugcaucaauuc

SEQ ID NO: 1786569 - RNA, 19 nt, Artificial Sequence
  Description of Artificial Sequence: Synthetic oligonucleotide
ucguggcuuguccaagucu

SEQ ID NO: 1786570 - RNA, 19 nt, Artificial Sequence
  Description of Artificial Sequence: Synthetic oligonucleotide
caauugcaguuccugucag

SEQ ID NO: 1786571 - RNA, 19 nt, Artificial Sequence
  Description of Artificial Sequence: Synthetic oligonucleotide
uagcaaucaauugcaguuc

SEQ ID NO: 1786572 - RNA, 19 nt, Artificial Sequence
  Description of Artificial Sequence: Synthetic oligonucleotide
ugcggacauacuugaaauc

SEQ ID NO: 1786573 - RNA, 19 nt, Artificial Sequence
  Description of Artificial Sequence: Synthetic oligonucleotide
uguuuccaccauagacacc

SEQ ID NO: 1786574 - RNA, 19 nt, Artificial Sequence
  Description of Artificial Sequence: Synthetic oligonucleotide
agcacauagcguuucugua

SEQ ID NO: 1786575 - RNA, 19 nt, Artificial Sequence
  Description of Artificial Sequence: Synthetic oligonucleotide
gguuaaacacaggaaagga

SEQ ID NO: 1786576 - RNA, 19 nt, Artificial Sequence
  Description of Artificial Sequence: Synthetic oligonucleotide
gauucgaguccgaaugauc

SEQ ID NO: 1786577 - RNA, 19 nt, Artificial Sequence
  Description of Artificial Sequence: Synthetic oligonucleotide
uacuucgccuccugggaga

SEQ ID NO: 1786578 - RNA, 19 nt, Artificial Sequence
  Description of Artificial Sequence: Synthetic oligonucleotide
auuauaauucaaagagaua

SEQ ID NO: 1786579 - RNA, 19 nt, Artificial Sequence
  Description of Artificial Sequence: Synthetic oligonucleotide
uucauagauucgaguccga

SEQ ID NO: 1786580 - RNA, 19 nt, Artificial Sequence
  Description of Artificial Sequence: Synthetic oligonucleotide
cauagcugccuaaagagau

SEQ ID NO: 1786581 - RNA, 19 nt, Artificial Sequence
  Description of Artificial Sequence: Synthetic oligonucleotide
uccaccagauacugagggu

SEQ ID NO: 1786582 - RNA, 19 nt, Artificial Sequence
  Description of Artificial Sequence: Synthetic oligonucleotide
caaagagauaacaaauuuu

SEQ ID NO: 1786583 - RNA, 19 nt, Artificial Sequence
  Description of Artificial Sequence: Synthetic oligonucleotide
ucgguucuggcucuugauu

SEQ ID NO: 1786584 - RNA, 19 nt, Artificial Sequence
  Description of Artificial Sequence: Synthetic oligonucleotide
uucucagguugaauuugaa

SEQ ID NO: 1786585 - RNA, 19 nt, Artificial Sequence
  Description of Artificial Sequence: Synthetic oligonucleotide
cuacuucgccuccugggag

SEQ ID NO: 1786586 - RNA, 19 nt, Artificial Sequence
  Description of Artificial Sequence: Synthetic oligonucleotide
ucucacugugcagaaguuc

SEQ ID NO: 1786587 - RNA, 19 nt, Artificial Sequence
  Description of Artificial Sequence: Synthetic oligonucleotide
ccaaacaauaacuugauuu

SEQ ID NO: 1786588 - RNA, 19 nt, Artificial Sequence
  Description of Artificial Sequence: Synthetic oligonucleotide
agcguagugcaggggagcg

SEQ ID NO: 1786589 - RNA, 19 nt, Artificial Sequence
  Description of Artificial Sequence: Synthetic oligonucleotide
accagauacugaggguugg

SEQ ID NO: 1786590 - RNA, 19 nt, Artificial Sequence
  Description of Artificial Sequence: Synthetic oligonucleotide
ccuaugucugugacuacgg

SEQ ID NO: 1786591 - RNA, 19 nt, Artificial Sequence
  Description of Artificial Sequence: Synthetic oligonucleotide
agacagauauucucauauu

SEQ ID NO: 1786592 - RNA, 19 nt, Artificial Sequence
  Description of Artificial Sequence: Synthetic oligonucleotide
ccaguacuuugauucauag

SEQ ID NO: 1786593 - RNA, 19 nt, Artificial Sequence
  Description of Artificial Sequence: Synthetic oligonucleotide
gaguuggcuuuauguuucc

SEQ ID NO: 1786594 - RNA, 19 nt, Artificial Sequence
  Description of Artificial Sequence: Synthetic oligonucleotide
auacauaaccauaguuggu

SEQ ID NO: 1786595 - RNA, 19 nt, Artificial Sequence
  Description of Artificial Sequence: Synthetic oligonucleotide
cacuagacuccacaucauc

SEQ ID NO: 1786596 - RNA, 19 nt, Artificial Sequence
  Description of Artificial Sequence: Synthetic oligonucleotide
acuacgguggugaccuggg

SEQ ID NO: 1786597 - RNA, 19 nt, Artificial Sequence
  Description of Artificial Sequence: Synthetic oligonucleotide
aggccaucuggacuaaaau

SEQ ID NO: 1786598 - RNA, 19 nt, Artificial Sequence
  Description of Artificial Sequence: Synthetic oligonucleotide
uccccauuucgguucuggc

SEQ ID NO: 1786599 - RNA, 19 nt, Artificial Sequence
  Description of Artificial Sequence: Synthetic oligonucleotide
cagccguaaguccaaagca

SEQ ID NO: 1786600 - RNA, 19 nt, Artificial Sequence
  Description of Artificial Sequence: Synthetic oligonucleotide
caccagauacugaggguug

SEQ ID NO: 1786601 - RNA, 19 nt, Artificial Sequence
  Description of Artificial Sequence: Synthetic oligonucleotide
auccuugaccguacgguuc

SEQ ID NO: 1786602 - RNA, 19 nt, Artificial Sequence
  Description of Artificial Sequence: Synthetic oligonucleotide
cgauagucauuguacaaag

SEQ ID NO: 1786603 - RNA, 19 nt, Artificial Sequence
  Description of Artificial Sequence: Synthetic oligonucleotide
cauacuugaaaucuucauu

SEQ ID NO: 1786604 - RNA, 19 nt, Artificial Sequence
  Description of Artificial Sequence: Synthetic oligonucleotide
acgguucgccauuuuagaa

SEQ ID NO: 1786605 - RNA, 19 nt, Artificial Sequence
  Description of Artificial Sequence: Synthetic oligonucleotide
guaaguccaaagcauuccu

SEQ ID NO: 1786606 - RNA, 19 nt, Artificial Sequence
  Description of Artificial Sequence: Synthetic oligonucleotide
agcguuucuguagccgggg

SEQ ID NO: 1786607 - RNA, 19 nt, Artificial Sequence
  Description of Artificial Sequence: Synthetic oligonucleotide
cuacaugcaucaauucaaa

SEQ ID NO: 1786608 - RNA, 19 nt, Artificial Sequence
  Description of Artificial Sequence: Synthetic oligonucleotide
ugaccguacgguucgccau

SEQ ID NO: 1786609 - RNA, 19 nt, Artificial Sequence
  Description of Artificial Sequence: Synthetic oligonucleotide
ucacuagacuccacaucau

SEQ ID NO: 1786610 - RNA, 19 nt, Artificial Sequence
  Description of Artificial Sequence: Synthetic oligonucleotide
aucuggacuaaaauauaaa

SEQ ID NO: 1786611 - RNA, 19 nt, Artificial Sequence
  Description of Artificial Sequence: Synthetic oligonucleotide
gugacuacgguggugaccu

SEQ ID NO: 1786612 - RNA, 19 nt, Artificial Sequence
  Description of Artificial Sequence: Synthetic oligonucleotide
gcugccuaaagagaucuug

SEQ ID NO: 1786613 - RNA, 19 nt, Artificial Sequence
  Description of Artificial Sequence: Synthetic oligonucleotide
cuaugccuuucucggcggg

SEQ ID NO: 1786614 - RNA, 19 nt, Artificial Sequence
  Description of Artificial Sequence: Synthetic oligonucleotide
guagcguagugcaggggag

SEQ ID NO: 1786615 - RNA, 19 nt, Artificial Sequence
  Description of Artificial Sequence: Synthetic oligonucleotide
ggggcaaaaugauaucaca

SEQ ID NO: 1786616 - RNA, 19 nt, Artificial Sequence
  Description of Artificial Sequence: Synthetic oligonucleotide
ucgauggcgucguggacuc

SEQ ID NO: 1786617 - RNA, 19 nt, Artificial Sequence
  Description of Artificial Sequence: Synthetic oligonucleotide
cagacucucucacugugca

SEQ ID NO: 1786618 - RNA, 19 nt, Artificial Sequence
  Description of Artificial Sequence: Synthetic oligonucleotide
aguccaaagcauuccucuu

SEQ ID NO: 1786619 - RNA, 19 nt, Artificial Sequence
  Description of Artificial Sequence: Synthetic oligonucleotide
ugucugugacuacgguggu

SEQ ID NO: 1786620 - RNA, 19 nt, Artificial Sequence
  Description of Artificial Sequence: Synthetic oligonucleotide
cuguagccggggcaaaaug

SEQ ID NO: 1786621 - RNA, 19 nt, Artificial Sequence
  Description of Artificial Sequence: Synthetic oligonucleotide
gccuaaagagaucuugauc

SEQ ID NO: 1786622 - RNA, 19 nt, Artificial Sequence
  Description of Artificial Sequence: Synthetic oligonucleotide
gacuccuccuguagcguag

SEQ ID NO: 1786623 - RNA, 19 nt, Artificial Sequence
  Description of Artificial Sequence: Synthetic oligonucleotide
cagauacugaggguuggug

SEQ ID NO: 1786624 - RNA, 19 nt, Artificial Sequence
  Description of Artificial Sequence: Synthetic oligonucleotide
uggggauuuagagcgggau

SEQ ID NO: 1786625 - RNA, 19 nt, Artificial Sequence
  Description of Artificial Sequence: Synthetic oligonucleotide
caguacuuugauucauaga

SEQ ID NO: 1786626 - RNA, 19 nt, Artificial Sequence
  Description of Artificial Sequence: Synthetic oligonucleotide
uguccaagucucgguagcu

SEQ ID NO: 1786627 - RNA, 19 nt, Artificial Sequence
  Description of Artificial Sequence: Synthetic oligonucleotide
cauauuuacaggaggccau

SEQ ID NO: 1786628 - RNA, 19 nt, Artificial Sequence
  Description of Artificial Sequence: Synthetic oligonucleotide
auacucauagcugccuaaa

SEQ ID NO: 1786629 - RNA, 19 nt, Artificial Sequence
  Description of Artificial Sequence: Synthetic oligonucleotide
ugucgacuacaaguucagc

SEQ ID NO: 1786630 - RNA, 19 nt, Artificial Sequence
  Description of Artificial Sequence: Synthetic oligonucleotide
agccggggcaaaaugauau

SEQ ID NO: 1786631 - RNA, 19 nt, Artificial Sequence
  Description of Artificial Sequence: Synthetic oligonucleotide
ugccuuucucggcggggag

SEQ ID NO: 1786632 - RNA, 19 nt, Artificial Sequence
  Description of Artificial Sequence: Synthetic oligonucleotide
acuucgccuccugggagac

SEQ ID NO: 1786633 - RNA, 19 nt, Artificial Sequence
  Description of Artificial Sequence: Synthetic oligonucleotide
cuccgacuccuccuguagc

SEQ ID NO: 1786634 - RNA, 19 nt, Artificial Sequence
  Description of Artificial Sequence: Synthetic oligonucleotide
acuacaaguucagccguaa

SEQ ID NO: 1786635 - RNA, 19 nt, Artificial Sequence
  Description of Artificial Sequence: Synthetic oligonucleotide
gaccgacuccgacuccucc

SEQ ID NO: 1786636 - RNA, 19 nt, Artificial Sequence
  Description of Artificial Sequence: Synthetic oligonucleotide
cuuagacagauauucucau

SEQ ID NO: 1786637 - RNA, 19 nt, Artificial Sequence
  Description of Artificial Sequence: Synthetic oligonucleotide
cuccccauuucgguucugg

SEQ ID NO: 1786638 - RNA, 19 nt, Artificial Sequence
  Description of Artificial Sequence: Synthetic oligonucleotide
ucuguagccggggcaaaau

SEQ ID NO: 1786639 - RNA, 19 nt, Artificial Sequence
  Description of Artificial Sequence: Synthetic oligonucleotide
uagcguagugcaggggagc

SEQ ID NO: 1786640 - RNA, 19 nt, Artificial Sequence
  Description of Artificial Sequence: Synthetic oligonucleotide
ggacauacuugaaaucuuc

SEQ ID NO: 1786641 - RNA, 19 nt, Artificial Sequence
  Description of Artificial Sequence: Synthetic oligonucleotide
agauucgaguccgaaugau

SEQ ID NO: 1786642 - RNA, 19 nt, Artificial Sequence
  Description of Artificial Sequence: Synthetic oligonucleotide
gugacuccuaugucuguga

SEQ ID NO: 1786643 - RNA, 19 nt, Artificial Sequence
  Description of Artificial Sequence: Synthetic oligonucleotide
uucgaguccgaaugaucuu

SEQ ID NO: 1786644 - RNA, 19 nt, Artificial Sequence
  Description of Artificial Sequence: Synthetic oligonucleotide
ccccaaauacucauagcug

SEQ ID NO: 1786645 - RNA, 19 nt, Artificial Sequence
  Description of Artificial Sequence: Synthetic oligonucleotide
cuugaccguacgguucgcc

SEQ ID NO: 1786646 - RNA, 19 nt, Artificial Sequence
  Description of Artificial Sequence: Synthetic oligonucleotide
ccuguagcguagugcaggg

SEQ ID NO: 1786647 - RNA, 19 nt, Artificial Sequence
  Description of Artificial Sequence: Synthetic oligonucleotide
cccacaaaccuuaauucca

SEQ ID NO: 1786648 - RNA, 19 nt, Artificial Sequence
  Description of Artificial Sequence: Synthetic oligonucleotide
cuugaucauuucacuuaga

SEQ ID NO: 1786649 - RNA, 19 nt, Artificial Sequence
  Description of Artificial Sequence: Synthetic oligonucleotide
ggacuaaaauauaaaucaa

SEQ ID NO: 1786650 - RNA, 19 nt, Artificial Sequence
  Description of Artificial Sequence: Synthetic oligonucleotide
augauaucacagacucucu

SEQ ID NO: 1786651 - RNA, 19 nt, Artificial Sequence
  Description of Artificial Sequence: Synthetic oligonucleotide
cauuccucuuuccaguacu

SEQ ID NO: 1786652 - RNA, 19 nt, Artificial Sequence
  Description of Artificial Sequence: Synthetic oligonucleotide
agugcaggggagcgucgug

SEQ ID NO: 1786653 - RNA, 19 nt, Artificial Sequence
  Description of Artificial Sequence: Synthetic oligonucleotide
ggagcgucguggcuugucc

SEQ ID NO: 1786654 - RNA, 19 nt, Artificial Sequence
  Description of Artificial Sequence: Synthetic oligonucleotide
cuacgguggugaccugggg

SEQ ID NO: 1786655 - RNA, 19 nt, Artificial Sequence
  Description of Artificial Sequence: Synthetic oligonucleotide
uccggcucuucuuguggcu

SEQ ID NO: 1786656 - RNA, 19 nt, Artificial Sequence
  Description of Artificial Sequence: Synthetic oligonucleotide
cuaacucgaggcuccagcu

SEQ ID NO: 1786657 - RNA, 19 nt, Artificial Sequence
  Description of Artificial Sequence: Synthetic oligonucleotide
ccuccuguagcguagugca

SEQ ID NO: 1786658 - RNA, 19 nt, Artificial Sequence
  Description of Artificial Sequence: Synthetic oligonucleotide
gcagaaguucaucaaugaa

SEQ ID NO: 1786659 - RNA, 19 nt, Artificial Sequence
  Description of Artificial Sequence: Synthetic oligonucleotide
ggugaucaggugauggcac

SEQ ID NO: 1786660 - RNA, 19 nt, Artificial Sequence
  Description of Artificial Sequence: Synthetic oligonucleotide
gggagaccgacuccgacuc

SEQ ID NO: 1786661 - RNA, 19 nt, Artificial Sequence
  Description of Artificial Sequence: Synthetic oligonucleotide
gcuucgauggcgucgugga

SEQ ID NO: 1786662 - RNA, 19 nt, Artificial Sequence
  Description of Artificial Sequence: Synthetic oligonucleotide
ggccaucuggacuaaaaua

SEQ ID NO: 1786663 - RNA, 19 nt, Artificial Sequence
  Description of Artificial Sequence: Synthetic oligonucleotide
acaaagguuccaaguacuu

SEQ ID NO: 1786664 - RNA, 19 nt, Artificial Sequence
  Description of Artificial Sequence: Synthetic oligonucleotide
cuccuguagcguagugcag

SEQ ID NO: 1786665 - RNA, 19 nt, Artificial Sequence
  Description of Artificial Sequence: Synthetic oligonucleotide
gaguccgaaugaucuucuc

SEQ ID NO: 1786666 - RNA, 19 nt, Artificial Sequence
  Description of Artificial Sequence: Synthetic oligonucleotide
agcgucguggcuuguccaa

SEQ ID NO: 1786667 - RNA, 19 nt, Artificial Sequence
  Description of Artificial Sequence: Synthetic oligonucleotide
uagccggggcaaaaugaua

SEQ ID NO: 1786668 - RNA, 19 nt, Artificial Sequence
  Description of Artificial Sequence: Synthetic oligonucleotide
uggcgucguggacucuugc

SEQ ID NO: 1786669 - RNA, 19 nt, Artificial Sequence
  Description of Artificial Sequence: Synthetic oligonucleotide
cugggagaccgacuccgac

SEQ ID NO: 1786670 - RNA, 19 nt, Artificial Sequence
  Description of Artificial Sequence: Synthetic oligonucleotide
gacuuugagugacuccuau

SEQ ID NO: 1786671 - RNA, 19 nt, Artificial Sequence
  Description of Artificial Sequence: Synthetic oligonucleotide
aggggagcgucguggcuug

SEQ ID NO: 1786672 - RNA, 19 nt, Artificial Sequence
  Description of Artificial Sequence: Synthetic oligonucleotide
uuagaccuuucaggagacu

SEQ ID NO: 1786673 - RNA, 19 nt, Artificial Sequence
  Description of Artificial Sequence: Synthetic oligonucleotide
gccucauguaaagugcccc

SEQ ID NO: 1786674 - RNA, 19 nt, Artificial Sequence
  Description of Artificial Sequence: Synthetic oligonucleotide
uggugaccuggggauuuag

SEQ ID NO: 1786675 - RNA, 19 nt, Artificial Sequence
  Description of Artificial Sequence: Synthetic oligonucleotide
cuucgauggcgucguggac

SEQ ID NO: 1786676 - RNA, 19 nt, Artificial Sequence
  Description of Artificial Sequence: Synthetic oligonucleotide
gacuccuaugucugugacu

SEQ ID NO: 1786677 - RNA, 19 nt, Artificial Sequence
  Description of Artificial Sequence: Synthetic oligonucleotide
cuaaagagaucuugaucau

SEQ ID NO: 1786678 - RNA, 19 nt, Artificial Sequence
  Description of Artificial Sequence: Synthetic oligonucleotide
cagcacauagcguuucugu

SEQ ID NO: 1786679 - RNA, 19 nt, Artificial Sequence
  Description of Artificial Sequence: Synthetic oligonucleotide
aucaggugauggcacucuu

SEQ ID NO: 1786680 - RNA, 19 nt, Artificial Sequence
  Description of Artificial Sequence: Synthetic oligonucleotide
gccaucuggacuaaaauau

SEQ ID NO: 1786681 - RNA, 19 nt, Artificial Sequence
  Description of Artificial Sequence: Synthetic oligonucleotide
auuucgguucuggcucuug

SEQ ID NO: 1786682 - RNA, 19 nt, Artificial Sequence
  Description of Artificial Sequence: Synthetic oligonucleotide
aguuggcuuuauguuucca

SEQ ID NO: 1786683 - RNA, 19 nt, Artificial Sequence
  Description of Artificial Sequence: Synthetic oligonucleotide
acaccacccacaaaccuua

SEQ ID NO: 1786684 - RNA, 19 nt, Artificial Sequence
  Description of Artificial Sequence: Synthetic oligonucleotide
ucucgggaccugcuucgau

SEQ ID NO: 1786685 - RNA, 19 nt, Artificial Sequence
  Description of Artificial Sequence: Synthetic oligonucleotide
gagcgucguggcuugucca

SEQ ID NO: 1786686 - RNA, 19 nt, Artificial Sequence
  Description of Artificial Sequence: Synthetic oligonucleotide
ccguaaguccaaagcauuc

SEQ ID NO: 1786687 - RNA, 19 nt, Artificial Sequence
  Description of Artificial Sequence: Synthetic oligonucleotide
ccuaugccuuucucggcgg

SEQ ID NO: 1786688 - RNA, 19 nt, Artificial Sequence
  Description of Artificial Sequence: Synthetic oligonucleotide
gucguggcuuguccaaguc

SEQ ID NO: 1786689 - RNA, 19 nt, Artificial Sequence
  Description of Artificial Sequence: Synthetic oligonucleotide
caauucaaacuccccauuu

SEQ ID NO: 1786690 - RNA, 19 nt, Artificial Sequence
  Description of Artificial Sequence: Synthetic oligonucleotide
uagugcaggggagcgucgu

SEQ ID NO: 1786691 - RNA, 19 nt, Artificial Sequence
  Description of Artificial Sequence: Synthetic oligonucleotide
acccuucaaagauguugau

SEQ ID NO: 1786692 - RNA, 19 nt, Artificial Sequence
  Description of Artificial Sequence: Synthetic oligonucleotide
ccaaagcauuccucuuucc

SEQ ID NO: 1786693 - RNA, 19 nt, Artificial Sequence
  Description of Artificial Sequence: Synthetic oligonucleotide
ucggcggggagaagggcuu

SEQ ID NO: 1786694 - RNA, 19 nt, Artificial Sequence
  Description of Artificial Sequence: Synthetic oligonucleotide
cuguagcguagugcagggg

SEQ ID NO: 1786695 - RNA, 19 nt, Artificial Sequence
  Description of Artificial Sequence: Synthetic oligonucleotide
cauuucacuuagacagaua

SEQ ID NO: 1786696 - RNA, 19 nt, Artificial Sequence
  Description of Artificial Sequence: Synthetic oligonucleotide
gguugaauuugaagcaucu

SEQ ID NO: 1786697 - RNA, 19 nt, Artificial Sequence
  Description of Artificial Sequence: Synthetic oligonucleotide
caggaaaggaguuggcuuu

SEQ ID NO: 1786698 - RNA, 19 nt, Artificial Sequence
  Description of Artificial Sequence: Synthetic oligonucleotide
gcggacauacuugaaaucu

SEQ ID NO: 1786699 - RNA, 19 nt, Artificial Sequence
  Description of Artificial Sequence: Synthetic oligonucleotide
caaauacucauagcugccu

SEQ ID NO: 1786700 - RNA, 19 nt, Artificial Sequence
  Description of Artificial Sequence: Synthetic oligonucleotide
cugugacuacgguggugac

SEQ ID NO: 1786701 - RNA, 19 nt, Artificial Sequence
  Description of Artificial Sequence: Synthetic oligonucleotide
ucucggcggggagaagggc

SEQ ID NO: 1786702 - RNA, 19 nt, Artificial Sequence
  Description of Artificial Sequence: Synthetic oligonucleotide
gcccuuguuaaguauacau

SEQ ID NO: 1786703 - RNA, 19 nt, Artificial Sequence
  Description of Artificial Sequence: Synthetic oligonucleotide
gcgucguggacucuugcuc

SEQ ID NO: 1786704 - RNA, 19 nt, Artificial Sequence
  Description of Artificial Sequence: Synthetic oligonucleotide
ugugggcauccuugaccgu

SEQ ID NO: 1786705 - RNA, 19 nt, Artificial Sequence
  Description of Artificial Sequence: Synthetic oligonucleotide
agagcgggaucugugucuu

SEQ ID NO: 1786706 - RNA, 19 nt, Artificial Sequence
  Description of Artificial Sequence: Synthetic oligonucleotide
cuccuaugucugugacuac

SEQ ID NO: 1786707 - RNA, 19 nt, Artificial Sequence
  Description of Artificial Sequence: Synthetic oligonucleotide
gugaucaggugauggcacu

SEQ ID NO: 1786708 - RNA, 19 nt, Artificial Sequence
  Description of Artificial Sequence: Synthetic oligonucleotide
ccuggggauuuagagcggg

SEQ ID NO: 1786709 - RNA, 19 nt, Artificial Sequence
  Description of Artificial Sequence: Synthetic oligonucleotide
caaacuccccauuucgguu

SEQ ID NO: 1786710 - RNA, 19 nt, Artificial Sequence
  Description of Artificial Sequence: Synthetic oligonucleotide
gagaccgacuccgacuccu

SEQ ID NO: 1786711 - RNA, 19 nt, Artificial Sequence
  Description of Artificial Sequence: Synthetic oligonucleotide
gacuacaaguucagccgua

SEQ ID NO: 1786712 - RNA, 19 nt, Artificial Sequence
  Description of Artificial Sequence: Synthetic oligonucleotide
gcauuccucuuuccaguac

SEQ ID NO: 1786713 - RNA, 19 nt, Artificial Sequence
  Description of Artificial Sequence: Synthetic oligonucleotide
accuggggauuuagagcgg

SEQ ID NO: 1786714 - RNA, 19 nt, Artificial Sequence
  Description of Artificial Sequence: Synthetic oligonucleotide
cacuaacucgaggcuccag

SEQ ID NO: 1786715 - RNA, 19 nt, Artificial Sequence
  Description of Artificial Sequence: Synthetic oligonucleotide
cccuuguuaaguauacaua

SEQ ID NO: 1786716 - RNA, 19 nt, Artificial Sequence
  Description of Artificial Sequence: Synthetic oligonucleotide
cggggcaaaaugauaucac

SEQ ID NO: 1786717 - RNA, 19 nt, Artificial Sequence
  Description of Artificial Sequence: Synthetic oligonucleotide
cuaugucugugacuacggu

SEQ ID NO: 1786718 - RNA, 19 nt, Artificial Sequence
  Description of Artificial Sequence: Synthetic oligonucleotide
ccugucagccucauguaaa

SEQ ID NO: 1786719 - RNA, 19 nt, Artificial Sequence
  Description of Artificial Sequence: Synthetic oligonucleotide
ccucuuggcccuuguuaag

SEQ ID NO: 1786720 - RNA, 19 nt, Artificial Sequence
  Description of Artificial Sequence: Synthetic oligonucleotide
cuucggugaucaggugaug

SEQ ID NO: 1786721 - RNA, 19 nt, Artificial Sequence
  Description of Artificial Sequence: Synthetic oligonucleotide
cuccuccuguagcguagug

SEQ ID NO: 1786722 - RNA, 19 nt, Artificial Sequence
  Description of Artificial Sequence: Synthetic oligonucleotide
cauccuugaccguacgguu

SEQ ID NO: 1786723 - RNA, 19 nt, Artificial Sequence
  Description of Artificial Sequence: Synthetic oligonucleotide
gagugacuccuaugucugu

SEQ ID NO: 1786724 - RNA, 19 nt, Artificial Sequence
  Description of Artificial Sequence: Synthetic oligonucleotide
accuuucaggagacuuuga

SEQ ID NO: 1786725 - RNA, 19 nt, Artificial Sequence
  Description of Artificial Sequence: Synthetic oligonucleotide
cuugcuccuaugccuuucu

SEQ ID NO: 1786726 - RNA, 19 nt, Artificial Sequence
  Description of Artificial Sequence: Synthetic oligonucleotide
cuuggcccuuguuaaguau

SEQ ID NO: 1786727 - RNA, 19 nt, Artificial Sequence
  Description of Artificial Sequence: Synthetic oligonucleotide
cucggcggggagaagggcu

SEQ ID NO: 1786728 - RNA, 19 nt, Artificial Sequence
  Description of Artificial Sequence: Synthetic oligonucleotide
aacacccuucaaagauguu

SEQ ID NO: 1786729 - RNA, 19 nt, Artificial Sequence
  Description of Artificial Sequence: Synthetic oligonucleotide
guagccggggcaaaaugau

SEQ ID NO: 1786730 - RNA, 19 nt, Artificial Sequence
  Description of Artificial Sequence: Synthetic oligonucleotide
gcguuucuguagccggggc

SEQ ID NO: 1786731 - RNA, 19 nt, Artificial Sequence
  Description of Artificial Sequence: Synthetic oligonucleotide
cucuuggcccuuguuaagu

SEQ ID NO: 1786732 - RNA, 19 nt, Artificial Sequence
  Description of Artificial Sequence: Synthetic oligonucleotide
gaccugcuucgauggcguc

SEQ ID NO: 1786733 - RNA, 19 nt, Artificial Sequence
  Description of Artificial Sequence: Synthetic oligonucleotide
gauggcgucguggacucuu

SEQ ID NO: 1786734 - RNA, 19 nt, Artificial Sequence
  Description of Artificial Sequence: Synthetic oligonucleotide
gcuuugucgacuacaaguu

SEQ ID NO: 1786735 - RNA, 19 nt, Artificial Sequence
  Description of Artificial Sequence: Synthetic oligonucleotide
auggcgucguggacucuug

SEQ ID NO: 1786736 - RNA, 19 nt, Artificial Sequence
  Description of Artificial Sequence: Synthetic oligonucleotide
ccaacaugcggacauacuu

SEQ ID NO: 1786737 - RNA, 19 nt, Artificial Sequence
  Description of Artificial Sequence: Synthetic oligonucleotide
cucgaggcuccagcuguuc

SEQ ID NO: 1786738 - RNA, 19 nt, Artificial Sequence
  Description of Artificial Sequence: Synthetic oligonucleotide
ccaucuggacuaaaauaua

SEQ ID NO: 1786739 - RNA, 19 nt, Artificial Sequence
  Description of Artificial Sequence: Synthetic oligonucleotide
cuuucucggcggggagaag

SEQ ID NO: 1786740 - RNA, 19 nt, Artificial Sequence
  Description of Artificial Sequence: Synthetic oligonucleotide
ggagaccgacuccgacucc

SEQ ID NO: 1786741 - RNA, 19 nt, Artificial Sequence
  Description of Artificial Sequence: Synthetic oligonucleotide
ccggggcaaaaugauauca

SEQ ID NO: 1786742 - RNA, 19 nt, Artificial Sequence
  Description of Artificial Sequence: Synthetic oligonucleotide
cguagugcaggggagcguc

SEQ ID NO: 1786743 - RNA, 19 nt, Artificial Sequence
  Description of Artificial Sequence: Synthetic oligonucleotide
gaccguacgguucgccauu

SEQ ID NO: 1786744 - RNA, 19 nt, Artificial Sequence
  Description of Artificial Sequence: Synthetic oligonucleotide
gccggggcaaaaugauauc

SEQ ID NO: 1786745 - RNA, 19 nt, Artificial Sequence
  Description of Artificial Sequence: Synthetic oligonucleotide
gagcgggaucugugucuuc

SEQ ID NO: 1786746 - RNA, 19 nt, Artificial Sequence
  Description of Artificial Sequence: Synthetic oligonucleotide
ucgccuccugggagaccga

SEQ ID NO: 1786747 - RNA, 19 nt, Artificial Sequence
  Description of Artificial Sequence: Synthetic oligonucleotide
ggcgucguggacucuugcu

SEQ ID NO: 1786748 - RNA, 19 nt, Artificial Sequence
  Description of Artificial Sequence: Synthetic oligonucleotide
ccccaacaugcggacauac

SEQ ID NO: 1786749 - RNA, 19 nt, Artificial Sequence
  Description of Artificial Sequence: Synthetic oligonucleotide
caggagacuuugagugacu

SEQ ID NO: 1786750 - RNA, 19 nt, Artificial Sequence
  Description of Artificial Sequence: Synthetic oligonucleotide
cagcucugucauguuaaua

SEQ ID NO: 1786751 - RNA, 19 nt, Artificial Sequence
  Description of Artificial Sequence: Synthetic oligonucleotide
accguacgguucgccauuu

SEQ ID NO: 1786752 - RNA, 19 nt, Artificial Sequence
  Description of Artificial Sequence: Synthetic oligonucleotide
gcgucguggcuuguccaag

SEQ ID NO: 1786753 - RNA, 19 nt, Artificial Sequence
  Description of Artificial Sequence: Synthetic oligonucleotide
cucucacugugcagaaguu

SEQ ID NO: 1786754 - RNA, 19 nt, Artificial Sequence
  Description of Artificial Sequence: Synthetic oligonucleotide
ggcccuuguuaaguauaca

SEQ ID NO: 1786755 - RNA, 19 nt, Artificial Sequence
  Description of Artificial Sequence: Synthetic oligonucleotide
cguacgguucgccauuuua

SEQ ID NO: 1786756 - RNA, 19 nt, Artificial Sequence
  Description of Artificial Sequence: Synthetic oligonucleotide
gcaaucaauugcaguuccu

SEQ ID NO: 1786757 - RNA, 19 nt, Artificial Sequence
  Description of Artificial Sequence: Synthetic oligonucleotide
agcugccuaaagagaucuu

SEQ ID NO: 1786758 - RNA, 19 nt, Artificial Sequence
  Description of Artificial Sequence: Synthetic oligonucleotide
ggaccugcuucgauggcgu

SEQ ID NO: 1786759 - RNA, 19 nt, Artificial Sequence
  Description of Artificial Sequence: Synthetic oligonucleotide
gcaguuccugucagccuca

SEQ ID NO: 1786760 - RNA, 19 nt, Artificial Sequence
  Description of Artificial Sequence: Synthetic oligonucleotide
cugcuucgauggcgucgug

SEQ ID NO: 1786761 - RNA, 19 nt, Artificial Sequence
  Description of Artificial Sequence: Synthetic oligonucleotide
aggaggccaucuggacuaa

SEQ ID NO: 1786762 - RNA, 19 nt, Artificial Sequence
  Description of Artificial Sequence: Synthetic oligonucleotide
acucgaggcuccagcuguu

SEQ ID NO: 1786763 - RNA, 19 nt, Artificial Sequence
  Description of Artificial Sequence: Synthetic oligonucleotide
cggugaucaggugauggca

SEQ ID NO: 1786764 - RNA, 19 nt, Artificial Sequence
  Description of Artificial Sequence: Synthetic oligonucleotide
ccaccagauacugaggguu

SEQ ID NO: 1786765 - RNA, 19 nt, Artificial Sequence
  Description of Artificial Sequence: Synthetic oligonucleotide
caggggagcgucguggcuu

SEQ ID NO: 1786766 - RNA, 19 nt, Artificial Sequence
  Description of Artificial Sequence: Synthetic oligonucleotide
gggagcgucguggcuuguc

SEQ ID NO: 1786767 - RNA, 19 nt, Artificial Sequence
  Description of Artificial Sequence: Synthetic oligonucleotide
cggggagaagggcuucuuc

SEQ ID NO: 1786768 - RNA, 19 nt, Artificial Sequence
  Description of Artificial Sequence: Synthetic oligonucleotide
gguggugaccuggggauuu

SEQ ID NO: 1786769 - RNA, 19 nt, Artificial Sequence
  Description of Artificial Sequence: Synthetic oligonucleotide
guggugaccuggggauuua

SEQ ID NO: 1786770 - RNA, 19 nt, Artificial Sequence
  Description of Artificial Sequence: Synthetic oligonucleotide
ccugggagaccgacuccga

SEQ ID NO: 1786771 - RNA, 19 nt, Artificial Sequence
  Description of Artificial Sequence: Synthetic oligonucleotide
gcacuaacucgaggcucca

SEQ ID NO: 1786772 - RNA, 19 nt, Artificial Sequence
  Description of Artificial Sequence: Synthetic oligonucleotide
ccuugaccguacgguucgc

SEQ ID NO: 1786773 - RNA, 19 nt, Artificial Sequence
  Description of Artificial Sequence: Synthetic oligonucleotide
ccugcuucgauggcgucgu

SEQ ID NO: 1786774 - RNA, 19 nt, Artificial Sequence
  Description of Artificial Sequence: Synthetic oligonucleotide
cgacuacaaguucagccgu

SEQ ID NO: 1786775 - RNA, 19 nt, Artificial Sequence
  Description of Artificial Sequence: Synthetic oligonucleotide
cgaguccgaaugaucuucu

SEQ ID NO: 1786776 - RNA, 19 nt, Artificial Sequence
  Description of Artificial Sequence: Synthetic oligonucleotide
ccagauacugaggguuggu

SEQ ID NO: 1786777 - RNA, 19 nt, Artificial Sequence
  Description of Artificial Sequence: Synthetic oligonucleotide
cauuucgguucuggcucuu

SEQ ID NO: 1786778 - RNA, 19 nt, Artificial Sequence
  Description of Artificial Sequence: Synthetic oligonucleotide
cgucguggcuuguccaagu

SEQ ID NO: 1786779 - RNA, 19 nt, Artificial Sequence
  Description of Artificial Sequence: Synthetic oligonucleotide
gcguagugcaggggagcgu

SEQ ID NO: 1786780 - RNA, 19 nt, Artificial Sequence
  Description of Artificial Sequence: Synthetic oligonucleotide
cguggacucuugcuccuau

SEQ ID NO: 1786781 - RNA, 19 nt, Artificial Sequence
  Description of Artificial Sequence: Synthetic oligonucleotide
ccgacuccuccuguagcgu

SEQ ID NO: 1786782 - RNA, 19 nt, Artificial Sequence
  Description of Artificial Sequence: Synthetic oligonucleotide
gcggggagaagggcuucuu

SEQ ID NO: 1786783 - RNA, 19 nt, Artificial Sequence
  Description of Artificial Sequence: Synthetic oligonucleotide
ggggagcgucguggcuugu

SEQ ID NO: 1786784 - RNA, 19 nt, Artificial Sequence
  Description of Artificial Sequence: Synthetic oligonucleotide
ccguacgguucgccauuuu

SEQ ID NO: 1786785 - RNA, 19 nt, Artificial Sequence
  Description of Artificial Sequence: Synthetic oligonucleotide
cgguggugaccuggggauu

SEQ ID NO: 1786786 - RNA, 19 nt, Artificial Sequence
  Description of Artificial Sequence: Synthetic oligonucleotide
cgauggcgucguggacucu

SEQ ID NO: 1786787 - RNA, 19 nt, Artificial Sequence
  Description of Artificial Sequence: Synthetic oligonucleotide
auaaaugucuuucagacuc

SEQ ID NO: 1786788 - RNA, 19 nt, Artificial Sequence
  Description of Artificial Sequence: Synthetic oligonucleotide
aaugcuucgcaccagcugc

SEQ ID NO: 1786789 - RNA, 19 nt, Artificial Sequence
  Description of Artificial Sequence: Synthetic oligonucleotide
aauuguugauuauagccac

SEQ ID NO: 1786790 - RNA, 19 nt, Artificial Sequence
  Description of Artificial Sequence: Synthetic oligonucleotide
uauauuaccauuuugcaaa

SEQ ID NO: 1786791 - RNA, 19 nt, Artificial Sequence
  Description of Artificial Sequence: Synthetic oligonucleotide
guagcauuuacugagagcg

SEQ ID NO: 1786792 - RNA, 19 nt, Artificial Sequence
  Description of Artificial Sequence: Synthetic oligonucleotide
uauggaaauuuccugaugc

SEQ ID NO: 1786793 - RNA, 19 nt, Artificial Sequence
  Description of Artificial Sequence: Synthetic oligonucleotide
aggguucucauucacaagc

SEQ ID NO: 1786794 - RNA, 19 nt, Artificial Sequence
  Description of Artificial Sequence: Synthetic oligonucleotide
uuagaguugacaucgagcu

SEQ ID NO: 1786795 - RNA, 19 nt, Artificial Sequence
  Description of Artificial Sequence: Synthetic oligonucleotide
auaacaguguuccagcuuc

SEQ ID NO: 1786796 - RNA, 19 nt, Artificial Sequence
  Description of Artificial Sequence: Synthetic oligonucleotide
uuaugugcgaaccagugug

SEQ ID NO: 1786797 - RNA, 19 nt, Artificial Sequence
  Description of Artificial Sequence: Synthetic oligonucleotide
ugucuuuauugccagaaag

SEQ ID NO: 1786798 - RNA, 19 nt, Artificial Sequence
  Description of Artificial Sequence: Synthetic oligonucleotide
ugugguaaugauuuugugc

SEQ ID NO: 1786799 - RNA, 19 nt, Artificial Sequence
  Description of Artificial Sequence: Synthetic oligonucleotide
agagaacgcaguuggaucc

SEQ ID NO: 1786800 - RNA, 19 nt, Artificial Sequence
  Description of Artificial Sequence: Synthetic oligonucleotide
auguagugcauuuucauag

SEQ ID NO: 1786801 - RNA, 19 nt, Artificial Sequence
  Description of Artificial Sequence: Synthetic oligonucleotide
aauccagucucucucgagg

SEQ ID NO: 1786802 - RNA, 19 nt, Artificial Sequence
  Description of Artificial Sequence: Synthetic oligonucleotide
agaaauuguugauuauagc

SEQ ID NO: 1786803 - RNA, 19 nt, Artificial Sequence
  Description of Artificial Sequence: Synthetic oligonucleotide
aaaccgaacaucuuuuacu

SEQ ID NO: 1786804 - RNA, 19 nt, Artificial Sequence
  Description of Artificial Sequence: Synthetic oligonucleotide
uguguauccaugcucaugu

SEQ ID NO: 1786805 - RNA, 19 nt, Artificial Sequence
  Description of Artificial Sequence: Synthetic oligonucleotide
uucuuacuagauaacagug

SEQ ID NO: 1786806 - RNA, 19 nt, Artificial Sequence
  Description of Artificial Sequence: Synthetic oligonucleotide
ucauucacaagcaucacaa

SEQ ID NO: 1786807 - RNA, 19 nt, Artificial Sequence
  Description of Artificial Sequence: Synthetic oligonucleotide
agugcauuuucauagccag

SEQ ID NO: 1786808 - RNA, 19 nt, Artificial Sequence
  Description of Artificial Sequence: Synthetic oligonucleotide
acaacauccgucucugcgc

SEQ ID NO: 1786809 - RNA, 19 nt, Artificial Sequence
  Description of Artificial Sequence: Synthetic oligonucleotide
guacagagaacgcaguugg

SEQ ID NO: 1786810 - RNA, 19 nt, Artificial Sequence
  Description of Artificial Sequence: Synthetic oligonucleotide
acaguugacaugaacauuc

SEQ ID NO: 1786811 - RNA, 19 nt, Artificial Sequence
  Description of Artificial Sequence: Synthetic oligonucleotide
uuuacuugcucccuuuucu

SEQ ID NO: 1786812 - RNA, 19 nt, Artificial Sequence
  Description of Artificial Sequence: Synthetic oligonucleotide
ucuuuauugccagaaagug

SEQ ID NO: 1786813 - RNA, 19 nt, Artificial Sequence
  Description of Artificial Sequence: Synthetic oligonucleotide
ugauuauagccacacaauc

SEQ ID NO: 1786814 - RNA, 19 nt, Artificial Sequence
  Description of Artificial Sequence: Synthetic oligonucleotide
acgcaguuggauccgaucc

SEQ ID NO: 1786815 - RNA, 19 nt, Artificial Sequence
  Description of Artificial Sequence: Synthetic oligonucleotide
cauucuuacuagauaacag

SEQ ID NO: 1786816 - RNA, 19 nt, Artificial Sequence
  Description of Artificial Sequence: Synthetic oligonucleotide
gugguaaugauuuugugca

SEQ ID NO: 1786817 - RNA, 19 nt, Artificial Sequence
  Description of Artificial Sequence: Synthetic oligonucleotide
auuauagccacacaaucau

SEQ ID NO: 1786818 - RNA, 19 nt, Artificial Sequence
  Description of Artificial Sequence: Synthetic oligonucleotide
gaaagugcagcaaacauga

SEQ ID NO: 1786819 - RNA, 19 nt, Artificial Sequence
  Description of Artificial Sequence: Synthetic oligonucleotide
uuuugaucaggguauccag

SEQ ID NO: 1786820 - RNA, 19 nt, Artificial Sequence
  Description of Artificial Sequence: Synthetic oligonucleotide
ugcugcaugcauuaaagga

SEQ ID NO: 1786821 - RNA, 19 nt, Artificial Sequence
  Description of Artificial Sequence: Synthetic oligonucleotide
ucuuaugugcgaaccagug

SEQ ID NO: 1786822 - RNA, 19 nt, Artificial Sequence
  Description of Artificial Sequence: Synthetic oligonucleotide
ucuuacuagauaacagugu

SEQ ID NO: 1786823 - RNA, 19 nt, Artificial Sequence
  Description of Artificial Sequence: Synthetic oligonucleotide
guugauuauagccacacaa

SEQ ID NO: 1786824 - RNA, 19 nt, Artificial Sequence
  Description of Artificial Sequence: Synthetic oligonucleotide
aauccaucaccuuguagca

SEQ ID NO: 1786825 - RNA, 19 nt, Artificial Sequence
  Description of Artificial Sequence: Synthetic oligonucleotide
cauuucugaaagaugcagc

SEQ ID NO: 1786826 - RNA, 19 nt, Artificial Sequence
  Description of Artificial Sequence: Synthetic oligonucleotide
agcauuuacugagagcggc

SEQ ID NO: 1786827 - RNA, 19 nt, Artificial Sequence
  Description of Artificial Sequence: Synthetic oligonucleotide
auauauuaccauuuugcaa

SEQ ID NO: 1786828 - RNA, 19 nt, Artificial Sequence
  Description of Artificial Sequence: Synthetic oligonucleotide
uuucauagccagcacuuca

SEQ ID NO: 1786829 - RNA, 19 nt, Artificial Sequence
  Description of Artificial Sequence: Synthetic oligonucleotide
auccgauuucaacuggagc

SEQ ID NO: 1786830 - RNA, 19 nt, Artificial Sequence
  Description of Artificial Sequence: Synthetic oligonucleotide
auuuacugagagcggcugc

SEQ ID NO: 1786831 - RNA, 19 nt, Artificial Sequence
  Description of Artificial Sequence: Synthetic oligonucleotide
uccgacugaguucacaaca

SEQ ID NO: 1786832 - RNA, 19 nt, Artificial Sequence
  Description of Artificial Sequence: Synthetic oligonucleotide
guaacuugcacaugucaag

SEQ ID NO: 1786833 - RNA, 19 nt, Artificial Sequence
  Description of Artificial Sequence: Synthetic oligonucleotide
ugauuuugugcaguggucc

SEQ ID NO: 1786834 - RNA, 19 nt, Artificial Sequence
  Description of Artificial Sequence: Synthetic oligonucleotide
auauuaccauuuugcaaac

SEQ ID NO: 1786835 - RNA, 19 nt, Artificial Sequence
  Description of Artificial Sequence: Synthetic oligonucleotide
ugaacauucuuacuagaua

SEQ ID NO: 1786836 - RNA, 19 nt, Artificial Sequence
  Description of Artificial Sequence: Synthetic oligonucleotide
uugauuauagccacacaau

SEQ ID NO: 1786837 - RNA, 19 nt, Artificial Sequence
  Description of Artificial Sequence: Synthetic oligonucleotide
aucuucuuaugugcgaacc

SEQ ID NO: 1786838 - RNA, 19 nt, Artificial Sequence
  Description of Artificial Sequence: Synthetic oligonucleotide
cauuaaaggagucaugcca

SEQ ID NO: 1786839 - RNA, 19 nt, Artificial Sequence
  Description of Artificial Sequence: Synthetic oligonucleotide
uuccuuuauaugcugcaug

SEQ ID NO: 1786840 - RNA, 19 nt, Artificial Sequence
  Description of Artificial Sequence: Synthetic oligonucleotide
ucuuauguuuggcagcuuc

SEQ ID NO: 1786841 - RNA, 19 nt, Artificial Sequence
  Description of Artificial Sequence: Synthetic oligonucleotide
uuuccugguacacugggaa

SEQ ID NO: 1786842 - RNA, 19 nt, Artificial Sequence
  Description of Artificial Sequence: Synthetic oligonucleotide
ucacaauauauuaccauuu

SEQ ID NO: 1786843 - RNA, 19 nt, Artificial Sequence
  Description of Artificial Sequence: Synthetic oligonucleotide
aacgcaguuggauccgauc

SEQ ID NO: 1786844 - RNA, 19 nt, Artificial Sequence
  Description of Artificial Sequence: Synthetic oligonucleotide
cacgugaugucuuuauugc

SEQ ID NO: 1786845 - RNA, 19 nt, Artificial Sequence
  Description of Artificial Sequence: Synthetic oligonucleotide
uuuauaugcugcaugcauu

SEQ ID NO: 1786846 - RNA, 19 nt, Artificial Sequence
  Description of Artificial Sequence: Synthetic oligonucleotide
auuaacaugguuagaguug

SEQ ID NO: 1786847 - RNA, 19 nt, Artificial Sequence
  Description of Artificial Sequence: Synthetic oligonucleotide
acgugaugucuuuauugcc

SEQ ID NO: 1786848 - RNA, 19 nt, Artificial Sequence
  Description of Artificial Sequence: Synthetic oligonucleotide
uccccgaucacuuccagca

SEQ ID NO: 1786849 - RNA, 19 nt, Artificial Sequence
  Description of Artificial Sequence: Synthetic oligonucleotide
aacuggagcaaugcuucgc

SEQ ID NO: 1786850 - RNA, 19 nt, Artificial Sequence
  Description of Artificial Sequence: Synthetic oligonucleotide
uuaccauuuugcaaaccga

SEQ ID NO: 1786851 - RNA, 19 nt, Artificial Sequence
  Description of Artificial Sequence: Synthetic oligonucleotide
ugcaaaacucaacauccac

SEQ ID NO: 1786852 - RNA, 19 nt, Artificial Sequence
  Description of Artificial Sequence: Synthetic oligonucleotide
uucuuugaggaaguuaaug

SEQ ID NO: 1786853 - RNA, 19 nt, Artificial Sequence
  Description of Artificial Sequence: Synthetic oligonucleotide
cacaacauccgucucugcg

SEQ ID NO: 1786854 - RNA, 19 nt, Artificial Sequence
  Description of Artificial Sequence: Synthetic oligonucleotide
uguagcauuuacugagagc

SEQ ID NO: 1786855 - RNA, 19 nt, Artificial Sequence
  Description of Artificial Sequence: Synthetic oligonucleotide
uggugcaaaacucaacauc

SEQ ID NO: 1786856 - RNA, 19 nt, Artificial Sequence
  Description of Artificial Sequence: Synthetic oligonucleotide
acaugguuagaguugacau

SEQ ID NO: 1786857 - RNA, 19 nt, Artificial Sequence
  Description of Artificial Sequence: Synthetic oligonucleotide
uuguagcauuuacugagag

SEQ ID NO: 1786858 - RNA, 19 nt, Artificial Sequence
  Description of Artificial Sequence: Synthetic oligonucleotide
ucuuacacaucuucuuaug

SEQ ID NO: 1786859 - RNA, 19 nt, Artificial Sequence
  Description of Artificial Sequence: Synthetic oligonucleotide
acaagcaucacaaucuuga

SEQ ID NO: 1786860 - RNA, 19 nt, Artificial Sequence
  Description of Artificial Sequence: Synthetic oligonucleotide
ggugcaaaacucaacaucc

SEQ ID NO: 1786861 - RNA, 19 nt, Artificial Sequence
  Description of Artificial Sequence: Synthetic oligonucleotide
uggacgguaccuuuccccg

SEQ ID NO: 1786862 - RNA, 19 nt, Artificial Sequence
  Description of Artificial Sequence: Synthetic oligonucleotide
aaucuugacaggguggaga

SEQ ID NO: 1786863 - RNA, 19 nt, Artificial Sequence
  Description of Artificial Sequence: Synthetic oligonucleotide
ucauuaacaugguuagagu

SEQ ID NO: 1786864 - RNA, 19 nt, Artificial Sequence
  Description of Artificial Sequence: Synthetic oligonucleotide
cauguugauggcaauugac

SEQ ID NO: 1786865 - RNA, 19 nt, Artificial Sequence
  Description of Artificial Sequence: Synthetic oligonucleotide
uguagugcauuuucauagc

SEQ ID NO: 1786866 - RNA, 19 nt, Artificial Sequence
  Description of Artificial Sequence: Synthetic oligonucleotide
ugggagauguccacuguag

SEQ ID NO: 1786867 - RNA, 19 nt, Artificial Sequence
  Description of Artificial Sequence: Synthetic oligonucleotide
uuauaugcugcaugcauua

SEQ ID NO: 1786868 - RNA, 19 nt, Artificial Sequence
  Description of Artificial Sequence: Synthetic oligonucleotide
gaaggcuguaauaauccag

SEQ ID NO: 1786869 - RNA, 19 nt, Artificial Sequence
  Description of Artificial Sequence: Synthetic oligonucleotide
acuguugcuucucauaaau

SEQ ID NO: 1786870 - RNA, 19 nt, Artificial Sequence
  Description of Artificial Sequence: Synthetic oligonucleotide
aaggcuguaauaauccagu

SEQ ID NO: 1786871 - RNA, 19 nt, Artificial Sequence
  Description of Artificial Sequence: Synthetic oligonucleotide
ucuuucagacucuuacaca

SEQ ID NO: 1786872 - RNA, 19 nt, Artificial Sequence
  Description of Artificial Sequence: Synthetic oligonucleotide
ucuucuuaugugcgaacca

SEQ ID NO: 1786873 - RNA, 19 nt, Artificial Sequence
  Description of Artificial Sequence: Synthetic oligonucleotide
ucgagggaagaaauuguug

SEQ ID NO: 1786874 - RNA, 19 nt, Artificial Sequence
  Description of Artificial Sequence: Synthetic oligonucleotide
guaaugauuuugugcagug

SEQ ID NO: 1786875 - RNA, 19 nt, Artificial Sequence
  Description of Artificial Sequence: Synthetic oligonucleotide
uucacaguauggaaauuuc

SEQ ID NO: 1786876 - RNA, 19 nt, Artificial Sequence
  Description of Artificial Sequence: Synthetic oligonucleotide
uugacaucgagcuuuccau

SEQ ID NO: 1786877 - RNA, 19 nt, Artificial Sequence
  Description of Artificial Sequence: Synthetic oligonucleotide
uggcgcagaaguaacuugc

SEQ ID NO: 1786878 - RNA, 19 nt, Artificial Sequence
  Description of Artificial Sequence: Synthetic oligonucleotide
acugaguucacaacauccg

SEQ ID NO: 1786879 - RNA, 19 nt, Artificial Sequence
  Description of Artificial Sequence: Synthetic oligonucleotide
ugcugaccuacaaaggcug

SEQ ID NO: 1786880 - RNA, 19 nt, Artificial Sequence
  Description of Artificial Sequence: Synthetic oligonucleotide
aacaagcuuuugaucaggg

SEQ ID NO: 1786881 - RNA, 19 nt, Artificial Sequence
  Description of Artificial Sequence: Synthetic oligonucleotide
uggcucuuauguuuggcag

SEQ ID NO: 1786882 - RNA, 19 nt, Artificial Sequence
  Description of Artificial Sequence: Synthetic oligonucleotide
ucuuggacgguaccuuucc

SEQ ID NO: 1786883 - RNA, 19 nt, Artificial Sequence
  Description of Artificial Sequence: Synthetic oligonucleotide
uccgauccgauuucaacug

SEQ ID NO: 1786884 - RNA, 19 nt, Artificial Sequence
  Description of Artificial Sequence: Synthetic oligonucleotide
agaaagugcagcaaacaug

SEQ ID NO: 1786885 - RNA, 19 nt, Artificial Sequence
  Description of Artificial Sequence: Synthetic oligonucleotide
gauggcuuggguaaguaca

SEQ ID NO: 1786886 - RNA, 19 nt, Artificial Sequence
  Description of Artificial Sequence: Synthetic oligonucleotide
uuauguuuggcagcuucag

SEQ ID NO: 1786887 - RNA, 19 nt, Artificial Sequence
  Description of Artificial Sequence: Synthetic oligonucleotide
uggagauucguugugguaa

SEQ ID NO: 1786888 - RNA, 19 nt, Artificial Sequence
  Description of Artificial Sequence: Synthetic oligonucleotide
agaggguucucauucacaa

SEQ ID NO: 1786889 - RNA, 19 nt, Artificial Sequence
  Description of Artificial Sequence: Synthetic oligonucleotide
uaacaagcuuuugaucagg

SEQ ID NO: 1786890 - RNA, 19 nt, Artificial Sequence
  Description of Artificial Sequence: Synthetic oligonucleotide
uggagcaaugcuucgcacc

SEQ ID NO: 1786891 - RNA, 19 nt, Artificial Sequence
  Description of Artificial Sequence: Synthetic oligonucleotide
acauucuuacuagauaaca

SEQ ID NO: 1786892 - RNA, 19 nt, Artificial Sequence
  Description of Artificial Sequence: Synthetic oligonucleotide
ggcaauugacaucagcucc

SEQ ID NO: 1786893 - RNA, 19 nt, Artificial Sequence
  Description of Artificial Sequence: Synthetic oligonucleotide
gaugcccugccuuuuaaca

SEQ ID NO: 1786894 - RNA, 19 nt, Artificial Sequence
  Description of Artificial Sequence: Synthetic oligonucleotide
uuggacgguaccuuucccc

SEQ ID NO: 1786895 - RNA, 19 nt, Artificial Sequence
  Description of Artificial Sequence: Synthetic oligonucleotide
uaaguacagagaacgcagu

SEQ ID NO: 1786896 - RNA, 19 nt, Artificial Sequence
  Description of Artificial Sequence: Synthetic oligonucleotide
uguaauaauccagucucuc

SEQ ID NO: 1786897 - RNA, 19 nt, Artificial Sequence
  Description of Artificial Sequence: Synthetic oligonucleotide
cuuggguaaguacagagaa

SEQ ID NO: 1786898 - RNA, 19 nt, Artificial Sequence
  Description of Artificial Sequence: Synthetic oligonucleotide
guagugcauuuucauagcc

SEQ ID NO: 1786899 - RNA, 19 nt, Artificial Sequence
  Description of Artificial Sequence: Synthetic oligonucleotide
uugcaaaccgaacaucuuu

SEQ ID NO: 1786900 - RNA, 19 nt, Artificial Sequence
  Description of Artificial Sequence: Synthetic oligonucleotide
ugaaggcuguaauaaucca

SEQ ID NO: 1786901 - RNA, 19 nt, Artificial Sequence
  Description of Artificial Sequence: Synthetic oligonucleotide
gguccugccaacuuugaag

SEQ ID NO: 1786902 - RNA, 19 nt, Artificial Sequence
  Description of Artificial Sequence: Synthetic oligonucleotide
uagcauuuacugagagcgg

SEQ ID NO: 1786903 - RNA, 19 nt, Artificial Sequence
  Description of Artificial Sequence: Synthetic oligonucleotide
cuucuuaugugcgaaccag

SEQ ID NO: 1786904 - RNA, 19 nt, Artificial Sequence
  Description of Artificial Sequence: Synthetic oligonucleotide
agacuguugcuucucauaa

SEQ ID NO: 1786905 - RNA, 19 nt, Artificial Sequence
  Description of Artificial Sequence: Synthetic oligonucleotide
aagcuuuugaucaggguau

SEQ ID NO: 1786906 - RNA, 19 nt, Artificial Sequence
  Description of Artificial Sequence: Synthetic oligonucleotide
uaaaugucuuucagacucu

SEQ ID NO: 1786907 - RNA, 19 nt, Artificial Sequence
  Description of Artificial Sequence: Synthetic oligonucleotide
ugcccugccuuuuaacaag

SEQ ID NO: 1786908 - RNA, 19 nt, Artificial Sequence
  Description of Artificial Sequence: Synthetic oligonucleotide
uucuuaugugcgaaccagu

SEQ ID NO: 1786909 - RNA, 19 nt, Artificial Sequence
  Description of Artificial Sequence: Synthetic oligonucleotide
agaguugacaucgagcuuu

SEQ ID NO: 1786910 - RNA, 19 nt, Artificial Sequence
  Description of Artificial Sequence: Synthetic oligonucleotide
caaaccgaacaucuuuuac

SEQ ID NO: 1786911 - RNA, 19 nt, Artificial Sequence
  Description of Artificial Sequence: Synthetic oligonucleotide
uguugauuauagccacaca

SEQ ID NO: 1786912 - RNA, 19 nt, Artificial Sequence
  Description of Artificial Sequence: Synthetic oligonucleotide
gguggugcaaaacucaaca

SEQ ID NO: 1786913 - RNA, 19 nt, Artificial Sequence
  Description of Artificial Sequence: Synthetic oligonucleotide
aaguacagagaacgcaguu

SEQ ID NO: 1786914 - RNA, 19 nt, Artificial Sequence
  Description of Artificial Sequence: Synthetic oligonucleotide
uuaaugcauuucugaaaga

SEQ ID NO: 1786915 - RNA, 19 nt, Artificial Sequence
  Description of Artificial Sequence: Synthetic oligonucleotide
uucauagccagcacuucau

SEQ ID NO: 1786916 - RNA, 19 nt, Artificial Sequence
  Description of Artificial Sequence: Synthetic oligonucleotide
uuuugugcagugguccugc

SEQ ID NO: 1786917 - RNA, 19 nt, Artificial Sequence
  Description of Artificial Sequence: Synthetic oligonucleotide
ugguaaugauuuugugcag

SEQ ID NO: 1786918 - RNA, 19 nt, Artificial Sequence
  Description of Artificial Sequence: Synthetic oligonucleotide
caguauggaaauuuccuga

SEQ ID NO: 1786919 - RNA, 19 nt, Artificial Sequence
  Description of Artificial Sequence: Synthetic oligonucleotide
gacaucgagcuuuccauuc

SEQ ID NO: 1786920 - RNA, 19 nt, Artificial Sequence
  Description of Artificial Sequence: Synthetic oligonucleotide
uaauccagucucucucgag

SEQ ID NO: 1786921 - RNA, 19 nt, Artificial Sequence
  Description of Artificial Sequence: Synthetic oligonucleotide
uugugguaaugauuuugug

SEQ ID NO: 1786922 - RNA, 19 nt, Artificial Sequence
  Description of Artificial Sequence: Synthetic oligonucleotide
agaugcccugccuuuuaac

SEQ ID NO: 1786923 - RNA, 19 nt, Artificial Sequence
  Description of Artificial Sequence: Synthetic oligonucleotide
uuggguaaguacagagaac

SEQ ID NO: 1786924 - RNA, 19 nt, Artificial Sequence
  Description of Artificial Sequence: Synthetic oligonucleotide
uggcaauugacaucagcuc

SEQ ID NO: 1786925 - RNA, 19 nt, Artificial Sequence
  Description of Artificial Sequence: Synthetic oligonucleotide
cauagccagcacuucauuc

SEQ ID NO: 1786926 - RNA, 19 nt, Artificial Sequence
  Description of Artificial Sequence: Synthetic oligonucleotide
gcugcaugcauuaaaggag

SEQ ID NO: 1786927 - RNA, 19 nt, Artificial Sequence
  Description of Artificial Sequence: Synthetic oligonucleotide
ugccauucucauccaaaca

SEQ ID NO: 1786928 - RNA, 19 nt, Artificial Sequence
  Description of Artificial Sequence: Synthetic oligonucleotide
auaugcugcaugcauuaaa

SEQ ID NO: 1786929 - RNA, 19 nt, Artificial Sequence
  Description of Artificial Sequence: Synthetic oligonucleotide
auccacaaaccccacuugu

SEQ ID NO: 1786930 - RNA, 19 nt, Artificial Sequence
  Description of Artificial Sequence: Synthetic oligonucleotide
acuugcacaugucaaguuu

SEQ ID NO: 1786931 - RNA, 19 nt, Artificial Sequence
  Description of Artificial Sequence: Synthetic oligonucleotide
auguugauggcaauugaca

SEQ ID NO: 1786932 - RNA, 19 nt, Artificial Sequence
  Description of Artificial Sequence: Synthetic oligonucleotide
cagagaacgcaguuggauc

SEQ ID NO: 1786933 - RNA, 19 nt, Artificial Sequence
  Description of Artificial Sequence: Synthetic oligonucleotide
guauggaaauuuccugaug

SEQ ID NO: 1786934 - RNA, 19 nt, Artificial Sequence
  Description of Artificial Sequence: Synthetic oligonucleotide
aguaacuugcacaugucaa

SEQ ID NO: 1786935 - RNA, 19 nt, Artificial Sequence
  Description of Artificial Sequence: Synthetic oligonucleotide
gaucaggguauccaguuua

SEQ ID NO: 1786936 - RNA, 19 nt, Artificial Sequence
  Description of Artificial Sequence: Synthetic oligonucleotide
uaugugcgaaccagugugu

SEQ ID NO: 1786937 - RNA, 19 nt, Artificial Sequence
  Description of Artificial Sequence: Synthetic oligonucleotide
cagugugucuucuggcagg

SEQ ID NO: 1786938 - RNA, 19 nt, Artificial Sequence
  Description of Artificial Sequence: Synthetic oligonucleotide
acucuuacacaucuucuua

SEQ ID NO: 1786939 - RNA, 19 nt, Artificial Sequence
  Description of Artificial Sequence: Synthetic oligonucleotide
augauuuugugcagugguc

SEQ ID NO: 1786940 - RNA, 19 nt, Artificial Sequence
  Description of Artificial Sequence: Synthetic oligonucleotide
accagugugucuucuggca

SEQ ID NO: 1786941 - RNA, 19 nt, Artificial Sequence
  Description of Artificial Sequence: Synthetic oligonucleotide
cacagguggugcaaaacuc

SEQ ID NO: 1786942 - RNA, 19 nt, Artificial Sequence
  Description of Artificial Sequence: Synthetic oligonucleotide
agauucguugugguaauga

SEQ ID NO: 1786943 - RNA, 19 nt, Artificial Sequence
  Description of Artificial Sequence: Synthetic oligonucleotide
uuuuccuccuggcucuuau

SEQ ID NO: 1786944 - RNA, 19 nt, Artificial Sequence
  Description of Artificial Sequence: Synthetic oligonucleotide
caacauccgucucugcgcc

SEQ ID NO: 1786945 - RNA, 19 nt, Artificial Sequence
  Description of Artificial Sequence: Synthetic oligonucleotide
auaauccagucucucucga

SEQ ID NO: 1786946 - RNA, 19 nt, Artificial Sequence
  Description of Artificial Sequence: Synthetic oligonucleotide
ugauggcuuggguaaguac

SEQ ID NO: 1786947 - RNA, 19 nt, Artificial Sequence
  Description of Artificial Sequence: Synthetic oligonucleotide
auggcgcagaaguaacuug

SEQ ID NO: 1786948 - RNA, 19 nt, Artificial Sequence
  Description of Artificial Sequence: Synthetic oligonucleotide
ucuucuggcaggucugguc

SEQ ID NO: 1786949 - RNA, 19 nt, Artificial Sequence
  Description of Artificial Sequence: Synthetic oligonucleotide
caagcaucacaaucuugac

SEQ ID NO: 1786950 - RNA, 19 nt, Artificial Sequence
  Description of Artificial Sequence: Synthetic oligonucleotide
cuuucagacucuuacacau

SEQ ID NO: 1786951 - RNA, 19 nt, Artificial Sequence
  Description of Artificial Sequence: Synthetic oligonucleotide
ugucucucugcuucaugca

SEQ ID NO: 1786952 - RNA, 19 nt, Artificial Sequence
  Description of Artificial Sequence: Synthetic oligonucleotide
ugugcgaaccagugugucu

SEQ ID NO: 1786953 - RNA, 19 nt, Artificial Sequence
  Description of Artificial Sequence: Synthetic oligonucleotide
acaagcuuuugaucagggu

SEQ ID NO: 1786954 - RNA, 19 nt, Artificial Sequence
  Description of Artificial Sequence: Synthetic oligonucleotide
uauuaccauuuugcaaacc

SEQ ID NO: 1786955 - RNA, 19 nt, Artificial Sequence
  Description of Artificial Sequence: Synthetic oligonucleotide
ugcacaugucaaguuuucc

SEQ ID NO: 1786956 - RNA, 19 nt, Artificial Sequence
  Description of Artificial Sequence: Synthetic oligonucleotide
aacaguugacaugaacauu

SEQ ID NO: 1786957 - RNA, 19 nt, Artificial Sequence
  Description of Artificial Sequence: Synthetic oligonucleotide
acuagauaacaguguucca

SEQ ID NO: 1786958 - RNA, 19 nt, Artificial Sequence
  Description of Artificial Sequence: Synthetic oligonucleotide
ugugcuggccagcccagcu

SEQ ID NO: 1786959 - RNA, 19 nt, Artificial Sequence
  Description of Artificial Sequence: Synthetic oligonucleotide
cacaguauggaaauuuccu

SEQ ID NO: 1786960 - RNA, 19 nt, Artificial Sequence
  Description of Artificial Sequence: Synthetic oligonucleotide
uguccacuguagccucugg

SEQ ID NO: 1786961 - RNA, 19 nt, Artificial Sequence
  Description of Artificial Sequence: Synthetic oligonucleotide
uaccuuuccccgaucacuu

SEQ ID NO: 1786962 - RNA, 19 nt, Artificial Sequence
  Description of Artificial Sequence: Synthetic oligonucleotide
cagaucaaauccaucaccu

SEQ ID NO: 1786963 - RNA, 19 nt, Artificial Sequence
  Description of Artificial Sequence: Synthetic oligonucleotide
gggaagaaauuguugauua

SEQ ID NO: 1786964 - RNA, 19 nt, Artificial Sequence
  Description of Artificial Sequence: Synthetic oligonucleotide
gcauuucugaaagaugcag

SEQ ID NO: 1786965 - RNA, 19 nt, Artificial Sequence
  Description of Artificial Sequence: Synthetic oligonucleotide
gaggaaguuaaugcauuuc

SEQ ID NO: 1786966 - RNA, 19 nt, Artificial Sequence
  Description of Artificial Sequence: Synthetic oligonucleotide
gagaacgcaguuggauccg

SEQ ID NO: 1786967 - RNA, 19 nt, Artificial Sequence
  Description of Artificial Sequence: Synthetic oligonucleotide
gucacaauauauuaccauu

SEQ ID NO: 1786968 - RNA, 19 nt, Artificial Sequence
  Description of Artificial Sequence: Synthetic oligonucleotide
gguaaguacagagaacgca

SEQ ID NO: 1786969 - RNA, 19 nt, Artificial Sequence
  Description of Artificial Sequence: Synthetic oligonucleotide
acagagaacgcaguuggau

SEQ ID NO: 1786970 - RNA, 19 nt, Artificial Sequence
  Description of Artificial Sequence: Synthetic oligonucleotide
uacagagaacgcaguugga

SEQ ID NO: 1786971 - RNA, 19 nt, Artificial Sequence
  Description of Artificial Sequence: Synthetic oligonucleotide
cuuuucuccacagguggug

SEQ ID NO: 1786972 - RNA, 19 nt, Artificial Sequence
  Description of Artificial Sequence: Synthetic oligonucleotide
gcugauguagugcauuuuc

SEQ ID NO: 1786973 - RNA, 19 nt, Artificial Sequence
  Description of Artificial Sequence: Synthetic oligonucleotide
aggguggcuucacaguaug

SEQ ID NO: 1786974 - RNA, 19 nt, Artificial Sequence
  Description of Artificial Sequence: Synthetic oligonucleotide
cuucuggcaggucugguca

SEQ ID NO: 1786975 - RNA, 19 nt, Artificial Sequence
  Description of Artificial Sequence: Synthetic oligonucleotide
uuggauccgauccgauuuc

SEQ ID NO: 1786976 - RNA, 19 nt, Artificial Sequence
  Description of Artificial Sequence: Synthetic oligonucleotide
cauuuacugagagcggcug

SEQ ID NO: 1786977 - RNA, 19 nt, Artificial Sequence
  Description of Artificial Sequence: Synthetic oligonucleotide
accgaacaucuuuuacuug

SEQ ID NO: 1786978 - RNA, 19 nt, Artificial Sequence
  Description of Artificial Sequence: Synthetic oligonucleotide
cuuguagcauuuacugaga

SEQ ID NO: 1786979 - RNA, 19 nt, Artificial Sequence
  Description of Artificial Sequence: Synthetic oligonucleotide
gcauuaaaggagucaugcc

SEQ ID NO: 1786980 - RNA, 19 nt, Artificial Sequence
  Description of Artificial Sequence: Synthetic oligonucleotide
cacaaucaugcugaccuac

SEQ ID NO: 1786981 - RNA, 19 nt, Artificial Sequence
  Description of Artificial Sequence: Synthetic oligonucleotide
auggcuuggguaaguacag

SEQ ID NO: 1786982 - RNA, 19 nt, Artificial Sequence
  Description of Artificial Sequence: Synthetic oligonucleotide
ggaguggaauuuucuuggg

SEQ ID NO: 1786983 - RNA, 19 nt, Artificial Sequence
  Description of Artificial Sequence: Synthetic oligonucleotide
uuaaaggagucaugccauu

SEQ ID NO: 1786984 - RNA, 19 nt, Artificial Sequence
  Description of Artificial Sequence: Synthetic oligonucleotide
uuuucauagccagcacuuc

SEQ ID NO: 1786985 - RNA, 19 nt, Artificial Sequence
  Description of Artificial Sequence: Synthetic oligonucleotide
caacuggagcaaugcuucg

SEQ ID NO: 1786986 - RNA, 19 nt, Artificial Sequence
  Description of Artificial Sequence: Synthetic oligonucleotide
ugcaugcauuaaaggaguc

SEQ ID NO: 1786987 - RNA, 19 nt, Artificial Sequence
  Description of Artificial Sequence: Synthetic oligonucleotide
uaacaguguuccagcuucu

SEQ ID NO: 1786988 - RNA, 19 nt, Artificial Sequence
  Description of Artificial Sequence: Synthetic oligonucleotide
ucucucucgagggaagaaa

SEQ ID NO: 1786989 - RNA, 19 nt, Artificial Sequence
  Description of Artificial Sequence: Synthetic oligonucleotide
ccacgugaugucuuuauug

SEQ ID NO: 1786990 - RNA, 19 nt, Artificial Sequence
  Description of Artificial Sequence: Synthetic oligonucleotide
gaaguaacuugcacauguc

SEQ ID NO: 1786991 - RNA, 19 nt, Artificial Sequence
  Description of Artificial Sequence: Synthetic oligonucleotide
agacucuuacacaucuucu

SEQ ID NO: 1786992 - RNA, 19 nt, Artificial Sequence
  Description of Artificial Sequence: Synthetic oligonucleotide
acagguggugcaaaacuca

SEQ ID NO: 1786993 - RNA, 19 nt, Artificial Sequence
  Description of Artificial Sequence: Synthetic oligonucleotide
cuuccgacugaguucacaa

SEQ ID NO: 1786994 - RNA, 19 nt, Artificial Sequence
  Description of Artificial Sequence: Synthetic oligonucleotide
acaucuucuuaugugcgaa

SEQ ID NO: 1786995 - RNA, 19 nt, Artificial Sequence
  Description of Artificial Sequence: Synthetic oligonucleotide
cugaccuacaaaggcugcc

SEQ ID NO: 1786996 - RNA, 19 nt, Artificial Sequence
  Description of Artificial Sequence: Synthetic oligonucleotide
aggguggagauucguugug

SEQ ID NO: 1786997 - RNA, 19 nt, Artificial Sequence
  Description of Artificial Sequence: Synthetic oligonucleotide
cccacuuguccugugaugg

SEQ ID NO: 1786998 - RNA, 19 nt, Artificial Sequence
  Description of Artificial Sequence: Synthetic oligonucleotide
ggagcaaugcuucgcacca

SEQ ID NO: 1786999 - RNA, 19 nt, Artificial Sequence
  Description of Artificial Sequence: Synthetic oligonucleotide
aggagcauccugugugcug

SEQ ID NO: 1787000 - RNA, 19 nt, Artificial Sequence
  Description of Artificial Sequence: Synthetic oligonucleotide
augcccugccuuuuaacaa

SEQ ID NO: 1787001 - RNA, 19 nt, Artificial Sequence
  Description of Artificial Sequence: Synthetic oligonucleotide
aguuggauccgauccgauu

SEQ ID NO: 1787002 - RNA, 19 nt, Artificial Sequence
  Description of Artificial Sequence: Synthetic oligonucleotide
cuuggacgguaccuuuccc

SEQ ID NO: 1787003 - RNA, 19 nt, Artificial Sequence
  Description of Artificial Sequence: Synthetic oligonucleotide
gauucguugugguaaugau

SEQ ID NO: 1787004 - RNA, 19 nt, Artificial Sequence
  Description of Artificial Sequence: Synthetic oligonucleotide
cauccacaaaccccacuug

SEQ ID NO: 1787005 - RNA, 19 nt, Artificial Sequence
  Description of Artificial Sequence: Synthetic oligonucleotide
agggaagaaauuguugauu

SEQ ID NO: 1787006 - RNA, 19 nt, Artificial Sequence
  Description of Artificial Sequence: Synthetic oligonucleotide
guuggauccgauccgauuu

SEQ ID NO: 1787007 - RNA, 19 nt, Artificial Sequence
  Description of Artificial Sequence: Synthetic oligonucleotide
ucuuccgacugaguucaca

SEQ ID NO: 1787008 - RNA, 19 nt, Artificial Sequence
  Description of Artificial Sequence: Synthetic oligonucleotide
ucauagccagcacuucauu

SEQ ID NO: 1787009 - RNA, 19 nt, Artificial Sequence
  Description of Artificial Sequence: Synthetic oligonucleotide
augugcgaaccaguguguc

SEQ ID NO: 1787010 - RNA, 19 nt, Artificial Sequence
  Description of Artificial Sequence: Synthetic oligonucleotide
ugacaucgagcuuuccauu

SEQ ID NO: 1787011 - RNA, 19 nt, Artificial Sequence
  Description of Artificial Sequence: Synthetic oligonucleotide
uucaugcacuucucacaga

SEQ ID NO: 1787012 - RNA, 19 nt, Artificial Sequence
  Description of Artificial Sequence: Synthetic oligonucleotide
gagucaugccauucucauc

SEQ ID NO: 1787013 - RNA, 19 nt, Artificial Sequence
  Description of Artificial Sequence: Synthetic oligonucleotide
agguggugcaaaacucaac

SEQ ID NO: 1787014 - RNA, 19 nt, Artificial Sequence
  Description of Artificial Sequence: Synthetic oligonucleotide
agcauccugugugcuggcc

SEQ ID NO: 1787015 - RNA, 19 nt, Artificial Sequence
  Description of Artificial Sequence: Synthetic oligonucleotide
uagaguugacaucgagcuu

SEQ ID NO: 1787016 - RNA, 19 nt, Artificial Sequence
  Description of Artificial Sequence: Synthetic oligonucleotide
uuugugcagugguccugcc

SEQ ID NO: 1787017 - RNA, 19 nt, Artificial Sequence
  Description of Artificial Sequence: Synthetic oligonucleotide
ugguccugccaacuuugaa

SEQ ID NO: 1787018 - RNA, 19 nt, Artificial Sequence
  Description of Artificial Sequence: Synthetic oligonucleotide
ugcgccugccuccaacauc

SEQ ID NO: 1787019 - RNA, 19 nt, Artificial Sequence
  Description of Artificial Sequence: Synthetic oligonucleotide
cugaaagaugcagcugaug

SEQ ID NO: 1787020 - RNA, 19 nt, Artificial Sequence
  Description of Artificial Sequence: Synthetic oligonucleotide
aaaccccacuuguccugug

SEQ ID NO: 1787021 - RNA, 19 nt, Artificial Sequence
  Description of Artificial Sequence: Synthetic oligonucleotide
cacaucuucuuaugugcga

SEQ ID NO: 1787022 - RNA, 19 nt, Artificial Sequence
  Description of Artificial Sequence: Synthetic oligonucleotide
uauaugcugcaugcauuaa

SEQ ID NO: 1787023 - RNA, 19 nt, Artificial Sequence
  Description of Artificial Sequence: Synthetic oligonucleotide
cuguguauccaugcucaug

SEQ ID NO: 1787024 - RNA, 19 nt, Artificial Sequence
  Description of Artificial Sequence: Synthetic oligonucleotide
gauaacaguguuccagcuu

SEQ ID NO: 1787025 - RNA, 19 nt, Artificial Sequence
  Description of Artificial Sequence: Synthetic oligonucleotide
caugcauuaaaggagucau

SEQ ID NO: 1787026 - RNA, 19 nt, Artificial Sequence
  Description of Artificial Sequence: Synthetic oligonucleotide
gggagauguccacuguagc

SEQ ID NO: 1787027 - RNA, 19 nt, Artificial Sequence
  Description of Artificial Sequence: Synthetic oligonucleotide
aaugucuuucagacucuua

SEQ ID NO: 1787028 - RNA, 19 nt, Artificial Sequence
  Description of Artificial Sequence: Synthetic oligonucleotide
uucgcaccagcugcuggag

SEQ ID NO: 1787029 - RNA, 19 nt, Artificial Sequence
  Description of Artificial Sequence: Synthetic oligonucleotide
cuggagcaaugcuucgcac

SEQ ID NO: 1787030 - RNA, 19 nt, Artificial Sequence
  Description of Artificial Sequence: Synthetic oligonucleotide
agaaucagcaggaguggaa

SEQ ID NO: 1787031 - RNA, 19 nt, Artificial Sequence
  Description of Artificial Sequence: Synthetic oligonucleotide
aacauccgucucugcgccu

SEQ ID NO: 1787032 - RNA, 19 nt, Artificial Sequence
  Description of Artificial Sequence: Synthetic oligonucleotide
gacuguugcuucucauaaa

SEQ ID NO: 1787033 - RNA, 19 nt, Artificial Sequence
  Description of Artificial Sequence: Synthetic oligonucleotide
ucacaacauccgucucugc

SEQ ID NO: 1787034 - RNA, 19 nt, Artificial Sequence
  Description of Artificial Sequence: Synthetic oligonucleotide
gcagaaguaacuugcacau

SEQ ID NO: 1787035 - RNA, 19 nt, Artificial Sequence
  Description of Artificial Sequence: Synthetic oligonucleotide
uggauccgauccgauuuca

SEQ ID NO: 1787036 - RNA, 19 nt, Artificial Sequence
  Description of Artificial Sequence: Synthetic oligonucleotide
ggguauccaguuuauucuc

SEQ ID NO: 1787037 - RNA, 19 nt, Artificial Sequence
  Description of Artificial Sequence: Synthetic oligonucleotide
acauccgucucugcgccug

SEQ ID NO: 1787038 - RNA, 19 nt, Artificial Sequence
  Description of Artificial Sequence: Synthetic oligonucleotide
cugcaugcauuaaaggagu

SEQ ID NO: 1787039 - RNA, 19 nt, Artificial Sequence
  Description of Artificial Sequence: Synthetic oligonucleotide
augcauuaaaggagucaug

SEQ ID NO: 1787040 - RNA, 19 nt, Artificial Sequence
  Description of Artificial Sequence: Synthetic oligonucleotide
acccacgugaugucuuuau

SEQ ID NO: 1787041 - RNA, 19 nt, Artificial Sequence
  Description of Artificial Sequence: Synthetic oligonucleotide
caaucaugcugaccuacaa

SEQ ID NO: 1787042 - RNA, 19 nt, Artificial Sequence
  Description of Artificial Sequence: Synthetic oligonucleotide
aucugggcggcgguucuuc

SEQ ID NO: 1787043 - RNA, 19 nt, Artificial Sequence
  Description of Artificial Sequence: Synthetic oligonucleotide
cagaggguucucauucaca

SEQ ID NO: 1787044 - RNA, 19 nt, Artificial Sequence
  Description of Artificial Sequence: Synthetic oligonucleotide
gacagccguggcucugcag

SEQ ID NO: 1787045 - RNA, 19 nt, Artificial Sequence
  Description of Artificial Sequence: Synthetic oligonucleotide
cagaaagugcagcaaacau

SEQ ID NO: 1787046 - RNA, 19 nt, Artificial Sequence
  Description of Artificial Sequence: Synthetic oligonucleotide
gagauucguugugguaaug

SEQ ID NO: 1787047 - RNA, 19 nt, Artificial Sequence
  Description of Artificial Sequence: Synthetic oligonucleotide
ucugggcggcgguucuucc

SEQ ID NO: 1787048 - RNA, 19 nt, Artificial Sequence
  Description of Artificial Sequence: Synthetic oligonucleotide
cuuaugugcgaaccagugu

SEQ ID NO: 1787049 - RNA, 19 nt, Artificial Sequence
  Description of Artificial Sequence: Synthetic oligonucleotide
cagacuguugcuucucaua

SEQ ID NO: 1787050 - RNA, 19 nt, Artificial Sequence
  Description of Artificial Sequence: Synthetic oligonucleotide
ggguggagauucguugugg

SEQ ID NO: 1787051 - RNA, 19 nt, Artificial Sequence
  Description of Artificial Sequence: Synthetic oligonucleotide
gaucuuuuccugguacacu

SEQ ID NO: 1787052 - RNA, 19 nt, Artificial Sequence
  Description of Artificial Sequence: Synthetic oligonucleotide
gcaauugacaucagcucca

SEQ ID NO: 1787053 - RNA, 19 nt, Artificial Sequence
  Description of Artificial Sequence: Synthetic oligonucleotide
cagaaguaacuugcacaug

SEQ ID NO: 1787054 - RNA, 19 nt, Artificial Sequence
  Description of Artificial Sequence: Synthetic oligonucleotide
gcacaugucaaguuuuccu

SEQ ID NO: 1787055 - RNA, 19 nt, Artificial Sequence
  Description of Artificial Sequence: Synthetic oligonucleotide
cucuuacacaucuucuuau

SEQ ID NO: 1787056 - RNA, 19 nt, Artificial Sequence
  Description of Artificial Sequence: Synthetic oligonucleotide
ggucacaauauauuaccau

SEQ ID NO: 1787057 - RNA, 19 nt, Artificial Sequence
  Description of Artificial Sequence: Synthetic oligonucleotide
gcucccuuuucuccacagg

SEQ ID NO: 1787058 - RNA, 19 nt, Artificial Sequence
  Description of Artificial Sequence: Synthetic oligonucleotide
acacaaucaugcugaccua

SEQ ID NO: 1787059 - RNA, 19 nt, Artificial Sequence
  Description of Artificial Sequence: Synthetic oligonucleotide
gcuucgcaccagcugcugg

SEQ ID NO: 1787060 - RNA, 19 nt, Artificial Sequence
  Description of Artificial Sequence: Synthetic oligonucleotide
cugaguucacaacauccgu

SEQ ID NO: 1787061 - RNA, 19 nt, Artificial Sequence
  Description of Artificial Sequence: Synthetic oligonucleotide
guaccuuuccccgaucacu

SEQ ID NO: 1787062 - RNA, 19 nt, Artificial Sequence
  Description of Artificial Sequence: Synthetic oligonucleotide
acgguaccuuuccccgauc

SEQ ID NO: 1787063 - RNA, 19 nt, Artificial Sequence
  Description of Artificial Sequence: Synthetic oligonucleotide
gguaccuuuccccgaucac

SEQ ID NO: 1787064 - RNA, 19 nt, Artificial Sequence
  Description of Artificial Sequence: Synthetic oligonucleotide
cauucucauccaaacaguu

SEQ ID NO: 1787065 - RNA, 19 nt, Artificial Sequence
  Description of Artificial Sequence: Synthetic oligonucleotide
ucacccacgugaugucuuu

SEQ ID NO: 1787066 - RNA, 19 nt, Artificial Sequence
  Description of Artificial Sequence: Synthetic oligonucleotide
gagcaaugcuucgcaccag

SEQ ID NO: 1787067 - RNA, 19 nt, Artificial Sequence
  Description of Artificial Sequence: Synthetic oligonucleotide
caacuuugaaggcuguaau

SEQ ID NO: 1787068 - RNA, 19 nt, Artificial Sequence
  Description of Artificial Sequence: Synthetic oligonucleotide
cuguaauaauccagucucu

SEQ ID NO: 1787069 - RNA, 19 nt, Artificial Sequence
  Description of Artificial Sequence: Synthetic oligonucleotide
gguaaugauuuugugcagu

SEQ ID NO: 1787070 - RNA, 19 nt, Artificial Sequence
  Description of Artificial Sequence: Synthetic oligonucleotide
ggguaaguacagagaacgc

SEQ ID NO: 1787071 - RNA, 19 nt, Artificial Sequence
  Description of Artificial Sequence: Synthetic oligonucleotide
ugcgaaccagugugucuuc

SEQ ID NO: 1787072 - RNA, 19 nt, Artificial Sequence
  Description of Artificial Sequence: Synthetic oligonucleotide
cacaaaccccacuuguccu

SEQ ID NO: 1787073 - RNA, 19 nt, Artificial Sequence
  Description of Artificial Sequence: Synthetic oligonucleotide
gagcauccugugugcuggc

SEQ ID NO: 1787074 - RNA, 19 nt, Artificial Sequence
  Description of Artificial Sequence: Synthetic oligonucleotide
gcaugcauuaaaggaguca

SEQ ID NO: 1787075 - RNA, 19 nt, Artificial Sequence
  Description of Artificial Sequence: Synthetic oligonucleotide
cguugugguaaugauuuug

SEQ ID NO: 1787076 - RNA, 19 nt, Artificial Sequence
  Description of Artificial Sequence: Synthetic oligonucleotide
ucguugugguaaugauuuu

SEQ ID NO: 1787077 - RNA, 19 nt, Artificial Sequence
  Description of Artificial Sequence: Synthetic oligonucleotide
ggcgguucuuccgacugag

SEQ ID NO: 1787078 - RNA, 19 nt, Artificial Sequence
  Description of Artificial Sequence: Synthetic oligonucleotide
cucucucgagggaagaaau

SEQ ID NO: 1787079 - RNA, 19 nt, Artificial Sequence
  Description of Artificial Sequence: Synthetic oligonucleotide
agaacgcaguuggauccga

SEQ ID NO: 1787080 - RNA, 19 nt, Artificial Sequence
  Description of Artificial Sequence: Synthetic oligonucleotide
ugcuucgcaccagcugcug

SEQ ID NO: 1787081 - RNA, 19 nt, Artificial Sequence
  Description of Artificial Sequence: Synthetic oligonucleotide
ggagucaugccauucucau

SEQ ID NO: 1787082 - RNA, 19 nt, Artificial Sequence
  Description of Artificial Sequence: Synthetic oligonucleotide
gcuuggguaaguacagaga

SEQ ID NO: 1787083 - RNA, 19 nt, Artificial Sequence
  Description of Artificial Sequence: Synthetic oligonucleotide
ccgauccgauuucaacugg

SEQ ID NO: 1787084 - RNA, 19 nt, Artificial Sequence
  Description of Artificial Sequence: Synthetic oligonucleotide
gacgguaccuuuccccgau

SEQ ID NO: 1787085 - RNA, 19 nt, Artificial Sequence
  Description of Artificial Sequence: Synthetic oligonucleotide
ccaugcucauguugauggc

SEQ ID NO: 1787086 - RNA, 19 nt, Artificial Sequence
  Description of Artificial Sequence: Synthetic oligonucleotide
cucgagggaagaaauuguu

SEQ ID NO: 1787087 - RNA, 19 nt, Artificial Sequence
  Description of Artificial Sequence: Synthetic oligonucleotide
caggguggagauucguugu

SEQ ID NO: 1787088 - RNA, 19 nt, Artificial Sequence
  Description of Artificial Sequence: Synthetic oligonucleotide
ggaagaaauuguugauuau

SEQ ID NO: 1787089 - RNA, 19 nt, Artificial Sequence
  Description of Artificial Sequence: Synthetic oligonucleotide
gcggcgguucuuccgacug

SEQ ID NO: 1787090 - RNA, 19 nt, Artificial Sequence
  Description of Artificial Sequence: Synthetic oligonucleotide
cauccgucucugcgccugc

SEQ ID NO: 1787091 - RNA, 19 nt, Artificial Sequence
  Description of Artificial Sequence: Synthetic oligonucleotide
gggaagccaucagaugccc

SEQ ID NO: 1787092 - RNA, 19 nt, Artificial Sequence
  Description of Artificial Sequence: Synthetic oligonucleotide
agcugauguagugcauuuu

SEQ ID NO: 1787093 - RNA, 19 nt, Artificial Sequence
  Description of Artificial Sequence: Synthetic oligonucleotide
auccaucaccuuguagcau

SEQ ID NO: 1787094 - RNA, 19 nt, Artificial Sequence
  Description of Artificial Sequence: Synthetic oligonucleotide
ccuacaaaggcugccaucu

SEQ ID NO: 1787095 - RNA, 19 nt, Artificial Sequence
  Description of Artificial Sequence: Synthetic oligonucleotide
gaccuacaaaggcugccau

SEQ ID NO: 1787096 - RNA, 19 nt, Artificial Sequence
  Description of Artificial Sequence: Synthetic oligonucleotide
ccacuuguccugugauggc

SEQ ID NO: 1787097 - RNA, 19 nt, Artificial Sequence
  Description of Artificial Sequence: Synthetic oligonucleotide
gcaaaccgaacaucuuuua

SEQ ID NO: 1787098 - RNA, 19 nt, Artificial Sequence
  Description of Artificial Sequence: Synthetic oligonucleotide
gugcagugguccugccaac

SEQ ID NO: 1787099 - RNA, 19 nt, Artificial Sequence
  Description of Artificial Sequence: Synthetic oligonucleotide
aucacccacgugaugucuu

SEQ ID NO: 1787100 - RNA, 19 nt, Artificial Sequence
  Description of Artificial Sequence: Synthetic oligonucleotide
gcugaccuacaaaggcugc

SEQ ID NO: 1787101 - RNA, 19 nt, Artificial Sequence
  Description of Artificial Sequence: Synthetic oligonucleotide
agcaaacaugagggcugug

SEQ ID NO: 1787102 - RNA, 19 nt, Artificial Sequence
  Description of Artificial Sequence: Synthetic oligonucleotide
gcaguuggauccgauccga

SEQ ID NO: 1787103 - RNA, 19 nt, Artificial Sequence
  Description of Artificial Sequence: Synthetic oligonucleotide
augcuucgcaccagcugcu

SEQ ID NO: 1787104 - RNA, 19 nt, Artificial Sequence
  Description of Artificial Sequence: Synthetic oligonucleotide
caucuuuuacuugcucccu

SEQ ID NO: 1787105 - RNA, 19 nt, Artificial Sequence
  Description of Artificial Sequence: Synthetic oligonucleotide
gugcgaaccagugugucuu

SEQ ID NO: 1787106 - RNA, 19 nt, Artificial Sequence
  Description of Artificial Sequence: Synthetic oligonucleotide
gacaggguggagauucguu

SEQ ID NO: 1787107 - RNA, 19 nt, Artificial Sequence
  Description of Artificial Sequence: Synthetic oligonucleotide
ggagauucguugugguaau

SEQ ID NO: 1787108 - RNA, 19 nt, Artificial Sequence
  Description of Artificial Sequence: Synthetic oligonucleotide
ggcgcagaaguaacuugca

SEQ ID NO: 1787109 - RNA, 19 nt, Artificial Sequence
  Description of Artificial Sequence: Synthetic oligonucleotide
gcccugccuuuuaacaagc

SEQ ID NO: 1787110 - RNA, 19 nt, Artificial Sequence
  Description of Artificial Sequence: Synthetic oligonucleotide
cauucaugucucucugcuu

SEQ ID NO: 1787111 - RNA, 19 nt, Artificial Sequence
  Description of Artificial Sequence: Synthetic oligonucleotide
cauggcgcagaaguaacuu

SEQ ID NO: 1787112 - RNA, 19 nt, Artificial Sequence
  Description of Artificial Sequence: Synthetic oligonucleotide
gauguccacuguagccucu

SEQ ID NO: 1787113 - RNA, 19 nt, Artificial Sequence
  Description of Artificial Sequence: Synthetic oligonucleotide
ggucuggucacaauauauu

SEQ ID NO: 1787114 - RNA, 19 nt, Artificial Sequence
  Description of Artificial Sequence: Synthetic oligonucleotide
ggacgguaccuuuccccga

SEQ ID NO: 1787115 - RNA, 19 nt, Artificial Sequence
  Description of Artificial Sequence: Synthetic oligonucleotide
uuccagcuucuuggacggu

SEQ ID NO: 1787116 - RNA, 19 nt, Artificial Sequence
  Description of Artificial Sequence: Synthetic oligonucleotide
cgauccgauuucaacugga

SEQ ID NO: 1787117 - RNA, 19 nt, Artificial Sequence
  Description of Artificial Sequence: Synthetic oligonucleotide
ccgauuucaacuggagcaa

SEQ ID NO: 1787118 - RNA, 19 nt, Artificial Sequence
  Description of Artificial Sequence: Synthetic oligonucleotide
caucgagcuuuccauucuu

SEQ ID NO: 1787119 - RNA, 19 nt, Artificial Sequence
  Description of Artificial Sequence: Synthetic oligonucleotide
cuguagccucugguugauc

SEQ ID NO: 1787120 - RNA, 19 nt, Artificial Sequence
  Description of Artificial Sequence: Synthetic oligonucleotide
caaaccccacuuguccugu

SEQ ID NO: 1787121 - RNA, 19 nt, Artificial Sequence
  Description of Artificial Sequence: Synthetic oligonucleotide
caucacccacgugaugucu

SEQ ID NO: 1787122 - RNA, 19 nt, Artificial Sequence
  Description of Artificial Sequence: Synthetic oligonucleotide
ccugccaacuuugaaggcu

SEQ ID NO: 1787123 - RNA, 19 nt, Artificial Sequence
  Description of Artificial Sequence: Synthetic oligonucleotide
gcauuuacugagagcggcu

SEQ ID NO: 1787124 - RNA, 19 nt, Artificial Sequence
  Description of Artificial Sequence: Synthetic oligonucleotide
ugccaucugggcggcgguu

SEQ ID NO: 1787125 - RNA, 19 nt, Artificial Sequence
  Description of Artificial Sequence: Synthetic oligonucleotide
ccgucucugcgccugccuc

SEQ ID NO: 1787126 - RNA, 19 nt, Artificial Sequence
  Description of Artificial Sequence: Synthetic oligonucleotide
gaacgcaguuggauccgau

SEQ ID NO: 1787127 - RNA, 19 nt, Artificial Sequence
  Description of Artificial Sequence: Synthetic oligonucleotide
ccuccaacaucacccacgu

SEQ ID NO: 1787128 - RNA, 19 nt, Artificial Sequence
  Description of Artificial Sequence: Synthetic oligonucleotide
ccagucucucucgagggaa

SEQ ID NO: 1787129 - RNA, 19 nt, Artificial Sequence
  Description of Artificial Sequence: Synthetic oligonucleotide
gccaucugggcggcgguuc

SEQ ID NO: 1787130 - RNA, 19 nt, Artificial Sequence
  Description of Artificial Sequence: Synthetic oligonucleotide
gcggcugcuucugccagca

SEQ ID NO: 1787131 - RNA, 19 nt, Artificial Sequence
  Description of Artificial Sequence: Synthetic oligonucleotide
ccuuuucuccacagguggu

SEQ ID NO: 1787132 - RNA, 19 nt, Artificial Sequence
  Description of Artificial Sequence: Synthetic oligonucleotide
ccgacugaguucacaacau

SEQ ID NO: 1787133 - RNA, 19 nt, Artificial Sequence
  Description of Artificial Sequence: Synthetic oligonucleotide
caguuggauccgauccgau

SEQ ID NO: 1787134 - RNA, 19 nt, Artificial Sequence
  Description of Artificial Sequence: Synthetic oligonucleotide
gcucauguugauggcaauu

SEQ ID NO: 1787135 - RNA, 19 nt, Artificial Sequence
  Description of Artificial Sequence: Synthetic oligonucleotide
gcaaugcuucgcaccagcu

SEQ ID NO: 1787136 - RNA, 19 nt, Artificial Sequence
  Description of Artificial Sequence: Synthetic oligonucleotide
ccguggcucugcaggagca

SEQ ID NO: 1787137 - RNA, 19 nt, Artificial Sequence
  Description of Artificial Sequence: Synthetic oligonucleotide
ggaagccaucagaugcccu

SEQ ID NO: 1787138 - RNA, 19 nt, Artificial Sequence
  Description of Artificial Sequence: Synthetic oligonucleotide
cacccacgugaugucuuua

SEQ ID NO: 1787139 - RNA, 19 nt, Artificial Sequence
  Description of Artificial Sequence: Synthetic oligonucleotide
cugccaucugggcggcggu

SEQ ID NO: 1787140 - RNA, 19 nt, Artificial Sequence
  Description of Artificial Sequence: Synthetic oligonucleotide
ggcggcgguucuuccgacu

SEQ ID NO: 1787141 - RNA, 19 nt, Artificial Sequence
  Description of Artificial Sequence: Synthetic oligonucleotide
gcgaaccagugugucuucu

SEQ ID NO: 1787142 - RNA, 19 nt, Artificial Sequence
  Description of Artificial Sequence: Synthetic oligonucleotide
cucuuauguuuggcagcuu

SEQ ID NO: 1787143 - RNA, 19 nt, Artificial Sequence
  Description of Artificial Sequence: Synthetic oligonucleotide
cggcgguucuuccgacuga

SEQ ID NO: 1787144 - RNA, 19 nt, Artificial Sequence
  Description of Artificial Sequence: Synthetic oligonucleotide
gcgguucuuccgacugagu

SEQ ID NO: 1787145 - RNA, 19 nt, Artificial Sequence
  Description of Artificial Sequence: Synthetic oligonucleotide
caucugggcggcgguucuu

SEQ ID NO: 1787146 - RNA, 19 nt, Artificial Sequence
  Description of Artificial Sequence: Synthetic oligonucleotide
aacauauagacacugugug

SEQ ID NO: 1787147 - RNA, 19 nt, Artificial Sequence
  Description of Artificial Sequence: Synthetic oligonucleotide
aaagacaaccacuccggcg

SEQ ID NO: 1787148 - RNA, 19 nt, Artificial Sequence
  Description of Artificial Sequence: Synthetic oligonucleotide
ucugacguauugaagaaca

SEQ ID NO: 1787149 - RNA, 19 nt, Artificial Sequence
  Description of Artificial Sequence: Synthetic oligonucleotide
aagacaaccacuccggcgu

SEQ ID NO: 1787150 - RNA, 19 nt, Artificial Sequence
  Description of Artificial Sequence: Synthetic oligonucleotide
aaauguagggacagggccc

SEQ ID NO: 1787151 - RNA, 19 nt, Artificial Sequence
  Description of Artificial Sequence: Synthetic oligonucleotide
agaacauauagacacugug

SEQ ID NO: 1787152 - RNA, 19 nt, Artificial Sequence
  Description of Artificial Sequence: Synthetic oligonucleotide
ucauagauuggguugcugc

SEQ ID NO: 1787153 - RNA, 19 nt, Artificial Sequence
  Description of Artificial Sequence: Synthetic oligonucleotide
uguuguucuacacuugacu

SEQ ID NO: 1787154 - RNA, 19 nt, Artificial Sequence
  Description of Artificial Sequence: Synthetic oligonucleotide
uuugguuuuaucauagauu

SEQ ID NO: 1787155 - RNA, 19 nt, Artificial Sequence
  Description of Artificial Sequence: Synthetic oligonucleotide
gguuuuaucauagauuggg

SEQ ID NO: 1787156 - RNA, 19 nt, Artificial Sequence
  Description of Artificial Sequence: Synthetic oligonucleotide
ucuacacuugacuugaauc

SEQ ID NO: 1787157 - RNA, 19 nt, Artificial Sequence
  Description of Artificial Sequence: Synthetic oligonucleotide
aucaaaagacaaccacucc

SEQ ID NO: 1787158 - RNA, 19 nt, Artificial Sequence
  Description of Artificial Sequence: Synthetic oligonucleotide
aguacguugucuuugcugu

SEQ ID NO: 1787159 - RNA, 19 nt, Artificial Sequence
  Description of Artificial Sequence: Synthetic oligonucleotide
aauguagggacagggcccc

SEQ ID NO: 1787160 - RNA, 19 nt, Artificial Sequence
  Description of Artificial Sequence: Synthetic oligonucleotide
gacaucaaaagacaaccac

SEQ ID NO: 1787161 - RNA, 19 nt, Artificial Sequence
  Description of Artificial Sequence: Synthetic oligonucleotide
augucugacguauugaaga

SEQ ID NO: 1787162 - RNA, 19 nt, Artificial Sequence
  Description of Artificial Sequence: Synthetic oligonucleotide
cuugaaucucugcagacgc

SEQ ID NO: 1787163 - RNA, 19 nt, Artificial Sequence
  Description of Artificial Sequence: Synthetic oligonucleotide
ucuuuggcguaguaguccg

SEQ ID NO: 1787164 - RNA, 19 nt, Artificial Sequence
  Description of Artificial Sequence: Synthetic oligonucleotide
cauagauuggguugcugcg

SEQ ID NO: 1787165 - RNA, 19 nt, Artificial Sequence
  Description of Artificial Sequence: Synthetic oligonucleotide
uuaucauagauuggguugc

SEQ ID NO: 1787166 - RNA, 19 nt, Artificial Sequence
  Description of Artificial Sequence: Synthetic oligonucleotide
uuuuaucauagauuggguu

SEQ ID NO: 1787167 - RNA, 19 nt, Artificial Sequence
  Description of Artificial Sequence: Synthetic oligonucleotide
acugaucccguugauuucc

SEQ ID NO: 1787168 - RNA, 19 nt, Artificial Sequence
  Description of Artificial Sequence: Synthetic oligonucleotide
cuugguucagccacugccg

SEQ ID NO: 1787169 - RNA, 19 nt, Artificial Sequence
  Description of Artificial Sequence: Synthetic oligonucleotide
ucgguuaccaagguaacgc

SEQ ID NO: 1787170 - RNA, 19 nt, Artificial Sequence
  Description of Artificial Sequence: Synthetic oligonucleotide
gaagcgaaagcccuguauc

SEQ ID NO: 1787171 - RNA, 19 nt, Artificial Sequence
  Description of Artificial Sequence: Synthetic oligonucleotide
ugucacaagagcagugagc

SEQ ID NO: 1787172 - RNA, 19 nt, Artificial Sequence
  Description of Artificial Sequence: Synthetic oligonucleotide
uguucuacacuugacuuga

SEQ ID NO: 1787173 - RNA, 19 nt, Artificial Sequence
  Description of Artificial Sequence: Synthetic oligonucleotide
uaaugucugacguauugaa

SEQ ID NO: 1787174 - RNA, 19 nt, Artificial Sequence
  Description of Artificial Sequence: Synthetic oligonucleotide
uuccgaaagucaauguaca

SEQ ID NO: 1787175 - RNA, 19 nt, Artificial Sequence
  Description of Artificial Sequence: Synthetic oligonucleotide
auggcuucgaugcguuugc

SEQ ID NO: 1787176 - RNA, 19 nt, Artificial Sequence
  Description of Artificial Sequence: Synthetic oligonucleotide
uuguacagggcgagcacgg

SEQ ID NO: 1787177 - RNA, 19 nt, Artificial Sequence
  Description of Artificial Sequence: Synthetic oligonucleotide
uuugggacugaucccguug

SEQ ID NO: 1787178 - RNA, 19 nt, Artificial Sequence
  Description of Artificial Sequence: Synthetic oligonucleotide
accucuuuggcguaguagu

SEQ ID NO: 1787179 - RNA, 19 nt, Artificial Sequence
  Description of Artificial Sequence: Synthetic oligonucleotide
aaugucugacguauugaag

SEQ ID NO: 1787180 - RNA, 19 nt, Artificial Sequence
  Description of Artificial Sequence: Synthetic oligonucleotide
ugacaucaaaagacaacca

SEQ ID NO: 1787181 - RNA, 19 nt, Artificial Sequence
  Description of Artificial Sequence: Synthetic oligonucleotide
gaguacguugucuuugcug

SEQ ID NO: 1787182 - RNA, 19 nt, Artificial Sequence
  Description of Artificial Sequence: Synthetic oligonucleotide
uucugguagaguuccacgu

SEQ ID NO: 1787183 - RNA, 19 nt, Artificial Sequence
  Description of Artificial Sequence: Synthetic oligonucleotide
uaguacacgaugggcagcg

SEQ ID NO: 1787184 - RNA, 19 nt, Artificial Sequence
  Description of Artificial Sequence: Synthetic oligonucleotide
uacaaccgcagugacauca

SEQ ID NO: 1787185 - RNA, 19 nt, Artificial Sequence
  Description of Artificial Sequence: Synthetic oligonucleotide
cguauugaagaacauauag

SEQ ID NO: 1787186 - RNA, 19 nt, Artificial Sequence
  Description of Artificial Sequence: Synthetic oligonucleotide
uuccacguggaguacguug

SEQ ID NO: 1787187 - RNA, 19 nt, Artificial Sequence
  Description of Artificial Sequence: Synthetic oligonucleotide
augcguuugcguuucacca

SEQ ID NO: 1787188 - RNA, 19 nt, Artificial Sequence
  Description of Artificial Sequence: Synthetic oligonucleotide
gagcacugaagcgaaagcc

SEQ ID NO: 1787189 - RNA, 19 nt, Artificial Sequence
  Description of Artificial Sequence: Synthetic oligonucleotide
uuaccaagguaacgccagg

SEQ ID NO: 1787190 - RNA, 19 nt, Artificial Sequence
  Description of Artificial Sequence: Synthetic oligonucleotide
guuaccaagguaacgccag

SEQ ID NO: 1787191 - RNA, 19 nt, Artificial Sequence
  Description of Artificial Sequence: Synthetic oligonucleotide
agcgaaagcccuguauccc

SEQ ID NO: 1787192 - RNA, 19 nt, Artificial Sequence
  Description of Artificial Sequence: Synthetic oligonucleotide
auagauuggguugcugcgg

SEQ ID NO: 1787193 - RNA, 19 nt, Artificial Sequence
  Description of Artificial Sequence: Synthetic oligonucleotide
ugucgcacacagcaguucu

SEQ ID NO: 1787194 - RNA, 19 nt, Artificial Sequence
  Description of Artificial Sequence: Synthetic oligonucleotide
aagguaacgccaggaauug

SEQ ID NO: 1787195 - RNA, 19 nt, Artificial Sequence
  Description of Artificial Sequence: Synthetic oligonucleotide
gauuuccacguggaguacg

SEQ ID NO: 1787196 - RNA, 19 nt, Artificial Sequence
  Description of Artificial Sequence: Synthetic oligonucleotide
agucaauguacagcugucg

SEQ ID NO: 1787197 - RNA, 19 nt, Artificial Sequence
  Description of Artificial Sequence: Synthetic oligonucleotide
acguuugggacugaucccg

SEQ ID NO: 1787198 - RNA, 19 nt, Artificial Sequence
  Description of Artificial Sequence: Synthetic oligonucleotide
auggugacgccgaagcacc

SEQ ID NO: 1787199 - RNA, 19 nt, Artificial Sequence
  Description of Artificial Sequence: Synthetic oligonucleotide
caauguacagcugucgcac

SEQ ID NO: 1787200 - RNA, 19 nt, Artificial Sequence
  Description of Artificial Sequence: Synthetic oligonucleotide
guaguaguccgccucgggc

SEQ ID NO: 1787201 - RNA, 19 nt, Artificial Sequence
  Description of Artificial Sequence: Synthetic oligonucleotide
guguugguuguagagggcg

SEQ ID NO: 1787202 - RNA, 19 nt, Artificial Sequence
  Description of Artificial Sequence: Synthetic oligonucleotide
ugaauggugcccaggucac

SEQ ID NO: 1787203 - RNA, 19 nt, Artificial Sequence
  Description of Artificial Sequence: Synthetic oligonucleotide
uaacgccaggaauuguugc

SEQ ID NO: 1787204 - RNA, 19 nt, Artificial Sequence
  Description of Artificial Sequence: Synthetic oligonucleotide
ugcguuugcguuucaccag

SEQ ID NO: 1787205 - RNA, 19 nt, Artificial Sequence
  Description of Artificial Sequence: Synthetic oligonucleotide
uugggacugaucccguuga

SEQ ID NO: 1787206 - RNA, 19 nt, Artificial Sequence
  Description of Artificial Sequence: Synthetic oligonucleotide
caugguagcccuuggguuc

SEQ ID NO: 1787207 - RNA, 19 nt, Artificial Sequence
  Description of Artificial Sequence: Synthetic oligonucleotide
uuuggcguaguaguccgcc

SEQ ID NO: 1787208 - RNA, 19 nt, Artificial Sequence
  Description of Artificial Sequence: Synthetic oligonucleotide
gacguauugaagaacauau

SEQ ID NO: 1787209 - RNA, 19 nt, Artificial Sequence
  Description of Artificial Sequence: Synthetic oligonucleotide
gauuggguugcugcggucc

SEQ ID NO: 1787210 - RNA, 19 nt, Artificial Sequence
  Description of Artificial Sequence: Synthetic oligonucleotide
guuguacagggcgagcacg

SEQ ID NO: 1787211 - RNA, 19 nt, Artificial Sequence
  Description of Artificial Sequence: Synthetic oligonucleotide
gagggcgaggaccuuacug

SEQ ID NO: 1787212 - RNA, 19 nt, Artificial Sequence
  Description of Artificial Sequence: Synthetic oligonucleotide
uagauuggguugcugcggu

SEQ ID NO: 1787213 - RNA, 19 nt, Artificial Sequence
  Description of Artificial Sequence: Synthetic oligonucleotide
cagcagucgguuaccaagg

SEQ ID NO: 1787214 - RNA, 19 nt, Artificial Sequence
  Description of Artificial Sequence: Synthetic oligonucleotide
gacguuugggacugauccc

SEQ ID NO: 1787215 - RNA, 19 nt, Artificial Sequence
  Description of Artificial Sequence: Synthetic oligonucleotide
uucuacacuugacuugaau

SEQ ID NO: 1787216 - RNA, 19 nt, Artificial Sequence
  Description of Artificial Sequence: Synthetic oligonucleotide
uccaugucgauggucuugc

SEQ ID NO: 1787217 - RNA, 19 nt, Artificial Sequence
  Description of Artificial Sequence: Synthetic oligonucleotide
cagucgguuaccaagguaa

SEQ ID NO: 1787218 - RNA, 19 nt, Artificial Sequence
  Description of Artificial Sequence: Synthetic oligonucleotide
aaccacuccggcguaucgg

SEQ ID NO: 1787219 - RNA, 19 nt, Artificial Sequence
  Description of Artificial Sequence: Synthetic oligonucleotide
cugugugggaugucuuugg

SEQ ID NO: 1787220 - RNA, 19 nt, Artificial Sequence
  Description of Artificial Sequence: Synthetic oligonucleotide
uugcgacccacguaguaca

SEQ ID NO: 1787221 - RNA, 19 nt, Artificial Sequence
  Description of Artificial Sequence: Synthetic oligonucleotide
auauagacacuguguggga

SEQ ID NO: 1787222 - RNA, 19 nt, Artificial Sequence
  Description of Artificial Sequence: Synthetic oligonucleotide
gucaccucgacguuuggga

SEQ ID NO: 1787223 - RNA, 19 nt, Artificial Sequence
  Description of Artificial Sequence: Synthetic oligonucleotide
ugugugggaugucuuuggu

SEQ ID NO: 1787224 - RNA, 19 nt, Artificial Sequence
  Description of Artificial Sequence: Synthetic oligonucleotide
cucuuuggcguaguagucc

SEQ ID NO: 1787225 - RNA, 19 nt, Artificial Sequence
  Description of Artificial Sequence: Synthetic oligonucleotide
cauggugacgccgaagcac

SEQ ID NO: 1787226 - RNA, 19 nt, Artificial Sequence
  Description of Artificial Sequence: Synthetic oligonucleotide
cuguaucccgucuccuugg

SEQ ID NO: 1787227 - RNA, 19 nt, Artificial Sequence
  Description of Artificial Sequence: Synthetic oligonucleotide
acgcgggugaccucuuugg

SEQ ID NO: 1787228 - RNA, 19 nt, Artificial Sequence
  Description of Artificial Sequence: Synthetic oligonucleotide
ucccuaaugucugacguau

SEQ ID NO: 1787229 - RNA, 19 nt, Artificial Sequence
  Description of Artificial Sequence: Synthetic oligonucleotide
cacuccggcguaucggugg

SEQ ID NO: 1787230 - RNA, 19 nt, Artificial Sequence
  Description of Artificial Sequence: Synthetic oligonucleotide
ggagcggacgaucauguug

SEQ ID NO: 1787231 - RNA, 19 nt, Artificial Sequence
  Description of Artificial Sequence: Synthetic oligonucleotide
ugacguauugaagaacaua

SEQ ID NO: 1787232 - RNA, 19 nt, Artificial Sequence
  Description of Artificial Sequence: Synthetic oligonucleotide
cacguaguacacgaugggc

SEQ ID NO: 1787233 - RNA, 19 nt, Artificial Sequence
  Description of Artificial Sequence: Synthetic oligonucleotide
acguaguacacgaugggca

SEQ ID NO: 1787234 - RNA, 19 nt, Artificial Sequence
  Description of Artificial Sequence: Synthetic oligonucleotide
ucaggcacugcuucccuaa

SEQ ID NO: 1787235 - RNA, 19 nt, Artificial Sequence
  Description of Artificial Sequence: Synthetic oligonucleotide
gggcuugcgacccacguag

SEQ ID NO: 1787236 - RNA, 19 nt, Artificial Sequence
  Description of Artificial Sequence: Synthetic oligonucleotide
cugucacaagagcagugag

SEQ ID NO: 1787237 - RNA, 19 nt, Artificial Sequence
  Description of Artificial Sequence: Synthetic oligonucleotide
gaccucuuuggcguaguag

SEQ ID NO: 1787238 - RNA, 19 nt, Artificial Sequence
  Description of Artificial Sequence: Synthetic oligonucleotide
uugguucagccacugccgu

SEQ ID NO: 1787239 - RNA, 19 nt, Artificial Sequence
  Description of Artificial Sequence: Synthetic oligonucleotide
uauagacacugugugggau

SEQ ID NO: 1787240 - RNA, 19 nt, Artificial Sequence
  Description of Artificial Sequence: Synthetic oligonucleotide
cgacguuugggacugaucc

SEQ ID NO: 1787241 - RNA, 19 nt, Artificial Sequence
  Description of Artificial Sequence: Synthetic oligonucleotide
uccacguguuguucuacac

SEQ ID NO: 1787242 - RNA, 19 nt, Artificial Sequence
  Description of Artificial Sequence: Synthetic oligonucleotide
uccggaucggcgcucucgc

SEQ ID NO: 1787243 - RNA, 19 nt, Artificial Sequence
  Description of Artificial Sequence: Synthetic oligonucleotide
cccacguaguacacgaugg

SEQ ID NO: 1787244 - RNA, 19 nt, Artificial Sequence
  Description of Artificial Sequence: Synthetic oligonucleotide
cagccacugccguacaacc

SEQ ID NO: 1787245 - RNA, 19 nt, Artificial Sequence
  Description of Artificial Sequence: Synthetic oligonucleotide
uuggguucguggauccacu

SEQ ID NO: 1787246 - RNA, 19 nt, Artificial Sequence
  Description of Artificial Sequence: Synthetic oligonucleotide
uuccacguguuguucuaca

SEQ ID NO: 1787247 - RNA, 19 nt, Artificial Sequence
  Description of Artificial Sequence: Synthetic oligonucleotide
guacacgaugggcagcggc

SEQ ID NO: 1787248 - RNA, 19 nt, Artificial Sequence
  Description of Artificial Sequence: Synthetic oligonucleotide
gucgguuaccaagguaacg

SEQ ID NO: 1787249 - RNA, 19 nt, Artificial Sequence
  Description of Artificial Sequence: Synthetic oligonucleotide
ucaccucgacguuugggac

SEQ ID NO: 1787250 - RNA, 19 nt, Artificial Sequence
  Description of Artificial Sequence: Synthetic oligonucleotide
ccuaaugucugacguauug

SEQ ID NO: 1787251 - RNA, 19 nt, Artificial Sequence
  Description of Artificial Sequence: Synthetic oligonucleotide
uuugcaggagcggacgauc

SEQ ID NO: 1787252 - RNA, 19 nt, Artificial Sequence
  Description of Artificial Sequence: Synthetic oligonucleotide
uagaguuccacguguuguu

SEQ ID NO: 1787253 - RNA, 19 nt, Artificial Sequence
  Description of Artificial Sequence: Synthetic oligonucleotide
acugugugggaugucuuug

SEQ ID NO: 1787254 - RNA, 19 nt, Artificial Sequence
  Description of Artificial Sequence: Synthetic oligonucleotide
uccguggagcugaagcagu

SEQ ID NO: 1787255 - RNA, 19 nt, Artificial Sequence
  Description of Artificial Sequence: Synthetic oligonucleotide
uagagggcgaggaccuuac

SEQ ID NO: 1787256 - RNA, 19 nt, Artificial Sequence
  Description of Artificial Sequence: Synthetic oligonucleotide
guacagggcgagcacggcc

SEQ ID NO: 1787257 - RNA, 19 nt, Artificial Sequence
  Description of Artificial Sequence: Synthetic oligonucleotide
cuuggguucguggauccac

SEQ ID NO: 1787258 - RNA, 19 nt, Artificial Sequence
  Description of Artificial Sequence: Synthetic oligonucleotide
agucgguuaccaagguaac

SEQ ID NO: 1787259 - RNA, 19 nt, Artificial Sequence
  Description of Artificial Sequence: Synthetic oligonucleotide
uguaucccgucuccuuggu

SEQ ID NO: 1787260 - RNA, 19 nt, Artificial Sequence
  Description of Artificial Sequence: Synthetic oligonucleotide
augguagcccuuggguucg

SEQ ID NO: 1787261 - RNA, 19 nt, Artificial Sequence
  Description of Artificial Sequence: Synthetic oligonucleotide
acugccguacaaccgcagu

SEQ ID NO: 1787262 - RNA, 19 nt, Artificial Sequence
  Description of Artificial Sequence: Synthetic oligonucleotide
cugccguacaaccgcagug

SEQ ID NO: 1787263 - RNA, 19 nt, Artificial Sequence
  Description of Artificial Sequence: Synthetic oligonucleotide
acuccggcguaucgguggg

SEQ ID NO: 1787264 - RNA, 19 nt, Artificial Sequence
  Description of Artificial Sequence: Synthetic oligonucleotide
agauuggguugcugcgguc

SEQ ID NO: 1787265 - RNA, 19 nt, Artificial Sequence
  Description of Artificial Sequence: Synthetic oligonucleotide
accacuccggcguaucggu

SEQ ID NO: 1787266 - RNA, 19 nt, Artificial Sequence
  Description of Artificial Sequence: Synthetic oligonucleotide
ccgaaagucaauguacagc

SEQ ID NO: 1787267 - RNA, 19 nt, Artificial Sequence
  Description of Artificial Sequence: Synthetic oligonucleotide
aagcacccggguuguguug

SEQ ID NO: 1787268 - RNA, 19 nt, Artificial Sequence
  Description of Artificial Sequence: Synthetic oligonucleotide
agcacccggguuguguugg

SEQ ID NO: 1787269 - RNA, 19 nt, Artificial Sequence
  Description of Artificial Sequence: Synthetic oligonucleotide
ugacgccgaagcacccggg

SEQ ID NO: 1787270 - RNA, 19 nt, Artificial Sequence
  Description of Artificial Sequence: Synthetic oligonucleotide
caggucaccucgacguuug

SEQ ID NO: 1787271 - RNA, 19 nt, Artificial Sequence
  Description of Artificial Sequence: Synthetic oligonucleotide
uucgaugcguuugcguuuc

SEQ ID NO: 1787272 - RNA, 19 nt, Artificial Sequence
  Description of Artificial Sequence: Synthetic oligonucleotide
uucccuaaugucugacgua

SEQ ID NO: 1787273 - RNA, 19 nt, Artificial Sequence
  Description of Artificial Sequence: Synthetic oligonucleotide
ggcguaguaguccgccucg

SEQ ID NO: 1787274 - RNA, 19 nt, Artificial Sequence
  Description of Artificial Sequence: Synthetic oligonucleotide
caagguaacgccaggaauu

SEQ ID NO: 1787275 - RNA, 19 nt, Artificial Sequence
  Description of Artificial Sequence: Synthetic oligonucleotide
ucgacguuugggacugauc

SEQ ID NO: 1787276 - RNA, 19 nt, Artificial Sequence
  Description of Artificial Sequence: Synthetic oligonucleotide
caaccacuccggcguaucg

SEQ ID NO: 1787277 - RNA, 19 nt, Artificial Sequence
  Description of Artificial Sequence: Synthetic oligonucleotide
gguagaguuccacguguug

SEQ ID NO: 1787278 - RNA, 19 nt, Artificial Sequence
  Description of Artificial Sequence: Synthetic oligonucleotide
ugcgaugccuugagcugug

SEQ ID NO: 1787279 - RNA, 19 nt, Artificial Sequence
  Description of Artificial Sequence: Synthetic oligonucleotide
acaaccacuccggcguauc

SEQ ID NO: 1787280 - RNA, 19 nt, Artificial Sequence
  Description of Artificial Sequence: Synthetic oligonucleotide
acguggaguacguugucuu

SEQ ID NO: 1787281 - RNA, 19 nt, Artificial Sequence
  Description of Artificial Sequence: Synthetic oligonucleotide
gacagaaguuggcauggua

SEQ ID NO: 1787282 - RNA, 19 nt, Artificial Sequence
  Description of Artificial Sequence: Synthetic oligonucleotide
cuucccuaaugucugacgu

SEQ ID NO: 1787283 - RNA, 19 nt, Artificial Sequence
  Description of Artificial Sequence: Synthetic oligonucleotide
cucugcgaugccuugagcu

SEQ ID NO: 1787284 - RNA, 19 nt, Artificial Sequence
  Description of Artificial Sequence: Synthetic oligonucleotide
accucgacguuugggacug

SEQ ID NO: 1787285 - RNA, 19 nt, Artificial Sequence
  Description of Artificial Sequence: Synthetic oligonucleotide
auuuccacguggaguacgu

SEQ ID NO: 1787286 - RNA, 19 nt, Artificial Sequence
  Description of Artificial Sequence: Synthetic oligonucleotide
cuuuggcguaguaguccgc

SEQ ID NO: 1787287 - RNA, 19 nt, Artificial Sequence
  Description of Artificial Sequence: Synthetic oligonucleotide
ucgcacacagcaguucuuc

SEQ ID NO: 1787288 - RNA, 19 nt, Artificial Sequence
  Description of Artificial Sequence: Synthetic oligonucleotide
cugcagacgcagcucugcc

SEQ ID NO: 1787289 - RNA, 19 nt, Artificial Sequence
  Description of Artificial Sequence: Synthetic oligonucleotide
ucgcgggugcuguuguaca

SEQ ID NO: 1787290 - RNA, 19 nt, Artificial Sequence
  Description of Artificial Sequence: Synthetic oligonucleotide
gcuccaaauguagggacag

SEQ ID NO: 1787291 - RNA, 19 nt, Artificial Sequence
  Description of Artificial Sequence: Synthetic oligonucleotide
agcagucgguuaccaaggu

SEQ ID NO: 1787292 - RNA, 19 nt, Artificial Sequence
  Description of Artificial Sequence: Synthetic oligonucleotide
guagaguuccacguguugu

SEQ ID NO: 1787293 - RNA, 19 nt, Artificial Sequence
  Description of Artificial Sequence: Synthetic oligonucleotide
uuggcguaguaguccgccu

SEQ ID NO: 1787294 - RNA, 19 nt, Artificial Sequence
  Description of Artificial Sequence: Synthetic oligonucleotide
ggaucggcgcucucgcccg

SEQ ID NO: 1787295 - RNA, 19 nt, Artificial Sequence
  Description of Artificial Sequence: Synthetic oligonucleotide
uggguugcugcgguccacc

SEQ ID NO: 1787296 - RNA, 19 nt, Artificial Sequence
  Description of Artificial Sequence: Synthetic oligonucleotide
aucccgucuccuugguuca

SEQ ID NO: 1787297 - RNA, 19 nt, Artificial Sequence
  Description of Artificial Sequence: Synthetic oligonucleotide
uucagccacugccguacaa

SEQ ID NO: 1787298 - RNA, 19 nt, Artificial Sequence
  Description of Artificial Sequence: Synthetic oligonucleotide
agccacugccguacaaccg

SEQ ID NO: 1787299 - RNA, 19 nt, Artificial Sequence
  Description of Artificial Sequence: Synthetic oligonucleotide
ugcgacccacguaguacac

SEQ ID NO: 1787300 - RNA, 19 nt, Artificial Sequence
  Description of Artificial Sequence: Synthetic oligonucleotide
guuugcguuucaccagcuc

SEQ ID NO: 1787301 - RNA, 19 nt, Artificial Sequence
  Description of Artificial Sequence: Synthetic oligonucleotide
ugaucccguugauuuccac

SEQ ID NO: 1787302 - RNA, 19 nt, Artificial Sequence
  Description of Artificial Sequence: Synthetic oligonucleotide
ugggcuugcgacccacgua

SEQ ID NO: 1787303 - RNA, 19 nt, Artificial Sequence
  Description of Artificial Sequence: Synthetic oligonucleotide
gucugacguauugaagaac

SEQ ID NO: 1787304 - RNA, 19 nt, Artificial Sequence
  Description of Artificial Sequence: Synthetic oligonucleotide
ggcagcgggagcagaagcg

SEQ ID NO: 1787305 - RNA, 19 nt, Artificial Sequence
  Description of Artificial Sequence: Synthetic oligonucleotide
caccuugggcuugcgaccc

SEQ ID NO: 1787306 - RNA, 19 nt, Artificial Sequence
  Description of Artificial Sequence: Synthetic oligonucleotide
cuccggaucggcgcucucg

SEQ ID NO: 1787307 - RNA, 19 nt, Artificial Sequence
  Description of Artificial Sequence: Synthetic oligonucleotide
ugcaggagcggacgaucau

SEQ ID NO: 1787308 - RNA, 19 nt, Artificial Sequence
  Description of Artificial Sequence: Synthetic oligonucleotide
acggauggcuucgaugcgu

SEQ ID NO: 1787309 - RNA, 19 nt, Artificial Sequence
  Description of Artificial Sequence: Synthetic oligonucleotide
cgaaagucaauguacagcu

SEQ ID NO: 1787310 - RNA, 19 nt, Artificial Sequence
  Description of Artificial Sequence: Synthetic oligonucleotide
uggcuucgaugcguuugcg

SEQ ID NO: 1787311 - RNA, 19 nt, Artificial Sequence
  Description of Artificial Sequence: Synthetic oligonucleotide
cacgcgggugaccucuuug

SEQ ID NO: 1787312 - RNA, 19 nt, Artificial Sequence
  Description of Artificial Sequence: Synthetic oligonucleotide
ggcucugcgaugccuugag

SEQ ID NO: 1787313 - RNA, 19 nt, Artificial Sequence
  Description of Artificial Sequence: Synthetic oligonucleotide
ggagccacggcagcgggag

SEQ ID NO: 1787314 - RNA, 19 nt, Artificial Sequence
  Description of Artificial Sequence: Synthetic oligonucleotide
auuugcaggagcggacgau

SEQ ID NO: 1787315 - RNA, 19 nt, Artificial Sequence
  Description of Artificial Sequence: Synthetic oligonucleotide
ggacugaucccguugauuu

SEQ ID NO: 1787316 - RNA, 19 nt, Artificial Sequence
  Description of Artificial Sequence: Synthetic oligonucleotide
ccacguaguacacgauggg

SEQ ID NO: 1787317 - RNA, 19 nt, Artificial Sequence
  Description of Artificial Sequence: Synthetic oligonucleotide
gcucucgcccgcuacccgg

SEQ ID NO: 1787318 - RNA, 19 nt, Artificial Sequence
  Description of Artificial Sequence: Synthetic oligonucleotide
cucgcccgcuacccggucg

SEQ ID NO: 1787319 - RNA, 19 nt, Artificial Sequence
  Description of Artificial Sequence: Synthetic oligonucleotide
gggucuguucaugucauga

SEQ ID NO: 1787320 - RNA, 19 nt, Artificial Sequence
  Description of Artificial Sequence: Synthetic oligonucleotide
cagcugucgcacacagcag

SEQ ID NO: 1787321 - RNA, 19 nt, Artificial Sequence
  Description of Artificial Sequence: Synthetic oligonucleotide
gccacggauggcuucgaug

SEQ ID NO: 1787322 - RNA, 19 nt, Artificial Sequence
  Description of Artificial Sequence: Synthetic oligonucleotide
agacgcagcucugcccggg

SEQ ID NO: 1787323 - RNA, 19 nt, Artificial Sequence
  Description of Artificial Sequence: Synthetic oligonucleotide
ggacgaucauguuggacaa

SEQ ID NO: 1787324 - RNA, 19 nt, Artificial Sequence
  Description of Artificial Sequence: Synthetic oligonucleotide
aguacacgaugggcagcgg

SEQ ID NO: 1787325 - RNA, 19 nt, Artificial Sequence
  Description of Artificial Sequence: Synthetic oligonucleotide
ccggaguuuggacaggauc

SEQ ID NO: 1787326 - RNA, 19 nt, Artificial Sequence
  Description of Artificial Sequence: Synthetic oligonucleotide
ugaccucuuuggcguagua

SEQ ID NO: 1787327 - RNA, 19 nt, Artificial Sequence
  Description of Artificial Sequence: Synthetic oligonucleotide
ugggacugaucccguugau

SEQ ID NO: 1787328 - RNA, 19 nt, Artificial Sequence
  Description of Artificial Sequence: Synthetic oligonucleotide
cacugccguacaaccgcag

SEQ ID NO: 1787329 - RNA, 19 nt, Artificial Sequence
  Description of Artificial Sequence: Synthetic oligonucleotide
acguauugaagaacauaua

SEQ ID NO: 1787330 - RNA, 19 nt, Artificial Sequence
  Description of Artificial Sequence: Synthetic oligonucleotide
ggucuguucaugucaugaa

SEQ ID NO: 1787331 - RNA, 19 nt, Artificial Sequence
  Description of Artificial Sequence: Synthetic oligonucleotide
guacguugucuuugcuguc

SEQ ID NO: 1787332 - RNA, 19 nt, Artificial Sequence
  Description of Artificial Sequence: Synthetic oligonucleotide
gggguucaggcacugcuuc

SEQ ID NO: 1787333 - RNA, 19 nt, Artificial Sequence
  Description of Artificial Sequence: Synthetic oligonucleotide
ucuucuccguggagcugaa

SEQ ID NO: 1787334 - RNA, 19 nt, Artificial Sequence
  Description of Artificial Sequence: Synthetic oligonucleotide
ggugacgccgaagcacccg

SEQ ID NO: 1787335 - RNA, 19 nt, Artificial Sequence
  Description of Artificial Sequence: Synthetic oligonucleotide
ugguucagccacugccgua

SEQ ID NO: 1787336 - RNA, 19 nt, Artificial Sequence
  Description of Artificial Sequence: Synthetic oligonucleotide
cagacgcagcucugcccgg

SEQ ID NO: 1787337 - RNA, 19 nt, Artificial Sequence
  Description of Artificial Sequence: Synthetic oligonucleotide
uggguucguggauccacuu

SEQ ID NO: 1787338 - RNA, 19 nt, Artificial Sequence
  Description of Artificial Sequence: Synthetic oligonucleotide
gucgcgggugcuguuguac

SEQ ID NO: 1787339 - RNA, 19 nt, Artificial Sequence
  Description of Artificial Sequence: Synthetic oligonucleotide
guuccacguguuguucuac

SEQ ID NO: 1787340 - RNA, 19 nt, Artificial Sequence
  Description of Artificial Sequence: Synthetic oligonucleotide
ggcaugguagcccuugggu

SEQ ID NO: 1787341 - RNA, 19 nt, Artificial Sequence
  Description of Artificial Sequence: Synthetic oligonucleotide
gaagcacccggguuguguu

SEQ ID NO: 1787342 - RNA, 19 nt, Artificial Sequence
  Description of Artificial Sequence: Synthetic oligonucleotide
gcaggagcggacgaucaug

SEQ ID NO: 1787343 - RNA, 19 nt, Artificial Sequence
  Description of Artificial Sequence: Synthetic oligonucleotide
agccggaguuuggacagga

SEQ ID NO: 1787344 - RNA, 19 nt, Artificial Sequence
  Description of Artificial Sequence: Synthetic oligonucleotide
gagccggaguuuggacagg

SEQ ID NO: 1787345 - RNA, 19 nt, Artificial Sequence
  Description of Artificial Sequence: Synthetic oligonucleotide
caggagcggacgaucaugu

SEQ ID NO: 1787346 - RNA, 19 nt, Artificial Sequence
  Description of Artificial Sequence: Synthetic oligonucleotide
gcgagccggaguuuggaca

SEQ ID NO: 1787347 - RNA, 19 nt, Artificial Sequence
  Description of Artificial Sequence: Synthetic oligonucleotide
agagggcgaggaccuuacu

SEQ ID NO: 1787348 - RNA, 19 nt, Artificial Sequence
  Description of Artificial Sequence: Synthetic oligonucleotide
cugaucccguugauuucca

SEQ ID NO: 1787349 - RNA, 19 nt, Artificial Sequence
  Description of Artificial Sequence: Synthetic oligonucleotide
cugucgcacacagcaguuc

SEQ ID NO: 1787350 - RNA, 19 nt, Artificial Sequence
  Description of Artificial Sequence: Synthetic oligonucleotide
cccgcuacccggucgcggg

SEQ ID NO: 1787351 - RNA, 19 nt, Artificial Sequence
  Description of Artificial Sequence: Synthetic oligonucleotide
ucgaugcguuugcguuuca

SEQ ID NO: 1787352 - RNA, 19 nt, Artificial Sequence
  Description of Artificial Sequence: Synthetic oligonucleotide
ccuuccgaaagucaaugua

SEQ ID NO: 1787353 - RNA, 19 nt, Artificial Sequence
  Description of Artificial Sequence: Synthetic oligonucleotide
gcuucgaugcguuugcguu

SEQ ID NO: 1787354 - RNA, 19 nt, Artificial Sequence
  Description of Artificial Sequence: Synthetic oligonucleotide
agguaacgccaggaauugu

SEQ ID NO: 1787355 - RNA, 19 nt, Artificial Sequence
  Description of Artificial Sequence: Synthetic oligonucleotide
acgccgaagcacccggguu

SEQ ID NO: 1787356 - RNA, 19 nt, Artificial Sequence
  Description of Artificial Sequence: Synthetic oligonucleotide
ccgucuccuugguucagcc

SEQ ID NO: 1787357 - RNA, 19 nt, Artificial Sequence
  Description of Artificial Sequence: Synthetic oligonucleotide
gacgccgaagcacccgggu

SEQ ID NO: 1787358 - RNA, 19 nt, Artificial Sequence
  Description of Artificial Sequence: Synthetic oligonucleotide
agcggacgaucauguugga

SEQ ID NO: 1787359 - RNA, 19 nt, Artificial Sequence
  Description of Artificial Sequence: Synthetic oligonucleotide
gacgcagcucugcccggga

SEQ ID NO: 1787360 - RNA, 19 nt, Artificial Sequence
  Description of Artificial Sequence: Synthetic oligonucleotide
agacaaccacuccggcgua

SEQ ID NO: 1787361 - RNA, 19 nt, Artificial Sequence
  Description of Artificial Sequence: Synthetic oligonucleotide
ggcuccaaauguagggaca

SEQ ID NO: 1787362 - RNA, 19 nt, Artificial Sequence
  Description of Artificial Sequence: Synthetic oligonucleotide
gaucggcgcucucgcccgc

SEQ ID NO: 1787363 - RNA, 19 nt, Artificial Sequence
  Description of Artificial Sequence: Synthetic oligonucleotide
uacccggucgcgggugcug

SEQ ID NO: 1787364 - RNA, 19 nt, Artificial Sequence
  Description of Artificial Sequence: Synthetic oligonucleotide
ggcgcucucgcccgcuacc

SEQ ID NO: 1787365 - RNA, 19 nt, Artificial Sequence
  Description of Artificial Sequence: Synthetic oligonucleotide
cuugagcugugcaggugcu

SEQ ID NO: 1787366 - RNA, 19 nt, Artificial Sequence
  Description of Artificial Sequence: Synthetic oligonucleotide
cguaguaguccgccucggg

SEQ ID NO: 1787367 - RNA, 19 nt, Artificial Sequence
  Description of Artificial Sequence: Synthetic oligonucleotide
ggguuguguugguuguaga

SEQ ID NO: 1787368 - RNA, 19 nt, Artificial Sequence
  Description of Artificial Sequence: Synthetic oligonucleotide
uuuccacguggaguacguu

SEQ ID NO: 1787369 - RNA, 19 nt, Artificial Sequence
  Description of Artificial Sequence: Synthetic oligonucleotide
gccguacaaccgcagugac

SEQ ID NO: 1787370 - RNA, 19 nt, Artificial Sequence
  Description of Artificial Sequence: Synthetic oligonucleotide
gcgacccacguaguacacg

SEQ ID NO: 1787371 - RNA, 19 nt, Artificial Sequence
  Description of Artificial Sequence: Synthetic oligonucleotide
ggcgagccggaguuuggac

SEQ ID NO: 1787372 - RNA, 19 nt, Artificial Sequence
  Description of Artificial Sequence: Synthetic oligonucleotide
cccacggcuggccuccccg

SEQ ID NO: 1787373 - RNA, 19 nt, Artificial Sequence
  Description of Artificial Sequence: Synthetic oligonucleotide
cugacguauugaagaacau

SEQ ID NO: 1787374 - RNA, 19 nt, Artificial Sequence
  Description of Artificial Sequence: Synthetic oligonucleotide
gguaacgccaggaauuguu

SEQ ID NO: 1787375 - RNA, 19 nt, Artificial Sequence
  Description of Artificial Sequence: Synthetic oligonucleotide
cacggcagcgggagcagaa

SEQ ID NO: 1787376 - RNA, 19 nt, Artificial Sequence
  Description of Artificial Sequence: Synthetic oligonucleotide
gcgaggaccuuacuguacu

SEQ ID NO: 1787377 - RNA, 19 nt, Artificial Sequence
  Description of Artificial Sequence: Synthetic oligonucleotide
aggagcggacgaucauguu

SEQ ID NO: 1787378 - RNA, 19 nt, Artificial Sequence
  Description of Artificial Sequence: Synthetic oligonucleotide
cggaucggcgcucucgccc

SEQ ID NO: 1787379 - RNA, 19 nt, Artificial Sequence
  Description of Artificial Sequence: Synthetic oligonucleotide
cuucgaugcguuugcguuu

SEQ ID NO: 1787380 - RNA, 19 nt, Artificial Sequence
  Description of Artificial Sequence: Synthetic oligonucleotide
ggcgaggaccuuacuguac

SEQ ID NO: 1787381 - RNA, 19 nt, Artificial Sequence
  Description of Artificial Sequence: Synthetic oligonucleotide
caccucgacguuugggacu

SEQ ID NO: 1787382 - RNA, 19 nt, Artificial Sequence
  Description of Artificial Sequence: Synthetic oligonucleotide
uguagagggcgaggaccuu

SEQ ID NO: 1787383 - RNA, 19 nt, Artificial Sequence
  Description of Artificial Sequence: Synthetic oligonucleotide
cgacccacguaguacacga

SEQ ID NO: 1787384 - RNA, 19 nt, Artificial Sequence
  Description of Artificial Sequence: Synthetic oligonucleotide
cugcuucccuaaugucuga

SEQ ID NO: 1787385 - RNA, 19 nt, Artificial Sequence
  Description of Artificial Sequence: Synthetic oligonucleotide
acacugugugggaugucuu

SEQ ID NO: 1787386 - RNA, 19 nt, Artificial Sequence
  Description of Artificial Sequence: Synthetic oligonucleotide
ccgcagugacaucaaaaga

SEQ ID NO: 1787387 - RNA, 19 nt, Artificial Sequence
  Description of Artificial Sequence: Synthetic oligonucleotide
ggaucuggccacggauggc

SEQ ID NO: 1787388 - RNA, 19 nt, Artificial Sequence
  Description of Artificial Sequence: Synthetic oligonucleotide
cuucuccguggagcugaag

SEQ ID NO: 1787389 - RNA, 19 nt, Artificial Sequence
  Description of Artificial Sequence: Synthetic oligonucleotide
gcguaguaguccgccucgg

SEQ ID NO: 1787390 - RNA, 19 nt, Artificial Sequence
  Description of Artificial Sequence: Synthetic oligonucleotide
cgccgaagcacccggguug

SEQ ID NO: 1787391 - RNA, 19 nt, Artificial Sequence
  Description of Artificial Sequence: Synthetic oligonucleotide
agugagcacugaagcgaaa

SEQ ID NO: 1787392 - RNA, 19 nt, Artificial Sequence
  Description of Artificial Sequence: Synthetic oligonucleotide
gcuacccggucgcgggugc

SEQ ID NO: 1787393 - RNA, 19 nt, Artificial Sequence
  Description of Artificial Sequence: Synthetic oligonucleotide
gcagucgguuaccaaggua

SEQ ID NO: 1787394 - RNA, 19 nt, Artificial Sequence
  Description of Artificial Sequence: Synthetic oligonucleotide
ggaccuuacuguacugugu

SEQ ID NO: 1787395 - RNA, 19 nt, Artificial Sequence
  Description of Artificial Sequence: Synthetic oligonucleotide
cacugugugggaugucuuu

SEQ ID NO: 1787396 - RNA, 19 nt, Artificial Sequence
  Description of Artificial Sequence: Synthetic oligonucleotide
cagcgggccgggcggcacc

SEQ ID NO: 1787397 - RNA, 19 nt, Artificial Sequence
  Description of Artificial Sequence: Synthetic oligonucleotide
ccaagguaacgccaggaau

SEQ ID NO: 1787398 - RNA, 19 nt, Artificial Sequence
  Description of Artificial Sequence: Synthetic oligonucleotide
cuccggcguaucggugggg

SEQ ID NO: 1787399 - RNA, 19 nt, Artificial Sequence
  Description of Artificial Sequence: Synthetic oligonucleotide
gccaggaauuguugcugaa

SEQ ID NO: 1787400 - RNA, 19 nt, Artificial Sequence
  Description of Artificial Sequence: Synthetic oligonucleotide
gcggacgaucauguuggac

SEQ ID NO: 1787401 - RNA, 19 nt, Artificial Sequence
  Description of Artificial Sequence: Synthetic oligonucleotide
ccguacaaccgcagugaca

SEQ ID NO: 1787402 - RNA, 19 nt, Artificial Sequence
  Description of Artificial Sequence: Synthetic oligonucleotide
cgcgggugcuguuguacag

SEQ ID NO: 1787403 - RNA, 19 nt, Artificial Sequence
  Description of Artificial Sequence: Synthetic oligonucleotide
ggguugcugcgguccacca

SEQ ID NO: 1787404 - RNA, 19 nt, Artificial Sequence
  Description of Artificial Sequence: Synthetic oligonucleotide
auguagggacagggcccca

SEQ ID NO: 1787405 - RNA, 19 nt, Artificial Sequence
  Description of Artificial Sequence: Synthetic oligonucleotide
ccccagacagaaguuggca

SEQ ID NO: 1787406 - RNA, 19 nt, Artificial Sequence
  Description of Artificial Sequence: Synthetic oligonucleotide
cccgucuccuugguucagc

SEQ ID NO: 1787407 - RNA, 19 nt, Artificial Sequence
  Description of Artificial Sequence: Synthetic oligonucleotide
ccacuccggcguaucggug

SEQ ID NO: 1787408 - RNA, 19 nt, Artificial Sequence
  Description of Artificial Sequence: Synthetic oligonucleotide
gacaaccacuccggcguau

SEQ ID NO: 1787409 - RNA, 19 nt, Artificial Sequence
  Description of Artificial Sequence: Synthetic oligonucleotide
ccacguggaguacguuguc

SEQ ID NO: 1787410 - RNA, 19 nt, Artificial Sequence
  Description of Artificial Sequence: Synthetic oligonucleotide
gcgcucucgcccgcuaccc

SEQ ID NO: 1787411 - RNA, 19 nt, Artificial Sequence
  Description of Artificial Sequence: Synthetic oligonucleotide
cagggcucugcgaugccuu

SEQ ID NO: 1787412 - RNA, 19 nt, Artificial Sequence
  Description of Artificial Sequence: Synthetic oligonucleotide
guaucccgucuccuugguu

SEQ ID NO: 1787413 - RNA, 19 nt, Artificial Sequence
  Description of Artificial Sequence: Synthetic oligonucleotide
ugguagcccuuggguucgu

SEQ ID NO: 1787414 - RNA, 19 nt, Artificial Sequence
  Description of Artificial Sequence: Synthetic oligonucleotide
ccggaucggcgcucucgcc

SEQ ID NO: 1787415 - RNA, 19 nt, Artificial Sequence
  Description of Artificial Sequence: Synthetic oligonucleotide
gcccgcuacccggucgcgg

SEQ ID NO: 1787416 - RNA, 19 nt, Artificial Sequence
  Description of Artificial Sequence: Synthetic oligonucleotide
aguuggcaugguagcccuu

SEQ ID NO: 1787417 - RNA, 19 nt, Artificial Sequence
  Description of Artificial Sequence: Synthetic oligonucleotide
gugaccucuuuggcguagu

SEQ ID NO: 1787418 - RNA, 19 nt, Artificial Sequence
  Description of Artificial Sequence: Synthetic oligonucleotide
cgaugcguuugcguuucac

SEQ ID NO: 1787419 - RNA, 19 nt, Artificial Sequence
  Description of Artificial Sequence: Synthetic oligonucleotide
cucucgcccgcuacccggu

SEQ ID NO: 1787420 - RNA, 19 nt, Artificial Sequence
  Description of Artificial Sequence: Synthetic oligonucleotide
ggcggggcggggccucagc

SEQ ID NO: 1787421 - RNA, 19 nt, Artificial Sequence
  Description of Artificial Sequence: Synthetic oligonucleotide
ggccuccccggcgucagca

SEQ ID NO: 1787422 - RNA, 19 nt, Artificial Sequence
  Description of Artificial Sequence: Synthetic oligonucleotide
cucgacguuugggacugau

SEQ ID NO: 1787423 - RNA, 19 nt, Artificial Sequence
  Description of Artificial Sequence: Synthetic oligonucleotide
gacccacguaguacacgau

SEQ ID NO: 1787424 - RNA, 19 nt, Artificial Sequence
  Description of Artificial Sequence: Synthetic oligonucleotide
cgcucucgcccgcuacccg

SEQ ID NO: 1787425 - RNA, 19 nt, Artificial Sequence
  Description of Artificial Sequence: Synthetic oligonucleotide
gggacugaucccguugauu

SEQ ID NO: 1787426 - RNA, 19 nt, Artificial Sequence
  Description of Artificial Sequence: Synthetic oligonucleotide
cagccccgagggcggcaug

SEQ ID NO: 1787427 - RNA, 19 nt, Artificial Sequence
  Description of Artificial Sequence: Synthetic oligonucleotide
ccaggaauuguugcugaau

SEQ ID NO: 1787428 - RNA, 19 nt, Artificial Sequence
  Description of Artificial Sequence: Synthetic oligonucleotide
ccggucgcgggugcuguug

SEQ ID NO: 1787429 - RNA, 19 nt, Artificial Sequence
  Description of Artificial Sequence: Synthetic oligonucleotide
gucgcacacagcaguucuu

SEQ ID NO: 1787430 - RNA, 19 nt, Artificial Sequence
  Description of Artificial Sequence: Synthetic oligonucleotide
cuguggcacacagcauggu

SEQ ID NO: 1787431 - RNA, 19 nt, Artificial Sequence
  Description of Artificial Sequence: Synthetic oligonucleotide
ccaccaucagcacgcgggu

SEQ ID NO: 1787432 - RNA, 19 nt, Artificial Sequence
  Description of Artificial Sequence: Synthetic oligonucleotide
gccgaagcacccggguugu

SEQ ID NO: 1787433 - RNA, 19 nt, Artificial Sequence
  Description of Artificial Sequence: Synthetic oligonucleotide
gcggggcggggccucagcu

SEQ ID NO: 1787434 - RNA, 19 nt, Artificial Sequence
  Description of Artificial Sequence: Synthetic oligonucleotide
gcagcgggccgggcggcac

SEQ ID NO: 1787435 - RNA, 19 nt, Artificial Sequence
  Description of Artificial Sequence: Synthetic oligonucleotide
gcuccggaucggcgcucuc

SEQ ID NO: 1787436 - RNA, 19 nt, Artificial Sequence
  Description of Artificial Sequence: Synthetic oligonucleotide
cgcuacccggucgcgggug

SEQ ID NO: 1787437 - RNA, 19 nt, Artificial Sequence
  Description of Artificial Sequence: Synthetic oligonucleotide
cgaagcacccggguugugu

SEQ ID NO: 1787438 - RNA, 19 nt, Artificial Sequence
  Description of Artificial Sequence: Synthetic oligonucleotide
ccccgagggcggcauggga

SEQ ID NO: 1787439 - RNA, 19 nt, Artificial Sequence
  Description of Artificial Sequence: Synthetic oligonucleotide
cuacccggucgcgggugcu

SEQ ID NO: 1787440 - RNA, 19 nt, Artificial Sequence
  Description of Artificial Sequence: Synthetic oligonucleotide
cguuugggacugaucccgu

SEQ ID NO: 1787441 - RNA, 19 nt, Artificial Sequence
  Description of Artificial Sequence: Synthetic oligonucleotide
ggggcggggcggggcgggg

SEQ ID NO: 1787442 - RNA, 19 nt, Artificial Sequence
  Description of Artificial Sequence: Synthetic oligonucleotide
gggcggggcggggcggggc

SEQ ID NO: 1787443 - RNA, 19 nt, Artificial Sequence
  Description of Artificial Sequence: Synthetic oligonucleotide
cggcgcucucgcccgcuac

SEQ ID NO: 1787444 - RNA, 19 nt, Artificial Sequence
  Description of Artificial Sequence: Synthetic oligonucleotide
ggcuugcgacccacguagu

SEQ ID NO: 1787445 - RNA, 19 nt, Artificial Sequence
  Description of Artificial Sequence: Synthetic oligonucleotide
ggcuccggaucggcgcucu

SEQ ID NO: 1787446 - RNA, 19 nt, Artificial Sequence
  Description of Artificial Sequence: Synthetic oligonucleotide
gcacccggguuguguuggu

SEQ ID NO: 1787447 - RNA, 19 nt, Artificial Sequence
  Description of Artificial Sequence: Synthetic oligonucleotide
cccuaaugucugacguauu

SEQ ID NO: 1787448 - RNA, 19 nt, Artificial Sequence
  Description of Artificial Sequence: Synthetic oligonucleotide
cacccggguuguguugguu

SEQ ID NO: 1787449 - RNA, 19 nt, Artificial Sequence
  Description of Artificial Sequence: Synthetic oligonucleotide
gccggaguuuggacaggau

SEQ ID NO: 1787450 - RNA, 19 nt, Artificial Sequence
  Description of Artificial Sequence: Synthetic oligonucleotide
cggauggcuucgaugcguu

SEQ ID NO: 1787451 - RNA, 19 nt, Artificial Sequence
  Description of Artificial Sequence: Synthetic oligonucleotide
cgcccgcuacccggucgcg

SEQ ID NO: 1787452 - RNA, 19 nt, Artificial Sequence
  Description of Artificial Sequence: Synthetic oligonucleotide
gcacgcgggugaccucuuu

SEQ ID NO: 1787453 - RNA, 19 nt, Artificial Sequence
  Description of Artificial Sequence: Synthetic oligonucleotide
cggucgcgggugcuguugu

SEQ ID NO: 1787454 - RNA, 19 nt, Artificial Sequence
  Description of Artificial Sequence: Synthetic oligonucleotide
ccgcuacccggucgcgggu

SEQ ID NO: 1787455 - RNA, 19 nt, Artificial Sequence
  Description of Artificial Sequence: Synthetic oligonucleotide
ggcuggcgagccggaguuu

SEQ ID NO: 1787456 - RNA, 19 nt, Artificial Sequence
  Description of Artificial Sequence: Synthetic oligonucleotide
ccucgacguuugggacuga

SEQ ID NO: 1787457 - RNA, 19 nt, Artificial Sequence
  Description of Artificial Sequence: Synthetic oligonucleotide
aagucauugcaauucaugc

SEQ ID NO: 1787458 - RNA, 19 nt, Artificial Sequence
  Description of Artificial Sequence: Synthetic oligonucleotide
uucacuauaaccuuguacc

SEQ ID NO: 1787459 - RNA, 19 nt, Artificial Sequence
  Description of Artificial Sequence: Synthetic oligonucleotide
ucuauuacugucaaguucc

SEQ ID NO: 1787460 - RNA, 19 nt, Artificial Sequence
  Description of Artificial Sequence: Synthetic oligonucleotide
auuacugucaaguuccagc

SEQ ID NO: 1787461 - RNA, 19 nt, Artificial Sequence
  Description of Artificial Sequence: Synthetic oligonucleotide
acucauuacauuuaugugg

SEQ ID NO: 1787462 - RNA, 19 nt, Artificial Sequence
  Description of Artificial Sequence: Synthetic oligonucleotide
acucauuacacccauaggg

SEQ ID NO: 1787463 - RNA, 19 nt, Artificial Sequence
  Description of Artificial Sequence: Synthetic oligonucleotide
ugagacuugagacugaagc

SEQ ID NO: 1787464 - RNA, 19 nt, Artificial Sequence
  Description of Artificial Sequence: Synthetic oligonucleotide
acuggaagaagauuucucc

SEQ ID NO: 1787465 - RNA, 19 nt, Artificial Sequence
  Description of Artificial Sequence: Synthetic oligonucleotide
uuaauguucaguuuagugu

SEQ ID NO: 1787466 - RNA, 19 nt, Artificial Sequence
  Description of Artificial Sequence: Synthetic oligonucleotide
acgaccuuaacccaaacac

SEQ ID NO: 1787467 - RNA, 19 nt, Artificial Sequence
  Description of Artificial Sequence: Synthetic oligonucleotide
auaaaugacagguguaggg

SEQ ID NO: 1787468 - RNA, 19 nt, Artificial Sequence
  Description of Artificial Sequence: Synthetic oligonucleotide
aguucuguaaugcugaaug

SEQ ID NO: 1787469 - RNA, 19 nt, Artificial Sequence
  Description of Artificial Sequence: Synthetic oligonucleotide
guaacuaaaggcuuucccg

SEQ ID NO: 1787470 - RNA, 19 nt, Artificial Sequence
  Description of Artificial Sequence: Synthetic oligonucleotide
uuaaagaggcuacagcucc

SEQ ID NO: 1787471 - RNA, 19 nt, Artificial Sequence
  Description of Artificial Sequence: Synthetic oligonucleotide
uuaacccaaacacaccugg

SEQ ID NO: 1787472 - RNA, 19 nt, Artificial Sequence
  Description of Artificial Sequence: Synthetic oligonucleotide
auuaguuuggauuucuucu

SEQ ID NO: 1787473 - RNA, 19 nt, Artificial Sequence
  Description of Artificial Sequence: Synthetic oligonucleotide
agaagauuucuccacacuc

SEQ ID NO: 1787474 - RNA, 19 nt, Artificial Sequence
  Description of Artificial Sequence: Synthetic oligonucleotide
aauucaugcucuucgaaga

SEQ ID NO: 1787475 - RNA, 19 nt, Artificial Sequence
  Description of Artificial Sequence: Synthetic oligonucleotide
ucuucuauuacugucaagu

SEQ ID NO: 1787476 - RNA, 19 nt, Artificial Sequence
  Description of Artificial Sequence: Synthetic oligonucleotide
acucggaacgaccuuaacc

SEQ ID NO: 1787477 - RNA, 19 nt, Artificial Sequence
  Description of Artificial Sequence: Synthetic oligonucleotide
gaagaggugguguucauag

SEQ ID NO: 1787478 - RNA, 19 nt, Artificial Sequence
  Description of Artificial Sequence: Synthetic oligonucleotide
uucgcagauguuuaaagag

SEQ ID NO: 1787479 - RNA, 19 nt, Artificial Sequence
  Description of Artificial Sequence: Synthetic oligonucleotide
cucggaacgaccuuaaccc

SEQ ID NO: 1787480 - RNA, 19 nt, Artificial Sequence
  Description of Artificial Sequence: Synthetic oligonucleotide
acacucauuacauuuaugu

SEQ ID NO: 1787481 - RNA, 19 nt, Artificial Sequence
  Description of Artificial Sequence: Synthetic oligonucleotide
cucauuacauuuauguggc

SEQ ID NO: 1787482 - RNA, 19 nt, Artificial Sequence
  Description of Artificial Sequence: Synthetic oligonucleotide
uguuuaaagaggcuacagc

SEQ ID NO: 1787483 - RNA, 19 nt, Artificial Sequence
  Description of Artificial Sequence: Synthetic oligonucleotide
uuucuuaauguucaguuua

SEQ ID NO: 1787484 - RNA, 19 nt, Artificial Sequence
  Description of Artificial Sequence: Synthetic oligonucleotide
cuuaauguucaguuuagug

SEQ ID NO: 1787485 - RNA, 19 nt, Artificial Sequence
  Description of Artificial Sequence: Synthetic oligonucleotide
guaaugcugaaugaggucg

SEQ ID NO: 1787486 - RNA, 19 nt, Artificial Sequence
  Description of Artificial Sequence: Synthetic oligonucleotide
acaagaugcgaccucacuc

SEQ ID NO: 1787487 - RNA, 19 nt, Artificial Sequence
  Description of Artificial Sequence: Synthetic oligonucleotide
ucugauaguuccaugucug

SEQ ID NO: 1787488 - RNA, 19 nt, Artificial Sequence
  Description of Artificial Sequence: Synthetic oligonucleotide
auuucugggguuucucugc

SEQ ID NO: 1787489 - RNA, 19 nt, Artificial Sequence
  Description of Artificial Sequence: Synthetic oligonucleotide
uguucaaggaggcugacau

SEQ ID NO: 1787490 - RNA, 19 nt, Artificial Sequence
  Description of Artificial Sequence: Synthetic oligonucleotide
ucgcagauguuuaaagagg

SEQ ID NO: 1787491 - RNA, 19 nt, Artificial Sequence
  Description of Artificial Sequence: Synthetic oligonucleotide
ucuagaguggagucggagg

SEQ ID NO: 1787492 - RNA, 19 nt, Artificial Sequence
  Description of Artificial Sequence: Synthetic oligonucleotide
ugugcacucugaaugaagc

SEQ ID NO: 1787493 - RNA, 19 nt, Artificial Sequence
  Description of Artificial Sequence: Synthetic oligonucleotide
auaaccuuguaccugagaa

SEQ ID NO: 1787494 - RNA, 19 nt, Artificial Sequence
  Description of Artificial Sequence: Synthetic oligonucleotide
uuuucuggcccacauggag

SEQ ID NO: 1787495 - RNA, 19 nt, Artificial Sequence
  Description of Artificial Sequence: Synthetic oligonucleotide
guuuaguguucuuacuucg

SEQ ID NO: 1787496 - RNA, 19 nt, Artificial Sequence
  Description of Artificial Sequence: Synthetic oligonucleotide
agaagcauuaguuuggauu

SEQ ID NO: 1787497 - RNA, 19 nt, Artificial Sequence
  Description of Artificial Sequence: Synthetic oligonucleotide
caagaugcgaccucacucg

SEQ ID NO: 1787498 - RNA, 19 nt, Artificial Sequence
  Description of Artificial Sequence: Synthetic oligonucleotide
uuuauguggccucucugag

SEQ ID NO: 1787499 - RNA, 19 nt, Artificial Sequence
  Description of Artificial Sequence: Synthetic oligonucleotide
uucuauuacugucaaguuc

SEQ ID NO: 1787500 - RNA, 19 nt, Artificial Sequence
  Description of Artificial Sequence: Synthetic oligonucleotide
accugaaugguuucucccc

SEQ ID NO: 1787501 - RNA, 19 nt, Artificial Sequence
  Description of Artificial Sequence: Synthetic oligonucleotide
uuuuguguggggacacugg

SEQ ID NO: 1787502 - RNA, 19 nt, Artificial Sequence
  Description of Artificial Sequence: Synthetic oligonucleotide
ugggagcucacucggaacg

SEQ ID NO: 1787503 - RNA, 19 nt, Artificial Sequence
  Description of Artificial Sequence: Synthetic oligonucleotide
acuauaaccuuguaccuga

SEQ ID NO: 1787504 - RNA, 19 nt, Artificial Sequence
  Description of Artificial Sequence: Synthetic oligonucleotide
ugcgaccucacucggaagg

SEQ ID NO: 1787505 - RNA, 19 nt, Artificial Sequence
  Description of Artificial Sequence: Synthetic oligonucleotide
uuuaaagaggcuacagcuc

SEQ ID NO: 1787506 - RNA, 19 nt, Artificial Sequence
  Description of Artificial Sequence: Synthetic oligonucleotide
ucggaacuguaacuaaagg

SEQ ID NO: 1787507 - RNA, 19 nt, Artificial Sequence
  Description of Artificial Sequence: Synthetic oligonucleotide
caauucaugcucuucgaag

SEQ ID NO: 1787508 - RNA, 19 nt, Artificial Sequence
  Description of Artificial Sequence: Synthetic oligonucleotide
aguguucuuacuucguuug

SEQ ID NO: 1787509 - RNA, 19 nt, Artificial Sequence
  Description of Artificial Sequence: Synthetic oligonucleotide
ucauuacacccauagggcc

SEQ ID NO: 1787510 - RNA, 19 nt, Artificial Sequence
  Description of Artificial Sequence: Synthetic oligonucleotide
caugcaucacauuucuggg

SEQ ID NO: 1787511 - RNA, 19 nt, Artificial Sequence
  Description of Artificial Sequence: Synthetic oligonucleotide
gcaugcaucacauuucugg

SEQ ID NO: 1787512 - RNA, 19 nt, Artificial Sequence
  Description of Artificial Sequence: Synthetic oligonucleotide
gauucgucgaugcuguaug

SEQ ID NO: 1787513 - RNA, 19 nt, Artificial Sequence
  Description of Artificial Sequence: Synthetic oligonucleotide
acauaaaugacagguguag

SEQ ID NO: 1787514 - RNA, 19 nt, Artificial Sequence
  Description of Artificial Sequence: Synthetic oligonucleotide
auuuauguggccucucuga

SEQ ID NO: 1787515 - RNA, 19 nt, Artificial Sequence
  Description of Artificial Sequence: Synthetic oligonucleotide
augaggucggaacuguaac

SEQ ID NO: 1787516 - RNA, 19 nt, Artificial Sequence
  Description of Artificial Sequence: Synthetic oligonucleotide
uuaggaaucuguccucuca

SEQ ID NO: 1787517 - RNA, 19 nt, Artificial Sequence
  Description of Artificial Sequence: Synthetic oligonucleotide
uauaggcuucaucacagac

SEQ ID NO: 1787518 - RNA, 19 nt, Artificial Sequence
  Description of Artificial Sequence: Synthetic oligonucleotide
uucaaggaggcugacauac

SEQ ID NO: 1787519 - RNA, 19 nt, Artificial Sequence
  Description of Artificial Sequence: Synthetic oligonucleotide
uaaugcugaaugaggucgg

SEQ ID NO: 1787520 - RNA, 19 nt, Artificial Sequence
  Description of Artificial Sequence: Synthetic oligonucleotide
ugggauuucucucggaagu

SEQ ID NO: 1787521 - RNA, 19 nt, Artificial Sequence
  Description of Artificial Sequence: Synthetic oligonucleotide
uucugauaguuccaugucu

SEQ ID NO: 1787522 - RNA, 19 nt, Artificial Sequence
  Description of Artificial Sequence: Synthetic oligonucleotide
uucuguaaugcugaaugag

SEQ ID NO: 1787523 - RNA, 19 nt, Artificial Sequence
  Description of Artificial Sequence: Synthetic oligonucleotide
guuuaaagaggcuacagcu

SEQ ID NO: 1787524 - RNA, 19 nt, Artificial Sequence
  Description of Artificial Sequence: Synthetic oligonucleotide
ucgucgaugcuguaugagg

SEQ ID NO: 1787525 - RNA, 19 nt, Artificial Sequence
  Description of Artificial Sequence: Synthetic oligonucleotide
ugucacugcaacuuuggga

SEQ ID NO: 1787526 - RNA, 19 nt, Artificial Sequence
  Description of Artificial Sequence: Synthetic oligonucleotide
uuuguguggggacacuggc

SEQ ID NO: 1787527 - RNA, 19 nt, Artificial Sequence
  Description of Artificial Sequence: Synthetic oligonucleotide
aagaagauuucuccacacu

SEQ ID NO: 1787528 - RNA, 19 nt, Artificial Sequence
  Description of Artificial Sequence: Synthetic oligonucleotide
uuugggauuucucucggaa

SEQ ID NO: 1787529 - RNA, 19 nt, Artificial Sequence
  Description of Artificial Sequence: Synthetic oligonucleotide
gucauugcaauucaugcuc

SEQ ID NO: 1787530 - RNA, 19 nt, Artificial Sequence
  Description of Artificial Sequence: Synthetic oligonucleotide
gauguuguuuugugugggg

SEQ ID NO: 1787531 - RNA, 19 nt, Artificial Sequence
  Description of Artificial Sequence: Synthetic oligonucleotide
acccaaacacaccuggcac

SEQ ID NO: 1787532 - RNA, 19 nt, Artificial Sequence
  Description of Artificial Sequence: Synthetic oligonucleotide
cuucacuauaaccuuguac

SEQ ID NO: 1787533 - RNA, 19 nt, Artificial Sequence
  Description of Artificial Sequence: Synthetic oligonucleotide
gaagucauugcaauucaug

SEQ ID NO: 1787534 - RNA, 19 nt, Artificial Sequence
  Description of Artificial Sequence: Synthetic oligonucleotide
ugaacgccucccaaaaccc

SEQ ID NO: 1787535 - RNA, 19 nt, Artificial Sequence
  Description of Artificial Sequence: Synthetic oligonucleotide
cuuacuucguuugucacug

SEQ ID NO: 1787536 - RNA, 19 nt, Artificial Sequence
  Description of Artificial Sequence: Synthetic oligonucleotide
uaaccuuguaccugagaag

SEQ ID NO: 1787537 - RNA, 19 nt, Artificial Sequence
  Description of Artificial Sequence: Synthetic oligonucleotide
cauuccucacaccugaaug

SEQ ID NO: 1787538 - RNA, 19 nt, Artificial Sequence
  Description of Artificial Sequence: Synthetic oligonucleotide
uggaagaagauuucuccac

SEQ ID NO: 1787539 - RNA, 19 nt, Artificial Sequence
  Description of Artificial Sequence: Synthetic oligonucleotide
uuucccgcagguaucacac

SEQ ID NO: 1787540 - RNA, 19 nt, Artificial Sequence
  Description of Artificial Sequence: Synthetic oligonucleotide
aaacacaccuggcacuugu

SEQ ID NO: 1787541 - RNA, 19 nt, Artificial Sequence
  Description of Artificial Sequence: Synthetic oligonucleotide
gugaacgccucccaaaacc

SEQ ID NO: 1787542 - RNA, 19 nt, Artificial Sequence
  Description of Artificial Sequence: Synthetic oligonucleotide
uuauguggccucucugagg

SEQ ID NO: 1787543 - RNA, 19 nt, Artificial Sequence
  Description of Artificial Sequence: Synthetic oligonucleotide
gaagaagauuucuccacac

SEQ ID NO: 1787544 - RNA, 19 nt, Artificial Sequence
  Description of Artificial Sequence: Synthetic oligonucleotide
ugauguuguuuuguguggg

SEQ ID NO: 1787545 - RNA, 19 nt, Artificial Sequence
  Description of Artificial Sequence: Synthetic oligonucleotide
gaaucuguccucucauggc

SEQ ID NO: 1787546 - RNA, 19 nt, Artificial Sequence
  Description of Artificial Sequence: Synthetic oligonucleotide
uuuaguguucuuacuucgu

SEQ ID NO: 1787547 - RNA, 19 nt, Artificial Sequence
  Description of Artificial Sequence: Synthetic oligonucleotide
cauuaguuuggauuucuuc

SEQ ID NO: 1787548 - RNA, 19 nt, Artificial Sequence
  Description of Artificial Sequence: Synthetic oligonucleotide
aagaugcgaccucacucgg

SEQ ID NO: 1787549 - RNA, 19 nt, Artificial Sequence
  Description of Artificial Sequence: Synthetic oligonucleotide
aacaagaugcgaccucacu

SEQ ID NO: 1787550 - RNA, 19 nt, Artificial Sequence
  Description of Artificial Sequence: Synthetic oligonucleotide
ugcugaaugaggucggaac

SEQ ID NO: 1787551 - RNA, 19 nt, Artificial Sequence
  Description of Artificial Sequence: Synthetic oligonucleotide
ugcugaacaagaugcgacc

SEQ ID NO: 1787552 - RNA, 19 nt, Artificial Sequence
  Description of Artificial Sequence: Synthetic oligonucleotide
gaccuuaacccaaacacac

SEQ ID NO: 1787553 - RNA, 19 nt, Artificial Sequence
  Description of Artificial Sequence: Synthetic oligonucleotide
acugucaaguuccagcuau

SEQ ID NO: 1787554 - RNA, 19 nt, Artificial Sequence
  Description of Artificial Sequence: Synthetic oligonucleotide
ugaacaagaugcgaccuca

SEQ ID NO: 1787555 - RNA, 19 nt, Artificial Sequence
  Description of Artificial Sequence: Synthetic oligonucleotide
ucuuacuucguuugucacu

SEQ ID NO: 1787556 - RNA, 19 nt, Artificial Sequence
  Description of Artificial Sequence: Synthetic oligonucleotide
uguuguuuuguguggggac

SEQ ID NO: 1787557 - RNA, 19 nt, Artificial Sequence
  Description of Artificial Sequence: Synthetic oligonucleotide
uugggauuucucucggaag

SEQ ID NO: 1787558 - RNA, 19 nt, Artificial Sequence
  Description of Artificial Sequence: Synthetic oligonucleotide
gaaauucuggaauuucuua

SEQ ID NO: 1787559 - RNA, 19 nt, Artificial Sequence
  Description of Artificial Sequence: Synthetic oligonucleotide
cacucauuacauuuaugug

SEQ ID NO: 1787560 - RNA, 19 nt, Artificial Sequence
  Description of Artificial Sequence: Synthetic oligonucleotide
cugacauacuggaagaaga

SEQ ID NO: 1787561 - RNA, 19 nt, Artificial Sequence
  Description of Artificial Sequence: Synthetic oligonucleotide
ucacuauaaccuuguaccu

SEQ ID NO: 1787562 - RNA, 19 nt, Artificial Sequence
  Description of Artificial Sequence: Synthetic oligonucleotide
gacgcuguggugcugcacc

SEQ ID NO: 1787563 - RNA, 19 nt, Artificial Sequence
  Description of Artificial Sequence: Synthetic oligonucleotide
uaguuuggauuucuucuga

SEQ ID NO: 1787564 - RNA, 19 nt, Artificial Sequence
  Description of Artificial Sequence: Synthetic oligonucleotide
cuucguuugucacugcaac

SEQ ID NO: 1787565 - RNA, 19 nt, Artificial Sequence
  Description of Artificial Sequence: Synthetic oligonucleotide
agcuauaggcuucaucaca

SEQ ID NO: 1787566 - RNA, 19 nt, Artificial Sequence
  Description of Artificial Sequence: Synthetic oligonucleotide
ugacauacuggaagaagau

SEQ ID NO: 1787567 - RNA, 19 nt, Artificial Sequence
  Description of Artificial Sequence: Synthetic oligonucleotide
acugaugggauuucccacu

SEQ ID NO: 1787568 - RNA, 19 nt, Artificial Sequence
  Description of Artificial Sequence: Synthetic oligonucleotide
acuuugggauuucucucgg

SEQ ID NO: 1787569 - RNA, 19 nt, Artificial Sequence
  Description of Artificial Sequence: Synthetic oligonucleotide
ucauagucuucacuauaac

SEQ ID NO: 1787570 - RNA, 19 nt, Artificial Sequence
  Description of Artificial Sequence: Synthetic oligonucleotide
ugauuguagcuuuucccac

SEQ ID NO: 1787571 - RNA, 19 nt, Artificial Sequence
  Description of Artificial Sequence: Synthetic oligonucleotide
uauaaccuuguaccugaga

SEQ ID NO: 1787572 - RNA, 19 nt, Artificial Sequence
  Description of Artificial Sequence: Synthetic oligonucleotide
cuacagcuccaacugaagc

SEQ ID NO: 1787573 - RNA, 19 nt, Artificial Sequence
  Description of Artificial Sequence: Synthetic oligonucleotide
ucauugcaauucaugcucu

SEQ ID NO: 1787574 - RNA, 19 nt, Artificial Sequence
  Description of Artificial Sequence: Synthetic oligonucleotide
ucaguuuaguguucuuacu

SEQ ID NO: 1787575 - RNA, 19 nt, Artificial Sequence
  Description of Artificial Sequence: Synthetic oligonucleotide
ugcugagugagguggacac

SEQ ID NO: 1787576 - RNA, 19 nt, Artificial Sequence
  Description of Artificial Sequence: Synthetic oligonucleotide
uaucuucuauuacugucaa

SEQ ID NO: 1787577 - RNA, 19 nt, Artificial Sequence
  Description of Artificial Sequence: Synthetic oligonucleotide
uacuucguuugucacugca

SEQ ID NO: 1787578 - RNA, 19 nt, Artificial Sequence
  Description of Artificial Sequence: Synthetic oligonucleotide
aagaggcuacagcuccaac

SEQ ID NO: 1787579 - RNA, 19 nt, Artificial Sequence
  Description of Artificial Sequence: Synthetic oligonucleotide
acauacuggaagaagauuu

SEQ ID NO: 1787580 - RNA, 19 nt, Artificial Sequence
  Description of Artificial Sequence: Synthetic oligonucleotide
gcagguaucacacugguaa

SEQ ID NO: 1787581 - RNA, 19 nt, Artificial Sequence
  Description of Artificial Sequence: Synthetic oligonucleotide
ccaacugaagcucauuccg

SEQ ID NO: 1787582 - RNA, 19 nt, Artificial Sequence
  Description of Artificial Sequence: Synthetic oligonucleotide
gauuguagcuuuucccaca

SEQ ID NO: 1787583 - RNA, 19 nt, Artificial Sequence
  Description of Artificial Sequence: Synthetic oligonucleotide
cucucuagaguggagucgg

SEQ ID NO: 1787584 - RNA, 19 nt, Artificial Sequence
  Description of Artificial Sequence: Synthetic oligonucleotide
cucgaugaugcugagugag

SEQ ID NO: 1787585 - RNA, 19 nt, Artificial Sequence
  Description of Artificial Sequence: Synthetic oligonucleotide
ugcuguaugaggugugcac

SEQ ID NO: 1787586 - RNA, 19 nt, Artificial Sequence
  Description of Artificial Sequence: Synthetic oligonucleotide
ggcuucaucacagacacug

SEQ ID NO: 1787587 - RNA, 19 nt, Artificial Sequence
  Description of Artificial Sequence: Synthetic oligonucleotide
uucugauguuguuuugugu

SEQ ID NO: 1787588 - RNA, 19 nt, Artificial Sequence
  Description of Artificial Sequence: Synthetic oligonucleotide
guguucauagucuucacua

SEQ ID NO: 1787589 - RNA, 19 nt, Artificial Sequence
  Description of Artificial Sequence: Synthetic oligonucleotide
ucgaccgaagcucuuccca

SEQ ID NO: 1787590 - RNA, 19 nt, Artificial Sequence
  Description of Artificial Sequence: Synthetic oligonucleotide
ucccgcagguaucacacug

SEQ ID NO: 1787591 - RNA, 19 nt, Artificial Sequence
  Description of Artificial Sequence: Synthetic oligonucleotide
ugcaauucaugcucuucga

SEQ ID NO: 1787592 - RNA, 19 nt, Artificial Sequence
  Description of Artificial Sequence: Synthetic oligonucleotide
caacugaagcucauuccgc

SEQ ID NO: 1787593 - RNA, 19 nt, Artificial Sequence
  Description of Artificial Sequence: Synthetic oligonucleotide
ugaggucggaacuguaacu

SEQ ID NO: 1787594 - RNA, 19 nt, Artificial Sequence
  Description of Artificial Sequence: Synthetic oligonucleotide
ugcucgaucaggugggagu

SEQ ID NO: 1787595 - RNA, 19 nt, Artificial Sequence
  Description of Artificial Sequence: Synthetic oligonucleotide
ccagcuauaggcuucauca

SEQ ID NO: 1787596 - RNA, 19 nt, Artificial Sequence
  Description of Artificial Sequence: Synthetic oligonucleotide
ugaugggauuucccacugg

SEQ ID NO: 1787597 - RNA, 19 nt, Artificial Sequence
  Description of Artificial Sequence: Synthetic oligonucleotide
agguaucacacugguaagg

SEQ ID NO: 1787598 - RNA, 19 nt, Artificial Sequence
  Description of Artificial Sequence: Synthetic oligonucleotide
ugguguucaaggaggcuga

SEQ ID NO: 1787599 - RNA, 19 nt, Artificial Sequence
  Description of Artificial Sequence: Synthetic oligonucleotide
uguuuaggaaucuguccuc

SEQ ID NO: 1787600 - RNA, 19 nt, Artificial Sequence
  Description of Artificial Sequence: Synthetic oligonucleotide
accaggugggagcucacuc

SEQ ID NO: 1787601 - RNA, 19 nt, Artificial Sequence
  Description of Artificial Sequence: Synthetic oligonucleotide
cauuccgcauucuuugcac

SEQ ID NO: 1787602 - RNA, 19 nt, Artificial Sequence
  Description of Artificial Sequence: Synthetic oligonucleotide
ugauaguuccaugucugcu

SEQ ID NO: 1787603 - RNA, 19 nt, Artificial Sequence
  Description of Artificial Sequence: Synthetic oligonucleotide
caaggaggcugacauacug

SEQ ID NO: 1787604 - RNA, 19 nt, Artificial Sequence
  Description of Artificial Sequence: Synthetic oligonucleotide
uguaccugagaagcauuag

SEQ ID NO: 1787605 - RNA, 19 nt, Artificial Sequence
  Description of Artificial Sequence: Synthetic oligonucleotide
ugucgaccgaagcucuucc

SEQ ID NO: 1787606 - RNA, 19 nt, Artificial Sequence
  Description of Artificial Sequence: Synthetic oligonucleotide
gucacugcaacuuugggau

SEQ ID NO: 1787607 - RNA, 19 nt, Artificial Sequence
  Description of Artificial Sequence: Synthetic oligonucleotide
ugcaacuuugggauuucuc

SEQ ID NO: 1787608 - RNA, 19 nt, Artificial Sequence
  Description of Artificial Sequence: Synthetic oligonucleotide
uucgaagaggugguguuca

SEQ ID NO: 1787609 - RNA, 19 nt, Artificial Sequence
  Description of Artificial Sequence: Synthetic oligonucleotide
uucguuugucacugcaacu

SEQ ID NO: 1787610 - RNA, 19 nt, Artificial Sequence
  Description of Artificial Sequence: Synthetic oligonucleotide
cuucucgcuuuucuggccc

SEQ ID NO: 1787611 - RNA, 19 nt, Artificial Sequence
  Description of Artificial Sequence: Synthetic oligonucleotide
guguuuaggaaucuguccu

SEQ ID NO: 1787612 - RNA, 19 nt, Artificial Sequence
  Description of Artificial Sequence: Synthetic oligonucleotide
aguggagucggagguggcc

SEQ ID NO: 1787613 - RNA, 19 nt, Artificial Sequence
  Description of Artificial Sequence: Synthetic oligonucleotide
uguucuuacuucguuuguc

SEQ ID NO: 1787614 - RNA, 19 nt, Artificial Sequence
  Description of Artificial Sequence: Synthetic oligonucleotide
uauuacugucaaguuccag

SEQ ID NO: 1787615 - RNA, 19 nt, Artificial Sequence
  Description of Artificial Sequence: Synthetic oligonucleotide
ucacucggaaggcuuuccc

SEQ ID NO: 1787616 - RNA, 19 nt, Artificial Sequence
  Description of Artificial Sequence: Synthetic oligonucleotide
gagugagguggacacguug

SEQ ID NO: 1787617 - RNA, 19 nt, Artificial Sequence
  Description of Artificial Sequence: Synthetic oligonucleotide
caccugaaugguuucuccc

SEQ ID NO: 1787618 - RNA, 19 nt, Artificial Sequence
  Description of Artificial Sequence: Synthetic oligonucleotide
gaugugaacgccucccaaa

SEQ ID NO: 1787619 - RNA, 19 nt, Artificial Sequence
  Description of Artificial Sequence: Synthetic oligonucleotide
uuguaccugagaagcauua

SEQ ID NO: 1787620 - RNA, 19 nt, Artificial Sequence
  Description of Artificial Sequence: Synthetic oligonucleotide
uuccgcauucuuugcacug

SEQ ID NO: 1787621 - RNA, 19 nt, Artificial Sequence
  Description of Artificial Sequence: Synthetic oligonucleotide
cacucauuacacccauagg

SEQ ID NO: 1787622 - RNA, 19 nt, Artificial Sequence
  Description of Artificial Sequence: Synthetic oligonucleotide
ucuucucgcuuuucuggcc

SEQ ID NO: 1787623 - RNA, 19 nt, Artificial Sequence
  Description of Artificial Sequence: Synthetic oligonucleotide
cuucgcagauguuuaaaga

SEQ ID NO: 1787624 - RNA, 19 nt, Artificial Sequence
  Description of Artificial Sequence: Synthetic oligonucleotide
gaugcuguaugaggugugc

SEQ ID NO: 1787625 - RNA, 19 nt, Artificial Sequence
  Description of Artificial Sequence: Synthetic oligonucleotide
guagcuuuucccacauucc

SEQ ID NO: 1787626 - RNA, 19 nt, Artificial Sequence
  Description of Artificial Sequence: Synthetic oligonucleotide
uuucacccgugugaacucg

SEQ ID NO: 1787627 - RNA, 19 nt, Artificial Sequence
  Description of Artificial Sequence: Synthetic oligonucleotide
gaugcgaccucacucggaa

SEQ ID NO: 1787628 - RNA, 19 nt, Artificial Sequence
  Description of Artificial Sequence: Synthetic oligonucleotide
uccucucauggcuucgcag

SEQ ID NO: 1787629 - RNA, 19 nt, Artificial Sequence
  Description of Artificial Sequence: Synthetic oligonucleotide
cagacacuguucuucucgc

SEQ ID NO: 1787630 - RNA, 19 nt, Artificial Sequence
  Description of Artificial Sequence: Synthetic oligonucleotide
gucggaacuguaacuaaag

SEQ ID NO: 1787631 - RNA, 19 nt, Artificial Sequence
  Description of Artificial Sequence: Synthetic oligonucleotide
uagucuucacuauaaccuu

SEQ ID NO: 1787632 - RNA, 19 nt, Artificial Sequence
  Description of Artificial Sequence: Synthetic oligonucleotide
cuucugauaguuccauguc

SEQ ID NO: 1787633 - RNA, 19 nt, Artificial Sequence
  Description of Artificial Sequence: Synthetic oligonucleotide
uucuucugauaguuccaug

SEQ ID NO: 1787634 - RNA, 19 nt, Artificial Sequence
  Description of Artificial Sequence: Synthetic oligonucleotide
cggaacuguaacuaaaggc

SEQ ID NO: 1787635 - RNA, 19 nt, Artificial Sequence
  Description of Artificial Sequence: Synthetic oligonucleotide
aaguuccagcuauaggcuu

SEQ ID NO: 1787636 - RNA, 19 nt, Artificial Sequence
  Description of Artificial Sequence: Synthetic oligonucleotide
ucuucgaagaggugguguu

SEQ ID NO: 1787637 - RNA, 19 nt, Artificial Sequence
  Description of Artificial Sequence: Synthetic oligonucleotide
ucuuaauguucaguuuagu

SEQ ID NO: 1787638 - RNA, 19 nt, Artificial Sequence
  Description of Artificial Sequence: Synthetic oligonucleotide
ucauuacauuuauguggcc

SEQ ID NO: 1787639 - RNA, 19 nt, Artificial Sequence
  Description of Artificial Sequence: Synthetic oligonucleotide
cacugaugggauuucccac

SEQ ID NO: 1787640 - RNA, 19 nt, Artificial Sequence
  Description of Artificial Sequence: Synthetic oligonucleotide
ucccaaaacccuucccaca

SEQ ID NO: 1787641 - RNA, 19 nt, Artificial Sequence
  Description of Artificial Sequence: Synthetic oligonucleotide
uucgucgaugcuguaugag

SEQ ID NO: 1787642 - RNA, 19 nt, Artificial Sequence
  Description of Artificial Sequence: Synthetic oligonucleotide
ugggagugucgaccgaagc

SEQ ID NO: 1787643 - RNA, 19 nt, Artificial Sequence
  Description of Artificial Sequence: Synthetic oligonucleotide
auuacacuugaagggccuc

SEQ ID NO: 1787644 - RNA, 19 nt, Artificial Sequence
  Description of Artificial Sequence: Synthetic oligonucleotide
gaugggauuucccacuggu

SEQ ID NO: 1787645 - RNA, 19 nt, Artificial Sequence
  Description of Artificial Sequence: Synthetic oligonucleotide
aggcugacauacuggaaga

SEQ ID NO: 1787646 - RNA, 19 nt, Artificial Sequence
  Description of Artificial Sequence: Synthetic oligonucleotide
cacuauaaccuuguaccug

SEQ ID NO: 1787647 - RNA, 19 nt, Artificial Sequence
  Description of Artificial Sequence: Synthetic oligonucleotide
uccagcuauaggcuucauc

SEQ ID NO: 1787648 - RNA, 19 nt, Artificial Sequence
  Description of Artificial Sequence: Synthetic oligonucleotide
cagguaucacacugguaag

SEQ ID NO: 1787649 - RNA, 19 nt, Artificial Sequence
  Description of Artificial Sequence: Synthetic oligonucleotide
ugaggugugcacucugaau

SEQ ID NO: 1787650 - RNA, 19 nt, Artificial Sequence
  Description of Artificial Sequence: Synthetic oligonucleotide
ucgaugcuguaugaggugu

SEQ ID NO: 1787651 - RNA, 19 nt, Artificial Sequence
  Description of Artificial Sequence: Synthetic oligonucleotide
uuuucacccgugugaacuc

SEQ ID NO: 1787652 - RNA, 19 nt, Artificial Sequence
  Description of Artificial Sequence: Synthetic oligonucleotide
aggaaucuguccucucaug

SEQ ID NO: 1787653 - RNA, 19 nt, Artificial Sequence
  Description of Artificial Sequence: Synthetic oligonucleotide
caggugggagcucacucgg

SEQ ID NO: 1787654 - RNA, 19 nt, Artificial Sequence
  Description of Artificial Sequence: Synthetic oligonucleotide
aucuucuauuacugucaag

SEQ ID NO: 1787655 - RNA, 19 nt, Artificial Sequence
  Description of Artificial Sequence: Synthetic oligonucleotide
uuuaggaaucuguccucuc

SEQ ID NO: 1787656 - RNA, 19 nt, Artificial Sequence
  Description of Artificial Sequence: Synthetic oligonucleotide
cacucauggcacugguggg

SEQ ID NO: 1787657 - RNA, 19 nt, Artificial Sequence
  Description of Artificial Sequence: Synthetic oligonucleotide
uggacacguugauuguagc

SEQ ID NO: 1787658 - RNA, 19 nt, Artificial Sequence
  Description of Artificial Sequence: Synthetic oligonucleotide
guucuguaaugcugaauga

SEQ ID NO: 1787659 - RNA, 19 nt, Artificial Sequence
  Description of Artificial Sequence: Synthetic oligonucleotide
aucaggugggagugucgac

SEQ ID NO: 1787660 - RNA, 19 nt, Artificial Sequence
  Description of Artificial Sequence: Synthetic oligonucleotide
cuguaugaggugugcacuc

SEQ ID NO: 1787661 - RNA, 19 nt, Artificial Sequence
  Description of Artificial Sequence: Synthetic oligonucleotide
agcauuaguuuggauuucu

SEQ ID NO: 1787662 - RNA, 19 nt, Artificial Sequence
  Description of Artificial Sequence: Synthetic oligonucleotide
guggacacguugauuguag

SEQ ID NO: 1787663 - RNA, 19 nt, Artificial Sequence
  Description of Artificial Sequence: Synthetic oligonucleotide
auuccgcauucuuugcacu

SEQ ID NO: 1787664 - RNA, 19 nt, Artificial Sequence
  Description of Artificial Sequence: Synthetic oligonucleotide
aagcucauuccgcauucuu

SEQ ID NO: 1787665 - RNA, 19 nt, Artificial Sequence
  Description of Artificial Sequence: Synthetic oligonucleotide
ucggaacgaccuuaaccca

SEQ ID NO: 1787666 - RNA, 19 nt, Artificial Sequence
  Description of Artificial Sequence: Synthetic oligonucleotide
uguaugaggugugcacucu

SEQ ID NO: 1787667 - RNA, 19 nt, Artificial Sequence
  Description of Artificial Sequence: Synthetic oligonucleotide
cugaaugguuucuccccag

SEQ ID NO: 1787668 - RNA, 19 nt, Artificial Sequence
  Description of Artificial Sequence: Synthetic oligonucleotide
ucaaggaggcugacauacu

SEQ ID NO: 1787669 - RNA, 19 nt, Artificial Sequence
  Description of Artificial Sequence: Synthetic oligonucleotide
gcugaagucauugcaauuc

SEQ ID NO: 1787670 - RNA, 19 nt, Artificial Sequence
  Description of Artificial Sequence: Synthetic oligonucleotide
cugaaauucuggaauuucu

SEQ ID NO: 1787671 - RNA, 19 nt, Artificial Sequence
  Description of Artificial Sequence: Synthetic oligonucleotide
ugcaugcaucacauuucug

SEQ ID NO: 1787672 - RNA, 19 nt, Artificial Sequence
  Description of Artificial Sequence: Synthetic oligonucleotide
acacguugauuguagcuuu

SEQ ID NO: 1787673 - RNA, 19 nt, Artificial Sequence
  Description of Artificial Sequence: Synthetic oligonucleotide
guaugaggugugcacucug

SEQ ID NO: 1787674 - RNA, 19 nt, Artificial Sequence
  Description of Artificial Sequence: Synthetic oligonucleotide
gucggagguggccagcgag

SEQ ID NO: 1787675 - RNA, 19 nt, Artificial Sequence
  Description of Artificial Sequence: Synthetic oligonucleotide
uuacacuugaagggccucu

SEQ ID NO: 1787676 - RNA, 19 nt, Artificial Sequence
  Description of Artificial Sequence: Synthetic oligonucleotide
ggaaguggcguuucaggug

SEQ ID NO: 1787677 - RNA, 19 nt, Artificial Sequence
  Description of Artificial Sequence: Synthetic oligonucleotide
ggaagaagauuucuccaca

SEQ ID NO: 1787678 - RNA, 19 nt, Artificial Sequence
  Description of Artificial Sequence: Synthetic oligonucleotide
cuguaaugcugaaugaggu

SEQ ID NO: 1787679 - RNA, 19 nt, Artificial Sequence
  Description of Artificial Sequence: Synthetic oligonucleotide
acguugauuguagcuuuuc

SEQ ID NO: 1787680 - RNA, 19 nt, Artificial Sequence
  Description of Artificial Sequence: Synthetic oligonucleotide
cuauaaccuuguaccugag

SEQ ID NO: 1787681 - RNA, 19 nt, Artificial Sequence
  Description of Artificial Sequence: Synthetic oligonucleotide
auguuguuuugugugggga

SEQ ID NO: 1787682 - RNA, 19 nt, Artificial Sequence
  Description of Artificial Sequence: Synthetic oligonucleotide
aaagaggcuacagcuccaa

SEQ ID NO: 1787683 - RNA, 19 nt, Artificial Sequence
  Description of Artificial Sequence: Synthetic oligonucleotide
acauuccucacaccugaau

SEQ ID NO: 1787684 - RNA, 19 nt, Artificial Sequence
  Description of Artificial Sequence: Synthetic oligonucleotide
uggugggacuucucucuag

SEQ ID NO: 1787685 - RNA, 19 nt, Artificial Sequence
  Description of Artificial Sequence: Synthetic oligonucleotide
uuguuuuguguggggacac

SEQ ID NO: 1787686 - RNA, 19 nt, Artificial Sequence
  Description of Artificial Sequence: Synthetic oligonucleotide
cugaagucauugcaauuca

SEQ ID NO: 1787687 - RNA, 19 nt, Artificial Sequence
  Description of Artificial Sequence: Synthetic oligonucleotide
cgcagauguuuaaagaggc

SEQ ID NO: 1787688 - RNA, 19 nt, Artificial Sequence
  Description of Artificial Sequence: Synthetic oligonucleotide
gaucaggugggagugucga

SEQ ID NO: 1787689 - RNA, 19 nt, Artificial Sequence
  Description of Artificial Sequence: Synthetic oligonucleotide
aggugcucgaucagguggg

SEQ ID NO: 1787690 - RNA, 19 nt, Artificial Sequence
  Description of Artificial Sequence: Synthetic oligonucleotide
cugaugggauuucccacug

SEQ ID NO: 1787691 - RNA, 19 nt, Artificial Sequence
  Description of Artificial Sequence: Synthetic oligonucleotide
gcaacuuugggauuucucu

SEQ ID NO: 1787692 - RNA, 19 nt, Artificial Sequence
  Description of Artificial Sequence: Synthetic oligonucleotide
ugaguucuguaaugcugaa

SEQ ID NO: 1787693 - RNA, 19 nt, Artificial Sequence
  Description of Artificial Sequence: Synthetic oligonucleotide
cagauguuuaaagaggcua

SEQ ID NO: 1787694 - RNA, 19 nt, Artificial Sequence
  Description of Artificial Sequence: Synthetic oligonucleotide
gugggacuucucucuagag

SEQ ID NO: 1787695 - RNA, 19 nt, Artificial Sequence
  Description of Artificial Sequence: Synthetic oligonucleotide
auucgucgaugcuguauga

SEQ ID NO: 1787696 - RNA, 19 nt, Artificial Sequence
  Description of Artificial Sequence: Synthetic oligonucleotide
cuguaacuaaaggcuuucc

SEQ ID NO: 1787697 - RNA, 19 nt, Artificial Sequence
  Description of Artificial Sequence: Synthetic oligonucleotide
gaugagacuugagacugaa

SEQ ID NO: 1787698 - RNA, 19 nt, Artificial Sequence
  Description of Artificial Sequence: Synthetic oligonucleotide
uguggggacacuggccagc

SEQ ID NO: 1787699 - RNA, 19 nt, Artificial Sequence
  Description of Artificial Sequence: Synthetic oligonucleotide
cacucuggugcugaacaag

SEQ ID NO: 1787700 - RNA, 19 nt, Artificial Sequence
  Description of Artificial Sequence: Synthetic oligonucleotide
cucuagaguggagucggag

SEQ ID NO: 1787701 - RNA, 19 nt, Artificial Sequence
  Description of Artificial Sequence: Synthetic oligonucleotide
ucacucggaacgaccuuaa

SEQ ID NO: 1787702 - RNA, 19 nt, Artificial Sequence
  Description of Artificial Sequence: Synthetic oligonucleotide
gagucggagguggccagcg

SEQ ID NO: 1787703 - RNA, 19 nt, Artificial Sequence
  Description of Artificial Sequence: Synthetic oligonucleotide
guggcguuucaggugcucg

SEQ ID NO: 1787704 - RNA, 19 nt, Artificial Sequence
  Description of Artificial Sequence: Synthetic oligonucleotide
cuagaguggagucggaggu

SEQ ID NO: 1787705 - RNA, 19 nt, Artificial Sequence
  Description of Artificial Sequence: Synthetic oligonucleotide
ucgcuuuucuggcccacau

SEQ ID NO: 1787706 - RNA, 19 nt, Artificial Sequence
  Description of Artificial Sequence: Synthetic oligonucleotide
acucgaugaugcugaguga

SEQ ID NO: 1787707 - RNA, 19 nt, Artificial Sequence
  Description of Artificial Sequence: Synthetic oligonucleotide
agacacuguucuucucgcu

SEQ ID NO: 1787708 - RNA, 19 nt, Artificial Sequence
  Description of Artificial Sequence: Synthetic oligonucleotide
cuuucccgcagguaucaca

SEQ ID NO: 1787709 - RNA, 19 nt, Artificial Sequence
  Description of Artificial Sequence: Synthetic oligonucleotide
ucucggaaguggcguuuca

SEQ ID NO: 1787710 - RNA, 19 nt, Artificial Sequence
  Description of Artificial Sequence: Synthetic oligonucleotide
agcugaagucauugcaauu

SEQ ID NO: 1787711 - RNA, 19 nt, Artificial Sequence
  Description of Artificial Sequence: Synthetic oligonucleotide
ucuccacacucauggcacu

SEQ ID NO: 1787712 - RNA, 19 nt, Artificial Sequence
  Description of Artificial Sequence: Synthetic oligonucleotide
gaacgaccuuaacccaaac

SEQ ID NO: 1787713 - RNA, 19 nt, Artificial Sequence
  Description of Artificial Sequence: Synthetic oligonucleotide
ucucuagaguggagucgga

SEQ ID NO: 1787714 - RNA, 19 nt, Artificial Sequence
  Description of Artificial Sequence: Synthetic oligonucleotide
aggucggaacuguaacuaa

SEQ ID NO: 1787715 - RNA, 19 nt, Artificial Sequence
  Description of Artificial Sequence: Synthetic oligonucleotide
gagcucacucggaacgacc

SEQ ID NO: 1787716 - RNA, 19 nt, Artificial Sequence
  Description of Artificial Sequence: Synthetic oligonucleotide
ucgaucaggugggaguguc

SEQ ID NO: 1787717 - RNA, 19 nt, Artificial Sequence
  Description of Artificial Sequence: Synthetic oligonucleotide
cauuacacccauagggccu

SEQ ID NO: 1787718 - RNA, 19 nt, Artificial Sequence
  Description of Artificial Sequence: Synthetic oligonucleotide
agguggacacguugauugu

SEQ ID NO: 1787719 - RNA, 19 nt, Artificial Sequence
  Description of Artificial Sequence: Synthetic oligonucleotide
ggagugucgaccgaagcuc

SEQ ID NO: 1787720 - RNA, 19 nt, Artificial Sequence
  Description of Artificial Sequence: Synthetic oligonucleotide
agcucacucggaacgaccu

SEQ ID NO: 1787721 - RNA, 19 nt, Artificial Sequence
  Description of Artificial Sequence: Synthetic oligonucleotide
gacacguugauuguagcuu

SEQ ID NO: 1787722 - RNA, 19 nt, Artificial Sequence
  Description of Artificial Sequence: Synthetic oligonucleotide
uucucgcuuuucuggccca

SEQ ID NO: 1787723 - RNA, 19 nt, Artificial Sequence
  Description of Artificial Sequence: Synthetic oligonucleotide
uguuuuguguggggacacu

SEQ ID NO: 1787724 - RNA, 19 nt, Artificial Sequence
  Description of Artificial Sequence: Synthetic oligonucleotide
cuauuacugucaaguucca

SEQ ID NO: 1787725 - RNA, 19 nt, Artificial Sequence
  Description of Artificial Sequence: Synthetic oligonucleotide
gucgaccgaagcucuuccc

SEQ ID NO: 1787726 - RNA, 19 nt, Artificial Sequence
  Description of Artificial Sequence: Synthetic oligonucleotide
gaacaagaugcgaccucac

SEQ ID NO: 1787727 - RNA, 19 nt, Artificial Sequence
  Description of Artificial Sequence: Synthetic oligonucleotide
cuuuucuggcccacaugga

SEQ ID NO: 1787728 - RNA, 19 nt, Artificial Sequence
  Description of Artificial Sequence: Synthetic oligonucleotide
cucauggcacuggugggac

SEQ ID NO: 1787729 - RNA, 19 nt, Artificial Sequence
  Description of Artificial Sequence: Synthetic oligonucleotide
cagguguuuaggaaucugu

SEQ ID NO: 1787730 - RNA, 19 nt, Artificial Sequence
  Description of Artificial Sequence: Synthetic oligonucleotide
cguugauuguagcuuuucc

SEQ ID NO: 1787731 - RNA, 19 nt, Artificial Sequence
  Description of Artificial Sequence: Synthetic oligonucleotide
augggauuucccacuggug

SEQ ID NO: 1787732 - RNA, 19 nt, Artificial Sequence
  Description of Artificial Sequence: Synthetic oligonucleotide
acacucuggugcugaacaa

SEQ ID NO: 1787733 - RNA, 19 nt, Artificial Sequence
  Description of Artificial Sequence: Synthetic oligonucleotide
cuucgaagaggugguguuc

SEQ ID NO: 1787734 - RNA, 19 nt, Artificial Sequence
  Description of Artificial Sequence: Synthetic oligonucleotide
gccagcgagaugugaacgc

SEQ ID NO: 1787735 - RNA, 19 nt, Artificial Sequence
  Description of Artificial Sequence: Synthetic oligonucleotide
acuucguuugucacugcaa

SEQ ID NO: 1787736 - RNA, 19 nt, Artificial Sequence
  Description of Artificial Sequence: Synthetic oligonucleotide
caguuuaguguucuuacuu

SEQ ID NO: 1787737 - RNA, 19 nt, Artificial Sequence
  Description of Artificial Sequence: Synthetic oligonucleotide
augcgaccucacucggaag

SEQ ID NO: 1787738 - RNA, 19 nt, Artificial Sequence
  Description of Artificial Sequence: Synthetic oligonucleotide
agcucauuccgcauucuuu

SEQ ID NO: 1787739 - RNA, 19 nt, Artificial Sequence
  Description of Artificial Sequence: Synthetic oligonucleotide
ggugggacuucucucuaga

SEQ ID NO: 1787740 - RNA, 19 nt, Artificial Sequence
  Description of Artificial Sequence: Synthetic oligonucleotide
cauuacacuugaagggccu

SEQ ID NO: 1787741 - RNA, 19 nt, Artificial Sequence
  Description of Artificial Sequence: Synthetic oligonucleotide
guuuaggaaucuguccucu

SEQ ID NO: 1787742 - RNA, 19 nt, Artificial Sequence
  Description of Artificial Sequence: Synthetic oligonucleotide
ggccagcgagaugugaacg

SEQ ID NO: 1787743 - RNA, 19 nt, Artificial Sequence
  Description of Artificial Sequence: Synthetic oligonucleotide
gguaaggcugcuccuguaa

SEQ ID NO: 1787744 - RNA, 19 nt, Artificial Sequence
  Description of Artificial Sequence: Synthetic oligonucleotide
guggacgcuguggugcugc

SEQ ID NO: 1787745 - RNA, 19 nt, Artificial Sequence
  Description of Artificial Sequence: Synthetic oligonucleotide
cuuugggauuucucucgga

SEQ ID NO: 1787746 - RNA, 19 nt, Artificial Sequence
  Description of Artificial Sequence: Synthetic oligonucleotide
ucauggcacuggugggacu

SEQ ID NO: 1787747 - RNA, 19 nt, Artificial Sequence
  Description of Artificial Sequence: Synthetic oligonucleotide
cacuguggacgcuguggug

SEQ ID NO: 1787748 - RNA, 19 nt, Artificial Sequence
  Description of Artificial Sequence: Synthetic oligonucleotide
auggcuucgcagauguuua

SEQ ID NO: 1787749 - RNA, 19 nt, Artificial Sequence
  Description of Artificial Sequence: Synthetic oligonucleotide
uggcuucgcagauguuuaa

SEQ ID NO: 1787750 - RNA, 19 nt, Artificial Sequence
  Description of Artificial Sequence: Synthetic oligonucleotide
ucgaagaggugguguucau

SEQ ID NO: 1787751 - RNA, 19 nt, Artificial Sequence
  Description of Artificial Sequence: Synthetic oligonucleotide
ugguaaggcugcuccugua

SEQ ID NO: 1787752 - RNA, 19 nt, Artificial Sequence
  Description of Artificial Sequence: Synthetic oligonucleotide
guguggggacacuggccag

SEQ ID NO: 1787753 - RNA, 19 nt, Artificial Sequence
  Description of Artificial Sequence: Synthetic oligonucleotide
cccgcagguaucacacugg

SEQ ID NO: 1787754 - RNA, 19 nt, Artificial Sequence
  Description of Artificial Sequence: Synthetic oligonucleotide
gugggagugucgaccgaag

SEQ ID NO: 1787755 - RNA, 19 nt, Artificial Sequence
  Description of Artificial Sequence: Synthetic oligonucleotide
gggauuucucucggaagug

SEQ ID NO: 1787756 - RNA, 19 nt, Artificial Sequence
  Description of Artificial Sequence: Synthetic oligonucleotide
acuggccagcacugucucu

SEQ ID NO: 1787757 - RNA, 19 nt, Artificial Sequence
  Description of Artificial Sequence: Synthetic oligonucleotide
acgcuguggugcugcacca

SEQ ID NO: 1787758 - RNA, 19 nt, Artificial Sequence
  Description of Artificial Sequence: Synthetic oligonucleotide
ccucucauggcuucgcaga

SEQ ID NO: 1787759 - RNA, 19 nt, Artificial Sequence
  Description of Artificial Sequence: Synthetic oligonucleotide
ucacugcaacuuugggauu

SEQ ID NO: 1787760 - RNA, 19 nt, Artificial Sequence
  Description of Artificial Sequence: Synthetic oligonucleotide
gcucgaucaggugggagug

SEQ ID NO: 1787761 - RNA, 19 nt, Artificial Sequence
  Description of Artificial Sequence: Synthetic oligonucleotide
ggacacguugauuguagcu

SEQ ID NO: 1787762 - RNA, 19 nt, Artificial Sequence
  Description of Artificial Sequence: Synthetic oligonucleotide
gggagugucgaccgaagcu

SEQ ID NO: 1787763 - RNA, 19 nt, Artificial Sequence
  Description of Artificial Sequence: Synthetic oligonucleotide
ccagcgagaugugaacgcc

SEQ ID NO: 1787764 - RNA, 19 nt, Artificial Sequence
  Description of Artificial Sequence: Synthetic oligonucleotide
ucucucggaaguggcguuu

SEQ ID NO: 1787765 - RNA, 19 nt, Artificial Sequence
  Description of Artificial Sequence: Synthetic oligonucleotide
guggccagcgagaugugaa

SEQ ID NO: 1787766 - RNA, 19 nt, Artificial Sequence
  Description of Artificial Sequence: Synthetic oligonucleotide
guucaaggaggcugacaua

SEQ ID NO: 1787767 - RNA, 19 nt, Artificial Sequence
  Description of Artificial Sequence: Synthetic oligonucleotide
cucacucggaacgaccuua

SEQ ID NO: 1787768 - RNA, 19 nt, Artificial Sequence
  Description of Artificial Sequence: Synthetic oligonucleotide
ucucgcuuuucuggcccac

SEQ ID NO: 1787769 - RNA, 19 nt, Artificial Sequence
  Description of Artificial Sequence: Synthetic oligonucleotide
augcugaaugaggucggaa

SEQ ID NO: 1787770 - RNA, 19 nt, Artificial Sequence
  Description of Artificial Sequence: Synthetic oligonucleotide
aacacaccuggcacuugua

SEQ ID NO: 1787771 - RNA, 19 nt, Artificial Sequence
  Description of Artificial Sequence: Synthetic oligonucleotide
gugucgaccgaagcucuuc

SEQ ID NO: 1787772 - RNA, 19 nt, Artificial Sequence
  Description of Artificial Sequence: Synthetic oligonucleotide
gcugagugagguggacacg

SEQ ID NO: 1787773 - RNA, 19 nt, Artificial Sequence
  Description of Artificial Sequence: Synthetic oligonucleotide
uggacgcuguggugcugca

SEQ ID NO: 1787774 - RNA, 19 nt, Artificial Sequence
  Description of Artificial Sequence: Synthetic oligonucleotide
guguucuuacuucguuugu

SEQ ID NO: 1787775 - RNA, 19 nt, Artificial Sequence
  Description of Artificial Sequence: Synthetic oligonucleotide
agucggagguggccagcga

SEQ ID NO: 1787776 - RNA, 19 nt, Artificial Sequence
  Description of Artificial Sequence: Synthetic oligonucleotide
gaaugaggucggaacugua

SEQ ID NO: 1787777 - RNA, 19 nt, Artificial Sequence
  Description of Artificial Sequence: Synthetic oligonucleotide
ucucugcaugcaucacauu

SEQ ID NO: 1787778 - RNA, 19 nt, Artificial Sequence
  Description of Artificial Sequence: Synthetic oligonucleotide
gagaagcauuaguuuggau

SEQ ID NO: 1787779 - RNA, 19 nt, Artificial Sequence
  Description of Artificial Sequence: Synthetic oligonucleotide
agaugcgaccucacucgga

SEQ ID NO: 1787780 - RNA, 19 nt, Artificial Sequence
  Description of Artificial Sequence: Synthetic oligonucleotide
cucucggaaguggcguuuc

SEQ ID NO: 1787781 - RNA, 19 nt, Artificial Sequence
  Description of Artificial Sequence: Synthetic oligonucleotide
cuuguaccugagaagcauu

SEQ ID NO: 1787782 - RNA, 19 nt, Artificial Sequence
  Description of Artificial Sequence: Synthetic oligonucleotide
uguggacgcuguggugcug

SEQ ID NO: 1787783 - RNA, 19 nt, Artificial Sequence
  Description of Artificial Sequence: Synthetic oligonucleotide
ggucggaacuguaacuaaa

SEQ ID NO: 1787784 - RNA, 19 nt, Artificial Sequence
  Description of Artificial Sequence: Synthetic oligonucleotide
ggugguguucauagucuuc

SEQ ID NO: 1787785 - RNA, 19 nt, Artificial Sequence
  Description of Artificial Sequence: Synthetic oligonucleotide
cauugcacugaugggauuu

SEQ ID NO: 1787786 - RNA, 19 nt, Artificial Sequence
  Description of Artificial Sequence: Synthetic oligonucleotide
caugucugcuucugaaauu

SEQ ID NO: 1787787 - RNA, 19 nt, Artificial Sequence
  Description of Artificial Sequence: Synthetic oligonucleotide
ucccacuggugcagauuuu

SEQ ID NO: 1787788 - RNA, 19 nt, Artificial Sequence
  Description of Artificial Sequence: Synthetic oligonucleotide
cuggugcagauuuucugau

SEQ ID NO: 1787789 - RNA, 19 nt, Artificial Sequence
  Description of Artificial Sequence: Synthetic oligonucleotide
cgaccuuaacccaaacaca

SEQ ID NO: 1787790 - RNA, 19 nt, Artificial Sequence
  Description of Artificial Sequence: Synthetic oligonucleotide
gagugucgaccgaagcucu

SEQ ID NO: 1787791 - RNA, 19 nt, Artificial Sequence
  Description of Artificial Sequence: Synthetic oligonucleotide
cugucaaguuccagcuaua

SEQ ID NO: 1787792 - RNA, 19 nt, Artificial Sequence
  Description of Artificial Sequence: Synthetic oligonucleotide
uggauucgucgaugcugua

SEQ ID NO: 1787793 - RNA, 19 nt, Artificial Sequence
  Description of Artificial Sequence: Synthetic oligonucleotide
cucuucgaagagguggugu

SEQ ID NO: 1787794 - RNA, 19 nt, Artificial Sequence
  Description of Artificial Sequence: Synthetic oligonucleotide
ggaacgaccuuaacccaaa

SEQ ID NO: 1787795 - RNA, 19 nt, Artificial Sequence
  Description of Artificial Sequence: Synthetic oligonucleotide
gaacgccucccaaaacccu

SEQ ID NO: 1787796 - RNA, 19 nt, Artificial Sequence
  Description of Artificial Sequence: Synthetic oligonucleotide
gcuguaugaggugugcacu

SEQ ID NO: 1787797 - RNA, 19 nt, Artificial Sequence
  Description of Artificial Sequence: Synthetic oligonucleotide
cgaucaggugggagugucg

SEQ ID NO: 1787798 - RNA, 19 nt, Artificial Sequence
  Description of Artificial Sequence: Synthetic oligonucleotide
ggagcucacucggaacgac

SEQ ID NO: 1787799 - RNA, 19 nt, Artificial Sequence
  Description of Artificial Sequence: Synthetic oligonucleotide
uggccucucugaggaagau

SEQ ID NO: 1787800 - RNA, 19 nt, Artificial Sequence
  Description of Artificial Sequence: Synthetic oligonucleotide
gcugaacaagaugcgaccu

SEQ ID NO: 1787801 - RNA, 19 nt, Artificial Sequence
  Description of Artificial Sequence: Synthetic oligonucleotide
gcgaccucacucggaaggc

SEQ ID NO: 1787802 - RNA, 19 nt, Artificial Sequence
  Description of Artificial Sequence: Synthetic oligonucleotide
ggugggagugucgaccgaa

SEQ ID NO: 1787803 - RNA, 19 nt, Artificial Sequence
  Description of Artificial Sequence: Synthetic oligonucleotide
cagcgagaugugaacgccu

SEQ ID NO: 1787804 - RNA, 19 nt, Artificial Sequence
  Description of Artificial Sequence: Synthetic oligonucleotide
accucacucggaaggcuuu

SEQ ID NO: 1787805 - RNA, 19 nt, Artificial Sequence
  Description of Artificial Sequence: Synthetic oligonucleotide
gguggacacguugauugua

SEQ ID NO: 1787806 - RNA, 19 nt, Artificial Sequence
  Description of Artificial Sequence: Synthetic oligonucleotide
ggccucucccugcugugca

SEQ ID NO: 1787807 - RNA, 19 nt, Artificial Sequence
  Description of Artificial Sequence: Synthetic oligonucleotide
auguggccucucugaggaa

SEQ ID NO: 1787808 - RNA, 19 nt, Artificial Sequence
  Description of Artificial Sequence: Synthetic oligonucleotide
cauugcaauucaugcucuu

SEQ ID NO: 1787809 - RNA, 19 nt, Artificial Sequence
  Description of Artificial Sequence: Synthetic oligonucleotide
ccaugucugcuucugaaau

SEQ ID NO: 1787810 - RNA, 19 nt, Artificial Sequence
  Description of Artificial Sequence: Synthetic oligonucleotide
cacugcaacuuugggauuu

SEQ ID NO: 1787811 - RNA, 19 nt, Artificial Sequence
  Description of Artificial Sequence: Synthetic oligonucleotide
agugucgaccgaagcucuu

SEQ ID NO: 1787812 - RNA, 19 nt, Artificial Sequence
  Description of Artificial Sequence: Synthetic oligonucleotide
ggauucgucgaugcuguau

SEQ ID NO: 1787813 - RNA, 19 nt, Artificial Sequence
  Description of Artificial Sequence: Synthetic oligonucleotide
ccucacaccugaaugguuu

SEQ ID NO: 1787814 - RNA, 19 nt, Artificial Sequence
  Description of Artificial Sequence: Synthetic oligonucleotide
gcacacucuggugcugaac

SEQ ID NO: 1787815 - RNA, 19 nt, Artificial Sequence
  Description of Artificial Sequence: Synthetic oligonucleotide
gggagcucacucggaacga

SEQ ID NO: 1787816 - RNA, 19 nt, Artificial Sequence
  Description of Artificial Sequence: Synthetic oligonucleotide
ggaggcugacauacuggaa

SEQ ID NO: 1787817 - RNA, 19 nt, Artificial Sequence
  Description of Artificial Sequence: Synthetic oligonucleotide
uuccagcuauaggcuucau

SEQ ID NO: 1787818 - RNA, 19 nt, Artificial Sequence
  Description of Artificial Sequence: Synthetic oligonucleotide
cacguugauuguagcuuuu

SEQ ID NO: 1787819 - RNA, 19 nt, Artificial Sequence
  Description of Artificial Sequence: Synthetic oligonucleotide
cggaacgaccuuaacccaa

SEQ ID NO: 1787820 - RNA, 19 nt, Artificial Sequence
  Description of Artificial Sequence: Synthetic oligonucleotide
ccgcauucuuugcacugga

SEQ ID NO: 1787821 - RNA, 19 nt, Artificial Sequence
  Description of Artificial Sequence: Synthetic oligonucleotide
ccuuguaccugagaagcau

SEQ ID NO: 1787822 - RNA, 19 nt, Artificial Sequence
  Description of Artificial Sequence: Synthetic oligonucleotide
ccucacucggaaggcuuuc

SEQ ID NO: 1787823 - RNA, 19 nt, Artificial Sequence
  Description of Artificial Sequence: Synthetic oligonucleotide
ggacgcuguggugcugcac

SEQ ID NO: 1787824 - RNA, 19 nt, Artificial Sequence
  Description of Artificial Sequence: Synthetic oligonucleotide
gcuuucccgcagguaucac

SEQ ID NO: 1787825 - RNA, 19 nt, Artificial Sequence
  Description of Artificial Sequence: Synthetic oligonucleotide
cgaugaugcugagugaggu

SEQ ID NO: 1787826 - RNA, 19 nt, Artificial Sequence
  Description of Artificial Sequence: Synthetic oligonucleotide
gcauuaguuuggauuucuu

SEQ ID NO: 1787827 - RNA, 19 nt, Artificial Sequence
  Description of Artificial Sequence: Synthetic oligonucleotide
ggcguuucaggugcucgau

SEQ ID NO: 1787828 - RNA, 19 nt, Artificial Sequence
  Description of Artificial Sequence: Synthetic oligonucleotide
ggcccacauggagcacuug

SEQ ID NO: 1787829 - RNA, 19 nt, Artificial Sequence
  Description of Artificial Sequence: Synthetic oligonucleotide
ccgcagguaucacacuggu

SEQ ID NO: 1787830 - RNA, 19 nt, Artificial Sequence
  Description of Artificial Sequence: Synthetic oligonucleotide
caccaggugggagcucacu

SEQ ID NO: 1787831 - RNA, 19 nt, Artificial Sequence
  Description of Artificial Sequence: Synthetic oligonucleotide
gcucacucggaacgaccuu

SEQ ID NO: 1787832 - RNA, 19 nt, Artificial Sequence
  Description of Artificial Sequence: Synthetic oligonucleotide
cgaagaggugguguucaua

SEQ ID NO: 1787833 - RNA, 19 nt, Artificial Sequence
  Description of Artificial Sequence: Synthetic oligonucleotide
cgcagguaucacacuggua

SEQ ID NO: 1787834 - RNA, 19 nt, Artificial Sequence
  Description of Artificial Sequence: Synthetic oligonucleotide
uuauuuuagcuuaugaggg

SEQ ID NO: 1787835 - RNA, 19 nt, Artificial Sequence
  Description of Artificial Sequence: Synthetic oligonucleotide
aauauuuucuuagauuugc

SEQ ID NO: 1787836 - RNA, 19 nt, Artificial Sequence
  Description of Artificial Sequence: Synthetic oligonucleotide
uguaucaugaagaucaaag

SEQ ID NO: 1787837 - RNA, 19 nt, Artificial Sequence
  Description of Artificial Sequence: Synthetic oligonucleotide
aacuauucaggucaucccc

SEQ ID NO: 1787838 - RNA, 19 nt, Artificial Sequence
  Description of Artificial Sequence: Synthetic oligonucleotide
aaaugaagggauaaugugc

SEQ ID NO: 1787839 - RNA, 19 nt, Artificial Sequence
  Description of Artificial Sequence: Synthetic oligonucleotide
uuuaguugcacucacgaug

SEQ ID NO: 1787840 - RNA, 19 nt, Artificial Sequence
  Description of Artificial Sequence: Synthetic oligonucleotide
uuaugaggggaaaugaagg

SEQ ID NO: 1787841 - RNA, 19 nt, Artificial Sequence
  Description of Artificial Sequence: Synthetic oligonucleotide
acuauuacugaauugagga

SEQ ID NO: 1787842 - RNA, 19 nt, Artificial Sequence
  Description of Artificial Sequence: Synthetic oligonucleotide
uggauuucugcaaagaagc

SEQ ID NO: 1787843 - RNA, 19 nt, Artificial Sequence
  Description of Artificial Sequence: Synthetic oligonucleotide
auuuguucagcucuuguac

SEQ ID NO: 1787844 - RNA, 19 nt, Artificial Sequence
  Description of Artificial Sequence: Synthetic oligonucleotide
auaacuauucaggucaucc

SEQ ID NO: 1787845 - RNA, 19 nt, Artificial Sequence
  Description of Artificial Sequence: Synthetic oligonucleotide
aaugucacagaagaggcgg

SEQ ID NO: 1787846 - RNA, 19 nt, Artificial Sequence
  Description of Artificial Sequence: Synthetic oligonucleotide
aaaauaaguucuucuuuag

SEQ ID NO: 1787847 - RNA, 19 nt, Artificial Sequence
  Description of Artificial Sequence: Synthetic oligonucleotide
aauugaggaaaucaaucug

SEQ ID NO: 1787848 - RNA, 19 nt, Artificial Sequence
  Description of Artificial Sequence: Synthetic oligonucleotide
auucucuacauucagaagu

SEQ ID NO: 1787849 - RNA, 19 nt, Artificial Sequence
  Description of Artificial Sequence: Synthetic oligonucleotide
augacuugugacuucgucc

SEQ ID NO: 1787850 - RNA, 19 nt, Artificial Sequence
  Description of Artificial Sequence: Synthetic oligonucleotide
cuaacaacugauuauugag

SEQ ID NO: 1787851 - RNA, 19 nt, Artificial Sequence
  Description of Artificial Sequence: Synthetic oligonucleotide
uucucugugaguaaggcac

SEQ ID NO: 1787852 - RNA, 19 nt, Artificial Sequence
  Description of Artificial Sequence: Synthetic oligonucleotide
aaguugaagcuccaaguuc

SEQ ID NO: 1787853 - RNA, 19 nt, Artificial Sequence
  Description of Artificial Sequence: Synthetic oligonucleotide
gauaaugugcugaagauca

SEQ ID NO: 1787854 - RNA, 19 nt, Artificial Sequence
  Description of Artificial Sequence: Synthetic oligonucleotide
uuuuccuuaaguugaagcu

SEQ ID NO: 1787855 - RNA, 19 nt, Artificial Sequence
  Description of Artificial Sequence: Synthetic oligonucleotide
uuaguugcacucacgaugc

SEQ ID NO: 1787856 - RNA, 19 nt, Artificial Sequence
  Description of Artificial Sequence: Synthetic oligonucleotide
aaguguguccaguucaguc

SEQ ID NO: 1787857 - RNA, 19 nt, Artificial Sequence
  Description of Artificial Sequence: Synthetic oligonucleotide
aaaucaaucugacucuccu

SEQ ID NO: 1787858 - RNA, 19 nt, Artificial Sequence
  Description of Artificial Sequence: Synthetic oligonucleotide
gauuauugaguacagaucu

SEQ ID NO: 1787859 - RNA, 19 nt, Artificial Sequence
  Description of Artificial Sequence: Synthetic oligonucleotide
caaaugucacagaagaggc

SEQ ID NO: 1787860 - RNA, 19 nt, Artificial Sequence
  Description of Artificial Sequence: Synthetic oligonucleotide
uuaaguugaagcuccaagu

SEQ ID NO: 1787861 - RNA, 19 nt, Artificial Sequence
  Description of Artificial Sequence: Synthetic oligonucleotide
ucuuuaguugcacucacga

SEQ ID NO: 1787862 - RNA, 19 nt, Artificial Sequence
  Description of Artificial Sequence: Synthetic oligonucleotide
uauuuuagcuuaugagggg

SEQ ID NO: 1787863 - RNA, 19 nt, Artificial Sequence
  Description of Artificial Sequence: Synthetic oligonucleotide
uucuuagauuugcugacgg

SEQ ID NO: 1787864 - RNA, 19 nt, Artificial Sequence
  Description of Artificial Sequence: Synthetic oligonucleotide
cuuaugaggggaaaugaag

SEQ ID NO: 1787865 - RNA, 19 nt, Artificial Sequence
  Description of Artificial Sequence: Synthetic oligonucleotide
ucuaacaacugauuauuga

SEQ ID NO: 1787866 - RNA, 19 nt, Artificial Sequence
  Description of Artificial Sequence: Synthetic oligonucleotide
ugugcugaagaucaaaaua

SEQ ID NO: 1787867 - RNA, 19 nt, Artificial Sequence
  Description of Artificial Sequence: Synthetic oligonucleotide
aaauaaguucuucuuuagu

SEQ ID NO: 1787868 - RNA, 19 nt, Artificial Sequence
  Description of Artificial Sequence: Synthetic oligonucleotide
ucacagaucucacaguaug

SEQ ID NO: 1787869 - RNA, 19 nt, Artificial Sequence
  Description of Artificial Sequence: Synthetic oligonucleotide
agcaccgugaccucauucc

SEQ ID NO: 1787870 - RNA, 19 nt, Artificial Sequence
  Description of Artificial Sequence: Synthetic oligonucleotide
ucaucagagucuuuuaugu

SEQ ID NO: 1787871 - RNA, 19 nt, Artificial Sequence
  Description of Artificial Sequence: Synthetic oligonucleotide
uuauguauucgaauucucu

SEQ ID NO: 1787872 - RNA, 19 nt, Artificial Sequence
  Description of Artificial Sequence: Synthetic oligonucleotide
gaaugcagggacuuggcag

SEQ ID NO: 1787873 - RNA, 19 nt, Artificial Sequence
  Description of Artificial Sequence: Synthetic oligonucleotide
aacaacugauuauugagua

SEQ ID NO: 1787874 - RNA, 19 nt, Artificial Sequence
  Description of Artificial Sequence: Synthetic oligonucleotide
cuuagauuugcugacgggg

SEQ ID NO: 1787875 - RNA, 19 nt, Artificial Sequence
  Description of Artificial Sequence: Synthetic oligonucleotide
uuccuuaaguugaagcucc

SEQ ID NO: 1787876 - RNA, 19 nt, Artificial Sequence
  Description of Artificial Sequence: Synthetic oligonucleotide
ugacuugugacuucguccc

SEQ ID NO: 1787877 - RNA, 19 nt, Artificial Sequence
  Description of Artificial Sequence: Synthetic oligonucleotide
ucugauucucuacauucag

SEQ ID NO: 1787878 - RNA, 19 nt, Artificial Sequence
  Description of Artificial Sequence: Synthetic oligonucleotide
aaugaagggauaaugugcu

SEQ ID NO: 1787879 - RNA, 19 nt, Artificial Sequence
  Description of Artificial Sequence: Synthetic oligonucleotide
cuuaaguugaagcuccaag

SEQ ID NO: 1787880 - RNA, 19 nt, Artificial Sequence
  Description of Artificial Sequence: Synthetic oligonucleotide
ucaguauuaccugaggagc

SEQ ID NO: 1787881 - RNA, 19 nt, Artificial Sequence
  Description of Artificial Sequence: Synthetic oligonucleotide
uuuucuuagauuugcugac

SEQ ID NO: 1787882 - RNA, 19 nt, Artificial Sequence
  Description of Artificial Sequence: Synthetic oligonucleotide
uuugcguuuguuugcuugg

SEQ ID NO: 1787883 - RNA, 19 nt, Artificial Sequence
  Description of Artificial Sequence: Synthetic oligonucleotide
ucaugaagaucaaagcagu

SEQ ID NO: 1787884 - RNA, 19 nt, Artificial Sequence
  Description of Artificial Sequence: Synthetic oligonucleotide
ugauuauugaguacagauc

SEQ ID NO: 1787885 - RNA, 19 nt, Artificial Sequence
  Description of Artificial Sequence: Synthetic oligonucleotide
gaagcuuucucuucaucag

SEQ ID NO: 1787886 - RNA, 19 nt, Artificial Sequence
  Description of Artificial Sequence: Synthetic oligonucleotide
aucaugaagaucaaagcag

SEQ ID NO: 1787887 - RNA, 19 nt, Artificial Sequence
  Description of Artificial Sequence: Synthetic oligonucleotide
auuucuaacaacugauuau

SEQ ID NO: 1787888 - RNA, 19 nt, Artificial Sequence
  Description of Artificial Sequence: Synthetic oligonucleotide
auucagcgcagcuucagac

SEQ ID NO: 1787889 - RNA, 19 nt, Artificial Sequence
  Description of Artificial Sequence: Synthetic oligonucleotide
uaacaacugauuauugagu

SEQ ID NO: 1787890 - RNA, 19 nt, Artificial Sequence
  Description of Artificial Sequence: Synthetic oligonucleotide
cuuggauuguuucuccugg

SEQ ID NO: 1787891 - RNA, 19 nt, Artificial Sequence
  Description of Artificial Sequence: Synthetic oligonucleotide
acaacugauuauugaguac

SEQ ID NO: 1787892 - RNA, 19 nt, Artificial Sequence
  Description of Artificial Sequence: Synthetic oligonucleotide
gauaucugugccugcgugg

SEQ ID NO: 1787893 - RNA, 19 nt, Artificial Sequence
  Description of Artificial Sequence: Synthetic oligonucleotide
uagaugucggaguuugagg

SEQ ID NO: 1787894 - RNA, 19 nt, Artificial Sequence
  Description of Artificial Sequence: Synthetic oligonucleotide
uuuugcguuuguuugcuug

SEQ ID NO: 1787895 - RNA, 19 nt, Artificial Sequence
  Description of Artificial Sequence: Synthetic oligonucleotide
aguuugaggaagcccaguc

SEQ ID NO: 1787896 - RNA, 19 nt, Artificial Sequence
  Description of Artificial Sequence: Synthetic oligonucleotide
acagaucucacaguauggc

SEQ ID NO: 1787897 - RNA, 19 nt, Artificial Sequence
  Description of Artificial Sequence: Synthetic oligonucleotide
uuugacguucucuucuugc

SEQ ID NO: 1787898 - RNA, 19 nt, Artificial Sequence
  Description of Artificial Sequence: Synthetic oligonucleotide
agaugucggaguuugagga

SEQ ID NO: 1787899 - RNA, 19 nt, Artificial Sequence
  Description of Artificial Sequence: Synthetic oligonucleotide
aagcuccaaguucuugacc

SEQ ID NO: 1787900 - RNA, 19 nt, Artificial Sequence
  Description of Artificial Sequence: Synthetic oligonucleotide
uuagaugucggaguuugag

SEQ ID NO: 1787901 - RNA, 19 nt, Artificial Sequence
  Description of Artificial Sequence: Synthetic oligonucleotide
cacuauuacugaauugagg

SEQ ID NO: 1787902 - RNA, 19 nt, Artificial Sequence
  Description of Artificial Sequence: Synthetic oligonucleotide
aaggucucaucgucauugc

SEQ ID NO: 1787903 - RNA, 19 nt, Artificial Sequence
  Description of Artificial Sequence: Synthetic oligonucleotide
uacugaauugaggaaauca

SEQ ID NO: 1787904 - RNA, 19 nt, Artificial Sequence
  Description of Artificial Sequence: Synthetic oligonucleotide
agggauaaugugcugaaga

SEQ ID NO: 1787905 - RNA, 19 nt, Artificial Sequence
  Description of Artificial Sequence: Synthetic oligonucleotide
ucugauaucugugccugcg

SEQ ID NO: 1787906 - RNA, 19 nt, Artificial Sequence
  Description of Artificial Sequence: Synthetic oligonucleotide
uccucggcaaguuugacgu

SEQ ID NO: 1787907 - RNA, 19 nt, Artificial Sequence
  Description of Artificial Sequence: Synthetic oligonucleotide
uuagauuugcugacggggu

SEQ ID NO: 1787908 - RNA, 19 nt, Artificial Sequence
  Description of Artificial Sequence: Synthetic oligonucleotide
ucuuagauuugcugacggg

SEQ ID NO: 1787909 - RNA, 19 nt, Artificial Sequence
  Description of Artificial Sequence: Synthetic oligonucleotide
gagacugauggauuucugc

SEQ ID NO: 1787910 - RNA, 19 nt, Artificial Sequence
  Description of Artificial Sequence: Synthetic oligonucleotide
uugaugacuugugacuucg

SEQ ID NO: 1787911 - RNA, 19 nt, Artificial Sequence
  Description of Artificial Sequence: Synthetic oligonucleotide
uaacuauucaggucauccc

SEQ ID NO: 1787912 - RNA, 19 nt, Artificial Sequence
  Description of Artificial Sequence: Synthetic oligonucleotide
acaguauggccucuccucg

SEQ ID NO: 1787913 - RNA, 19 nt, Artificial Sequence
  Description of Artificial Sequence: Synthetic oligonucleotide
aucagagucuuuuauguau

SEQ ID NO: 1787914 - RNA, 19 nt, Artificial Sequence
  Description of Artificial Sequence: Synthetic oligonucleotide
uccccguugccauucagcg

SEQ ID NO: 1787915 - RNA, 19 nt, Artificial Sequence
  Description of Artificial Sequence: Synthetic oligonucleotide
aguaaggcacuggugagac

SEQ ID NO: 1787916 - RNA, 19 nt, Artificial Sequence
  Description of Artificial Sequence: Synthetic oligonucleotide
uugaagguccacuauuacu

SEQ ID NO: 1787917 - RNA, 19 nt, Artificial Sequence
  Description of Artificial Sequence: Synthetic oligonucleotide
uuuguucagcucuuguaca

SEQ ID NO: 1787918 - RNA, 19 nt, Artificial Sequence
  Description of Artificial Sequence: Synthetic oligonucleotide
auguguagaauguggagga

SEQ ID NO: 1787919 - RNA, 19 nt, Artificial Sequence
  Description of Artificial Sequence: Synthetic oligonucleotide
ugauaucugugccugcgug

SEQ ID NO: 1787920 - RNA, 19 nt, Artificial Sequence
  Description of Artificial Sequence: Synthetic oligonucleotide
uuuauguauucgaauucuc

SEQ ID NO: 1787921 - RNA, 19 nt, Artificial Sequence
  Description of Artificial Sequence: Synthetic oligonucleotide
ucugcauggcaucuucugc

SEQ ID NO: 1787922 - RNA, 19 nt, Artificial Sequence
  Description of Artificial Sequence: Synthetic oligonucleotide
uucuuuaguugcacucacg

SEQ ID NO: 1787923 - RNA, 19 nt, Artificial Sequence
  Description of Artificial Sequence: Synthetic oligonucleotide
gaauugaggaaaucaaucu

SEQ ID NO: 1787924 - RNA, 19 nt, Artificial Sequence
  Description of Artificial Sequence: Synthetic oligonucleotide
guugcacucacgaugcugg

SEQ ID NO: 1787925 - RNA, 19 nt, Artificial Sequence
  Description of Artificial Sequence: Synthetic oligonucleotide
ucgucauugcaguugguug

SEQ ID NO: 1787926 - RNA, 19 nt, Artificial Sequence
  Description of Artificial Sequence: Synthetic oligonucleotide
cuuaucagacuccaguguc

SEQ ID NO: 1787927 - RNA, 19 nt, Artificial Sequence
  Description of Artificial Sequence: Synthetic oligonucleotide
gugaguaaggcacugguga

SEQ ID NO: 1787928 - RNA, 19 nt, Artificial Sequence
  Description of Artificial Sequence: Synthetic oligonucleotide
uuucuuagauuugcugacg

SEQ ID NO: 1787929 - RNA, 19 nt, Artificial Sequence
  Description of Artificial Sequence: Synthetic oligonucleotide
aaaugucacagaagaggcg

SEQ ID NO: 1787930 - RNA, 19 nt, Artificial Sequence
  Description of Artificial Sequence: Synthetic oligonucleotide
gaugcugguggaaagcugc

SEQ ID NO: 1787931 - RNA, 19 nt, Artificial Sequence
  Description of Artificial Sequence: Synthetic oligonucleotide
uucugauucucuacauuca

SEQ ID NO: 1787932 - RNA, 19 nt, Artificial Sequence
  Description of Artificial Sequence: Synthetic oligonucleotide
ugaguaaggcacuggugag

SEQ ID NO: 1787933 - RNA, 19 nt, Artificial Sequence
  Description of Artificial Sequence: Synthetic oligonucleotide
ugugaguaaggcacuggug

SEQ ID NO: 1787934 - RNA, 19 nt, Artificial Sequence
  Description of Artificial Sequence: Synthetic oligonucleotide
ucagucuguaguuuugcgu

SEQ ID NO: 1787935 - RNA, 19 nt, Artificial Sequence
  Description of Artificial Sequence: Synthetic oligonucleotide
uccagugucugcacaacug

SEQ ID NO: 1787936 - RNA, 19 nt, Artificial Sequence
  Description of Artificial Sequence: Synthetic oligonucleotide
ugccgugauguguagaaug

SEQ ID NO: 1787937 - RNA, 19 nt, Artificial Sequence
  Description of Artificial Sequence: Synthetic oligonucleotide
ucaaucugacucuccuggg

SEQ ID NO: 1787938 - RNA, 19 nt, Artificial Sequence
  Description of Artificial Sequence: Synthetic oligonucleotide
agagucuuuuauguauucg

SEQ ID NO: 1787939 - RNA, 19 nt, Artificial Sequence
  Description of Artificial Sequence: Synthetic oligonucleotide
ugauucuuucuuugaaggu

SEQ ID NO: 1787940 - RNA, 19 nt, Artificial Sequence
  Description of Artificial Sequence: Synthetic oligonucleotide
uuaucagacuccagugucu

SEQ ID NO: 1787941 - RNA, 19 nt, Artificial Sequence
  Description of Artificial Sequence: Synthetic oligonucleotide
accuuaucagacuccagug

SEQ ID NO: 1787942 - RNA, 19 nt, Artificial Sequence
  Description of Artificial Sequence: Synthetic oligonucleotide
ugacguucucuucuugcag

SEQ ID NO: 1787943 - RNA, 19 nt, Artificial Sequence
  Description of Artificial Sequence: Synthetic oligonucleotide
cacagaucucacaguaugg

SEQ ID NO: 1787944 - RNA, 19 nt, Artificial Sequence
  Description of Artificial Sequence: Synthetic oligonucleotide
gugucugcacaacugaaug

SEQ ID NO: 1787945 - RNA, 19 nt, Artificial Sequence
  Description of Artificial Sequence: Synthetic oligonucleotide
aguugaagcuccaaguucu

SEQ ID NO: 1787946 - RNA, 19 nt, Artificial Sequence
  Description of Artificial Sequence: Synthetic oligonucleotide
aacaucucacagaucucac

SEQ ID NO: 1787947 - RNA, 19 nt, Artificial Sequence
  Description of Artificial Sequence: Synthetic oligonucleotide
uguauucgaauucucucuu

SEQ ID NO: 1787948 - RNA, 19 nt, Artificial Sequence
  Description of Artificial Sequence: Synthetic oligonucleotide
uugacguucucuucuugca

SEQ ID NO: 1787949 - RNA, 19 nt, Artificial Sequence
  Description of Artificial Sequence: Synthetic oligonucleotide
cagaucucacaguauggcc

SEQ ID NO: 1787950 - RNA, 19 nt, Artificial Sequence
  Description of Artificial Sequence: Synthetic oligonucleotide
aacugauuauugaguacag

SEQ ID NO: 1787951 - RNA, 19 nt, Artificial Sequence
  Description of Artificial Sequence: Synthetic oligonucleotide
auaucugugccugcguggg

SEQ ID NO: 1787952 - RNA, 19 nt, Artificial Sequence
  Description of Artificial Sequence: Synthetic oligonucleotide
auugcaguugguugcccag

SEQ ID NO: 1787953 - RNA, 19 nt, Artificial Sequence
  Description of Artificial Sequence: Synthetic oligonucleotide
ucaucuugaggucuugauu

SEQ ID NO: 1787954 - RNA, 19 nt, Artificial Sequence
  Description of Artificial Sequence: Synthetic oligonucleotide
auuuuagcuuaugagggga

SEQ ID NO: 1787955 - RNA, 19 nt, Artificial Sequence
  Description of Artificial Sequence: Synthetic oligonucleotide
ugaaugcagggacuuggca

SEQ ID NO: 1787956 - RNA, 19 nt, Artificial Sequence
  Description of Artificial Sequence: Synthetic oligonucleotide
cacugucauaacuauucag

SEQ ID NO: 1787957 - RNA, 19 nt, Artificial Sequence
  Description of Artificial Sequence: Synthetic oligonucleotide
acuauucaggucauccccg

SEQ ID NO: 1787958 - RNA, 19 nt, Artificial Sequence
  Description of Artificial Sequence: Synthetic oligonucleotide
uuauugaguacagaucuuu

SEQ ID NO: 1787959 - RNA, 19 nt, Artificial Sequence
  Description of Artificial Sequence: Synthetic oligonucleotide
ugcaaagaagcuuucucuu

SEQ ID NO: 1787960 - RNA, 19 nt, Artificial Sequence
  Description of Artificial Sequence: Synthetic oligonucleotide
uuucccuagcuccucggca

SEQ ID NO: 1787961 - RNA, 19 nt, Artificial Sequence
  Description of Artificial Sequence: Synthetic oligonucleotide
uuuugaugacuugugacuu

SEQ ID NO: 1787962 - RNA, 19 nt, Artificial Sequence
  Description of Artificial Sequence: Synthetic oligonucleotide
uucaccuuaucagacucca

SEQ ID NO: 1787963 - RNA, 19 nt, Artificial Sequence
  Description of Artificial Sequence: Synthetic oligonucleotide
cuuuugauuuguucagcuc

SEQ ID NO: 1787964 - RNA, 19 nt, Artificial Sequence
  Description of Artificial Sequence: Synthetic oligonucleotide
guacagaucuuucuucuuc

SEQ ID NO: 1787965 - RNA, 19 nt, Artificial Sequence
  Description of Artificial Sequence: Synthetic oligonucleotide
ugaccuugagcucaagcuu

SEQ ID NO: 1787966 - RNA, 19 nt, Artificial Sequence
  Description of Artificial Sequence: Synthetic oligonucleotide
uuuuagcuuaugaggggaa

SEQ ID NO: 1787967 - RNA, 19 nt, Artificial Sequence
  Description of Artificial Sequence: Synthetic oligonucleotide
uagaauguggaggaucuuc

SEQ ID NO: 1787968 - RNA, 19 nt, Artificial Sequence
  Description of Artificial Sequence: Synthetic oligonucleotide
caagcuucaccuuaucaga

SEQ ID NO: 1787969 - RNA, 19 nt, Artificial Sequence
  Description of Artificial Sequence: Synthetic oligonucleotide
uagcuccucggcaaguuug

SEQ ID NO: 1787970 - RNA, 19 nt, Artificial Sequence
  Description of Artificial Sequence: Synthetic oligonucleotide
aggaagcccagucccgccc

SEQ ID NO: 1787971 - RNA, 19 nt, Artificial Sequence
  Description of Artificial Sequence: Synthetic oligonucleotide
ugaucugcauggcaucuuc

SEQ ID NO: 1787972 - RNA, 19 nt, Artificial Sequence
  Description of Artificial Sequence: Synthetic oligonucleotide
gcacucacgaugcuggugg

SEQ ID NO: 1787973 - RNA, 19 nt, Artificial Sequence
  Description of Artificial Sequence: Synthetic oligonucleotide
ugauggauuucugcaaaga

SEQ ID NO: 1787974 - RNA, 19 nt, Artificial Sequence
  Description of Artificial Sequence: Synthetic oligonucleotide
uagcuuaugaggggaaaug

SEQ ID NO: 1787975 - RNA, 19 nt, Artificial Sequence
  Description of Artificial Sequence: Synthetic oligonucleotide
ugugacuucgucccguguu

SEQ ID NO: 1787976 - RNA, 19 nt, Artificial Sequence
  Description of Artificial Sequence: Synthetic oligonucleotide
uuugcugacggggucaaaa

SEQ ID NO: 1787977 - RNA, 19 nt, Artificial Sequence
  Description of Artificial Sequence: Synthetic oligonucleotide
cuugaagcucccucagaag

SEQ ID NO: 1787978 - RNA, 19 nt, Artificial Sequence
  Description of Artificial Sequence: Synthetic oligonucleotide
caacugauuauugaguaca

SEQ ID NO: 1787979 - RNA, 19 nt, Artificial Sequence
  Description of Artificial Sequence: Synthetic oligonucleotide
ucagcgcagcuucagacau

SEQ ID NO: 1787980 - RNA, 19 nt, Artificial Sequence
  Description of Artificial Sequence: Synthetic oligonucleotide
cacaguauggccucuccuc

SEQ ID NO: 1787981 - RNA, 19 nt, Artificial Sequence
  Description of Artificial Sequence: Synthetic oligonucleotide
caaucugacucuccugggc

SEQ ID NO: 1787982 - RNA, 19 nt, Artificial Sequence
  Description of Artificial Sequence: Synthetic oligonucleotide
acugaauugaggaaaucaa

SEQ ID NO: 1787983 - RNA, 19 nt, Artificial Sequence
  Description of Artificial Sequence: Synthetic oligonucleotide
gaaaucaaucugacucucc

SEQ ID NO: 1787984 - RNA, 19 nt, Artificial Sequence
  Description of Artificial Sequence: Synthetic oligonucleotide
uucagcgcagcuucagaca

SEQ ID NO: 1787985 - RNA, 19 nt, Artificial Sequence
  Description of Artificial Sequence: Synthetic oligonucleotide
uacauucagaaguucuuuu

SEQ ID NO: 1787986 - RNA, 19 nt, Artificial Sequence
  Description of Artificial Sequence: Synthetic oligonucleotide
agcuuuugaugacuuguga

SEQ ID NO: 1787987 - RNA, 19 nt, Artificial Sequence
  Description of Artificial Sequence: Synthetic oligonucleotide
uugcccagugcccaaacau

SEQ ID NO: 1787988 - RNA, 19 nt, Artificial Sequence
  Description of Artificial Sequence: Synthetic oligonucleotide
acuggugagacugauggau

SEQ ID NO: 1787989 - RNA, 19 nt, Artificial Sequence
  Description of Artificial Sequence: Synthetic oligonucleotide
cuuuugaugacuugugacu

SEQ ID NO: 1787990 - RNA, 19 nt, Artificial Sequence
  Description of Artificial Sequence: Synthetic oligonucleotide
uucuuuaaguguguccagu

SEQ ID NO: 1787991 - RNA, 19 nt, Artificial Sequence
  Description of Artificial Sequence: Synthetic oligonucleotide
ugcaguugguugcccagug

SEQ ID NO: 1787992 - RNA, 19 nt, Artificial Sequence
  Description of Artificial Sequence: Synthetic oligonucleotide
gaucucacaguauggccuc

SEQ ID NO: 1787993 - RNA, 19 nt, Artificial Sequence
  Description of Artificial Sequence: Synthetic oligonucleotide
accugaggagcuguugagc

SEQ ID NO: 1787994 - RNA, 19 nt, Artificial Sequence
  Description of Artificial Sequence: Synthetic oligonucleotide
cugggcaucaguauuaccu

SEQ ID NO: 1787995 - RNA, 19 nt, Artificial Sequence
  Description of Artificial Sequence: Synthetic oligonucleotide
caugaagaucaaagcaguc

SEQ ID NO: 1787996 - RNA, 19 nt, Artificial Sequence
  Description of Artificial Sequence: Synthetic oligonucleotide
caucaguauuaccugagga

SEQ ID NO: 1787997 - RNA, 19 nt, Artificial Sequence
  Description of Artificial Sequence: Synthetic oligonucleotide
gcuuuugaugacuugugac

SEQ ID NO: 1787998 - RNA, 19 nt, Artificial Sequence
  Description of Artificial Sequence: Synthetic oligonucleotide
ugucggaguuugaggaagc

SEQ ID NO: 1787999 - RNA, 19 nt, Artificial Sequence
  Description of Artificial Sequence: Synthetic oligonucleotide
ucacaguauggccucuccu

SEQ ID NO: 1788000 - RNA, 19 nt, Artificial Sequence
  Description of Artificial Sequence: Synthetic oligonucleotide
gaagggauaaugugcugaa

SEQ ID NO: 1788001 - RNA, 19 nt, Artificial Sequence
  Description of Artificial Sequence: Synthetic oligonucleotide
ugcguuuguuugcuuggug

SEQ ID NO: 1788002 - RNA, 19 nt, Artificial Sequence
  Description of Artificial Sequence: Synthetic oligonucleotide
cagcguuucugucuucucc

SEQ ID NO: 1788003 - RNA, 19 nt, Artificial Sequence
  Description of Artificial Sequence: Synthetic oligonucleotide
aagguccacuauuacugaa

SEQ ID NO: 1788004 - RNA, 19 nt, Artificial Sequence
  Description of Artificial Sequence: Synthetic oligonucleotide
uagauuugcugacgggguc

SEQ ID NO: 1788005 - RNA, 19 nt, Artificial Sequence
  Description of Artificial Sequence: Synthetic oligonucleotide
cugaaugcagggacuuggc

SEQ ID NO: 1788006 - RNA, 19 nt, Artificial Sequence
  Description of Artificial Sequence: Synthetic oligonucleotide
gaagaggcgggguuucuuc

SEQ ID NO: 1788007 - RNA, 19 nt, Artificial Sequence
  Description of Artificial Sequence: Synthetic oligonucleotide
uuagcuuaugaggggaaau

SEQ ID NO: 1788008 - RNA, 19 nt, Artificial Sequence
  Description of Artificial Sequence: Synthetic oligonucleotide
gaucuuucuucuuccagcu

SEQ ID NO: 1788009 - RNA, 19 nt, Artificial Sequence
  Description of Artificial Sequence: Synthetic oligonucleotide
aguauuaccugaggagcug

SEQ ID NO: 1788010 - RNA, 19 nt, Artificial Sequence
  Description of Artificial Sequence: Synthetic oligonucleotide
auuacugaauugaggaaau

SEQ ID NO: 1788011 - RNA, 19 nt, Artificial Sequence
  Description of Artificial Sequence: Synthetic oligonucleotide
cuucagacaucaucuccac

SEQ ID NO: 1788012 - RNA, 19 nt, Artificial Sequence
  Description of Artificial Sequence: Synthetic oligonucleotide
augucggaguuugaggaag

SEQ ID NO: 1788013 - RNA, 19 nt, Artificial Sequence
  Description of Artificial Sequence: Synthetic oligonucleotide
agcuuaugaggggaaauga

SEQ ID NO: 1788014 - RNA, 19 nt, Artificial Sequence
  Description of Artificial Sequence: Synthetic oligonucleotide
uuuagcuuaugaggggaaa

SEQ ID NO: 1788015 - RNA, 19 nt, Artificial Sequence
  Description of Artificial Sequence: Synthetic oligonucleotide
cccucagaaggucucaucg

SEQ ID NO: 1788016 - RNA, 19 nt, Artificial Sequence
  Description of Artificial Sequence: Synthetic oligonucleotide
uugagcugccucuuguuuu

SEQ ID NO: 1788017 - RNA, 19 nt, Artificial Sequence
  Description of Artificial Sequence: Synthetic oligonucleotide
cagcuuuugaugacuugug

SEQ ID NO: 1788018 - RNA, 19 nt, Artificial Sequence
  Description of Artificial Sequence: Synthetic oligonucleotide
gaguacagaucuuucuucu

SEQ ID NO: 1788019 - RNA, 19 nt, Artificial Sequence
  Description of Artificial Sequence: Synthetic oligonucleotide
aguuuugcguuuguuugcu

SEQ ID NO: 1788020 - RNA, 19 nt, Artificial Sequence
  Description of Artificial Sequence: Synthetic oligonucleotide
uucucuccccggagcaccg

SEQ ID NO: 1788021 - RNA, 19 nt, Artificial Sequence
  Description of Artificial Sequence: Synthetic oligonucleotide
ccguguuuucccuagcucc

SEQ ID NO: 1788022 - RNA, 19 nt, Artificial Sequence
  Description of Artificial Sequence: Synthetic oligonucleotide
acagaucuuucuucuucca

SEQ ID NO: 1788023 - RNA, 19 nt, Artificial Sequence
  Description of Artificial Sequence: Synthetic oligonucleotide
auccccguugccauucagc

SEQ ID NO: 1788024 - RNA, 19 nt, Artificial Sequence
  Description of Artificial Sequence: Synthetic oligonucleotide
aguauggccucuccucgcu

SEQ ID NO: 1788025 - RNA, 19 nt, Artificial Sequence
  Description of Artificial Sequence: Synthetic oligonucleotide
acguucucuucuugcagug

SEQ ID NO: 1788026 - RNA, 19 nt, Artificial Sequence
  Description of Artificial Sequence: Synthetic oligonucleotide
cuauuacugaauugaggaa

SEQ ID NO: 1788027 - RNA, 19 nt, Artificial Sequence
  Description of Artificial Sequence: Synthetic oligonucleotide
uccagcuuuugaugacuug

SEQ ID NO: 1788028 - RNA, 19 nt, Artificial Sequence
  Description of Artificial Sequence: Synthetic oligonucleotide
agaggcguucucuccccgg

SEQ ID NO: 1788029 - RNA, 19 nt, Artificial Sequence
  Description of Artificial Sequence: Synthetic oligonucleotide
ucccguguuuucccuagcu

SEQ ID NO: 1788030 - RNA, 19 nt, Artificial Sequence
  Description of Artificial Sequence: Synthetic oligonucleotide
cuucgucccguguuuuccc

SEQ ID NO: 1788031 - RNA, 19 nt, Artificial Sequence
  Description of Artificial Sequence: Synthetic oligonucleotide
cucacaguauggccucucc

SEQ ID NO: 1788032 - RNA, 19 nt, Artificial Sequence
  Description of Artificial Sequence: Synthetic oligonucleotide
ucacagaagaggcgggguu

SEQ ID NO: 1788033 - RNA, 19 nt, Artificial Sequence
  Description of Artificial Sequence: Synthetic oligonucleotide
uugauuuguucagcucuug

SEQ ID NO: 1788034 - RNA, 19 nt, Artificial Sequence
  Description of Artificial Sequence: Synthetic oligonucleotide
ugguguccuccaaggaggc

SEQ ID NO: 1788035 - RNA, 19 nt, Artificial Sequence
  Description of Artificial Sequence: Synthetic oligonucleotide
gcaucaguauuaccugagg

SEQ ID NO: 1788036 - RNA, 19 nt, Artificial Sequence
  Description of Artificial Sequence: Synthetic oligonucleotide
uugaagcuccaaguucuug

SEQ ID NO: 1788037 - RNA, 19 nt, Artificial Sequence
  Description of Artificial Sequence: Synthetic oligonucleotide
agaucaaagcagucacaaa

SEQ ID NO: 1788038 - RNA, 19 nt, Artificial Sequence
  Description of Artificial Sequence: Synthetic oligonucleotide
ucggcaaguuugacguucu

SEQ ID NO: 1788039 - RNA, 19 nt, Artificial Sequence
  Description of Artificial Sequence: Synthetic oligonucleotide
ggaucuucugauaucugug

SEQ ID NO: 1788040 - RNA, 19 nt, Artificial Sequence
  Description of Artificial Sequence: Synthetic oligonucleotide
agcgcagcuucagacauca

SEQ ID NO: 1788041 - RNA, 19 nt, Artificial Sequence
  Description of Artificial Sequence: Synthetic oligonucleotide
uggugagacugauggauuu

SEQ ID NO: 1788042 - RNA, 19 nt, Artificial Sequence
  Description of Artificial Sequence: Synthetic oligonucleotide
agauuugcugacgggguca

SEQ ID NO: 1788043 - RNA, 19 nt, Artificial Sequence
  Description of Artificial Sequence: Synthetic oligonucleotide
uucugauaucugugccugc

SEQ ID NO: 1788044 - RNA, 19 nt, Artificial Sequence
  Description of Artificial Sequence: Synthetic oligonucleotide
acaacugaaugcagggacu

SEQ ID NO: 1788045 - RNA, 19 nt, Artificial Sequence
  Description of Artificial Sequence: Synthetic oligonucleotide
aguucagucuguaguuuug

SEQ ID NO: 1788046 - RNA, 19 nt, Artificial Sequence
  Description of Artificial Sequence: Synthetic oligonucleotide
cucuacauucagaaguucu

SEQ ID NO: 1788047 - RNA, 19 nt, Artificial Sequence
  Description of Artificial Sequence: Synthetic oligonucleotide
cuugugacuucgucccgug

SEQ ID NO: 1788048 - RNA, 19 nt, Artificial Sequence
  Description of Artificial Sequence: Synthetic oligonucleotide
uguggaggaucuucugaua

SEQ ID NO: 1788049 - RNA, 19 nt, Artificial Sequence
  Description of Artificial Sequence: Synthetic oligonucleotide
aguuugacguucucuucuu

SEQ ID NO: 1788050 - RNA, 19 nt, Artificial Sequence
  Description of Artificial Sequence: Synthetic oligonucleotide
uggggcaguccucuguauc

SEQ ID NO: 1788051 - RNA, 19 nt, Artificial Sequence
  Description of Artificial Sequence: Synthetic oligonucleotide
ugagcugcugccugcuuua

SEQ ID NO: 1788052 - RNA, 19 nt, Artificial Sequence
  Description of Artificial Sequence: Synthetic oligonucleotide
ugccugggcaucaguauua

SEQ ID NO: 1788053 - RNA, 19 nt, Artificial Sequence
  Description of Artificial Sequence: Synthetic oligonucleotide
ucggcguccuucucuguga

SEQ ID NO: 1788054 - RNA, 19 nt, Artificial Sequence
  Description of Artificial Sequence: Synthetic oligonucleotide
gacguucucuucuugcagu

SEQ ID NO: 1788055 - RNA, 19 nt, Artificial Sequence
  Description of Artificial Sequence: Synthetic oligonucleotide
agcucggcguccuucucug

SEQ ID NO: 1788056 - RNA, 19 nt, Artificial Sequence
  Description of Artificial Sequence: Synthetic oligonucleotide
gacuccagugucugcacaa

SEQ ID NO: 1788057 - RNA, 19 nt, Artificial Sequence
  Description of Artificial Sequence: Synthetic oligonucleotide
gucauugcaguugguugcc

SEQ ID NO: 1788058 - RNA, 19 nt, Artificial Sequence
  Description of Artificial Sequence: Synthetic oligonucleotide
cucggcaaguuugacguuc

SEQ ID NO: 1788059 - RNA, 19 nt, Artificial Sequence
  Description of Artificial Sequence: Synthetic oligonucleotide
caguauggccucuccucgc

SEQ ID NO: 1788060 - RNA, 19 nt, Artificial Sequence
  Description of Artificial Sequence: Synthetic oligonucleotide
gaagcucccucagaagguc

SEQ ID NO: 1788061 - RNA, 19 nt, Artificial Sequence
  Description of Artificial Sequence: Synthetic oligonucleotide
ggaaaugaagggauaaugu

SEQ ID NO: 1788062 - RNA, 19 nt, Artificial Sequence
  Description of Artificial Sequence: Synthetic oligonucleotide
cacgaugcugguggaaagc

SEQ ID NO: 1788063 - RNA, 19 nt, Artificial Sequence
  Description of Artificial Sequence: Synthetic oligonucleotide
ugaugacuugugacuucgu

SEQ ID NO: 1788064 - RNA, 19 nt, Artificial Sequence
  Description of Artificial Sequence: Synthetic oligonucleotide
uauuaccugaggagcuguu

SEQ ID NO: 1788065 - RNA, 19 nt, Artificial Sequence
  Description of Artificial Sequence: Synthetic oligonucleotide
gugaccucauuccucagcu

SEQ ID NO: 1788066 - RNA, 19 nt, Artificial Sequence
  Description of Artificial Sequence: Synthetic oligonucleotide
uaaguguguccaguucagu

SEQ ID NO: 1788067 - RNA, 19 nt, Artificial Sequence
  Description of Artificial Sequence: Synthetic oligonucleotide
ugcacucacgaugcuggug

SEQ ID NO: 1788068 - RNA, 19 nt, Artificial Sequence
  Description of Artificial Sequence: Synthetic oligonucleotide
acgaugcugguggaaagcu

SEQ ID NO: 1788069 - RNA, 19 nt, Artificial Sequence
  Description of Artificial Sequence: Synthetic oligonucleotide
aggcgggguuucuucuugg

SEQ ID NO: 1788070 - RNA, 19 nt, Artificial Sequence
  Description of Artificial Sequence: Synthetic oligonucleotide
cugaauugaggaaaucaau

SEQ ID NO: 1788071 - RNA, 19 nt, Artificial Sequence
  Description of Artificial Sequence: Synthetic oligonucleotide
uggucaucacugucauaac

SEQ ID NO: 1788072 - RNA, 19 nt, Artificial Sequence
  Description of Artificial Sequence: Synthetic oligonucleotide
cuuuaggguuucuauuucu

SEQ ID NO: 1788073 - RNA, 19 nt, Artificial Sequence
  Description of Artificial Sequence: Synthetic oligonucleotide
gauuucugcaaagaagcuu

SEQ ID NO: 1788074 - RNA, 19 nt, Artificial Sequence
  Description of Artificial Sequence: Synthetic oligonucleotide
aggucucaucgucauugca

SEQ ID NO: 1788075 - RNA, 19 nt, Artificial Sequence
  Description of Artificial Sequence: Synthetic oligonucleotide
agugucugcacaacugaau

SEQ ID NO: 1788076 - RNA, 19 nt, Artificial Sequence
  Description of Artificial Sequence: Synthetic oligonucleotide
cauugcaguugguugccca

SEQ ID NO: 1788077 - RNA, 19 nt, Artificial Sequence
  Description of Artificial Sequence: Synthetic oligonucleotide
gagcucaagcuucaccuua

SEQ ID NO: 1788078 - RNA, 19 nt, Artificial Sequence
  Description of Artificial Sequence: Synthetic oligonucleotide
acuugugacuucgucccgu

SEQ ID NO: 1788079 - RNA, 19 nt, Artificial Sequence
  Description of Artificial Sequence: Synthetic oligonucleotide
ucucuacauucagaaguuc

SEQ ID NO: 1788080 - RNA, 19 nt, Artificial Sequence
  Description of Artificial Sequence: Synthetic oligonucleotide
ugguggaaagcugcuuaga

SEQ ID NO: 1788081 - RNA, 19 nt, Artificial Sequence
  Description of Artificial Sequence: Synthetic oligonucleotide
augucacagaagaggcggg

SEQ ID NO: 1788082 - RNA, 19 nt, Artificial Sequence
  Description of Artificial Sequence: Synthetic oligonucleotide
cucggcguccuucucugug

SEQ ID NO: 1788083 - RNA, 19 nt, Artificial Sequence
  Description of Artificial Sequence: Synthetic oligonucleotide
uucgucccguguuuucccu

SEQ ID NO: 1788084 - RNA, 19 nt, Artificial Sequence
  Description of Artificial Sequence: Synthetic oligonucleotide
caccuuaucagacuccagu

SEQ ID NO: 1788085 - RNA, 19 nt, Artificial Sequence
  Description of Artificial Sequence: Synthetic oligonucleotide
agucuguaguuuugcguuu

SEQ ID NO: 1788086 - RNA, 19 nt, Artificial Sequence
  Description of Artificial Sequence: Synthetic oligonucleotide
guugguugcccagugccca

SEQ ID NO: 1788087 - RNA, 19 nt, Artificial Sequence
  Description of Artificial Sequence: Synthetic oligonucleotide
uugugacuucgucccgugu

SEQ ID NO: 1788088 - RNA, 19 nt, Artificial Sequence
  Description of Artificial Sequence: Synthetic oligonucleotide
uauucaggucauccccguu

SEQ ID NO: 1788089 - RNA, 19 nt, Artificial Sequence
  Description of Artificial Sequence: Synthetic oligonucleotide
gcuucagacaucaucucca

SEQ ID NO: 1788090 - RNA, 19 nt, Artificial Sequence
  Description of Artificial Sequence: Synthetic oligonucleotide
ccagucccgcccuugaagc

SEQ ID NO: 1788091 - RNA, 19 nt, Artificial Sequence
  Description of Artificial Sequence: Synthetic oligonucleotide
ggacuucugagcugcugcc

SEQ ID NO: 1788092 - RNA, 19 nt, Artificial Sequence
  Description of Artificial Sequence: Synthetic oligonucleotide
gagcaccgugaccucauuc

SEQ ID NO: 1788093 - RNA, 19 nt, Artificial Sequence
  Description of Artificial Sequence: Synthetic oligonucleotide
auuauugaguacagaucuu

SEQ ID NO: 1788094 - RNA, 19 nt, Artificial Sequence
  Description of Artificial Sequence: Synthetic oligonucleotide
gacuucgucccguguuuuc

SEQ ID NO: 1788095 - RNA, 19 nt, Artificial Sequence
  Description of Artificial Sequence: Synthetic oligonucleotide
uguguagaauguggaggau

SEQ ID NO: 1788096 - RNA, 19 nt, Artificial Sequence
  Description of Artificial Sequence: Synthetic oligonucleotide
guggaggaucuucugauau

SEQ ID NO: 1788097 - RNA, 19 nt, Artificial Sequence
  Description of Artificial Sequence: Synthetic oligonucleotide
gcuuuaggguuucuauuuc

SEQ ID NO: 1788098 - RNA, 19 nt, Artificial Sequence
  Description of Artificial Sequence: Synthetic oligonucleotide
uugcguuuguuugcuuggu

SEQ ID NO: 1788099 - RNA, 19 nt, Artificial Sequence
  Description of Artificial Sequence: Synthetic oligonucleotide
ggaaaucaaucugacucuc

SEQ ID NO: 1788100 - RNA, 19 nt, Artificial Sequence
  Description of Artificial Sequence: Synthetic oligonucleotide
cagucuguaguuuugcguu

SEQ ID NO: 1788101 - RNA, 19 nt, Artificial Sequence
  Description of Artificial Sequence: Synthetic oligonucleotide
caguauuaccugaggagcu

SEQ ID NO: 1788102 - RNA, 19 nt, Artificial Sequence
  Description of Artificial Sequence: Synthetic oligonucleotide
agguccacuauuacugaau

SEQ ID NO: 1788103 - RNA, 19 nt, Artificial Sequence
  Description of Artificial Sequence: Synthetic oligonucleotide
caccgugaccucauuccuc

SEQ ID NO: 1788104 - RNA, 19 nt, Artificial Sequence
  Description of Artificial Sequence: Synthetic oligonucleotide
uugcaguugguugcccagu

SEQ ID NO: 1788105 - RNA, 19 nt, Artificial Sequence
  Description of Artificial Sequence: Synthetic oligonucleotide
caucagagucuuuuaugua

SEQ ID NO: 1788106 - RNA, 19 nt, Artificial Sequence
  Description of Artificial Sequence: Synthetic oligonucleotide
gucggaguuugaggaagcc

SEQ ID NO: 1788107 - RNA, 19 nt, Artificial Sequence
  Description of Artificial Sequence: Synthetic oligonucleotide
ggggcaguccucuguauca

SEQ ID NO: 1788108 - RNA, 19 nt, Artificial Sequence
  Description of Artificial Sequence: Synthetic oligonucleotide
cccguugccauucagcgca

SEQ ID NO: 1788109 - RNA, 19 nt, Artificial Sequence
  Description of Artificial Sequence: Synthetic oligonucleotide
cauucagcgcagcuucaga

SEQ ID NO: 1788110 - RNA, 19 nt, Artificial Sequence
  Description of Artificial Sequence: Synthetic oligonucleotide
aagcucccucagaaggucu

SEQ ID NO: 1788111 - RNA, 19 nt, Artificial Sequence
  Description of Artificial Sequence: Synthetic oligonucleotide
uugcacucacgaugcuggu

SEQ ID NO: 1788112 - RNA, 19 nt, Artificial Sequence
  Description of Artificial Sequence: Synthetic oligonucleotide
gcugcuuagaugucggagu

SEQ ID NO: 1788113 - RNA, 19 nt, Artificial Sequence
  Description of Artificial Sequence: Synthetic oligonucleotide
gcaaguuugacguucucuu

SEQ ID NO: 1788114 - RNA, 19 nt, Artificial Sequence
  Description of Artificial Sequence: Synthetic oligonucleotide
aggccagcguuucugucuu

SEQ ID NO: 1788115 - RNA, 19 nt, Artificial Sequence
  Description of Artificial Sequence: Synthetic oligonucleotide
gcugccgugauguguagaa

SEQ ID NO: 1788116 - RNA, 19 nt, Artificial Sequence
  Description of Artificial Sequence: Synthetic oligonucleotide
ggcguucucuccccggagc

SEQ ID NO: 1788117 - RNA, 19 nt, Artificial Sequence
  Description of Artificial Sequence: Synthetic oligonucleotide
uccccggagcaccgugacc

SEQ ID NO: 1788118 - RNA, 19 nt, Artificial Sequence
  Description of Artificial Sequence: Synthetic oligonucleotide
uccucgcuccggcugccgu

SEQ ID NO: 1788119 - RNA, 19 nt, Artificial Sequence
  Description of Artificial Sequence: Synthetic oligonucleotide
cuuuaguugcacucacgau

SEQ ID NO: 1788120 - RNA, 19 nt, Artificial Sequence
  Description of Artificial Sequence: Synthetic oligonucleotide
gguggaaagcugcuuagau

SEQ ID NO: 1788121 - RNA, 19 nt, Artificial Sequence
  Description of Artificial Sequence: Synthetic oligonucleotide
ucuugaccuugagcucaag

SEQ ID NO: 1788122 - RNA, 19 nt, Artificial Sequence
  Description of Artificial Sequence: Synthetic oligonucleotide
ccuugaagcucccucagaa

SEQ ID NO: 1788123 - RNA, 19 nt, Artificial Sequence
  Description of Artificial Sequence: Synthetic oligonucleotide
auaaugugcugaagaucaa

SEQ ID NO: 1788124 - RNA, 19 nt, Artificial Sequence
  Description of Artificial Sequence: Synthetic oligonucleotide
gucauccccguugccauuc

SEQ ID NO: 1788125 - RNA, 19 nt, Artificial Sequence
  Description of Artificial Sequence: Synthetic oligonucleotide
gugagacugauggauuucu

SEQ ID NO: 1788126 - RNA, 19 nt, Artificial Sequence
  Description of Artificial Sequence: Synthetic oligonucleotide
cauccccguugccauucag

SEQ ID NO: 1788127 - RNA, 19 nt, Artificial Sequence
  Description of Artificial Sequence: Synthetic oligonucleotide
ugugccugcguggggcagu

SEQ ID NO: 1788128 - RNA, 19 nt, Artificial Sequence
  Description of Artificial Sequence: Synthetic oligonucleotide
gcaguugguugcccagugc

SEQ ID NO: 1788129 - RNA, 19 nt, Artificial Sequence
  Description of Artificial Sequence: Synthetic oligonucleotide
cagucacaaaugucacaga

SEQ ID NO: 1788130 - RNA, 19 nt, Artificial Sequence
  Description of Artificial Sequence: Synthetic oligonucleotide
gcuuaugaggggaaaugaa

SEQ ID NO: 1788131 - RNA, 19 nt, Artificial Sequence
  Description of Artificial Sequence: Synthetic oligonucleotide
ugcuuagaugucggaguuu

SEQ ID NO: 1788132 - RNA, 19 nt, Artificial Sequence
  Description of Artificial Sequence: Synthetic oligonucleotide
gcagaggcguucucucccc

SEQ ID NO: 1788133 - RNA, 19 nt, Artificial Sequence
  Description of Artificial Sequence: Synthetic oligonucleotide
ggcaguccucuguaucaug

SEQ ID NO: 1788134 - RNA, 19 nt, Artificial Sequence
  Description of Artificial Sequence: Synthetic oligonucleotide
gcuguugagcugccucuug

SEQ ID NO: 1788135 - RNA, 19 nt, Artificial Sequence
  Description of Artificial Sequence: Synthetic oligonucleotide
guugagcugccucuuguuu

SEQ ID NO: 1788136 - RNA, 19 nt, Artificial Sequence
  Description of Artificial Sequence: Synthetic oligonucleotide
agcuccucggcaaguuuga

SEQ ID NO: 1788137 - RNA, 19 nt, Artificial Sequence
  Description of Artificial Sequence: Synthetic oligonucleotide
cuccccggagcaccgugac

SEQ ID NO: 1788138 - RNA, 19 nt, Artificial Sequence
  Description of Artificial Sequence: Synthetic oligonucleotide
ggugagacugauggauuuc

SEQ ID NO: 1788139 - RNA, 19 nt, Artificial Sequence
  Description of Artificial Sequence: Synthetic oligonucleotide
gcccuugaagcucccucag

SEQ ID NO: 1788140 - RNA, 19 nt, Artificial Sequence
  Description of Artificial Sequence: Synthetic oligonucleotide
gcugaaagcugcugggacu

SEQ ID NO: 1788141 - RNA, 19 nt, Artificial Sequence
  Description of Artificial Sequence: Synthetic oligonucleotide
cccagucccgcccuugaag

SEQ ID NO: 1788142 - RNA, 19 nt, Artificial Sequence
  Description of Artificial Sequence: Synthetic oligonucleotide
ugacuucgucccguguuuu

SEQ ID NO: 1788143 - RNA, 19 nt, Artificial Sequence
  Description of Artificial Sequence: Synthetic oligonucleotide
guauggccucuccucgcuc

SEQ ID NO: 1788144 - RNA, 19 nt, Artificial Sequence
  Description of Artificial Sequence: Synthetic oligonucleotide
ugcguggggcaguccucug

SEQ ID NO: 1788145 - RNA, 19 nt, Artificial Sequence
  Description of Artificial Sequence: Synthetic oligonucleotide
guauuaccugaggagcugu

SEQ ID NO: 1788146 - RNA, 19 nt, Artificial Sequence
  Description of Artificial Sequence: Synthetic oligonucleotide
caugaucugcauggcaucu

SEQ ID NO: 1788147 - RNA, 19 nt, Artificial Sequence
  Description of Artificial Sequence: Synthetic oligonucleotide
ucgucccguguuuucccua

SEQ ID NO: 1788148 - RNA, 19 nt, Artificial Sequence
  Description of Artificial Sequence: Synthetic oligonucleotide
guauucgaauucucucuuu

SEQ ID NO: 1788149 - RNA, 19 nt, Artificial Sequence
  Description of Artificial Sequence: Synthetic oligonucleotide
gucccguguuuucccuagc

SEQ ID NO: 1788150 - RNA, 19 nt, Artificial Sequence
  Description of Artificial Sequence: Synthetic oligonucleotide
ugacucuccugggcucucu

SEQ ID NO: 1788151 - RNA, 19 nt, Artificial Sequence
  Description of Artificial Sequence: Synthetic oligonucleotide
gucccgcccuugaagcucc

SEQ ID NO: 1788152 - RNA, 19 nt, Artificial Sequence
  Description of Artificial Sequence: Synthetic oligonucleotide
caguccucuguaucaugaa

SEQ ID NO: 1788153 - RNA, 19 nt, Artificial Sequence
  Description of Artificial Sequence: Synthetic oligonucleotide
ggcaaguuugacguucucu

SEQ ID NO: 1788154 - RNA, 19 nt, Artificial Sequence
  Description of Artificial Sequence: Synthetic oligonucleotide
gguccacuauuacugaauu

SEQ ID NO: 1788155 - RNA, 19 nt, Artificial Sequence
  Description of Artificial Sequence: Synthetic oligonucleotide
gguugcccagugcccaaac

SEQ ID NO: 1788156 - RNA, 19 nt, Artificial Sequence
  Description of Artificial Sequence: Synthetic oligonucleotide
cucacagaucucacaguau

SEQ ID NO: 1788157 - RNA, 19 nt, Artificial Sequence
  Description of Artificial Sequence: Synthetic oligonucleotide
gcguccuucucugugagua

SEQ ID NO: 1788158 - RNA, 19 nt, Artificial Sequence
  Description of Artificial Sequence: Synthetic oligonucleotide
aucucacaguauggccucu

SEQ ID NO: 1788159 - RNA, 19 nt, Artificial Sequence
  Description of Artificial Sequence: Synthetic oligonucleotide
ccugggcaucaguauuacc

SEQ ID NO: 1788160 - RNA, 19 nt, Artificial Sequence
  Description of Artificial Sequence: Synthetic oligonucleotide
gaguuugaggaagcccagu

SEQ ID NO: 1788161 - RNA, 19 nt, Artificial Sequence
  Description of Artificial Sequence: Synthetic oligonucleotide
gugacuucgucccguguuu

SEQ ID NO: 1788162 - RNA, 19 nt, Artificial Sequence
  Description of Artificial Sequence: Synthetic oligonucleotide
cccguguuuucccuagcuc

SEQ ID NO: 1788163 - RNA, 19 nt, Artificial Sequence
  Description of Artificial Sequence: Synthetic oligonucleotide
cagcgcagcuucagacauc

SEQ ID NO: 1788164 - RNA, 19 nt, Artificial Sequence
  Description of Artificial Sequence: Synthetic oligonucleotide
cugauaucugugccugcgu

SEQ ID NO: 1788165 - RNA, 19 nt, Artificial Sequence
  Description of Artificial Sequence: Synthetic oligonucleotide
ugguugcccagugcccaaa

SEQ ID NO: 1788166 - RNA, 19 nt, Artificial Sequence
  Description of Artificial Sequence: Synthetic oligonucleotide
cugcuuagaugucggaguu

SEQ ID NO: 1788167 - RNA, 19 nt, Artificial Sequence
  Description of Artificial Sequence: Synthetic oligonucleotide
cuggugagacugauggauu

SEQ ID NO: 1788168 - RNA, 19 nt, Artificial Sequence
  Description of Artificial Sequence: Synthetic oligonucleotide
gacuuggcagaggcguucu

SEQ ID NO: 1788169 - RNA, 19 nt, Artificial Sequence
  Description of Artificial Sequence: Synthetic oligonucleotide
cacucacgaugcuggugga

SEQ ID NO: 1788170 - RNA, 19 nt, Artificial Sequence
  Description of Artificial Sequence: Synthetic oligonucleotide
ccagcuuuugaugacuugu

SEQ ID NO: 1788171 - RNA, 19 nt, Artificial Sequence
  Description of Artificial Sequence: Synthetic oligonucleotide
ggauuucugcaaagaagcu

SEQ ID NO: 1788172 - RNA, 19 nt, Artificial Sequence
  Description of Artificial Sequence: Synthetic oligonucleotide
cgucccguguuuucccuag

SEQ ID NO: 1788173 - RNA, 19 nt, Artificial Sequence
  Description of Artificial Sequence: Synthetic oligonucleotide
ccucuguaucaugaagauc

SEQ ID NO: 1788174 - RNA, 19 nt, Artificial Sequence
  Description of Artificial Sequence: Synthetic oligonucleotide
ccuuaucagacuccagugu

SEQ ID NO: 1788175 - RNA, 19 nt, Artificial Sequence
  Description of Artificial Sequence: Synthetic oligonucleotide
gcucaagcuucaccuuauc

SEQ ID NO: 1788176 - RNA, 19 nt, Artificial Sequence
  Description of Artificial Sequence: Synthetic oligonucleotide
ccccguugccauucagcgc

SEQ ID NO: 1788177 - RNA, 19 nt, Artificial Sequence
  Description of Artificial Sequence: Synthetic oligonucleotide
ggcgggguuucuucuugga

SEQ ID NO: 1788178 - RNA, 19 nt, Artificial Sequence
  Description of Artificial Sequence: Synthetic oligonucleotide
ccgugauguguagaaugug

SEQ ID NO: 1788179 - RNA, 19 nt, Artificial Sequence
  Description of Artificial Sequence: Synthetic oligonucleotide
gguguccuccaaggaggcc

SEQ ID NO: 1788180 - RNA, 19 nt, Artificial Sequence
  Description of Artificial Sequence: Synthetic oligonucleotide
caacugaaugcagggacuu

SEQ ID NO: 1788181 - RNA, 19 nt, Artificial Sequence
  Description of Artificial Sequence: Synthetic oligonucleotide
guaaggcacuggugagacu

SEQ ID NO: 1788182 - RNA, 19 nt, Artificial Sequence
  Description of Artificial Sequence: Synthetic oligonucleotide
ccaaggaggccagcguuuc

SEQ ID NO: 1788183 - RNA, 19 nt, Artificial Sequence
  Description of Artificial Sequence: Synthetic oligonucleotide
ccagcguuucugucuucuc

SEQ ID NO: 1788184 - RNA, 19 nt, Artificial Sequence
  Description of Artificial Sequence: Synthetic oligonucleotide
cucgcuccggcugccguga

SEQ ID NO: 1788185 - RNA, 19 nt, Artificial Sequence
  Description of Artificial Sequence: Synthetic oligonucleotide
ucccgcccuugaagcuccc

SEQ ID NO: 1788186 - RNA, 19 nt, Artificial Sequence
  Description of Artificial Sequence: Synthetic oligonucleotide
ccgcccuugaagcucccuc

SEQ ID NO: 1788187 - RNA, 19 nt, Artificial Sequence
  Description of Artificial Sequence: Synthetic oligonucleotide
cugacucuccugggcucuc

SEQ ID NO: 1788188 - RNA, 19 nt, Artificial Sequence
  Description of Artificial Sequence: Synthetic oligonucleotide
cugccugggcaucaguauu

SEQ ID NO: 1788189 - RNA, 19 nt, Artificial Sequence
  Description of Artificial Sequence: Synthetic oligonucleotide
gccugggcaucaguauuac

SEQ ID NO: 1788190 - RNA, 19 nt, Artificial Sequence
  Description of Artificial Sequence: Synthetic oligonucleotide
cuagcuccucggcaaguuu

SEQ ID NO: 1788191 - RNA, 19 nt, Artificial Sequence
  Description of Artificial Sequence: Synthetic oligonucleotide
ccugcguggggcaguccuc

SEQ ID NO: 1788192 - RNA, 19 nt, Artificial Sequence
  Description of Artificial Sequence: Synthetic oligonucleotide
ggguuucuauuucuuucuu

SEQ ID NO: 1788193 - RNA, 19 nt, Artificial Sequence
  Description of Artificial Sequence: Synthetic oligonucleotide
ggggaaaugaagggauaau

SEQ ID NO: 1788194 - RNA, 19 nt, Artificial Sequence
  Description of Artificial Sequence: Synthetic oligonucleotide
guugaagcuccaaguucuu

SEQ ID NO: 1788195 - RNA, 19 nt, Artificial Sequence
  Description of Artificial Sequence: Synthetic oligonucleotide
gccugcguggggcaguccu

SEQ ID NO: 1788196 - RNA, 19 nt, Artificial Sequence
  Description of Artificial Sequence: Synthetic oligonucleotide
cagucccgcccuugaagcu

SEQ ID NO: 1788197 - RNA, 19 nt, Artificial Sequence
  Description of Artificial Sequence: Synthetic oligonucleotide
ccuuaaguugaagcuccaa

SEQ ID NO: 1788198 - RNA, 19 nt, Artificial Sequence
  Description of Artificial Sequence: Synthetic oligonucleotide
gugccugcguggggcaguc

SEQ ID NO: 1788199 - RNA, 19 nt, Artificial Sequence
  Description of Artificial Sequence: Synthetic oligonucleotide
caaggaggccagcguuucu

SEQ ID NO: 1788200 - RNA, 19 nt, Artificial Sequence
  Description of Artificial Sequence: Synthetic oligonucleotide
ccggcugccgugaugugua

SEQ ID NO: 1788201 - RNA, 19 nt, Artificial Sequence
  Description of Artificial Sequence: Synthetic oligonucleotide
ugccugcguggggcagucc

SEQ ID NO: 1788202 - RNA, 19 nt, Artificial Sequence
  Description of Artificial Sequence: Synthetic oligonucleotide
cguguuuucccuagcuccu

SEQ ID NO: 1788203 - RNA, 19 nt, Artificial Sequence
  Description of Artificial Sequence: Synthetic oligonucleotide
gcucccucagaaggucuca

SEQ ID NO: 1788204 - RNA, 19 nt, Artificial Sequence
  Description of Artificial Sequence: Synthetic oligonucleotide
cgcccuugaagcucccuca

SEQ ID NO: 1788205 - RNA, 19 nt, Artificial Sequence
  Description of Artificial Sequence: Synthetic oligonucleotide
ccgugaccucauuccucag

SEQ ID NO: 1788206 - RNA, 19 nt, Artificial Sequence
  Description of Artificial Sequence: Synthetic oligonucleotide
ucgcuccggcugccgugau

SEQ ID NO: 1788207 - RNA, 19 nt, Artificial Sequence
  Description of Artificial Sequence: Synthetic oligonucleotide
caucgucauugcaguuggu

SEQ ID NO: 1788208 - RNA, 19 nt, Artificial Sequence
  Description of Artificial Sequence: Synthetic oligonucleotide
ccguugccauucagcgcag

SEQ ID NO: 1788209 - RNA, 19 nt, Artificial Sequence
  Description of Artificial Sequence: Synthetic oligonucleotide
gccagcguuucugucuucu

SEQ ID NO: 1788210 - RNA, 19 nt, Artificial Sequence
  Description of Artificial Sequence: Synthetic oligonucleotide
gcgggguuucuucuuggau

SEQ ID NO: 1788211 - RNA, 19 nt, Artificial Sequence
  Description of Artificial Sequence: Synthetic oligonucleotide
ggcugccgugauguguaga

SEQ ID NO: 1788212 - RNA, 19 nt, Artificial Sequence
  Description of Artificial Sequence: Synthetic oligonucleotide
cggcguccuucucugugag

SEQ ID NO: 1788213 - RNA, 19 nt, Artificial Sequence
  Description of Artificial Sequence: Synthetic oligonucleotide
gaagcccagucccgcccuu

SEQ ID NO: 1788214 - RNA, 19 nt, Artificial Sequence
  Description of Artificial Sequence: Synthetic oligonucleotide
cagaagaggcgggguuucu

SEQ ID NO: 1788215 - RNA, 19 nt, Artificial Sequence
  Description of Artificial Sequence: Synthetic oligonucleotide
ccuccaaggaggccagcgu

SEQ ID NO: 1788216 - RNA, 19 nt, Artificial Sequence
  Description of Artificial Sequence: Synthetic oligonucleotide
cucccucagaaggucucau

SEQ ID NO: 1788217 - RNA, 19 nt, Artificial Sequence
  Description of Artificial Sequence: Synthetic oligonucleotide
cugccgugauguguagaau

SEQ ID NO: 1788218 - RNA, 19 nt, Artificial Sequence
  Description of Artificial Sequence: Synthetic oligonucleotide
ggccagcguuucugucuuc

SEQ ID NO: 1788219 - RNA, 19 nt, Artificial Sequence
  Description of Artificial Sequence: Synthetic oligonucleotide
cguggggcaguccucugua

SEQ ID NO: 1788220 - RNA, 19 nt, Artificial Sequence
  Description of Artificial Sequence: Synthetic oligonucleotide
ggcguccuucucugugagu

SEQ ID NO: 1788221 - RNA, 19 nt, Artificial Sequence
  Description of Artificial Sequence: Synthetic oligonucleotide
cguccuucucugugaguaa

SEQ ID NO: 1788222 - RNA, 19 nt, Artificial Sequence
  Description of Artificial Sequence: Synthetic oligonucleotide
cguugccauucagcgcagc

SEQ ID NO: 1788223 - RNA, 19 nt, Artificial Sequence
  Description of Artificial Sequence: Synthetic oligonucleotide
cggcugccgugauguguag

SEQ ID NO: 1788224 - RNA, 19 nt, Artificial Sequence
  Description of Artificial Sequence: Synthetic oligonucleotide
ggagcaccgugaccucauu

SEQ ID NO: 1788225 - RNA, 19 nt, Artificial Sequence
  Description of Artificial Sequence: Synthetic oligonucleotide
ccuagcuccucggcaaguu

SEQ ID NO: 1788226 - RNA, 19 nt, Artificial Sequence
  Description of Artificial Sequence: Synthetic oligonucleotide
gcucggcguccuucucugu

SEQ ID NO: 1788227 - RNA, 19 nt, Artificial Sequence
  Description of Artificial Sequence: Synthetic oligonucleotide
cggagcaccgugaccucau

SEQ ID NO: 1788228 - RNA, 19 nt, Artificial Sequence
  Description of Artificial Sequence: Synthetic oligonucleotide
cccuagcuccucggcaagu

SEQ ID NO: 1788229 - RNA, 19 nt, Artificial Sequence
  Description of Artificial Sequence: Synthetic oligonucleotide
ccucggcaaguuugacguu

SEQ ID NO: 1788230 - RNA, 19 nt, Artificial Sequence
  Description of Artificial Sequence: Synthetic oligonucleotide
gcgcagcuucagacaucau

SEQ ID NO: 1788231 - RNA, 19 nt, Artificial Sequence
  Description of Artificial Sequence: Synthetic oligonucleotide
aaagucuagagccucaguc

SEQ ID NO: 1788232 - RNA, 19 nt, Artificial Sequence
  Description of Artificial Sequence: Synthetic oligonucleotide
aggaguaaugcuuuggucc

SEQ ID NO: 1788233 - RNA, 19 nt, Artificial Sequence
  Description of Artificial Sequence: Synthetic oligonucleotide
aauaaaggcagagaacacc

SEQ ID NO: 1788234 - RNA, 19 nt, Artificial Sequence
  Description of Artificial Sequence: Synthetic oligonucleotide
aauaccguaauaaaggcag

SEQ ID NO: 1788235 - RNA, 19 nt, Artificial Sequence
  Description of Artificial Sequence: Synthetic oligonucleotide
aaugaugagaagcauccuc

SEQ ID NO: 1788236 - RNA, 19 nt, Artificial Sequence
  Description of Artificial Sequence: Synthetic oligonucleotide
gaaauuguagcguagaguc

SEQ ID NO: 1788237 - RNA, 19 nt, Artificial Sequence
  Description of Artificial Sequence: Synthetic oligonucleotide
aguucacugauguugaaac

SEQ ID NO: 1788238 - RNA, 19 nt, Artificial Sequence
  Description of Artificial Sequence: Synthetic oligonucleotide
aggaggggcaaacagaugc

SEQ ID NO: 1788239 - RNA, 19 nt, Artificial Sequence
  Description of Artificial Sequence: Synthetic oligonucleotide
uaaaaugcagguuacuccc

SEQ ID NO: 1788240 - RNA, 19 nt, Artificial Sequence
  Description of Artificial Sequence: Synthetic oligonucleotide
auugcugcuaagcugguac

SEQ ID NO: 1788241 - RNA, 19 nt, Artificial Sequence
  Description of Artificial Sequence: Synthetic oligonucleotide
auuaagacacuguaagguc

SEQ ID NO: 1788242 - RNA, 19 nt, Artificial Sequence
  Description of Artificial Sequence: Synthetic oligonucleotide
uuaagacacuguaaggucc

SEQ ID NO: 1788243 - RNA, 19 nt, Artificial Sequence
  Description of Artificial Sequence: Synthetic oligonucleotide
uaagguccguuccugaugg

SEQ ID NO: 1788244 - RNA, 19 nt, Artificial Sequence
  Description of Artificial Sequence: Synthetic oligonucleotide
ugaacaucacgcauaagcu

SEQ ID NO: 1788245 - RNA, 19 nt, Artificial Sequence
  Description of Artificial Sequence: Synthetic oligonucleotide
guaauaaaggcagagaaca

SEQ ID NO: 1788246 - RNA, 19 nt, Artificial Sequence
  Description of Artificial Sequence: Synthetic oligonucleotide
guaaaaugcagguuacucc

SEQ ID NO: 1788247 - RNA, 19 nt, Artificial Sequence
  Description of Artificial Sequence: Synthetic oligonucleotide
aguaaaaugcagguuacuc

SEQ ID NO: 1788248 - RNA, 19 nt, Artificial Sequence
  Description of Artificial Sequence: Synthetic oligonucleotide
aucacgcauaagcugaggc

SEQ ID NO: 1788249 - RNA, 19 nt, Artificial Sequence
  Description of Artificial Sequence: Synthetic oligonucleotide
aacgugagaggcuggaaag

SEQ ID NO: 1788250 - RNA, 19 nt, Artificial Sequence
  Description of Artificial Sequence: Synthetic oligonucleotide
uccaucaaggacauggaca

SEQ ID NO: 1788251 - RNA, 19 nt, Artificial Sequence
  Description of Artificial Sequence: Synthetic oligonucleotide
aaggaguaaugcuuugguc

SEQ ID NO: 1788252 - RNA, 19 nt, Artificial Sequence
  Description of Artificial Sequence: Synthetic oligonucleotide
cacaaguuggaucaggggc

SEQ ID NO: 1788253 - RNA, 19 nt, Artificial Sequence
  Description of Artificial Sequence: Synthetic oligonucleotide
aaaggcgugcacaaguugg

SEQ ID NO: 1788254 - RNA, 19 nt, Artificial Sequence
  Description of Artificial Sequence: Synthetic oligonucleotide
ugcacaaguuggaucaggg

SEQ ID NO: 1788255 - RNA, 19 nt, Artificial Sequence
  Description of Artificial Sequence: Synthetic oligonucleotide
ucuucugaaguaacgugag

SEQ ID NO: 1788256 - RNA, 19 nt, Artificial Sequence
  Description of Artificial Sequence: Synthetic oligonucleotide
uagcguagagucuugagca

SEQ ID NO: 1788257 - RNA, 19 nt, Artificial Sequence
  Description of Artificial Sequence: Synthetic oligonucleotide
guaauaccguaauaaaggc

SEQ ID NO: 1788258 - RNA, 19 nt, Artificial Sequence
  Description of Artificial Sequence: Synthetic oligonucleotide
agaguacacaucauggagc

SEQ ID NO: 1788259 - RNA, 19 nt, Artificial Sequence
  Description of Artificial Sequence: Synthetic oligonucleotide
ugaagugggacaguuguag

SEQ ID NO: 1788260 - RNA, 19 nt, Artificial Sequence
  Description of Artificial Sequence: Synthetic oligonucleotide
gaguacacaucauggagcc

SEQ ID NO: 1788261 - RNA, 19 nt, Artificial Sequence
  Description of Artificial Sequence: Synthetic oligonucleotide
uaauaccguaauaaaggca

SEQ ID NO: 1788262 - RNA, 19 nt, Artificial Sequence
  Description of Artificial Sequence: Synthetic oligonucleotide
gacaguuguaggaugaagc

SEQ ID NO: 1788263 - RNA, 19 nt, Artificial Sequence
  Description of Artificial Sequence: Synthetic oligonucleotide
gauuuuauccacggcaccc

SEQ ID NO: 1788264 - RNA, 19 nt, Artificial Sequence
  Description of Artificial Sequence: Synthetic oligonucleotide
uuauccacggcacccaacu

SEQ ID NO: 1788265 - RNA, 19 nt, Artificial Sequence
  Description of Artificial Sequence: Synthetic oligonucleotide
aacaucacgcauaagcuga

SEQ ID NO: 1788266 - RNA, 19 nt, Artificial Sequence
  Description of Artificial Sequence: Synthetic oligonucleotide
agcagcagaguacacauca

SEQ ID NO: 1788267 - RNA, 19 nt, Artificial Sequence
  Description of Artificial Sequence: Synthetic oligonucleotide
acacuguaagguccguucc

SEQ ID NO: 1788268 - RNA, 19 nt, Artificial Sequence
  Description of Artificial Sequence: Synthetic oligonucleotide
ucaucuguaauaccguaau

SEQ ID NO: 1788269 - RNA, 19 nt, Artificial Sequence
  Description of Artificial Sequence: Synthetic oligonucleotide
aaagcagcgugcucagcuc

SEQ ID NO: 1788270 - RNA, 19 nt, Artificial Sequence
  Description of Artificial Sequence: Synthetic oligonucleotide
cucugcaccgaacaaaggc

SEQ ID NO: 1788271 - RNA, 19 nt, Artificial Sequence
  Description of Artificial Sequence: Synthetic oligonucleotide
cagucaggaaauuguagcg

SEQ ID NO: 1788272 - RNA, 19 nt, Artificial Sequence
  Description of Artificial Sequence: Synthetic oligonucleotide
caaacagaugcucugggug

SEQ ID NO: 1788273 - RNA, 19 nt, Artificial Sequence
  Description of Artificial Sequence: Synthetic oligonucleotide
acaucagucaagugcauga

SEQ ID NO: 1788274 - RNA, 19 nt, Artificial Sequence
  Description of Artificial Sequence: Synthetic oligonucleotide
agucuugagcaaccgcucc

SEQ ID NO: 1788275 - RNA, 19 nt, Artificial Sequence
  Description of Artificial Sequence: Synthetic oligonucleotide
agcagaguacacaucaugg

SEQ ID NO: 1788276 - RNA, 19 nt, Artificial Sequence
  Description of Artificial Sequence: Synthetic oligonucleotide
acaucauggagccgagucg

SEQ ID NO: 1788277 - RNA, 19 nt, Artificial Sequence
  Description of Artificial Sequence: Synthetic oligonucleotide
gaagcaguucuccagccug

SEQ ID NO: 1788278 - RNA, 19 nt, Artificial Sequence
  Description of Artificial Sequence: Synthetic oligonucleotide
guagcguagagucuugagc

SEQ ID NO: 1788279 - RNA, 19 nt, Artificial Sequence
  Description of Artificial Sequence: Synthetic oligonucleotide
cugaaguaacgugagaggc

SEQ ID NO: 1788280 - RNA, 19 nt, Artificial Sequence
  Description of Artificial Sequence: Synthetic oligonucleotide
uuucgagaagugcugggug

SEQ ID NO: 1788281 - RNA, 19 nt, Artificial Sequence
  Description of Artificial Sequence: Synthetic oligonucleotide
acacccacaaagucuagag

SEQ ID NO: 1788282 - RNA, 19 nt, Artificial Sequence
  Description of Artificial Sequence: Synthetic oligonucleotide
agucuagagccucagucag

SEQ ID NO: 1788283 - RNA, 19 nt, Artificial Sequence
  Description of Artificial Sequence: Synthetic oligonucleotide
ugugugguggugguggugg

SEQ ID NO: 1788284 - RNA, 19 nt, Artificial Sequence
  Description of Artificial Sequence: Synthetic oligonucleotide
uguugaaacaaggaguaau

SEQ ID NO: 1788285 - RNA, 19 nt, Artificial Sequence
  Description of Artificial Sequence: Synthetic oligonucleotide
aauuguagcguagagucuu

SEQ ID NO: 1788286 - RNA, 19 nt, Artificial Sequence
  Description of Artificial Sequence: Synthetic oligonucleotide
aaugcagguuacucccauc

SEQ ID NO: 1788287 - RNA, 19 nt, Artificial Sequence
  Description of Artificial Sequence: Synthetic oligonucleotide
ucaggaaauuguagcguag

SEQ ID NO: 1788288 - RNA, 19 nt, Artificial Sequence
  Description of Artificial Sequence: Synthetic oligonucleotide
guagacagcacuccacucc

SEQ ID NO: 1788289 - RNA, 19 nt, Artificial Sequence
  Description of Artificial Sequence: Synthetic oligonucleotide
uaauaaaggcagagaacac

SEQ ID NO: 1788290 - RNA, 19 nt, Artificial Sequence
  Description of Artificial Sequence: Synthetic oligonucleotide
acugcauuaagacacugua

SEQ ID NO: 1788291 - RNA, 19 nt, Artificial Sequence
  Description of Artificial Sequence: Synthetic oligonucleotide
cacugauguugaaacaagg

SEQ ID NO: 1788292 - RNA, 19 nt, Artificial Sequence
  Description of Artificial Sequence: Synthetic oligonucleotide
gaagugggacaguuguagg

SEQ ID NO: 1788293 - RNA, 19 nt, Artificial Sequence
  Description of Artificial Sequence: Synthetic oligonucleotide
auggagccgagucggaggc

SEQ ID NO: 1788294 - RNA, 19 nt, Artificial Sequence
  Description of Artificial Sequence: Synthetic oligonucleotide
guugaaacaaggaguaaug

SEQ ID NO: 1788295 - RNA, 19 nt, Artificial Sequence
  Description of Artificial Sequence: Synthetic oligonucleotide
aggauuuuauccacggcac

SEQ ID NO: 1788296 - RNA, 19 nt, Artificial Sequence
  Description of Artificial Sequence: Synthetic oligonucleotide
uagaccccuggccaggacg

SEQ ID NO: 1788297 - RNA, 19 nt, Artificial Sequence
  Description of Artificial Sequence: Synthetic oligonucleotide
aggaaauuguagcguagag

SEQ ID NO: 1788298 - RNA, 19 nt, Artificial Sequence
  Description of Artificial Sequence: Synthetic oligonucleotide
guagaagcaguucuccagc

SEQ ID NO: 1788299 - RNA, 19 nt, Artificial Sequence
  Description of Artificial Sequence: Synthetic oligonucleotide
aacaaggaguaaugcuuug

SEQ ID NO: 1788300 - RNA, 19 nt, Artificial Sequence
  Description of Artificial Sequence: Synthetic oligonucleotide
uaacgugagaggcuggaaa

SEQ ID NO: 1788301 - RNA, 19 nt, Artificial Sequence
  Description of Artificial Sequence: Synthetic oligonucleotide
uucgagaagugcugggugc

SEQ ID NO: 1788302 - RNA, 19 nt, Artificial Sequence
  Description of Artificial Sequence: Synthetic oligonucleotide
uucaucuguaauaccguaa

SEQ ID NO: 1788303 - RNA, 19 nt, Artificial Sequence
  Description of Artificial Sequence: Synthetic oligonucleotide
gauguugaaacaaggagua

SEQ ID NO: 1788304 - RNA, 19 nt, Artificial Sequence
  Description of Artificial Sequence: Synthetic oligonucleotide
gacacuguaagguccguuc

SEQ ID NO: 1788305 - RNA, 19 nt, Artificial Sequence
  Description of Artificial Sequence: Synthetic oligonucleotide
ucacgcauaagcugaggca

SEQ ID NO: 1788306 - RNA, 19 nt, Artificial Sequence
  Description of Artificial Sequence: Synthetic oligonucleotide
aaccgcuccaucaaggaca

SEQ ID NO: 1788307 - RNA, 19 nt, Artificial Sequence
  Description of Artificial Sequence: Synthetic oligonucleotide
acuuucgagaagugcuggg

SEQ ID NO: 1788308 - RNA, 19 nt, Artificial Sequence
  Description of Artificial Sequence: Synthetic oligonucleotide
ggucccaucaagcacauca

SEQ ID NO: 1788309 - RNA, 19 nt, Artificial Sequence
  Description of Artificial Sequence: Synthetic oligonucleotide
cuguagcacaccuuccagg

SEQ ID NO: 1788310 - RNA, 19 nt, Artificial Sequence
  Description of Artificial Sequence: Synthetic oligonucleotide
acaaggaguaaugcuuugg

SEQ ID NO: 1788311 - RNA, 19 nt, Artificial Sequence
  Description of Artificial Sequence: Synthetic oligonucleotide
uaccguaauaaaggcagag

SEQ ID NO: 1788312 - RNA, 19 nt, Artificial Sequence
  Description of Artificial Sequence: Synthetic oligonucleotide
caucauggagccgagucgg

SEQ ID NO: 1788313 - RNA, 19 nt, Artificial Sequence
  Description of Artificial Sequence: Synthetic oligonucleotide
gcaaugaugagaagcaucc

SEQ ID NO: 1788314 - RNA, 19 nt, Artificial Sequence
  Description of Artificial Sequence: Synthetic oligonucleotide
ucaagugcaugaugucugc

SEQ ID NO: 1788315 - RNA, 19 nt, Artificial Sequence
  Description of Artificial Sequence: Synthetic oligonucleotide
ugggacaguuguaggauga

SEQ ID NO: 1788316 - RNA, 19 nt, Artificial Sequence
  Description of Artificial Sequence: Synthetic oligonucleotide
agggacuuucgagaagugc

SEQ ID NO: 1788317 - RNA, 19 nt, Artificial Sequence
  Description of Artificial Sequence: Synthetic oligonucleotide
uucauccgcugcuuggucc

SEQ ID NO: 1788318 - RNA, 19 nt, Artificial Sequence
  Description of Artificial Sequence: Synthetic oligonucleotide
cacgcauaagcugaggcag

SEQ ID NO: 1788319 - RNA, 19 nt, Artificial Sequence
  Description of Artificial Sequence: Synthetic oligonucleotide
ucccaucaagcacaucaag

SEQ ID NO: 1788320 - RNA, 19 nt, Artificial Sequence
  Description of Artificial Sequence: Synthetic oligonucleotide
cauggagccgagucggagg

SEQ ID NO: 1788321 - RNA, 19 nt, Artificial Sequence
  Description of Artificial Sequence: Synthetic oligonucleotide
gcauuaagacacuguaagg

SEQ ID NO: 1788322 - RNA, 19 nt, Artificial Sequence
  Description of Artificial Sequence: Synthetic oligonucleotide
uugguagggagcagcaggu

SEQ ID NO: 1788323 - RNA, 19 nt, Artificial Sequence
  Description of Artificial Sequence: Synthetic oligonucleotide
cacaucauggagccgaguc

SEQ ID NO: 1788324 - RNA, 19 nt, Artificial Sequence
  Description of Artificial Sequence: Synthetic oligonucleotide
ugccauugcugcuaagcug

SEQ ID NO: 1788325 - RNA, 19 nt, Artificial Sequence
  Description of Artificial Sequence: Synthetic oligonucleotide
uccucacugcauuaagaca

SEQ ID NO: 1788326 - RNA, 19 nt, Artificial Sequence
  Description of Artificial Sequence: Synthetic oligonucleotide
ggaguaaugcuuugguccc

SEQ ID NO: 1788327 - RNA, 19 nt, Artificial Sequence
  Description of Artificial Sequence: Synthetic oligonucleotide
acagccggaucccugaggu

SEQ ID NO: 1788328 - RNA, 19 nt, Artificial Sequence
  Description of Artificial Sequence: Synthetic oligonucleotide
gacuuucgagaagugcugg

SEQ ID NO: 1788329 - RNA, 19 nt, Artificial Sequence
  Description of Artificial Sequence: Synthetic oligonucleotide
uccugauggacacccacaa

SEQ ID NO: 1788330 - RNA, 19 nt, Artificial Sequence
  Description of Artificial Sequence: Synthetic oligonucleotide
aggaugagcagcagaguac

SEQ ID NO: 1788331 - RNA, 19 nt, Artificial Sequence
  Description of Artificial Sequence: Synthetic oligonucleotide
aggcgguagaccccuggcc

SEQ ID NO: 1788332 - RNA, 19 nt, Artificial Sequence
  Description of Artificial Sequence: Synthetic oligonucleotide
acucccuaucucugcaccg

SEQ ID NO: 1788333 - RNA, 19 nt, Artificial Sequence
  Description of Artificial Sequence: Synthetic oligonucleotide
agagagguggccuugccuu

SEQ ID NO: 1788334 - RNA, 19 nt, Artificial Sequence
  Description of Artificial Sequence: Synthetic oligonucleotide
agcgugcucagcucugaac

SEQ ID NO: 1788335 - RNA, 19 nt, Artificial Sequence
  Description of Artificial Sequence: Synthetic oligonucleotide
agucaagugcaugaugucu

SEQ ID NO: 1788336 - RNA, 19 nt, Artificial Sequence
  Description of Artificial Sequence: Synthetic oligonucleotide
aucucugcaccgaacaaag

SEQ ID NO: 1788337 - RNA, 19 nt, Artificial Sequence
  Description of Artificial Sequence: Synthetic oligonucleotide
uuccugauggacacccaca

SEQ ID NO: 1788338 - RNA, 19 nt, Artificial Sequence
  Description of Artificial Sequence: Synthetic oligonucleotide
agguagacagcacuccacu

SEQ ID NO: 1788339 - RNA, 19 nt, Artificial Sequence
  Description of Artificial Sequence: Synthetic oligonucleotide
cucugaacucaguuccugc

SEQ ID NO: 1788340 - RNA, 19 nt, Artificial Sequence
  Description of Artificial Sequence: Synthetic oligonucleotide
guaagguccguuccugaug

SEQ ID NO: 1788341 - RNA, 19 nt, Artificial Sequence
  Description of Artificial Sequence: Synthetic oligonucleotide
caggacggagcauccaggg

SEQ ID NO: 1788342 - RNA, 19 nt, Artificial Sequence
  Description of Artificial Sequence: Synthetic oligonucleotide
acaaguuggaucaggggcu

SEQ ID NO: 1788343 - RNA, 19 nt, Artificial Sequence
  Description of Artificial Sequence: Synthetic oligonucleotide
ugcagugcagccucaguaa

SEQ ID NO: 1788344 - RNA, 19 nt, Artificial Sequence
  Description of Artificial Sequence: Synthetic oligonucleotide
aaauuguagcguagagucu

SEQ ID NO: 1788345 - RNA, 19 nt, Artificial Sequence
  Description of Artificial Sequence: Synthetic oligonucleotide
guacacaucauggagccga

SEQ ID NO: 1788346 - RNA, 19 nt, Artificial Sequence
  Description of Artificial Sequence: Synthetic oligonucleotide
uguaagguccguuccugau

SEQ ID NO: 1788347 - RNA, 19 nt, Artificial Sequence
  Description of Artificial Sequence: Synthetic oligonucleotide
uuuauccacggcacccaac

SEQ ID NO: 1788348 - RNA, 19 nt, Artificial Sequence
  Description of Artificial Sequence: Synthetic oligonucleotide
caguuguaggaugaagccc

SEQ ID NO: 1788349 - RNA, 19 nt, Artificial Sequence
  Description of Artificial Sequence: Synthetic oligonucleotide
agccggaucccugagguag

SEQ ID NO: 1788350 - RNA, 19 nt, Artificial Sequence
  Description of Artificial Sequence: Synthetic oligonucleotide
uuuuauccacggcacccaa

SEQ ID NO: 1788351 - RNA, 19 nt, Artificial Sequence
  Description of Artificial Sequence: Synthetic oligonucleotide
auggacacccacaaagucu

SEQ ID NO: 1788352 - RNA, 19 nt, Artificial Sequence
  Description of Artificial Sequence: Synthetic oligonucleotide
agucaggaaauuguagcgu

SEQ ID NO: 1788353 - RNA, 19 nt, Artificial Sequence
  Description of Artificial Sequence: Synthetic oligonucleotide
ugcggugagggcaggacuc

SEQ ID NO: 1788354 - RNA, 19 nt, Artificial Sequence
  Description of Artificial Sequence: Synthetic oligonucleotide
ugcuggucugccuguagca

SEQ ID NO: 1788355 - RNA, 19 nt, Artificial Sequence
  Description of Artificial Sequence: Synthetic oligonucleotide
ugcaugacugguggcaaug

SEQ ID NO: 1788356 - RNA, 19 nt, Artificial Sequence
  Description of Artificial Sequence: Synthetic oligonucleotide
ggacggagcauccagggac

SEQ ID NO: 1788357 - RNA, 19 nt, Artificial Sequence
  Description of Artificial Sequence: Synthetic oligonucleotide
cugccuguagcacaccuuc

SEQ ID NO: 1788358 - RNA, 19 nt, Artificial Sequence
  Description of Artificial Sequence: Synthetic oligonucleotide
acugccugggagaugagca

SEQ ID NO: 1788359 - RNA, 19 nt, Artificial Sequence
  Description of Artificial Sequence: Synthetic oligonucleotide
uuccacugccgaaggagga

SEQ ID NO: 1788360 - RNA, 19 nt, Artificial Sequence
  Description of Artificial Sequence: Synthetic oligonucleotide
augacugguggcaaugaug

SEQ ID NO: 1788361 - RNA, 19 nt, Artificial Sequence
  Description of Artificial Sequence: Synthetic oligonucleotide
ucggaggcaguucacugau

SEQ ID NO: 1788362 - RNA, 19 nt, Artificial Sequence
  Description of Artificial Sequence: Synthetic oligonucleotide
agaagcaguucuccagccu

SEQ ID NO: 1788363 - RNA, 19 nt, Artificial Sequence
  Description of Artificial Sequence: Synthetic oligonucleotide
ugcaccgaacaaaggcgug

SEQ ID NO: 1788364 - RNA, 19 nt, Artificial Sequence
  Description of Artificial Sequence: Synthetic oligonucleotide
auuuuauccacggcaccca

SEQ ID NO: 1788365 - RNA, 19 nt, Artificial Sequence
  Description of Artificial Sequence: Synthetic oligonucleotide
agguccguuccugauggac

SEQ ID NO: 1788366 - RNA, 19 nt, Artificial Sequence
  Description of Artificial Sequence: Synthetic oligonucleotide
cuggaaagcagcgugcuca

SEQ ID NO: 1788367 - RNA, 19 nt, Artificial Sequence
  Description of Artificial Sequence: Synthetic oligonucleotide
guggugguggugguggugg

SEQ ID NO: 1788368 - RNA, 19 nt, Artificial Sequence
  Description of Artificial Sequence: Synthetic oligonucleotide
aaaaugcagguuacuccca

SEQ ID NO: 1788369 - RNA, 19 nt, Artificial Sequence
  Description of Artificial Sequence: Synthetic oligonucleotide
ugcuaagcugguacacacu

SEQ ID NO: 1788370 - RNA, 19 nt, Artificial Sequence
  Description of Artificial Sequence: Synthetic oligonucleotide
cucgcuuccacugccgaag

SEQ ID NO: 1788371 - RNA, 19 nt, Artificial Sequence
  Description of Artificial Sequence: Synthetic oligonucleotide
ucgcuuccacugccgaagg

SEQ ID NO: 1788372 - RNA, 19 nt, Artificial Sequence
  Description of Artificial Sequence: Synthetic oligonucleotide
accugaacaucacgcauaa

SEQ ID NO: 1788373 - RNA, 19 nt, Artificial Sequence
  Description of Artificial Sequence: Synthetic oligonucleotide
cugauacuccagcaaggac

SEQ ID NO: 1788374 - RNA, 19 nt, Artificial Sequence
  Description of Artificial Sequence: Synthetic oligonucleotide
caaaggcgugcacaaguug

SEQ ID NO: 1788375 - RNA, 19 nt, Artificial Sequence
  Description of Artificial Sequence: Synthetic oligonucleotide
agugcagccucaguaaaau

SEQ ID NO: 1788376 - RNA, 19 nt, Artificial Sequence
  Description of Artificial Sequence: Synthetic oligonucleotide
ucgagaagugcugggugcc

SEQ ID NO: 1788377 - RNA, 19 nt, Artificial Sequence
  Description of Artificial Sequence: Synthetic oligonucleotide
acacucaggaggggcaaac

SEQ ID NO: 1788378 - RNA, 19 nt, Artificial Sequence
  Description of Artificial Sequence: Synthetic oligonucleotide
ugcaugaugucugcaugac

SEQ ID NO: 1788379 - RNA, 19 nt, Artificial Sequence
  Description of Artificial Sequence: Synthetic oligonucleotide
gcuaagcugguacacacuc

SEQ ID NO: 1788380 - RNA, 19 nt, Artificial Sequence
  Description of Artificial Sequence: Synthetic oligonucleotide
cuguccugugccauugcug

SEQ ID NO: 1788381 - RNA, 19 nt, Artificial Sequence
  Description of Artificial Sequence: Synthetic oligonucleotide
cuugccuugcggugagggc

SEQ ID NO: 1788382 - RNA, 19 nt, Artificial Sequence
  Description of Artificial Sequence: Synthetic oligonucleotide
ugccuugcggugagggcag

SEQ ID NO: 1788383 - RNA, 19 nt, Artificial Sequence
  Description of Artificial Sequence: Synthetic oligonucleotide
ugaugucugcaugacuggu

SEQ ID NO: 1788384 - RNA, 19 nt, Artificial Sequence
  Description of Artificial Sequence: Synthetic oligonucleotide
accguaauaaaggcagaga

SEQ ID NO: 1788385 - RNA, 19 nt, Artificial Sequence
  Description of Artificial Sequence: Synthetic oligonucleotide
accgaacaaaggcgugcac

SEQ ID NO: 1788386 - RNA, 19 nt, Artificial Sequence
  Description of Artificial Sequence: Synthetic oligonucleotide
uugcugcuaagcugguaca

SEQ ID NO: 1788387 - RNA, 19 nt, Artificial Sequence
  Description of Artificial Sequence: Synthetic oligonucleotide
agggcccaaggauuuuauc

SEQ ID NO: 1788388 - RNA, 19 nt, Artificial Sequence
  Description of Artificial Sequence: Synthetic oligonucleotide
cuccaucaaggacauggac

SEQ ID NO: 1788389 - RNA, 19 nt, Artificial Sequence
  Description of Artificial Sequence: Synthetic oligonucleotide
guacacacucaggaggggc

SEQ ID NO: 1788390 - RNA, 19 nt, Artificial Sequence
  Description of Artificial Sequence: Synthetic oligonucleotide
agugggacaguuguaggau

SEQ ID NO: 1788391 - RNA, 19 nt, Artificial Sequence
  Description of Artificial Sequence: Synthetic oligonucleotide
gucaggaaauuguagcgua

SEQ ID NO: 1788392 - RNA, 19 nt, Artificial Sequence
  Description of Artificial Sequence: Synthetic oligonucleotide
uccagccugagcugugugu

SEQ ID NO: 1788393 - RNA, 19 nt, Artificial Sequence
  Description of Artificial Sequence: Synthetic oligonucleotide
gacucuguaccguccucac

SEQ ID NO: 1788394 - RNA, 19 nt, Artificial Sequence
  Description of Artificial Sequence: Synthetic oligonucleotide
ggauuuuauccacggcacc

SEQ ID NO: 1788395 - RNA, 19 nt, Artificial Sequence
  Description of Artificial Sequence: Synthetic oligonucleotide
gaugaagcccacaguguga

SEQ ID NO: 1788396 - RNA, 19 nt, Artificial Sequence
  Description of Artificial Sequence: Synthetic oligonucleotide
ugccuguagcacaccuucc

SEQ ID NO: 1788397 - RNA, 19 nt, Artificial Sequence
  Description of Artificial Sequence: Synthetic oligonucleotide
gauacuccagcaaggacgu

SEQ ID NO: 1788398 - RNA, 19 nt, Artificial Sequence
  Description of Artificial Sequence: Synthetic oligonucleotide
cuccaggcacgccagacuc

SEQ ID NO: 1788399 - RNA, 19 nt, Artificial Sequence
  Description of Artificial Sequence: Synthetic oligonucleotide
cguaauaaaggcagagaac

SEQ ID NO: 1788400 - RNA, 19 nt, Artificial Sequence
  Description of Artificial Sequence: Synthetic oligonucleotide
gacauggacaggcgguaga

SEQ ID NO: 1788401 - RNA, 19 nt, Artificial Sequence
  Description of Artificial Sequence: Synthetic oligonucleotide
gcgugcacaaguuggauca

SEQ ID NO: 1788402 - RNA, 19 nt, Artificial Sequence
  Description of Artificial Sequence: Synthetic oligonucleotide
gcacaaguuggaucagggg

SEQ ID NO: 1788403 - RNA, 19 nt, Artificial Sequence
  Description of Artificial Sequence: Synthetic oligonucleotide
ggugggguucaccugaaca

SEQ ID NO: 1788404 - RNA, 19 nt, Artificial Sequence
  Description of Artificial Sequence: Synthetic oligonucleotide
guccguuccugauggacac

SEQ ID NO: 1788405 - RNA, 19 nt, Artificial Sequence
  Description of Artificial Sequence: Synthetic oligonucleotide
acccaacucucgcuuccac

SEQ ID NO: 1788406 - RNA, 19 nt, Artificial Sequence
  Description of Artificial Sequence: Synthetic oligonucleotide
uagcggacugccugggaga

SEQ ID NO: 1788407 - RNA, 19 nt, Artificial Sequence
  Description of Artificial Sequence: Synthetic oligonucleotide
ggcagagaacaccuuggcc

SEQ ID NO: 1788408 - RNA, 19 nt, Artificial Sequence
  Description of Artificial Sequence: Synthetic oligonucleotide
cucugucaagggcccaagg

SEQ ID NO: 1788409 - RNA, 19 nt, Artificial Sequence
  Description of Artificial Sequence: Synthetic oligonucleotide
caucaagcacaucaagaaa

SEQ ID NO: 1788410 - RNA, 19 nt, Artificial Sequence
  Description of Artificial Sequence: Synthetic oligonucleotide
aacagaugcucugggugau

SEQ ID NO: 1788411 - RNA, 19 nt, Artificial Sequence
  Description of Artificial Sequence: Synthetic oligonucleotide
aguacacaucauggagccg

SEQ ID NO: 1788412 - RNA, 19 nt, Artificial Sequence
  Description of Artificial Sequence: Synthetic oligonucleotide
cacggcacccaacucucgc

SEQ ID NO: 1788413 - RNA, 19 nt, Artificial Sequence
  Description of Artificial Sequence: Synthetic oligonucleotide
agacucuguaccguccuca

SEQ ID NO: 1788414 - RNA, 19 nt, Artificial Sequence
  Description of Artificial Sequence: Synthetic oligonucleotide
ugcugcuaagcugguacac

SEQ ID NO: 1788415 - RNA, 19 nt, Artificial Sequence
  Description of Artificial Sequence: Synthetic oligonucleotide
agaccccuggccaggacgg

SEQ ID NO: 1788416 - RNA, 19 nt, Artificial Sequence
  Description of Artificial Sequence: Synthetic oligonucleotide
aaggcgugcacaaguugga

SEQ ID NO: 1788417 - RNA, 19 nt, Artificial Sequence
  Description of Artificial Sequence: Synthetic oligonucleotide
cauccuccaggcagagacc

SEQ ID NO: 1788418 - RNA, 19 nt, Artificial Sequence
  Description of Artificial Sequence: Synthetic oligonucleotide
caaccgcuccaucaaggac

SEQ ID NO: 1788419 - RNA, 19 nt, Artificial Sequence
  Description of Artificial Sequence: Synthetic oligonucleotide
gacugguggcaaugaugag

SEQ ID NO: 1788420 - RNA, 19 nt, Artificial Sequence
  Description of Artificial Sequence: Synthetic oligonucleotide
caacucucgcuuccacugc

SEQ ID NO: 1788421 - RNA, 19 nt, Artificial Sequence
  Description of Artificial Sequence: Synthetic oligonucleotide
cuaagcugguacacacuca

SEQ ID NO: 1788422 - RNA, 19 nt, Artificial Sequence
  Description of Artificial Sequence: Synthetic oligonucleotide
cacaucagucaagugcaug

SEQ ID NO: 1788423 - RNA, 19 nt, Artificial Sequence
  Description of Artificial Sequence: Synthetic oligonucleotide
cagucaagugcaugauguc

SEQ ID NO: 1788424 - RNA, 19 nt, Artificial Sequence
  Description of Artificial Sequence: Synthetic oligonucleotide
ccaucaagcacaucaagaa

SEQ ID NO: 1788425 - RNA, 19 nt, Artificial Sequence
  Description of Artificial Sequence: Synthetic oligonucleotide
cuucaucuguaauaccgua

SEQ ID NO: 1788426 - RNA, 19 nt, Artificial Sequence
  Description of Artificial Sequence: Synthetic oligonucleotide
gacugccugggagaugagc

SEQ ID NO: 1788427 - RNA, 19 nt, Artificial Sequence
  Description of Artificial Sequence: Synthetic oligonucleotide
cccaaggauuuuauccacg

SEQ ID NO: 1788428 - RNA, 19 nt, Artificial Sequence
  Description of Artificial Sequence: Synthetic oligonucleotide
ccguaauaaaggcagagaa

SEQ ID NO: 1788429 - RNA, 19 nt, Artificial Sequence
  Description of Artificial Sequence: Synthetic oligonucleotide
gcagaguacacaucaugga

SEQ ID NO: 1788430 - RNA, 19 nt, Artificial Sequence
  Description of Artificial Sequence: Synthetic oligonucleotide
cuagggguuccucuucuga

SEQ ID NO: 1788431 - RNA, 19 nt, Artificial Sequence
  Description of Artificial Sequence: Synthetic oligonucleotide
gucggaggcaguucacuga

SEQ ID NO: 1788432 - RNA, 19 nt, Artificial Sequence
  Description of Artificial Sequence: Synthetic oligonucleotide
ugguggugguggugguggg

SEQ ID NO: 1788433 - RNA, 19 nt, Artificial Sequence
  Description of Artificial Sequence: Synthetic oligonucleotide
gagucuugagcaaccgcuc

SEQ ID NO: 1788434 - RNA, 19 nt, Artificial Sequence
  Description of Artificial Sequence: Synthetic oligonucleotide
cacagccggaucccugagg

SEQ ID NO: 1788435 - RNA, 19 nt, Artificial Sequence
  Description of Artificial Sequence: Synthetic oligonucleotide
caaggaguaaugcuuuggu

SEQ ID NO: 1788436 - RNA, 19 nt, Artificial Sequence
  Description of Artificial Sequence: Synthetic oligonucleotide
gucugcaugacugguggca

SEQ ID NO: 1788437 - RNA, 19 nt, Artificial Sequence
  Description of Artificial Sequence: Synthetic oligonucleotide
ggcaaugaugagaagcauc

SEQ ID NO: 1788438 - RNA, 19 nt, Artificial Sequence
  Description of Artificial Sequence: Synthetic oligonucleotide
agcguagagucuugagcaa

SEQ ID NO: 1788439 - RNA, 19 nt, Artificial Sequence
  Description of Artificial Sequence: Synthetic oligonucleotide
uuguagcguagagucuuga

SEQ ID NO: 1788440 - RNA, 19 nt, Artificial Sequence
  Description of Artificial Sequence: Synthetic oligonucleotide
uggccaggacggagcaucc

SEQ ID NO: 1788441 - RNA, 19 nt, Artificial Sequence
  Description of Artificial Sequence: Synthetic oligonucleotide
caucacgcauaagcugagg

SEQ ID NO: 1788442 - RNA, 19 nt, Artificial Sequence
  Description of Artificial Sequence: Synthetic oligonucleotide
ucccuaucucugcaccgaa

SEQ ID NO: 1788443 - RNA, 19 nt, Artificial Sequence
  Description of Artificial Sequence: Synthetic oligonucleotide
aguaaugcuuuggucccau

SEQ ID NO: 1788444 - RNA, 19 nt, Artificial Sequence
  Description of Artificial Sequence: Synthetic oligonucleotide
ugggugcgagccaggguga

SEQ ID NO: 1788445 - RNA, 19 nt, Artificial Sequence
  Description of Artificial Sequence: Synthetic oligonucleotide
acucuguaccguccucacu

SEQ ID NO: 1788446 - RNA, 19 nt, Artificial Sequence
  Description of Artificial Sequence: Synthetic oligonucleotide
aacucaguuccugcuucau

SEQ ID NO: 1788447 - RNA, 19 nt, Artificial Sequence
  Description of Artificial Sequence: Synthetic oligonucleotide
ggacaguuguaggaugaag

SEQ ID NO: 1788448 - RNA, 19 nt, Artificial Sequence
  Description of Artificial Sequence: Synthetic oligonucleotide
acggcacccaacucucgcu

SEQ ID NO: 1788449 - RNA, 19 nt, Artificial Sequence
  Description of Artificial Sequence: Synthetic oligonucleotide
acgcauaagcugaggcagg

SEQ ID NO: 1788450 - RNA, 19 nt, Artificial Sequence
  Description of Artificial Sequence: Synthetic oligonucleotide
uguggugguggugguggug

SEQ ID NO: 1788451 - RNA, 19 nt, Artificial Sequence
  Description of Artificial Sequence: Synthetic oligonucleotide
ucucgcuuccacugccgaa

SEQ ID NO: 1788452 - RNA, 19 nt, Artificial Sequence
  Description of Artificial Sequence: Synthetic oligonucleotide
caggaaauuguagcguaga

SEQ ID NO: 1788453 - RNA, 19 nt, Artificial Sequence
  Description of Artificial Sequence: Synthetic oligonucleotide
guagcacaccuuccaggac

SEQ ID NO: 1788454 - RNA, 19 nt, Artificial Sequence
  Description of Artificial Sequence: Synthetic oligonucleotide
aggacggagcauccaggga

SEQ ID NO: 1788455 - RNA, 19 nt, Artificial Sequence
  Description of Artificial Sequence: Synthetic oligonucleotide
ggggugcacagccggaucc

SEQ ID NO: 1788456 - RNA, 19 nt, Artificial Sequence
  Description of Artificial Sequence: Synthetic oligonucleotide
gugcagccucaguaaaaug

SEQ ID NO: 1788457 - RNA, 19 nt, Artificial Sequence
  Description of Artificial Sequence: Synthetic oligonucleotide
cccaucaagcacaucaaga

SEQ ID NO: 1788458 - RNA, 19 nt, Artificial Sequence
  Description of Artificial Sequence: Synthetic oligonucleotide
acaucacgcauaagcugag

SEQ ID NO: 1788459 - RNA, 19 nt, Artificial Sequence
  Description of Artificial Sequence: Synthetic oligonucleotide
cguagagucuugagcaacc

SEQ ID NO: 1788460 - RNA, 19 nt, Artificial Sequence
  Description of Artificial Sequence: Synthetic oligonucleotide
gaggggcaaacagaugcuc

SEQ ID NO: 1788461 - RNA, 19 nt, Artificial Sequence
  Description of Artificial Sequence: Synthetic oligonucleotide
gaucccugagguagcggac

SEQ ID NO: 1788462 - RNA, 19 nt, Artificial Sequence
  Description of Artificial Sequence: Synthetic oligonucleotide
gacagcacuccacucccua

SEQ ID NO: 1788463 - RNA, 19 nt, Artificial Sequence
  Description of Artificial Sequence: Synthetic oligonucleotide
acgugcagcugcugcccuc

SEQ ID NO: 1788464 - RNA, 19 nt, Artificial Sequence
  Description of Artificial Sequence: Synthetic oligonucleotide
cuucauccgcugcuugguc

SEQ ID NO: 1788465 - RNA, 19 nt, Artificial Sequence
  Description of Artificial Sequence: Synthetic oligonucleotide
ggaaauuguagcguagagu

SEQ ID NO: 1788466 - RNA, 19 nt, Artificial Sequence
  Description of Artificial Sequence: Synthetic oligonucleotide
caccugaacaucacgcaua

SEQ ID NO: 1788467 - RNA, 19 nt, Artificial Sequence
  Description of Artificial Sequence: Synthetic oligonucleotide
gguagacagcacuccacuc

SEQ ID NO: 1788468 - RNA, 19 nt, Artificial Sequence
  Description of Artificial Sequence: Synthetic oligonucleotide
ggcgguagaccccuggcca

SEQ ID NO: 1788469 - RNA, 19 nt, Artificial Sequence
  Description of Artificial Sequence: Synthetic oligonucleotide
agguggccuugccuugcgg

SEQ ID NO: 1788470 - RNA, 19 nt, Artificial Sequence
  Description of Artificial Sequence: Synthetic oligonucleotide
uggcaaugaugagaagcau

SEQ ID NO: 1788471 - RNA, 19 nt, Artificial Sequence
  Description of Artificial Sequence: Synthetic oligonucleotide
uggccuugccuugcgguga

SEQ ID NO: 1788472 - RNA, 19 nt, Artificial Sequence
  Description of Artificial Sequence: Synthetic oligonucleotide
auaccguaauaaaggcaga

SEQ ID NO: 1788473 - RNA, 19 nt, Artificial Sequence
  Description of Artificial Sequence: Synthetic oligonucleotide
aagggcccaaggauuuuau

SEQ ID NO: 1788474 - RNA, 19 nt, Artificial Sequence
  Description of Artificial Sequence: Synthetic oligonucleotide
uccacugccgaaggaggau

SEQ ID NO: 1788475 - RNA, 19 nt, Artificial Sequence
  Description of Artificial Sequence: Synthetic oligonucleotide
cuguaagguccguuccuga

SEQ ID NO: 1788476 - RNA, 19 nt, Artificial Sequence
  Description of Artificial Sequence: Synthetic oligonucleotide
aggcacgccagacucugua

SEQ ID NO: 1788477 - RNA, 19 nt, Artificial Sequence
  Description of Artificial Sequence: Synthetic oligonucleotide
aagguccguuccugaugga

SEQ ID NO: 1788478 - RNA, 19 nt, Artificial Sequence
  Description of Artificial Sequence: Synthetic oligonucleotide
ugcgagccagggugaggag

SEQ ID NO: 1788479 - RNA, 19 nt, Artificial Sequence
  Description of Artificial Sequence: Synthetic oligonucleotide
uuacucccaucuccuucau

SEQ ID NO: 1788480 - RNA, 19 nt, Artificial Sequence
  Description of Artificial Sequence: Synthetic oligonucleotide
ggcgugcacaaguuggauc

SEQ ID NO: 1788481 - RNA, 19 nt, Artificial Sequence
  Description of Artificial Sequence: Synthetic oligonucleotide
ggagccgagucggaggcag

SEQ ID NO: 1788482 - RNA, 19 nt, Artificial Sequence
  Description of Artificial Sequence: Synthetic oligonucleotide
agguagcggacugccuggg

SEQ ID NO: 1788483 - RNA, 19 nt, Artificial Sequence
  Description of Artificial Sequence: Synthetic oligonucleotide
ccugagguagcggacugcc

SEQ ID NO: 1788484 - RNA, 19 nt, Artificial Sequence
  Description of Artificial Sequence: Synthetic oligonucleotide
gguacacacucaggagggg

SEQ ID NO: 1788485 - RNA, 19 nt, Artificial Sequence
  Description of Artificial Sequence: Synthetic oligonucleotide
gaguaaugcuuugguccca

SEQ ID NO: 1788486 - RNA, 19 nt, Artificial Sequence
  Description of Artificial Sequence: Synthetic oligonucleotide
uggugggguucaccugaac

SEQ ID NO: 1788487 - RNA, 19 nt, Artificial Sequence
  Description of Artificial Sequence: Synthetic oligonucleotide
guuguaggaugaagcccac

SEQ ID NO: 1788488 - RNA, 19 nt, Artificial Sequence
  Description of Artificial Sequence: Synthetic oligonucleotide
guaaugcuuuggucccauc

SEQ ID NO: 1788489 - RNA, 19 nt, Artificial Sequence
  Description of Artificial Sequence: Synthetic oligonucleotide
gcgugcucagcucugaacu

SEQ ID NO: 1788490 - RNA, 19 nt, Artificial Sequence
  Description of Artificial Sequence: Synthetic oligonucleotide
uccguuccugauggacacc

SEQ ID NO: 1788491 - RNA, 19 nt, Artificial Sequence
  Description of Artificial Sequence: Synthetic oligonucleotide
cuuucgagaagugcugggu

SEQ ID NO: 1788492 - RNA, 19 nt, Artificial Sequence
  Description of Artificial Sequence: Synthetic oligonucleotide
uaccguccucacugcauua

SEQ ID NO: 1788493 - RNA, 19 nt, Artificial Sequence
  Description of Artificial Sequence: Synthetic oligonucleotide
cugcaccgaacaaaggcgu

SEQ ID NO: 1788494 - RNA, 19 nt, Artificial Sequence
  Description of Artificial Sequence: Synthetic oligonucleotide
gguugguagggagcagcag

SEQ ID NO: 1788495 - RNA, 19 nt, Artificial Sequence
  Description of Artificial Sequence: Synthetic oligonucleotide
gccgaaggaggaugagcag

SEQ ID NO: 1788496 - RNA, 19 nt, Artificial Sequence
  Description of Artificial Sequence: Synthetic oligonucleotide
ccguuccugauggacaccc

SEQ ID NO: 1788497 - RNA, 19 nt, Artificial Sequence
  Description of Artificial Sequence: Synthetic oligonucleotide
ggagagagagguggccuug

SEQ ID NO: 1788498 - RNA, 19 nt, Artificial Sequence
  Description of Artificial Sequence: Synthetic oligonucleotide
cugaagugggacaguugua

SEQ ID NO: 1788499 - RNA, 19 nt, Artificial Sequence
  Description of Artificial Sequence: Synthetic oligonucleotide
ugguggugguggugguggu

SEQ ID NO: 1788500 - RNA, 19 nt, Artificial Sequence
  Description of Artificial Sequence: Synthetic oligonucleotide
cuccaugagcugcuggucu

SEQ ID NO: 1788501 - RNA, 19 nt, Artificial Sequence
  Description of Artificial Sequence: Synthetic oligonucleotide
ggugguggugguggugggg

SEQ ID NO: 1788502 - RNA, 19 nt, Artificial Sequence
  Description of Artificial Sequence: Synthetic oligonucleotide
cagccacaucagucaagug

SEQ ID NO: 1788503 - RNA, 19 nt, Artificial Sequence
  Description of Artificial Sequence: Synthetic oligonucleotide
caccgaacaaaggcgugca

SEQ ID NO: 1788504 - RNA, 19 nt, Artificial Sequence
  Description of Artificial Sequence: Synthetic oligonucleotide
gcagguagaagcaguucuc

SEQ ID NO: 1788505 - RNA, 19 nt, Artificial Sequence
  Description of Artificial Sequence: Synthetic oligonucleotide
ggcacgccagacucuguac

SEQ ID NO: 1788506 - RNA, 19 nt, Artificial Sequence
  Description of Artificial Sequence: Synthetic oligonucleotide
cucccuaucucugcaccga

SEQ ID NO: 1788507 - RNA, 19 nt, Artificial Sequence
  Description of Artificial Sequence: Synthetic oligonucleotide
ccgcacagccacaucaguc

SEQ ID NO: 1788508 - RNA, 19 nt, Artificial Sequence
  Description of Artificial Sequence: Synthetic oligonucleotide
cucacugcauuaagacacu

SEQ ID NO: 1788509 - RNA, 19 nt, Artificial Sequence
  Description of Artificial Sequence: Synthetic oligonucleotide
acgccagacucuguaccgu

SEQ ID NO: 1788510 - RNA, 19 nt, Artificial Sequence
  Description of Artificial Sequence: Synthetic oligonucleotide
guaacgugagaggcuggaa

SEQ ID NO: 1788511 - RNA, 19 nt, Artificial Sequence
  Description of Artificial Sequence: Synthetic oligonucleotide
gcgccgcacagccacauca

SEQ ID NO: 1788512 - RNA, 19 nt, Artificial Sequence
  Description of Artificial Sequence: Synthetic oligonucleotide
caggggagcuagggguucc

SEQ ID NO: 1788513 - RNA, 19 nt, Artificial Sequence
  Description of Artificial Sequence: Synthetic oligonucleotide
gggugaugccagcuccagc

SEQ ID NO: 1788514 - RNA, 19 nt, Artificial Sequence
  Description of Artificial Sequence: Synthetic oligonucleotide
ggacgugcagcugcugccc

SEQ ID NO: 1788515 - RNA, 19 nt, Artificial Sequence
  Description of Artificial Sequence: Synthetic oligonucleotide
cucucgcuuccacugccga

SEQ ID NO: 1788516 - RNA, 19 nt, Artificial Sequence
  Description of Artificial Sequence: Synthetic oligonucleotide
gcugcuaagcugguacaca

SEQ ID NO: 1788517 - RNA, 19 nt, Artificial Sequence
  Description of Artificial Sequence: Synthetic oligonucleotide
cuuggucccggggugcaca

SEQ ID NO: 1788518 - RNA, 19 nt, Artificial Sequence
  Description of Artificial Sequence: Synthetic oligonucleotide
ggaccucugucaagggccc

SEQ ID NO: 1788519 - RNA, 19 nt, Artificial Sequence
  Description of Artificial Sequence: Synthetic oligonucleotide
ucaagggcccaaggauuuu

SEQ ID NO: 1788520 - RNA, 19 nt, Artificial Sequence
  Description of Artificial Sequence: Synthetic oligonucleotide
gcguagagucuugagcaac

SEQ ID NO: 1788521 - RNA, 19 nt, Artificial Sequence
  Description of Artificial Sequence: Synthetic oligonucleotide
cacuguaagguccguuccu

SEQ ID NO: 1788522 - RNA, 19 nt, Artificial Sequence
  Description of Artificial Sequence: Synthetic oligonucleotide
agcggacugccugggagau

SEQ ID NO: 1788523 - RNA, 19 nt, Artificial Sequence
  Description of Artificial Sequence: Synthetic oligonucleotide
guagaccccuggccaggac

SEQ ID NO: 1788524 - RNA, 19 nt, Artificial Sequence
  Description of Artificial Sequence: Synthetic oligonucleotide
gagucggaggcaguucacu

SEQ ID NO: 1788525 - RNA, 19 nt, Artificial Sequence
  Description of Artificial Sequence: Synthetic oligonucleotide
gacggagcauccagggacu

SEQ ID NO: 1788526 - RNA, 19 nt, Artificial Sequence
  Description of Artificial Sequence: Synthetic oligonucleotide
cugugccauugcugcuaag

SEQ ID NO: 1788527 - RNA, 19 nt, Artificial Sequence
  Description of Artificial Sequence: Synthetic oligonucleotide
ccacuccuuccugaagugg

SEQ ID NO: 1788528 - RNA, 19 nt, Artificial Sequence
  Description of Artificial Sequence: Synthetic oligonucleotide
ccgaacaaaggcgugcaca

SEQ ID NO: 1788529 - RNA, 19 nt, Artificial Sequence
  Description of Artificial Sequence: Synthetic oligonucleotide
cagagaccagcaucugaua

SEQ ID NO: 1788530 - RNA, 19 nt, Artificial Sequence
  Description of Artificial Sequence: Synthetic oligonucleotide
gugugugguggugguggug

SEQ ID NO: 1788531 - RNA, 19 nt, Artificial Sequence
  Description of Artificial Sequence: Synthetic oligonucleotide
caaagucuagagccucagu

SEQ ID NO: 1788532 - RNA, 19 nt, Artificial Sequence
  Description of Artificial Sequence: Synthetic oligonucleotide
ggugcgagccagggugagg

SEQ ID NO: 1788533 - RNA, 19 nt, Artificial Sequence
  Description of Artificial Sequence: Synthetic oligonucleotide
gcagagaccagcaucugau

SEQ ID NO: 1788534 - RNA, 19 nt, Artificial Sequence
  Description of Artificial Sequence: Synthetic oligonucleotide
ccguccucacugcauuaag

SEQ ID NO: 1788535 - RNA, 19 nt, Artificial Sequence
  Description of Artificial Sequence: Synthetic oligonucleotide
aucauggagccgagucgga

SEQ ID NO: 1788536 - RNA, 19 nt, Artificial Sequence
  Description of Artificial Sequence: Synthetic oligonucleotide
gcgagccagggugaggagc

SEQ ID NO: 1788537 - RNA, 19 nt, Artificial Sequence
  Description of Artificial Sequence: Synthetic oligonucleotide
agcaggggagcuagggguu

SEQ ID NO: 1788538 - RNA, 19 nt, Artificial Sequence
  Description of Artificial Sequence: Synthetic oligonucleotide
ggccuugccuugcggugag

SEQ ID NO: 1788539 - RNA, 19 nt, Artificial Sequence
  Description of Artificial Sequence: Synthetic oligonucleotide
cccuaucucugcaccgaac

SEQ ID NO: 1788540 - RNA, 19 nt, Artificial Sequence
  Description of Artificial Sequence: Synthetic oligonucleotide
gcauaagcugaggcaggug

SEQ ID NO: 1788541 - RNA, 19 nt, Artificial Sequence
  Description of Artificial Sequence: Synthetic oligonucleotide
cugcuuccuccaggcacgc

SEQ ID NO: 1788542 - RNA, 19 nt, Artificial Sequence
  Description of Artificial Sequence: Synthetic oligonucleotide
gggagcuagggguuccucu

SEQ ID NO: 1788543 - RNA, 19 nt, Artificial Sequence
  Description of Artificial Sequence: Synthetic oligonucleotide
caagggcccaaggauuuua

SEQ ID NO: 1788544 - RNA, 19 nt, Artificial Sequence
  Description of Artificial Sequence: Synthetic oligonucleotide
gguggugguggugguggug

SEQ ID NO: 1788545 - RNA, 19 nt, Artificial Sequence
  Description of Artificial Sequence: Synthetic oligonucleotide
agccgagucggaggcaguu

SEQ ID NO: 1788546 - RNA, 19 nt, Artificial Sequence
  Description of Artificial Sequence: Synthetic oligonucleotide
ccgagucggaggcaguuca

SEQ ID NO: 1788547 - RNA, 19 nt, Artificial Sequence
  Description of Artificial Sequence: Synthetic oligonucleotide
caaugaugagaagcauccu

SEQ ID NO: 1788548 - RNA, 19 nt, Artificial Sequence
  Description of Artificial Sequence: Synthetic oligonucleotide
agggagcagcagguagaca

SEQ ID NO: 1788549 - RNA, 19 nt, Artificial Sequence
  Description of Artificial Sequence: Synthetic oligonucleotide
ccacucccuaucucugcac

SEQ ID NO: 1788550 - RNA, 19 nt, Artificial Sequence
  Description of Artificial Sequence: Synthetic oligonucleotide
gcaugacugguggcaauga

SEQ ID NO: 1788551 - RNA, 19 nt, Artificial Sequence
  Description of Artificial Sequence: Synthetic oligonucleotide
aggggagcuagggguuccu

SEQ ID NO: 1788552 - RNA, 19 nt, Artificial Sequence
  Description of Artificial Sequence: Synthetic oligonucleotide
gguagcggacugccuggga

SEQ ID NO: 1788553 - RNA, 19 nt, Artificial Sequence
  Description of Artificial Sequence: Synthetic oligonucleotide
caucagucaagugcaugau

SEQ ID NO: 1788554 - RNA, 19 nt, Artificial Sequence
  Description of Artificial Sequence: Synthetic oligonucleotide
ccacggcacccaacucucg

SEQ ID NO: 1788555 - RNA, 19 nt, Artificial Sequence
  Description of Artificial Sequence: Synthetic oligonucleotide
uggcgccgcacagccacau

SEQ ID NO: 1788556 - RNA, 19 nt, Artificial Sequence
  Description of Artificial Sequence: Synthetic oligonucleotide
cggacugccugggagauga

SEQ ID NO: 1788557 - RNA, 19 nt, Artificial Sequence
  Description of Artificial Sequence: Synthetic oligonucleotide
cauugcugcuaagcuggua

SEQ ID NO: 1788558 - RNA, 19 nt, Artificial Sequence
  Description of Artificial Sequence: Synthetic oligonucleotide
cugagguagcggacugccu

SEQ ID NO: 1788559 - RNA, 19 nt, Artificial Sequence
  Description of Artificial Sequence: Synthetic oligonucleotide
ccggaucccugagguagcg

SEQ ID NO: 1788560 - RNA, 19 nt, Artificial Sequence
  Description of Artificial Sequence: Synthetic oligonucleotide
gcggugagggcaggacucc

SEQ ID NO: 1788561 - RNA, 19 nt, Artificial Sequence
  Description of Artificial Sequence: Synthetic oligonucleotide
gggacaguuguaggaugaa

SEQ ID NO: 1788562 - RNA, 19 nt, Artificial Sequence
  Description of Artificial Sequence: Synthetic oligonucleotide
ccugaacaucacgcauaag

SEQ ID NO: 1788563 - RNA, 19 nt, Artificial Sequence
  Description of Artificial Sequence: Synthetic oligonucleotide
cgccgcacagccacaucag

SEQ ID NO: 1788564 - RNA, 19 nt, Artificial Sequence
  Description of Artificial Sequence: Synthetic oligonucleotide
acggagcauccagggacuu

SEQ ID NO: 1788565 - RNA, 19 nt, Artificial Sequence
  Description of Artificial Sequence: Synthetic oligonucleotide
ggcuggaaagcagcgugcu

SEQ ID NO: 1788566 - RNA, 19 nt, Artificial Sequence
  Description of Artificial Sequence: Synthetic oligonucleotide
cacacucaggaggggcaaa

SEQ ID NO: 1788567 - RNA, 19 nt, Artificial Sequence
  Description of Artificial Sequence: Synthetic oligonucleotide
cagcgugcucagcucugaa

SEQ ID NO: 1788568 - RNA, 19 nt, Artificial Sequence
  Description of Artificial Sequence: Synthetic oligonucleotide
cugcaugacugguggcaau

SEQ ID NO: 1788569 - RNA, 19 nt, Artificial Sequence
  Description of Artificial Sequence: Synthetic oligonucleotide
uggucccaucaagcacauc

SEQ ID NO: 1788570 - RNA, 19 nt, Artificial Sequence
  Description of Artificial Sequence: Synthetic oligonucleotide
guguggugguggugguggu

SEQ ID NO: 1788571 - RNA, 19 nt, Artificial Sequence
  Description of Artificial Sequence: Synthetic oligonucleotide
cccugagguagcggacugc

SEQ ID NO: 1788572 - RNA, 19 nt, Artificial Sequence
  Description of Artificial Sequence: Synthetic oligonucleotide
guggugggguucaccugaa

SEQ ID NO: 1788573 - RNA, 19 nt, Artificial Sequence
  Description of Artificial Sequence: Synthetic oligonucleotide
ggacaggcgguagaccccu

SEQ ID NO: 1788574 - RNA, 19 nt, Artificial Sequence
  Description of Artificial Sequence: Synthetic oligonucleotide
cuuccugaagugggacagu

SEQ ID NO: 1788575 - RNA, 19 nt, Artificial Sequence
  Description of Artificial Sequence: Synthetic oligonucleotide
cgccagacucuguaccguc

SEQ ID NO: 1788576 - RNA, 19 nt, Artificial Sequence
  Description of Artificial Sequence: Synthetic oligonucleotide
gcagcgugcucagcucuga

SEQ ID NO: 1788577 - RNA, 19 nt, Artificial Sequence
  Description of Artificial Sequence: Synthetic oligonucleotide
cccaacucucgcuuccacu

SEQ ID NO: 1788578 - RNA, 19 nt, Artificial Sequence
  Description of Artificial Sequence: Synthetic oligonucleotide
cgugcacaaguuggaucag

SEQ ID NO: 1788579 - RNA, 19 nt, Artificial Sequence
  Description of Artificial Sequence: Synthetic oligonucleotide
ccugugccauugcugcuaa

SEQ ID NO: 1788580 - RNA, 19 nt, Artificial Sequence
  Description of Artificial Sequence: Synthetic oligonucleotide
ccgcugcuuggucccgggg

SEQ ID NO: 1788581 - RNA, 19 nt, Artificial Sequence
  Description of Artificial Sequence: Synthetic oligonucleotide
cgguagaccccuggccagg

SEQ ID NO: 1788582 - RNA, 19 nt, Artificial Sequence
  Description of Artificial Sequence: Synthetic oligonucleotide
cagccggaucccugaggua

SEQ ID NO: 1788583 - RNA, 19 nt, Artificial Sequence
  Description of Artificial Sequence: Synthetic oligonucleotide
gcaaggacgugcagcugcu

SEQ ID NO: 1788584 - RNA, 19 nt, Artificial Sequence
  Description of Artificial Sequence: Synthetic oligonucleotide
gguggaagugccacuccuu

SEQ ID NO: 1788585 - RNA, 19 nt, Artificial Sequence
  Description of Artificial Sequence: Synthetic oligonucleotide
ggggagcuagggguuccuc

SEQ ID NO: 1788586 - RNA, 19 nt, Artificial Sequence
  Description of Artificial Sequence: Synthetic oligonucleotide
gccgcacagccacaucagu

SEQ ID NO: 1788587 - RNA, 19 nt, Artificial Sequence
  Description of Artificial Sequence: Synthetic oligonucleotide
gugccuguccugugccauu

SEQ ID NO: 1788588 - RNA, 19 nt, Artificial Sequence
  Description of Artificial Sequence: Synthetic oligonucleotide
cggaggcaguucacugaug

SEQ ID NO: 1788589 - RNA, 19 nt, Artificial Sequence
  Description of Artificial Sequence: Synthetic oligonucleotide
gcuuggucccggggugcac

SEQ ID NO: 1788590 - RNA, 19 nt, Artificial Sequence
  Description of Artificial Sequence: Synthetic oligonucleotide
gccuugccuugcggugagg

SEQ ID NO: 1788591 - RNA, 19 nt, Artificial Sequence
  Description of Artificial Sequence: Synthetic oligonucleotide
gccuugcggugagggcagg

SEQ ID NO: 1788592 - RNA, 19 nt, Artificial Sequence
  Description of Artificial Sequence: Synthetic oligonucleotide
gagccgagucggaggcagu

SEQ ID NO: 1788593 - RNA, 19 nt, Artificial Sequence
  Description of Artificial Sequence: Synthetic oligonucleotide
caggggcuccugagauucu

SEQ ID NO: 1788594 - RNA, 19 nt, Artificial Sequence
  Description of Artificial Sequence: Synthetic oligonucleotide
ccuccaggcacgccagacu

SEQ ID NO: 1788595 - RNA, 19 nt, Artificial Sequence
  Description of Artificial Sequence: Synthetic oligonucleotide
gcccucuguuucagccaug

SEQ ID NO: 1788596 - RNA, 19 nt, Artificial Sequence
  Description of Artificial Sequence: Synthetic oligonucleotide
caggcacgccagacucugu

SEQ ID NO: 1788597 - RNA, 19 nt, Artificial Sequence
  Description of Artificial Sequence: Synthetic oligonucleotide
cgcauaagcugaggcaggu

SEQ ID NO: 1788598 - RNA, 19 nt, Artificial Sequence
  Description of Artificial Sequence: Synthetic oligonucleotide
cggcacccaacucucgcuu

SEQ ID NO: 1788599 - RNA, 19 nt, Artificial Sequence
  Description of Artificial Sequence: Synthetic oligonucleotide
aagagugcccaccagaggc

SEQ ID NO: 1788600 - RNA, 19 nt, Artificial Sequence
  Description of Artificial Sequence: Synthetic oligonucleotide
guaucuaugacuaaggucc

SEQ ID NO: 1788601 - RNA, 19 nt, Artificial Sequence
  Description of Artificial Sequence: Synthetic oligonucleotide
aggauuaucacaugacugc

SEQ ID NO: 1788602 - RNA, 19 nt, Artificial Sequence
  Description of Artificial Sequence: Synthetic oligonucleotide
cuuauguuguguaaggacg

SEQ ID NO: 1788603 - RNA, 19 nt, Artificial Sequence
  Description of Artificial Sequence: Synthetic oligonucleotide
caggauacauucaagaccg

SEQ ID NO: 1788604 - RNA, 19 nt, Artificial Sequence
  Description of Artificial Sequence: Synthetic oligonucleotide
agagccauaguugagaugg

SEQ ID NO: 1788605 - RNA, 19 nt, Artificial Sequence
  Description of Artificial Sequence: Synthetic oligonucleotide
auagaaacgcaucuuaaag

SEQ ID NO: 1788606 - RNA, 19 nt, Artificial Sequence
  Description of Artificial Sequence: Synthetic oligonucleotide
auagcuauccaugaagagc

SEQ ID NO: 1788607 - RNA, 19 nt, Artificial Sequence
  Description of Artificial Sequence: Synthetic oligonucleotide
uagcuauccaugaagagcc

SEQ ID NO: 1788608 - RNA, 19 nt, Artificial Sequence
  Description of Artificial Sequence: Synthetic oligonucleotide
agaaucuugagcuggguuc

SEQ ID NO: 1788609 - RNA, 19 nt, Artificial Sequence
  Description of Artificial Sequence: Synthetic oligonucleotide
ucaagaggaacuaggaagc

SEQ ID NO: 1788610 - RNA, 19 nt, Artificial Sequence
  Description of Artificial Sequence: Synthetic oligonucleotide
uuguucaagaggaacuagg

SEQ ID NO: 1788611 - RNA, 19 nt, Artificial Sequence
  Description of Artificial Sequence: Synthetic oligonucleotide
gaucuuauguuguguaagg

SEQ ID NO: 1788612 - RNA, 19 nt, Artificial Sequence
  Description of Artificial Sequence: Synthetic oligonucleotide
uucaagaccgcucccacag

SEQ ID NO: 1788613 - RNA, 19 nt, Artificial Sequence
  Description of Artificial Sequence: Synthetic oligonucleotide
aacuaggaagcgaagaauc

SEQ ID NO: 1788614 - RNA, 19 nt, Artificial Sequence
  Description of Artificial Sequence: Synthetic oligonucleotide
gaagguuugaggaaggcgc

SEQ ID NO: 1788615 - RNA, 19 nt, Artificial Sequence
  Description of Artificial Sequence: Synthetic oligonucleotide
auuaucacaugacugccag

SEQ ID NO: 1788616 - RNA, 19 nt, Artificial Sequence
  Description of Artificial Sequence: Synthetic oligonucleotide
ugaugugcggaucuuaugu

SEQ ID NO: 1788617 - RNA, 19 nt, Artificial Sequence
  Description of Artificial Sequence: Synthetic oligonucleotide
augacuaagguccuaucuc

SEQ ID NO: 1788618 - RNA, 19 nt, Artificial Sequence
  Description of Artificial Sequence: Synthetic oligonucleotide
uaugacuaagguccuaucu

SEQ ID NO: 1788619 - RNA, 19 nt, Artificial Sequence
  Description of Artificial Sequence: Synthetic oligonucleotide
ucuuauguuguguaaggac

SEQ ID NO: 1788620 - RNA, 19 nt, Artificial Sequence
  Description of Artificial Sequence: Synthetic oligonucleotide
uguuguguaaggacggccc

SEQ ID NO: 1788621 - RNA, 19 nt, Artificial Sequence
  Description of Artificial Sequence: Synthetic oligonucleotide
gaaauggcggcccaaguug

SEQ ID NO: 1788622 - RNA, 19 nt, Artificial Sequence
  Description of Artificial Sequence: Synthetic oligonucleotide
gaagguaucuaugacuaag

SEQ ID NO: 1788623 - RNA, 19 nt, Artificial Sequence
  Description of Artificial Sequence: Synthetic oligonucleotide
uguucaagaggaacuagga

SEQ ID NO: 1788624 - RNA, 19 nt, Artificial Sequence
  Description of Artificial Sequence: Synthetic oligonucleotide
uguaagagugcccaccaga

SEQ ID NO: 1788625 - RNA, 19 nt, Artificial Sequence
  Description of Artificial Sequence: Synthetic oligonucleotide
caaguacauagucaagucg

SEQ ID NO: 1788626 - RNA, 19 nt, Artificial Sequence
  Description of Artificial Sequence: Synthetic oligonucleotide
ugacuaagguccuaucucc

SEQ ID NO: 1788627 - RNA, 19 nt, Artificial Sequence
  Description of Artificial Sequence: Synthetic oligonucleotide
guugcagaagguuugagga

SEQ ID NO: 1788628 - RNA, 19 nt, Artificial Sequence
  Description of Artificial Sequence: Synthetic oligonucleotide
accuugacuuuuccgaggc

SEQ ID NO: 1788629 - RNA, 19 nt, Artificial Sequence
  Description of Artificial Sequence: Synthetic oligonucleotide
cauagucaagucgagagcc

SEQ ID NO: 1788630 - RNA, 19 nt, Artificial Sequence
  Description of Artificial Sequence: Synthetic oligonucleotide
aagcacuccauacugccug

SEQ ID NO: 1788631 - RNA, 19 nt, Artificial Sequence
  Description of Artificial Sequence: Synthetic oligonucleotide
uggaagguaucuaugacua

SEQ ID NO: 1788632 - RNA, 19 nt, Artificial Sequence
  Description of Artificial Sequence: Synthetic oligonucleotide
aagguaucuaugacuaagg

SEQ ID NO: 1788633 - RNA, 19 nt, Artificial Sequence
  Description of Artificial Sequence: Synthetic oligonucleotide
gauagcuauccaugaagag

SEQ ID NO: 1788634 - RNA, 19 nt, Artificial Sequence
  Description of Artificial Sequence: Synthetic oligonucleotide
ucuuaaaggacaaccgcuc

SEQ ID NO: 1788635 - RNA, 19 nt, Artificial Sequence
  Description of Artificial Sequence: Synthetic oligonucleotide
uaucacaugacugccagcu

SEQ ID NO: 1788636 - RNA, 19 nt, Artificial Sequence
  Description of Artificial Sequence: Synthetic oligonucleotide
aaacgcaucuuaaaggaca

SEQ ID NO: 1788637 - RNA, 19 nt, Artificial Sequence
  Description of Artificial Sequence: Synthetic oligonucleotide
uccacuuacgcccuggguc

SEQ ID NO: 1788638 - RNA, 19 nt, Artificial Sequence
  Description of Artificial Sequence: Synthetic oligonucleotide
uccuguuuuggauggaagc

SEQ ID NO: 1788639 - RNA, 19 nt, Artificial Sequence
  Description of Artificial Sequence: Synthetic oligonucleotide
augggccguauucagauuc

SEQ ID NO: 1788640 - RNA, 19 nt, Artificial Sequence
  Description of Artificial Sequence: Synthetic oligonucleotide
aggacaaccgcucagguuu

SEQ ID NO: 1788641 - RNA, 19 nt, Artificial Sequence
  Description of Artificial Sequence: Synthetic oligonucleotide
gaagcagcgauagcuaucc

SEQ ID NO: 1788642 - RNA, 19 nt, Artificial Sequence
  Description of Artificial Sequence: Synthetic oligonucleotide
uggucaaugggucgauggg

SEQ ID NO: 1788643 - RNA, 19 nt, Artificial Sequence
  Description of Artificial Sequence: Synthetic oligonucleotide
caguacgcaucacacaugg

SEQ ID NO: 1788644 - RNA, 19 nt, Artificial Sequence
  Description of Artificial Sequence: Synthetic oligonucleotide
ugguugaaugcauucgagc

SEQ ID NO: 1788645 - RNA, 19 nt, Artificial Sequence
  Description of Artificial Sequence: Synthetic oligonucleotide
uguaaggacggcccguccc

SEQ ID NO: 1788646 - RNA, 19 nt, Artificial Sequence
  Description of Artificial Sequence: Synthetic oligonucleotide
ugcauucgagcuuuccuag

SEQ ID NO: 1788647 - RNA, 19 nt, Artificial Sequence
  Description of Artificial Sequence: Synthetic oligonucleotide
cugagcaagccauccaucc

SEQ ID NO: 1788648 - RNA, 19 nt, Artificial Sequence
  Description of Artificial Sequence: Synthetic oligonucleotide
aguugagauggcgugcacc

SEQ ID NO: 1788649 - RNA, 19 nt, Artificial Sequence
  Description of Artificial Sequence: Synthetic oligonucleotide
augacugccagcugccagg

SEQ ID NO: 1788650 - RNA, 19 nt, Artificial Sequence
  Description of Artificial Sequence: Synthetic oligonucleotide
uaagagugcccaccagagg

SEQ ID NO: 1788651 - RNA, 19 nt, Artificial Sequence
  Description of Artificial Sequence: Synthetic oligonucleotide
uggguucccgcaaacuccg

SEQ ID NO: 1788652 - RNA, 19 nt, Artificial Sequence
  Description of Artificial Sequence: Synthetic oligonucleotide
agugaucagagcccaucac

SEQ ID NO: 1788653 - RNA, 19 nt, Artificial Sequence
  Description of Artificial Sequence: Synthetic oligonucleotide
acgcaucacacauggcucc

SEQ ID NO: 1788654 - RNA, 19 nt, Artificial Sequence
  Description of Artificial Sequence: Synthetic oligonucleotide
agaagguuugaggaaggcg

SEQ ID NO: 1788655 - RNA, 19 nt, Artificial Sequence
  Description of Artificial Sequence: Synthetic oligonucleotide
ugaguuugauggcugggcu

SEQ ID NO: 1788656 - RNA, 19 nt, Artificial Sequence
  Description of Artificial Sequence: Synthetic oligonucleotide
agguccuaucuccaaguac

SEQ ID NO: 1788657 - RNA, 19 nt, Artificial Sequence
  Description of Artificial Sequence: Synthetic oligonucleotide
aagucgagagccauaguug

SEQ ID NO: 1788658 - RNA, 19 nt, Artificial Sequence
  Description of Artificial Sequence: Synthetic oligonucleotide
uuuuccgaggccugguuga

SEQ ID NO: 1788659 - RNA, 19 nt, Artificial Sequence
  Description of Artificial Sequence: Synthetic oligonucleotide
uucgagcuuuccuaggaug

SEQ ID NO: 1788660 - RNA, 19 nt, Artificial Sequence
  Description of Artificial Sequence: Synthetic oligonucleotide
ugugcggaucuuauguugu

SEQ ID NO: 1788661 - RNA, 19 nt, Artificial Sequence
  Description of Artificial Sequence: Synthetic oligonucleotide
aaccgcucagguuucccag

SEQ ID NO: 1788662 - RNA, 19 nt, Artificial Sequence
  Description of Artificial Sequence: Synthetic oligonucleotide
gguugcagaagguuugagg

SEQ ID NO: 1788663 - RNA, 19 nt, Artificial Sequence
  Description of Artificial Sequence: Synthetic oligonucleotide
gaagcggguacacagagcu

SEQ ID NO: 1788664 - RNA, 19 nt, Artificial Sequence
  Description of Artificial Sequence: Synthetic oligonucleotide
gaaucuugagcuggguucc

SEQ ID NO: 1788665 - RNA, 19 nt, Artificial Sequence
  Description of Artificial Sequence: Synthetic oligonucleotide
gaaggcgcgaaguaacuca

SEQ ID NO: 1788666 - RNA, 19 nt, Artificial Sequence
  Description of Artificial Sequence: Synthetic oligonucleotide
ugacuacugaccagcaggu

SEQ ID NO: 1788667 - RNA, 19 nt, Artificial Sequence
  Description of Artificial Sequence: Synthetic oligonucleotide
cuauggccgccacagaggg

SEQ ID NO: 1788668 - RNA, 19 nt, Artificial Sequence
  Description of Artificial Sequence: Synthetic oligonucleotide
agucgagagccauaguuga

SEQ ID NO: 1788669 - RNA, 19 nt, Artificial Sequence
  Description of Artificial Sequence: Synthetic oligonucleotide
gaagguugcagaagguuug

SEQ ID NO: 1788670 - RNA, 19 nt, Artificial Sequence
  Description of Artificial Sequence: Synthetic oligonucleotide
ugaucagagcccaucacuu

SEQ ID NO: 1788671 - RNA, 19 nt, Artificial Sequence
  Description of Artificial Sequence: Synthetic oligonucleotide
gauggaagcagcgauagcu

SEQ ID NO: 1788672 - RNA, 19 nt, Artificial Sequence
  Description of Artificial Sequence: Synthetic oligonucleotide
uacgcaucacacauggcuc

SEQ ID NO: 1788673 - RNA, 19 nt, Artificial Sequence
  Description of Artificial Sequence: Synthetic oligonucleotide
ugcaucacaguggucaaug

SEQ ID NO: 1788674 - RNA, 19 nt, Artificial Sequence
  Description of Artificial Sequence: Synthetic oligonucleotide
aaauggcggcccaaguugg

SEQ ID NO: 1788675 - RNA, 19 nt, Artificial Sequence
  Description of Artificial Sequence: Synthetic oligonucleotide
aagguuugaggaaggcgcg

SEQ ID NO: 1788676 - RNA, 19 nt, Artificial Sequence
  Description of Artificial Sequence: Synthetic oligonucleotide
ucugcucggaucugcagca

SEQ ID NO: 1788677 - RNA, 19 nt, Artificial Sequence
  Description of Artificial Sequence: Synthetic oligonucleotide
guuguguaaggacggcccg

SEQ ID NO: 1788678 - RNA, 19 nt, Artificial Sequence
  Description of Artificial Sequence: Synthetic oligonucleotide
cauccuuaggccucaguug

SEQ ID NO: 1788679 - RNA, 19 nt, Artificial Sequence
  Description of Artificial Sequence: Synthetic oligonucleotide
guuacugagcaagccaucc

SEQ ID NO: 1788680 - RNA, 19 nt, Artificial Sequence
  Description of Artificial Sequence: Synthetic oligonucleotide
ucugaugugcggaucuuau

SEQ ID NO: 1788681 - RNA, 19 nt, Artificial Sequence
  Description of Artificial Sequence: Synthetic oligonucleotide
aguuacagcgggaggaggg

SEQ ID NO: 1788682 - RNA, 19 nt, Artificial Sequence
  Description of Artificial Sequence: Synthetic oligonucleotide
agguucuuguucaagagga

SEQ ID NO: 1788683 - RNA, 19 nt, Artificial Sequence
  Description of Artificial Sequence: Synthetic oligonucleotide
uacugagcaagccauccau

SEQ ID NO: 1788684 - RNA, 19 nt, Artificial Sequence
  Description of Artificial Sequence: Synthetic oligonucleotide
uuugaggaaggcgcgaagu

SEQ ID NO: 1788685 - RNA, 19 nt, Artificial Sequence
  Description of Artificial Sequence: Synthetic oligonucleotide
uccgaggccugguugaaug

SEQ ID NO: 1788686 - RNA, 19 nt, Artificial Sequence
  Description of Artificial Sequence: Synthetic oligonucleotide
caagaccgcucccacaggg

SEQ ID NO: 1788687 - RNA, 19 nt, Artificial Sequence
  Description of Artificial Sequence: Synthetic oligonucleotide
cuguuugggacccagccuc

SEQ ID NO: 1788688 - RNA, 19 nt, Artificial Sequence
  Description of Artificial Sequence: Synthetic oligonucleotide
augugcggaucuuauguug

SEQ ID NO: 1788689 - RNA, 19 nt, Artificial Sequence
  Description of Artificial Sequence: Synthetic oligonucleotide
agguaucuaugacuaaggu

SEQ ID NO: 1788690 - RNA, 19 nt, Artificial Sequence
  Description of Artificial Sequence: Synthetic oligonucleotide
gguaucuaugacuaagguc

SEQ ID NO: 1788691 - RNA, 19 nt, Artificial Sequence
  Description of Artificial Sequence: Synthetic oligonucleotide
aacucgcacagguucuugu

SEQ ID NO: 1788692 - RNA, 19 nt, Artificial Sequence
  Description of Artificial Sequence: Synthetic oligonucleotide
uccaugaagagcccuguuu

SEQ ID NO: 1788693 - RNA, 19 nt, Artificial Sequence
  Description of Artificial Sequence: Synthetic oligonucleotide
uuacugagcaagccaucca

SEQ ID NO: 1788694 - RNA, 19 nt, Artificial Sequence
  Description of Artificial Sequence: Synthetic oligonucleotide
ucuaugacuaagguccuau

SEQ ID NO: 1788695 - RNA, 19 nt, Artificial Sequence
  Description of Artificial Sequence: Synthetic oligonucleotide
gauggcgugcaccacugac

SEQ ID NO: 1788696 - RNA, 19 nt, Artificial Sequence
  Description of Artificial Sequence: Synthetic oligonucleotide
ucgcacagguucuuguuca

SEQ ID NO: 1788697 - RNA, 19 nt, Artificial Sequence
  Description of Artificial Sequence: Synthetic oligonucleotide
ccuaggauguuucuguacc

SEQ ID NO: 1788698 - RNA, 19 nt, Artificial Sequence
  Description of Artificial Sequence: Synthetic oligonucleotide
ucuguaccugaguuugaug

SEQ ID NO: 1788699 - RNA, 19 nt, Artificial Sequence
  Description of Artificial Sequence: Synthetic oligonucleotide
gcaucuuaaaggacaaccg

SEQ ID NO: 1788700 - RNA, 19 nt, Artificial Sequence
  Description of Artificial Sequence: Synthetic oligonucleotide
aaguuacagcgggaggagg

SEQ ID NO: 1788701 - RNA, 19 nt, Artificial Sequence
  Description of Artificial Sequence: Synthetic oligonucleotide
uugaaugcauucgagcuuu

SEQ ID NO: 1788702 - RNA, 19 nt, Artificial Sequence
  Description of Artificial Sequence: Synthetic oligonucleotide
uaucuaugacuaagguccu

SEQ ID NO: 1788703 - RNA, 19 nt, Artificial Sequence
  Description of Artificial Sequence: Synthetic oligonucleotide
uacauucaagaccgcuccc

SEQ ID NO: 1788704 - RNA, 19 nt, Artificial Sequence
  Description of Artificial Sequence: Synthetic oligonucleotide
ucccaggauccgcaugugg

SEQ ID NO: 1788705 - RNA, 19 nt, Artificial Sequence
  Description of Artificial Sequence: Synthetic oligonucleotide
guacgcaucacacauggcu

SEQ ID NO: 1788706 - RNA, 19 nt, Artificial Sequence
  Description of Artificial Sequence: Synthetic oligonucleotide
ucacaguacgcaucacaca

SEQ ID NO: 1788707 - RNA, 19 nt, Artificial Sequence
  Description of Artificial Sequence: Synthetic oligonucleotide
accugaguuugauggcugg

SEQ ID NO: 1788708 - RNA, 19 nt, Artificial Sequence
  Description of Artificial Sequence: Synthetic oligonucleotide
gcgauagcuauccaugaag

SEQ ID NO: 1788709 - RNA, 19 nt, Artificial Sequence
  Description of Artificial Sequence: Synthetic oligonucleotide
aagaccgcucccacagggc

SEQ ID NO: 1788710 - RNA, 19 nt, Artificial Sequence
  Description of Artificial Sequence: Synthetic oligonucleotide
ucaagaccgcucccacagg

SEQ ID NO: 1788711 - RNA, 19 nt, Artificial Sequence
  Description of Artificial Sequence: Synthetic oligonucleotide
cugaguuugauggcugggc

SEQ ID NO: 1788712 - RNA, 19 nt, Artificial Sequence
  Description of Artificial Sequence: Synthetic oligonucleotide
uuaucacaugacugccagc

SEQ ID NO: 1788713 - RNA, 19 nt, Artificial Sequence
  Description of Artificial Sequence: Synthetic oligonucleotide
cuuguucaagaggaacuag

SEQ ID NO: 1788714 - RNA, 19 nt, Artificial Sequence
  Description of Artificial Sequence: Synthetic oligonucleotide
augcauucgagcuuuccua

SEQ ID NO: 1788715 - RNA, 19 nt, Artificial Sequence
  Description of Artificial Sequence: Synthetic oligonucleotide
uccuaggauguuucuguac

SEQ ID NO: 1788716 - RNA, 19 nt, Artificial Sequence
  Description of Artificial Sequence: Synthetic oligonucleotide
cuuuuccgaggccugguug

SEQ ID NO: 1788717 - RNA, 19 nt, Artificial Sequence
  Description of Artificial Sequence: Synthetic oligonucleotide
agccaccuugacuuuuccg

SEQ ID NO: 1788718 - RNA, 19 nt, Artificial Sequence
  Description of Artificial Sequence: Synthetic oligonucleotide
caccuugacuuuuccgagg

SEQ ID NO: 1788719 - RNA, 19 nt, Artificial Sequence
  Description of Artificial Sequence: Synthetic oligonucleotide
ugacuuuuccgaggccugg

SEQ ID NO: 1788720 - RNA, 19 nt, Artificial Sequence
  Description of Artificial Sequence: Synthetic oligonucleotide
uaggccucaguuguuucag

SEQ ID NO: 1788721 - RNA, 19 nt, Artificial Sequence
  Description of Artificial Sequence: Synthetic oligonucleotide
uugaggaaggcgcgaagua

SEQ ID NO: 1788722 - RNA, 19 nt, Artificial Sequence
  Description of Artificial Sequence: Synthetic oligonucleotide
uguuugggacccagccucc

SEQ ID NO: 1788723 - RNA, 19 nt, Artificial Sequence
  Description of Artificial Sequence: Synthetic oligonucleotide
gucgaugggccguauucag

SEQ ID NO: 1788724 - RNA, 19 nt, Artificial Sequence
  Description of Artificial Sequence: Synthetic oligonucleotide
agaggggcaugggugaggg

SEQ ID NO: 1788725 - RNA, 19 nt, Artificial Sequence
  Description of Artificial Sequence: Synthetic oligonucleotide
gguccuaucuccaaguaca

SEQ ID NO: 1788726 - RNA, 19 nt, Artificial Sequence
  Description of Artificial Sequence: Synthetic oligonucleotide
cauucaagaccgcucccac

SEQ ID NO: 1788727 - RNA, 19 nt, Artificial Sequence
  Description of Artificial Sequence: Synthetic oligonucleotide
gguugaaugcauucgagcu

SEQ ID NO: 1788728 - RNA, 19 nt, Artificial Sequence
  Description of Artificial Sequence: Synthetic oligonucleotide
cuuaaaggacaaccgcuca

SEQ ID NO: 1788729 - RNA, 19 nt, Artificial Sequence
  Description of Artificial Sequence: Synthetic oligonucleotide
caggcgauagaaacgcauc

SEQ ID NO: 1788730 - RNA, 19 nt, Artificial Sequence
  Description of Artificial Sequence: Synthetic oligonucleotide
caugacugccagcugccag

SEQ ID NO: 1788731 - RNA, 19 nt, Artificial Sequence
  Description of Artificial Sequence: Synthetic oligonucleotide
cucccuauggccgccacag

SEQ ID NO: 1788732 - RNA, 19 nt, Artificial Sequence
  Description of Artificial Sequence: Synthetic oligonucleotide
gaaugcauucgagcuuucc

SEQ ID NO: 1788733 - RNA, 19 nt, Artificial Sequence
  Description of Artificial Sequence: Synthetic oligonucleotide
ugggccguauucagauucc

SEQ ID NO: 1788734 - RNA, 19 nt, Artificial Sequence
  Description of Artificial Sequence: Synthetic oligonucleotide
acuaagguccuaucuccaa

SEQ ID NO: 1788735 - RNA, 19 nt, Artificial Sequence
  Description of Artificial Sequence: Synthetic oligonucleotide
caucccuggguuacugagc

SEQ ID NO: 1788736 - RNA, 19 nt, Artificial Sequence
  Description of Artificial Sequence: Synthetic oligonucleotide
guuacagcgggaggagggg

SEQ ID NO: 1788737 - RNA, 19 nt, Artificial Sequence
  Description of Artificial Sequence: Synthetic oligonucleotide
aucuuauguuguguaagga

SEQ ID NO: 1788738 - RNA, 19 nt, Artificial Sequence
  Description of Artificial Sequence: Synthetic oligonucleotide
guuugaggaaggcgcgaag

SEQ ID NO: 1788739 - RNA, 19 nt, Artificial Sequence
  Description of Artificial Sequence: Synthetic oligonucleotide
aacgcaucuuaaaggacaa

SEQ ID NO: 1788740 - RNA, 19 nt, Artificial Sequence
  Description of Artificial Sequence: Synthetic oligonucleotide
aaagcacuccauacugccu

SEQ ID NO: 1788741 - RNA, 19 nt, Artificial Sequence
  Description of Artificial Sequence: Synthetic oligonucleotide
ucgaugggccguauucaga

SEQ ID NO: 1788742 - RNA, 19 nt, Artificial Sequence
  Description of Artificial Sequence: Synthetic oligonucleotide
aaacuccgggaggaagcgg

SEQ ID NO: 1788743 - RNA, 19 nt, Artificial Sequence
  Description of Artificial Sequence: Synthetic oligonucleotide
uggcgugcaccacugacua

SEQ ID NO: 1788744 - RNA, 19 nt, Artificial Sequence
  Description of Artificial Sequence: Synthetic oligonucleotide
aagguccuaucuccaagua

SEQ ID NO: 1788745 - RNA, 19 nt, Artificial Sequence
  Description of Artificial Sequence: Synthetic oligonucleotide
acauucaagaccgcuccca

SEQ ID NO: 1788746 - RNA, 19 nt, Artificial Sequence
  Description of Artificial Sequence: Synthetic oligonucleotide
acaaccgcucagguuuccc

SEQ ID NO: 1788747 - RNA, 19 nt, Artificial Sequence
  Description of Artificial Sequence: Synthetic oligonucleotide
auucaagaccgcucccaca

SEQ ID NO: 1788748 - RNA, 19 nt, Artificial Sequence
  Description of Artificial Sequence: Synthetic oligonucleotide
ggauuaucacaugacugcc

SEQ ID NO: 1788749 - RNA, 19 nt, Artificial Sequence
  Description of Artificial Sequence: Synthetic oligonucleotide
ugggguaaccaugccagac

SEQ ID NO: 1788750 - RNA, 19 nt, Artificial Sequence
  Description of Artificial Sequence: Synthetic oligonucleotide
ccaugaagagcccuguuug

SEQ ID NO: 1788751 - RNA, 19 nt, Artificial Sequence
  Description of Artificial Sequence: Synthetic oligonucleotide
cauggcucccuauggccgc

SEQ ID NO: 1788752 - RNA, 19 nt, Artificial Sequence
  Description of Artificial Sequence: Synthetic oligonucleotide
gauguuucuguaccugagu

SEQ ID NO: 1788753 - RNA, 19 nt, Artificial Sequence
  Description of Artificial Sequence: Synthetic oligonucleotide
aagguugcagaagguuuga

SEQ ID NO: 1788754 - RNA, 19 nt, Artificial Sequence
  Description of Artificial Sequence: Synthetic oligonucleotide
agaccgcucccacagggca

SEQ ID NO: 1788755 - RNA, 19 nt, Artificial Sequence
  Description of Artificial Sequence: Synthetic oligonucleotide
aauggcggcccaaguuggg

SEQ ID NO: 1788756 - RNA, 19 nt, Artificial Sequence
  Description of Artificial Sequence: Synthetic oligonucleotide
acugagcaagccauccauc

SEQ ID NO: 1788757 - RNA, 19 nt, Artificial Sequence
  Description of Artificial Sequence: Synthetic oligonucleotide
uauggccgccacagagggg

SEQ ID NO: 1788758 - RNA, 19 nt, Artificial Sequence
  Description of Artificial Sequence: Synthetic oligonucleotide
cugaugugcggaucuuaug

SEQ ID NO: 1788759 - RNA, 19 nt, Artificial Sequence
  Description of Artificial Sequence: Synthetic oligonucleotide
acaguggucaaugggucga

SEQ ID NO: 1788760 - RNA, 19 nt, Artificial Sequence
  Description of Artificial Sequence: Synthetic oligonucleotide
cuggguuacugagcaagcc

SEQ ID NO: 1788761 - RNA, 19 nt, Artificial Sequence
  Description of Artificial Sequence: Synthetic oligonucleotide
agcgauagcuauccaugaa

SEQ ID NO: 1788762 - RNA, 19 nt, Artificial Sequence
  Description of Artificial Sequence: Synthetic oligonucleotide
cuggaagguaucuaugacu

SEQ ID NO: 1788763 - RNA, 19 nt, Artificial Sequence
  Description of Artificial Sequence: Synthetic oligonucleotide
cuuaggccucaguuguuuc

SEQ ID NO: 1788764 - RNA, 19 nt, Artificial Sequence
  Description of Artificial Sequence: Synthetic oligonucleotide
uugggacccagccuccauc

SEQ ID NO: 1788765 - RNA, 19 nt, Artificial Sequence
  Description of Artificial Sequence: Synthetic oligonucleotide
ugcggaucuuauguugugu

SEQ ID NO: 1788766 - RNA, 19 nt, Artificial Sequence
  Description of Artificial Sequence: Synthetic oligonucleotide
ccaaguacauagucaaguc

SEQ ID NO: 1788767 - RNA, 19 nt, Artificial Sequence
  Description of Artificial Sequence: Synthetic oligonucleotide
gcagcgauagcuauccaug

SEQ ID NO: 1788768 - RNA, 19 nt, Artificial Sequence
  Description of Artificial Sequence: Synthetic oligonucleotide
uguguaaggacggcccguc

SEQ ID NO: 1788769 - RNA, 19 nt, Artificial Sequence
  Description of Artificial Sequence: Synthetic oligonucleotide
cauccacuuacgcccuggg

SEQ ID NO: 1788770 - RNA, 19 nt, Artificial Sequence
  Description of Artificial Sequence: Synthetic oligonucleotide
gccguauucagauucccca

SEQ ID NO: 1788771 - RNA, 19 nt, Artificial Sequence
  Description of Artificial Sequence: Synthetic oligonucleotide
gggauuguaagagugccca

SEQ ID NO: 1788772 - RNA, 19 nt, Artificial Sequence
  Description of Artificial Sequence: Synthetic oligonucleotide
cucgcacagguucuuguuc

SEQ ID NO: 1788773 - RNA, 19 nt, Artificial Sequence
  Description of Artificial Sequence: Synthetic oligonucleotide
cgcaucuuaaaggacaacc

SEQ ID NO: 1788774 - RNA, 19 nt, Artificial Sequence
  Description of Artificial Sequence: Synthetic oligonucleotide
ggcgcgaaguaacucauca

SEQ ID NO: 1788775 - RNA, 19 nt, Artificial Sequence
  Description of Artificial Sequence: Synthetic oligonucleotide
gugaucagagcccaucacu

SEQ ID NO: 1788776 - RNA, 19 nt, Artificial Sequence
  Description of Artificial Sequence: Synthetic oligonucleotide
cuacugaccagcaggugaa

SEQ ID NO: 1788777 - RNA, 19 nt, Artificial Sequence
  Description of Artificial Sequence: Synthetic oligonucleotide
gugcaugggguaaccaugc

SEQ ID NO: 1788778 - RNA, 19 nt, Artificial Sequence
  Description of Artificial Sequence: Synthetic oligonucleotide
gaggaacuaggaagcgaag

SEQ ID NO: 1788779 - RNA, 19 nt, Artificial Sequence
  Description of Artificial Sequence: Synthetic oligonucleotide
guucccgcaaacuccggga

SEQ ID NO: 1788780 - RNA, 19 nt, Artificial Sequence
  Description of Artificial Sequence: Synthetic oligonucleotide
aguacgcaucacacauggc

SEQ ID NO: 1788781 - RNA, 19 nt, Artificial Sequence
  Description of Artificial Sequence: Synthetic oligonucleotide
ucaagucgagagccauagu

SEQ ID NO: 1788782 - RNA, 19 nt, Artificial Sequence
  Description of Artificial Sequence: Synthetic oligonucleotide
cacaguacgcaucacacau

SEQ ID NO: 1788783 - RNA, 19 nt, Artificial Sequence
  Description of Artificial Sequence: Synthetic oligonucleotide
ccacuuacgcccugggucc

SEQ ID NO: 1788784 - RNA, 19 nt, Artificial Sequence
  Description of Artificial Sequence: Synthetic oligonucleotide
caugggugaggguccacuc

SEQ ID NO: 1788785 - RNA, 19 nt, Artificial Sequence
  Description of Artificial Sequence: Synthetic oligonucleotide
ggucaaugggucgaugggc

SEQ ID NO: 1788786 - RNA, 19 nt, Artificial Sequence
  Description of Artificial Sequence: Synthetic oligonucleotide
uuccuaggauguuucugua

SEQ ID NO: 1788787 - RNA, 19 nt, Artificial Sequence
  Description of Artificial Sequence: Synthetic oligonucleotide
cagaagguuugaggaaggc

SEQ ID NO: 1788788 - RNA, 19 nt, Artificial Sequence
  Description of Artificial Sequence: Synthetic oligonucleotide
gcaggacuggcugaacucg

SEQ ID NO: 1788789 - RNA, 19 nt, Artificial Sequence
  Description of Artificial Sequence: Synthetic oligonucleotide
agcuauccaugaagagccc

SEQ ID NO: 1788790 - RNA, 19 nt, Artificial Sequence
  Description of Artificial Sequence: Synthetic oligonucleotide
gaggguccacucagcauag

SEQ ID NO: 1788791 - RNA, 19 nt, Artificial Sequence
  Description of Artificial Sequence: Synthetic oligonucleotide
caagucgagagccauaguu

SEQ ID NO: 1788792 - RNA, 19 nt, Artificial Sequence
  Description of Artificial Sequence: Synthetic oligonucleotide
uuguguaaggacggcccgu

SEQ ID NO: 1788793 - RNA, 19 nt, Artificial Sequence
  Description of Artificial Sequence: Synthetic oligonucleotide
uuugggacccagccuccau

SEQ ID NO: 1788794 - RNA, 19 nt, Artificial Sequence
  Description of Artificial Sequence: Synthetic oligonucleotide
gacuaagguccuaucucca

SEQ ID NO: 1788795 - RNA, 19 nt, Artificial Sequence
  Description of Artificial Sequence: Synthetic oligonucleotide
cucggaucugcagcaggcg

SEQ ID NO: 1788796 - RNA, 19 nt, Artificial Sequence
  Description of Artificial Sequence: Synthetic oligonucleotide
gcauucgagcuuuccuagg

SEQ ID NO: 1788797 - RNA, 19 nt, Artificial Sequence
  Description of Artificial Sequence: Synthetic oligonucleotide
cagugaucagagcccauca

SEQ ID NO: 1788798 - RNA, 19 nt, Artificial Sequence
  Description of Artificial Sequence: Synthetic oligonucleotide
uaguugagauggcgugcac

SEQ ID NO: 1788799 - RNA, 19 nt, Artificial Sequence
  Description of Artificial Sequence: Synthetic oligonucleotide
aaggcgcgaaguaacucau

SEQ ID NO: 1788800 - RNA, 19 nt, Artificial Sequence
  Description of Artificial Sequence: Synthetic oligonucleotide
auccgcauguggacaguac

SEQ ID NO: 1788801 - RNA, 19 nt, Artificial Sequence
  Description of Artificial Sequence: Synthetic oligonucleotide
aggauacauucaagaccgc

SEQ ID NO: 1788802 - RNA, 19 nt, Artificial Sequence
  Description of Artificial Sequence: Synthetic oligonucleotide
gguccguacuucuuucuca

SEQ ID NO: 1788803 - RNA, 19 nt, Artificial Sequence
  Description of Artificial Sequence: Synthetic oligonucleotide
gugcggaucuuauguugug

SEQ ID NO: 1788804 - RNA, 19 nt, Artificial Sequence
  Description of Artificial Sequence: Synthetic oligonucleotide
ggguccacucagcauagac

SEQ ID NO: 1788805 - RNA, 19 nt, Artificial Sequence
  Description of Artificial Sequence: Synthetic oligonucleotide
gagugcccaccagaggcag

SEQ ID NO: 1788806 - RNA, 19 nt, Artificial Sequence
  Description of Artificial Sequence: Synthetic oligonucleotide
caguuccacaucaggagaa

SEQ ID NO: 1788807 - RNA, 19 nt, Artificial Sequence
  Description of Artificial Sequence: Synthetic oligonucleotide
uucugaugugcggaucuua

SEQ ID NO: 1788808 - RNA, 19 nt, Artificial Sequence
  Description of Artificial Sequence: Synthetic oligonucleotide
aggaagcgaagaaucuuga

SEQ ID NO: 1788809 - RNA, 19 nt, Artificial Sequence
  Description of Artificial Sequence: Synthetic oligonucleotide
acgcaucuuaaaggacaac

SEQ ID NO: 1788810 - RNA, 19 nt, Artificial Sequence
  Description of Artificial Sequence: Synthetic oligonucleotide
cagcgauagcuauccauga

SEQ ID NO: 1788811 - RNA, 19 nt, Artificial Sequence
  Description of Artificial Sequence: Synthetic oligonucleotide
auggcgugcaccacugacu

SEQ ID NO: 1788812 - RNA, 19 nt, Artificial Sequence
  Description of Artificial Sequence: Synthetic oligonucleotide
ccacugacuacugaccagc

SEQ ID NO: 1788813 - RNA, 19 nt, Artificial Sequence
  Description of Artificial Sequence: Synthetic oligonucleotide
acaguacgcaucacacaug

SEQ ID NO: 1788814 - RNA, 19 nt, Artificial Sequence
  Description of Artificial Sequence: Synthetic oligonucleotide
gacuacugaccagcaggug

SEQ ID NO: 1788815 - RNA, 19 nt, Artificial Sequence
  Description of Artificial Sequence: Synthetic oligonucleotide
ccaccuugacuuuuccgag

SEQ ID NO: 1788816 - RNA, 19 nt, Artificial Sequence
  Description of Artificial Sequence: Synthetic oligonucleotide
caggcuaggcaguuccaca

SEQ ID NO: 1788817 - RNA, 19 nt, Artificial Sequence
  Description of Artificial Sequence: Synthetic oligonucleotide
acuuuuccgaggccugguu

SEQ ID NO: 1788818 - RNA, 19 nt, Artificial Sequence
  Description of Artificial Sequence: Synthetic oligonucleotide
caggagggcuucugcucgg

SEQ ID NO: 1788819 - RNA, 19 nt, Artificial Sequence
  Description of Artificial Sequence: Synthetic oligonucleotide
acgcccuggguccucuuca

SEQ ID NO: 1788820 - RNA, 19 nt, Artificial Sequence
  Description of Artificial Sequence: Synthetic oligonucleotide
aagcagcgauagcuaucca

SEQ ID NO: 1788821 - RNA, 19 nt, Artificial Sequence
  Description of Artificial Sequence: Synthetic oligonucleotide
uacugaccagcaggugaag

SEQ ID NO: 1788822 - RNA, 19 nt, Artificial Sequence
  Description of Artificial Sequence: Synthetic oligonucleotide
augggguaaccaugccaga

SEQ ID NO: 1788823 - RNA, 19 nt, Artificial Sequence
  Description of Artificial Sequence: Synthetic oligonucleotide
guguaaggacggcccgucc

SEQ ID NO: 1788824 - RNA, 19 nt, Artificial Sequence
  Description of Artificial Sequence: Synthetic oligonucleotide
gaugugcggaucuuauguu

SEQ ID NO: 1788825 - RNA, 19 nt, Artificial Sequence
  Description of Artificial Sequence: Synthetic oligonucleotide
gcgauagaaacgcaucuua

SEQ ID NO: 1788826 - RNA, 19 nt, Artificial Sequence
  Description of Artificial Sequence: Synthetic oligonucleotide
gggguaaccaugccagaca

SEQ ID NO: 1788827 - RNA, 19 nt, Artificial Sequence
  Description of Artificial Sequence: Synthetic oligonucleotide
aaugggucgaugggccgua

SEQ ID NO: 1788828 - RNA, 19 nt, Artificial Sequence
  Description of Artificial Sequence: Synthetic oligonucleotide
ucccuucugaugugcggau

SEQ ID NO: 1788829 - RNA, 19 nt, Artificial Sequence
  Description of Artificial Sequence: Synthetic oligonucleotide
cuaucuccaaguacauagu

SEQ ID NO: 1788830 - RNA, 19 nt, Artificial Sequence
  Description of Artificial Sequence: Synthetic oligonucleotide
ccuggguuacugagcaagc

SEQ ID NO: 1788831 - RNA, 19 nt, Artificial Sequence
  Description of Artificial Sequence: Synthetic oligonucleotide
cacauugaugagggucaag

SEQ ID NO: 1788832 - RNA, 19 nt, Artificial Sequence
  Description of Artificial Sequence: Synthetic oligonucleotide
cuaggauguuucuguaccu

SEQ ID NO: 1788833 - RNA, 19 nt, Artificial Sequence
  Description of Artificial Sequence: Synthetic oligonucleotide
uccuaucuccaaguacaua

SEQ ID NO: 1788834 - RNA, 19 nt, Artificial Sequence
  Description of Artificial Sequence: Synthetic oligonucleotide
aguggucaaugggucgaug

SEQ ID NO: 1788835 - RNA, 19 nt, Artificial Sequence
  Description of Artificial Sequence: Synthetic oligonucleotide
cccuggguuacugagcaag

SEQ ID NO: 1788836 - RNA, 19 nt, Artificial Sequence
  Description of Artificial Sequence: Synthetic oligonucleotide
ggauuguaagagugcccac

SEQ ID NO: 1788837 - RNA, 19 nt, Artificial Sequence
  Description of Artificial Sequence: Synthetic oligonucleotide
aggaaggcgcgaaguaacu

SEQ ID NO: 1788838 - RNA, 19 nt, Artificial Sequence
  Description of Artificial Sequence: Synthetic oligonucleotide
guaccugaguuugauggcu

SEQ ID NO: 1788839 - RNA, 19 nt, Artificial Sequence
  Description of Artificial Sequence: Synthetic oligonucleotide
gcgcgaaguaacucaucag

SEQ ID NO: 1788840 - RNA, 19 nt, Artificial Sequence
  Description of Artificial Sequence: Synthetic oligonucleotide
gaccgcucccacagggcag

SEQ ID NO: 1788841 - RNA, 19 nt, Artificial Sequence
  Description of Artificial Sequence: Synthetic oligonucleotide
guaaggacggcccgucccu

SEQ ID NO: 1788842 - RNA, 19 nt, Artificial Sequence
  Description of Artificial Sequence: Synthetic oligonucleotide
cgauagcuauccaugaaga

SEQ ID NO: 1788843 - RNA, 19 nt, Artificial Sequence
  Description of Artificial Sequence: Synthetic oligonucleotide
ccaugccagacauccuuag

SEQ ID NO: 1788844 - RNA, 19 nt, Artificial Sequence
  Description of Artificial Sequence: Synthetic oligonucleotide
gacaaccgcucagguuucc

SEQ ID NO: 1788845 - RNA, 19 nt, Artificial Sequence
  Description of Artificial Sequence: Synthetic oligonucleotide
uuuccgaggccugguugaa

SEQ ID NO: 1788846 - RNA, 19 nt, Artificial Sequence
  Description of Artificial Sequence: Synthetic oligonucleotide
agguuugaggaaggcgcga

SEQ ID NO: 1788847 - RNA, 19 nt, Artificial Sequence
  Description of Artificial Sequence: Synthetic oligonucleotide
ucccuauggccgccacaga

SEQ ID NO: 1788848 - RNA, 19 nt, Artificial Sequence
  Description of Artificial Sequence: Synthetic oligonucleotide
cacugacuacugaccagca

SEQ ID NO: 1788849 - RNA, 19 nt, Artificial Sequence
  Description of Artificial Sequence: Synthetic oligonucleotide
ggacuggcugaacucgcac

SEQ ID NO: 1788850 - RNA, 19 nt, Artificial Sequence
  Description of Artificial Sequence: Synthetic oligonucleotide
ggauggaagcagcgauagc

SEQ ID NO: 1788851 - RNA, 19 nt, Artificial Sequence
  Description of Artificial Sequence: Synthetic oligonucleotide
gagguccguacuucuuucu

SEQ ID NO: 1788852 - RNA, 19 nt, Artificial Sequence
  Description of Artificial Sequence: Synthetic oligonucleotide
ggccguauucagauucccc

SEQ ID NO: 1788853 - RNA, 19 nt, Artificial Sequence
  Description of Artificial Sequence: Synthetic oligonucleotide
cuccaucccuggguuacug

SEQ ID NO: 1788854 - RNA, 19 nt, Artificial Sequence
  Description of Artificial Sequence: Synthetic oligonucleotide
guccguacuucuuucucau

SEQ ID NO: 1788855 - RNA, 19 nt, Artificial Sequence
  Description of Artificial Sequence: Synthetic oligonucleotide
ggauacauucaagaccgcu

SEQ ID NO: 1788856 - RNA, 19 nt, Artificial Sequence
  Description of Artificial Sequence: Synthetic oligonucleotide
gacccagugcaugggguaa

SEQ ID NO: 1788857 - RNA, 19 nt, Artificial Sequence
  Description of Artificial Sequence: Synthetic oligonucleotide
caggauccgcauguggaca

SEQ ID NO: 1788858 - RNA, 19 nt, Artificial Sequence
  Description of Artificial Sequence: Synthetic oligonucleotide
cuggcauacaggauacauu

SEQ ID NO: 1788859 - RNA, 19 nt, Artificial Sequence
  Description of Artificial Sequence: Synthetic oligonucleotide
ggcggcccaaguugggccc

SEQ ID NO: 1788860 - RNA, 19 nt, Artificial Sequence
  Description of Artificial Sequence: Synthetic oligonucleotide
gcggaucuuauguugugua

SEQ ID NO: 1788861 - RNA, 19 nt, Artificial Sequence
  Description of Artificial Sequence: Synthetic oligonucleotide
gauccgcauguggacagua

SEQ ID NO: 1788862 - RNA, 19 nt, Artificial Sequence
  Description of Artificial Sequence: Synthetic oligonucleotide
cauguggacaguacacauu

SEQ ID NO: 1788863 - RNA, 19 nt, Artificial Sequence
  Description of Artificial Sequence: Synthetic oligonucleotide
ggaagcggguacacagagc

SEQ ID NO: 1788864 - RNA, 19 nt, Artificial Sequence
  Description of Artificial Sequence: Synthetic oligonucleotide
ggaagguaucuaugacuaa

SEQ ID NO: 1788865 - RNA, 19 nt, Artificial Sequence
  Description of Artificial Sequence: Synthetic oligonucleotide
aggcgcgaaguaacucauc

SEQ ID NO: 1788866 - RNA, 19 nt, Artificial Sequence
  Description of Artificial Sequence: Synthetic oligonucleotide
ggaaggcgcgaaguaacuc

SEQ ID NO: 1788867 - RNA, 19 nt, Artificial Sequence
  Description of Artificial Sequence: Synthetic oligonucleotide
caucacacauggcucccua

SEQ ID NO: 1788868 - RNA, 19 nt, Artificial Sequence
  Description of Artificial Sequence: Synthetic oligonucleotide
gccuagcacacauguagaa

SEQ ID NO: 1788869 - RNA, 19 nt, Artificial Sequence
  Description of Artificial Sequence: Synthetic oligonucleotide
ccguacuucuuucucaucu

SEQ ID NO: 1788870 - RNA, 19 nt, Artificial Sequence
  Description of Artificial Sequence: Synthetic oligonucleotide
gguuacugagcaagccauc

SEQ ID NO: 1788871 - RNA, 19 nt, Artificial Sequence
  Description of Artificial Sequence: Synthetic oligonucleotide
gcgaaguaacucaucaggu

SEQ ID NO: 1788872 - RNA, 19 nt, Artificial Sequence
  Description of Artificial Sequence: Synthetic oligonucleotide
cgauagaaacgcaucuuaa

SEQ ID NO: 1788873 - RNA, 19 nt, Artificial Sequence
  Description of Artificial Sequence: Synthetic oligonucleotide
gcaggcuaggcaguuccac

SEQ ID NO: 1788874 - RNA, 19 nt, Artificial Sequence
  Description of Artificial Sequence: Synthetic oligonucleotide
ccuugacuuuuccgaggcc

SEQ ID NO: 1788875 - RNA, 19 nt, Artificial Sequence
  Description of Artificial Sequence: Synthetic oligonucleotide
ccgaggccugguugaaugc

SEQ ID NO: 1788876 - RNA, 19 nt, Artificial Sequence
  Description of Artificial Sequence: Synthetic oligonucleotide
ucccuggguuacugagcaa

SEQ ID NO: 1788877 - RNA, 19 nt, Artificial Sequence
  Description of Artificial Sequence: Synthetic oligonucleotide
cagagcugggcacuguuuu

SEQ ID NO: 1788878 - RNA, 19 nt, Artificial Sequence
  Description of Artificial Sequence: Synthetic oligonucleotide
agacauccuuaggccucag

SEQ ID NO: 1788879 - RNA, 19 nt, Artificial Sequence
  Description of Artificial Sequence: Synthetic oligonucleotide
cugcucggaucugcagcag

SEQ ID NO: 1788880 - RNA, 19 nt, Artificial Sequence
  Description of Artificial Sequence: Synthetic oligonucleotide
ggguuacugagcaagccau

SEQ ID NO: 1788881 - RNA, 19 nt, Artificial Sequence
  Description of Artificial Sequence: Synthetic oligonucleotide
gcuggcauacaggauacau

SEQ ID NO: 1788882 - RNA, 19 nt, Artificial Sequence
  Description of Artificial Sequence: Synthetic oligonucleotide
gguaaccaugccagacauc

SEQ ID NO: 1788883 - RNA, 19 nt, Artificial Sequence
  Description of Artificial Sequence: Synthetic oligonucleotide
gaugggccguauucagauu

SEQ ID NO: 1788884 - RNA, 19 nt, Artificial Sequence
  Description of Artificial Sequence: Synthetic oligonucleotide
gccacagaggggcaugggu

SEQ ID NO: 1788885 - RNA, 19 nt, Artificial Sequence
  Description of Artificial Sequence: Synthetic oligonucleotide
ccuucugaugugcggaucu

SEQ ID NO: 1788886 - RNA, 19 nt, Artificial Sequence
  Description of Artificial Sequence: Synthetic oligonucleotide
ccaaguugggcccugcuuu

SEQ ID NO: 1788887 - RNA, 19 nt, Artificial Sequence
  Description of Artificial Sequence: Synthetic oligonucleotide
caaugggucgaugggccgu

SEQ ID NO: 1788888 - RNA, 19 nt, Artificial Sequence
  Description of Artificial Sequence: Synthetic oligonucleotide
gcgggaggaggggucacug

SEQ ID NO: 1788889 - RNA, 19 nt, Artificial Sequence
  Description of Artificial Sequence: Synthetic oligonucleotide
gggugaggguccacucagc

SEQ ID NO: 1788890 - RNA, 19 nt, Artificial Sequence
  Description of Artificial Sequence: Synthetic oligonucleotide
uuacgcccuggguccucuu

SEQ ID NO: 1788891 - RNA, 19 nt, Artificial Sequence
  Description of Artificial Sequence: Synthetic oligonucleotide
aggguccacucagcauaga

SEQ ID NO: 1788892 - RNA, 19 nt, Artificial Sequence
  Description of Artificial Sequence: Synthetic oligonucleotide
ggacaaccgcucagguuuc

SEQ ID NO: 1788893 - RNA, 19 nt, Artificial Sequence
  Description of Artificial Sequence: Synthetic oligonucleotide
guggccuagcacacaugua

SEQ ID NO: 1788894 - RNA, 19 nt, Artificial Sequence
  Description of Artificial Sequence: Synthetic oligonucleotide
guccuaucuccaaguacau

SEQ ID NO: 1788895 - RNA, 19 nt, Artificial Sequence
  Description of Artificial Sequence: Synthetic oligonucleotide
cggaucuuauguuguguaa

SEQ ID NO: 1788896 - RNA, 19 nt, Artificial Sequence
  Description of Artificial Sequence: Synthetic oligonucleotide
ggguucccgcaaacuccgg

SEQ ID NO: 1788897 - RNA, 19 nt, Artificial Sequence
  Description of Artificial Sequence: Synthetic oligonucleotide
ggcgauagaaacgcaucuu

SEQ ID NO: 1788898 - RNA, 19 nt, Artificial Sequence
  Description of Artificial Sequence: Synthetic oligonucleotide
gccgccacagaggggcaug

SEQ ID NO: 1788899 - RNA, 19 nt, Artificial Sequence
  Description of Artificial Sequence: Synthetic oligonucleotide
cgaaguaacucaucagguu

SEQ ID NO: 1788900 - RNA, 19 nt, Artificial Sequence
  Description of Artificial Sequence: Synthetic oligonucleotide
cgaugggccguauucagau

SEQ ID NO: 1788901 - RNA, 19 nt, Artificial Sequence
  Description of Artificial Sequence: Synthetic oligonucleotide
ccgccacagaggggcaugg

SEQ ID NO: 1788902 - RNA, 19 nt, Artificial Sequence
  Description of Artificial Sequence: Synthetic oligonucleotide
ccgcucagguuucccagga

SEQ ID NO: 1788903 - RNA, 19 nt, Artificial Sequence
  Description of Artificial Sequence: Synthetic oligonucleotide
gcccuguuugggacccagc

SEQ ID NO: 1788904 - RNA, 19 nt, Artificial Sequence
  Description of Artificial Sequence: Synthetic oligonucleotide
ccguggccuagcacacaug

SEQ ID NO: 1788905 - RNA, 19 nt, Artificial Sequence
  Description of Artificial Sequence: Synthetic oligonucleotide
ccagugcaugggguaacca

SEQ ID NO: 1788906 - RNA, 19 nt, Artificial Sequence
  Description of Artificial Sequence: Synthetic oligonucleotide
gccccguggccuagcacac

SEQ ID NO: 1788907 - RNA, 19 nt, Artificial Sequence
  Description of Artificial Sequence: Synthetic oligonucleotide
cgagagccauaguugagau

SEQ ID NO: 1788908 - RNA, 19 nt, Artificial Sequence
  Description of Artificial Sequence: Synthetic oligonucleotide
ggcaugggugaggguccac

SEQ ID NO: 1788909 - RNA, 19 nt, Artificial Sequence
  Description of Artificial Sequence: Synthetic oligonucleotide
ggagggcuucugcucggau

SEQ ID NO: 1788910 - RNA, 19 nt, Artificial Sequence
  Description of Artificial Sequence: Synthetic oligonucleotide
ccgggaggaagcggguaca

SEQ ID NO: 1788911 - RNA, 19 nt, Artificial Sequence
  Description of Artificial Sequence: Synthetic oligonucleotide
cacuuacgcccuggguccu

SEQ ID NO: 1788912 - RNA, 19 nt, Artificial Sequence
  Description of Artificial Sequence: Synthetic oligonucleotide
ggauccgcauguggacagu

SEQ ID NO: 1788913 - RNA, 19 nt, Artificial Sequence
  Description of Artificial Sequence: Synthetic oligonucleotide
cccaaguugggcccugcuu

SEQ ID NO: 1788914 - RNA, 19 nt, Artificial Sequence
  Description of Artificial Sequence: Synthetic oligonucleotide
gcccaaguugggcccugcu

SEQ ID NO: 1788915 - RNA, 19 nt, Artificial Sequence
  Description of Artificial Sequence: Synthetic oligonucleotide
ggcugaacucgcacagguu

SEQ ID NO: 1788916 - RNA, 19 nt, Artificial Sequence
  Description of Artificial Sequence: Synthetic oligonucleotide
gcggcccaaguugggcccu

SEQ ID NO: 1788917 - RNA, 19 nt, Artificial Sequence
  Description of Artificial Sequence: Synthetic oligonucleotide
ccccguggccuagcacaca

SEQ ID NO: 1788918 - RNA, 19 nt, Artificial Sequence
  Description of Artificial Sequence: Synthetic oligonucleotide
ggccgccacagaggggcau

SEQ ID NO: 1788919 - RNA, 19 nt, Artificial Sequence
  Description of Artificial Sequence: Synthetic oligonucleotide
cggcccaaguugggcccug

SEQ ID NO: 1788920 - RNA, 19 nt, Artificial Sequence
  Description of Artificial Sequence: Synthetic oligonucleotide
agacagauaauauuggcgg

SEQ ID NO: 1788921 - RNA, 19 nt, Artificial Sequence
  Description of Artificial Sequence: Synthetic oligonucleotide
ucaacaacaaauuugcccu

SEQ ID NO: 1788922 - RNA, 19 nt, Artificial Sequence
  Description of Artificial Sequence: Synthetic oligonucleotide
uuccauaguuucuugaugg

SEQ ID NO: 1788923 - RNA, 19 nt, Artificial Sequence
  Description of Artificial Sequence: Synthetic oligonucleotide
ugucaauccucccaggacg

SEQ ID NO: 1788924 - RNA, 19 nt, Artificial Sequence
  Description of Artificial Sequence: Synthetic oligonucleotide
uuugcauuuagcucguucc

SEQ ID NO: 1788925 - RNA, 19 nt, Artificial Sequence
  Description of Artificial Sequence: Synthetic oligonucleotide
uggaccuugaccaacaccu

SEQ ID NO: 1788926 - RNA, 19 nt, Artificial Sequence
  Description of Artificial Sequence: Synthetic oligonucleotide
auaaguugagucuggcacc

SEQ ID NO: 1788927 - RNA, 19 nt, Artificial Sequence
  Description of Artificial Sequence: Synthetic oligonucleotide
ucauuagugacaccagagg

SEQ ID NO: 1788928 - RNA, 19 nt, Artificial Sequence
  Description of Artificial Sequence: Synthetic oligonucleotide
aaagguacaguccguauga

SEQ ID NO: 1788929 - RNA, 19 nt, Artificial Sequence
  Description of Artificial Sequence: Synthetic oligonucleotide
ucgauuacuucuuuaaucu

SEQ ID NO: 1788930 - RNA, 19 nt, Artificial Sequence
  Description of Artificial Sequence: Synthetic oligonucleotide
uuagguaggaucuuaugca

SEQ ID NO: 1788931 - RNA, 19 nt, Artificial Sequence
  Description of Artificial Sequence: Synthetic oligonucleotide
cauaaguugagucuggcac

SEQ ID NO: 1788932 - RNA, 19 nt, Artificial Sequence
  Description of Artificial Sequence: Synthetic oligonucleotide
ucucgcaaggcauacaugc

SEQ ID NO: 1788933 - RNA, 19 nt, Artificial Sequence
  Description of Artificial Sequence: Synthetic oligonucleotide
cauuagugacaccagaggg

SEQ ID NO: 1788934 - RNA, 19 nt, Artificial Sequence
  Description of Artificial Sequence: Synthetic oligonucleotide
aaauuugcccucaggaugg

SEQ ID NO: 1788935 - RNA, 19 nt, Artificial Sequence
  Description of Artificial Sequence: Synthetic oligonucleotide
acacaaaggacauacccuc

SEQ ID NO: 1788936 - RNA, 19 nt, Artificial Sequence
  Description of Artificial Sequence: Synthetic oligonucleotide
gauggagucgaucucgucc

SEQ ID NO: 1788937 - RNA, 19 nt, Artificial Sequence
  Description of Artificial Sequence: Synthetic oligonucleotide
aaggacauacccucacuuc

SEQ ID NO: 1788938 - RNA, 19 nt, Artificial Sequence
  Description of Artificial Sequence: Synthetic oligonucleotide
cguaugaugagcuacagcg

SEQ ID NO: 1788939 - RNA, 19 nt, Artificial Sequence
  Description of Artificial Sequence: Synthetic oligonucleotide
uaaagguacaguccguaug

SEQ ID NO: 1788940 - RNA, 19 nt, Artificial Sequence
  Description of Artificial Sequence: Synthetic oligonucleotide
guuaguagccaugauaacc

SEQ ID NO: 1788941 - RNA, 19 nt, Artificial Sequence
  Description of Artificial Sequence: Synthetic oligonucleotide
aguucagggugcuucaccg

SEQ ID NO: 1788942 - RNA, 19 nt, Artificial Sequence
  Description of Artificial Sequence: Synthetic oligonucleotide
agaggguccaccuuauuag

SEQ ID NO: 1788943 - RNA, 19 nt, Artificial Sequence
  Description of Artificial Sequence: Synthetic oligonucleotide
acgaauaaagguacagucc

SEQ ID NO: 1788944 - RNA, 19 nt, Artificial Sequence
  Description of Artificial Sequence: Synthetic oligonucleotide
uucuguaccaguucagagc

SEQ ID NO: 1788945 - RNA, 19 nt, Artificial Sequence
  Description of Artificial Sequence: Synthetic oligonucleotide
ucgaucucguccaugaaga

SEQ ID NO: 1788946 - RNA, 19 nt, Artificial Sequence
  Description of Artificial Sequence: Synthetic oligonucleotide
aucuuaugcagaguguagc

SEQ ID NO: 1788947 - RNA, 19 nt, Artificial Sequence
  Description of Artificial Sequence: Synthetic oligonucleotide
ucgcaaggcauacaugccg

SEQ ID NO: 1788948 - RNA, 19 nt, Artificial Sequence
  Description of Artificial Sequence: Synthetic oligonucleotide
cacgaauaaagguacaguc

SEQ ID NO: 1788949 - RNA, 19 nt, Artificial Sequence
  Description of Artificial Sequence: Synthetic oligonucleotide
auuggcggaguccacugcc

SEQ ID NO: 1788950 - RNA, 19 nt, Artificial Sequence
  Description of Artificial Sequence: Synthetic oligonucleotide
gagauucuggcucuuauca

SEQ ID NO: 1788951 - RNA, 19 nt, Artificial Sequence
  Description of Artificial Sequence: Synthetic oligonucleotide
ucaucucauaaguugaguc

SEQ ID NO: 1788952 - RNA, 19 nt, Artificial Sequence
  Description of Artificial Sequence: Synthetic oligonucleotide
ugucgauccuguuaguagc

SEQ ID NO: 1788953 - RNA, 19 nt, Artificial Sequence
  Description of Artificial Sequence: Synthetic oligonucleotide
aaccucgaggagccgaugg

SEQ ID NO: 1788954 - RNA, 19 nt, Artificial Sequence
  Description of Artificial Sequence: Synthetic oligonucleotide
ucucauaaguugagucugg

SEQ ID NO: 1788955 - RNA, 19 nt, Artificial Sequence
  Description of Artificial Sequence: Synthetic oligonucleotide
uuuagcucguuccucugug

SEQ ID NO: 1788956 - RNA, 19 nt, Artificial Sequence
  Description of Artificial Sequence: Synthetic oligonucleotide
ucucgugccaugacgaaca

SEQ ID NO: 1788957 - RNA, 19 nt, Artificial Sequence
  Description of Artificial Sequence: Synthetic oligonucleotide
aaaggacauacccucacuu

SEQ ID NO: 1788958 - RNA, 19 nt, Artificial Sequence
  Description of Artificial Sequence: Synthetic oligonucleotide
agauaauauuggcggaguc

SEQ ID NO: 1788959 - RNA, 19 nt, Artificial Sequence
  Description of Artificial Sequence: Synthetic oligonucleotide
ucuuaugcagaguguagcu

SEQ ID NO: 1788960 - RNA, 19 nt, Artificial Sequence
  Description of Artificial Sequence: Synthetic oligonucleotide
uauuagguaggaucuuaug

SEQ ID NO: 1788961 - RNA, 19 nt, Artificial Sequence
  Description of Artificial Sequence: Synthetic oligonucleotide
cauaguuucuugauggaca

SEQ ID NO: 1788962 - RNA, 19 nt, Artificial Sequence
  Description of Artificial Sequence: Synthetic oligonucleotide
auggaccuugaccaacacc

SEQ ID NO: 1788963 - RNA, 19 nt, Artificial Sequence
  Description of Artificial Sequence: Synthetic oligonucleotide
ucugucaauccucccagga

SEQ ID NO: 1788964 - RNA, 19 nt, Artificial Sequence
  Description of Artificial Sequence: Synthetic oligonucleotide
agcaacucggcaauugggc

SEQ ID NO: 1788965 - RNA, 19 nt, Artificial Sequence
  Description of Artificial Sequence: Synthetic oligonucleotide
cugaguaacguggacacgc

SEQ ID NO: 1788966 - RNA, 19 nt, Artificial Sequence
  Description of Artificial Sequence: Synthetic oligonucleotide
uguaccaguucagagccag

SEQ ID NO: 1788967 - RNA, 19 nt, Artificial Sequence
  Description of Artificial Sequence: Synthetic oligonucleotide
gacacgaauaaagguacag

SEQ ID NO: 1788968 - RNA, 19 nt, Artificial Sequence
  Description of Artificial Sequence: Synthetic oligonucleotide
gagacacgaauaaagguac

SEQ ID NO: 1788969 - RNA, 19 nt, Artificial Sequence
  Description of Artificial Sequence: Synthetic oligonucleotide
uucagggugcuucaccggc

SEQ ID NO: 1788970 - RNA, 19 nt, Artificial Sequence
  Description of Artificial Sequence: Synthetic oligonucleotide
cauccuagccccuuccccg

SEQ ID NO: 1788971 - RNA, 19 nt, Artificial Sequence
  Description of Artificial Sequence: Synthetic oligonucleotide
aguccguaugaugagcuac

SEQ ID NO: 1788972 - RNA, 19 nt, Artificial Sequence
  Description of Artificial Sequence: Synthetic oligonucleotide
acagauaauauuggcggag

SEQ ID NO: 1788973 - RNA, 19 nt, Artificial Sequence
  Description of Artificial Sequence: Synthetic oligonucleotide
uggagcauguucucgugcc

SEQ ID NO: 1788974 - RNA, 19 nt, Artificial Sequence
  Description of Artificial Sequence: Synthetic oligonucleotide
aucauuagugacaccagag

SEQ ID NO: 1788975 - RNA, 19 nt, Artificial Sequence
  Description of Artificial Sequence: Synthetic oligonucleotide
uuauuagguaggaucuuau

SEQ ID NO: 1788976 - RNA, 19 nt, Artificial Sequence
  Description of Artificial Sequence: Synthetic oligonucleotide
augacgaacagcucccuca

SEQ ID NO: 1788977 - RNA, 19 nt, Artificial Sequence
  Description of Artificial Sequence: Synthetic oligonucleotide
ugagcuacagcgcgggcca

SEQ ID NO: 1788978 - RNA, 19 nt, Artificial Sequence
  Description of Artificial Sequence: Synthetic oligonucleotide
ucauaaguugagucuggca

SEQ ID NO: 1788979 - RNA, 19 nt, Artificial Sequence
  Description of Artificial Sequence: Synthetic oligonucleotide
agcugucauuccuuagagc

SEQ ID NO: 1788980 - RNA, 19 nt, Artificial Sequence
  Description of Artificial Sequence: Synthetic oligonucleotide
uucaccggcagcucgauua

SEQ ID NO: 1788981 - RNA, 19 nt, Artificial Sequence
  Description of Artificial Sequence: Synthetic oligonucleotide
cgaauaaagguacaguccg

SEQ ID NO: 1788982 - RNA, 19 nt, Artificial Sequence
  Description of Artificial Sequence: Synthetic oligonucleotide
caaucaucucauaaguuga

SEQ ID NO: 1788983 - RNA, 19 nt, Artificial Sequence
  Description of Artificial Sequence: Synthetic oligonucleotide
aucucauaaguugagucug

SEQ ID NO: 1788984 - RNA, 19 nt, Artificial Sequence
  Description of Artificial Sequence: Synthetic oligonucleotide
agccaugauaaccuugaug

SEQ ID NO: 1788985 - RNA, 19 nt, Artificial Sequence
  Description of Artificial Sequence: Synthetic oligonucleotide
acgaacagcucccucacca

SEQ ID NO: 1788986 - RNA, 19 nt, Artificial Sequence
  Description of Artificial Sequence: Synthetic oligonucleotide
uuccuuagagcaacucggc

SEQ ID NO: 1788987 - RNA, 19 nt, Artificial Sequence
  Description of Artificial Sequence: Synthetic oligonucleotide
gauaaccuugauguucuug

SEQ ID NO: 1788988 - RNA, 19 nt, Artificial Sequence
  Description of Artificial Sequence: Synthetic oligonucleotide
ugucauuccuuagagcaac

SEQ ID NO: 1788989 - RNA, 19 nt, Artificial Sequence
  Description of Artificial Sequence: Synthetic oligonucleotide
cagaguguagcugucauuc

SEQ ID NO: 1788990 - RNA, 19 nt, Artificial Sequence
  Description of Artificial Sequence: Synthetic oligonucleotide
gaucuuaugcagaguguag

SEQ ID NO: 1788991 - RNA, 19 nt, Artificial Sequence
  Description of Artificial Sequence: Synthetic oligonucleotide
uaccaguucagagccagag

SEQ ID NO: 1788992 - RNA, 19 nt, Artificial Sequence
  Description of Artificial Sequence: Synthetic oligonucleotide
uuugcaugaccuuggccac

SEQ ID NO: 1788993 - RNA, 19 nt, Artificial Sequence
  Description of Artificial Sequence: Synthetic oligonucleotide
agagacacgaauaaaggua

SEQ ID NO: 1788994 - RNA, 19 nt, Artificial Sequence
  Description of Artificial Sequence: Synthetic oligonucleotide
uugcauuuagcucguuccu

SEQ ID NO: 1788995 - RNA, 19 nt, Artificial Sequence
  Description of Artificial Sequence: Synthetic oligonucleotide
ugaguaacguggacacgcc

SEQ ID NO: 1788996 - RNA, 19 nt, Artificial Sequence
  Description of Artificial Sequence: Synthetic oligonucleotide
uggcucuuaucauuuacaa

SEQ ID NO: 1788997 - RNA, 19 nt, Artificial Sequence
  Description of Artificial Sequence: Synthetic oligonucleotide
agcucgauuacuucuuuaa

SEQ ID NO: 1788998 - RNA, 19 nt, Artificial Sequence
  Description of Artificial Sequence: Synthetic oligonucleotide
auggagucgaucucgucca

SEQ ID NO: 1788999 - RNA, 19 nt, Artificial Sequence
  Description of Artificial Sequence: Synthetic oligonucleotide
auauuggcggaguccacug

SEQ ID NO: 1789000 - RNA, 19 nt, Artificial Sequence
  Description of Artificial Sequence: Synthetic oligonucleotide
guagcugucauuccuuaga

SEQ ID NO: 1789001 - RNA, 19 nt, Artificial Sequence
  Description of Artificial Sequence: Synthetic oligonucleotide
gguacaguccguaugauga

SEQ ID NO: 1789002 - RNA, 19 nt, Artificial Sequence
  Description of Artificial Sequence: Synthetic oligonucleotide
caacaaauuugcccucagg

SEQ ID NO: 1789003 - RNA, 19 nt, Artificial Sequence
  Description of Artificial Sequence: Synthetic oligonucleotide
gaguaacguggacacgccg

SEQ ID NO: 1789004 - RNA, 19 nt, Artificial Sequence
  Description of Artificial Sequence: Synthetic oligonucleotide
aacucggcaauugggcguc

SEQ ID NO: 1789005 - RNA, 19 nt, Artificial Sequence
  Description of Artificial Sequence: Synthetic oligonucleotide
auuagugacaccagagggu

SEQ ID NO: 1789006 - RNA, 19 nt, Artificial Sequence
  Description of Artificial Sequence: Synthetic oligonucleotide
aauugggcgucacaucauu

SEQ ID NO: 1789007 - RNA, 19 nt, Artificial Sequence
  Description of Artificial Sequence: Synthetic oligonucleotide
uggauggagcauguucucg

SEQ ID NO: 1789008 - RNA, 19 nt, Artificial Sequence
  Description of Artificial Sequence: Synthetic oligonucleotide
cauggugcgcugcaccucg

SEQ ID NO: 1789009 - RNA, 19 nt, Artificial Sequence
  Description of Artificial Sequence: Synthetic oligonucleotide
gacagauaauauuggcgga

SEQ ID NO: 1789010 - RNA, 19 nt, Artificial Sequence
  Description of Artificial Sequence: Synthetic oligonucleotide
aaaguccuccugaguaacg

SEQ ID NO: 1789011 - RNA, 19 nt, Artificial Sequence
  Description of Artificial Sequence: Synthetic oligonucleotide
caacauaggagcccuguuc

SEQ ID NO: 1789012 - RNA, 19 nt, Artificial Sequence
  Description of Artificial Sequence: Synthetic oligonucleotide
accauccuagccccuuccc

SEQ ID NO: 1789013 - RNA, 19 nt, Artificial Sequence
  Description of Artificial Sequence: Synthetic oligonucleotide
aguaggcgaacuuuugcau

SEQ ID NO: 1789014 - RNA, 19 nt, Artificial Sequence
  Description of Artificial Sequence: Synthetic oligonucleotide
uccauaguuucuugaugga

SEQ ID NO: 1789015 - RNA, 19 nt, Artificial Sequence
  Description of Artificial Sequence: Synthetic oligonucleotide
ugacgaacagcucccucac

SEQ ID NO: 1789016 - RNA, 19 nt, Artificial Sequence
  Description of Artificial Sequence: Synthetic oligonucleotide
aagcacucccuuuggcugu

SEQ ID NO: 1789017 - RNA, 19 nt, Artificial Sequence
  Description of Artificial Sequence: Synthetic oligonucleotide
gccagagacacgaauaaag

SEQ ID NO: 1789018 - RNA, 19 nt, Artificial Sequence
  Description of Artificial Sequence: Synthetic oligonucleotide
auuuagcucguuccucugu

SEQ ID NO: 1789019 - RNA, 19 nt, Artificial Sequence
  Description of Artificial Sequence: Synthetic oligonucleotide
agguacaguccguaugaug

SEQ ID NO: 1789020 - RNA, 19 nt, Artificial Sequence
  Description of Artificial Sequence: Synthetic oligonucleotide
uauuggcggaguccacugc

SEQ ID NO: 1789021 - RNA, 19 nt, Artificial Sequence
  Description of Artificial Sequence: Synthetic oligonucleotide
cccgauaaauuucuguacc

SEQ ID NO: 1789022 - RNA, 19 nt, Artificial Sequence
  Description of Artificial Sequence: Synthetic oligonucleotide
uagagcaacucggcaauug

SEQ ID NO: 1789023 - RNA, 19 nt, Artificial Sequence
  Description of Artificial Sequence: Synthetic oligonucleotide
uuucuuauccauggcccga

SEQ ID NO: 1789024 - RNA, 19 nt, Artificial Sequence
  Description of Artificial Sequence: Synthetic oligonucleotide
acacgaauaaagguacagu

SEQ ID NO: 1789025 - RNA, 19 nt, Artificial Sequence
  Description of Artificial Sequence: Synthetic oligonucleotide
uacaguccguaugaugagc

SEQ ID NO: 1789026 - RNA, 19 nt, Artificial Sequence
  Description of Artificial Sequence: Synthetic oligonucleotide
gcaacucggcaauugggcg

SEQ ID NO: 1789027 - RNA, 19 nt, Artificial Sequence
  Description of Artificial Sequence: Synthetic oligonucleotide
aggauggaccuugaccaac

SEQ ID NO: 1789028 - RNA, 19 nt, Artificial Sequence
  Description of Artificial Sequence: Synthetic oligonucleotide
uaggcgaacuuuugcauuu

SEQ ID NO: 1789029 - RNA, 19 nt, Artificial Sequence
  Description of Artificial Sequence: Synthetic oligonucleotide
gcaauugggcgucacauca

SEQ ID NO: 1789030 - RNA, 19 nt, Artificial Sequence
  Description of Artificial Sequence: Synthetic oligonucleotide
guacaguccguaugaugag

SEQ ID NO: 1789031 - RNA, 19 nt, Artificial Sequence
  Description of Artificial Sequence: Synthetic oligonucleotide
cugucaauccucccaggac

SEQ ID NO: 1789032 - RNA, 19 nt, Artificial Sequence
  Description of Artificial Sequence: Synthetic oligonucleotide
guaugaugagcuacagcgc

SEQ ID NO: 1789033 - RNA, 19 nt, Artificial Sequence
  Description of Artificial Sequence: Synthetic oligonucleotide
uaugcagaguguagcuguc

SEQ ID NO: 1789034 - RNA, 19 nt, Artificial Sequence
  Description of Artificial Sequence: Synthetic oligonucleotide
caucaagcgccaucuuccc

SEQ ID NO: 1789035 - RNA, 19 nt, Artificial Sequence
  Description of Artificial Sequence: Synthetic oligonucleotide
aguaacguggacacgccgu

SEQ ID NO: 1789036 - RNA, 19 nt, Artificial Sequence
  Description of Artificial Sequence: Synthetic oligonucleotide
uccaccuuauuagguagga

SEQ ID NO: 1789037 - RNA, 19 nt, Artificial Sequence
  Description of Artificial Sequence: Synthetic oligonucleotide
uccaacauaggagcccugu

SEQ ID NO: 1789038 - RNA, 19 nt, Artificial Sequence
  Description of Artificial Sequence: Synthetic oligonucleotide
caguaggcgaacuuuugca

SEQ ID NO: 1789039 - RNA, 19 nt, Artificial Sequence
  Description of Artificial Sequence: Synthetic oligonucleotide
uccgagaguggauuuucaa

SEQ ID NO: 1789040 - RNA, 19 nt, Artificial Sequence
  Description of Artificial Sequence: Synthetic oligonucleotide
uacagcgcgggccaacaau

SEQ ID NO: 1789041 - RNA, 19 nt, Artificial Sequence
  Description of Artificial Sequence: Synthetic oligonucleotide
agauucuggcucuuaucau

SEQ ID NO: 1789042 - RNA, 19 nt, Artificial Sequence
  Description of Artificial Sequence: Synthetic oligonucleotide
aguagccaugauaaccuug

SEQ ID NO: 1789043 - RNA, 19 nt, Artificial Sequence
  Description of Artificial Sequence: Synthetic oligonucleotide
caucucauaaguugagucu

SEQ ID NO: 1789044 - RNA, 19 nt, Artificial Sequence
  Description of Artificial Sequence: Synthetic oligonucleotide
gagccagagacacgaauaa

SEQ ID NO: 1789045 - RNA, 19 nt, Artificial Sequence
  Description of Artificial Sequence: Synthetic oligonucleotide
cuggcucuuaucauuuaca

SEQ ID NO: 1789046 - RNA, 19 nt, Artificial Sequence
  Description of Artificial Sequence: Synthetic oligonucleotide
aguugagucuggcaccuuu

SEQ ID NO: 1789047 - RNA, 19 nt, Artificial Sequence
  Description of Artificial Sequence: Synthetic oligonucleotide
uccguaugaugagcuacag

SEQ ID NO: 1789048 - RNA, 19 nt, Artificial Sequence
  Description of Artificial Sequence: Synthetic oligonucleotide
ucaaagaguucagggugcu

SEQ ID NO: 1789049 - RNA, 19 nt, Artificial Sequence
  Description of Artificial Sequence: Synthetic oligonucleotide
auacaugccggccucugua

SEQ ID NO: 1789050 - RNA, 19 nt, Artificial Sequence
  Description of Artificial Sequence: Synthetic oligonucleotide
ugggcgucacaucauugau

SEQ ID NO: 1789051 - RNA, 19 nt, Artificial Sequence
  Description of Artificial Sequence: Synthetic oligonucleotide
guugauuccccuggucaag

SEQ ID NO: 1789052 - RNA, 19 nt, Artificial Sequence
  Description of Artificial Sequence: Synthetic oligonucleotide
ugcauuuagcucguuccuc

SEQ ID NO: 1789053 - RNA, 19 nt, Artificial Sequence
  Description of Artificial Sequence: Synthetic oligonucleotide
uggcccgaacuacuucucc

SEQ ID NO: 1789054 - RNA, 19 nt, Artificial Sequence
  Description of Artificial Sequence: Synthetic oligonucleotide
cauuuagcucguuccucug

SEQ ID NO: 1789055 - RNA, 19 nt, Artificial Sequence
  Description of Artificial Sequence: Synthetic oligonucleotide
agcgcgggccaacaauguc

SEQ ID NO: 1789056 - RNA, 19 nt, Artificial Sequence
  Description of Artificial Sequence: Synthetic oligonucleotide
gacacgccguucucgcaag

SEQ ID NO: 1789057 - RNA, 19 nt, Artificial Sequence
  Description of Artificial Sequence: Synthetic oligonucleotide
uguccuuuugcaugaccuu

SEQ ID NO: 1789058 - RNA, 19 nt, Artificial Sequence
  Description of Artificial Sequence: Synthetic oligonucleotide
ucggcaauugggcgucaca

SEQ ID NO: 1789059 - RNA, 19 nt, Artificial Sequence
  Description of Artificial Sequence: Synthetic oligonucleotide
auuuuccgagaguggauuu

SEQ ID NO: 1789060 - RNA, 19 nt, Artificial Sequence
  Description of Artificial Sequence: Synthetic oligonucleotide
gugcuucaccggcagcucg

SEQ ID NO: 1789061 - RNA, 19 nt, Artificial Sequence
  Description of Artificial Sequence: Synthetic oligonucleotide
gcaguaggcgaacuuuugc

SEQ ID NO: 1789062 - RNA, 19 nt, Artificial Sequence
  Description of Artificial Sequence: Synthetic oligonucleotide
cagaagcacucccuuuggc

SEQ ID NO: 1789063 - RNA, 19 nt, Artificial Sequence
  Description of Artificial Sequence: Synthetic oligonucleotide
uucucgugccaugacgaac

SEQ ID NO: 1789064 - RNA, 19 nt, Artificial Sequence
  Description of Artificial Sequence: Synthetic oligonucleotide
acaguccguaugaugagcu

SEQ ID NO: 1789065 - RNA, 19 nt, Artificial Sequence
  Description of Artificial Sequence: Synthetic oligonucleotide
uugauuccccuggucaagu

SEQ ID NO: 1789066 - RNA, 19 nt, Artificial Sequence
  Description of Artificial Sequence: Synthetic oligonucleotide
caugccggccucuguacac

SEQ ID NO: 1789067 - RNA, 19 nt, Artificial Sequence
  Description of Artificial Sequence: Synthetic oligonucleotide
aguccacugccugccuucc

SEQ ID NO: 1789068 - RNA, 19 nt, Artificial Sequence
  Description of Artificial Sequence: Synthetic oligonucleotide
ucauuccuuagagcaacuc

SEQ ID NO: 1789069 - RNA, 19 nt, Artificial Sequence
  Description of Artificial Sequence: Synthetic oligonucleotide
uccaaccucgaggagccga

SEQ ID NO: 1789070 - RNA, 19 nt, Artificial Sequence
  Description of Artificial Sequence: Synthetic oligonucleotide
agagccagagacacgaaua

SEQ ID NO: 1789071 - RNA, 19 nt, Artificial Sequence
  Description of Artificial Sequence: Synthetic oligonucleotide
ucaccggcagcucgauuac

SEQ ID NO: 1789072 - RNA, 19 nt, Artificial Sequence
  Description of Artificial Sequence: Synthetic oligonucleotide
cagggcggaguccaggaug

SEQ ID NO: 1789073 - RNA, 19 nt, Artificial Sequence
  Description of Artificial Sequence: Synthetic oligonucleotide
caauccucccaggacgaag

SEQ ID NO: 1789074 - RNA, 19 nt, Artificial Sequence
  Description of Artificial Sequence: Synthetic oligonucleotide
gaugucgauccuguuagua

SEQ ID NO: 1789075 - RNA, 19 nt, Artificial Sequence
  Description of Artificial Sequence: Synthetic oligonucleotide
gaguccacugccugccuuc

SEQ ID NO: 1789076 - RNA, 19 nt, Artificial Sequence
  Description of Artificial Sequence: Synthetic oligonucleotide
cuuauuagguaggaucuua

SEQ ID NO: 1789077 - RNA, 19 nt, Artificial Sequence
  Description of Artificial Sequence: Synthetic oligonucleotide
cauguucucgugccaugac

SEQ ID NO: 1789078 - RNA, 19 nt, Artificial Sequence
  Description of Artificial Sequence: Synthetic oligonucleotide
uuggcggaguccacugccu

SEQ ID NO: 1789079 - RNA, 19 nt, Artificial Sequence
  Description of Artificial Sequence: Synthetic oligonucleotide
agcucguuccucugugccu

SEQ ID NO: 1789080 - RNA, 19 nt, Artificial Sequence
  Description of Artificial Sequence: Synthetic oligonucleotide
gucgauccuguuaguagcc

SEQ ID NO: 1789081 - RNA, 19 nt, Artificial Sequence
  Description of Artificial Sequence: Synthetic oligonucleotide
acagcgcgggccaacaaug

SEQ ID NO: 1789082 - RNA, 19 nt, Artificial Sequence
  Description of Artificial Sequence: Synthetic oligonucleotide
gaugagcuacagcgcgggc

SEQ ID NO: 1789083 - RNA, 19 nt, Artificial Sequence
  Description of Artificial Sequence: Synthetic oligonucleotide
cuguacacacacccuucac

SEQ ID NO: 1789084 - RNA, 19 nt, Artificial Sequence
  Description of Artificial Sequence: Synthetic oligonucleotide
uggcggaguccacugccug

SEQ ID NO: 1789085 - RNA, 19 nt, Artificial Sequence
  Description of Artificial Sequence: Synthetic oligonucleotide
uucuuauccauggcccgaa

SEQ ID NO: 1789086 - RNA, 19 nt, Artificial Sequence
  Description of Artificial Sequence: Synthetic oligonucleotide
auuugcccucaggauggac

SEQ ID NO: 1789087 - RNA, 19 nt, Artificial Sequence
  Description of Artificial Sequence: Synthetic oligonucleotide
ggcugugcaaugcccagug

SEQ ID NO: 1789088 - RNA, 19 nt, Artificial Sequence
  Description of Artificial Sequence: Synthetic oligonucleotide
gccgauggagucgaucucg

SEQ ID NO: 1789089 - RNA, 19 nt, Artificial Sequence
  Description of Artificial Sequence: Synthetic oligonucleotide
ucgauccuguuaguagcca

SEQ ID NO: 1789090 - RNA, 19 nt, Artificial Sequence
  Description of Artificial Sequence: Synthetic oligonucleotide
caugacgaacagcucccuc

SEQ ID NO: 1789091 - RNA, 19 nt, Artificial Sequence
  Description of Artificial Sequence: Synthetic oligonucleotide
ggagauucuggcucuuauc

SEQ ID NO: 1789092 - RNA, 19 nt, Artificial Sequence
  Description of Artificial Sequence: Synthetic oligonucleotide
acgaagcagggcggagucc

SEQ ID NO: 1789093 - RNA, 19 nt, Artificial Sequence
  Description of Artificial Sequence: Synthetic oligonucleotide
uccucauugggaggcggga

SEQ ID NO: 1789094 - RNA, 19 nt, Artificial Sequence
  Description of Artificial Sequence: Synthetic oligonucleotide
cagaggguccaccuuauua

SEQ ID NO: 1789095 - RNA, 19 nt, Artificial Sequence
  Description of Artificial Sequence: Synthetic oligonucleotide
cugcuccggcccaucaagc

SEQ ID NO: 1789096 - RNA, 19 nt, Artificial Sequence
  Description of Artificial Sequence: Synthetic oligonucleotide
ggcgaacuuuugcauuuag

SEQ ID NO: 1789097 - RNA, 19 nt, Artificial Sequence
  Description of Artificial Sequence: Synthetic oligonucleotide
ggagcccuguuccuguagc

SEQ ID NO: 1789098 - RNA, 19 nt, Artificial Sequence
  Description of Artificial Sequence: Synthetic oligonucleotide
cuccugaguaacguggaca

SEQ ID NO: 1789099 - RNA, 19 nt, Artificial Sequence
  Description of Artificial Sequence: Synthetic oligonucleotide
uccuguuaguagccaugau

SEQ ID NO: 1789100 - RNA, 19 nt, Artificial Sequence
  Description of Artificial Sequence: Synthetic oligonucleotide
acuuuugcauuuagcucgu

SEQ ID NO: 1789101 - RNA, 19 nt, Artificial Sequence
  Description of Artificial Sequence: Synthetic oligonucleotide
acucccuuuggcugugcaa

SEQ ID NO: 1789102 - RNA, 19 nt, Artificial Sequence
  Description of Artificial Sequence: Synthetic oligonucleotide
aagguacaguccguaugau

SEQ ID NO: 1789103 - RNA, 19 nt, Artificial Sequence
  Description of Artificial Sequence: Synthetic oligonucleotide
cuuccccgauaaauuucug

SEQ ID NO: 1789104 - RNA, 19 nt, Artificial Sequence
  Description of Artificial Sequence: Synthetic oligonucleotide
caguucagagccagagaca

SEQ ID NO: 1789105 - RNA, 19 nt, Artificial Sequence
  Description of Artificial Sequence: Synthetic oligonucleotide
cauggcccgaacuacuucu

SEQ ID NO: 1789106 - RNA, 19 nt, Artificial Sequence
  Description of Artificial Sequence: Synthetic oligonucleotide
ggcggaguccaggaugucg

SEQ ID NO: 1789107 - RNA, 19 nt, Artificial Sequence
  Description of Artificial Sequence: Synthetic oligonucleotide
agguaggaucuuaugcaga

SEQ ID NO: 1789108 - RNA, 19 nt, Artificial Sequence
  Description of Artificial Sequence: Synthetic oligonucleotide
gaggcgggaauucaauuuu

SEQ ID NO: 1789109 - RNA, 19 nt, Artificial Sequence
  Description of Artificial Sequence: Synthetic oligonucleotide
ccccgauaaauuucuguac

SEQ ID NO: 1789110 - RNA, 19 nt, Artificial Sequence
  Description of Artificial Sequence: Synthetic oligonucleotide
aguguagcugucauuccuu

SEQ ID NO: 1789111 - RNA, 19 nt, Artificial Sequence
  Description of Artificial Sequence: Synthetic oligonucleotide
gaauaaagguacaguccgu

SEQ ID NO: 1789112 - RNA, 19 nt, Artificial Sequence
  Description of Artificial Sequence: Synthetic oligonucleotide
aauuugcccucaggaugga

SEQ ID NO: 1789113 - RNA, 19 nt, Artificial Sequence
  Description of Artificial Sequence: Synthetic oligonucleotide
auccuagccccuuccccga

SEQ ID NO: 1789114 - RNA, 19 nt, Artificial Sequence
  Description of Artificial Sequence: Synthetic oligonucleotide
ccauaguuucuugauggac

SEQ ID NO: 1789115 - RNA, 19 nt, Artificial Sequence
  Description of Artificial Sequence: Synthetic oligonucleotide
cuuauccauggcccgaacu

SEQ ID NO: 1789116 - RNA, 19 nt, Artificial Sequence
  Description of Artificial Sequence: Synthetic oligonucleotide
agcuacagcgcgggccaac

SEQ ID NO: 1789117 - RNA, 19 nt, Artificial Sequence
  Description of Artificial Sequence: Synthetic oligonucleotide
uggacacgccguucucgca

SEQ ID NO: 1789118 - RNA, 19 nt, Artificial Sequence
  Description of Artificial Sequence: Synthetic oligonucleotide
accuugaccaacaccuuuu

SEQ ID NO: 1789119 - RNA, 19 nt, Artificial Sequence
  Description of Artificial Sequence: Synthetic oligonucleotide
guccguaugaugagcuaca

SEQ ID NO: 1789120 - RNA, 19 nt, Artificial Sequence
  Description of Artificial Sequence: Synthetic oligonucleotide
cauugggaggcgggaauuc

SEQ ID NO: 1789121 - RNA, 19 nt, Artificial Sequence
  Description of Artificial Sequence: Synthetic oligonucleotide
cgugccaugacgaacagcu

SEQ ID NO: 1789122 - RNA, 19 nt, Artificial Sequence
  Description of Artificial Sequence: Synthetic oligonucleotide
agggcggaguccaggaugu

SEQ ID NO: 1789123 - RNA, 19 nt, Artificial Sequence
  Description of Artificial Sequence: Synthetic oligonucleotide
agacacgaauaaagguaca

SEQ ID NO: 1789124 - RNA, 19 nt, Artificial Sequence
  Description of Artificial Sequence: Synthetic oligonucleotide
cucguccaugaagaugaug

SEQ ID NO: 1789125 - RNA, 19 nt, Artificial Sequence
  Description of Artificial Sequence: Synthetic oligonucleotide
ucgugccaugacgaacagc

SEQ ID NO: 1789126 - RNA, 19 nt, Artificial Sequence
  Description of Artificial Sequence: Synthetic oligonucleotide
auggcccgaacuacuucuc

SEQ ID NO: 1789127 - RNA, 19 nt, Artificial Sequence
  Description of Artificial Sequence: Synthetic oligonucleotide
ccauccuagccccuucccc

SEQ ID NO: 1789128 - RNA, 19 nt, Artificial Sequence
  Description of Artificial Sequence: Synthetic oligonucleotide
ggcaauugggcgucacauc

SEQ ID NO: 1789129 - RNA, 19 nt, Artificial Sequence
  Description of Artificial Sequence: Synthetic oligonucleotide
gugcaaugcccagugcuuc

SEQ ID NO: 1789130 - RNA, 19 nt, Artificial Sequence
  Description of Artificial Sequence: Synthetic oligonucleotide
auccauggcccgaacuacu

SEQ ID NO: 1789131 - RNA, 19 nt, Artificial Sequence
  Description of Artificial Sequence: Synthetic oligonucleotide
guaggcgaacuuuugcauu

SEQ ID NO: 1789132 - RNA, 19 nt, Artificial Sequence
  Description of Artificial Sequence: Synthetic oligonucleotide
cucuucccgcaguaggcga

SEQ ID NO: 1789133 - RNA, 19 nt, Artificial Sequence
  Description of Artificial Sequence: Synthetic oligonucleotide
ccggccucuguacacacac

SEQ ID NO: 1789134 - RNA, 19 nt, Artificial Sequence
  Description of Artificial Sequence: Synthetic oligonucleotide
ccguaugaugagcuacagc

SEQ ID NO: 1789135 - RNA, 19 nt, Artificial Sequence
  Description of Artificial Sequence: Synthetic oligonucleotide
ugccggccucuguacacac

SEQ ID NO: 1789136 - RNA, 19 nt, Artificial Sequence
  Description of Artificial Sequence: Synthetic oligonucleotide
gaccuugaccaacaccuuu

SEQ ID NO: 1789137 - RNA, 19 nt, Artificial Sequence
  Description of Artificial Sequence: Synthetic oligonucleotide
ucccgcaguaggcgaacuu

SEQ ID NO: 1789138 - RNA, 19 nt, Artificial Sequence
  Description of Artificial Sequence: Synthetic oligonucleotide
cuagccccuuccccgauaa

SEQ ID NO: 1789139 - RNA, 19 nt, Artificial Sequence
  Description of Artificial Sequence: Synthetic oligonucleotide
caacucggcaauugggcgu

SEQ ID NO: 1789140 - RNA, 19 nt, Artificial Sequence
  Description of Artificial Sequence: Synthetic oligonucleotide
agccagagacacgaauaaa

SEQ ID NO: 1789141 - RNA, 19 nt, Artificial Sequence
  Description of Artificial Sequence: Synthetic oligonucleotide
ggcggaguccacugccugc

SEQ ID NO: 1789142 - RNA, 19 nt, Artificial Sequence
  Description of Artificial Sequence: Synthetic oligonucleotide
caccaucauuagugacacc

SEQ ID NO: 1789143 - RNA, 19 nt, Artificial Sequence
  Description of Artificial Sequence: Synthetic oligonucleotide
guucucgugccaugacgaa

SEQ ID NO: 1789144 - RNA, 19 nt, Artificial Sequence
  Description of Artificial Sequence: Synthetic oligonucleotide
gggcgucacaucauugaug

SEQ ID NO: 1789145 - RNA, 19 nt, Artificial Sequence
  Description of Artificial Sequence: Synthetic oligonucleotide
cuucggagauucuggcucu

SEQ ID NO: 1789146 - RNA, 19 nt, Artificial Sequence
  Description of Artificial Sequence: Synthetic oligonucleotide
cagauaauauuggcggagu

SEQ ID NO: 1789147 - RNA, 19 nt, Artificial Sequence
  Description of Artificial Sequence: Synthetic oligonucleotide
cuccaacauaggagcccug

SEQ ID NO: 1789148 - RNA, 19 nt, Artificial Sequence
  Description of Artificial Sequence: Synthetic oligonucleotide
cuucccgcaguaggcgaac

SEQ ID NO: 1789149 - RNA, 19 nt, Artificial Sequence
  Description of Artificial Sequence: Synthetic oligonucleotide
ggacacgccguucucgcaa

SEQ ID NO: 1789150 - RNA, 19 nt, Artificial Sequence
  Description of Artificial Sequence: Synthetic oligonucleotide
ccgagaguggauuuucaaa

SEQ ID NO: 1789151 - RNA, 19 nt, Artificial Sequence
  Description of Artificial Sequence: Synthetic oligonucleotide
ccaacaaugucuucccagu

SEQ ID NO: 1789152 - RNA, 19 nt, Artificial Sequence
  Description of Artificial Sequence: Synthetic oligonucleotide
accggcagcucgauuacuu

SEQ ID NO: 1789153 - RNA, 19 nt, Artificial Sequence
  Description of Artificial Sequence: Synthetic oligonucleotide
guaacguggacacgccguu

SEQ ID NO: 1789154 - RNA, 19 nt, Artificial Sequence
  Description of Artificial Sequence: Synthetic oligonucleotide
ggaggcgggaauucaauuu

SEQ ID NO: 1789155 - RNA, 19 nt, Artificial Sequence
  Description of Artificial Sequence: Synthetic oligonucleotide
cauuuuccgagaguggauu

SEQ ID NO: 1789156 - RNA, 19 nt, Artificial Sequence
  Description of Artificial Sequence: Synthetic oligonucleotide
augccggccucuguacaca

SEQ ID NO: 1789157 - RNA, 19 nt, Artificial Sequence
  Description of Artificial Sequence: Synthetic oligonucleotide
ucggagauucuggcucuua

SEQ ID NO: 1789158 - RNA, 19 nt, Artificial Sequence
  Description of Artificial Sequence: Synthetic oligonucleotide
agcacucccuuuggcugug

SEQ ID NO: 1789159 - RNA, 19 nt, Artificial Sequence
  Description of Artificial Sequence: Synthetic oligonucleotide
caggauggaccuugaccaa

SEQ ID NO: 1789160 - RNA, 19 nt, Artificial Sequence
  Description of Artificial Sequence: Synthetic oligonucleotide
uucccgcaguaggcgaacu

SEQ ID NO: 1789161 - RNA, 19 nt, Artificial Sequence
  Description of Artificial Sequence: Synthetic oligonucleotide
uccuagccccuuccccgau

SEQ ID NO: 1789162 - RNA, 19 nt, Artificial Sequence
  Description of Artificial Sequence: Synthetic oligonucleotide
ggcucuuaucauuuacaau

SEQ ID NO: 1789163 - RNA, 19 nt, Artificial Sequence
  Description of Artificial Sequence: Synthetic oligonucleotide
cuguaccaguucagagcca

SEQ ID NO: 1789164 - RNA, 19 nt, Artificial Sequence
  Description of Artificial Sequence: Synthetic oligonucleotide
cccgaacuacuucuccaac

SEQ ID NO: 1789165 - RNA, 19 nt, Artificial Sequence
  Description of Artificial Sequence: Synthetic oligonucleotide
cucauugggaggcgggaau

SEQ ID NO: 1789166 - RNA, 19 nt, Artificial Sequence
  Description of Artificial Sequence: Synthetic oligonucleotide
gcggaguccaggaugucga

SEQ ID NO: 1789167 - RNA, 19 nt, Artificial Sequence
  Description of Artificial Sequence: Synthetic oligonucleotide
cagcucgauuacuucuuua

SEQ ID NO: 1789168 - RNA, 19 nt, Artificial Sequence
  Description of Artificial Sequence: Synthetic oligonucleotide
cucggcaauugggcgucac

SEQ ID NO: 1789169 - RNA, 19 nt, Artificial Sequence
  Description of Artificial Sequence: Synthetic oligonucleotide
cauacaugccggccucugu

SEQ ID NO: 1789170 - RNA, 19 nt, Artificial Sequence
  Description of Artificial Sequence: Synthetic oligonucleotide
gcccgaacuacuucuccaa

SEQ ID NO: 1789171 - RNA, 19 nt, Artificial Sequence
  Description of Artificial Sequence: Synthetic oligonucleotide
augauggauggagcauguu

SEQ ID NO: 1789172 - RNA, 19 nt, Artificial Sequence
  Description of Artificial Sequence: Synthetic oligonucleotide
cacucccuuuggcugugca

SEQ ID NO: 1789173 - RNA, 19 nt, Artificial Sequence
  Description of Artificial Sequence: Synthetic oligonucleotide
cguggacacgccguucucg

SEQ ID NO: 1789174 - RNA, 19 nt, Artificial Sequence
  Description of Artificial Sequence: Synthetic oligonucleotide
gcaucaauucagcaaucuu

SEQ ID NO: 1789175 - RNA, 19 nt, Artificial Sequence
  Description of Artificial Sequence: Synthetic oligonucleotide
cgcaguaggcgaacuuuug

SEQ ID NO: 1789176 - RNA, 19 nt, Artificial Sequence
  Description of Artificial Sequence: Synthetic oligonucleotide
cagagccagagacacgaau

SEQ ID NO: 1789177 - RNA, 19 nt, Artificial Sequence
  Description of Artificial Sequence: Synthetic oligonucleotide
ggagccgauggagucgauc

SEQ ID NO: 1789178 - RNA, 19 nt, Artificial Sequence
  Description of Artificial Sequence: Synthetic oligonucleotide
caaccucgaggagccgaug

SEQ ID NO: 1789179 - RNA, 19 nt, Artificial Sequence
  Description of Artificial Sequence: Synthetic oligonucleotide
gcucgauuacuucuuuaau

SEQ ID NO: 1789180 - RNA, 19 nt, Artificial Sequence
  Description of Artificial Sequence: Synthetic oligonucleotide
ccuccugaguaacguggac

SEQ ID NO: 1789181 - RNA, 19 nt, Artificial Sequence
  Description of Artificial Sequence: Synthetic oligonucleotide
uucggagauucuggcucuu

SEQ ID NO: 1789182 - RNA, 19 nt, Artificial Sequence
  Description of Artificial Sequence: Synthetic oligonucleotide
caguccguaugaugagcua

SEQ ID NO: 1789183 - RNA, 19 nt, Artificial Sequence
  Description of Artificial Sequence: Synthetic oligonucleotide
caauugggcgucacaucau

SEQ ID NO: 1789184 - RNA, 19 nt, Artificial Sequence
  Description of Artificial Sequence: Synthetic oligonucleotide
caggacgaagcagggcgga

SEQ ID NO: 1789185 - RNA, 19 nt, Artificial Sequence
  Description of Artificial Sequence: Synthetic oligonucleotide
ccggcagcucgauuacuuc

SEQ ID NO: 1789186 - RNA, 19 nt, Artificial Sequence
  Description of Artificial Sequence: Synthetic oligonucleotide
guugagucuggcaccuuuu

SEQ ID NO: 1789187 - RNA, 19 nt, Artificial Sequence
  Description of Artificial Sequence: Synthetic oligonucleotide
cuccaaccucgaggagccg

SEQ ID NO: 1789188 - RNA, 19 nt, Artificial Sequence
  Description of Artificial Sequence: Synthetic oligonucleotide
gugccaugacgaacagcuc

SEQ ID NO: 1789189 - RNA, 19 nt, Artificial Sequence
  Description of Artificial Sequence: Synthetic oligonucleotide
ggcccaucaagcgccaucu

SEQ ID NO: 1789190 - RNA, 19 nt, Artificial Sequence
  Description of Artificial Sequence: Synthetic oligonucleotide
gcuacagcgcgggccaaca

SEQ ID NO: 1789191 - RNA, 19 nt, Artificial Sequence
  Description of Artificial Sequence: Synthetic oligonucleotide
cuacagcgcgggccaacaa

SEQ ID NO: 1789192 - RNA, 19 nt, Artificial Sequence
  Description of Artificial Sequence: Synthetic oligonucleotide
caucauugaugucgauguu

SEQ ID NO: 1789193 - RNA, 19 nt, Artificial Sequence
  Description of Artificial Sequence: Synthetic oligonucleotide
ccguucucgcaaggcauac

SEQ ID NO: 1789194 - RNA, 19 nt, Artificial Sequence
  Description of Artificial Sequence: Synthetic oligonucleotide
gccuucggagauucuggcu

SEQ ID NO: 1789195 - RNA, 19 nt, Artificial Sequence
  Description of Artificial Sequence: Synthetic oligonucleotide
gcgcgggccaacaaugucu

SEQ ID NO: 1789196 - RNA, 19 nt, Artificial Sequence
  Description of Artificial Sequence: Synthetic oligonucleotide
gggaggcgggaauucaauu

SEQ ID NO: 1789197 - RNA, 19 nt, Artificial Sequence
  Description of Artificial Sequence: Synthetic oligonucleotide
cagcgcgggccaacaaugu

SEQ ID NO: 1789198 - RNA, 19 nt, Artificial Sequence
  Description of Artificial Sequence: Synthetic oligonucleotide
ugcccucaggauggaccuu

SEQ ID NO: 1789199 - RNA, 19 nt, Artificial Sequence
  Description of Artificial Sequence: Synthetic oligonucleotide
acucggcaauugggcguca

SEQ ID NO: 1789200 - RNA, 19 nt, Artificial Sequence
  Description of Artificial Sequence: Synthetic oligonucleotide
ggaugucgauccuguuagu

SEQ ID NO: 1789201 - RNA, 19 nt, Artificial Sequence
  Description of Artificial Sequence: Synthetic oligonucleotide
gcagcucgauuacuucuuu

SEQ ID NO: 1789202 - RNA, 19 nt, Artificial Sequence
  Description of Artificial Sequence: Synthetic oligonucleotide
gagcuacagcgcgggccaa

SEQ ID NO: 1789203 - RNA, 19 nt, Artificial Sequence
  Description of Artificial Sequence: Synthetic oligonucleotide
gccguucucgcaaggcaua

SEQ ID NO: 1789204 - RNA, 19 nt, Artificial Sequence
  Description of Artificial Sequence: Synthetic oligonucleotide
caaagaguucagggugcuu

SEQ ID NO: 1789205 - RNA, 19 nt, Artificial Sequence
  Description of Artificial Sequence: Synthetic oligonucleotide
cggcccaucaagcgccauc

SEQ ID NO: 1789206 - RNA, 19 nt, Artificial Sequence
  Description of Artificial Sequence: Synthetic oligonucleotide
ccaaccucgaggagccgau

SEQ ID NO: 1789207 - RNA, 19 nt, Artificial Sequence
  Description of Artificial Sequence: Synthetic oligonucleotide
cuucaccggcagcucgauu

SEQ ID NO: 1789208 - RNA, 19 nt, Artificial Sequence
  Description of Artificial Sequence: Synthetic oligonucleotide
ccgcaguaggcgaacuuuu

SEQ ID NO: 1789209 - RNA, 19 nt, Artificial Sequence
  Description of Artificial Sequence: Synthetic oligonucleotide
ccuuauuagguaggaucuu

SEQ ID NO: 1789210 - RNA, 19 nt, Artificial Sequence
  Description of Artificial Sequence: Synthetic oligonucleotide
gccggccucuguacacaca

SEQ ID NO: 1789211 - RNA, 19 nt, Artificial Sequence
  Description of Artificial Sequence: Synthetic oligonucleotide
cccgcaguaggcgaacuuu

SEQ ID NO: 1789212 - RNA, 19 nt, Artificial Sequence
  Description of Artificial Sequence: Synthetic oligonucleotide
caccggcagcucgauuacu

SEQ ID NO: 1789213 - RNA, 19 nt, Artificial Sequence
  Description of Artificial Sequence: Synthetic oligonucleotide
cggcaauugggcgucacau

SEQ ID NO: 1789214 - RNA, 19 nt, Artificial Sequence
  Description of Artificial Sequence: Synthetic oligonucleotide
ccuagccccuuccccgaua

SEQ ID NO: 1789215 - RNA, 19 nt, Artificial Sequence
  Description of Artificial Sequence: Synthetic oligonucleotide
cgaacagcucccucaccau

SEQ ID NO: 1789216 - RNA, 19 nt, Artificial Sequence
  Description of Artificial Sequence: Synthetic oligonucleotide
gggcggaguccaggauguc

SEQ ID NO: 1789217 - RNA, 19 nt, Artificial Sequence
  Description of Artificial Sequence: Synthetic oligonucleotide
gcuucaccggcagcucgau

SEQ ID NO: 1789218 - RNA, 19 nt, Artificial Sequence
  Description of Artificial Sequence: Synthetic oligonucleotide
ccaugacgaacagcucccu

SEQ ID NO: 1789219 - RNA, 19 nt, Artificial Sequence
  Description of Artificial Sequence: Synthetic oligonucleotide
cgcgggccaacaaugucuu

SEQ ID NO: 1789220 - RNA, 19 nt, Artificial Sequence
  Description of Artificial Sequence: Synthetic oligonucleotide
gcccaucaagcgccaucuu

SEQ ID NO: 1789221 - RNA, 19 nt, Artificial Sequence
  Description of Artificial Sequence: Synthetic oligonucleotide
ccggcccaucaagcgccau

SEQ ID NO: 1789222 - RNA, 19 nt, Artificial Sequence
  Description of Artificial Sequence: Synthetic oligonucleotide
uuuaaaucagaccacaccg

SEQ ID NO: 1789223 - RNA, 19 nt, Artificial Sequence
  Description of Artificial Sequence: Synthetic oligonucleotide
aaugcaaauaaugaauugc

SEQ ID NO: 1789224 - RNA, 19 nt, Artificial Sequence
  Description of Artificial Sequence: Synthetic oligonucleotide
aaucagaccacaccgagcg

SEQ ID NO: 1789225 - RNA, 19 nt, Artificial Sequence
  Description of Artificial Sequence: Synthetic oligonucleotide
gaaaacauuucuuaccucg

SEQ ID NO: 1789226 - RNA, 19 nt, Artificial Sequence
  Description of Artificial Sequence: Synthetic oligonucleotide
auuucuuaccucgagaacc

SEQ ID NO: 1789227 - RNA, 19 nt, Artificial Sequence
  Description of Artificial Sequence: Synthetic oligonucleotide
ucuuaaaucuuaaugaaau

SEQ ID NO: 1789228 - RNA, 19 nt, Artificial Sequence
  Description of Artificial Sequence: Synthetic oligonucleotide
aagagggacauucagacca

SEQ ID NO: 1789229 - RNA, 19 nt, Artificial Sequence
  Description of Artificial Sequence: Synthetic oligonucleotide
uauuguauggccuucauau

SEQ ID NO: 1789230 - RNA, 19 nt, Artificial Sequence
  Description of Artificial Sequence: Synthetic oligonucleotide
uauaguucuauauaaugca

SEQ ID NO: 1789231 - RNA, 19 nt, Artificial Sequence
  Description of Artificial Sequence: Synthetic oligonucleotide
cuuaaugccaaugaggcgg

SEQ ID NO: 1789232 - RNA, 19 nt, Artificial Sequence
  Description of Artificial Sequence: Synthetic oligonucleotide
aauaucaugguauauugua

SEQ ID NO: 1789233 - RNA, 19 nt, Artificial Sequence
  Description of Artificial Sequence: Synthetic oligonucleotide
aucuuaaugaaauaucaug

SEQ ID NO: 1789234 - RNA, 19 nt, Artificial Sequence
  Description of Artificial Sequence: Synthetic oligonucleotide
aaugaucugucccuuguuc

SEQ ID NO: 1789235 - RNA, 19 nt, Artificial Sequence
  Description of Artificial Sequence: Synthetic oligonucleotide
ucugcagucaguuugguga

SEQ ID NO: 1789236 - RNA, 19 nt, Artificial Sequence
  Description of Artificial Sequence: Synthetic oligonucleotide
ucauauugaaaacauuucu

SEQ ID NO: 1789237 - RNA, 19 nt, Artificial Sequence
  Description of Artificial Sequence: Synthetic oligonucleotide
uuguauggccuucauauag

SEQ ID NO: 1789238 - RNA, 19 nt, Artificial Sequence
  Description of Artificial Sequence: Synthetic oligonucleotide
ucccguuuaacuuuaaucu

SEQ ID NO: 1789239 - RNA, 19 nt, Artificial Sequence
  Description of Artificial Sequence: Synthetic oligonucleotide
ugagcauguucauagaccc

SEQ ID NO: 1789240 - RNA, 19 nt, Artificial Sequence
  Description of Artificial Sequence: Synthetic oligonucleotide
acaaccaggacacggaccg

SEQ ID NO: 1789241 - RNA, 19 nt, Artificial Sequence
  Description of Artificial Sequence: Synthetic oligonucleotide
uuuacuucuugccagucca

SEQ ID NO: 1789242 - RNA, 19 nt, Artificial Sequence
  Description of Artificial Sequence: Synthetic oligonucleotide
aaguccacggaagaggccc

SEQ ID NO: 1789243 - RNA, 19 nt, Artificial Sequence
  Description of Artificial Sequence: Synthetic oligonucleotide
caugguauauuguauggcc

SEQ ID NO: 1789244 - RNA, 19 nt, Artificial Sequence
  Description of Artificial Sequence: Synthetic oligonucleotide
auggagacccuucuuaucg

SEQ ID NO: 1789245 - RNA, 19 nt, Artificial Sequence
  Description of Artificial Sequence: Synthetic oligonucleotide
uccuuaaagcaucugcccg

SEQ ID NO: 1789246 - RNA, 19 nt, Artificial Sequence
  Description of Artificial Sequence: Synthetic oligonucleotide
cuuuaaaucagaccacacc

SEQ ID NO: 1789247 - RNA, 19 nt, Artificial Sequence
  Description of Artificial Sequence: Synthetic oligonucleotide
uaaaucagaccacaccgag

SEQ ID NO: 1789248 - RNA, 19 nt, Artificial Sequence
  Description of Artificial Sequence: Synthetic oligonucleotide
gaccuuggcauacauaucc

SEQ ID NO: 1789249 - RNA, 19 nt, Artificial Sequence
  Description of Artificial Sequence: Synthetic oligonucleotide
uauugaaaacauuucuuac

SEQ ID NO: 1789250 - RNA, 19 nt, Artificial Sequence
  Description of Artificial Sequence: Synthetic oligonucleotide
uuaaugaaauaucauggua

SEQ ID NO: 1789251 - RNA, 19 nt, Artificial Sequence
  Description of Artificial Sequence: Synthetic oligonucleotide
aucaugguauauuguaugg

SEQ ID NO: 1789252 - RNA, 19 nt, Artificial Sequence
  Description of Artificial Sequence: Synthetic oligonucleotide
uaucaugguauauuguaug

SEQ ID NO: 1789253 - RNA, 19 nt, Artificial Sequence
  Description of Artificial Sequence: Synthetic oligonucleotide
aauacugacaccuccccau

SEQ ID NO: 1789254 - RNA, 19 nt, Artificial Sequence
  Description of Artificial Sequence: Synthetic oligonucleotide
gaucaugucagccuccacc

SEQ ID NO: 1789255 - RNA, 19 nt, Artificial Sequence
  Description of Artificial Sequence: Synthetic oligonucleotide
guaagagggacauucagac

SEQ ID NO: 1789256 - RNA, 19 nt, Artificial Sequence
  Description of Artificial Sequence: Synthetic oligonucleotide
cuuccuuaaagcaucugcc

SEQ ID NO: 1789257 - RNA, 19 nt, Artificial Sequence
  Description of Artificial Sequence: Synthetic oligonucleotide
aaaaccugcagcuccauuu

SEQ ID NO: 1789258 - RNA, 19 nt, Artificial Sequence
  Description of Artificial Sequence: Synthetic oligonucleotide
gugauaauggcccuguggc

SEQ ID NO: 1789259 - RNA, 19 nt, Artificial Sequence
  Description of Artificial Sequence: Synthetic oligonucleotide
aucggcuagauguuggugg

SEQ ID NO: 1789260 - RNA, 19 nt, Artificial Sequence
  Description of Artificial Sequence: Synthetic oligonucleotide
uauccuuaaugccaaugag

SEQ ID NO: 1789261 - RNA, 19 nt, Artificial Sequence
  Description of Artificial Sequence: Synthetic oligonucleotide
uguaagagggacauucaga

SEQ ID NO: 1789262 - RNA, 19 nt, Artificial Sequence
  Description of Artificial Sequence: Synthetic oligonucleotide
aacgcauggcucaagcugc

SEQ ID NO: 1789263 - RNA, 19 nt, Artificial Sequence
  Description of Artificial Sequence: Synthetic oligonucleotide
uaaagcaucugcccgguca

SEQ ID NO: 1789264 - RNA, 19 nt, Artificial Sequence
  Description of Artificial Sequence: Synthetic oligonucleotide
gucaguuuggugaagaagc

SEQ ID NO: 1789265 - RNA, 19 nt, Artificial Sequence
  Description of Artificial Sequence: Synthetic oligonucleotide
ucuauauaaugcaaauaau

SEQ ID NO: 1789266 - RNA, 19 nt, Artificial Sequence
  Description of Artificial Sequence: Synthetic oligonucleotide
cuucuuaucggcuagaugu

SEQ ID NO: 1789267 - RNA, 19 nt, Artificial Sequence
  Description of Artificial Sequence: Synthetic oligonucleotide
aaagagccguagcugagag

SEQ ID NO: 1789268 - RNA, 19 nt, Artificial Sequence
  Description of Artificial Sequence: Synthetic oligonucleotide
cauauguuucuccauuggg

SEQ ID NO: 1789269 - RNA, 19 nt, Artificial Sequence
  Description of Artificial Sequence: Synthetic oligonucleotide
gaucucuuuaaaucagacc

SEQ ID NO: 1789270 - RNA, 19 nt, Artificial Sequence
  Description of Artificial Sequence: Synthetic oligonucleotide
uuaaaucagaccacaccga

SEQ ID NO: 1789271 - RNA, 19 nt, Artificial Sequence
  Description of Artificial Sequence: Synthetic oligonucleotide
aaagcaucugcccggucag

SEQ ID NO: 1789272 - RNA, 19 nt, Artificial Sequence
  Description of Artificial Sequence: Synthetic oligonucleotide
uuucuuaccucgagaaccc

SEQ ID NO: 1789273 - RNA, 19 nt, Artificial Sequence
  Description of Artificial Sequence: Synthetic oligonucleotide
cuuaccucgagaacccugg

SEQ ID NO: 1789274 - RNA, 19 nt, Artificial Sequence
  Description of Artificial Sequence: Synthetic oligonucleotide
uuuagagggagcugccuag

SEQ ID NO: 1789275 - RNA, 19 nt, Artificial Sequence
  Description of Artificial Sequence: Synthetic oligonucleotide
ugccaguccaguuuaaugu

SEQ ID NO: 1789276 - RNA, 19 nt, Artificial Sequence
  Description of Artificial Sequence: Synthetic oligonucleotide
cuuaucggcuagauguugg

SEQ ID NO: 1789277 - RNA, 19 nt, Artificial Sequence
  Description of Artificial Sequence: Synthetic oligonucleotide
aaauaaugaauugcucugu

SEQ ID NO: 1789278 - RNA, 19 nt, Artificial Sequence
  Description of Artificial Sequence: Synthetic oligonucleotide
aucugcguccucuuaaauc

SEQ ID NO: 1789279 - RNA, 19 nt, Artificial Sequence
  Description of Artificial Sequence: Synthetic oligonucleotide
uuccuggugagcaagucca

SEQ ID NO: 1789280 - RNA, 19 nt, Artificial Sequence
  Description of Artificial Sequence: Synthetic oligonucleotide
auguugguggguuuccugg

SEQ ID NO: 1789281 - RNA, 19 nt, Artificial Sequence
  Description of Artificial Sequence: Synthetic oligonucleotide
ugaaauaucaugguauauu

SEQ ID NO: 1789282 - RNA, 19 nt, Artificial Sequence
  Description of Artificial Sequence: Synthetic oligonucleotide
ugguuccuuacuuaaggcc

SEQ ID NO: 1789283 - RNA, 19 nt, Artificial Sequence
  Description of Artificial Sequence: Synthetic oligonucleotide
acauuucuuaccucgagaa

SEQ ID NO: 1789284 - RNA, 19 nt, Artificial Sequence
  Description of Artificial Sequence: Synthetic oligonucleotide
uacauauccuuaaugccaa

SEQ ID NO: 1789285 - RNA, 19 nt, Artificial Sequence
  Description of Artificial Sequence: Synthetic oligonucleotide
uccaguuuaaugucaggga

SEQ ID NO: 1789286 - RNA, 19 nt, Artificial Sequence
  Description of Artificial Sequence: Synthetic oligonucleotide
uuuguaagagggacauuca

SEQ ID NO: 1789287 - RNA, 19 nt, Artificial Sequence
  Description of Artificial Sequence: Synthetic oligonucleotide
acaccgagcgcuucauucc

SEQ ID NO: 1789288 - RNA, 19 nt, Artificial Sequence
  Description of Artificial Sequence: Synthetic oligonucleotide
auacauauccuuaaugcca

SEQ ID NO: 1789289 - RNA, 19 nt, Artificial Sequence
  Description of Artificial Sequence: Synthetic oligonucleotide
ucuuuaaaucagaccacac

SEQ ID NO: 1789290 - RNA, 19 nt, Artificial Sequence
  Description of Artificial Sequence: Synthetic oligonucleotide
uuccccacaacaaccagga

SEQ ID NO: 1789291 - RNA, 19 nt, Artificial Sequence
  Description of Artificial Sequence: Synthetic oligonucleotide
cuggguuguuucuucaucc

SEQ ID NO: 1789292 - RNA, 19 nt, Artificial Sequence
  Description of Artificial Sequence: Synthetic oligonucleotide
accagaacgcccuucacca

SEQ ID NO: 1789293 - RNA, 19 nt, Artificial Sequence
  Description of Artificial Sequence: Synthetic oligonucleotide
ugcaaauaaugaauugcuc

SEQ ID NO: 1789294 - RNA, 19 nt, Artificial Sequence
  Description of Artificial Sequence: Synthetic oligonucleotide
caguuuaaugucagggacc

SEQ ID NO: 1789295 - RNA, 19 nt, Artificial Sequence
  Description of Artificial Sequence: Synthetic oligonucleotide
uccccuuggugacaaagag

SEQ ID NO: 1789296 - RNA, 19 nt, Artificial Sequence
  Description of Artificial Sequence: Synthetic oligonucleotide
uuaaugucagggaccucag

SEQ ID NO: 1789297 - RNA, 19 nt, Artificial Sequence
  Description of Artificial Sequence: Synthetic oligonucleotide
ugugcuuccgcuccagcca

SEQ ID NO: 1789298 - RNA, 19 nt, Artificial Sequence
  Description of Artificial Sequence: Synthetic oligonucleotide
uuuuguuccccuuggugac

SEQ ID NO: 1789299 - RNA, 19 nt, Artificial Sequence
  Description of Artificial Sequence: Synthetic oligonucleotide
acacggaccgacuucuuuc

SEQ ID NO: 1789300 - RNA, 19 nt, Artificial Sequence
  Description of Artificial Sequence: Synthetic oligonucleotide
ugagcaaguccacggaaga

SEQ ID NO: 1789301 - RNA, 19 nt, Artificial Sequence
  Description of Artificial Sequence: Synthetic oligonucleotide
agaucucuuuaaaucagac

SEQ ID NO: 1789302 - RNA, 19 nt, Artificial Sequence
  Description of Artificial Sequence: Synthetic oligonucleotide
gacaaagagccguagcuga

SEQ ID NO: 1789303 - RNA, 19 nt, Artificial Sequence
  Description of Artificial Sequence: Synthetic oligonucleotide
aaaccagaacgcccuucac

SEQ ID NO: 1789304 - RNA, 19 nt, Artificial Sequence
  Description of Artificial Sequence: Synthetic oligonucleotide
ucaccaaugaucugucccu

SEQ ID NO: 1789305 - RNA, 19 nt, Artificial Sequence
  Description of Artificial Sequence: Synthetic oligonucleotide
cucccguuuaacuuuaauc

SEQ ID NO: 1789306 - RNA, 19 nt, Artificial Sequence
  Description of Artificial Sequence: Synthetic oligonucleotide
agcaaguccacggaagagg

SEQ ID NO: 1789307 - RNA, 19 nt, Artificial Sequence
  Description of Artificial Sequence: Synthetic oligonucleotide
guaucaaagucuucauaug

SEQ ID NO: 1789308 - RNA, 19 nt, Artificial Sequence
  Description of Artificial Sequence: Synthetic oligonucleotide
cuagacaggaaaugaccag

SEQ ID NO: 1789309 - RNA, 19 nt, Artificial Sequence
  Description of Artificial Sequence: Synthetic oligonucleotide
aguuuaaugucagggaccu

SEQ ID NO: 1789310 - RNA, 19 nt, Artificial Sequence
  Description of Artificial Sequence: Synthetic oligonucleotide
aaucuuaaugaaauaucau

SEQ ID NO: 1789311 - RNA, 19 nt, Artificial Sequence
  Description of Artificial Sequence: Synthetic oligonucleotide
cugucccuuguucaaaucc

SEQ ID NO: 1789312 - RNA, 19 nt, Artificial Sequence
  Description of Artificial Sequence: Synthetic oligonucleotide
ggugauaauggcccugugg

SEQ ID NO: 1789313 - RNA, 19 nt, Artificial Sequence
  Description of Artificial Sequence: Synthetic oligonucleotide
aguuuggugaagaagcugu

SEQ ID NO: 1789314 - RNA, 19 nt, Artificial Sequence
  Description of Artificial Sequence: Synthetic oligonucleotide
ucggcuagauguugguggg

SEQ ID NO: 1789315 - RNA, 19 nt, Artificial Sequence
  Description of Artificial Sequence: Synthetic oligonucleotide
uuguucuuuugccucugcc

SEQ ID NO: 1789316 - RNA, 19 nt, Artificial Sequence
  Description of Artificial Sequence: Synthetic oligonucleotide
uucauucccugcauggccu

SEQ ID NO: 1789317 - RNA, 19 nt, Artificial Sequence
  Description of Artificial Sequence: Synthetic oligonucleotide
cacaacaaccaggacacgg

SEQ ID NO: 1789318 - RNA, 19 nt, Artificial Sequence
  Description of Artificial Sequence: Synthetic oligonucleotide
ucaugguauauuguauggc

SEQ ID NO: 1789319 - RNA, 19 nt, Artificial Sequence
  Description of Artificial Sequence: Synthetic oligonucleotide
ugcaacgcauggcucaagc

SEQ ID NO: 1789320 - RNA, 19 nt, Artificial Sequence
  Description of Artificial Sequence: Synthetic oligonucleotide
aaccaggacacggaccgac

SEQ ID NO: 1789321 - RNA, 19 nt, Artificial Sequence
  Description of Artificial Sequence: Synthetic oligonucleotide
guaaggccuguucugcugg

SEQ ID NO: 1789322 - RNA, 19 nt, Artificial Sequence
  Description of Artificial Sequence: Synthetic oligonucleotide
uuggcauacauauccuuaa

SEQ ID NO: 1789323 - RNA, 19 nt, Artificial Sequence
  Description of Artificial Sequence: Synthetic oligonucleotide
aaugccaaugaggcggcag

SEQ ID NO: 1789324 - RNA, 19 nt, Artificial Sequence
  Description of Artificial Sequence: Synthetic oligonucleotide
aaaacauuucuuaccucga

SEQ ID NO: 1789325 - RNA, 19 nt, Artificial Sequence
  Description of Artificial Sequence: Synthetic oligonucleotide
caacgcauggcucaagcug

SEQ ID NO: 1789326 - RNA, 19 nt, Artificial Sequence
  Description of Artificial Sequence: Synthetic oligonucleotide
augcaaauaaugaauugcu

SEQ ID NO: 1789327 - RNA, 19 nt, Artificial Sequence
  Description of Artificial Sequence: Synthetic oligonucleotide
auauguuucuccauugggu

SEQ ID NO: 1789328 - RNA, 19 nt, Artificial Sequence
  Description of Artificial Sequence: Synthetic oligonucleotide
accucgagaacccugguau

SEQ ID NO: 1789329 - RNA, 19 nt, Artificial Sequence
  Description of Artificial Sequence: Synthetic oligonucleotide
ucuuuggccaauggucugg

SEQ ID NO: 1789330 - RNA, 19 nt, Artificial Sequence
  Description of Artificial Sequence: Synthetic oligonucleotide
aacccugguaucaaagucu

SEQ ID NO: 1789331 - RNA, 19 nt, Artificial Sequence
  Description of Artificial Sequence: Synthetic oligonucleotide
gaggcaaugcagcacugug

SEQ ID NO: 1789332 - RNA, 19 nt, Artificial Sequence
  Description of Artificial Sequence: Synthetic oligonucleotide
aaggccuuuagagggagcu

SEQ ID NO: 1789333 - RNA, 19 nt, Artificial Sequence
  Description of Artificial Sequence: Synthetic oligonucleotide
ugcuucuuuggccaauggu

SEQ ID NO: 1789334 - RNA, 19 nt, Artificial Sequence
  Description of Artificial Sequence: Synthetic oligonucleotide
augaucugucccuuguuca

SEQ ID NO: 1789335 - RNA, 19 nt, Artificial Sequence
  Description of Artificial Sequence: Synthetic oligonucleotide
ugacaaagagccguagcug

SEQ ID NO: 1789336 - RNA, 19 nt, Artificial Sequence
  Description of Artificial Sequence: Synthetic oligonucleotide
aaggcacccuuccagaguu

SEQ ID NO: 1789337 - RNA, 19 nt, Artificial Sequence
  Description of Artificial Sequence: Synthetic oligonucleotide
uaagagggacauucagacc

SEQ ID NO: 1789338 - RNA, 19 nt, Artificial Sequence
  Description of Artificial Sequence: Synthetic oligonucleotide
agggccacauucuucccgg

SEQ ID NO: 1789339 - RNA, 19 nt, Artificial Sequence
  Description of Artificial Sequence: Synthetic oligonucleotide
gauguugguggguuuccug

SEQ ID NO: 1789340 - RNA, 19 nt, Artificial Sequence
  Description of Artificial Sequence: Synthetic oligonucleotide
agucaguuuggugaagaag

SEQ ID NO: 1789341 - RNA, 19 nt, Artificial Sequence
  Description of Artificial Sequence: Synthetic oligonucleotide
ugcuggaaaggccuuuaga

SEQ ID NO: 1789342 - RNA, 19 nt, Artificial Sequence
  Description of Artificial Sequence: Synthetic oligonucleotide
cugguuccuuacuuaaggc

SEQ ID NO: 1789343 - RNA, 19 nt, Artificial Sequence
  Description of Artificial Sequence: Synthetic oligonucleotide
caaugcagcacugugucug

SEQ ID NO: 1789344 - RNA, 19 nt, Artificial Sequence
  Description of Artificial Sequence: Synthetic oligonucleotide
ugauaauggcccuguggca

SEQ ID NO: 1789345 - RNA, 19 nt, Artificial Sequence
  Description of Artificial Sequence: Synthetic oligonucleotide
gguuccuuacuuaaggccc

SEQ ID NO: 1789346 - RNA, 19 nt, Artificial Sequence
  Description of Artificial Sequence: Synthetic oligonucleotide
acaauaggcagagggccac

SEQ ID NO: 1789347 - RNA, 19 nt, Artificial Sequence
  Description of Artificial Sequence: Synthetic oligonucleotide
auaauggcccuguggcauc

SEQ ID NO: 1789348 - RNA, 19 nt, Artificial Sequence
  Description of Artificial Sequence: Synthetic oligonucleotide
cuucauauaguucuauaua

SEQ ID NO: 1789349 - RNA, 19 nt, Artificial Sequence
  Description of Artificial Sequence: Synthetic oligonucleotide
gucauauugaaaacauuuc

SEQ ID NO: 1789350 - RNA, 19 nt, Artificial Sequence
  Description of Artificial Sequence: Synthetic oligonucleotide
agagccguagcugagaguu

SEQ ID NO: 1789351 - RNA, 19 nt, Artificial Sequence
  Description of Artificial Sequence: Synthetic oligonucleotide
ucagcggcuuucccaacag

SEQ ID NO: 1789352 - RNA, 19 nt, Artificial Sequence
  Description of Artificial Sequence: Synthetic oligonucleotide
ccaaugaggcggcagaugg

SEQ ID NO: 1789353 - RNA, 19 nt, Artificial Sequence
  Description of Artificial Sequence: Synthetic oligonucleotide
gugagguugagcauguuca

SEQ ID NO: 1789354 - RNA, 19 nt, Artificial Sequence
  Description of Artificial Sequence: Synthetic oligonucleotide
cauguucauagacccagug

SEQ ID NO: 1789355 - RNA, 19 nt, Artificial Sequence
  Description of Artificial Sequence: Synthetic oligonucleotide
aguccaguuuaaugucagg

SEQ ID NO: 1789356 - RNA, 19 nt, Artificial Sequence
  Description of Artificial Sequence: Synthetic oligonucleotide
acgcccuucaccaaugauc

SEQ ID NO: 1789357 - RNA, 19 nt, Artificial Sequence
  Description of Artificial Sequence: Synthetic oligonucleotide
uggccaauggucuggacua

SEQ ID NO: 1789358 - RNA, 19 nt, Artificial Sequence
  Description of Artificial Sequence: Synthetic oligonucleotide
gugaccuuggcauacauau

SEQ ID NO: 1789359 - RNA, 19 nt, Artificial Sequence
  Description of Artificial Sequence: Synthetic oligonucleotide
ggcagaucucuuuaaauca

SEQ ID NO: 1789360 - RNA, 19 nt, Artificial Sequence
  Description of Artificial Sequence: Synthetic oligonucleotide
cuuugccuuccuuaaagca

SEQ ID NO: 1789361 - RNA, 19 nt, Artificial Sequence
  Description of Artificial Sequence: Synthetic oligonucleotide
cuaaggcacccuuccagag

SEQ ID NO: 1789362 - RNA, 19 nt, Artificial Sequence
  Description of Artificial Sequence: Synthetic oligonucleotide
ggcauacauauccuuaaug

SEQ ID NO: 1789363 - RNA, 19 nt, Artificial Sequence
  Description of Artificial Sequence: Synthetic oligonucleotide
ugguauauuguauggccuu

SEQ ID NO: 1789364 - RNA, 19 nt, Artificial Sequence
  Description of Artificial Sequence: Synthetic oligonucleotide
gacgggagaggcaaugcag

SEQ ID NO: 1789365 - RNA, 19 nt, Artificial Sequence
  Description of Artificial Sequence: Synthetic oligonucleotide
uaaggcacccuuccagagu

SEQ ID NO: 1789366 - RNA, 19 nt, Artificial Sequence
  Description of Artificial Sequence: Synthetic oligonucleotide
ugacgggagaggcaaugca

SEQ ID NO: 1789367 - RNA, 19 nt, Artificial Sequence
  Description of Artificial Sequence: Synthetic oligonucleotide
cacaccgagcgcuucauuc

SEQ ID NO: 1789368 - RNA, 19 nt, Artificial Sequence
  Description of Artificial Sequence: Synthetic oligonucleotide
cauagacccagugaccuug

SEQ ID NO: 1789369 - RNA, 19 nt, Artificial Sequence
  Description of Artificial Sequence: Synthetic oligonucleotide
ucuuaucggcuagauguug

SEQ ID NO: 1789370 - RNA, 19 nt, Artificial Sequence
  Description of Artificial Sequence: Synthetic oligonucleotide
caguccaguuuaaugucag

SEQ ID NO: 1789371 - RNA, 19 nt, Artificial Sequence
  Description of Artificial Sequence: Synthetic oligonucleotide
uggggaggcgaccacaaua

SEQ ID NO: 1789372 - RNA, 19 nt, Artificial Sequence
  Description of Artificial Sequence: Synthetic oligonucleotide
ccuuaaagcaucugcccgg

SEQ ID NO: 1789373 - RNA, 19 nt, Artificial Sequence
  Description of Artificial Sequence: Synthetic oligonucleotide
gggacauucagaccaggcc

SEQ ID NO: 1789374 - RNA, 19 nt, Artificial Sequence
  Description of Artificial Sequence: Synthetic oligonucleotide
uucuugccaguccaguuua

SEQ ID NO: 1789375 - RNA, 19 nt, Artificial Sequence
  Description of Artificial Sequence: Synthetic oligonucleotide
accgacuucuuucuucccu

SEQ ID NO: 1789376 - RNA, 19 nt, Artificial Sequence
  Description of Artificial Sequence: Synthetic oligonucleotide
gagaguugucuuugcugcc

SEQ ID NO: 1789377 - RNA, 19 nt, Artificial Sequence
  Description of Artificial Sequence: Synthetic oligonucleotide
ccaguuuaaugucagggac

SEQ ID NO: 1789378 - RNA, 19 nt, Artificial Sequence
  Description of Artificial Sequence: Synthetic oligonucleotide
ggcaucggaggccauaacc

SEQ ID NO: 1789379 - RNA, 19 nt, Artificial Sequence
  Description of Artificial Sequence: Synthetic oligonucleotide
acauggagacccuucuuau

SEQ ID NO: 1789380 - RNA, 19 nt, Artificial Sequence
  Description of Artificial Sequence: Synthetic oligonucleotide
ucggaggccauaaccucug

SEQ ID NO: 1789381 - RNA, 19 nt, Artificial Sequence
  Description of Artificial Sequence: Synthetic oligonucleotide
cacaggaaaccagaacgcc

SEQ ID NO: 1789382 - RNA, 19 nt, Artificial Sequence
  Description of Artificial Sequence: Synthetic oligonucleotide
gugacaaagagccguagcu

SEQ ID NO: 1789383 - RNA, 19 nt, Artificial Sequence
  Description of Artificial Sequence: Synthetic oligonucleotide
gaggccauaaccucugggu

SEQ ID NO: 1789384 - RNA, 19 nt, Artificial Sequence
  Description of Artificial Sequence: Synthetic oligonucleotide
ucuggacuacuccacuuuu

SEQ ID NO: 1789385 - RNA, 19 nt, Artificial Sequence
  Description of Artificial Sequence: Synthetic oligonucleotide
aucagaccacaccgagcgc

SEQ ID NO: 1789386 - RNA, 19 nt, Artificial Sequence
  Description of Artificial Sequence: Synthetic oligonucleotide
ugaucugcguccucuuaaa

SEQ ID NO: 1789387 - RNA, 19 nt, Artificial Sequence
  Description of Artificial Sequence: Synthetic oligonucleotide
agcaucugcccggucagcg

SEQ ID NO: 1789388 - RNA, 19 nt, Artificial Sequence
  Description of Artificial Sequence: Synthetic oligonucleotide
auauuguauggccuucaua

SEQ ID NO: 1789389 - RNA, 19 nt, Artificial Sequence
  Description of Artificial Sequence: Synthetic oligonucleotide
uggguuguuucuucauccu

SEQ ID NO: 1789390 - RNA, 19 nt, Artificial Sequence
  Description of Artificial Sequence: Synthetic oligonucleotide
cugacaccuccccaugugc

SEQ ID NO: 1789391 - RNA, 19 nt, Artificial Sequence
  Description of Artificial Sequence: Synthetic oligonucleotide
gauggugauaauggcccug

SEQ ID NO: 1789392 - RNA, 19 nt, Artificial Sequence
  Description of Artificial Sequence: Synthetic oligonucleotide
acggaagaggccccgggug

SEQ ID NO: 1789393 - RNA, 19 nt, Artificial Sequence
  Description of Artificial Sequence: Synthetic oligonucleotide
augguauauuguauggccu

SEQ ID NO: 1789394 - RNA, 19 nt, Artificial Sequence
  Description of Artificial Sequence: Synthetic oligonucleotide
uguugguggguuuccuggu

SEQ ID NO: 1789395 - RNA, 19 nt, Artificial Sequence
  Description of Artificial Sequence: Synthetic oligonucleotide
auacugacaccuccccaug

SEQ ID NO: 1789396 - RNA, 19 nt, Artificial Sequence
  Description of Artificial Sequence: Synthetic oligonucleotide
cuccaccacauggagaccc

SEQ ID NO: 1789397 - RNA, 19 nt, Artificial Sequence
  Description of Artificial Sequence: Synthetic oligonucleotide
guucauagacccagugacc

SEQ ID NO: 1789398 - RNA, 19 nt, Artificial Sequence
  Description of Artificial Sequence: Synthetic oligonucleotide
cucugguuccuuacuuaag

SEQ ID NO: 1789399 - RNA, 19 nt, Artificial Sequence
  Description of Artificial Sequence: Synthetic oligonucleotide
cugugucugcaacgcaugg

SEQ ID NO: 1789400 - RNA, 19 nt, Artificial Sequence
  Description of Artificial Sequence: Synthetic oligonucleotide
gcuucuuuggccaaugguc

SEQ ID NO: 1789401 - RNA, 19 nt, Artificial Sequence
  Description of Artificial Sequence: Synthetic oligonucleotide
agaccaggccacaggaaac

SEQ ID NO: 1789402 - RNA, 19 nt, Artificial Sequence
  Description of Artificial Sequence: Synthetic oligonucleotide
acaacaaccaggacacgga

SEQ ID NO: 1789403 - RNA, 19 nt, Artificial Sequence
  Description of Artificial Sequence: Synthetic oligonucleotide
uaauggcccuguggcaucg

SEQ ID NO: 1789404 - RNA, 19 nt, Artificial Sequence
  Description of Artificial Sequence: Synthetic oligonucleotide
guuccccuuggugacaaag

SEQ ID NO: 1789405 - RNA, 19 nt, Artificial Sequence
  Description of Artificial Sequence: Synthetic oligonucleotide
ggaccgacuucuuucuucc

SEQ ID NO: 1789406 - RNA, 19 nt, Artificial Sequence
  Description of Artificial Sequence: Synthetic oligonucleotide
auuguauggccuucauaua

SEQ ID NO: 1789407 - RNA, 19 nt, Artificial Sequence
  Description of Artificial Sequence: Synthetic oligonucleotide
cguuuaacuuuaaucuucc

SEQ ID NO: 1789408 - RNA, 19 nt, Artificial Sequence
  Description of Artificial Sequence: Synthetic oligonucleotide
caacaaccaggacacggac

SEQ ID NO: 1789409 - RNA, 19 nt, Artificial Sequence
  Description of Artificial Sequence: Synthetic oligonucleotide
uacugacaccuccccaugu

SEQ ID NO: 1789410 - RNA, 19 nt, Artificial Sequence
  Description of Artificial Sequence: Synthetic oligonucleotide
ugguggguuuccuggugag

SEQ ID NO: 1789411 - RNA, 19 nt, Artificial Sequence
  Description of Artificial Sequence: Synthetic oligonucleotide
uggcauacauauccuuaau

SEQ ID NO: 1789412 - RNA, 19 nt, Artificial Sequence
  Description of Artificial Sequence: Synthetic oligonucleotide
ccguuuaacuuuaaucuuc

SEQ ID NO: 1789413 - RNA, 19 nt, Artificial Sequence
  Description of Artificial Sequence: Synthetic oligonucleotide
cauggagacccuucuuauc

SEQ ID NO: 1789414 - RNA, 19 nt, Artificial Sequence
  Description of Artificial Sequence: Synthetic oligonucleotide
gucugcaacgcauggcuca

SEQ ID NO: 1789415 - RNA, 19 nt, Artificial Sequence
  Description of Artificial Sequence: Synthetic oligonucleotide
guuccuuacuuaaggcccc

SEQ ID NO: 1789416 - RNA, 19 nt, Artificial Sequence
  Description of Artificial Sequence: Synthetic oligonucleotide
uugacgggagaggcaaugc

SEQ ID NO: 1789417 - RNA, 19 nt, Artificial Sequence
  Description of Artificial Sequence: Synthetic oligonucleotide
uggcccuguggcaucggag

SEQ ID NO: 1789418 - RNA, 19 nt, Artificial Sequence
  Description of Artificial Sequence: Synthetic oligonucleotide
uuggugacaaagagccgua

SEQ ID NO: 1789419 - RNA, 19 nt, Artificial Sequence
  Description of Artificial Sequence: Synthetic oligonucleotide
aacgcccuucaccaaugau

SEQ ID NO: 1789420 - RNA, 19 nt, Artificial Sequence
  Description of Artificial Sequence: Synthetic oligonucleotide
cuucuuuggccaauggucu

SEQ ID NO: 1789421 - RNA, 19 nt, Artificial Sequence
  Description of Artificial Sequence: Synthetic oligonucleotide
uagagggagcugccuagac

SEQ ID NO: 1789422 - RNA, 19 nt, Artificial Sequence
  Description of Artificial Sequence: Synthetic oligonucleotide
aagagccguagcugagagu

SEQ ID NO: 1789423 - RNA, 19 nt, Artificial Sequence
  Description of Artificial Sequence: Synthetic oligonucleotide
ugaccuuggcauacauauc

SEQ ID NO: 1789424 - RNA, 19 nt, Artificial Sequence
  Description of Artificial Sequence: Synthetic oligonucleotide
caucggaggccauaaccuc

SEQ ID NO: 1789425 - RNA, 19 nt, Artificial Sequence
  Description of Artificial Sequence: Synthetic oligonucleotide
ucugcuggcccaugcaguu

SEQ ID NO: 1789426 - RNA, 19 nt, Artificial Sequence
  Description of Artificial Sequence: Synthetic oligonucleotide
aauaggcagagggccacau

SEQ ID NO: 1789427 - RNA, 19 nt, Artificial Sequence
  Description of Artificial Sequence: Synthetic oligonucleotide
cauuccccacaacaaccag

SEQ ID NO: 1789428 - RNA, 19 nt, Artificial Sequence
  Description of Artificial Sequence: Synthetic oligonucleotide
ugcguccucuuaaaucuua

SEQ ID NO: 1789429 - RNA, 19 nt, Artificial Sequence
  Description of Artificial Sequence: Synthetic oligonucleotide
guugacgggagaggcaaug

SEQ ID NO: 1789430 - RNA, 19 nt, Artificial Sequence
  Description of Artificial Sequence: Synthetic oligonucleotide
cagaucucuuuaaaucaga

SEQ ID NO: 1789431 - RNA, 19 nt, Artificial Sequence
  Description of Artificial Sequence: Synthetic oligonucleotide
ggugagguugagcauguuc

SEQ ID NO: 1789432 - RNA, 19 nt, Artificial Sequence
  Description of Artificial Sequence: Synthetic oligonucleotide
gauaauggcccuguggcau

SEQ ID NO: 1789433 - RNA, 19 nt, Artificial Sequence
  Description of Artificial Sequence: Synthetic oligonucleotide
ggaggcgaccacaauaggc

SEQ ID NO: 1789434 - RNA, 19 nt, Artificial Sequence
  Description of Artificial Sequence: Synthetic oligonucleotide
ugucugcaacgcauggcuc

SEQ ID NO: 1789435 - RNA, 19 nt, Artificial Sequence
  Description of Artificial Sequence: Synthetic oligonucleotide
gagcgcuucauucccugca

SEQ ID NO: 1789436 - RNA, 19 nt, Artificial Sequence
  Description of Artificial Sequence: Synthetic oligonucleotide
guucuauauaaugcaaaua

SEQ ID NO: 1789437 - RNA, 19 nt, Artificial Sequence
  Description of Artificial Sequence: Synthetic oligonucleotide
ccuuaaugccaaugaggcg

SEQ ID NO: 1789438 - RNA, 19 nt, Artificial Sequence
  Description of Artificial Sequence: Synthetic oligonucleotide
gguuguuucuucauccuga

SEQ ID NO: 1789439 - RNA, 19 nt, Artificial Sequence
  Description of Artificial Sequence: Synthetic oligonucleotide
ggccaauacugacaccucc

SEQ ID NO: 1789440 - RNA, 19 nt, Artificial Sequence
  Description of Artificial Sequence: Synthetic oligonucleotide
aggccauaaccucuggguu

SEQ ID NO: 1789441 - RNA, 19 nt, Artificial Sequence
  Description of Artificial Sequence: Synthetic oligonucleotide
cuuggugacaaagagccgu

SEQ ID NO: 1789442 - RNA, 19 nt, Artificial Sequence
  Description of Artificial Sequence: Synthetic oligonucleotide
ccuagacaggaaaugacca

SEQ ID NO: 1789443 - RNA, 19 nt, Artificial Sequence
  Description of Artificial Sequence: Synthetic oligonucleotide
gccuagacaggaaaugacc

SEQ ID NO: 1789444 - RNA, 19 nt, Artificial Sequence
  Description of Artificial Sequence: Synthetic oligonucleotide
acaccuccccaugugcuuc

SEQ ID NO: 1789445 - RNA, 19 nt, Artificial Sequence
  Description of Artificial Sequence: Synthetic oligonucleotide
uggugacaaagagccguag

SEQ ID NO: 1789446 - RNA, 19 nt, Artificial Sequence
  Description of Artificial Sequence: Synthetic oligonucleotide
ggggaggcgaccacaauag

SEQ ID NO: 1789447 - RNA, 19 nt, Artificial Sequence
  Description of Artificial Sequence: Synthetic oligonucleotide
uggugauaauggcccugug

SEQ ID NO: 1789448 - RNA, 19 nt, Artificial Sequence
  Description of Artificial Sequence: Synthetic oligonucleotide
caccgagcgcuucauuccc

SEQ ID NO: 1789449 - RNA, 19 nt, Artificial Sequence
  Description of Artificial Sequence: Synthetic oligonucleotide
uaccucgagaacccuggua

SEQ ID NO: 1789450 - RNA, 19 nt, Artificial Sequence
  Description of Artificial Sequence: Synthetic oligonucleotide
uguuugcuucuuuggccaa

SEQ ID NO: 1789451 - RNA, 19 nt, Artificial Sequence
  Description of Artificial Sequence: Synthetic oligonucleotide
uuaccucgagaacccuggu

SEQ ID NO: 1789452 - RNA, 19 nt, Artificial Sequence
  Description of Artificial Sequence: Synthetic oligonucleotide
cauugggucccuggcuugg

SEQ ID NO: 1789453 - RNA, 19 nt, Artificial Sequence
  Description of Artificial Sequence: Synthetic oligonucleotide
cuuuagagggagcugccua

SEQ ID NO: 1789454 - RNA, 19 nt, Artificial Sequence
  Description of Artificial Sequence: Synthetic oligonucleotide
agccguagcugagaguugu

SEQ ID NO: 1789455 - RNA, 19 nt, Artificial Sequence
  Description of Artificial Sequence: Synthetic oligonucleotide
caauacugacaccucccca

SEQ ID NO: 1789456 - RNA, 19 nt, Artificial Sequence
  Description of Artificial Sequence: Synthetic oligonucleotide
gcaaguccacggaagaggc

SEQ ID NO: 1789457 - RNA, 19 nt, Artificial Sequence
  Description of Artificial Sequence: Synthetic oligonucleotide
aguccacggaagaggcccc

SEQ ID NO: 1789458 - RNA, 19 nt, Artificial Sequence
  Description of Artificial Sequence: Synthetic oligonucleotide
uuaaagcaucugcccgguc

SEQ ID NO: 1789459 - RNA, 19 nt, Artificial Sequence
  Description of Artificial Sequence: Synthetic oligonucleotide
auagacccagugaccuugg

SEQ ID NO: 1789460 - RNA, 19 nt, Artificial Sequence
  Description of Artificial Sequence: Synthetic oligonucleotide
uugcucuguucuuugccuu

SEQ ID NO: 1789461 - RNA, 19 nt, Artificial Sequence
  Description of Artificial Sequence: Synthetic oligonucleotide
caccacauggagacccuuc

SEQ ID NO: 1789462 - RNA, 19 nt, Artificial Sequence
  Description of Artificial Sequence: Synthetic oligonucleotide
gccacauucuucccggaac

SEQ ID NO: 1789463 - RNA, 19 nt, Artificial Sequence
  Description of Artificial Sequence: Synthetic oligonucleotide
ccucuuaaaucuuaaugaa

SEQ ID NO: 1789464 - RNA, 19 nt, Artificial Sequence
  Description of Artificial Sequence: Synthetic oligonucleotide
gcgaccacaauaggcagag

SEQ ID NO: 1789465 - RNA, 19 nt, Artificial Sequence
  Description of Artificial Sequence: Synthetic oligonucleotide
aucggaggccauaaccucu

SEQ ID NO: 1789466 - RNA, 19 nt, Artificial Sequence
  Description of Artificial Sequence: Synthetic oligonucleotide
agcgcuucauucccugcau

SEQ ID NO: 1789467 - RNA, 19 nt, Artificial Sequence
  Description of Artificial Sequence: Synthetic oligonucleotide
ggcccaugcaguugacggg

SEQ ID NO: 1789468 - RNA, 19 nt, Artificial Sequence
  Description of Artificial Sequence: Synthetic oligonucleotide
ucugcaacgcauggcucaa

SEQ ID NO: 1789469 - RNA, 19 nt, Artificial Sequence
  Description of Artificial Sequence: Synthetic oligonucleotide
uucccucuuuugcugucau

SEQ ID NO: 1789470 - RNA, 19 nt, Artificial Sequence
  Description of Artificial Sequence: Synthetic oligonucleotide
ccuugcuccagcaccaguc

SEQ ID NO: 1789471 - RNA, 19 nt, Artificial Sequence
  Description of Artificial Sequence: Synthetic oligonucleotide
ugcuuccgcuccagccacg

SEQ ID NO: 1789472 - RNA, 19 nt, Artificial Sequence
  Description of Artificial Sequence: Synthetic oligonucleotide
ucgagaacccugguaucaa

SEQ ID NO: 1789473 - RNA, 19 nt, Artificial Sequence
  Description of Artificial Sequence: Synthetic oligonucleotide
ucauagacccagugaccuu

SEQ ID NO: 1789474 - RNA, 19 nt, Artificial Sequence
  Description of Artificial Sequence: Synthetic oligonucleotide
cucgagaacccugguauca

SEQ ID NO: 1789475 - RNA, 19 nt, Artificial Sequence
  Description of Artificial Sequence: Synthetic oligonucleotide
cugcuggaaaggccuuuag

SEQ ID NO: 1789476 - RNA, 19 nt, Artificial Sequence
  Description of Artificial Sequence: Synthetic oligonucleotide
gaccgacuucuuucuuccc

SEQ ID NO: 1789477 - RNA, 19 nt, Artificial Sequence
  Description of Artificial Sequence: Synthetic oligonucleotide
uucccugcauggccuuuac

SEQ ID NO: 1789478 - RNA, 19 nt, Artificial Sequence
  Description of Artificial Sequence: Synthetic oligonucleotide
gcugccuagacaggaaaug

SEQ ID NO: 1789479 - RNA, 19 nt, Artificial Sequence
  Description of Artificial Sequence: Synthetic oligonucleotide
cugccuagacaggaaauga

SEQ ID NO: 1789480 - RNA, 19 nt, Artificial Sequence
  Description of Artificial Sequence: Synthetic oligonucleotide
ucuugccaguccaguuuaa

SEQ ID NO: 1789481 - RNA, 19 nt, Artificial Sequence
  Description of Artificial Sequence: Synthetic oligonucleotide
gccaauacugacaccuccc

SEQ ID NO: 1789482 - RNA, 19 nt, Artificial Sequence
  Description of Artificial Sequence: Synthetic oligonucleotide
aggcaaugcagcacugugu

SEQ ID NO: 1789483 - RNA, 19 nt, Artificial Sequence
  Description of Artificial Sequence: Synthetic oligonucleotide
auugggucccuggcuuggg

SEQ ID NO: 1789484 - RNA, 19 nt, Artificial Sequence
  Description of Artificial Sequence: Synthetic oligonucleotide
gucagcggcuuucccaaca

SEQ ID NO: 1789485 - RNA, 19 nt, Artificial Sequence
  Description of Artificial Sequence: Synthetic oligonucleotide
gguauauuguauggccuuc

SEQ ID NO: 1789486 - RNA, 19 nt, Artificial Sequence
  Description of Artificial Sequence: Synthetic oligonucleotide
uggguuuccuggugagcaa

SEQ ID NO: 1789487 - RNA, 19 nt, Artificial Sequence
  Description of Artificial Sequence: Synthetic oligonucleotide
guagcugagaguugucuuu

SEQ ID NO: 1789488 - RNA, 19 nt, Artificial Sequence
  Description of Artificial Sequence: Synthetic oligonucleotide
uggccuucauauaguucua

SEQ ID NO: 1789489 - RNA, 19 nt, Artificial Sequence
  Description of Artificial Sequence: Synthetic oligonucleotide
agauguugguggguuuccu

SEQ ID NO: 1789490 - RNA, 19 nt, Artificial Sequence
  Description of Artificial Sequence: Synthetic oligonucleotide
gaccacaccgagcgcuuca

SEQ ID NO: 1789491 - RNA, 19 nt, Artificial Sequence
  Description of Artificial Sequence: Synthetic oligonucleotide
agccacgcucccguuuaac

SEQ ID NO: 1789492 - RNA, 19 nt, Artificial Sequence
  Description of Artificial Sequence: Synthetic oligonucleotide
uucuuaccucgagaacccu

SEQ ID NO: 1789493 - RNA, 19 nt, Artificial Sequence
  Description of Artificial Sequence: Synthetic oligonucleotide
ccccuuggugacaaagagc

SEQ ID NO: 1789494 - RNA, 19 nt, Artificial Sequence
  Description of Artificial Sequence: Synthetic oligonucleotide
gagaggcaaugcagcacug

SEQ ID NO: 1789495 - RNA, 19 nt, Artificial Sequence
  Description of Artificial Sequence: Synthetic oligonucleotide
gcauggcucaagcugcuca

SEQ ID NO: 1789496 - RNA, 19 nt, Artificial Sequence
  Description of Artificial Sequence: Synthetic oligonucleotide
caguugacgggagaggcaa

SEQ ID NO: 1789497 - RNA, 19 nt, Artificial Sequence
  Description of Artificial Sequence: Synthetic oligonucleotide
caaagagccguagcugaga

SEQ ID NO: 1789498 - RNA, 19 nt, Artificial Sequence
  Description of Artificial Sequence: Synthetic oligonucleotide
uccagccacgcucccguuu

SEQ ID NO: 1789499 - RNA, 19 nt, Artificial Sequence
  Description of Artificial Sequence: Synthetic oligonucleotide
gguugagcauguucauaga

SEQ ID NO: 1789500 - RNA, 19 nt, Artificial Sequence
  Description of Artificial Sequence: Synthetic oligonucleotide
ggggccaauacugacaccu

SEQ ID NO: 1789501 - RNA, 19 nt, Artificial Sequence
  Description of Artificial Sequence: Synthetic oligonucleotide
auaggcagagggccacauu

SEQ ID NO: 1789502 - RNA, 19 nt, Artificial Sequence
  Description of Artificial Sequence: Synthetic oligonucleotide
ccaauggucuggacuacuc

SEQ ID NO: 1789503 - RNA, 19 nt, Artificial Sequence
  Description of Artificial Sequence: Synthetic oligonucleotide
ggugagcaaguccacggaa

SEQ ID NO: 1789504 - RNA, 19 nt, Artificial Sequence
  Description of Artificial Sequence: Synthetic oligonucleotide
gagguugagcauguucaua

SEQ ID NO: 1789505 - RNA, 19 nt, Artificial Sequence
  Description of Artificial Sequence: Synthetic oligonucleotide
gagcauguucauagaccca

SEQ ID NO: 1789506 - RNA, 19 nt, Artificial Sequence
  Description of Artificial Sequence: Synthetic oligonucleotide
ggguuuccuggugagcaag

SEQ ID NO: 1789507 - RNA, 19 nt, Artificial Sequence
  Description of Artificial Sequence: Synthetic oligonucleotide
uggcaucggaggccauaac

SEQ ID NO: 1789508 - RNA, 19 nt, Artificial Sequence
  Description of Artificial Sequence: Synthetic oligonucleotide
agaccacaccgagcgcuuc

SEQ ID NO: 1789509 - RNA, 19 nt, Artificial Sequence
  Description of Artificial Sequence: Synthetic oligonucleotide
acauucagaccaggccaca

SEQ ID NO: 1789510 - RNA, 19 nt, Artificial Sequence
  Description of Artificial Sequence: Synthetic oligonucleotide
ccuuggugacaaagagccg

SEQ ID NO: 1789511 - RNA, 19 nt, Artificial Sequence
  Description of Artificial Sequence: Synthetic oligonucleotide
cagcggcuuucccaacagc

SEQ ID NO: 1789512 - RNA, 19 nt, Artificial Sequence
  Description of Artificial Sequence: Synthetic oligonucleotide
ccgacuucuuucuucccuc

SEQ ID NO: 1789513 - RNA, 19 nt, Artificial Sequence
  Description of Artificial Sequence: Synthetic oligonucleotide
guauggccuucauauaguu

SEQ ID NO: 1789514 - RNA, 19 nt, Artificial Sequence
  Description of Artificial Sequence: Synthetic oligonucleotide
aggccuuuagagggagcug

SEQ ID NO: 1789515 - RNA, 19 nt, Artificial Sequence
  Description of Artificial Sequence: Synthetic oligonucleotide
acccugguaucaaagucuu

SEQ ID NO: 1789516 - RNA, 19 nt, Artificial Sequence
  Description of Artificial Sequence: Synthetic oligonucleotide
agcugccuagacaggaaau

SEQ ID NO: 1789517 - RNA, 19 nt, Artificial Sequence
  Description of Artificial Sequence: Synthetic oligonucleotide
agugaccuuggcauacaua

SEQ ID NO: 1789518 - RNA, 19 nt, Artificial Sequence
  Description of Artificial Sequence: Synthetic oligonucleotide
aggcagagggccacauucu

SEQ ID NO: 1789519 - RNA, 19 nt, Artificial Sequence
  Description of Artificial Sequence: Synthetic oligonucleotide
aggcggcagauggugauaa

SEQ ID NO: 1789520 - RNA, 19 nt, Artificial Sequence
  Description of Artificial Sequence: Synthetic oligonucleotide
cuuaaagcaucugcccggu

SEQ ID NO: 1789521 - RNA, 19 nt, Artificial Sequence
  Description of Artificial Sequence: Synthetic oligonucleotide
gacacggaccgacuucuuu

SEQ ID NO: 1789522 - RNA, 19 nt, Artificial Sequence
  Description of Artificial Sequence: Synthetic oligonucleotide
ggaaaggccuuuagaggga

SEQ ID NO: 1789523 - RNA, 19 nt, Artificial Sequence
  Description of Artificial Sequence: Synthetic oligonucleotide
gagccguagcugagaguug

SEQ ID NO: 1789524 - RNA, 19 nt, Artificial Sequence
  Description of Artificial Sequence: Synthetic oligonucleotide
ccccgggugagguugagca

SEQ ID NO: 1789525 - RNA, 19 nt, Artificial Sequence
  Description of Artificial Sequence: Synthetic oligonucleotide
ggaaaccagaacgcccuuc

SEQ ID NO: 1789526 - RNA, 19 nt, Artificial Sequence
  Description of Artificial Sequence: Synthetic oligonucleotide
ugcccggucagcggcuuuc

SEQ ID NO: 1789527 - RNA, 19 nt, Artificial Sequence
  Description of Artificial Sequence: Synthetic oligonucleotide
gguggguuuccuggugagc

SEQ ID NO: 1789528 - RNA, 19 nt, Artificial Sequence
  Description of Artificial Sequence: Synthetic oligonucleotide
gucuggacuacuccacuuu

SEQ ID NO: 1789529 - RNA, 19 nt, Artificial Sequence
  Description of Artificial Sequence: Synthetic oligonucleotide
cugcuaaggcacccuucca

SEQ ID NO: 1789530 - RNA, 19 nt, Artificial Sequence
  Description of Artificial Sequence: Synthetic oligonucleotide
gcaucggaggccauaaccu

SEQ ID NO: 1789531 - RNA, 19 nt, Artificial Sequence
  Description of Artificial Sequence: Synthetic oligonucleotide
cacggaccgacuucuuucu

SEQ ID NO: 1789532 - RNA, 19 nt, Artificial Sequence
  Description of Artificial Sequence: Synthetic oligonucleotide
cauccugaucugcguccuc

SEQ ID NO: 1789533 - RNA, 19 nt, Artificial Sequence
  Description of Artificial Sequence: Synthetic oligonucleotide
guuuaaugucagggaccuc

SEQ ID NO: 1789534 - RNA, 19 nt, Artificial Sequence
  Description of Artificial Sequence: Synthetic oligonucleotide
cacgcucccguuuaacuuu

SEQ ID NO: 1789535 - RNA, 19 nt, Artificial Sequence
  Description of Artificial Sequence: Synthetic oligonucleotide
ggcucugguuccuuacuua

SEQ ID NO: 1789536 - RNA, 19 nt, Artificial Sequence
  Description of Artificial Sequence: Synthetic oligonucleotide
acccuucuuaucggcuaga

SEQ ID NO: 1789537 - RNA, 19 nt, Artificial Sequence
  Description of Artificial Sequence: Synthetic oligonucleotide
uguuccccuuggugacaaa

SEQ ID NO: 1789538 - RNA, 19 nt, Artificial Sequence
  Description of Artificial Sequence: Synthetic oligonucleotide
ggaucaugucagccuccac

SEQ ID NO: 1789539 - RNA, 19 nt, Artificial Sequence
  Description of Artificial Sequence: Synthetic oligonucleotide
gcccaugcaguugacggga

SEQ ID NO: 1789540 - RNA, 19 nt, Artificial Sequence
  Description of Artificial Sequence: Synthetic oligonucleotide
gccuuuagagggagcugcc

SEQ ID NO: 1789541 - RNA, 19 nt, Artificial Sequence
  Description of Artificial Sequence: Synthetic oligonucleotide
ccauugggucccuggcuug

SEQ ID NO: 1789542 - RNA, 19 nt, Artificial Sequence
  Description of Artificial Sequence: Synthetic oligonucleotide
gcgcuucauucccugcaug

SEQ ID NO: 1789543 - RNA, 19 nt, Artificial Sequence
  Description of Artificial Sequence: Synthetic oligonucleotide
accacaccgagcgcuucau

SEQ ID NO: 1789544 - RNA, 19 nt, Artificial Sequence
  Description of Artificial Sequence: Synthetic oligonucleotide
caaugaggcggcagauggu

SEQ ID NO: 1789545 - RNA, 19 nt, Artificial Sequence
  Description of Artificial Sequence: Synthetic oligonucleotide
acggaccgacuucuuucuu

SEQ ID NO: 1789546 - RNA, 19 nt, Artificial Sequence
  Description of Artificial Sequence: Synthetic oligonucleotide
cugcaacgcauggcucaag

SEQ ID NO: 1789547 - RNA, 19 nt, Artificial Sequence
  Description of Artificial Sequence: Synthetic oligonucleotide
gcagagggccacauucuuc

SEQ ID NO: 1789548 - RNA, 19 nt, Artificial Sequence
  Description of Artificial Sequence: Synthetic oligonucleotide
ccucgagaacccugguauc

SEQ ID NO: 1789549 - RNA, 19 nt, Artificial Sequence
  Description of Artificial Sequence: Synthetic oligonucleotide
cggaccgacuucuuucuuc

SEQ ID NO: 1789550 - RNA, 19 nt, Artificial Sequence
  Description of Artificial Sequence: Synthetic oligonucleotide
ccgagcgcuucauucccug

SEQ ID NO: 1789551 - RNA, 19 nt, Artificial Sequence
  Description of Artificial Sequence: Synthetic oligonucleotide
accgagcgcuucauucccu

SEQ ID NO: 1789552 - RNA, 19 nt, Artificial Sequence
  Description of Artificial Sequence: Synthetic oligonucleotide
ccaaugaucugucccuugu

SEQ ID NO: 1789553 - RNA, 19 nt, Artificial Sequence
  Description of Artificial Sequence: Synthetic oligonucleotide
acgcauggcucaagcugcu

SEQ ID NO: 1789554 - RNA, 19 nt, Artificial Sequence
  Description of Artificial Sequence: Synthetic oligonucleotide
cccaugcaguugacgggag

SEQ ID NO: 1789555 - RNA, 19 nt, Artificial Sequence
  Description of Artificial Sequence: Synthetic oligonucleotide
ccggucagcggcuuuccca

SEQ ID NO: 1789556 - RNA, 19 nt, Artificial Sequence
  Description of Artificial Sequence: Synthetic oligonucleotide
aguugacgggagaggcaau

SEQ ID NO: 1789557 - RNA, 19 nt, Artificial Sequence
  Description of Artificial Sequence: Synthetic oligonucleotide
gcaguugacgggagaggca

SEQ ID NO: 1789558 - RNA, 19 nt, Artificial Sequence
  Description of Artificial Sequence: Synthetic oligonucleotide
gccacgcucccguuuaacu

SEQ ID NO: 1789559 - RNA, 19 nt, Artificial Sequence
  Description of Artificial Sequence: Synthetic oligonucleotide
cccuucaccaaugaucugu

SEQ ID NO: 1789560 - RNA, 19 nt, Artificial Sequence
  Description of Artificial Sequence: Synthetic oligonucleotide
cgcccuucaccaaugaucu

SEQ ID NO: 1789561 - RNA, 19 nt, Artificial Sequence
  Description of Artificial Sequence: Synthetic oligonucleotide
gaggcggcagauggugaua

SEQ ID NO: 1789562 - RNA, 19 nt, Artificial Sequence
  Description of Artificial Sequence: Synthetic oligonucleotide
agaggccccgggugagguu

SEQ ID NO: 1789563 - RNA, 19 nt, Artificial Sequence
  Description of Artificial Sequence: Synthetic oligonucleotide
aucugcccggucagcggcu

SEQ ID NO: 1789564 - RNA, 19 nt, Artificial Sequence
  Description of Artificial Sequence: Synthetic oligonucleotide
cgagcgcuucauucccugc

SEQ ID NO: 1789565 - RNA, 19 nt, Artificial Sequence
  Description of Artificial Sequence: Synthetic oligonucleotide
ggucagcggcuuucccaac

SEQ ID NO: 1789566 - RNA, 19 nt, Artificial Sequence
  Description of Artificial Sequence: Synthetic oligonucleotide
gccuuccuuaaagcaucug

SEQ ID NO: 1789567 - RNA, 19 nt, Artificial Sequence
  Description of Artificial Sequence: Synthetic oligonucleotide
cccguuuaacuuuaaucuu

SEQ ID NO: 1789568 - RNA, 19 nt, Artificial Sequence
  Description of Artificial Sequence: Synthetic oligonucleotide
acgcucccguuuaacuuua

SEQ ID NO: 1789569 - RNA, 19 nt, Artificial Sequence
  Description of Artificial Sequence: Synthetic oligonucleotide
ggccaauggucuggacuac

SEQ ID NO: 1789570 - RNA, 19 nt, Artificial Sequence
  Description of Artificial Sequence: Synthetic oligonucleotide
gcguccucuuaaaucuuaa

SEQ ID NO: 1789571 - RNA, 19 nt, Artificial Sequence
  Description of Artificial Sequence: Synthetic oligonucleotide
gguuuccuggugagcaagu

SEQ ID NO: 1789572 - RNA, 19 nt, Artificial Sequence
  Description of Artificial Sequence: Synthetic oligonucleotide
ccacaacaaccaggacacg

SEQ ID NO: 1789573 - RNA, 19 nt, Artificial Sequence
  Description of Artificial Sequence: Synthetic oligonucleotide
cagugaccuuggcauacau

SEQ ID NO: 1789574 - RNA, 19 nt, Artificial Sequence
  Description of Artificial Sequence: Synthetic oligonucleotide
ccaugcaguugacgggaga

SEQ ID NO: 1789575 - RNA, 19 nt, Artificial Sequence
  Description of Artificial Sequence: Synthetic oligonucleotide
caaccaggacacggaccga

SEQ ID NO: 1789576 - RNA, 19 nt, Artificial Sequence
  Description of Artificial Sequence: Synthetic oligonucleotide
ccagccacgcucccguuua

SEQ ID NO: 1789577 - RNA, 19 nt, Artificial Sequence
  Description of Artificial Sequence: Synthetic oligonucleotide
gcucccguuuaacuuuaau

SEQ ID NO: 1789578 - RNA, 19 nt, Artificial Sequence
  Description of Artificial Sequence: Synthetic oligonucleotide
cccggucagcggcuuuccc

SEQ ID NO: 1789579 - RNA, 19 nt, Artificial Sequence
  Description of Artificial Sequence: Synthetic oligonucleotide
cagaccacaccgagcgcuu

SEQ ID NO: 1789580 - RNA, 19 nt, Artificial Sequence
  Description of Artificial Sequence: Synthetic oligonucleotide
gccaauggucuggacuacu

SEQ ID NO: 1789581 - RNA, 19 nt, Artificial Sequence
  Description of Artificial Sequence: Synthetic oligonucleotide
ggccuucauauaguucuau

SEQ ID NO: 1789582 - RNA, 19 nt, Artificial Sequence
  Description of Artificial Sequence: Synthetic oligonucleotide
ccuuuuccguucccagucu

SEQ ID NO: 1789583 - RNA, 19 nt, Artificial Sequence
  Description of Artificial Sequence: Synthetic oligonucleotide
ccagaacgcccuucaccaa

SEQ ID NO: 1789584 - RNA, 19 nt, Artificial Sequence
  Description of Artificial Sequence: Synthetic oligonucleotide
gcucagacagugguugguu

SEQ ID NO: 1789585 - RNA, 19 nt, Artificial Sequence
  Description of Artificial Sequence: Synthetic oligonucleotide
gcccggucagcggcuuucc

SEQ ID NO: 1789586 - RNA, 19 nt, Artificial Sequence
  Description of Artificial Sequence: Synthetic oligonucleotide
gccguagcugagaguuguc

SEQ ID NO: 1789587 - RNA, 19 nt, Artificial Sequence
  Description of Artificial Sequence: Synthetic oligonucleotide
cagccacgcucccguuuaa

SEQ ID NO: 1789588 - RNA, 19 nt, Artificial Sequence
  Description of Artificial Sequence: Synthetic oligonucleotide
aggccccgggugagguuga

SEQ ID NO: 1789589 - RNA, 19 nt, Artificial Sequence
  Description of Artificial Sequence: Synthetic oligonucleotide
ccguagcugagaguugucu

SEQ ID NO: 1789590 - RNA, 19 nt, Artificial Sequence
  Description of Artificial Sequence: Synthetic oligonucleotide
ccuuuagagggagcugccu

SEQ ID NO: 1789591 - RNA, 19 nt, Artificial Sequence
  Description of Artificial Sequence: Synthetic oligonucleotide
ccaggacacggaccgacuu

SEQ ID NO: 1789592 - RNA, 19 nt, Artificial Sequence
  Description of Artificial Sequence: Synthetic oligonucleotide
cccuucuuaucggcuagau

SEQ ID NO: 1789593 - RNA, 19 nt, Artificial Sequence
  Description of Artificial Sequence: Synthetic oligonucleotide
cgcauggcucaagcugcuc

SEQ ID NO: 1789594 - RNA, 19 nt, Artificial Sequence
  Description of Artificial Sequence: Synthetic oligonucleotide
cuccagccacgcucccguu

SEQ ID NO: 1789595 - RNA, 19 nt, Artificial Sequence
  Description of Artificial Sequence: Synthetic oligonucleotide
cccgggugagguugagcau

SEQ ID NO: 1789596 - RNA, 19 nt, Artificial Sequence
  Description of Artificial Sequence: Synthetic oligonucleotide
ggacacggaccgacuucuu

SEQ ID NO: 1789597 - RNA, 19 nt, Artificial Sequence
  Description of Artificial Sequence: Synthetic oligonucleotide
cugcccggucagcggcuuu

SEQ ID NO: 1789598 - RNA, 19 nt, Artificial Sequence
  Description of Artificial Sequence: Synthetic oligonucleotide
ccacaccgagcgcuucauu

SEQ ID NO: 1789599 - RNA, 19 nt, Artificial Sequence
  Description of Artificial Sequence: Synthetic oligonucleotide
gggugagguugagcauguu

SEQ ID NO: 1789600 - RNA, 19 nt, Artificial Sequence
  Description of Artificial Sequence: Synthetic oligonucleotide
ccaccacauggagacccuu

SEQ ID NO: 1789601 - RNA, 19 nt, Artificial Sequence
  Description of Artificial Sequence: Synthetic oligonucleotide
uuuauuacuggcuagaaaa

SEQ ID NO: 1789602 - RNA, 19 nt, Artificial Sequence
  Description of Artificial Sequence: Synthetic oligonucleotide
gaauucuuaauuacgaucg

SEQ ID NO: 1789603 - RNA, 19 nt, Artificial Sequence
  Description of Artificial Sequence: Synthetic oligonucleotide
ucguaaaugagaacgacgg

SEQ ID NO: 1789604 - RNA, 19 nt, Artificial Sequence
  Description of Artificial Sequence: Synthetic oligonucleotide
auuguauuccugaagagcc

SEQ ID NO: 1789605 - RNA, 19 nt, Artificial Sequence
  Description of Artificial Sequence: Synthetic oligonucleotide
uuuaauaccaccaggccgu

SEQ ID NO: 1789606 - RNA, 19 nt, Artificial Sequence
  Description of Artificial Sequence: Synthetic oligonucleotide
guuguauuugauuaugucc

SEQ ID NO: 1789607 - RNA, 19 nt, Artificial Sequence
  Description of Artificial Sequence: Synthetic oligonucleotide
ugaacaaugaauuaauguu

SEQ ID NO: 1789608 - RNA, 19 nt, Artificial Sequence
  Description of Artificial Sequence: Synthetic oligonucleotide
uguuugaugaucuuuaaua

SEQ ID NO: 1789609 - RNA, 19 nt, Artificial Sequence
  Description of Artificial Sequence: Synthetic oligonucleotide
aauuacgaucggcacuucc

SEQ ID NO: 1789610 - RNA, 19 nt, Artificial Sequence
  Description of Artificial Sequence: Synthetic oligonucleotide
cuuuaauaccaccaggccg

SEQ ID NO: 1789611 - RNA, 19 nt, Artificial Sequence
  Description of Artificial Sequence: Synthetic oligonucleotide
aaugaauuaauguuuuauu

SEQ ID NO: 1789612 - RNA, 19 nt, Artificial Sequence
  Description of Artificial Sequence: Synthetic oligonucleotide
ucuacaaccagacccagga

SEQ ID NO: 1789613 - RNA, 19 nt, Artificial Sequence
  Description of Artificial Sequence: Synthetic oligonucleotide
uugaacaaugaauuaaugu

SEQ ID NO: 1789614 - RNA, 19 nt, Artificial Sequence
  Description of Artificial Sequence: Synthetic oligonucleotide
agcaacuggagauucuucc

SEQ ID NO: 1789615 - RNA, 19 nt, Artificial Sequence
  Description of Artificial Sequence: Synthetic oligonucleotide
cacauuaggacauugauga

SEQ ID NO: 1789616 - RNA, 19 nt, Artificial Sequence
  Description of Artificial Sequence: Synthetic oligonucleotide
uaugggaucguaaaugaga

SEQ ID NO: 1789617 - RNA, 19 nt, Artificial Sequence
  Description of Artificial Sequence: Synthetic oligonucleotide
uucuuaauuacgaucggca

SEQ ID NO: 1789618 - RNA, 19 nt, Artificial Sequence
  Description of Artificial Sequence: Synthetic oligonucleotide
aauguuuuauuacuggcua

SEQ ID NO: 1789619 - RNA, 19 nt, Artificial Sequence
  Description of Artificial Sequence: Synthetic oligonucleotide
ucaguuauuguauuccuga

SEQ ID NO: 1789620 - RNA, 19 nt, Artificial Sequence
  Description of Artificial Sequence: Synthetic oligonucleotide
uugagaauccagaagcgcc

SEQ ID NO: 1789621 - RNA, 19 nt, Artificial Sequence
  Description of Artificial Sequence: Synthetic oligonucleotide
uuuuaugggaucguaaaug

SEQ ID NO: 1789622 - RNA, 19 nt, Artificial Sequence
  Description of Artificial Sequence: Synthetic oligonucleotide
aauucuuaauuacgaucgg

SEQ ID NO: 1789623 - RNA, 19 nt, Artificial Sequence
  Description of Artificial Sequence: Synthetic oligonucleotide
uuuugaacaaugaauuaau

SEQ ID NO: 1789624 - RNA, 19 nt, Artificial Sequence
  Description of Artificial Sequence: Synthetic oligonucleotide
ucuguaugccuucagugag

SEQ ID NO: 1789625 - RNA, 19 nt, Artificial Sequence
  Description of Artificial Sequence: Synthetic oligonucleotide
aaaugagaacgacggacuc

SEQ ID NO: 1789626 - RNA, 19 nt, Artificial Sequence
  Description of Artificial Sequence: Synthetic oligonucleotide
aauuaauguuuuauuacug

SEQ ID NO: 1789627 - RNA, 19 nt, Artificial Sequence
  Description of Artificial Sequence: Synthetic oligonucleotide
uaaaugagaacgacggacu

SEQ ID NO: 1789628 - RNA, 19 nt, Artificial Sequence
  Description of Artificial Sequence: Synthetic oligonucleotide
ucuuuaauaccaccaggcc

SEQ ID NO: 1789629 - RNA, 19 nt, Artificial Sequence
  Description of Artificial Sequence: Synthetic oligonucleotide
uuugaacaaugaauuaaug

SEQ ID NO: 1789630 - RNA, 19 nt, Artificial Sequence
  Description of Artificial Sequence: Synthetic oligonucleotide
uacaaccagacccaggagc

SEQ ID NO: 1789631 - RNA, 19 nt, Artificial Sequence
  Description of Artificial Sequence: Synthetic oligonucleotide
ugggaauucuuaauuacga

SEQ ID NO: 1789632 - RNA, 19 nt, Artificial Sequence
  Description of Artificial Sequence: Synthetic oligonucleotide
aaacuacugcagcagugac

SEQ ID NO: 1789633 - RNA, 19 nt, Artificial Sequence
  Description of Artificial Sequence: Synthetic oligonucleotide
aacuaaauugagaauccag

SEQ ID NO: 1789634 - RNA, 19 nt, Artificial Sequence
  Description of Artificial Sequence: Synthetic oligonucleotide
ucugguggcgucuccaugg

SEQ ID NO: 1789635 - RNA, 19 nt, Artificial Sequence
  Description of Artificial Sequence: Synthetic oligonucleotide
aguuauuguauuccugaag

SEQ ID NO: 1789636 - RNA, 19 nt, Artificial Sequence
  Description of Artificial Sequence: Synthetic oligonucleotide
uauuugauuauguccuggc

SEQ ID NO: 1789637 - RNA, 19 nt, Artificial Sequence
  Description of Artificial Sequence: Synthetic oligonucleotide
agugauugcugcuugcaag

SEQ ID NO: 1789638 - RNA, 19 nt, Artificial Sequence
  Description of Artificial Sequence: Synthetic oligonucleotide
auucuuaauuacgaucggc

SEQ ID NO: 1789639 - RNA, 19 nt, Artificial Sequence
  Description of Artificial Sequence: Synthetic oligonucleotide
auugagaauccagaagcgc

SEQ ID NO: 1789640 - RNA, 19 nt, Artificial Sequence
  Description of Artificial Sequence: Synthetic oligonucleotide
uguuuauccgccacggcug

SEQ ID NO: 1789641 - RNA, 19 nt, Artificial Sequence
  Description of Artificial Sequence: Synthetic oligonucleotide
ucaagcucccacauuagga

SEQ ID NO: 1789642 - RNA, 19 nt, Artificial Sequence
  Description of Artificial Sequence: Synthetic oligonucleotide
gggaucguaaaugagaacg

SEQ ID NO: 1789643 - RNA, 19 nt, Artificial Sequence
  Description of Artificial Sequence: Synthetic oligonucleotide
aucaguuuaggagucaguc

SEQ ID NO: 1789644 - RNA, 19 nt, Artificial Sequence
  Description of Artificial Sequence: Synthetic oligonucleotide
uuauuguauuccugaagag

SEQ ID NO: 1789645 - RNA, 19 nt, Artificial Sequence
  Description of Artificial Sequence: Synthetic oligonucleotide
uacguguuguauuugauua

SEQ ID NO: 1789646 - RNA, 19 nt, Artificial Sequence
  Description of Artificial Sequence: Synthetic oligonucleotide
ugauaguguuugaugaucu

SEQ ID NO: 1789647 - RNA, 19 nt, Artificial Sequence
  Description of Artificial Sequence: Synthetic oligonucleotide
uguucuggcaguaaguguu

SEQ ID NO: 1789648 - RNA, 19 nt, Artificial Sequence
  Description of Artificial Sequence: Synthetic oligonucleotide
gaauuaauguuuuauuacu

SEQ ID NO: 1789649 - RNA, 19 nt, Artificial Sequence
  Description of Artificial Sequence: Synthetic oligonucleotide
uucucaagcucccacauua

SEQ ID NO: 1789650 - RNA, 19 nt, Artificial Sequence
  Description of Artificial Sequence: Synthetic oligonucleotide
aacgacggacucuucaaug

SEQ ID NO: 1789651 - RNA, 19 nt, Artificial Sequence
  Description of Artificial Sequence: Synthetic oligonucleotide
guaaaugagaacgacggac

SEQ ID NO: 1789652 - RNA, 19 nt, Artificial Sequence
  Description of Artificial Sequence: Synthetic oligonucleotide
ucuuaauuacgaucggcac

SEQ ID NO: 1789653 - RNA, 19 nt, Artificial Sequence
  Description of Artificial Sequence: Synthetic oligonucleotide
ucauguuuauccgccacgg

SEQ ID NO: 1789654 - RNA, 19 nt, Artificial Sequence
  Description of Artificial Sequence: Synthetic oligonucleotide
aguacguggacugauacca

SEQ ID NO: 1789655 - RNA, 19 nt, Artificial Sequence
  Description of Artificial Sequence: Synthetic oligonucleotide
caguuuaggagucagucug

SEQ ID NO: 1789656 - RNA, 19 nt, Artificial Sequence
  Description of Artificial Sequence: Synthetic oligonucleotide
auugaugagaugggaauuc

SEQ ID NO: 1789657 - RNA, 19 nt, Artificial Sequence
  Description of Artificial Sequence: Synthetic oligonucleotide
uucucaguuauuguauucc

SEQ ID NO: 1789658 - RNA, 19 nt, Artificial Sequence
  Description of Artificial Sequence: Synthetic oligonucleotide
acuaaauugagaauccaga

SEQ ID NO: 1789659 - RNA, 19 nt, Artificial Sequence
  Description of Artificial Sequence: Synthetic oligonucleotide
gugauugcugcuugcaagg

SEQ ID NO: 1789660 - RNA, 19 nt, Artificial Sequence
  Description of Artificial Sequence: Synthetic oligonucleotide
acugauaccagcccacgug

SEQ ID NO: 1789661 - RNA, 19 nt, Artificial Sequence
  Description of Artificial Sequence: Synthetic oligonucleotide
uuaugggaucguaaaugag

SEQ ID NO: 1789662 - RNA, 19 nt, Artificial Sequence
  Description of Artificial Sequence: Synthetic oligonucleotide
cagucggucuucuacaacc

SEQ ID NO: 1789663 - RNA, 19 nt, Artificial Sequence
  Description of Artificial Sequence: Synthetic oligonucleotide
uuugcagcaaagaaauguu

SEQ ID NO: 1789664 - RNA, 19 nt, Artificial Sequence
  Description of Artificial Sequence: Synthetic oligonucleotide
cugauacugauguuucugc

SEQ ID NO: 1789665 - RNA, 19 nt, Artificial Sequence
  Description of Artificial Sequence: Synthetic oligonucleotide
gauguucuggcaguaagug

SEQ ID NO: 1789666 - RNA, 19 nt, Artificial Sequence
  Description of Artificial Sequence: Synthetic oligonucleotide
uuaauuacgaucggcacuu

SEQ ID NO: 1789667 - RNA, 19 nt, Artificial Sequence
  Description of Artificial Sequence: Synthetic oligonucleotide
ucgauguugacauggcgca

SEQ ID NO: 1789668 - RNA, 19 nt, Artificial Sequence
  Description of Artificial Sequence: Synthetic oligonucleotide
acgacggacucuucaaugg

SEQ ID NO: 1789669 - RNA, 19 nt, Artificial Sequence
  Description of Artificial Sequence: Synthetic oligonucleotide
uaaucuggccugcaaugag

SEQ ID NO: 1789670 - RNA, 19 nt, Artificial Sequence
  Description of Artificial Sequence: Synthetic oligonucleotide
aacgagccguaguacgugg

SEQ ID NO: 1789671 - RNA, 19 nt, Artificial Sequence
  Description of Artificial Sequence: Synthetic oligonucleotide
agugagagagaaccuuggg

SEQ ID NO: 1789672 - RNA, 19 nt, Artificial Sequence
  Description of Artificial Sequence: Synthetic oligonucleotide
acgaacgagccguaguacg

SEQ ID NO: 1789673 - RNA, 19 nt, Artificial Sequence
  Description of Artificial Sequence: Synthetic oligonucleotide
auauucuccugcuggcgac

SEQ ID NO: 1789674 - RNA, 19 nt, Artificial Sequence
  Description of Artificial Sequence: Synthetic oligonucleotide
guaaguguuaaucuggccu

SEQ ID NO: 1789675 - RNA, 19 nt, Artificial Sequence
  Description of Artificial Sequence: Synthetic oligonucleotide
uaguguuugaugaucuuua

SEQ ID NO: 1789676 - RNA, 19 nt, Artificial Sequence
  Description of Artificial Sequence: Synthetic oligonucleotide
aucguaaaugagaacgacg

SEQ ID NO: 1789677 - RNA, 19 nt, Artificial Sequence
  Description of Artificial Sequence: Synthetic oligonucleotide
uuugcccuuccccaccgcg

SEQ ID NO: 1789678 - RNA, 19 nt, Artificial Sequence
  Description of Artificial Sequence: Synthetic oligonucleotide
cugguguuucucauguacg

SEQ ID NO: 1789679 - RNA, 19 nt, Artificial Sequence
  Description of Artificial Sequence: Synthetic oligonucleotide
ugagggaacgggaagcagu

SEQ ID NO: 1789680 - RNA, 19 nt, Artificial Sequence
  Description of Artificial Sequence: Synthetic oligonucleotide
augggaauucuuaauuacg

SEQ ID NO: 1789681 - RNA, 19 nt, Artificial Sequence
  Description of Artificial Sequence: Synthetic oligonucleotide
uccgcuuugcagcaaagaa

SEQ ID NO: 1789682 - RNA, 19 nt, Artificial Sequence
  Description of Artificial Sequence: Synthetic oligonucleotide
ucuccagucggucuucuac

SEQ ID NO: 1789683 - RNA, 19 nt, Artificial Sequence
  Description of Artificial Sequence: Synthetic oligonucleotide
auguuuuauuacuggcuag

SEQ ID NO: 1789684 - RNA, 19 nt, Artificial Sequence
  Description of Artificial Sequence: Synthetic oligonucleotide
ugcugguaacuaaauugag

SEQ ID NO: 1789685 - RNA, 19 nt, Artificial Sequence
  Description of Artificial Sequence: Synthetic oligonucleotide
ucaguuuaggagucagucu

SEQ ID NO: 1789686 - RNA, 19 nt, Artificial Sequence
  Description of Artificial Sequence: Synthetic oligonucleotide
caagcucccacauuaggac

SEQ ID NO: 1789687 - RNA, 19 nt, Artificial Sequence
  Description of Artificial Sequence: Synthetic oligonucleotide
ggaauucuuaauuacgauc

SEQ ID NO: 1789688 - RNA, 19 nt, Artificial Sequence
  Description of Artificial Sequence: Synthetic oligonucleotide
uuucucauguacguguugu

SEQ ID NO: 1789689 - RNA, 19 nt, Artificial Sequence
  Description of Artificial Sequence: Synthetic oligonucleotide
aacgggaagcaguugguaa

SEQ ID NO: 1789690 - RNA, 19 nt, Artificial Sequence
  Description of Artificial Sequence: Synthetic oligonucleotide
auuugauuauguccuggcu

SEQ ID NO: 1789691 - RNA, 19 nt, Artificial Sequence
  Description of Artificial Sequence: Synthetic oligonucleotide
cuugccuagguuuugggca

SEQ ID NO: 1789692 - RNA, 19 nt, Artificial Sequence
  Description of Artificial Sequence: Synthetic oligonucleotide
uuccccaagugauugcugc

SEQ ID NO: 1789693 - RNA, 19 nt, Artificial Sequence
  Description of Artificial Sequence: Synthetic oligonucleotide
cugauacuggacuucauca

SEQ ID NO: 1789694 - RNA, 19 nt, Artificial Sequence
  Description of Artificial Sequence: Synthetic oligonucleotide
agcagugacaccagaaauc

SEQ ID NO: 1789695 - RNA, 19 nt, Artificial Sequence
  Description of Artificial Sequence: Synthetic oligonucleotide
uguaugccuucagugagag

SEQ ID NO: 1789696 - RNA, 19 nt, Artificial Sequence
  Description of Artificial Sequence: Synthetic oligonucleotide
auguugacauggcgcaggc

SEQ ID NO: 1789697 - RNA, 19 nt, Artificial Sequence
  Description of Artificial Sequence: Synthetic oligonucleotide
caguaaguguuaaucuggc

SEQ ID NO: 1789698 - RNA, 19 nt, Artificial Sequence
  Description of Artificial Sequence: Synthetic oligonucleotide
ucucaguuauuguauuccu

SEQ ID NO: 1789699 - RNA, 19 nt, Artificial Sequence
  Description of Artificial Sequence: Synthetic oligonucleotide
gagagagaaccuugggcag

SEQ ID NO: 1789700 - RNA, 19 nt, Artificial Sequence
  Description of Artificial Sequence: Synthetic oligonucleotide
uggcaguaaguguuaaucu

SEQ ID NO: 1789701 - RNA, 19 nt, Artificial Sequence
  Description of Artificial Sequence: Synthetic oligonucleotide
guauuugauuauguccugg

SEQ ID NO: 1789702 - RNA, 19 nt, Artificial Sequence
  Description of Artificial Sequence: Synthetic oligonucleotide
cucauguuuauccgccacg

SEQ ID NO: 1789703 - RNA, 19 nt, Artificial Sequence
  Description of Artificial Sequence: Synthetic oligonucleotide
uggggcuugaagaguuugg

SEQ ID NO: 1789704 - RNA, 19 nt, Artificial Sequence
  Description of Artificial Sequence: Synthetic oligonucleotide
aaaucccucuccgcuuugc

SEQ ID NO: 1789705 - RNA, 19 nt, Artificial Sequence
  Description of Artificial Sequence: Synthetic oligonucleotide
uuuugggcagugaacuccu

SEQ ID NO: 1789706 - RNA, 19 nt, Artificial Sequence
  Description of Artificial Sequence: Synthetic oligonucleotide
aagucagcgucgucuuccg

SEQ ID NO: 1789707 - RNA, 19 nt, Artificial Sequence
  Description of Artificial Sequence: Synthetic oligonucleotide
acucuggcgcugcauauuc

SEQ ID NO: 1789708 - RNA, 19 nt, Artificial Sequence
  Description of Artificial Sequence: Synthetic oligonucleotide
ucggucuucuacaaccaga

SEQ ID NO: 1789709 - RNA, 19 nt, Artificial Sequence
  Description of Artificial Sequence: Synthetic oligonucleotide
cuuuacaaacuuccaucag

SEQ ID NO: 1789710 - RNA, 19 nt, Artificial Sequence
  Description of Artificial Sequence: Synthetic oligonucleotide
augaucuuuaauaccacca

SEQ ID NO: 1789711 - RNA, 19 nt, Artificial Sequence
  Description of Artificial Sequence: Synthetic oligonucleotide
ugagaugggaauucuuaau

SEQ ID NO: 1789712 - RNA, 19 nt, Artificial Sequence
  Description of Artificial Sequence: Synthetic oligonucleotide
ucauguacguguuguauuu

SEQ ID NO: 1789713 - RNA, 19 nt, Artificial Sequence
  Description of Artificial Sequence: Synthetic oligonucleotide
uuaaucuggccugcaauga

SEQ ID NO: 1789714 - RNA, 19 nt, Artificial Sequence
  Description of Artificial Sequence: Synthetic oligonucleotide
cugauaccagcccacgugc

SEQ ID NO: 1789715 - RNA, 19 nt, Artificial Sequence
  Description of Artificial Sequence: Synthetic oligonucleotide
auuaggacauugaugagau

SEQ ID NO: 1789716 - RNA, 19 nt, Artificial Sequence
  Description of Artificial Sequence: Synthetic oligonucleotide
gucgauguugacauggcgc

SEQ ID NO: 1789717 - RNA, 19 nt, Artificial Sequence
  Description of Artificial Sequence: Synthetic oligonucleotide
guggucgauguugacaugg

SEQ ID NO: 1789718 - RNA, 19 nt, Artificial Sequence
  Description of Artificial Sequence: Synthetic oligonucleotide
gauaccagcccacgugcag

SEQ ID NO: 1789719 - RNA, 19 nt, Artificial Sequence
  Description of Artificial Sequence: Synthetic oligonucleotide
caacuggagauucuucccc

SEQ ID NO: 1789720 - RNA, 19 nt, Artificial Sequence
  Description of Artificial Sequence: Synthetic oligonucleotide
caguugguaaucuccaguc

SEQ ID NO: 1789721 - RNA, 19 nt, Artificial Sequence
  Description of Artificial Sequence: Synthetic oligonucleotide
ugguguuucucauguacgu

SEQ ID NO: 1789722 - RNA, 19 nt, Artificial Sequence
  Description of Artificial Sequence: Synthetic oligonucleotide
uugauaguguuugaugauc

SEQ ID NO: 1789723 - RNA, 19 nt, Artificial Sequence
  Description of Artificial Sequence: Synthetic oligonucleotide
ugcuucacggccgaguccc

SEQ ID NO: 1789724 - RNA, 19 nt, Artificial Sequence
  Description of Artificial Sequence: Synthetic oligonucleotide
agguggucgauguugacau

SEQ ID NO: 1789725 - RNA, 19 nt, Artificial Sequence
  Description of Artificial Sequence: Synthetic oligonucleotide
cuggcaguaaguguuaauc

SEQ ID NO: 1789726 - RNA, 19 nt, Artificial Sequence
  Description of Artificial Sequence: Synthetic oligonucleotide
guaguacguggacugauac

SEQ ID NO: 1789727 - RNA, 19 nt, Artificial Sequence
  Description of Artificial Sequence: Synthetic oligonucleotide
cuugaacaaccuccguucc

SEQ ID NO: 1789728 - RNA, 19 nt, Artificial Sequence
  Description of Artificial Sequence: Synthetic oligonucleotide
gacggacucuucaauggcg

SEQ ID NO: 1789729 - RNA, 19 nt, Artificial Sequence
  Description of Artificial Sequence: Synthetic oligonucleotide
cucaguuauuguauuccug

SEQ ID NO: 1789730 - RNA, 19 nt, Artificial Sequence
  Description of Artificial Sequence: Synthetic oligonucleotide
aagcucccacauuaggaca

SEQ ID NO: 1789731 - RNA, 19 nt, Artificial Sequence
  Description of Artificial Sequence: Synthetic oligonucleotide
gaauccagaagcgcccggg

SEQ ID NO: 1789732 - RNA, 19 nt, Artificial Sequence
  Description of Artificial Sequence: Synthetic oligonucleotide
gggaacgggaagcaguugg

SEQ ID NO: 1789733 - RNA, 19 nt, Artificial Sequence
  Description of Artificial Sequence: Synthetic oligonucleotide
uaacuaaauugagaaucca

SEQ ID NO: 1789734 - RNA, 19 nt, Artificial Sequence
  Description of Artificial Sequence: Synthetic oligonucleotide
ucacgaacgagccguagua

SEQ ID NO: 1789735 - RNA, 19 nt, Artificial Sequence
  Description of Artificial Sequence: Synthetic oligonucleotide
cagugagagagaaccuugg

SEQ ID NO: 1789736 - RNA, 19 nt, Artificial Sequence
  Description of Artificial Sequence: Synthetic oligonucleotide
ucucaagcucccacauuag

SEQ ID NO: 1789737 - RNA, 19 nt, Artificial Sequence
  Description of Artificial Sequence: Synthetic oligonucleotide
auguacguguuguauuuga

SEQ ID NO: 1789738 - RNA, 19 nt, Artificial Sequence
  Description of Artificial Sequence: Synthetic oligonucleotide
gagauucuuccccaaguga

SEQ ID NO: 1789739 - RNA, 19 nt, Artificial Sequence
  Description of Artificial Sequence: Synthetic oligonucleotide
cuccccucgacucuggcgc

SEQ ID NO: 1789740 - RNA, 19 nt, Artificial Sequence
  Description of Artificial Sequence: Synthetic oligonucleotide
gcaguaaguguuaaucugg

SEQ ID NO: 1789741 - RNA, 19 nt, Artificial Sequence
  Description of Artificial Sequence: Synthetic oligonucleotide
agcgucgucuuccgugugc

SEQ ID NO: 1789742 - RNA, 19 nt, Artificial Sequence
  Description of Artificial Sequence: Synthetic oligonucleotide
aagugauugcugcuugcaa

SEQ ID NO: 1789743 - RNA, 19 nt, Artificial Sequence
  Description of Artificial Sequence: Synthetic oligonucleotide
uacguggacugauaccagc

SEQ ID NO: 1789744 - RNA, 19 nt, Artificial Sequence
  Description of Artificial Sequence: Synthetic oligonucleotide
ggcaguaaguguuaaucug

SEQ ID NO: 1789745 - RNA, 19 nt, Artificial Sequence
  Description of Artificial Sequence: Synthetic oligonucleotide
uaguacguggacugauacc

SEQ ID NO: 1789746 - RNA, 19 nt, Artificial Sequence
  Description of Artificial Sequence: Synthetic oligonucleotide
uugggcagugaacuccuug

SEQ ID NO: 1789747 - RNA, 19 nt, Artificial Sequence
  Description of Artificial Sequence: Synthetic oligonucleotide
uuacgaucggcacuuccuc

SEQ ID NO: 1789748 - RNA, 19 nt, Artificial Sequence
  Description of Artificial Sequence: Synthetic oligonucleotide
aacuuccaucaguuuagga

SEQ ID NO: 1789749 - RNA, 19 nt, Artificial Sequence
  Description of Artificial Sequence: Synthetic oligonucleotide
gaucguaaaugagaacgac

SEQ ID NO: 1789750 - RNA, 19 nt, Artificial Sequence
  Description of Artificial Sequence: Synthetic oligonucleotide
agccguaguacguggacug

SEQ ID NO: 1789751 - RNA, 19 nt, Artificial Sequence
  Description of Artificial Sequence: Synthetic oligonucleotide
acguggacugauaccagcc

SEQ ID NO: 1789752 - RNA, 19 nt, Artificial Sequence
  Description of Artificial Sequence: Synthetic oligonucleotide
uguacguguuguauuugau

SEQ ID NO: 1789753 - RNA, 19 nt, Artificial Sequence
  Description of Artificial Sequence: Synthetic oligonucleotide
uuguauuccugaagagccu

SEQ ID NO: 1789754 - RNA, 19 nt, Artificial Sequence
  Description of Artificial Sequence: Synthetic oligonucleotide
gagaacgacggacucuuca

SEQ ID NO: 1789755 - RNA, 19 nt, Artificial Sequence
  Description of Artificial Sequence: Synthetic oligonucleotide
aagcgcccgggucacgaac

SEQ ID NO: 1789756 - RNA, 19 nt, Artificial Sequence
  Description of Artificial Sequence: Synthetic oligonucleotide
agagccugggccaugaaga

SEQ ID NO: 1789757 - RNA, 19 nt, Artificial Sequence
  Description of Artificial Sequence: Synthetic oligonucleotide
aggacauugaugagauggg

SEQ ID NO: 1789758 - RNA, 19 nt, Artificial Sequence
  Description of Artificial Sequence: Synthetic oligonucleotide
gcucaucucauccacccgg

SEQ ID NO: 1789759 - RNA, 19 nt, Artificial Sequence
  Description of Artificial Sequence: Synthetic oligonucleotide
cauuaggacauugaugaga

SEQ ID NO: 1789760 - RNA, 19 nt, Artificial Sequence
  Description of Artificial Sequence: Synthetic oligonucleotide
acauuaggacauugaugag

SEQ ID NO: 1789761 - RNA, 19 nt, Artificial Sequence
  Description of Artificial Sequence: Synthetic oligonucleotide
gucagcgucgucuuccgug

SEQ ID NO: 1789762 - RNA, 19 nt, Artificial Sequence
  Description of Artificial Sequence: Synthetic oligonucleotide
cuggcgacgcugcugauac

SEQ ID NO: 1789763 - RNA, 19 nt, Artificial Sequence
  Description of Artificial Sequence: Synthetic oligonucleotide
ucccacauuaggacauuga

SEQ ID NO: 1789764 - RNA, 19 nt, Artificial Sequence
  Description of Artificial Sequence: Synthetic oligonucleotide
auuacgaucggcacuuccu

SEQ ID NO: 1789765 - RNA, 19 nt, Artificial Sequence
  Description of Artificial Sequence: Synthetic oligonucleotide
cgugcugguaacuaaauug

SEQ ID NO: 1789766 - RNA, 19 nt, Artificial Sequence
  Description of Artificial Sequence: Synthetic oligonucleotide
agaacgacggacucuucaa

SEQ ID NO: 1789767 - RNA, 19 nt, Artificial Sequence
  Description of Artificial Sequence: Synthetic oligonucleotide
aaucccucuccgcuuugca

SEQ ID NO: 1789768 - RNA, 19 nt, Artificial Sequence
  Description of Artificial Sequence: Synthetic oligonucleotide
uuccccaccgcggagcccg

SEQ ID NO: 1789769 - RNA, 19 nt, Artificial Sequence
  Description of Artificial Sequence: Synthetic oligonucleotide
uugcccuuccccaccgcgg

SEQ ID NO: 1789770 - RNA, 19 nt, Artificial Sequence
  Description of Artificial Sequence: Synthetic oligonucleotide
agauucuuccccaagugau

SEQ ID NO: 1789771 - RNA, 19 nt, Artificial Sequence
  Description of Artificial Sequence: Synthetic oligonucleotide
aucggcacuuccucaaaca

SEQ ID NO: 1789772 - RNA, 19 nt, Artificial Sequence
  Description of Artificial Sequence: Synthetic oligonucleotide
gagaauccagaagcgcccg

SEQ ID NO: 1789773 - RNA, 19 nt, Artificial Sequence
  Description of Artificial Sequence: Synthetic oligonucleotide
aggagucagucuguaugcc

SEQ ID NO: 1789774 - RNA, 19 nt, Artificial Sequence
  Description of Artificial Sequence: Synthetic oligonucleotide
ucagcgucgucuuccgugu

SEQ ID NO: 1789775 - RNA, 19 nt, Artificial Sequence
  Description of Artificial Sequence: Synthetic oligonucleotide
ucucauguacguguuguau

SEQ ID NO: 1789776 - RNA, 19 nt, Artificial Sequence
  Description of Artificial Sequence: Synthetic oligonucleotide
uuccaucaguuuaggaguc

SEQ ID NO: 1789777 - RNA, 19 nt, Artificial Sequence
  Description of Artificial Sequence: Synthetic oligonucleotide
auaccagcccacgugcagg

SEQ ID NO: 1789778 - RNA, 19 nt, Artificial Sequence
  Description of Artificial Sequence: Synthetic oligonucleotide
ucggcacuuccucaaacau

SEQ ID NO: 1789779 - RNA, 19 nt, Artificial Sequence
  Description of Artificial Sequence: Synthetic oligonucleotide
ucaauggcgugcugguaac

SEQ ID NO: 1789780 - RNA, 19 nt, Artificial Sequence
  Description of Artificial Sequence: Synthetic oligonucleotide
uguuucucauguacguguu

SEQ ID NO: 1789781 - RNA, 19 nt, Artificial Sequence
  Description of Artificial Sequence: Synthetic oligonucleotide
uccacccgguccaucagca

SEQ ID NO: 1789782 - RNA, 19 nt, Artificial Sequence
  Description of Artificial Sequence: Synthetic oligonucleotide
agaauccagaagcgcccgg

SEQ ID NO: 1789783 - RNA, 19 nt, Artificial Sequence
  Description of Artificial Sequence: Synthetic oligonucleotide
uggucgauguugacauggc

SEQ ID NO: 1789784 - RNA, 19 nt, Artificial Sequence
  Description of Artificial Sequence: Synthetic oligonucleotide
cuuaauuacgaucggcacu

SEQ ID NO: 1789785 - RNA, 19 nt, Artificial Sequence
  Description of Artificial Sequence: Synthetic oligonucleotide
uugcagcaaagaaauguuu

SEQ ID NO: 1789786 - RNA, 19 nt, Artificial Sequence
  Description of Artificial Sequence: Synthetic oligonucleotide
uucagugagagagaaccuu

SEQ ID NO: 1789787 - RNA, 19 nt, Artificial Sequence
  Description of Artificial Sequence: Synthetic oligonucleotide
gacauugaugagaugggaa

SEQ ID NO: 1789788 - RNA, 19 nt, Artificial Sequence
  Description of Artificial Sequence: Synthetic oligonucleotide
ugacauggcgcaggcuucg

SEQ ID NO: 1789789 - RNA, 19 nt, Artificial Sequence
  Description of Artificial Sequence: Synthetic oligonucleotide
uacgaucggcacuuccuca

SEQ ID NO: 1789790 - RNA, 19 nt, Artificial Sequence
  Description of Artificial Sequence: Synthetic oligonucleotide
ugauaccagcccacgugca

SEQ ID NO: 1789791 - RNA, 19 nt, Artificial Sequence
  Description of Artificial Sequence: Synthetic oligonucleotide
uccgccacggcugacuucu

SEQ ID NO: 1789792 - RNA, 19 nt, Artificial Sequence
  Description of Artificial Sequence: Synthetic oligonucleotide
ucgucuuccgugugcugag

SEQ ID NO: 1789793 - RNA, 19 nt, Artificial Sequence
  Description of Artificial Sequence: Synthetic oligonucleotide
ugaugagaugggaauucuu

SEQ ID NO: 1789794 - RNA, 19 nt, Artificial Sequence
  Description of Artificial Sequence: Synthetic oligonucleotide
cuagguuuugggcagugaa

SEQ ID NO: 1789795 - RNA, 19 nt, Artificial Sequence
  Description of Artificial Sequence: Synthetic oligonucleotide
acaaugaauuaauguuuua

SEQ ID NO: 1789796 - RNA, 19 nt, Artificial Sequence
  Description of Artificial Sequence: Synthetic oligonucleotide
aucccucuccgcuuugcag

SEQ ID NO: 1789797 - RNA, 19 nt, Artificial Sequence
  Description of Artificial Sequence: Synthetic oligonucleotide
uugacauggcgcaggcuuc

SEQ ID NO: 1789798 - RNA, 19 nt, Artificial Sequence
  Description of Artificial Sequence: Synthetic oligonucleotide
gaucggcacuuccucaaac

SEQ ID NO: 1789799 - RNA, 19 nt, Artificial Sequence
  Description of Artificial Sequence: Synthetic oligonucleotide
agcagcgaauccauccugg

SEQ ID NO: 1789800 - RNA, 19 nt, Artificial Sequence
  Description of Artificial Sequence: Synthetic oligonucleotide
augggaucguaaaugagaa

SEQ ID NO: 1789801 - RNA, 19 nt, Artificial Sequence
  Description of Artificial Sequence: Synthetic oligonucleotide
ccuugaacaaccuccguuc

SEQ ID NO: 1789802 - RNA, 19 nt, Artificial Sequence
  Description of Artificial Sequence: Synthetic oligonucleotide
gagccugggccaugaagag

SEQ ID NO: 1789803 - RNA, 19 nt, Artificial Sequence
  Description of Artificial Sequence: Synthetic oligonucleotide
cauauucuccugcuggcga

SEQ ID NO: 1789804 - RNA, 19 nt, Artificial Sequence
  Description of Artificial Sequence: Synthetic oligonucleotide
cauguuuauccgccacggc

SEQ ID NO: 1789805 - RNA, 19 nt, Artificial Sequence
  Description of Artificial Sequence: Synthetic oligonucleotide
agaaaucccucuccgcuuu

SEQ ID NO: 1789806 - RNA, 19 nt, Artificial Sequence
  Description of Artificial Sequence: Synthetic oligonucleotide
guuucucauguacguguug

SEQ ID NO: 1789807 - RNA, 19 nt, Artificial Sequence
  Description of Artificial Sequence: Synthetic oligonucleotide
ggucgauguugacauggcg

SEQ ID NO: 1789808 - RNA, 19 nt, Artificial Sequence
  Description of Artificial Sequence: Synthetic oligonucleotide
aauggcgugcugguaacua

SEQ ID NO: 1789809 - RNA, 19 nt, Artificial Sequence
  Description of Artificial Sequence: Synthetic oligonucleotide
ucgacucuggcgcugcaua

SEQ ID NO: 1789810 - RNA, 19 nt, Artificial Sequence
  Description of Artificial Sequence: Synthetic oligonucleotide
ugauugcugcuugcaaggc

SEQ ID NO: 1789811 - RNA, 19 nt, Artificial Sequence
  Description of Artificial Sequence: Synthetic oligonucleotide
ccacauuaggacauugaug

SEQ ID NO: 1789812 - RNA, 19 nt, Artificial Sequence
  Description of Artificial Sequence: Synthetic oligonucleotide
guguuucucauguacgugu

SEQ ID NO: 1789813 - RNA, 19 nt, Artificial Sequence
  Description of Artificial Sequence: Synthetic oligonucleotide
guugacauggcgcaggcuu

SEQ ID NO: 1789814 - RNA, 19 nt, Artificial Sequence
  Description of Artificial Sequence: Synthetic oligonucleotide
gcaacuggagauucuuccc

SEQ ID NO: 1789815 - RNA, 19 nt, Artificial Sequence
  Description of Artificial Sequence: Synthetic oligonucleotide
ucagcaacuggagauucuu

SEQ ID NO: 1789816 - RNA, 19 nt, Artificial Sequence
  Description of Artificial Sequence: Synthetic oligonucleotide
gagcagcgaauccauccug

SEQ ID NO: 1789817 - RNA, 19 nt, Artificial Sequence
  Description of Artificial Sequence: Synthetic oligonucleotide
gcuugcaaggcugagcagc

SEQ ID NO: 1789818 - RNA, 19 nt, Artificial Sequence
  Description of Artificial Sequence: Synthetic oligonucleotide
acguguuguauuugauuau

SEQ ID NO: 1789819 - RNA, 19 nt, Artificial Sequence
  Description of Artificial Sequence: Synthetic oligonucleotide
uuaggacauugaugagaug

SEQ ID NO: 1789820 - RNA, 19 nt, Artificial Sequence
  Description of Artificial Sequence: Synthetic oligonucleotide
augagaacgacggacucuu

SEQ ID NO: 1789821 - RNA, 19 nt, Artificial Sequence
  Description of Artificial Sequence: Synthetic oligonucleotide
gaacgagccguaguacgug

SEQ ID NO: 1789822 - RNA, 19 nt, Artificial Sequence
  Description of Artificial Sequence: Synthetic oligonucleotide
guggacugauaccagccca

SEQ ID NO: 1789823 - RNA, 19 nt, Artificial Sequence
  Description of Artificial Sequence: Synthetic oligonucleotide
aaccuccguuccuuguccu

SEQ ID NO: 1789824 - RNA, 19 nt, Artificial Sequence
  Description of Artificial Sequence: Synthetic oligonucleotide
uuauccgccacggcugacu

SEQ ID NO: 1789825 - RNA, 19 nt, Artificial Sequence
  Description of Artificial Sequence: Synthetic oligonucleotide
ugggaucguaaaugagaac

SEQ ID NO: 1789826 - RNA, 19 nt, Artificial Sequence
  Description of Artificial Sequence: Synthetic oligonucleotide
uaauaccaccaggccgucg

SEQ ID NO: 1789827 - RNA, 19 nt, Artificial Sequence
  Description of Artificial Sequence: Synthetic oligonucleotide
gucggucuucuacaaccag

SEQ ID NO: 1789828 - RNA, 19 nt, Artificial Sequence
  Description of Artificial Sequence: Synthetic oligonucleotide
cuacaaccagacccaggag

SEQ ID NO: 1789829 - RNA, 19 nt, Artificial Sequence
  Description of Artificial Sequence: Synthetic oligonucleotide
uccagucggucuucuacaa

SEQ ID NO: 1789830 - RNA, 19 nt, Artificial Sequence
  Description of Artificial Sequence: Synthetic oligonucleotide
cuggcucaucucauccacc

SEQ ID NO: 1789831 - RNA, 19 nt, Artificial Sequence
  Description of Artificial Sequence: Synthetic oligonucleotide
cacccgguccaucagcaac

SEQ ID NO: 1789832 - RNA, 19 nt, Artificial Sequence
  Description of Artificial Sequence: Synthetic oligonucleotide
uucucauguacguguugua

SEQ ID NO: 1789833 - RNA, 19 nt, Artificial Sequence
  Description of Artificial Sequence: Synthetic oligonucleotide
uuccgugugcugagggaac

SEQ ID NO: 1789834 - RNA, 19 nt, Artificial Sequence
  Description of Artificial Sequence: Synthetic oligonucleotide
acggcugacuucuucucaa

SEQ ID NO: 1789835 - RNA, 19 nt, Artificial Sequence
  Description of Artificial Sequence: Synthetic oligonucleotide
acgaucggcacuuccucaa

SEQ ID NO: 1789836 - RNA, 19 nt, Artificial Sequence
  Description of Artificial Sequence: Synthetic oligonucleotide
gauuauguccuggcucauc

SEQ ID NO: 1789837 - RNA, 19 nt, Artificial Sequence
  Description of Artificial Sequence: Synthetic oligonucleotide
agccgccuuugccuuugcc

SEQ ID NO: 1789838 - RNA, 19 nt, Artificial Sequence
  Description of Artificial Sequence: Synthetic oligonucleotide
ugcuugcaaggcugagcag

SEQ ID NO: 1789839 - RNA, 19 nt, Artificial Sequence
  Description of Artificial Sequence: Synthetic oligonucleotide
gcuugccuagguuuugggc

SEQ ID NO: 1789840 - RNA, 19 nt, Artificial Sequence
  Description of Artificial Sequence: Synthetic oligonucleotide
cuuccccaagugauugcug

SEQ ID NO: 1789841 - RNA, 19 nt, Artificial Sequence
  Description of Artificial Sequence: Synthetic oligonucleotide
cauguacguguuguauuug

SEQ ID NO: 1789842 - RNA, 19 nt, Artificial Sequence
  Description of Artificial Sequence: Synthetic oligonucleotide
ugguaaucuccagucgguc

SEQ ID NO: 1789843 - RNA, 19 nt, Artificial Sequence
  Description of Artificial Sequence: Synthetic oligonucleotide
aguuuaggagucagucugu

SEQ ID NO: 1789844 - RNA, 19 nt, Artificial Sequence
  Description of Artificial Sequence: Synthetic oligonucleotide
cuucuacaaccagacccag

SEQ ID NO: 1789845 - RNA, 19 nt, Artificial Sequence
  Description of Artificial Sequence: Synthetic oligonucleotide
uaccagcccacgugcaggu

SEQ ID NO: 1789846 - RNA, 19 nt, Artificial Sequence
  Description of Artificial Sequence: Synthetic oligonucleotide
guuuauccgccacggcuga

SEQ ID NO: 1789847 - RNA, 19 nt, Artificial Sequence
  Description of Artificial Sequence: Synthetic oligonucleotide
auggcgugcugguaacuaa

SEQ ID NO: 1789848 - RNA, 19 nt, Artificial Sequence
  Description of Artificial Sequence: Synthetic oligonucleotide
caguuauuguauuccugaa

SEQ ID NO: 1789849 - RNA, 19 nt, Artificial Sequence
  Description of Artificial Sequence: Synthetic oligonucleotide
gguguuucucauguacgug

SEQ ID NO: 1789850 - RNA, 19 nt, Artificial Sequence
  Description of Artificial Sequence: Synthetic oligonucleotide
aaucuccagucggucuucu

SEQ ID NO: 1789851 - RNA, 19 nt, Artificial Sequence
  Description of Artificial Sequence: Synthetic oligonucleotide
ugccuuugcccuuccccac

SEQ ID NO: 1789852 - RNA, 19 nt, Artificial Sequence
  Description of Artificial Sequence: Synthetic oligonucleotide
cuccaucugauacuggacu

SEQ ID NO: 1789853 - RNA, 19 nt, Artificial Sequence
  Description of Artificial Sequence: Synthetic oligonucleotide
aguguuaaucuggccugca

SEQ ID NO: 1789854 - RNA, 19 nt, Artificial Sequence
  Description of Artificial Sequence: Synthetic oligonucleotide
auccuucucuuuacaaacu

SEQ ID NO: 1789855 - RNA, 19 nt, Artificial Sequence
  Description of Artificial Sequence: Synthetic oligonucleotide
gucgucuuccgugugcuga

SEQ ID NO: 1789856 - RNA, 19 nt, Artificial Sequence
  Description of Artificial Sequence: Synthetic oligonucleotide
uauccgccacggcugacuu

SEQ ID NO: 1789857 - RNA, 19 nt, Artificial Sequence
  Description of Artificial Sequence: Synthetic oligonucleotide
agagcuugccuagguuuug

SEQ ID NO: 1789858 - RNA, 19 nt, Artificial Sequence
  Description of Artificial Sequence: Synthetic oligonucleotide
cuugauaguguuugaugau

SEQ ID NO: 1789859 - RNA, 19 nt, Artificial Sequence
  Description of Artificial Sequence: Synthetic oligonucleotide
cuguaugccuucagugaga

SEQ ID NO: 1789860 - RNA, 19 nt, Artificial Sequence
  Description of Artificial Sequence: Synthetic oligonucleotide
acggacucuucaauggcgu

SEQ ID NO: 1789861 - RNA, 19 nt, Artificial Sequence
  Description of Artificial Sequence: Synthetic oligonucleotide
gugccuuccuugcgcgacg

SEQ ID NO: 1789862 - RNA, 19 nt, Artificial Sequence
  Description of Artificial Sequence: Synthetic oligonucleotide
gcgaauccauccuggcagg

SEQ ID NO: 1789863 - RNA, 19 nt, Artificial Sequence
  Description of Artificial Sequence: Synthetic oligonucleotide
uuccuugcgcgacgccaug

SEQ ID NO: 1789864 - RNA, 19 nt, Artificial Sequence
  Description of Artificial Sequence: Synthetic oligonucleotide
ggaagcaguugguaaucuc

SEQ ID NO: 1789865 - RNA, 19 nt, Artificial Sequence
  Description of Artificial Sequence: Synthetic oligonucleotide
ggcgacgcugcugauacug

SEQ ID NO: 1789866 - RNA, 19 nt, Artificial Sequence
  Description of Artificial Sequence: Synthetic oligonucleotide
guaaucuccagucggucuu

SEQ ID NO: 1789867 - RNA, 19 nt, Artificial Sequence
  Description of Artificial Sequence: Synthetic oligonucleotide
agcgcccgggucacgaacg

SEQ ID NO: 1789868 - RNA, 19 nt, Artificial Sequence
  Description of Artificial Sequence: Synthetic oligonucleotide
cacgaacgagccguaguac

SEQ ID NO: 1789869 - RNA, 19 nt, Artificial Sequence
  Description of Artificial Sequence: Synthetic oligonucleotide
ggaucguaaaugagaacga

SEQ ID NO: 1789870 - RNA, 19 nt, Artificial Sequence
  Description of Artificial Sequence: Synthetic oligonucleotide
agaagcgcccgggucacga

SEQ ID NO: 1789871 - RNA, 19 nt, Artificial Sequence
  Description of Artificial Sequence: Synthetic oligonucleotide
guacguggacugauaccag

SEQ ID NO: 1789872 - RNA, 19 nt, Artificial Sequence
  Description of Artificial Sequence: Synthetic oligonucleotide
gauaguguuugaugaucuu

SEQ ID NO: 1789873 - RNA, 19 nt, Artificial Sequence
  Description of Artificial Sequence: Synthetic oligonucleotide
ggucuucuacaaccagacc

SEQ ID NO: 1789874 - RNA, 19 nt, Artificial Sequence
  Description of Artificial Sequence: Synthetic oligonucleotide
gacucuucaauggcgugcu

SEQ ID NO: 1789875 - RNA, 19 nt, Artificial Sequence
  Description of Artificial Sequence: Synthetic oligonucleotide
cugcuucacggccgagucc

SEQ ID NO: 1789876 - RNA, 19 nt, Artificial Sequence
  Description of Artificial Sequence: Synthetic oligonucleotide
gcucauguuuauccgccac

SEQ ID NO: 1789877 - RNA, 19 nt, Artificial Sequence
  Description of Artificial Sequence: Synthetic oligonucleotide
ggacugauaccagcccacg

SEQ ID NO: 1789878 - RNA, 19 nt, Artificial Sequence
  Description of Artificial Sequence: Synthetic oligonucleotide
uucuggcaguaaguguuaa

SEQ ID NO: 1789879 - RNA, 19 nt, Artificial Sequence
  Description of Artificial Sequence: Synthetic oligonucleotide
agcucccacauuaggacau

SEQ ID NO: 1789880 - RNA, 19 nt, Artificial Sequence
  Description of Artificial Sequence: Synthetic oligonucleotide
gguuuugggcagugaacuc

SEQ ID NO: 1789881 - RNA, 19 nt, Artificial Sequence
  Description of Artificial Sequence: Synthetic oligonucleotide
cuugcaaggcugagcagcu

SEQ ID NO: 1789882 - RNA, 19 nt, Artificial Sequence
  Description of Artificial Sequence: Synthetic oligonucleotide
uuaauaccaccaggccguc

SEQ ID NO: 1789883 - RNA, 19 nt, Artificial Sequence
  Description of Artificial Sequence: Synthetic oligonucleotide
gacugauaccagcccacgu

SEQ ID NO: 1789884 - RNA, 19 nt, Artificial Sequence
  Description of Artificial Sequence: Synthetic oligonucleotide
gcuccccucgacucuggcg

SEQ ID NO: 1789885 - RNA, 19 nt, Artificial Sequence
  Description of Artificial Sequence: Synthetic oligonucleotide
cucauguacguguuguauu

SEQ ID NO: 1789886 - RNA, 19 nt, Artificial Sequence
  Description of Artificial Sequence: Synthetic oligonucleotide
auccgccacggcugacuuc

SEQ ID NO: 1789887 - RNA, 19 nt, Artificial Sequence
  Description of Artificial Sequence: Synthetic oligonucleotide
cucccacauuaggacauug

SEQ ID NO: 1789888 - RNA, 19 nt, Artificial Sequence
  Description of Artificial Sequence: Synthetic oligonucleotide
gucacgaacgagccguagu

SEQ ID NO: 1789889 - RNA, 19 nt, Artificial Sequence
  Description of Artificial Sequence: Synthetic oligonucleotide
guguuguauuugauuaugu

SEQ ID NO: 1789890 - RNA, 19 nt, Artificial Sequence
  Description of Artificial Sequence: Synthetic oligonucleotide
gaacgacggacucuucaau

SEQ ID NO: 1789891 - RNA, 19 nt, Artificial Sequence
  Description of Artificial Sequence: Synthetic oligonucleotide
ggacauugaugagauggga

SEQ ID NO: 1789892 - RNA, 19 nt, Artificial Sequence
  Description of Artificial Sequence: Synthetic oligonucleotide
ugccuuccuugcgcgacgc

SEQ ID NO: 1789893 - RNA, 19 nt, Artificial Sequence
  Description of Artificial Sequence: Synthetic oligonucleotide
agcacuccuugaacaaccu

SEQ ID NO: 1789894 - RNA, 19 nt, Artificial Sequence
  Description of Artificial Sequence: Synthetic oligonucleotide
gaacgggaagcaguuggua

SEQ ID NO: 1789895 - RNA, 19 nt, Artificial Sequence
  Description of Artificial Sequence: Synthetic oligonucleotide
cuucagugagagagaaccu

SEQ ID NO: 1789896 - RNA, 19 nt, Artificial Sequence
  Description of Artificial Sequence: Synthetic oligonucleotide
uuuauccgccacggcugac

SEQ ID NO: 1789897 - RNA, 19 nt, Artificial Sequence
  Description of Artificial Sequence: Synthetic oligonucleotide
gagucagucuguaugccuu

SEQ ID NO: 1789898 - RNA, 19 nt, Artificial Sequence
  Description of Artificial Sequence: Synthetic oligonucleotide
cccaagugauugcugcuug

SEQ ID NO: 1789899 - RNA, 19 nt, Artificial Sequence
  Description of Artificial Sequence: Synthetic oligonucleotide
gccggugccuuccuugcgc

SEQ ID NO: 1789900 - RNA, 19 nt, Artificial Sequence
  Description of Artificial Sequence: Synthetic oligonucleotide
gcaguugguaaucuccagu

SEQ ID NO: 1789901 - RNA, 19 nt, Artificial Sequence
  Description of Artificial Sequence: Synthetic oligonucleotide
cuugauguucuggcaguaa

SEQ ID NO: 1789902 - RNA, 19 nt, Artificial Sequence
  Description of Artificial Sequence: Synthetic oligonucleotide
ugguggcgucuccaugguc

SEQ ID NO: 1789903 - RNA, 19 nt, Artificial Sequence
  Description of Artificial Sequence: Synthetic oligonucleotide
gggaauucuuaauuacgau

SEQ ID NO: 1789904 - RNA, 19 nt, Artificial Sequence
  Description of Artificial Sequence: Synthetic oligonucleotide
cuccauggucuucucagcu

SEQ ID NO: 1789905 - RNA, 19 nt, Artificial Sequence
  Description of Artificial Sequence: Synthetic oligonucleotide
uaauuacgaucggcacuuc

SEQ ID NO: 1789906 - RNA, 19 nt, Artificial Sequence
  Description of Artificial Sequence: Synthetic oligonucleotide
agucagcgucgucuuccgu

SEQ ID NO: 1789907 - RNA, 19 nt, Artificial Sequence
  Description of Artificial Sequence: Synthetic oligonucleotide
ggugccuuccuugcgcgac

SEQ ID NO: 1789908 - RNA, 19 nt, Artificial Sequence
  Description of Artificial Sequence: Synthetic oligonucleotide
agcucccuuuucucaguua

SEQ ID NO: 1789909 - RNA, 19 nt, Artificial Sequence
  Description of Artificial Sequence: Synthetic oligonucleotide
cguggacugauaccagccc

SEQ ID NO: 1789910 - RNA, 19 nt, Artificial Sequence
  Description of Artificial Sequence: Synthetic oligonucleotide
caucaguuuaggagucagu

SEQ ID NO: 1789911 - RNA, 19 nt, Artificial Sequence
  Description of Artificial Sequence: Synthetic oligonucleotide
agggaacgggaagcaguug

SEQ ID NO: 1789912 - RNA, 19 nt, Artificial Sequence
  Description of Artificial Sequence: Synthetic oligonucleotide
caaccagacccaggagcac

SEQ ID NO: 1789913 - RNA, 19 nt, Artificial Sequence
  Description of Artificial Sequence: Synthetic oligonucleotide
gcccacgugcagguggucg

SEQ ID NO: 1789914 - RNA, 19 nt, Artificial Sequence
  Description of Artificial Sequence: Synthetic oligonucleotide
uccccucgacucuggcgcu

SEQ ID NO: 1789915 - RNA, 19 nt, Artificial Sequence
  Description of Artificial Sequence: Synthetic oligonucleotide
ccgcuuugcagcaaagaaa

SEQ ID NO: 1789916 - RNA, 19 nt, Artificial Sequence
  Description of Artificial Sequence: Synthetic oligonucleotide
gagccguaguacguggacu

SEQ ID NO: 1789917 - RNA, 19 nt, Artificial Sequence
  Description of Artificial Sequence: Synthetic oligonucleotide
gcucccuuuucucaguuau

SEQ ID NO: 1789918 - RNA, 19 nt, Artificial Sequence
  Description of Artificial Sequence: Synthetic oligonucleotide
cauugaugagaugggaauu

SEQ ID NO: 1789919 - RNA, 19 nt, Artificial Sequence
  Description of Artificial Sequence: Synthetic oligonucleotide
cucuccgcuuugcagcaaa

SEQ ID NO: 1789920 - RNA, 19 nt, Artificial Sequence
  Description of Artificial Sequence: Synthetic oligonucleotide
cuccgcuuugcagcaaaga

SEQ ID NO: 1789921 - RNA, 19 nt, Artificial Sequence
  Description of Artificial Sequence: Synthetic oligonucleotide
gguggucgauguugacaug

SEQ ID NO: 1789922 - RNA, 19 nt, Artificial Sequence
  Description of Artificial Sequence: Synthetic oligonucleotide
guaugccuucagugagaga

SEQ ID NO: 1789923 - RNA, 19 nt, Artificial Sequence
  Description of Artificial Sequence: Synthetic oligonucleotide
cgacggacucuucaauggc

SEQ ID NO: 1789924 - RNA, 19 nt, Artificial Sequence
  Description of Artificial Sequence: Synthetic oligonucleotide
ccggugccuuccuugcgcg

SEQ ID NO: 1789925 - RNA, 19 nt, Artificial Sequence
  Description of Artificial Sequence: Synthetic oligonucleotide
gaagcgcccgggucacgaa

SEQ ID NO: 1789926 - RNA, 19 nt, Artificial Sequence
  Description of Artificial Sequence: Synthetic oligonucleotide
guucuggcaguaaguguua

SEQ ID NO: 1789927 - RNA, 19 nt, Artificial Sequence
  Description of Artificial Sequence: Synthetic oligonucleotide
ggucacgaacgagccguag

SEQ ID NO: 1789928 - RNA, 19 nt, Artificial Sequence
  Description of Artificial Sequence: Synthetic oligonucleotide
acgagccguaguacgugga

SEQ ID NO: 1789929 - RNA, 19 nt, Artificial Sequence
  Description of Artificial Sequence: Synthetic oligonucleotide
gaggcggcgcuggggccgg

SEQ ID NO: 1789930 - RNA, 19 nt, Artificial Sequence
  Description of Artificial Sequence: Synthetic oligonucleotide
ccugcaaugagcagcgaau

SEQ ID NO: 1789931 - RNA, 19 nt, Artificial Sequence
  Description of Artificial Sequence: Synthetic oligonucleotide
cacucugguggcgucucca

SEQ ID NO: 1789932 - RNA, 19 nt, Artificial Sequence
  Description of Artificial Sequence: Synthetic oligonucleotide
caagcucccuuuucucagu

SEQ ID NO: 1789933 - RNA, 19 nt, Artificial Sequence
  Description of Artificial Sequence: Synthetic oligonucleotide
cuuccuugcgcgacgccau

SEQ ID NO: 1789934 - RNA, 19 nt, Artificial Sequence
  Description of Artificial Sequence: Synthetic oligonucleotide
ggccggugccuuccuugcg

SEQ ID NO: 1789935 - RNA, 19 nt, Artificial Sequence
  Description of Artificial Sequence: Synthetic oligonucleotide
caccgcggagcccgcggag

SEQ ID NO: 1789936 - RNA, 19 nt, Artificial Sequence
  Description of Artificial Sequence: Synthetic oligonucleotide
gagccgccuuugccuuugc

SEQ ID NO: 1789937 - RNA, 19 nt, Artificial Sequence
  Description of Artificial Sequence: Synthetic oligonucleotide
cccacauuaggacauugau

SEQ ID NO: 1789938 - RNA, 19 nt, Artificial Sequence
  Description of Artificial Sequence: Synthetic oligonucleotide
uggcgacgcugcugauacu

SEQ ID NO: 1789939 - RNA, 19 nt, Artificial Sequence
  Description of Artificial Sequence: Synthetic oligonucleotide
cgagccguaguacguggac

SEQ ID NO: 1789940 - RNA, 19 nt, Artificial Sequence
  Description of Artificial Sequence: Synthetic oligonucleotide
cagcgucgucuuccgugug

SEQ ID NO: 1789941 - RNA, 19 nt, Artificial Sequence
  Description of Artificial Sequence: Synthetic oligonucleotide
ccgggucacgaacgagccg

SEQ ID NO: 1789942 - RNA, 19 nt, Artificial Sequence
  Description of Artificial Sequence: Synthetic oligonucleotide
agcccacgugcaggugguc

SEQ ID NO: 1789943 - RNA, 19 nt, Artificial Sequence
  Description of Artificial Sequence: Synthetic oligonucleotide
ggcgucuccauggucuucu

SEQ ID NO: 1789944 - RNA, 19 nt, Artificial Sequence
  Description of Artificial Sequence: Synthetic oligonucleotide
ccgugugcugagggaacgg

SEQ ID NO: 1789945 - RNA, 19 nt, Artificial Sequence
  Description of Artificial Sequence: Synthetic oligonucleotide
gccuagguuuugggcagug

SEQ ID NO: 1789946 - RNA, 19 nt, Artificial Sequence
  Description of Artificial Sequence: Synthetic oligonucleotide
gacucuggcgcugcauauu

SEQ ID NO: 1789947 - RNA, 19 nt, Artificial Sequence
  Description of Artificial Sequence: Synthetic oligonucleotide
ccagaagcgcccgggucac

SEQ ID NO: 1789948 - RNA, 19 nt, Artificial Sequence
  Description of Artificial Sequence: Synthetic oligonucleotide
cccacgugcagguggucga

SEQ ID NO: 1789949 - RNA, 19 nt, Artificial Sequence
  Description of Artificial Sequence: Synthetic oligonucleotide
cuccuugaacaaccuccgu

SEQ ID NO: 1789950 - RNA, 19 nt, Artificial Sequence
  Description of Artificial Sequence: Synthetic oligonucleotide
ugcuggcgacgcugcugau

SEQ ID NO: 1789951 - RNA, 19 nt, Artificial Sequence
  Description of Artificial Sequence: Synthetic oligonucleotide
gccuuugccuuugcccuuc

SEQ ID NO: 1789952 - RNA, 19 nt, Artificial Sequence
  Description of Artificial Sequence: Synthetic oligonucleotide
cucccuuuucucaguuauu

SEQ ID NO: 1789953 - RNA, 19 nt, Artificial Sequence
  Description of Artificial Sequence: Synthetic oligonucleotide
cguaguacguggacugaua

SEQ ID NO: 1789954 - RNA, 19 nt, Artificial Sequence
  Description of Artificial Sequence: Synthetic oligonucleotide
cugguggcgucuccauggu

SEQ ID NO: 1789955 - RNA, 19 nt, Artificial Sequence
  Description of Artificial Sequence: Synthetic oligonucleotide
cgggaagcaguugguaauc

SEQ ID NO: 1789956 - RNA, 19 nt, Artificial Sequence
  Description of Artificial Sequence: Synthetic oligonucleotide
gggcagugaacuccuugau

SEQ ID NO: 1789957 - RNA, 19 nt, Artificial Sequence
  Description of Artificial Sequence: Synthetic oligonucleotide
gccuuccuugcgcgacgcc

SEQ ID NO: 1789958 - RNA, 19 nt, Artificial Sequence
  Description of Artificial Sequence: Synthetic oligonucleotide
gccguaguacguggacuga

SEQ ID NO: 1789959 - RNA, 19 nt, Artificial Sequence
  Description of Artificial Sequence: Synthetic oligonucleotide
gcgcaggcuucgcaucauc

SEQ ID NO: 1789960 - RNA, 19 nt, Artificial Sequence
  Description of Artificial Sequence: Synthetic oligonucleotide
cgaacgagccguaguacgu

SEQ ID NO: 1789961 - RNA, 19 nt, Artificial Sequence
  Description of Artificial Sequence: Synthetic oligonucleotide
cccucgacucuggcgcugc

SEQ ID NO: 1789962 - RNA, 19 nt, Artificial Sequence
  Description of Artificial Sequence: Synthetic oligonucleotide
gcgugcugguaacuaaauu

SEQ ID NO: 1789963 - RNA, 19 nt, Artificial Sequence
  Description of Artificial Sequence: Synthetic oligonucleotide
caauggcgugcugguaacu

SEQ ID NO: 1789964 - RNA, 19 nt, Artificial Sequence
  Description of Artificial Sequence: Synthetic oligonucleotide
ccuagguuuugggcaguga

SEQ ID NO: 1789965 - RNA, 19 nt, Artificial Sequence
  Description of Artificial Sequence: Synthetic oligonucleotide
gcgacgcugcugauacuga

SEQ ID NO: 1789966 - RNA, 19 nt, Artificial Sequence
  Description of Artificial Sequence: Synthetic oligonucleotide
cccgguccaucagcaacug

SEQ ID NO: 1789967 - RNA, 19 nt, Artificial Sequence
  Description of Artificial Sequence: Synthetic oligonucleotide
ggagcccgccgaggcggcg

SEQ ID NO: 1789968 - RNA, 19 nt, Artificial Sequence
  Description of Artificial Sequence: Synthetic oligonucleotide
cgucuuccgugugcugagg

SEQ ID NO: 1789969 - RNA, 19 nt, Artificial Sequence
  Description of Artificial Sequence: Synthetic oligonucleotide
gcuggcgacgcugcugaua

SEQ ID NO: 1789970 - RNA, 19 nt, Artificial Sequence
  Description of Artificial Sequence: Synthetic oligonucleotide
ggcuucgcaucaucuccau

SEQ ID NO: 1789971 - RNA, 19 nt, Artificial Sequence
  Description of Artificial Sequence: Synthetic oligonucleotide
gcuucacggccgagucccc

SEQ ID NO: 1789972 - RNA, 19 nt, Artificial Sequence
  Description of Artificial Sequence: Synthetic oligonucleotide
cgggucacgaacgagccgu

SEQ ID NO: 1789973 - RNA, 19 nt, Artificial Sequence
  Description of Artificial Sequence: Synthetic oligonucleotide
gcccgcggagcccgccgag

SEQ ID NO: 1789974 - RNA, 19 nt, Artificial Sequence
  Description of Artificial Sequence: Synthetic oligonucleotide
ccccgagccgccuuugccu

SEQ ID NO: 1789975 - RNA, 19 nt, Artificial Sequence
  Description of Artificial Sequence: Synthetic oligonucleotide
cgagccgccuuugccuuug

SEQ ID NO: 1789976 - RNA, 19 nt, Artificial Sequence
  Description of Artificial Sequence: Synthetic oligonucleotide
cucgacucuggcgcugcau

SEQ ID NO: 1789977 - RNA, 19 nt, Artificial Sequence
  Description of Artificial Sequence: Synthetic oligonucleotide
ccaggccgucgaucugcac

SEQ ID NO: 1789978 - RNA, 19 nt, Artificial Sequence
  Description of Artificial Sequence: Synthetic oligonucleotide
gcgcccgggucacgaacga

SEQ ID NO: 1789979 - RNA, 19 nt, Artificial Sequence
  Description of Artificial Sequence: Synthetic oligonucleotide
cgucgucuuccgugugcug

SEQ ID NO: 1789980 - RNA, 19 nt, Artificial Sequence
  Description of Artificial Sequence: Synthetic oligonucleotide
ccacccgguccaucagcaa

SEQ ID NO: 1789981 - RNA, 19 nt, Artificial Sequence
  Description of Artificial Sequence: Synthetic oligonucleotide
ccccucgacucuggcgcug

SEQ ID NO: 1789982 - RNA, 19 nt, Artificial Sequence
  Description of Artificial Sequence: Synthetic oligonucleotide
cggagcccgccgaggcggc

SEQ ID NO: 1789983 - RNA, 19 nt, Artificial Sequence
  Description of Artificial Sequence: Synthetic oligonucleotide
cuggggccggugccuuccu

SEQ ID NO: 1789984 - RNA, 19 nt, Artificial Sequence
  Description of Artificial Sequence: Synthetic oligonucleotide
cgcccgggucacgaacgag

SEQ ID NO: 1789985 - RNA, 19 nt, Artificial Sequence
  Description of Artificial Sequence: Synthetic oligonucleotide
cgacucuggcgcugcauau

SEQ ID NO: 1789986 - RNA, 19 nt, Artificial Sequence
  Description of Artificial Sequence: Synthetic oligonucleotide
cccgagccgccuuugccuu

SEQ ID NO: 1789987 - RNA, 19 nt, Artificial Sequence
  Description of Artificial Sequence: Synthetic oligonucleotide
gcucccacauuaggacauu

SEQ ID NO: 1789988 - RNA, 19 nt, Artificial Sequence
  Description of Artificial Sequence: Synthetic oligonucleotide
cggugccuuccuugcgcga

SEQ ID NO: 1789989 - RNA, 19 nt, Artificial Sequence
  Description of Artificial Sequence: Synthetic oligonucleotide
ccucuccgcuuugcagcaa

SEQ ID NO: 1789990 - RNA, 19 nt, Artificial Sequence
  Description of Artificial Sequence: Synthetic oligonucleotide
ccacgugcagguggucgau

SEQ ID NO: 1789991 - RNA, 19 nt, Artificial Sequence
  Description of Artificial Sequence: Synthetic oligonucleotide
ccgagccgccuuugccuuu

SEQ ID NO: 1789992 - RNA, 19 nt, Artificial Sequence
  Description of Artificial Sequence: Synthetic oligonucleotide
ccgccacggcugacuucuu

SEQ ID NO: 1789993 - RNA, 19 nt, Artificial Sequence
  Description of Artificial Sequence: Synthetic oligonucleotide
aacagcggcacauacagcc

SEQ ID NO: 1789994 - RNA, 19 nt, Artificial Sequence
  Description of Artificial Sequence: Synthetic oligonucleotide
ucagauugaaggcacagag

SEQ ID NO: 1789995 - RNA, 19 nt, Artificial Sequence
  Description of Artificial Sequence: Synthetic oligonucleotide
gauacgguuuuccugaggg

SEQ ID NO: 1789996 - RNA, 19 nt, Artificial Sequence
  Description of Artificial Sequence: Synthetic oligonucleotide
ugauuaaccuggaauacag

SEQ ID NO: 1789997 - RNA, 19 nt, Artificial Sequence
  Description of Artificial Sequence: Synthetic oligonucleotide
ccaaaugucagauugaagg

SEQ ID NO: 1789998 - RNA, 19 nt, Artificial Sequence
  Description of Artificial Sequence: Synthetic oligonucleotide
aauucagccaaggaguagg

SEQ ID NO: 1789999 - RNA, 19 nt, Artificial Sequence
  Description of Artificial Sequence: Synthetic oligonucleotide
gagagaaagccacuggucg

SEQ ID NO: 1790000 - RNA, 19 nt, Artificial Sequence
  Description of Artificial Sequence: Synthetic oligonucleotide
agauugaaggcacagaggu

SEQ ID NO: 1790001 - RNA, 19 nt, Artificial Sequence
  Description of Artificial Sequence: Synthetic oligonucleotide
cucaaaaggagccaugggg

SEQ ID NO: 1790002 - RNA, 19 nt, Artificial Sequence
  Description of Artificial Sequence: Synthetic oligonucleotide
uucugggacccaaagaagg

SEQ ID NO: 1790003 - RNA, 19 nt, Artificial Sequence
  Description of Artificial Sequence: Synthetic oligonucleotide
uacaggauggccuugaaaa

SEQ ID NO: 1790004 - RNA, 19 nt, Artificial Sequence
  Description of Artificial Sequence: Synthetic oligonucleotide
auuaaccuggaauacagca

SEQ ID NO: 1790005 - RNA, 19 nt, Artificial Sequence
  Description of Artificial Sequence: Synthetic oligonucleotide
caagguagggugaagagag

SEQ ID NO: 1790006 - RNA, 19 nt, Artificial Sequence
  Description of Artificial Sequence: Synthetic oligonucleotide
auaugaagcagguucuggg

SEQ ID NO: 1790007 - RNA, 19 nt, Artificial Sequence
  Description of Artificial Sequence: Synthetic oligonucleotide
ucaaacucaagcagccugg

SEQ ID NO: 1790008 - RNA, 19 nt, Artificial Sequence
  Description of Artificial Sequence: Synthetic oligonucleotide
aaugucagauugaaggcac

SEQ ID NO: 1790009 - RNA, 19 nt, Artificial Sequence
  Description of Artificial Sequence: Synthetic oligonucleotide
ucaaaaggagccauggggu

SEQ ID NO: 1790010 - RNA, 19 nt, Artificial Sequence
  Description of Artificial Sequence: Synthetic oligonucleotide
auaaccuucauggauaucu

SEQ ID NO: 1790011 - RNA, 19 nt, Artificial Sequence
  Description of Artificial Sequence: Synthetic oligonucleotide
uuuauagacugguacucag

SEQ ID NO: 1790012 - RNA, 19 nt, Artificial Sequence
  Description of Artificial Sequence: Synthetic oligonucleotide
agaagcauugaccaggaga

SEQ ID NO: 1790013 - RNA, 19 nt, Artificial Sequence
  Description of Artificial Sequence: Synthetic oligonucleotide
acaagacucaaaaggagcc

SEQ ID NO: 1790014 - RNA, 19 nt, Artificial Sequence
  Description of Artificial Sequence: Synthetic oligonucleotide
auacucgucaucaauagag

SEQ ID NO: 1790015 - RNA, 19 nt, Artificial Sequence
  Description of Artificial Sequence: Synthetic oligonucleotide
caaaugucagauugaaggc

SEQ ID NO: 1790016 - RNA, 19 nt, Artificial Sequence
  Description of Artificial Sequence: Synthetic oligonucleotide
agagaaagccacuggucgc

SEQ ID NO: 1790017 - RNA, 19 nt, Artificial Sequence
  Description of Artificial Sequence: Synthetic oligonucleotide
cuccaguugacacucaggg

SEQ ID NO: 1790018 - RNA, 19 nt, Artificial Sequence
  Description of Artificial Sequence: Synthetic oligonucleotide
aaaugcuccaguaggcucg

SEQ ID NO: 1790019 - RNA, 19 nt, Artificial Sequence
  Description of Artificial Sequence: Synthetic oligonucleotide
cauacauagugcagggugg

SEQ ID NO: 1790020 - RNA, 19 nt, Artificial Sequence
  Description of Artificial Sequence: Synthetic oligonucleotide
cacaagacucaaaaggagc

SEQ ID NO: 1790021 - RNA, 19 nt, Artificial Sequence
  Description of Artificial Sequence: Synthetic oligonucleotide
ugcugucaaacucaagcag

SEQ ID NO: 1790022 - RNA, 19 nt, Artificial Sequence
  Description of Artificial Sequence: Synthetic oligonucleotide
uauuguuccaggagaauuc

SEQ ID NO: 1790023 - RNA, 19 nt, Artificial Sequence
  Description of Artificial Sequence: Synthetic oligonucleotide
cagaauacugcuuguggcg

SEQ ID NO: 1790024 - RNA, 19 nt, Artificial Sequence
  Description of Artificial Sequence: Synthetic oligonucleotide
cucgucaucaauagagugc

SEQ ID NO: 1790025 - RNA, 19 nt, Artificial Sequence
  Description of Artificial Sequence: Synthetic oligonucleotide
auaucuggcgaguuucuuc

SEQ ID NO: 1790026 - RNA, 19 nt, Artificial Sequence
  Description of Artificial Sequence: Synthetic oligonucleotide
acgguggcgaccucuagcc

SEQ ID NO: 1790027 - RNA, 19 nt, Artificial Sequence
  Description of Artificial Sequence: Synthetic oligonucleotide
aaaugucagauugaaggca

SEQ ID NO: 1790028 - RNA, 19 nt, Artificial Sequence
  Description of Artificial Sequence: Synthetic oligonucleotide
cuaccugacaggaaucugc

SEQ ID NO: 1790029 - RNA, 19 nt, Artificial Sequence
  Description of Artificial Sequence: Synthetic oligonucleotide
aggagacuccaguugacac

SEQ ID NO: 1790030 - RNA, 19 nt, Artificial Sequence
  Description of Artificial Sequence: Synthetic oligonucleotide
agccccaaaugucagauug

SEQ ID NO: 1790031 - RNA, 19 nt, Artificial Sequence
  Description of Artificial Sequence: Synthetic oligonucleotide
gauaugaagcagguucugg

SEQ ID NO: 1790032 - RNA, 19 nt, Artificial Sequence
  Description of Artificial Sequence: Synthetic oligonucleotide
agauccaaugaguugguga

SEQ ID NO: 1790033 - RNA, 19 nt, Artificial Sequence
  Description of Artificial Sequence: Synthetic oligonucleotide
aaauaaccuucauggauau

SEQ ID NO: 1790034 - RNA, 19 nt, Artificial Sequence
  Description of Artificial Sequence: Synthetic oligonucleotide
aacacggagugguuuccac

SEQ ID NO: 1790035 - RNA, 19 nt, Artificial Sequence
  Description of Artificial Sequence: Synthetic oligonucleotide
gcaagauccaaugaguugg

SEQ ID NO: 1790036 - RNA, 19 nt, Artificial Sequence
  Description of Artificial Sequence: Synthetic oligonucleotide
ggagacuucuaccugacag

SEQ ID NO: 1790037 - RNA, 19 nt, Artificial Sequence
  Description of Artificial Sequence: Synthetic oligonucleotide
acuucuaccugacaggaau

SEQ ID NO: 1790038 - RNA, 19 nt, Artificial Sequence
  Description of Artificial Sequence: Synthetic oligonucleotide
ugauuccgagcacuagugg

SEQ ID NO: 1790039 - RNA, 19 nt, Artificial Sequence
  Description of Artificial Sequence: Synthetic oligonucleotide
aaugaguuggugauauugu

SEQ ID NO: 1790040 - RNA, 19 nt, Artificial Sequence
  Description of Artificial Sequence: Synthetic oligonucleotide
ugaguuggugauauuguuc

SEQ ID NO: 1790041 - RNA, 19 nt, Artificial Sequence
  Description of Artificial Sequence: Synthetic oligonucleotide
gguuucaguuuauagacug

SEQ ID NO: 1790042 - RNA, 19 nt, Artificial Sequence
  Description of Artificial Sequence: Synthetic oligonucleotide
uaucuggcgaguuucuucu

SEQ ID NO: 1790043 - RNA, 19 nt, Artificial Sequence
  Description of Artificial Sequence: Synthetic oligonucleotide
gagugcagcucuuucacug

SEQ ID NO: 1790044 - RNA, 19 nt, Artificial Sequence
  Description of Artificial Sequence: Synthetic oligonucleotide
uuauagacugguacucaga

SEQ ID NO: 1790045 - RNA, 19 nt, Artificial Sequence
  Description of Artificial Sequence: Synthetic oligonucleotide
gugauauuguuccaggaga

SEQ ID NO: 1790046 - RNA, 19 nt, Artificial Sequence
  Description of Artificial Sequence: Synthetic oligonucleotide
aggaguagggaggauacgg

SEQ ID NO: 1790047 - RNA, 19 nt, Artificial Sequence
  Description of Artificial Sequence: Synthetic oligonucleotide
ugcccuuuccucuggagag

SEQ ID NO: 1790048 - RNA, 19 nt, Artificial Sequence
  Description of Artificial Sequence: Synthetic oligonucleotide
caaugaguuggugauauug

SEQ ID NO: 1790049 - RNA, 19 nt, Artificial Sequence
  Description of Artificial Sequence: Synthetic oligonucleotide
ucgucaucaauagagugca

SEQ ID NO: 1790050 - RNA, 19 nt, Artificial Sequence
  Description of Artificial Sequence: Synthetic oligonucleotide
uguuggucccaguagccag

SEQ ID NO: 1790051 - RNA, 19 nt, Artificial Sequence
  Description of Artificial Sequence: Synthetic oligonucleotide
uagagugcagcucuuucac

SEQ ID NO: 1790052 - RNA, 19 nt, Artificial Sequence
  Description of Artificial Sequence: Synthetic oligonucleotide
uuucaguuuauagacuggu

SEQ ID NO: 1790053 - RNA, 19 nt, Artificial Sequence
  Description of Artificial Sequence: Synthetic oligonucleotide
aaauggcgcucagaguggc

SEQ ID NO: 1790054 - RNA, 19 nt, Artificial Sequence
  Description of Artificial Sequence: Synthetic oligonucleotide
uuccacgaggagaagcucc

SEQ ID NO: 1790055 - RNA, 19 nt, Artificial Sequence
  Description of Artificial Sequence: Synthetic oligonucleotide
aguucccagggccacugcc

SEQ ID NO: 1790056 - RNA, 19 nt, Artificial Sequence
  Description of Artificial Sequence: Synthetic oligonucleotide
auccagggagacuucuacc

SEQ ID NO: 1790057 - RNA, 19 nt, Artificial Sequence
  Description of Artificial Sequence: Synthetic oligonucleotide
aucaggagacaucaggaga

SEQ ID NO: 1790058 - RNA, 19 nt, Artificial Sequence
  Description of Artificial Sequence: Synthetic oligonucleotide
ugccauuggcaaaugcucc

SEQ ID NO: 1790059 - RNA, 19 nt, Artificial Sequence
  Description of Artificial Sequence: Synthetic oligonucleotide
ugcccggauaugaagcagg

SEQ ID NO: 1790060 - RNA, 19 nt, Artificial Sequence
  Description of Artificial Sequence: Synthetic oligonucleotide
ugcauacucgucaucaaua

SEQ ID NO: 1790061 - RNA, 19 nt, Artificial Sequence
  Description of Artificial Sequence: Synthetic oligonucleotide
accucuagcccaaacacgg

SEQ ID NO: 1790062 - RNA, 19 nt, Artificial Sequence
  Description of Artificial Sequence: Synthetic oligonucleotide
uggccagcuggaaauaacc

SEQ ID NO: 1790063 - RNA, 19 nt, Artificial Sequence
  Description of Artificial Sequence: Synthetic oligonucleotide
ucugggacccaaagaaggc

SEQ ID NO: 1790064 - RNA, 19 nt, Artificial Sequence
  Description of Artificial Sequence: Synthetic oligonucleotide
ugagagaaagccacugguc

SEQ ID NO: 1790065 - RNA, 19 nt, Artificial Sequence
  Description of Artificial Sequence: Synthetic oligonucleotide
cacacaagacucaaaagga

SEQ ID NO: 1790066 - RNA, 19 nt, Artificial Sequence
  Description of Artificial Sequence: Synthetic oligonucleotide
agggugaagagaggaagcc

SEQ ID NO: 1790067 - RNA, 19 nt, Artificial Sequence
  Description of Artificial Sequence: Synthetic oligonucleotide
gauuccgagcacuagugga

SEQ ID NO: 1790068 - RNA, 19 nt, Artificial Sequence
  Description of Artificial Sequence: Synthetic oligonucleotide
aaaauggcgcucagagugg

SEQ ID NO: 1790069 - RNA, 19 nt, Artificial Sequence
  Description of Artificial Sequence: Synthetic oligonucleotide
auacgguuuuccugagggc

SEQ ID NO: 1790070 - RNA, 19 nt, Artificial Sequence
  Description of Artificial Sequence: Synthetic oligonucleotide
uaagguccccaacagcggc

SEQ ID NO: 1790071 - RNA, 19 nt, Artificial Sequence
  Description of Artificial Sequence: Synthetic oligonucleotide
cagauugaaggcacagagg

SEQ ID NO: 1790072 - RNA, 19 nt, Artificial Sequence
  Description of Artificial Sequence: Synthetic oligonucleotide
agcugcacacacaagacuc

SEQ ID NO: 1790073 - RNA, 19 nt, Artificial Sequence
  Description of Artificial Sequence: Synthetic oligonucleotide
acucgucaucaauagagug

SEQ ID NO: 1790074 - RNA, 19 nt, Artificial Sequence
  Description of Artificial Sequence: Synthetic oligonucleotide
cagggugcuccauacauag

SEQ ID NO: 1790075 - RNA, 19 nt, Artificial Sequence
  Description of Artificial Sequence: Synthetic oligonucleotide
ugguacucagaauacugcu

SEQ ID NO: 1790076 - RNA, 19 nt, Artificial Sequence
  Description of Artificial Sequence: Synthetic oligonucleotide
guaguguuggucccaguag

SEQ ID NO: 1790077 - RNA, 19 nt, Artificial Sequence
  Description of Artificial Sequence: Synthetic oligonucleotide
acaggaaucugcagugugc

SEQ ID NO: 1790078 - RNA, 19 nt, Artificial Sequence
  Description of Artificial Sequence: Synthetic oligonucleotide
caaggaguagggaggauac

SEQ ID NO: 1790079 - RNA, 19 nt, Artificial Sequence
  Description of Artificial Sequence: Synthetic oligonucleotide
aguuggugcccacugcccg

SEQ ID NO: 1790080 - RNA, 19 nt, Artificial Sequence
  Description of Artificial Sequence: Synthetic oligonucleotide
guggguuucaguuuauaga

SEQ ID NO: 1790081 - RNA, 19 nt, Artificial Sequence
  Description of Artificial Sequence: Synthetic oligonucleotide
acaugagccccggaguucc

SEQ ID NO: 1790082 - RNA, 19 nt, Artificial Sequence
  Description of Artificial Sequence: Synthetic oligonucleotide
cuccauacauagugcaggg

SEQ ID NO: 1790083 - RNA, 19 nt, Artificial Sequence
  Description of Artificial Sequence: Synthetic oligonucleotide
ggagagguaguguuggucc

SEQ ID NO: 1790084 - RNA, 19 nt, Artificial Sequence
  Description of Artificial Sequence: Synthetic oligonucleotide
gaagccagauggugaagag

SEQ ID NO: 1790085 - RNA, 19 nt, Artificial Sequence
  Description of Artificial Sequence: Synthetic oligonucleotide
gucgccauugcaugaagcc

SEQ ID NO: 1790086 - RNA, 19 nt, Artificial Sequence
  Description of Artificial Sequence: Synthetic oligonucleotide
agcagaaacaggccuccuc

SEQ ID NO: 1790087 - RNA, 19 nt, Artificial Sequence
  Description of Artificial Sequence: Synthetic oligonucleotide
ucuagcccaaacacggagu

SEQ ID NO: 1790088 - RNA, 19 nt, Artificial Sequence
  Description of Artificial Sequence: Synthetic oligonucleotide
uaaccuucauggauaucug

SEQ ID NO: 1790089 - RNA, 19 nt, Artificial Sequence
  Description of Artificial Sequence: Synthetic oligonucleotide
gacaggaaucugcagugug

SEQ ID NO: 1790090 - RNA, 19 nt, Artificial Sequence
  Description of Artificial Sequence: Synthetic oligonucleotide
ugucagauugaaggcacag

SEQ ID NO: 1790091 - RNA, 19 nt, Artificial Sequence
  Description of Artificial Sequence: Synthetic oligonucleotide
uacgguuuuccugagggcu

SEQ ID NO: 1790092 - RNA, 19 nt, Artificial Sequence
  Description of Artificial Sequence: Synthetic oligonucleotide
agaccggccagauccagag

SEQ ID NO: 1790093 - RNA, 19 nt, Artificial Sequence
  Description of Artificial Sequence: Synthetic oligonucleotide
aauacugcuuguggcgaag

SEQ ID NO: 1790094 - RNA, 19 nt, Artificial Sequence
  Description of Artificial Sequence: Synthetic oligonucleotide
cuggugaagacaagagcag

SEQ ID NO: 1790095 - RNA, 19 nt, Artificial Sequence
  Description of Artificial Sequence: Synthetic oligonucleotide
auaaggaucaggagacauc

SEQ ID NO: 1790096 - RNA, 19 nt, Artificial Sequence
  Description of Artificial Sequence: Synthetic oligonucleotide
uggcgaagcagcagaaaca

SEQ ID NO: 1790097 - RNA, 19 nt, Artificial Sequence
  Description of Artificial Sequence: Synthetic oligonucleotide
cauugcaugaagccagaug

SEQ ID NO: 1790098 - RNA, 19 nt, Artificial Sequence
  Description of Artificial Sequence: Synthetic oligonucleotide
acacggagugguuuccacg

SEQ ID NO: 1790099 - RNA, 19 nt, Artificial Sequence
  Description of Artificial Sequence: Synthetic oligonucleotide
cagccaaggaguagggagg

SEQ ID NO: 1790100 - RNA, 19 nt, Artificial Sequence
  Description of Artificial Sequence: Synthetic oligonucleotide
uaccugacaggaaucugca

SEQ ID NO: 1790101 - RNA, 19 nt, Artificial Sequence
  Description of Artificial Sequence: Synthetic oligonucleotide
aaacucaagcagccuggug

SEQ ID NO: 1790102 - RNA, 19 nt, Artificial Sequence
  Description of Artificial Sequence: Synthetic oligonucleotide
aaggcuuggacaacuggug

SEQ ID NO: 1790103 - RNA, 19 nt, Artificial Sequence
  Description of Artificial Sequence: Synthetic oligonucleotide
acaaggcauccacuggagg

SEQ ID NO: 1790104 - RNA, 19 nt, Artificial Sequence
  Description of Artificial Sequence: Synthetic oligonucleotide
uccaaugaguuggugauau

SEQ ID NO: 1790105 - RNA, 19 nt, Artificial Sequence
  Description of Artificial Sequence: Synthetic oligonucleotide
acugguacucagaauacug

SEQ ID NO: 1790106 - RNA, 19 nt, Artificial Sequence
  Description of Artificial Sequence: Synthetic oligonucleotide
ggaaucugcagugugcagg

SEQ ID NO: 1790107 - RNA, 19 nt, Artificial Sequence
  Description of Artificial Sequence: Synthetic oligonucleotide
uucugagagaaagccacug

SEQ ID NO: 1790108 - RNA, 19 nt, Artificial Sequence
  Description of Artificial Sequence: Synthetic oligonucleotide
acacucagggcacucugag

SEQ ID NO: 1790109 - RNA, 19 nt, Artificial Sequence
  Description of Artificial Sequence: Synthetic oligonucleotide
ugacacucagggcacucug

SEQ ID NO: 1790110 - RNA, 19 nt, Artificial Sequence
  Description of Artificial Sequence: Synthetic oligonucleotide
accuugaaggccaggcugc

SEQ ID NO: 1790111 - RNA, 19 nt, Artificial Sequence
  Description of Artificial Sequence: Synthetic oligonucleotide
agcauugaccaggagaggu

SEQ ID NO: 1790112 - RNA, 19 nt, Artificial Sequence
  Description of Artificial Sequence: Synthetic oligonucleotide
uggaccuugaaggccaggc

SEQ ID NO: 1790113 - RNA, 19 nt, Artificial Sequence
  Description of Artificial Sequence: Synthetic oligonucleotide
aauaaccuucauggauauc

SEQ ID NO: 1790114 - RNA, 19 nt, Artificial Sequence
  Description of Artificial Sequence: Synthetic oligonucleotide
uggauaucuggcgaguuuc

SEQ ID NO: 1790115 - RNA, 19 nt, Artificial Sequence
  Description of Artificial Sequence: Synthetic oligonucleotide
uccaguugacacucagggc

SEQ ID NO: 1790116 - RNA, 19 nt, Artificial Sequence
  Description of Artificial Sequence: Synthetic oligonucleotide
caaaugcuccaguaggcuc

SEQ ID NO: 1790117 - RNA, 19 nt, Artificial Sequence
  Description of Artificial Sequence: Synthetic oligonucleotide
cuagcccaaacacggagug

SEQ ID NO: 1790118 - RNA, 19 nt, Artificial Sequence
  Description of Artificial Sequence: Synthetic oligonucleotide
ccaacagcggcacauacag

SEQ ID NO: 1790119 - RNA, 19 nt, Artificial Sequence
  Description of Artificial Sequence: Synthetic oligonucleotide
gggugcuccauacauagug

SEQ ID NO: 1790120 - RNA, 19 nt, Artificial Sequence
  Description of Artificial Sequence: Synthetic oligonucleotide
ggagccaugggguuggggc

SEQ ID NO: 1790121 - RNA, 19 nt, Artificial Sequence
  Description of Artificial Sequence: Synthetic oligonucleotide
uucaguuuauagacuggua

SEQ ID NO: 1790122 - RNA, 19 nt, Artificial Sequence
  Description of Artificial Sequence: Synthetic oligonucleotide
acuaguggagacaaggcau

SEQ ID NO: 1790123 - RNA, 19 nt, Artificial Sequence
  Description of Artificial Sequence: Synthetic oligonucleotide
cuaguggagacaaggcauc

SEQ ID NO: 1790124 - RNA, 19 nt, Artificial Sequence
  Description of Artificial Sequence: Synthetic oligonucleotide
auccacuggagggaagccc

SEQ ID NO: 1790125 - RNA, 19 nt, Artificial Sequence
  Description of Artificial Sequence: Synthetic oligonucleotide
caucaggagacuccaguug

SEQ ID NO: 1790126 - RNA, 19 nt, Artificial Sequence
  Description of Artificial Sequence: Synthetic oligonucleotide
gagaaagccacuggucgcc

SEQ ID NO: 1790127 - RNA, 19 nt, Artificial Sequence
  Description of Artificial Sequence: Synthetic oligonucleotide
ccggauaugaagcagguuc

SEQ ID NO: 1790128 - RNA, 19 nt, Artificial Sequence
  Description of Artificial Sequence: Synthetic oligonucleotide
gaccucuagcccaaacacg

SEQ ID NO: 1790129 - RNA, 19 nt, Artificial Sequence
  Description of Artificial Sequence: Synthetic oligonucleotide
gagagguaguguugguccc

SEQ ID NO: 1790130 - RNA, 19 nt, Artificial Sequence
  Description of Artificial Sequence: Synthetic oligonucleotide
ggagaagcuccauccaggg

SEQ ID NO: 1790131 - RNA, 19 nt, Artificial Sequence
  Description of Artificial Sequence: Synthetic oligonucleotide
cauugaccaggagagguag

SEQ ID NO: 1790132 - RNA, 19 nt, Artificial Sequence
  Description of Artificial Sequence: Synthetic oligonucleotide
uccgcugcuucugagagaa

SEQ ID NO: 1790133 - RNA, 19 nt, Artificial Sequence
  Description of Artificial Sequence: Synthetic oligonucleotide
gcauacucgucaucaauag

SEQ ID NO: 1790134 - RNA, 19 nt, Artificial Sequence
  Description of Artificial Sequence: Synthetic oligonucleotide
uggcaagauccaaugaguu

SEQ ID NO: 1790135 - RNA, 19 nt, Artificial Sequence
  Description of Artificial Sequence: Synthetic oligonucleotide
aaggcauccacuggaggga

SEQ ID NO: 1790136 - RNA, 19 nt, Artificial Sequence
  Description of Artificial Sequence: Synthetic oligonucleotide
guucuggggauuuggccag

SEQ ID NO: 1790137 - RNA, 19 nt, Artificial Sequence
  Description of Artificial Sequence: Synthetic oligonucleotide
gcucagaguggcaagaucc

SEQ ID NO: 1790138 - RNA, 19 nt, Artificial Sequence
  Description of Artificial Sequence: Synthetic oligonucleotide
aaggaguagggaggauacg

SEQ ID NO: 1790139 - RNA, 19 nt, Artificial Sequence
  Description of Artificial Sequence: Synthetic oligonucleotide
agcugauucucgguuccgc

SEQ ID NO: 1790140 - RNA, 19 nt, Artificial Sequence
  Description of Artificial Sequence: Synthetic oligonucleotide
gagacuccaguugacacuc

SEQ ID NO: 1790141 - RNA, 19 nt, Artificial Sequence
  Description of Artificial Sequence: Synthetic oligonucleotide
uaggcucgucuacaggaug

SEQ ID NO: 1790142 - RNA, 19 nt, Artificial Sequence
  Description of Artificial Sequence: Synthetic oligonucleotide
auuccgagcacuaguggag

SEQ ID NO: 1790143 - RNA, 19 nt, Artificial Sequence
  Description of Artificial Sequence: Synthetic oligonucleotide
aggugcauacucgucauca

SEQ ID NO: 1790144 - RNA, 19 nt, Artificial Sequence
  Description of Artificial Sequence: Synthetic oligonucleotide
gguucuggggauuuggcca

SEQ ID NO: 1790145 - RNA, 19 nt, Artificial Sequence
  Description of Artificial Sequence: Synthetic oligonucleotide
ggaggauacgguuuuccug

SEQ ID NO: 1790146 - RNA, 19 nt, Artificial Sequence
  Description of Artificial Sequence: Synthetic oligonucleotide
cuuguggcgaagcagcaga

SEQ ID NO: 1790147 - RNA, 19 nt, Artificial Sequence
  Description of Artificial Sequence: Synthetic oligonucleotide
agaauacugcuuguggcga

SEQ ID NO: 1790148 - RNA, 19 nt, Artificial Sequence
  Description of Artificial Sequence: Synthetic oligonucleotide
gacagcugauucucgguuc

SEQ ID NO: 1790149 - RNA, 19 nt, Artificial Sequence
  Description of Artificial Sequence: Synthetic oligonucleotide
uuggccagcuggaaauaac

SEQ ID NO: 1790150 - RNA, 19 nt, Artificial Sequence
  Description of Artificial Sequence: Synthetic oligonucleotide
auacugcuuguggcgaagc

SEQ ID NO: 1790151 - RNA, 19 nt, Artificial Sequence
  Description of Artificial Sequence: Synthetic oligonucleotide
augauuccgagcacuagug

SEQ ID NO: 1790152 - RNA, 19 nt, Artificial Sequence
  Description of Artificial Sequence: Synthetic oligonucleotide
agacuucuaccugacagga

SEQ ID NO: 1790153 - RNA, 19 nt, Artificial Sequence
  Description of Artificial Sequence: Synthetic oligonucleotide
augaguuggugauauuguu

SEQ ID NO: 1790154 - RNA, 19 nt, Artificial Sequence
  Description of Artificial Sequence: Synthetic oligonucleotide
uugcaugaagccagauggu

SEQ ID NO: 1790155 - RNA, 19 nt, Artificial Sequence
  Description of Artificial Sequence: Synthetic oligonucleotide
cugauucucgguuccgcug

SEQ ID NO: 1790156 - RNA, 19 nt, Artificial Sequence
  Description of Artificial Sequence: Synthetic oligonucleotide
ugaagagaggaagccuggc

SEQ ID NO: 1790157 - RNA, 19 nt, Artificial Sequence
  Description of Artificial Sequence: Synthetic oligonucleotide
agcccaaacacggaguggu

SEQ ID NO: 1790158 - RNA, 19 nt, Artificial Sequence
  Description of Artificial Sequence: Synthetic oligonucleotide
ccaguugacacucagggca

SEQ ID NO: 1790159 - RNA, 19 nt, Artificial Sequence
  Description of Artificial Sequence: Synthetic oligonucleotide
agucagggccgguacccac

SEQ ID NO: 1790160 - RNA, 19 nt, Artificial Sequence
  Description of Artificial Sequence: Synthetic oligonucleotide
uacugcuuguggcgaagca

SEQ ID NO: 1790161 - RNA, 19 nt, Artificial Sequence
  Description of Artificial Sequence: Synthetic oligonucleotide
gacaaggcauccacuggag

SEQ ID NO: 1790162 - RNA, 19 nt, Artificial Sequence
  Description of Artificial Sequence: Synthetic oligonucleotide
ucuaccugacaggaaucug

SEQ ID NO: 1790163 - RNA, 19 nt, Artificial Sequence
  Description of Artificial Sequence: Synthetic oligonucleotide
guaagguccccaacagcgg

SEQ ID NO: 1790164 - RNA, 19 nt, Artificial Sequence
  Description of Artificial Sequence: Synthetic oligonucleotide
aggaagagaauaagccaag

SEQ ID NO: 1790165 - RNA, 19 nt, Artificial Sequence
  Description of Artificial Sequence: Synthetic oligonucleotide
gagacaucaggagacucca

SEQ ID NO: 1790166 - RNA, 19 nt, Artificial Sequence
  Description of Artificial Sequence: Synthetic oligonucleotide
ugcagcucuuucacugaug

SEQ ID NO: 1790167 - RNA, 19 nt, Artificial Sequence
  Description of Artificial Sequence: Synthetic oligonucleotide
guuggugcccacugcccgg

SEQ ID NO: 1790168 - RNA, 19 nt, Artificial Sequence
  Description of Artificial Sequence: Synthetic oligonucleotide
ggcacagagguucugggac

SEQ ID NO: 1790169 - RNA, 19 nt, Artificial Sequence
  Description of Artificial Sequence: Synthetic oligonucleotide
acucagaauacugcuugug

SEQ ID NO: 1790170 - RNA, 19 nt, Artificial Sequence
  Description of Artificial Sequence: Synthetic oligonucleotide
cagaaacaggccuccuccc

SEQ ID NO: 1790171 - RNA, 19 nt, Artificial Sequence
  Description of Artificial Sequence: Synthetic oligonucleotide
cacuaguggagacaaggca

SEQ ID NO: 1790172 - RNA, 19 nt, Artificial Sequence
  Description of Artificial Sequence: Synthetic oligonucleotide
ggcgaagcagcagaaacag

SEQ ID NO: 1790173 - RNA, 19 nt, Artificial Sequence
  Description of Artificial Sequence: Synthetic oligonucleotide
ucuuucacugaugggcagu

SEQ ID NO: 1790174 - RNA, 19 nt, Artificial Sequence
  Description of Artificial Sequence: Synthetic oligonucleotide
auagacugguacucagaau

SEQ ID NO: 1790175 - RNA, 19 nt, Artificial Sequence
  Description of Artificial Sequence: Synthetic oligonucleotide
caguaagguccccaacagc

SEQ ID NO: 1790176 - RNA, 19 nt, Artificial Sequence
  Description of Artificial Sequence: Synthetic oligonucleotide
uccucccagcaacaugagc

SEQ ID NO: 1790177 - RNA, 19 nt, Artificial Sequence
  Description of Artificial Sequence: Synthetic oligonucleotide
aggcuuggacaacugguga

SEQ ID NO: 1790178 - RNA, 19 nt, Artificial Sequence
  Description of Artificial Sequence: Synthetic oligonucleotide
ucgccauugcaugaagcca

SEQ ID NO: 1790179 - RNA, 19 nt, Artificial Sequence
  Description of Artificial Sequence: Synthetic oligonucleotide
guggaguuggugcccacug

SEQ ID NO: 1790180 - RNA, 19 nt, Artificial Sequence
  Description of Artificial Sequence: Synthetic oligonucleotide
aggcucgucuacaggaugg

SEQ ID NO: 1790181 - RNA, 19 nt, Artificial Sequence
  Description of Artificial Sequence: Synthetic oligonucleotide
cacuggucgccauugcaug

SEQ ID NO: 1790182 - RNA, 19 nt, Artificial Sequence
  Description of Artificial Sequence: Synthetic oligonucleotide
uuggugcugucaaacucaa

SEQ ID NO: 1790183 - RNA, 19 nt, Artificial Sequence
  Description of Artificial Sequence: Synthetic oligonucleotide
guaggccaaauggagcugc

SEQ ID NO: 1790184 - RNA, 19 nt, Artificial Sequence
  Description of Artificial Sequence: Synthetic oligonucleotide
caagcagccuggugaagac

SEQ ID NO: 1790185 - RNA, 19 nt, Artificial Sequence
  Description of Artificial Sequence: Synthetic oligonucleotide
uaagccaagguagggugaa

SEQ ID NO: 1790186 - RNA, 19 nt, Artificial Sequence
  Description of Artificial Sequence: Synthetic oligonucleotide
ugcuuguggcgaagcagca

SEQ ID NO: 1790187 - RNA, 19 nt, Artificial Sequence
  Description of Artificial Sequence: Synthetic oligonucleotide
ucauggauaucuggcgagu

SEQ ID NO: 1790188 - RNA, 19 nt, Artificial Sequence
  Description of Artificial Sequence: Synthetic oligonucleotide
aggaaucugcagugugcag

SEQ ID NO: 1790189 - RNA, 19 nt, Artificial Sequence
  Description of Artificial Sequence: Synthetic oligonucleotide
caguugacacucagggcac

SEQ ID NO: 1790190 - RNA, 19 nt, Artificial Sequence
  Description of Artificial Sequence: Synthetic oligonucleotide
uggggagcaccaucagacc

SEQ ID NO: 1790191 - RNA, 19 nt, Artificial Sequence
  Description of Artificial Sequence: Synthetic oligonucleotide
uacauagugcaggguggag

SEQ ID NO: 1790192 - RNA, 19 nt, Artificial Sequence
  Description of Artificial Sequence: Synthetic oligonucleotide
acuggucgccauugcauga

SEQ ID NO: 1790193 - RNA, 19 nt, Artificial Sequence
  Description of Artificial Sequence: Synthetic oligonucleotide
cucuuucacugaugggcag

SEQ ID NO: 1790194 - RNA, 19 nt, Artificial Sequence
  Description of Artificial Sequence: Synthetic oligonucleotide
caguuuauagacugguacu

SEQ ID NO: 1790195 - RNA, 19 nt, Artificial Sequence
  Description of Artificial Sequence: Synthetic oligonucleotide
ugccaugauuccgagcacu

SEQ ID NO: 1790196 - RNA, 19 nt, Artificial Sequence
  Description of Artificial Sequence: Synthetic oligonucleotide
cccaguaggccaaauggag

SEQ ID NO: 1790197 - RNA, 19 nt, Artificial Sequence
  Description of Artificial Sequence: Synthetic oligonucleotide
cacggagugguuuccacga

SEQ ID NO: 1790198 - RNA, 19 nt, Artificial Sequence
  Description of Artificial Sequence: Synthetic oligonucleotide
uggucgccauugcaugaag

SEQ ID NO: 1790199 - RNA, 19 nt, Artificial Sequence
  Description of Artificial Sequence: Synthetic oligonucleotide
ucgucuacaggauggccuu

SEQ ID NO: 1790200 - RNA, 19 nt, Artificial Sequence
  Description of Artificial Sequence: Synthetic oligonucleotide
cacagcaacugauuaaccu

SEQ ID NO: 1790201 - RNA, 19 nt, Artificial Sequence
  Description of Artificial Sequence: Synthetic oligonucleotide
uuggucccaguagccaggg

SEQ ID NO: 1790202 - RNA, 19 nt, Artificial Sequence
  Description of Artificial Sequence: Synthetic oligonucleotide
agagugcagcucuuucacu

SEQ ID NO: 1790203 - RNA, 19 nt, Artificial Sequence
  Description of Artificial Sequence: Synthetic oligonucleotide
aaacacggagugguuucca

SEQ ID NO: 1790204 - RNA, 19 nt, Artificial Sequence
  Description of Artificial Sequence: Synthetic oligonucleotide
auacauagugcagggugga

SEQ ID NO: 1790205 - RNA, 19 nt, Artificial Sequence
  Description of Artificial Sequence: Synthetic oligonucleotide
caaacacggagugguuucc

SEQ ID NO: 1790206 - RNA, 19 nt, Artificial Sequence
  Description of Artificial Sequence: Synthetic oligonucleotide
ccaguaggccaaauggagc

SEQ ID NO: 1790207 - RNA, 19 nt, Artificial Sequence
  Description of Artificial Sequence: Synthetic oligonucleotide
uagcccaaacacggagugg

SEQ ID NO: 1790208 - RNA, 19 nt, Artificial Sequence
  Description of Artificial Sequence: Synthetic oligonucleotide
ggggagcaccaucagaccc

SEQ ID NO: 1790209 - RNA, 19 nt, Artificial Sequence
  Description of Artificial Sequence: Synthetic oligonucleotide
ucuacaggauggccuugaa

SEQ ID NO: 1790210 - RNA, 19 nt, Artificial Sequence
  Description of Artificial Sequence: Synthetic oligonucleotide
ccaaagaaggcuuggacaa

SEQ ID NO: 1790211 - RNA, 19 nt, Artificial Sequence
  Description of Artificial Sequence: Synthetic oligonucleotide
gugguuuccacgaggagaa

SEQ ID NO: 1790212 - RNA, 19 nt, Artificial Sequence
  Description of Artificial Sequence: Synthetic oligonucleotide
aggauacgguuuuccugag

SEQ ID NO: 1790213 - RNA, 19 nt, Artificial Sequence
  Description of Artificial Sequence: Synthetic oligonucleotide
gagguaguguuggucccag

SEQ ID NO: 1790214 - RNA, 19 nt, Artificial Sequence
  Description of Artificial Sequence: Synthetic oligonucleotide
gugugcaggaggcgagggg

SEQ ID NO: 1790215 - RNA, 19 nt, Artificial Sequence
  Description of Artificial Sequence: Synthetic oligonucleotide
uaggccaaauggagcugca

SEQ ID NO: 1790216 - RNA, 19 nt, Artificial Sequence
  Description of Artificial Sequence: Synthetic oligonucleotide
cauacucgucaucaauaga

SEQ ID NO: 1790217 - RNA, 19 nt, Artificial Sequence
  Description of Artificial Sequence: Synthetic oligonucleotide
gccaagguagggugaagag

SEQ ID NO: 1790218 - RNA, 19 nt, Artificial Sequence
  Description of Artificial Sequence: Synthetic oligonucleotide
cucagaguggcaagaucca

SEQ ID NO: 1790219 - RNA, 19 nt, Artificial Sequence
  Description of Artificial Sequence: Synthetic oligonucleotide
caccuuggugcugucaaac

SEQ ID NO: 1790220 - RNA, 19 nt, Artificial Sequence
  Description of Artificial Sequence: Synthetic oligonucleotide
gaauacugcuuguggcgaa

SEQ ID NO: 1790221 - RNA, 19 nt, Artificial Sequence
  Description of Artificial Sequence: Synthetic oligonucleotide
uuccgagcacuaguggaga

SEQ ID NO: 1790222 - RNA, 19 nt, Artificial Sequence
  Description of Artificial Sequence: Synthetic oligonucleotide
cacgaggagaagcuccauc

SEQ ID NO: 1790223 - RNA, 19 nt, Artificial Sequence
  Description of Artificial Sequence: Synthetic oligonucleotide
aguagggaggauacgguuu

SEQ ID NO: 1790224 - RNA, 19 nt, Artificial Sequence
  Description of Artificial Sequence: Synthetic oligonucleotide
caguaggccaaauggagcu

SEQ ID NO: 1790225 - RNA, 19 nt, Artificial Sequence
  Description of Artificial Sequence: Synthetic oligonucleotide
ugaccaggagagguagugu

SEQ ID NO: 1790226 - RNA, 19 nt, Artificial Sequence
  Description of Artificial Sequence: Synthetic oligonucleotide
uugacacucagggcacucu

SEQ ID NO: 1790227 - RNA, 19 nt, Artificial Sequence
  Description of Artificial Sequence: Synthetic oligonucleotide
ggcaaaugcuccaguaggc

SEQ ID NO: 1790228 - RNA, 19 nt, Artificial Sequence
  Description of Artificial Sequence: Synthetic oligonucleotide
aucuggcgaguuucuucuc

SEQ ID NO: 1790229 - RNA, 19 nt, Artificial Sequence
  Description of Artificial Sequence: Synthetic oligonucleotide
auaagccaagguaggguga

SEQ ID NO: 1790230 - RNA, 19 nt, Artificial Sequence
  Description of Artificial Sequence: Synthetic oligonucleotide
gucuuuggggagcaccauc

SEQ ID NO: 1790231 - RNA, 19 nt, Artificial Sequence
  Description of Artificial Sequence: Synthetic oligonucleotide
accuggaauacagcaggug

SEQ ID NO: 1790232 - RNA, 19 nt, Artificial Sequence
  Description of Artificial Sequence: Synthetic oligonucleotide
uucagccaaggaguaggga

SEQ ID NO: 1790233 - RNA, 19 nt, Artificial Sequence
  Description of Artificial Sequence: Synthetic oligonucleotide
ggcgaguuucuucucccag

SEQ ID NO: 1790234 - RNA, 19 nt, Artificial Sequence
  Description of Artificial Sequence: Synthetic oligonucleotide
cucgucuacaggauggccu

SEQ ID NO: 1790235 - RNA, 19 nt, Artificial Sequence
  Description of Artificial Sequence: Synthetic oligonucleotide
agccaugggguuggggcac

SEQ ID NO: 1790236 - RNA, 19 nt, Artificial Sequence
  Description of Artificial Sequence: Synthetic oligonucleotide
caaagaaggcuuggacaac

SEQ ID NO: 1790237 - RNA, 19 nt, Artificial Sequence
  Description of Artificial Sequence: Synthetic oligonucleotide
ggugcuccauacauagugc

SEQ ID NO: 1790238 - RNA, 19 nt, Artificial Sequence
  Description of Artificial Sequence: Synthetic oligonucleotide
agaauucagccaaggagua

SEQ ID NO: 1790239 - RNA, 19 nt, Artificial Sequence
  Description of Artificial Sequence: Synthetic oligonucleotide
acggagugguuuccacgag

SEQ ID NO: 1790240 - RNA, 19 nt, Artificial Sequence
  Description of Artificial Sequence: Synthetic oligonucleotide
uucccagggccacugccau

SEQ ID NO: 1790241 - RNA, 19 nt, Artificial Sequence
  Description of Artificial Sequence: Synthetic oligonucleotide
uggcgaguuucuucuccca

SEQ ID NO: 1790242 - RNA, 19 nt, Artificial Sequence
  Description of Artificial Sequence: Synthetic oligonucleotide
aguaggccaaauggagcug

SEQ ID NO: 1790243 - RNA, 19 nt, Artificial Sequence
  Description of Artificial Sequence: Synthetic oligonucleotide
ucgguuccgcugcuucuga

SEQ ID NO: 1790244 - RNA, 19 nt, Artificial Sequence
  Description of Artificial Sequence: Synthetic oligonucleotide
aguggagacaaggcaucca

SEQ ID NO: 1790245 - RNA, 19 nt, Artificial Sequence
  Description of Artificial Sequence: Synthetic oligonucleotide
caacagcggcacauacagc

SEQ ID NO: 1790246 - RNA, 19 nt, Artificial Sequence
  Description of Artificial Sequence: Synthetic oligonucleotide
gguggcgaccucuagccca

SEQ ID NO: 1790247 - RNA, 19 nt, Artificial Sequence
  Description of Artificial Sequence: Synthetic oligonucleotide
ccaaacacggagugguuuc

SEQ ID NO: 1790248 - RNA, 19 nt, Artificial Sequence
  Description of Artificial Sequence: Synthetic oligonucleotide
uggcgcucagaguggcaag

SEQ ID NO: 1790249 - RNA, 19 nt, Artificial Sequence
  Description of Artificial Sequence: Synthetic oligonucleotide
uuuccacgaggagaagcuc

SEQ ID NO: 1790250 - RNA, 19 nt, Artificial Sequence
  Description of Artificial Sequence: Synthetic oligonucleotide
gucagggccgguacccacg

SEQ ID NO: 1790251 - RNA, 19 nt, Artificial Sequence
  Description of Artificial Sequence: Synthetic oligonucleotide
caggaaucugcagugugca

SEQ ID NO: 1790252 - RNA, 19 nt, Artificial Sequence
  Description of Artificial Sequence: Synthetic oligonucleotide
guuuccacgaggagaagcu

SEQ ID NO: 1790253 - RNA, 19 nt, Artificial Sequence
  Description of Artificial Sequence: Synthetic oligonucleotide
gugggagccccaaauguca

SEQ ID NO: 1790254 - RNA, 19 nt, Artificial Sequence
  Description of Artificial Sequence: Synthetic oligonucleotide
gaagcuccauccagggaga

SEQ ID NO: 1790255 - RNA, 19 nt, Artificial Sequence
  Description of Artificial Sequence: Synthetic oligonucleotide
gucagauugaaggcacaga

SEQ ID NO: 1790256 - RNA, 19 nt, Artificial Sequence
  Description of Artificial Sequence: Synthetic oligonucleotide
agagguaguguugguccca

SEQ ID NO: 1790257 - RNA, 19 nt, Artificial Sequence
  Description of Artificial Sequence: Synthetic oligonucleotide
ccagauggugaagagcccc

SEQ ID NO: 1790258 - RNA, 19 nt, Artificial Sequence
  Description of Artificial Sequence: Synthetic oligonucleotide
cacugccaugauuccgagc

SEQ ID NO: 1790259 - RNA, 19 nt, Artificial Sequence
  Description of Artificial Sequence: Synthetic oligonucleotide
ggagcugcacacacaagac

SEQ ID NO: 1790260 - RNA, 19 nt, Artificial Sequence
  Description of Artificial Sequence: Synthetic oligonucleotide
gcacagagguucugggacc

SEQ ID NO: 1790261 - RNA, 19 nt, Artificial Sequence
  Description of Artificial Sequence: Synthetic oligonucleotide
gacccaaagaaggcuugga

SEQ ID NO: 1790262 - RNA, 19 nt, Artificial Sequence
  Description of Artificial Sequence: Synthetic oligonucleotide
ggugaagacaagagcagaa

SEQ ID NO: 1790263 - RNA, 19 nt, Artificial Sequence
  Description of Artificial Sequence: Synthetic oligonucleotide
cgccauugcaugaagccag

SEQ ID NO: 1790264 - RNA, 19 nt, Artificial Sequence
  Description of Artificial Sequence: Synthetic oligonucleotide
uuccgcugcuucugagaga

SEQ ID NO: 1790265 - RNA, 19 nt, Artificial Sequence
  Description of Artificial Sequence: Synthetic oligonucleotide
ggacccagccccaguaagg

SEQ ID NO: 1790266 - RNA, 19 nt, Artificial Sequence
  Description of Artificial Sequence: Synthetic oligonucleotide
agggcacucugaguggugu

SEQ ID NO: 1790267 - RNA, 19 nt, Artificial Sequence
  Description of Artificial Sequence: Synthetic oligonucleotide
gaccaggagagguaguguu

SEQ ID NO: 1790268 - RNA, 19 nt, Artificial Sequence
  Description of Artificial Sequence: Synthetic oligonucleotide
gacacucagggcacucuga

SEQ ID NO: 1790269 - RNA, 19 nt, Artificial Sequence
  Description of Artificial Sequence: Synthetic oligonucleotide
ggauaugaagcagguucug

SEQ ID NO: 1790270 - RNA, 19 nt, Artificial Sequence
  Description of Artificial Sequence: Synthetic oligonucleotide
ggacccaaagaaggcuugg

SEQ ID NO: 1790271 - RNA, 19 nt, Artificial Sequence
  Description of Artificial Sequence: Synthetic oligonucleotide
guggcaagauccaaugagu

SEQ ID NO: 1790272 - RNA, 19 nt, Artificial Sequence
  Description of Artificial Sequence: Synthetic oligonucleotide
ggagugguuuccacgagga

SEQ ID NO: 1790273 - RNA, 19 nt, Artificial Sequence
  Description of Artificial Sequence: Synthetic oligonucleotide
gcacuaguggagacaaggc

SEQ ID NO: 1790274 - RNA, 19 nt, Artificial Sequence
  Description of Artificial Sequence: Synthetic oligonucleotide
cuacaggauggccuugaaa

SEQ ID NO: 1790275 - RNA, 19 nt, Artificial Sequence
  Description of Artificial Sequence: Synthetic oligonucleotide
cgaccucuagcccaaacac

SEQ ID NO: 1790276 - RNA, 19 nt, Artificial Sequence
  Description of Artificial Sequence: Synthetic oligonucleotide
gaguagggaggauacgguu

SEQ ID NO: 1790277 - RNA, 19 nt, Artificial Sequence
  Description of Artificial Sequence: Synthetic oligonucleotide
gauauuguuccaggagaau

SEQ ID NO: 1790278 - RNA, 19 nt, Artificial Sequence
  Description of Artificial Sequence: Synthetic oligonucleotide
gcagcagaaacaggccucc

SEQ ID NO: 1790279 - RNA, 19 nt, Artificial Sequence
  Description of Artificial Sequence: Synthetic oligonucleotide
gcgaccucuagcccaaaca

SEQ ID NO: 1790280 - RNA, 19 nt, Artificial Sequence
  Description of Artificial Sequence: Synthetic oligonucleotide
caguagccagggccugugg

SEQ ID NO: 1790281 - RNA, 19 nt, Artificial Sequence
  Description of Artificial Sequence: Synthetic oligonucleotide
cagaagcauugaccaggag

SEQ ID NO: 1790282 - RNA, 19 nt, Artificial Sequence
  Description of Artificial Sequence: Synthetic oligonucleotide
cauaaggaucaggagacau

SEQ ID NO: 1790283 - RNA, 19 nt, Artificial Sequence
  Description of Artificial Sequence: Synthetic oligonucleotide
ccacagcaacugauuaacc

SEQ ID NO: 1790284 - RNA, 19 nt, Artificial Sequence
  Description of Artificial Sequence: Synthetic oligonucleotide
agcaacugauuaaccugga

SEQ ID NO: 1790285 - RNA, 19 nt, Artificial Sequence
  Description of Artificial Sequence: Synthetic oligonucleotide
guugacacucagggcacuc

SEQ ID NO: 1790286 - RNA, 19 nt, Artificial Sequence
  Description of Artificial Sequence: Synthetic oligonucleotide
agaaagccacuggucgcca

SEQ ID NO: 1790287 - RNA, 19 nt, Artificial Sequence
  Description of Artificial Sequence: Synthetic oligonucleotide
gaguucccagggccacugc

SEQ ID NO: 1790288 - RNA, 19 nt, Artificial Sequence
  Description of Artificial Sequence: Synthetic oligonucleotide
cuccucccagcaacaugag

SEQ ID NO: 1790289 - RNA, 19 nt, Artificial Sequence
  Description of Artificial Sequence: Synthetic oligonucleotide
gguuggggcacaggggacc

SEQ ID NO: 1790290 - RNA, 19 nt, Artificial Sequence
  Description of Artificial Sequence: Synthetic oligonucleotide
guagggaggauacgguuuu

SEQ ID NO: 1790291 - RNA, 19 nt, Artificial Sequence
  Description of Artificial Sequence: Synthetic oligonucleotide
gucuacaggauggccuuga

SEQ ID NO: 1790292 - RNA, 19 nt, Artificial Sequence
  Description of Artificial Sequence: Synthetic oligonucleotide
cuggggauuuggccagcug

SEQ ID NO: 1790293 - RNA, 19 nt, Artificial Sequence
  Description of Artificial Sequence: Synthetic oligonucleotide
gcagucagggccgguaccc

SEQ ID NO: 1790294 - RNA, 19 nt, Artificial Sequence
  Description of Artificial Sequence: Synthetic oligonucleotide
cagcugauucucgguuccg

SEQ ID NO: 1790295 - RNA, 19 nt, Artificial Sequence
  Description of Artificial Sequence: Synthetic oligonucleotide
ggaagcccauucccagaag

SEQ ID NO: 1790296 - RNA, 19 nt, Artificial Sequence
  Description of Artificial Sequence: Synthetic oligonucleotide
auugaccaggagagguagu

SEQ ID NO: 1790297 - RNA, 19 nt, Artificial Sequence
  Description of Artificial Sequence: Synthetic oligonucleotide
ggagacuccaguugacacu

SEQ ID NO: 1790298 - RNA, 19 nt, Artificial Sequence
  Description of Artificial Sequence: Synthetic oligonucleotide
ggccacugccaugauuccg

SEQ ID NO: 1790299 - RNA, 19 nt, Artificial Sequence
  Description of Artificial Sequence: Synthetic oligonucleotide
ggucgccauugcaugaagc

SEQ ID NO: 1790300 - RNA, 19 nt, Artificial Sequence
  Description of Artificial Sequence: Synthetic oligonucleotide
ccugugggagccccaaaug

SEQ ID NO: 1790301 - RNA, 19 nt, Artificial Sequence
  Description of Artificial Sequence: Synthetic oligonucleotide
aguugacacucagggcacu

SEQ ID NO: 1790302 - RNA, 19 nt, Artificial Sequence
  Description of Artificial Sequence: Synthetic oligonucleotide
cugcagugugcaggaggcg

SEQ ID NO: 1790303 - RNA, 19 nt, Artificial Sequence
  Description of Artificial Sequence: Synthetic oligonucleotide
ugggcagucagggccggua

SEQ ID NO: 1790304 - RNA, 19 nt, Artificial Sequence
  Description of Artificial Sequence: Synthetic oligonucleotide
ggcagucagggccgguacc

SEQ ID NO: 1790305 - RNA, 19 nt, Artificial Sequence
  Description of Artificial Sequence: Synthetic oligonucleotide
ggccagauccagagaaggc

SEQ ID NO: 1790306 - RNA, 19 nt, Artificial Sequence
  Description of Artificial Sequence: Synthetic oligonucleotide
ggaguucccagggccacug

SEQ ID NO: 1790307 - RNA, 19 nt, Artificial Sequence
  Description of Artificial Sequence: Synthetic oligonucleotide
gcugccauuggcaaaugcu

SEQ ID NO: 1790308 - RNA, 19 nt, Artificial Sequence
  Description of Artificial Sequence: Synthetic oligonucleotide
gacccagccccaguaaggu

SEQ ID NO: 1790309 - RNA, 19 nt, Artificial Sequence
  Description of Artificial Sequence: Synthetic oligonucleotide
gacuucuaccugacaggaa

SEQ ID NO: 1790310 - RNA, 19 nt, Artificial Sequence
  Description of Artificial Sequence: Synthetic oligonucleotide
caggugcauacucgucauc

SEQ ID NO: 1790311 - RNA, 19 nt, Artificial Sequence
  Description of Artificial Sequence: Synthetic oligonucleotide
cuggaccuugaaggccagg

SEQ ID NO: 1790312 - RNA, 19 nt, Artificial Sequence
  Description of Artificial Sequence: Synthetic oligonucleotide
uagggaggauacgguuuuc

SEQ ID NO: 1790313 - RNA, 19 nt, Artificial Sequence
  Description of Artificial Sequence: Synthetic oligonucleotide
ccccggaguucccagggcc

SEQ ID NO: 1790314 - RNA, 19 nt, Artificial Sequence
  Description of Artificial Sequence: Synthetic oligonucleotide
augagccccggaguuccca

SEQ ID NO: 1790315 - RNA, 19 nt, Artificial Sequence
  Description of Artificial Sequence: Synthetic oligonucleotide
gauucucgguuccgcugcu

SEQ ID NO: 1790316 - RNA, 19 nt, Artificial Sequence
  Description of Artificial Sequence: Synthetic oligonucleotide
ccaagguagggugaagaga

SEQ ID NO: 1790317 - RNA, 19 nt, Artificial Sequence
  Description of Artificial Sequence: Synthetic oligonucleotide
gccacuggucgccauugca

SEQ ID NO: 1790318 - RNA, 19 nt, Artificial Sequence
  Description of Artificial Sequence: Synthetic oligonucleotide
cuggagaguggguuucagu

SEQ ID NO: 1790319 - RNA, 19 nt, Artificial Sequence
  Description of Artificial Sequence: Synthetic oligonucleotide
caacaugagccccggaguu

SEQ ID NO: 1790320 - RNA, 19 nt, Artificial Sequence
  Description of Artificial Sequence: Synthetic oligonucleotide
ccaugauuccgagcacuag

SEQ ID NO: 1790321 - RNA, 19 nt, Artificial Sequence
  Description of Artificial Sequence: Synthetic oligonucleotide
gggaggauacgguuuuccu

SEQ ID NO: 1790322 - RNA, 19 nt, Artificial Sequence
  Description of Artificial Sequence: Synthetic oligonucleotide
cggccagauccagagaagg

SEQ ID NO: 1790323 - RNA, 19 nt, Artificial Sequence
  Description of Artificial Sequence: Synthetic oligonucleotide
gccgguacccacgguggcg

SEQ ID NO: 1790324 - RNA, 19 nt, Artificial Sequence
  Description of Artificial Sequence: Synthetic oligonucleotide
gaccggccagauccagaga

SEQ ID NO: 1790325 - RNA, 19 nt, Artificial Sequence
  Description of Artificial Sequence: Synthetic oligonucleotide
gcucgucuacaggauggcc

SEQ ID NO: 1790326 - RNA, 19 nt, Artificial Sequence
  Description of Artificial Sequence: Synthetic oligonucleotide
aggcauccacuggagggaa

SEQ ID NO: 1790327 - RNA, 19 nt, Artificial Sequence
  Description of Artificial Sequence: Synthetic oligonucleotide
uccccaacagcggcacaua

SEQ ID NO: 1790328 - RNA, 19 nt, Artificial Sequence
  Description of Artificial Sequence: Synthetic oligonucleotide
ggcucgucuacaggauggc

SEQ ID NO: 1790329 - RNA, 19 nt, Artificial Sequence
  Description of Artificial Sequence: Synthetic oligonucleotide
gcugauucucgguuccgcu

SEQ ID NO: 1790330 - RNA, 19 nt, Artificial Sequence
  Description of Artificial Sequence: Synthetic oligonucleotide
gguacccacgguggcgacc

SEQ ID NO: 1790331 - RNA, 19 nt, Artificial Sequence
  Description of Artificial Sequence: Synthetic oligonucleotide
ggcgaccucuagcccaaac

SEQ ID NO: 1790332 - RNA, 19 nt, Artificial Sequence
  Description of Artificial Sequence: Synthetic oligonucleotide
agaguggguuucaguuuau

SEQ ID NO: 1790333 - RNA, 19 nt, Artificial Sequence
  Description of Artificial Sequence: Synthetic oligonucleotide
gcaaaugcuccaguaggcu

SEQ ID NO: 1790334 - RNA, 19 nt, Artificial Sequence
  Description of Artificial Sequence: Synthetic oligonucleotide
gggccacugccaugauucc

SEQ ID NO: 1790335 - RNA, 19 nt, Artificial Sequence
  Description of Artificial Sequence: Synthetic oligonucleotide
cccaacagcggcacauaca

SEQ ID NO: 1790336 - RNA, 19 nt, Artificial Sequence
  Description of Artificial Sequence: Synthetic oligonucleotide
cuggucgccauugcaugaa

SEQ ID NO: 1790337 - RNA, 19 nt, Artificial Sequence
  Description of Artificial Sequence: Synthetic oligonucleotide
gcgaguuucuucucccagu

SEQ ID NO: 1790338 - RNA, 19 nt, Artificial Sequence
  Description of Artificial Sequence: Synthetic oligonucleotide
ccaaauggagcugcacaca

SEQ ID NO: 1790339 - RNA, 19 nt, Artificial Sequence
  Description of Artificial Sequence: Synthetic oligonucleotide
gccagcuggaaauaaccuu

SEQ ID NO: 1790340 - RNA, 19 nt, Artificial Sequence
  Description of Artificial Sequence: Synthetic oligonucleotide
agggugcuccauacauagu

SEQ ID NO: 1790341 - RNA, 19 nt, Artificial Sequence
  Description of Artificial Sequence: Synthetic oligonucleotide
ggaguagggaggauacggu

SEQ ID NO: 1790342 - RNA, 19 nt, Artificial Sequence
  Description of Artificial Sequence: Synthetic oligonucleotide
ccccaacagcggcacauac

SEQ ID NO: 1790343 - RNA, 19 nt, Artificial Sequence
  Description of Artificial Sequence: Synthetic oligonucleotide
gggagccccaaaugucaga

SEQ ID NO: 1790344 - RNA, 19 nt, Artificial Sequence
  Description of Artificial Sequence: Synthetic oligonucleotide
ccccuuggacaccuuggug

SEQ ID NO: 1790345 - RNA, 19 nt, Artificial Sequence
  Description of Artificial Sequence: Synthetic oligonucleotide
ggagccccaaaugucagau

SEQ ID NO: 1790346 - RNA, 19 nt, Artificial Sequence
  Description of Artificial Sequence: Synthetic oligonucleotide
ggcgcucagaguggcaaga

SEQ ID NO: 1790347 - RNA, 19 nt, Artificial Sequence
  Description of Artificial Sequence: Synthetic oligonucleotide
caaacucaagcagccuggu

SEQ ID NO: 1790348 - RNA, 19 nt, Artificial Sequence
  Description of Artificial Sequence: Synthetic oligonucleotide
guaggcucgucuacaggau

SEQ ID NO: 1790349 - RNA, 19 nt, Artificial Sequence
  Description of Artificial Sequence: Synthetic oligonucleotide
guggcgaccucuagcccaa

SEQ ID NO: 1790350 - RNA, 19 nt, Artificial Sequence
  Description of Artificial Sequence: Synthetic oligonucleotide
gcauugaccaggagaggua

SEQ ID NO: 1790351 - RNA, 19 nt, Artificial Sequence
  Description of Artificial Sequence: Synthetic oligonucleotide
ggcauccacuggagggaag

SEQ ID NO: 1790352 - RNA, 19 nt, Artificial Sequence
  Description of Artificial Sequence: Synthetic oligonucleotide
agacuccaguugacacuca

SEQ ID NO: 1790353 - RNA, 19 nt, Artificial Sequence
  Description of Artificial Sequence: Synthetic oligonucleotide
ccccaaaugucagauugaa

SEQ ID NO: 1790354 - RNA, 19 nt, Artificial Sequence
  Description of Artificial Sequence: Synthetic oligonucleotide
auucucgguuccgcugcuu

SEQ ID NO: 1790355 - RNA, 19 nt, Artificial Sequence
  Description of Artificial Sequence: Synthetic oligonucleotide
ggauaucuggcgaguuucu

SEQ ID NO: 1790356 - RNA, 19 nt, Artificial Sequence
  Description of Artificial Sequence: Synthetic oligonucleotide
gcccacugcccggauauga

SEQ ID NO: 1790357 - RNA, 19 nt, Artificial Sequence
  Description of Artificial Sequence: Synthetic oligonucleotide
uggugcccacugcccggau

SEQ ID NO: 1790358 - RNA, 19 nt, Artificial Sequence
  Description of Artificial Sequence: Synthetic oligonucleotide
gccccaaaugucagauuga

SEQ ID NO: 1790359 - RNA, 19 nt, Artificial Sequence
  Description of Artificial Sequence: Synthetic oligonucleotide
cggauaugaagcagguucu

SEQ ID NO: 1790360 - RNA, 19 nt, Artificial Sequence
  Description of Artificial Sequence: Synthetic oligonucleotide
ccccaguaagguccccaac

SEQ ID NO: 1790361 - RNA, 19 nt, Artificial Sequence
  Description of Artificial Sequence: Synthetic oligonucleotide
cacucugagugguguuggu

SEQ ID NO: 1790362 - RNA, 19 nt, Artificial Sequence
  Description of Artificial Sequence: Synthetic oligonucleotide
cgaguuucuucucccagua

SEQ ID NO: 1790363 - RNA, 19 nt, Artificial Sequence
  Description of Artificial Sequence: Synthetic oligonucleotide
cgagcacuaguggagacaa

SEQ ID NO: 1790364 - RNA, 19 nt, Artificial Sequence
  Description of Artificial Sequence: Synthetic oligonucleotide
cagucagggccgguaccca

SEQ ID NO: 1790365 - RNA, 19 nt, Artificial Sequence
  Description of Artificial Sequence: Synthetic oligonucleotide
ggacaccuuggugcuguca

SEQ ID NO: 1790366 - RNA, 19 nt, Artificial Sequence
  Description of Artificial Sequence: Synthetic oligonucleotide
gccccaguaagguccccaa

SEQ ID NO: 1790367 - RNA, 19 nt, Artificial Sequence
  Description of Artificial Sequence: Synthetic oligonucleotide
gccaugauuccgagcacua

SEQ ID NO: 1790368 - RNA, 19 nt, Artificial Sequence
  Description of Artificial Sequence: Synthetic oligonucleotide
ccucuagcccaaacacgga

SEQ ID NO: 1790369 - RNA, 19 nt, Artificial Sequence
  Description of Artificial Sequence: Synthetic oligonucleotide
gccccggaguucccagggc

SEQ ID NO: 1790370 - RNA, 19 nt, Artificial Sequence
  Description of Artificial Sequence: Synthetic oligonucleotide
ccagggugcuccauacaua

SEQ ID NO: 1790371 - RNA, 19 nt, Artificial Sequence
  Description of Artificial Sequence: Synthetic oligonucleotide
cccggaguucccagggcca

SEQ ID NO: 1790372 - RNA, 19 nt, Artificial Sequence
  Description of Artificial Sequence: Synthetic oligonucleotide
ggggcugggcagaccggcc

SEQ ID NO: 1790373 - RNA, 19 nt, Artificial Sequence
  Description of Artificial Sequence: Synthetic oligonucleotide
cccagggugcuccauacau

SEQ ID NO: 1790374 - RNA, 19 nt, Artificial Sequence
  Description of Artificial Sequence: Synthetic oligonucleotide
ccacuggucgccauugcau

SEQ ID NO: 1790375 - RNA, 19 nt, Artificial Sequence
  Description of Artificial Sequence: Synthetic oligonucleotide
gguggaguuggugcccacu

SEQ ID NO: 1790376 - RNA, 19 nt, Artificial Sequence
  Description of Artificial Sequence: Synthetic oligonucleotide
ccggaguucccagggccac

SEQ ID NO: 1790377 - RNA, 19 nt, Artificial Sequence
  Description of Artificial Sequence: Synthetic oligonucleotide
cgguuccgcugcuucugag

SEQ ID NO: 1790378 - RNA, 19 nt, Artificial Sequence
  Description of Artificial Sequence: Synthetic oligonucleotide
ccgguacccacgguggcga

SEQ ID NO: 1790379 - RNA, 19 nt, Artificial Sequence
  Description of Artificial Sequence: Synthetic oligonucleotide
cgguggcgaccucuagccc

SEQ ID NO: 1790380 - RNA, 19 nt, Artificial Sequence
  Description of Artificial Sequence: Synthetic oligonucleotide
uggcgaccucuagcccaaa

SEQ ID NO: 1790381 - RNA, 19 nt, Artificial Sequence
  Description of Artificial Sequence: Synthetic oligonucleotide
gcccggauaugaagcaggu

SEQ ID NO: 1790382 - RNA, 19 nt, Artificial Sequence
  Description of Artificial Sequence: Synthetic oligonucleotide
caggggacccagccccagu

SEQ ID NO: 1790383 - RNA, 19 nt, Artificial Sequence
  Description of Artificial Sequence: Synthetic oligonucleotide
cgucuacaggauggccuug

SEQ ID NO: 1790384 - RNA, 19 nt, Artificial Sequence
  Description of Artificial Sequence: Synthetic oligonucleotide
cugggcagaccggccagau

SEQ ID NO: 1790385 - RNA, 19 nt, Artificial Sequence
  Description of Artificial Sequence: Synthetic oligonucleotide
ggccugugggagccccaaa

SEQ ID NO: 1790386 - RNA, 19 nt, Artificial Sequence
  Description of Artificial Sequence: Synthetic oligonucleotide
ccaaugaguuggugauauu

SEQ ID NO: 1790387 - RNA, 19 nt, Artificial Sequence
  Description of Artificial Sequence: Synthetic oligonucleotide
gcgcucagaguggcaagau

SEQ ID NO: 1790388 - RNA, 19 nt, Artificial Sequence
  Description of Artificial Sequence: Synthetic oligonucleotide
cccggauaugaagcagguu

SEQ ID NO: 1790389 - RNA, 19 nt, Artificial Sequence
  Description of Artificial Sequence: Synthetic oligonucleotide
ccacgaggagaagcuccau

SEQ ID NO: 1790390 - RNA, 19 nt, Artificial Sequence
  Description of Artificial Sequence: Synthetic oligonucleotide
cggaguucccagggccacu

SEQ ID NO: 1790391 - RNA, 19 nt, Artificial Sequence
  Description of Artificial Sequence: Synthetic oligonucleotide
aaaucaugaaguuacaccu

SEQ ID NO: 1790392 - RNA, 19 nt, Artificial Sequence
  Description of Artificial Sequence: Synthetic oligonucleotide
ugaaaagugaaagugacag

SEQ ID NO: 1790393 - RNA, 19 nt, Artificial Sequence
  Description of Artificial Sequence: Synthetic oligonucleotide
aagugaaagugacaguacc

SEQ ID NO: 1790394 - RNA, 19 nt, Artificial Sequence
  Description of Artificial Sequence: Synthetic oligonucleotide
agaaaugucggacuagagc

SEQ ID NO: 1790395 - RNA, 19 nt, Artificial Sequence
  Description of Artificial Sequence: Synthetic oligonucleotide
ugaacuuugugaaacaucu

SEQ ID NO: 1790396 - RNA, 19 nt, Artificial Sequence
  Description of Artificial Sequence: Synthetic oligonucleotide
ucaucuuucaaccaugugu

SEQ ID NO: 1790397 - RNA, 19 nt, Artificial Sequence
  Description of Artificial Sequence: Synthetic oligonucleotide
aaaauguggccacaguuuc

SEQ ID NO: 1790398 - RNA, 19 nt, Artificial Sequence
  Description of Artificial Sequence: Synthetic oligonucleotide
acagcugucacaaacacgc

SEQ ID NO: 1790399 - RNA, 19 nt, Artificial Sequence
  Description of Artificial Sequence: Synthetic oligonucleotide
auauuagugcaacugcugc

SEQ ID NO: 1790400 - RNA, 19 nt, Artificial Sequence
  Description of Artificial Sequence: Synthetic oligonucleotide
gaaaucaagguuucugugg

SEQ ID NO: 1790401 - RNA, 19 nt, Artificial Sequence
  Description of Artificial Sequence: Synthetic oligonucleotide
uuauuuacuuccuuuaugu

SEQ ID NO: 1790402 - RNA, 19 nt, Artificial Sequence
  Description of Artificial Sequence: Synthetic oligonucleotide
ucuauauuagugcaacugc

SEQ ID NO: 1790403 - RNA, 19 nt, Artificial Sequence
  Description of Artificial Sequence: Synthetic oligonucleotide
auuaauugcuuugacuucc

SEQ ID NO: 1790404 - RNA, 19 nt, Artificial Sequence
  Description of Artificial Sequence: Synthetic oligonucleotide
acugcuuacaguauguugc

SEQ ID NO: 1790405 - RNA, 19 nt, Artificial Sequence
  Description of Artificial Sequence: Synthetic oligonucleotide
ucuaguaacuucauggcga

SEQ ID NO: 1790406 - RNA, 19 nt, Artificial Sequence
  Description of Artificial Sequence: Synthetic oligonucleotide
augaaguuacaccuguacc

SEQ ID NO: 1790407 - RNA, 19 nt, Artificial Sequence
  Description of Artificial Sequence: Synthetic oligonucleotide
uguaauucucucuggagag

SEQ ID NO: 1790408 - RNA, 19 nt, Artificial Sequence
  Description of Artificial Sequence: Synthetic oligonucleotide
gauauaaccgaggacacag

SEQ ID NO: 1790409 - RNA, 19 nt, Artificial Sequence
  Description of Artificial Sequence: Synthetic oligonucleotide
ugaaacaucuguaaauuaa

SEQ ID NO: 1790410 - RNA, 19 nt, Artificial Sequence
  Description of Artificial Sequence: Synthetic oligonucleotide
uaggauucuauauuagugc

SEQ ID NO: 1790411 - RNA, 19 nt, Artificial Sequence
  Description of Artificial Sequence: Synthetic oligonucleotide
aguaccaaaaucaugaagu

SEQ ID NO: 1790412 - RNA, 19 nt, Artificial Sequence
  Description of Artificial Sequence: Synthetic oligonucleotide
ugcaacugcugcaaaauag

SEQ ID NO: 1790413 - RNA, 19 nt, Artificial Sequence
  Description of Artificial Sequence: Synthetic oligonucleotide
uccaucuugaguuuggacu

SEQ ID NO: 1790414 - RNA, 19 nt, Artificial Sequence
  Description of Artificial Sequence: Synthetic oligonucleotide
aguauguugcuucaucauc

SEQ ID NO: 1790415 - RNA, 19 nt, Artificial Sequence
  Description of Artificial Sequence: Synthetic oligonucleotide
acuggcuuaggguaggagg

SEQ ID NO: 1790416 - RNA, 19 nt, Artificial Sequence
  Description of Artificial Sequence: Synthetic oligonucleotide
gaaaugucggacuagagcu

SEQ ID NO: 1790417 - RNA, 19 nt, Artificial Sequence
  Description of Artificial Sequence: Synthetic oligonucleotide
uucuauauuagugcaacug

SEQ ID NO: 1790418 - RNA, 19 nt, Artificial Sequence
  Description of Artificial Sequence: Synthetic oligonucleotide
uuuggcacuguaccgaggc

SEQ ID NO: 1790419 - RNA, 19 nt, Artificial Sequence
  Description of Artificial Sequence: Synthetic oligonucleotide
acuagagcuggcuccauac

SEQ ID NO: 1790420 - RNA, 19 nt, Artificial Sequence
  Description of Artificial Sequence: Synthetic oligonucleotide
aauguggccacaguuucgg

SEQ ID NO: 1790421 - RNA, 19 nt, Artificial Sequence
  Description of Artificial Sequence: Synthetic oligonucleotide
ucaugcuggacauaauuug

SEQ ID NO: 1790422 - RNA, 19 nt, Artificial Sequence
  Description of Artificial Sequence: Synthetic oligonucleotide
uguugcuucaucaucuuuc

SEQ ID NO: 1790423 - RNA, 19 nt, Artificial Sequence
  Description of Artificial Sequence: Synthetic oligonucleotide
acugcugcaaaauagguua

SEQ ID NO: 1790424 - RNA, 19 nt, Artificial Sequence
  Description of Artificial Sequence: Synthetic oligonucleotide
agugacaguaccaaaauca

SEQ ID NO: 1790425 - RNA, 19 nt, Artificial Sequence
  Description of Artificial Sequence: Synthetic oligonucleotide
ugcuucaucaucuuucaac

SEQ ID NO: 1790426 - RNA, 19 nt, Artificial Sequence
  Description of Artificial Sequence: Synthetic oligonucleotide
uacaccuguaccaaagcca

SEQ ID NO: 1790427 - RNA, 19 nt, Artificial Sequence
  Description of Artificial Sequence: Synthetic oligonucleotide
agucccauuuccuggaggg

SEQ ID NO: 1790428 - RNA, 19 nt, Artificial Sequence
  Description of Artificial Sequence: Synthetic oligonucleotide
uauugcagaaaauguggcc

SEQ ID NO: 1790429 - RNA, 19 nt, Artificial Sequence
  Description of Artificial Sequence: Synthetic oligonucleotide
agaugcgauggcuucauuc

SEQ ID NO: 1790430 - RNA, 19 nt, Artificial Sequence
  Description of Artificial Sequence: Synthetic oligonucleotide
aggucaacaggcuaauguc

SEQ ID NO: 1790431 - RNA, 19 nt, Artificial Sequence
  Description of Artificial Sequence: Synthetic oligonucleotide
caaagccaggauauaaccg

SEQ ID NO: 1790432 - RNA, 19 nt, Artificial Sequence
  Description of Artificial Sequence: Synthetic oligonucleotide
gauucuauauuagugcaac

SEQ ID NO: 1790433 - RNA, 19 nt, Artificial Sequence
  Description of Artificial Sequence: Synthetic oligonucleotide
ggagguaucucucucaugc

SEQ ID NO: 1790434 - RNA, 19 nt, Artificial Sequence
  Description of Artificial Sequence: Synthetic oligonucleotide
uguaccgaggcuuuccacc

SEQ ID NO: 1790435 - RNA, 19 nt, Artificial Sequence
  Description of Artificial Sequence: Synthetic oligonucleotide
aaugucggacuagagcugg

SEQ ID NO: 1790436 - RNA, 19 nt, Artificial Sequence
  Description of Artificial Sequence: Synthetic oligonucleotide
cauguguggcccuucagcg

SEQ ID NO: 1790437 - RNA, 19 nt, Artificial Sequence
  Description of Artificial Sequence: Synthetic oligonucleotide
cagaguuuggcacuguacc

SEQ ID NO: 1790438 - RNA, 19 nt, Artificial Sequence
  Description of Artificial Sequence: Synthetic oligonucleotide
uuggaguucccguagcucc

SEQ ID NO: 1790439 - RNA, 19 nt, Artificial Sequence
  Description of Artificial Sequence: Synthetic oligonucleotide
gguauugcagaaaaugugg

SEQ ID NO: 1790440 - RNA, 19 nt, Artificial Sequence
  Description of Artificial Sequence: Synthetic oligonucleotide
agaguuuggcacuguaccg

SEQ ID NO: 1790441 - RNA, 19 nt, Artificial Sequence
  Description of Artificial Sequence: Synthetic oligonucleotide
uaaacuguucucagcauuc

SEQ ID NO: 1790442 - RNA, 19 nt, Artificial Sequence
  Description of Artificial Sequence: Synthetic oligonucleotide
uucaucaucuuucaaccau

SEQ ID NO: 1790443 - RNA, 19 nt, Artificial Sequence
  Description of Artificial Sequence: Synthetic oligonucleotide
gaggacacagaaaugucgg

SEQ ID NO: 1790444 - RNA, 19 nt, Artificial Sequence
  Description of Artificial Sequence: Synthetic oligonucleotide
uugaguuuggacuggcuga

SEQ ID NO: 1790445 - RNA, 19 nt, Artificial Sequence
  Description of Artificial Sequence: Synthetic oligonucleotide
uuuggacuggcugaggugc

SEQ ID NO: 1790446 - RNA, 19 nt, Artificial Sequence
  Description of Artificial Sequence: Synthetic oligonucleotide
uuucuuugauucucuuggg

SEQ ID NO: 1790447 - RNA, 19 nt, Artificial Sequence
  Description of Artificial Sequence: Synthetic oligonucleotide
cucugucugaagcagacag

SEQ ID NO: 1790448 - RNA, 19 nt, Artificial Sequence
  Description of Artificial Sequence: Synthetic oligonucleotide
auugcagaaaauguggcca

SEQ ID NO: 1790449 - RNA, 19 nt, Artificial Sequence
  Description of Artificial Sequence: Synthetic oligonucleotide
uauaaccgaggacacagaa

SEQ ID NO: 1790450 - RNA, 19 nt, Artificial Sequence
  Description of Artificial Sequence: Synthetic oligonucleotide
aggauucuauauuagugca

SEQ ID NO: 1790451 - RNA, 19 nt, Artificial Sequence
  Description of Artificial Sequence: Synthetic oligonucleotide
ucugucugaagcagacagg

SEQ ID NO: 1790452 - RNA, 19 nt, Artificial Sequence
  Description of Artificial Sequence: Synthetic oligonucleotide
cucuaguaacuucauggcg

SEQ ID NO: 1790453 - RNA, 19 nt, Artificial Sequence
  Description of Artificial Sequence: Synthetic oligonucleotide
cauugcaggucucuggagg

SEQ ID NO: 1790454 - RNA, 19 nt, Artificial Sequence
  Description of Artificial Sequence: Synthetic oligonucleotide
cagaccuucuguaacuccg

SEQ ID NO: 1790455 - RNA, 19 nt, Artificial Sequence
  Description of Artificial Sequence: Synthetic oligonucleotide
aggcuaaugucccuucugg

SEQ ID NO: 1790456 - RNA, 19 nt, Artificial Sequence
  Description of Artificial Sequence: Synthetic oligonucleotide
aacacgcacuggcuuaggg

SEQ ID NO: 1790457 - RNA, 19 nt, Artificial Sequence
  Description of Artificial Sequence: Synthetic oligonucleotide
uuucaugcuggacauaauu

SEQ ID NO: 1790458 - RNA, 19 nt, Artificial Sequence
  Description of Artificial Sequence: Synthetic oligonucleotide
acaguauguugcuucauca

SEQ ID NO: 1790459 - RNA, 19 nt, Artificial Sequence
  Description of Artificial Sequence: Synthetic oligonucleotide
cuuucugccuguugcaacc

SEQ ID NO: 1790460 - RNA, 19 nt, Artificial Sequence
  Description of Artificial Sequence: Synthetic oligonucleotide
uugaaaagugaaagugaca

SEQ ID NO: 1790461 - RNA, 19 nt, Artificial Sequence
  Description of Artificial Sequence: Synthetic oligonucleotide
aacaggcuaaugucccuuc

SEQ ID NO: 1790462 - RNA, 19 nt, Artificial Sequence
  Description of Artificial Sequence: Synthetic oligonucleotide
uauuagugcaacugcugca

SEQ ID NO: 1790463 - RNA, 19 nt, Artificial Sequence
  Description of Artificial Sequence: Synthetic oligonucleotide
caggauauaaccgaggaca

SEQ ID NO: 1790464 - RNA, 19 nt, Artificial Sequence
  Description of Artificial Sequence: Synthetic oligonucleotide
ucuuucaaccauguguggc

SEQ ID NO: 1790465 - RNA, 19 nt, Artificial Sequence
  Description of Artificial Sequence: Synthetic oligonucleotide
uuuccaccacucuugagga

SEQ ID NO: 1790466 - RNA, 19 nt, Artificial Sequence
  Description of Artificial Sequence: Synthetic oligonucleotide
acagaccuucuguaacucc

SEQ ID NO: 1790467 - RNA, 19 nt, Artificial Sequence
  Description of Artificial Sequence: Synthetic oligonucleotide
cuugaguuuggacuggcug

SEQ ID NO: 1790468 - RNA, 19 nt, Artificial Sequence
  Description of Artificial Sequence: Synthetic oligonucleotide
cuuggcgcugucuucagag

SEQ ID NO: 1790469 - RNA, 19 nt, Artificial Sequence
  Description of Artificial Sequence: Synthetic oligonucleotide
uccgcugaacuccuguugc

SEQ ID NO: 1790470 - RNA, 19 nt, Artificial Sequence
  Description of Artificial Sequence: Synthetic oligonucleotide
ucucucaugcuguaauucu

SEQ ID NO: 1790471 - RNA, 19 nt, Artificial Sequence
  Description of Artificial Sequence: Synthetic oligonucleotide
ucuuucucuagacccgagc

SEQ ID NO: 1790472 - RNA, 19 nt, Artificial Sequence
  Description of Artificial Sequence: Synthetic oligonucleotide
uucuuugauucucuugggu

SEQ ID NO: 1790473 - RNA, 19 nt, Artificial Sequence
  Description of Artificial Sequence: Synthetic oligonucleotide
uucaugcuggacauaauuu

SEQ ID NO: 1790474 - RNA, 19 nt, Artificial Sequence
  Description of Artificial Sequence: Synthetic oligonucleotide
uacaguauguugcuucauc

SEQ ID NO: 1790475 - RNA, 19 nt, Artificial Sequence
  Description of Artificial Sequence: Synthetic oligonucleotide
ugcuguaauucucucugga

SEQ ID NO: 1790476 - RNA, 19 nt, Artificial Sequence
  Description of Artificial Sequence: Synthetic oligonucleotide
aacuguucucagcauucug

SEQ ID NO: 1790477 - RNA, 19 nt, Artificial Sequence
  Description of Artificial Sequence: Synthetic oligonucleotide
aguaacuucauggcgauuu

SEQ ID NO: 1790478 - RNA, 19 nt, Artificial Sequence
  Description of Artificial Sequence: Synthetic oligonucleotide
ucggacuagagcuggcucc

SEQ ID NO: 1790479 - RNA, 19 nt, Artificial Sequence
  Description of Artificial Sequence: Synthetic oligonucleotide
cuguaaacuguucucagca

SEQ ID NO: 1790480 - RNA, 19 nt, Artificial Sequence
  Description of Artificial Sequence: Synthetic oligonucleotide
cuucaaaagaugcgauggc

SEQ ID NO: 1790481 - RNA, 19 nt, Artificial Sequence
  Description of Artificial Sequence: Synthetic oligonucleotide
aguuuggacuggcugaggu

SEQ ID NO: 1790482 - RNA, 19 nt, Artificial Sequence
  Description of Artificial Sequence: Synthetic oligonucleotide
augcucagcugucacuugg

SEQ ID NO: 1790483 - RNA, 19 nt, Artificial Sequence
  Description of Artificial Sequence: Synthetic oligonucleotide
uggguaggauucuauauua

SEQ ID NO: 1790484 - RNA, 19 nt, Artificial Sequence
  Description of Artificial Sequence: Synthetic oligonucleotide
uauuuacuuccuuuauguc

SEQ ID NO: 1790485 - RNA, 19 nt, Artificial Sequence
  Description of Artificial Sequence: Synthetic oligonucleotide
aguucuuucucuagacccg

SEQ ID NO: 1790486 - RNA, 19 nt, Artificial Sequence
  Description of Artificial Sequence: Synthetic oligonucleotide
aguuacaccuguaccaaag

SEQ ID NO: 1790487 - RNA, 19 nt, Artificial Sequence
  Description of Artificial Sequence: Synthetic oligonucleotide
caguaccaaaaucaugaag

SEQ ID NO: 1790488 - RNA, 19 nt, Artificial Sequence
  Description of Artificial Sequence: Synthetic oligonucleotide
aacuucauggcgauuucca

SEQ ID NO: 1790489 - RNA, 19 nt, Artificial Sequence
  Description of Artificial Sequence: Synthetic oligonucleotide
accaaagccaggauauaac

SEQ ID NO: 1790490 - RNA, 19 nt, Artificial Sequence
  Description of Artificial Sequence: Synthetic oligonucleotide
caaaaucaugaaguuacac

SEQ ID NO: 1790491 - RNA, 19 nt, Artificial Sequence
  Description of Artificial Sequence: Synthetic oligonucleotide
agguaucucucucaugcug

SEQ ID NO: 1790492 - RNA, 19 nt, Artificial Sequence
  Description of Artificial Sequence: Synthetic oligonucleotide
uagagcuggcuccauacaa

SEQ ID NO: 1790493 - RNA, 19 nt, Artificial Sequence
  Description of Artificial Sequence: Synthetic oligonucleotide
auguguggcccuucagcgc

SEQ ID NO: 1790494 - RNA, 19 nt, Artificial Sequence
  Description of Artificial Sequence: Synthetic oligonucleotide
uagacccgagcauugguca

SEQ ID NO: 1790495 - RNA, 19 nt, Artificial Sequence
  Description of Artificial Sequence: Synthetic oligonucleotide
cuguaauucucucuggaga

SEQ ID NO: 1790496 - RNA, 19 nt, Artificial Sequence
  Description of Artificial Sequence: Synthetic oligonucleotide
aguuuggcacuguaccgag

SEQ ID NO: 1790497 - RNA, 19 nt, Artificial Sequence
  Description of Artificial Sequence: Synthetic oligonucleotide
uguugcaaccuuucuucca

SEQ ID NO: 1790498 - RNA, 19 nt, Artificial Sequence
  Description of Artificial Sequence: Synthetic oligonucleotide
agguauugcagaaaaugug

SEQ ID NO: 1790499 - RNA, 19 nt, Artificial Sequence
  Description of Artificial Sequence: Synthetic oligonucleotide
gacauaauuugauugguuu

SEQ ID NO: 1790500 - RNA, 19 nt, Artificial Sequence
  Description of Artificial Sequence: Synthetic oligonucleotide
guauugcagaaaauguggc

SEQ ID NO: 1790501 - RNA, 19 nt, Artificial Sequence
  Description of Artificial Sequence: Synthetic oligonucleotide
aucuuucaaccaugugugg

SEQ ID NO: 1790502 - RNA, 19 nt, Artificial Sequence
  Description of Artificial Sequence: Synthetic oligonucleotide
guuacaccuguaccaaagc

SEQ ID NO: 1790503 - RNA, 19 nt, Artificial Sequence
  Description of Artificial Sequence: Synthetic oligonucleotide
guagcuguagggcacugac

SEQ ID NO: 1790504 - RNA, 19 nt, Artificial Sequence
  Description of Artificial Sequence: Synthetic oligonucleotide
ucucuagacccgagcauug

SEQ ID NO: 1790505 - RNA, 19 nt, Artificial Sequence
  Description of Artificial Sequence: Synthetic oligonucleotide
aaugcucagcugucacuug

SEQ ID NO: 1790506 - RNA, 19 nt, Artificial Sequence
  Description of Artificial Sequence: Synthetic oligonucleotide
aaucaagguuucuguggga

SEQ ID NO: 1790507 - RNA, 19 nt, Artificial Sequence
  Description of Artificial Sequence: Synthetic oligonucleotide
cuccauacaaaccauggaa

SEQ ID NO: 1790508 - RNA, 19 nt, Artificial Sequence
  Description of Artificial Sequence: Synthetic oligonucleotide
gaugcgauggcuucauucu

SEQ ID NO: 1790509 - RNA, 19 nt, Artificial Sequence
  Description of Artificial Sequence: Synthetic oligonucleotide
ucuagacccgagcauuggu

SEQ ID NO: 1790510 - RNA, 19 nt, Artificial Sequence
  Description of Artificial Sequence: Synthetic oligonucleotide
uagggcacugacccuuccg

SEQ ID NO: 1790511 - RNA, 19 nt, Artificial Sequence
  Description of Artificial Sequence: Synthetic oligonucleotide
uuggucacgcagcugggac

SEQ ID NO: 1790512 - RNA, 19 nt, Artificial Sequence
  Description of Artificial Sequence: Synthetic oligonucleotide
gacccuuccgcugaacucc

SEQ ID NO: 1790513 - RNA, 19 nt, Artificial Sequence
  Description of Artificial Sequence: Synthetic oligonucleotide
uucaaagacacagcagaaa

SEQ ID NO: 1790514 - RNA, 19 nt, Artificial Sequence
  Description of Artificial Sequence: Synthetic oligonucleotide
cuggcugaggugcaguccc

SEQ ID NO: 1790515 - RNA, 19 nt, Artificial Sequence
  Description of Artificial Sequence: Synthetic oligonucleotide
auucuauauuagugcaacu

SEQ ID NO: 1790516 - RNA, 19 nt, Artificial Sequence
  Description of Artificial Sequence: Synthetic oligonucleotide
aguggugcuuucuucggga

SEQ ID NO: 1790517 - RNA, 19 nt, Artificial Sequence
  Description of Artificial Sequence: Synthetic oligonucleotide
acaccuguaccaaagccag

SEQ ID NO: 1790518 - RNA, 19 nt, Artificial Sequence
  Description of Artificial Sequence: Synthetic oligonucleotide
cacugcuuacaguauguug

SEQ ID NO: 1790519 - RNA, 19 nt, Artificial Sequence
  Description of Artificial Sequence: Synthetic oligonucleotide
uuucucuagacccgagcau

SEQ ID NO: 1790520 - RNA, 19 nt, Artificial Sequence
  Description of Artificial Sequence: Synthetic oligonucleotide
uuccgcugaacuccuguug

SEQ ID NO: 1790521 - RNA, 19 nt, Artificial Sequence
  Description of Artificial Sequence: Synthetic oligonucleotide
ucgggaaauggagaacucc

SEQ ID NO: 1790522 - RNA, 19 nt, Artificial Sequence
  Description of Artificial Sequence: Synthetic oligonucleotide
ugucacaaacacgcacugg

SEQ ID NO: 1790523 - RNA, 19 nt, Artificial Sequence
  Description of Artificial Sequence: Synthetic oligonucleotide
ucaucuuggaguucccgua

SEQ ID NO: 1790524 - RNA, 19 nt, Artificial Sequence
  Description of Artificial Sequence: Synthetic oligonucleotide
caugcuggacauaauuuga

SEQ ID NO: 1790525 - RNA, 19 nt, Artificial Sequence
  Description of Artificial Sequence: Synthetic oligonucleotide
uugcagaaaauguggccac

SEQ ID NO: 1790526 - RNA, 19 nt, Artificial Sequence
  Description of Artificial Sequence: Synthetic oligonucleotide
gaggcccagaguuuggcac

SEQ ID NO: 1790527 - RNA, 19 nt, Artificial Sequence
  Description of Artificial Sequence: Synthetic oligonucleotide
agcucauugcuggagcagg

SEQ ID NO: 1790528 - RNA, 19 nt, Artificial Sequence
  Description of Artificial Sequence: Synthetic oligonucleotide
ucuggaggcccagaguuug

SEQ ID NO: 1790529 - RNA, 19 nt, Artificial Sequence
  Description of Artificial Sequence: Synthetic oligonucleotide
acagaaaugucggacuaga

SEQ ID NO: 1790530 - RNA, 19 nt, Artificial Sequence
  Description of Artificial Sequence: Synthetic oligonucleotide
gucaacaggcuaauguccc

SEQ ID NO: 1790531 - RNA, 19 nt, Artificial Sequence
  Description of Artificial Sequence: Synthetic oligonucleotide
gcuaaugucccuucuggug

SEQ ID NO: 1790532 - RNA, 19 nt, Artificial Sequence
  Description of Artificial Sequence: Synthetic oligonucleotide
aucucucucaugcuguaau

SEQ ID NO: 1790533 - RNA, 19 nt, Artificial Sequence
  Description of Artificial Sequence: Synthetic oligonucleotide
uucagcgccuuauuuacuu

SEQ ID NO: 1790534 - RNA, 19 nt, Artificial Sequence
  Description of Artificial Sequence: Synthetic oligonucleotide
uuucaaccauguguggccc

SEQ ID NO: 1790535 - RNA, 19 nt, Artificial Sequence
  Description of Artificial Sequence: Synthetic oligonucleotide
uaacuccgccuucucaucu

SEQ ID NO: 1790536 - RNA, 19 nt, Artificial Sequence
  Description of Artificial Sequence: Synthetic oligonucleotide
uggagaacuccuucucaca

SEQ ID NO: 1790537 - RNA, 19 nt, Artificial Sequence
  Description of Artificial Sequence: Synthetic oligonucleotide
gcaacugcugcaaaauagg

SEQ ID NO: 1790538 - RNA, 19 nt, Artificial Sequence
  Description of Artificial Sequence: Synthetic oligonucleotide
aaaugucggacuagagcug

SEQ ID NO: 1790539 - RNA, 19 nt, Artificial Sequence
  Description of Artificial Sequence: Synthetic oligonucleotide
ugucacuuggcgcugucuu

SEQ ID NO: 1790540 - RNA, 19 nt, Artificial Sequence
  Description of Artificial Sequence: Synthetic oligonucleotide
auuagugcaacugcugcaa

SEQ ID NO: 1790541 - RNA, 19 nt, Artificial Sequence
  Description of Artificial Sequence: Synthetic oligonucleotide
cuagacccgagcauugguc

SEQ ID NO: 1790542 - RNA, 19 nt, Artificial Sequence
  Description of Artificial Sequence: Synthetic oligonucleotide
ggucauugcaggucucugg

SEQ ID NO: 1790543 - RNA, 19 nt, Artificial Sequence
  Description of Artificial Sequence: Synthetic oligonucleotide
gauuucaguucuuucucua

SEQ ID NO: 1790544 - RNA, 19 nt, Artificial Sequence
  Description of Artificial Sequence: Synthetic oligonucleotide
gacacagaaaugucggacu

SEQ ID NO: 1790545 - RNA, 19 nt, Artificial Sequence
  Description of Artificial Sequence: Synthetic oligonucleotide
acaggagguaucucucuca

SEQ ID NO: 1790546 - RNA, 19 nt, Artificial Sequence
  Description of Artificial Sequence: Synthetic oligonucleotide
ugcagucccauuuccugga

SEQ ID NO: 1790547 - RNA, 19 nt, Artificial Sequence
  Description of Artificial Sequence: Synthetic oligonucleotide
ggcgauuuccaucucaguc

SEQ ID NO: 1790548 - RNA, 19 nt, Artificial Sequence
  Description of Artificial Sequence: Synthetic oligonucleotide
aaacuguucucagcauucu

SEQ ID NO: 1790549 - RNA, 19 nt, Artificial Sequence
  Description of Artificial Sequence: Synthetic oligonucleotide
agcucugucugaagcagac

SEQ ID NO: 1790550 - RNA, 19 nt, Artificial Sequence
  Description of Artificial Sequence: Synthetic oligonucleotide
gcuguaauucucucuggag

SEQ ID NO: 1790551 - RNA, 19 nt, Artificial Sequence
  Description of Artificial Sequence: Synthetic oligonucleotide
cuauauuagugcaacugcu

SEQ ID NO: 1790552 - RNA, 19 nt, Artificial Sequence
  Description of Artificial Sequence: Synthetic oligonucleotide
ggcugauggccucaggagg

SEQ ID NO: 1790553 - RNA, 19 nt, Artificial Sequence
  Description of Artificial Sequence: Synthetic oligonucleotide
uguucucagcauucugaac

SEQ ID NO: 1790554 - RNA, 19 nt, Artificial Sequence
  Description of Artificial Sequence: Synthetic oligonucleotide
agacccgagcauuggucac

SEQ ID NO: 1790555 - RNA, 19 nt, Artificial Sequence
  Description of Artificial Sequence: Synthetic oligonucleotide
auggguguccuucucuagu

SEQ ID NO: 1790556 - RNA, 19 nt, Artificial Sequence
  Description of Artificial Sequence: Synthetic oligonucleotide
cagaaaugucggacuagag

SEQ ID NO: 1790557 - RNA, 19 nt, Artificial Sequence
  Description of Artificial Sequence: Synthetic oligonucleotide
ccuguugcaaccuuucuuc

SEQ ID NO: 1790558 - RNA, 19 nt, Artificial Sequence
  Description of Artificial Sequence: Synthetic oligonucleotide
agggugugacagcugucac

SEQ ID NO: 1790559 - RNA, 19 nt, Artificial Sequence
  Description of Artificial Sequence: Synthetic oligonucleotide
aaagaugcgauggcuucau

SEQ ID NO: 1790560 - RNA, 19 nt, Artificial Sequence
  Description of Artificial Sequence: Synthetic oligonucleotide
ucacuuggcgcugucuuca

SEQ ID NO: 1790561 - RNA, 19 nt, Artificial Sequence
  Description of Artificial Sequence: Synthetic oligonucleotide
uggcggagggcgaccagcg

SEQ ID NO: 1790562 - RNA, 19 nt, Artificial Sequence
  Description of Artificial Sequence: Synthetic oligonucleotide
uagcuguagggcacugacc

SEQ ID NO: 1790563 - RNA, 19 nt, Artificial Sequence
  Description of Artificial Sequence: Synthetic oligonucleotide
aaguuacaccuguaccaaa

SEQ ID NO: 1790564 - RNA, 19 nt, Artificial Sequence
  Description of Artificial Sequence: Synthetic oligonucleotide
guuuggacuggcugaggug

SEQ ID NO: 1790565 - RNA, 19 nt, Artificial Sequence
  Description of Artificial Sequence: Synthetic oligonucleotide
aaccauguguggcccuuca

SEQ ID NO: 1790566 - RNA, 19 nt, Artificial Sequence
  Description of Artificial Sequence: Synthetic oligonucleotide
agugcaacugcugcaaaau

SEQ ID NO: 1790567 - RNA, 19 nt, Artificial Sequence
  Description of Artificial Sequence: Synthetic oligonucleotide
gcagaaaucaagguuucug

SEQ ID NO: 1790568 - RNA, 19 nt, Artificial Sequence
  Description of Artificial Sequence: Synthetic oligonucleotide
acacgcacuggcuuagggu

SEQ ID NO: 1790569 - RNA, 19 nt, Artificial Sequence
  Description of Artificial Sequence: Synthetic oligonucleotide
uggcuccauacaaaccaug

SEQ ID NO: 1790570 - RNA, 19 nt, Artificial Sequence
  Description of Artificial Sequence: Synthetic oligonucleotide
uucucuagacccgagcauu

SEQ ID NO: 1790571 - RNA, 19 nt, Artificial Sequence
  Description of Artificial Sequence: Synthetic oligonucleotide
uucucauggguguccuucu

SEQ ID NO: 1790572 - RNA, 19 nt, Artificial Sequence
  Description of Artificial Sequence: Synthetic oligonucleotide
ggagaacuccuucucacac

SEQ ID NO: 1790573 - RNA, 19 nt, Artificial Sequence
  Description of Artificial Sequence: Synthetic oligonucleotide
acacagaaaugucggacua

SEQ ID NO: 1790574 - RNA, 19 nt, Artificial Sequence
  Description of Artificial Sequence: Synthetic oligonucleotide
acuguaccgaggcuuucca

SEQ ID NO: 1790575 - RNA, 19 nt, Artificial Sequence
  Description of Artificial Sequence: Synthetic oligonucleotide
ugcuggacauaauuugauu

SEQ ID NO: 1790576 - RNA, 19 nt, Artificial Sequence
  Description of Artificial Sequence: Synthetic oligonucleotide
cugucugaagcagacagga

SEQ ID NO: 1790577 - RNA, 19 nt, Artificial Sequence
  Description of Artificial Sequence: Synthetic oligonucleotide
uuucugugggaugugggua

SEQ ID NO: 1790578 - RNA, 19 nt, Artificial Sequence
  Description of Artificial Sequence: Synthetic oligonucleotide
gaguuuggcacuguaccga

SEQ ID NO: 1790579 - RNA, 19 nt, Artificial Sequence
  Description of Artificial Sequence: Synthetic oligonucleotide
aucaagguuucugugggau

SEQ ID NO: 1790580 - RNA, 19 nt, Artificial Sequence
  Description of Artificial Sequence: Synthetic oligonucleotide
gcauucugaacuuugugaa

SEQ ID NO: 1790581 - RNA, 19 nt, Artificial Sequence
  Description of Artificial Sequence: Synthetic oligonucleotide
uaauugcuuugacuuccuc

SEQ ID NO: 1790582 - RNA, 19 nt, Artificial Sequence
  Description of Artificial Sequence: Synthetic oligonucleotide
cauuggucacgcagcuggg

SEQ ID NO: 1790583 - RNA, 19 nt, Artificial Sequence
  Description of Artificial Sequence: Synthetic oligonucleotide
guauguugcuucaucaucu

SEQ ID NO: 1790584 - RNA, 19 nt, Artificial Sequence
  Description of Artificial Sequence: Synthetic oligonucleotide
uccgccuucucaucuugga

SEQ ID NO: 1790585 - RNA, 19 nt, Artificial Sequence
  Description of Artificial Sequence: Synthetic oligonucleotide
ugacccuuccgcugaacuc

SEQ ID NO: 1790586 - RNA, 19 nt, Artificial Sequence
  Description of Artificial Sequence: Synthetic oligonucleotide
cagaaaucaagguuucugu

SEQ ID NO: 1790587 - RNA, 19 nt, Artificial Sequence
  Description of Artificial Sequence: Synthetic oligonucleotide
ggucaacaggcuaaugucc

SEQ ID NO: 1790588 - RNA, 19 nt, Artificial Sequence
  Description of Artificial Sequence: Synthetic oligonucleotide
gaagcagacaggagguauc

SEQ ID NO: 1790589 - RNA, 19 nt, Artificial Sequence
  Description of Artificial Sequence: Synthetic oligonucleotide
uucgggaaauggagaacuc

SEQ ID NO: 1790590 - RNA, 19 nt, Artificial Sequence
  Description of Artificial Sequence: Synthetic oligonucleotide
agcuggcuccauacaaacc

SEQ ID NO: 1790591 - RNA, 19 nt, Artificial Sequence
  Description of Artificial Sequence: Synthetic oligonucleotide
gacccgagcauuggucacg

SEQ ID NO: 1790592 - RNA, 19 nt, Artificial Sequence
  Description of Artificial Sequence: Synthetic oligonucleotide
ucccguagcuccuucuuua

SEQ ID NO: 1790593 - RNA, 19 nt, Artificial Sequence
  Description of Artificial Sequence: Synthetic oligonucleotide
uggucacgcagcugggaca

SEQ ID NO: 1790594 - RNA, 19 nt, Artificial Sequence
  Description of Artificial Sequence: Synthetic oligonucleotide
aaacacgcacuggcuuagg

SEQ ID NO: 1790595 - RNA, 19 nt, Artificial Sequence
  Description of Artificial Sequence: Synthetic oligonucleotide
cucaugcuguaauucucuc

SEQ ID NO: 1790596 - RNA, 19 nt, Artificial Sequence
  Description of Artificial Sequence: Synthetic oligonucleotide
caggcuaaugucccuucug

SEQ ID NO: 1790597 - RNA, 19 nt, Artificial Sequence
  Description of Artificial Sequence: Synthetic oligonucleotide
guaacuucauggcgauuuc

SEQ ID NO: 1790598 - RNA, 19 nt, Artificial Sequence
  Description of Artificial Sequence: Synthetic oligonucleotide
agggcgaccagcguguccu

SEQ ID NO: 1790599 - RNA, 19 nt, Artificial Sequence
  Description of Artificial Sequence: Synthetic oligonucleotide
gugaaacaucuguaaauua

SEQ ID NO: 1790600 - RNA, 19 nt, Artificial Sequence
  Description of Artificial Sequence: Synthetic oligonucleotide
cacagaaaugucggacuag

SEQ ID NO: 1790601 - RNA, 19 nt, Artificial Sequence
  Description of Artificial Sequence: Synthetic oligonucleotide
caaacacgcacuggcuuag

SEQ ID NO: 1790602 - RNA, 19 nt, Artificial Sequence
  Description of Artificial Sequence: Synthetic oligonucleotide
guaccgaggcuuuccacca

SEQ ID NO: 1790603 - RNA, 19 nt, Artificial Sequence
  Description of Artificial Sequence: Synthetic oligonucleotide
acccgagcauuggucacgc

SEQ ID NO: 1790604 - RNA, 19 nt, Artificial Sequence
  Description of Artificial Sequence: Synthetic oligonucleotide
cagucccauuuccuggagg

SEQ ID NO: 1790605 - RNA, 19 nt, Artificial Sequence
  Description of Artificial Sequence: Synthetic oligonucleotide
uccuucucacacugcuuac

SEQ ID NO: 1790606 - RNA, 19 nt, Artificial Sequence
  Description of Artificial Sequence: Synthetic oligonucleotide
cauuuguuucaugcuggac

SEQ ID NO: 1790607 - RNA, 19 nt, Artificial Sequence
  Description of Artificial Sequence: Synthetic oligonucleotide
auguggguaggauucuaua

SEQ ID NO: 1790608 - RNA, 19 nt, Artificial Sequence
  Description of Artificial Sequence: Synthetic oligonucleotide
ugccuguugcaaccuuucu

SEQ ID NO: 1790609 - RNA, 19 nt, Artificial Sequence
  Description of Artificial Sequence: Synthetic oligonucleotide
ucagcgccuuauuuacuuc

SEQ ID NO: 1790610 - RNA, 19 nt, Artificial Sequence
  Description of Artificial Sequence: Synthetic oligonucleotide
gguguccuucucuaguaac

SEQ ID NO: 1790611 - RNA, 19 nt, Artificial Sequence
  Description of Artificial Sequence: Synthetic oligonucleotide
gguaggauucuauauuagu

SEQ ID NO: 1790612 - RNA, 19 nt, Artificial Sequence
  Description of Artificial Sequence: Synthetic oligonucleotide
accauguguggcccuucag

SEQ ID NO: 1790613 - RNA, 19 nt, Artificial Sequence
  Description of Artificial Sequence: Synthetic oligonucleotide
aguucccguagcuccuucu

SEQ ID NO: 1790614 - RNA, 19 nt, Artificial Sequence
  Description of Artificial Sequence: Synthetic oligonucleotide
aggagguaucucucucaug

SEQ ID NO: 1790615 - RNA, 19 nt, Artificial Sequence
  Description of Artificial Sequence: Synthetic oligonucleotide
cacgcacuggcuuagggua

SEQ ID NO: 1790616 - RNA, 19 nt, Artificial Sequence
  Description of Artificial Sequence: Synthetic oligonucleotide
uguagggcacugacccuuc

SEQ ID NO: 1790617 - RNA, 19 nt, Artificial Sequence
  Description of Artificial Sequence: Synthetic oligonucleotide
cacuguaccgaggcuuucc

SEQ ID NO: 1790618 - RNA, 19 nt, Artificial Sequence
  Description of Artificial Sequence: Synthetic oligonucleotide
cauggcgauuuccaucuca

SEQ ID NO: 1790619 - RNA, 19 nt, Artificial Sequence
  Description of Artificial Sequence: Synthetic oligonucleotide
guugcaaccuuucuuccau

SEQ ID NO: 1790620 - RNA, 19 nt, Artificial Sequence
  Description of Artificial Sequence: Synthetic oligonucleotide
ugucggacuagagcuggcu

SEQ ID NO: 1790621 - RNA, 19 nt, Artificial Sequence
  Description of Artificial Sequence: Synthetic oligonucleotide
guaacuccgccuucucauc

SEQ ID NO: 1790622 - RNA, 19 nt, Artificial Sequence
  Description of Artificial Sequence: Synthetic oligonucleotide
agccaggauauaaccgagg

SEQ ID NO: 1790623 - RNA, 19 nt, Artificial Sequence
  Description of Artificial Sequence: Synthetic oligonucleotide
guaaacuguucucagcauu

SEQ ID NO: 1790624 - RNA, 19 nt, Artificial Sequence
  Description of Artificial Sequence: Synthetic oligonucleotide
accgaggcuuuccaccacu

SEQ ID NO: 1790625 - RNA, 19 nt, Artificial Sequence
  Description of Artificial Sequence: Synthetic oligonucleotide
agaggcugacagucuggug

SEQ ID NO: 1790626 - RNA, 19 nt, Artificial Sequence
  Description of Artificial Sequence: Synthetic oligonucleotide
cugccuguugcaaccuuuc

SEQ ID NO: 1790627 - RNA, 19 nt, Artificial Sequence
  Description of Artificial Sequence: Synthetic oligonucleotide
uucaaccauguguggcccu

SEQ ID NO: 1790628 - RNA, 19 nt, Artificial Sequence
  Description of Artificial Sequence: Synthetic oligonucleotide
auaaccgaggacacagaaa

SEQ ID NO: 1790629 - RNA, 19 nt, Artificial Sequence
  Description of Artificial Sequence: Synthetic oligonucleotide
aacuccgccuucucaucuu

SEQ ID NO: 1790630 - RNA, 19 nt, Artificial Sequence
  Description of Artificial Sequence: Synthetic oligonucleotide
ggugugacagcugucacaa

SEQ ID NO: 1790631 - RNA, 19 nt, Artificial Sequence
  Description of Artificial Sequence: Synthetic oligonucleotide
ccgagcauuggucacgcag

SEQ ID NO: 1790632 - RNA, 19 nt, Artificial Sequence
  Description of Artificial Sequence: Synthetic oligonucleotide
ggucucuggaggcccagag

SEQ ID NO: 1790633 - RNA, 19 nt, Artificial Sequence
  Description of Artificial Sequence: Synthetic oligonucleotide
ugggucauugcaggucucu

SEQ ID NO: 1790634 - RNA, 19 nt, Artificial Sequence
  Description of Artificial Sequence: Synthetic oligonucleotide
gcaaccuuucuuccauuug

SEQ ID NO: 1790635 - RNA, 19 nt, Artificial Sequence
  Description of Artificial Sequence: Synthetic oligonucleotide
cugcuguaaacuguucuca

SEQ ID NO: 1790636 - RNA, 19 nt, Artificial Sequence
  Description of Artificial Sequence: Synthetic oligonucleotide
cuccuucucacacugcuua

SEQ ID NO: 1790637 - RNA, 19 nt, Artificial Sequence
  Description of Artificial Sequence: Synthetic oligonucleotide
agcguguccugcuucucau

SEQ ID NO: 1790638 - RNA, 19 nt, Artificial Sequence
  Description of Artificial Sequence: Synthetic oligonucleotide
cgagcauuggucacgcagc

SEQ ID NO: 1790639 - RNA, 19 nt, Artificial Sequence
  Description of Artificial Sequence: Synthetic oligonucleotide
ggacagcuguagcuguagg

SEQ ID NO: 1790640 - RNA, 19 nt, Artificial Sequence
  Description of Artificial Sequence: Synthetic oligonucleotide
gagaacuccuucucacacu

SEQ ID NO: 1790641 - RNA, 19 nt, Artificial Sequence
  Description of Artificial Sequence: Synthetic oligonucleotide
ggcacugacccuuccgcug

SEQ ID NO: 1790642 - RNA, 19 nt, Artificial Sequence
  Description of Artificial Sequence: Synthetic oligonucleotide
cuucgggaaauggagaacu

SEQ ID NO: 1790643 - RNA, 19 nt, Artificial Sequence
  Description of Artificial Sequence: Synthetic oligonucleotide
ugcugcaaaauagguuaau

SEQ ID NO: 1790644 - RNA, 19 nt, Artificial Sequence
  Description of Artificial Sequence: Synthetic oligonucleotide
caccuguaccaaagccagg

SEQ ID NO: 1790645 - RNA, 19 nt, Artificial Sequence
  Description of Artificial Sequence: Synthetic oligonucleotide
gucggacuagagcuggcuc

SEQ ID NO: 1790646 - RNA, 19 nt, Artificial Sequence
  Description of Artificial Sequence: Synthetic oligonucleotide
uggcgauuuccaucucagu

SEQ ID NO: 1790647 - RNA, 19 nt, Artificial Sequence
  Description of Artificial Sequence: Synthetic oligonucleotide
gucacuuggcgcugucuuc

SEQ ID NO: 1790648 - RNA, 19 nt, Artificial Sequence
  Description of Artificial Sequence: Synthetic oligonucleotide
guuuggcacuguaccgagg

SEQ ID NO: 1790649 - RNA, 19 nt, Artificial Sequence
  Description of Artificial Sequence: Synthetic oligonucleotide
uuacaguauguugcuucau

SEQ ID NO: 1790650 - RNA, 19 nt, Artificial Sequence
  Description of Artificial Sequence: Synthetic oligonucleotide
guaccaaaaucaugaaguu

SEQ ID NO: 1790651 - RNA, 19 nt, Artificial Sequence
  Description of Artificial Sequence: Synthetic oligonucleotide
guugcagcuuguggcuccg

SEQ ID NO: 1790652 - RNA, 19 nt, Artificial Sequence
  Description of Artificial Sequence: Synthetic oligonucleotide
cacucuugaggauggaggu

SEQ ID NO: 1790653 - RNA, 19 nt, Artificial Sequence
  Description of Artificial Sequence: Synthetic oligonucleotide
agcagaaaucaagguuucu

SEQ ID NO: 1790654 - RNA, 19 nt, Artificial Sequence
  Description of Artificial Sequence: Synthetic oligonucleotide
guucuuucucuagacccga

SEQ ID NO: 1790655 - RNA, 19 nt, Artificial Sequence
  Description of Artificial Sequence: Synthetic oligonucleotide
ggguaggauucuauauuag

SEQ ID NO: 1790656 - RNA, 19 nt, Artificial Sequence
  Description of Artificial Sequence: Synthetic oligonucleotide
ggucacgcagcugggacag

SEQ ID NO: 1790657 - RNA, 19 nt, Artificial Sequence
  Description of Artificial Sequence: Synthetic oligonucleotide
gcgauuuccaucucagucu

SEQ ID NO: 1790658 - RNA, 19 nt, Artificial Sequence
  Description of Artificial Sequence: Synthetic oligonucleotide
aggcuguggaggagcagcg

SEQ ID NO: 1790659 - RNA, 19 nt, Artificial Sequence
  Description of Artificial Sequence: Synthetic oligonucleotide
agagcuggcuccauacaaa

SEQ ID NO: 1790660 - RNA, 19 nt, Artificial Sequence
  Description of Artificial Sequence: Synthetic oligonucleotide
cucaucuuggaguucccgu

SEQ ID NO: 1790661 - RNA, 19 nt, Artificial Sequence
  Description of Artificial Sequence: Synthetic oligonucleotide
auauaaccgaggacacaga

SEQ ID NO: 1790662 - RNA, 19 nt, Artificial Sequence
  Description of Artificial Sequence: Synthetic oligonucleotide
cuguaacuccgccuucuca

SEQ ID NO: 1790663 - RNA, 19 nt, Artificial Sequence
  Description of Artificial Sequence: Synthetic oligonucleotide
augcuggacauaauuugau

SEQ ID NO: 1790664 - RNA, 19 nt, Artificial Sequence
  Description of Artificial Sequence: Synthetic oligonucleotide
guggguaggauucuauauu

SEQ ID NO: 1790665 - RNA, 19 nt, Artificial Sequence
  Description of Artificial Sequence: Synthetic oligonucleotide
cuagagcuggcuccauaca

SEQ ID NO: 1790666 - RNA, 19 nt, Artificial Sequence
  Description of Artificial Sequence: Synthetic oligonucleotide
auuggucacgcagcuggga

SEQ ID NO: 1790667 - RNA, 19 nt, Artificial Sequence
  Description of Artificial Sequence: Synthetic oligonucleotide
cacagaccuucuguaacuc

SEQ ID NO: 1790668 - RNA, 19 nt, Artificial Sequence
  Description of Artificial Sequence: Synthetic oligonucleotide
ccaccacucuugaggaugg

SEQ ID NO: 1790669 - RNA, 19 nt, Artificial Sequence
  Description of Artificial Sequence: Synthetic oligonucleotide
ggggcugauggccucagga

SEQ ID NO: 1790670 - RNA, 19 nt, Artificial Sequence
  Description of Artificial Sequence: Synthetic oligonucleotide
acagucuggugaggauuuc

SEQ ID NO: 1790671 - RNA, 19 nt, Artificial Sequence
  Description of Artificial Sequence: Synthetic oligonucleotide
caucaucuuucaaccaugu

SEQ ID NO: 1790672 - RNA, 19 nt, Artificial Sequence
  Description of Artificial Sequence: Synthetic oligonucleotide
ugggacagcuguagcugua

SEQ ID NO: 1790673 - RNA, 19 nt, Artificial Sequence
  Description of Artificial Sequence: Synthetic oligonucleotide
augucggacuagagcuggc

SEQ ID NO: 1790674 - RNA, 19 nt, Artificial Sequence
  Description of Artificial Sequence: Synthetic oligonucleotide
gucuggcccuuucugccug

SEQ ID NO: 1790675 - RNA, 19 nt, Artificial Sequence
  Description of Artificial Sequence: Synthetic oligonucleotide
cacacugcuuacaguaugu

SEQ ID NO: 1790676 - RNA, 19 nt, Artificial Sequence
  Description of Artificial Sequence: Synthetic oligonucleotide
aagaugcgauggcuucauu

SEQ ID NO: 1790677 - RNA, 19 nt, Artificial Sequence
  Description of Artificial Sequence: Synthetic oligonucleotide
ccaggauauaaccgaggac

SEQ ID NO: 1790678 - RNA, 19 nt, Artificial Sequence
  Description of Artificial Sequence: Synthetic oligonucleotide
acuuggcgcugucuucaga

SEQ ID NO: 1790679 - RNA, 19 nt, Artificial Sequence
  Description of Artificial Sequence: Synthetic oligonucleotide
uaccgaggcuuuccaccac

SEQ ID NO: 1790680 - RNA, 19 nt, Artificial Sequence
  Description of Artificial Sequence: Synthetic oligonucleotide
gaccagcguguccugcuuc

SEQ ID NO: 1790681 - RNA, 19 nt, Artificial Sequence
  Description of Artificial Sequence: Synthetic oligonucleotide
aauucucucuggagagcuu

SEQ ID NO: 1790682 - RNA, 19 nt, Artificial Sequence
  Description of Artificial Sequence: Synthetic oligonucleotide
agcgccuuauuuacuuccu

SEQ ID NO: 1790683 - RNA, 19 nt, Artificial Sequence
  Description of Artificial Sequence: Synthetic oligonucleotide
uugggucauugcaggucuc

SEQ ID NO: 1790684 - RNA, 19 nt, Artificial Sequence
  Description of Artificial Sequence: Synthetic oligonucleotide
gagguaucucucucaugcu

SEQ ID NO: 1790685 - RNA, 19 nt, Artificial Sequence
  Description of Artificial Sequence: Synthetic oligonucleotide
ggcuucauucuucugcugu

SEQ ID NO: 1790686 - RNA, 19 nt, Artificial Sequence
  Description of Artificial Sequence: Synthetic oligonucleotide
cacuuggcgcugucuucag

SEQ ID NO: 1790687 - RNA, 19 nt, Artificial Sequence
  Description of Artificial Sequence: Synthetic oligonucleotide
guaucucucucaugcugua

SEQ ID NO: 1790688 - RNA, 19 nt, Artificial Sequence
  Description of Artificial Sequence: Synthetic oligonucleotide
gugacaguaccaaaaucau

SEQ ID NO: 1790689 - RNA, 19 nt, Artificial Sequence
  Description of Artificial Sequence: Synthetic oligonucleotide
agcauuggucacgcagcug

SEQ ID NO: 1790690 - RNA, 19 nt, Artificial Sequence
  Description of Artificial Sequence: Synthetic oligonucleotide
cauuuccuggagggcuugc

SEQ ID NO: 1790691 - RNA, 19 nt, Artificial Sequence
  Description of Artificial Sequence: Synthetic oligonucleotide
cacuggcuuaggguaggag

SEQ ID NO: 1790692 - RNA, 19 nt, Artificial Sequence
  Description of Artificial Sequence: Synthetic oligonucleotide
gcggagggcgaccagcgug

SEQ ID NO: 1790693 - RNA, 19 nt, Artificial Sequence
  Description of Artificial Sequence: Synthetic oligonucleotide
gauguggguaggauucuau

SEQ ID NO: 1790694 - RNA, 19 nt, Artificial Sequence
  Description of Artificial Sequence: Synthetic oligonucleotide
gggugugacagcugucaca

SEQ ID NO: 1790695 - RNA, 19 nt, Artificial Sequence
  Description of Artificial Sequence: Synthetic oligonucleotide
acgcacuggcuuaggguag

SEQ ID NO: 1790696 - RNA, 19 nt, Artificial Sequence
  Description of Artificial Sequence: Synthetic oligonucleotide
ggauucuauauuagugcaa

SEQ ID NO: 1790697 - RNA, 19 nt, Artificial Sequence
  Description of Artificial Sequence: Synthetic oligonucleotide
ucuggcccuuucugccugu

SEQ ID NO: 1790698 - RNA, 19 nt, Artificial Sequence
  Description of Artificial Sequence: Synthetic oligonucleotide
cugcuuacaguauguugcu

SEQ ID NO: 1790699 - RNA, 19 nt, Artificial Sequence
  Description of Artificial Sequence: Synthetic oligonucleotide
uuccaccacucuugaggau

SEQ ID NO: 1790700 - RNA, 19 nt, Artificial Sequence
  Description of Artificial Sequence: Synthetic oligonucleotide
gguaucucucucaugcugu

SEQ ID NO: 1790701 - RNA, 19 nt, Artificial Sequence
  Description of Artificial Sequence: Synthetic oligonucleotide
gcugacagucuggugagga

SEQ ID NO: 1790702 - RNA, 19 nt, Artificial Sequence
  Description of Artificial Sequence: Synthetic oligonucleotide
cugcugcaaaauagguuaa

SEQ ID NO: 1790703 - RNA, 19 nt, Artificial Sequence
  Description of Artificial Sequence: Synthetic oligonucleotide
caguauguugcuucaucau

SEQ ID NO: 1790704 - RNA, 19 nt, Artificial Sequence
  Description of Artificial Sequence: Synthetic oligonucleotide
gucccuucugguggggcug

SEQ ID NO: 1790705 - RNA, 19 nt, Artificial Sequence
  Description of Artificial Sequence: Synthetic oligonucleotide
aguuucggcaguggugcuu

SEQ ID NO: 1790706 - RNA, 19 nt, Artificial Sequence
  Description of Artificial Sequence: Synthetic oligonucleotide
ggauauaaccgaggacaca

SEQ ID NO: 1790707 - RNA, 19 nt, Artificial Sequence
  Description of Artificial Sequence: Synthetic oligonucleotide
acacugcuuacaguauguu

SEQ ID NO: 1790708 - RNA, 19 nt, Artificial Sequence
  Description of Artificial Sequence: Synthetic oligonucleotide
cagucuggugaggauuuca

SEQ ID NO: 1790709 - RNA, 19 nt, Artificial Sequence
  Description of Artificial Sequence: Synthetic oligonucleotide
ugcuggcggagggcgacca

SEQ ID NO: 1790710 - RNA, 19 nt, Artificial Sequence
  Description of Artificial Sequence: Synthetic oligonucleotide
cagcguguccugcuucuca

SEQ ID NO: 1790711 - RNA, 19 nt, Artificial Sequence
  Description of Artificial Sequence: Synthetic oligonucleotide
cugaggugcagucccauuu

SEQ ID NO: 1790712 - RNA, 19 nt, Artificial Sequence
  Description of Artificial Sequence: Synthetic oligonucleotide
cugacccuuccgcugaacu

SEQ ID NO: 1790713 - RNA, 19 nt, Artificial Sequence
  Description of Artificial Sequence: Synthetic oligonucleotide
uuguuucaugcuggacaua

SEQ ID NO: 1790714 - RNA, 19 nt, Artificial Sequence
  Description of Artificial Sequence: Synthetic oligonucleotide
cuucagaggcugacagucu

SEQ ID NO: 1790715 - RNA, 19 nt, Artificial Sequence
  Description of Artificial Sequence: Synthetic oligonucleotide
gggucauugcaggucucug

SEQ ID NO: 1790716 - RNA, 19 nt, Artificial Sequence
  Description of Artificial Sequence: Synthetic oligonucleotide
uuucggcaguggugcuuuc

SEQ ID NO: 1790717 - RNA, 19 nt, Artificial Sequence
  Description of Artificial Sequence: Synthetic oligonucleotide
cucacacugcuuacaguau

SEQ ID NO: 1790718 - RNA, 19 nt, Artificial Sequence
  Description of Artificial Sequence: Synthetic oligonucleotide
ggcuaaugucccuucuggu

SEQ ID NO: 1790719 - RNA, 19 nt, Artificial Sequence
  Description of Artificial Sequence: Synthetic oligonucleotide
cugggacagcuguagcugu

SEQ ID NO: 1790720 - RNA, 19 nt, Artificial Sequence
  Description of Artificial Sequence: Synthetic oligonucleotide
cuucagcgccuuauuuacu

SEQ ID NO: 1790721 - RNA, 19 nt, Artificial Sequence
  Description of Artificial Sequence: Synthetic oligonucleotide
caggagguaucucucucau

SEQ ID NO: 1790722 - RNA, 19 nt, Artificial Sequence
  Description of Artificial Sequence: Synthetic oligonucleotide
ccagcucauugcuggagca

SEQ ID NO: 1790723 - RNA, 19 nt, Artificial Sequence
  Description of Artificial Sequence: Synthetic oligonucleotide
gagcagcgcugcaggagca

SEQ ID NO: 1790724 - RNA, 19 nt, Artificial Sequence
  Description of Artificial Sequence: Synthetic oligonucleotide
ggagcagguauugcagaaa

SEQ ID NO: 1790725 - RNA, 19 nt, Artificial Sequence
  Description of Artificial Sequence: Synthetic oligonucleotide
guucccguagcuccuucuu

SEQ ID NO: 1790726 - RNA, 19 nt, Artificial Sequence
  Description of Artificial Sequence: Synthetic oligonucleotide
ggguguccuucucuaguaa

SEQ ID NO: 1790727 - RNA, 19 nt, Artificial Sequence
  Description of Artificial Sequence: Synthetic oligonucleotide
ccuuauuuacuuccuuuau

SEQ ID NO: 1790728 - RNA, 19 nt, Artificial Sequence
  Description of Artificial Sequence: Synthetic oligonucleotide
gcguguccugcuucucaug

SEQ ID NO: 1790729 - RNA, 19 nt, Artificial Sequence
  Description of Artificial Sequence: Synthetic oligonucleotide
ccuguugcagcuuguggcu

SEQ ID NO: 1790730 - RNA, 19 nt, Artificial Sequence
  Description of Artificial Sequence: Synthetic oligonucleotide
acccuuccgcugaacuccu

SEQ ID NO: 1790731 - RNA, 19 nt, Artificial Sequence
  Description of Artificial Sequence: Synthetic oligonucleotide
ggacauaauuugauugguu

SEQ ID NO: 1790732 - RNA, 19 nt, Artificial Sequence
  Description of Artificial Sequence: Synthetic oligonucleotide
cuuccgcugaacuccuguu

SEQ ID NO: 1790733 - RNA, 19 nt, Artificial Sequence
  Description of Artificial Sequence: Synthetic oligonucleotide
gccuguugcaaccuuucuu

SEQ ID NO: 1790734 - RNA, 19 nt, Artificial Sequence
  Description of Artificial Sequence: Synthetic oligonucleotide
gcugcuggcggagggcgac

SEQ ID NO: 1790735 - RNA, 19 nt, Artificial Sequence
  Description of Artificial Sequence: Synthetic oligonucleotide
ccgaggcuuuccaccacuc

SEQ ID NO: 1790736 - RNA, 19 nt, Artificial Sequence
  Description of Artificial Sequence: Synthetic oligonucleotide
ggcgaccagcguguccugc

SEQ ID NO: 1790737 - RNA, 19 nt, Artificial Sequence
  Description of Artificial Sequence: Synthetic oligonucleotide
gugugacagcugucacaaa

SEQ ID NO: 1790738 - RNA, 19 nt, Artificial Sequence
  Description of Artificial Sequence: Synthetic oligonucleotide
gcucugucugaagcagaca

SEQ ID NO: 1790739 - RNA, 19 nt, Artificial Sequence
  Description of Artificial Sequence: Synthetic oligonucleotide
gggcacugacccuuccgcu

SEQ ID NO: 1790740 - RNA, 19 nt, Artificial Sequence
  Description of Artificial Sequence: Synthetic oligonucleotide
gucacgcagcugggacagc

SEQ ID NO: 1790741 - RNA, 19 nt, Artificial Sequence
  Description of Artificial Sequence: Synthetic oligonucleotide
gagggcagggccagcucau

SEQ ID NO: 1790742 - RNA, 19 nt, Artificial Sequence
  Description of Artificial Sequence: Synthetic oligonucleotide
ggcgcugucuucagaggcu

SEQ ID NO: 1790743 - RNA, 19 nt, Artificial Sequence
  Description of Artificial Sequence: Synthetic oligonucleotide
ccgcugaacuccuguugca

SEQ ID NO: 1790744 - RNA, 19 nt, Artificial Sequence
  Description of Artificial Sequence: Synthetic oligonucleotide
cugucacuuggcgcugucu

SEQ ID NO: 1790745 - RNA, 19 nt, Artificial Sequence
  Description of Artificial Sequence: Synthetic oligonucleotide
cacugacccuuccgcugaa

SEQ ID NO: 1790746 - RNA, 19 nt, Artificial Sequence
  Description of Artificial Sequence: Synthetic oligonucleotide
ccacaguuucggcaguggu

SEQ ID NO: 1790747 - RNA, 19 nt, Artificial Sequence
  Description of Artificial Sequence: Synthetic oligonucleotide
ccuucucuaguaacuucau

SEQ ID NO: 1790748 - RNA, 19 nt, Artificial Sequence
  Description of Artificial Sequence: Synthetic oligonucleotide
gcuguagcuguagggcacu

SEQ ID NO: 1790749 - RNA, 19 nt, Artificial Sequence
  Description of Artificial Sequence: Synthetic oligonucleotide
cccagaguuuggcacugua

SEQ ID NO: 1790750 - RNA, 19 nt, Artificial Sequence
  Description of Artificial Sequence: Synthetic oligonucleotide
gggcgaccagcguguccug

SEQ ID NO: 1790751 - RNA, 19 nt, Artificial Sequence
  Description of Artificial Sequence: Synthetic oligonucleotide
caccacucuugaggaugga

SEQ ID NO: 1790752 - RNA, 19 nt, Artificial Sequence
  Description of Artificial Sequence: Synthetic oligonucleotide
ggcacuguaccgaggcuuu

SEQ ID NO: 1790753 - RNA, 19 nt, Artificial Sequence
  Description of Artificial Sequence: Synthetic oligonucleotide
gggauguggguaggauucu

SEQ ID NO: 1790754 - RNA, 19 nt, Artificial Sequence
  Description of Artificial Sequence: Synthetic oligonucleotide
gcacuguaccgaggcuuuc

SEQ ID NO: 1790755 - RNA, 19 nt, Artificial Sequence
  Description of Artificial Sequence: Synthetic oligonucleotide
ggacuggcugaggugcagu

SEQ ID NO: 1790756 - RNA, 19 nt, Artificial Sequence
  Description of Artificial Sequence: Synthetic oligonucleotide
gcccuucagcgccuuauuu

SEQ ID NO: 1790757 - RNA, 19 nt, Artificial Sequence
  Description of Artificial Sequence: Synthetic oligonucleotide
cgccuuauuuacuuccuuu

SEQ ID NO: 1790758 - RNA, 19 nt, Artificial Sequence
  Description of Artificial Sequence: Synthetic oligonucleotide
cggacuagagcuggcucca

SEQ ID NO: 1790759 - RNA, 19 nt, Artificial Sequence
  Description of Artificial Sequence: Synthetic oligonucleotide
cgauuuccaucucagucuu

SEQ ID NO: 1790760 - RNA, 19 nt, Artificial Sequence
  Description of Artificial Sequence: Synthetic oligonucleotide
gcugaggugcagucccauu

SEQ ID NO: 1790761 - RNA, 19 nt, Artificial Sequence
  Description of Artificial Sequence: Synthetic oligonucleotide
ccagcguguccugcuucuc

SEQ ID NO: 1790762 - RNA, 19 nt, Artificial Sequence
  Description of Artificial Sequence: Synthetic oligonucleotide
gcgccuuauuuacuuccuu

SEQ ID NO: 1790763 - RNA, 19 nt, Artificial Sequence
  Description of Artificial Sequence: Synthetic oligonucleotide
cccuuccgcugaacuccug

SEQ ID NO: 1790764 - RNA, 19 nt, Artificial Sequence
  Description of Artificial Sequence: Synthetic oligonucleotide
ggagggcgaccagcguguc

SEQ ID NO: 1790765 - RNA, 19 nt, Artificial Sequence
  Description of Artificial Sequence: Synthetic oligonucleotide
ccuguaccaaagccaggau

SEQ ID NO: 1790766 - RNA, 19 nt, Artificial Sequence
  Description of Artificial Sequence: Synthetic oligonucleotide
ggcggagggcgaccagcgu

SEQ ID NO: 1790767 - RNA, 19 nt, Artificial Sequence
  Description of Artificial Sequence: Synthetic oligonucleotide
ggaguucccguagcuccuu

SEQ ID NO: 1790768 - RNA, 19 nt, Artificial Sequence
  Description of Artificial Sequence: Synthetic oligonucleotide
cccgagcauuggucacgca

SEQ ID NO: 1790769 - RNA, 19 nt, Artificial Sequence
  Description of Artificial Sequence: Synthetic oligonucleotide
ggacuagagcuggcuccau

SEQ ID NO: 1790770 - RNA, 19 nt, Artificial Sequence
  Description of Artificial Sequence: Synthetic oligonucleotide
gauaaauacauuuagacuc

SEQ ID NO: 1790771 - RNA, 19 nt, Artificial Sequence
  Description of Artificial Sequence: Synthetic oligonucleotide
uguaacaauacucugauca

SEQ ID NO: 1790772 - RNA, 19 nt, Artificial Sequence
  Description of Artificial Sequence: Synthetic oligonucleotide
aauucuugccaauaaagac

SEQ ID NO: 1790773 - RNA, 19 nt, Artificial Sequence
  Description of Artificial Sequence: Synthetic oligonucleotide
ugugguuugucuuugaugg

SEQ ID NO: 1790774 - RNA, 19 nt, Artificial Sequence
  Description of Artificial Sequence: Synthetic oligonucleotide
ucuacaacaguuaugauac

SEQ ID NO: 1790775 - RNA, 19 nt, Artificial Sequence
  Description of Artificial Sequence: Synthetic oligonucleotide
uguuuuauugauaagaauc

SEQ ID NO: 1790776 - RNA, 19 nt, Artificial Sequence
  Description of Artificial Sequence: Synthetic oligonucleotide
gaucuaauauauuugagag

SEQ ID NO: 1790777 - RNA, 19 nt, Artificial Sequence
  Description of Artificial Sequence: Synthetic oligonucleotide
agcuaauuuguuuagcucc

SEQ ID NO: 1790778 - RNA, 19 nt, Artificial Sequence
  Description of Artificial Sequence: Synthetic oligonucleotide
ugugacuggaaucuuaacg

SEQ ID NO: 1790779 - RNA, 19 nt, Artificial Sequence
  Description of Artificial Sequence: Synthetic oligonucleotide
uucucuauagcucuaaggc

SEQ ID NO: 1790780 - RNA, 19 nt, Artificial Sequence
  Description of Artificial Sequence: Synthetic oligonucleotide
aaauaucacuuccuaauuc

SEQ ID NO: 1790781 - RNA, 19 nt, Artificial Sequence
  Description of Artificial Sequence: Synthetic oligonucleotide
uauauuugagagaugaacu

SEQ ID NO: 1790782 - RNA, 19 nt, Artificial Sequence
  Description of Artificial Sequence: Synthetic oligonucleotide
uccuaauucagcaucaacc

SEQ ID NO: 1790783 - RNA, 19 nt, Artificial Sequence
  Description of Artificial Sequence: Synthetic oligonucleotide
uacauuuagacucucuucc

SEQ ID NO: 1790784 - RNA, 19 nt, Artificial Sequence
  Description of Artificial Sequence: Synthetic oligonucleotide
uuauugaucugauaguugc

SEQ ID NO: 1790785 - RNA, 19 nt, Artificial Sequence
  Description of Artificial Sequence: Synthetic oligonucleotide
gauaguugcagcuaauuug

SEQ ID NO: 1790786 - RNA, 19 nt, Artificial Sequence
  Description of Artificial Sequence: Synthetic oligonucleotide
ucuaauauauuugagagau

SEQ ID NO: 1790787 - RNA, 19 nt, Artificial Sequence
  Description of Artificial Sequence: Synthetic oligonucleotide
uccagugagaguaucauag

SEQ ID NO: 1790788 - RNA, 19 nt, Artificial Sequence
  Description of Artificial Sequence: Synthetic oligonucleotide
uaauauauuugagagauga

SEQ ID NO: 1790789 - RNA, 19 nt, Artificial Sequence
  Description of Artificial Sequence: Synthetic oligonucleotide
auauauuugagagaugaac

SEQ ID NO: 1790790 - RNA, 19 nt, Artificial Sequence
  Description of Artificial Sequence: Synthetic oligonucleotide
uugauaagaaucaugucug

SEQ ID NO: 1790791 - RNA, 19 nt, Artificial Sequence
  Description of Artificial Sequence: Synthetic oligonucleotide
uggauaaauacauuuagac

SEQ ID NO: 1790792 - RNA, 19 nt, Artificial Sequence
  Description of Artificial Sequence: Synthetic oligonucleotide
uaagaaaugguaucuagug

SEQ ID NO: 1790793 - RNA, 19 nt, Artificial Sequence
  Description of Artificial Sequence: Synthetic oligonucleotide
aaucaugucugccaaagca

SEQ ID NO: 1790794 - RNA, 19 nt, Artificial Sequence
  Description of Artificial Sequence: Synthetic oligonucleotide
agccguaugaccuccaugc

SEQ ID NO: 1790795 - RNA, 19 nt, Artificial Sequence
  Description of Artificial Sequence: Synthetic oligonucleotide
aaacauagaagccacugca

SEQ ID NO: 1790796 - RNA, 19 nt, Artificial Sequence
  Description of Artificial Sequence: Synthetic oligonucleotide
aaauuuccccuucuuuugc

SEQ ID NO: 1790797 - RNA, 19 nt, Artificial Sequence
  Description of Artificial Sequence: Synthetic oligonucleotide
uuuuguauguucuuuuccc

SEQ ID NO: 1790798 - RNA, 19 nt, Artificial Sequence
  Description of Artificial Sequence: Synthetic oligonucleotide
uucauagccgguaacauga

SEQ ID NO: 1790799 - RNA, 19 nt, Artificial Sequence
  Description of Artificial Sequence: Synthetic oligonucleotide
caguuaaauguuuuaaucc

SEQ ID NO: 1790800 - RNA, 19 nt, Artificial Sequence
  Description of Artificial Sequence: Synthetic oligonucleotide
uuuugaaucuacaacaguu

SEQ ID NO: 1790801 - RNA, 19 nt, Artificial Sequence
  Description of Artificial Sequence: Synthetic oligonucleotide
uucaggacaauccuccgcg

SEQ ID NO: 1790802 - RNA, 19 nt, Artificial Sequence
  Description of Artificial Sequence: Synthetic oligonucleotide
caagauaaauaucacuucc

SEQ ID NO: 1790803 - RNA, 19 nt, Artificial Sequence
  Description of Artificial Sequence: Synthetic oligonucleotide
agagaugaacucuugaucu

SEQ ID NO: 1790804 - RNA, 19 nt, Artificial Sequence
  Description of Artificial Sequence: Synthetic oligonucleotide
aaagcaacuugccucguag

SEQ ID NO: 1790805 - RNA, 19 nt, Artificial Sequence
  Description of Artificial Sequence: Synthetic oligonucleotide
acauagaagccacugcacc

SEQ ID NO: 1790806 - RNA, 19 nt, Artificial Sequence
  Description of Artificial Sequence: Synthetic oligonucleotide
aaugugacuguaacaauac

SEQ ID NO: 1790807 - RNA, 19 nt, Artificial Sequence
  Description of Artificial Sequence: Synthetic oligonucleotide
guaaacuuauuccagugag

SEQ ID NO: 1790808 - RNA, 19 nt, Artificial Sequence
  Description of Artificial Sequence: Synthetic oligonucleotide
gagaguaucauaggcaugg

SEQ ID NO: 1790809 - RNA, 19 nt, Artificial Sequence
  Description of Artificial Sequence: Synthetic oligonucleotide
uuucuguaaacuuauucca

SEQ ID NO: 1790810 - RNA, 19 nt, Artificial Sequence
  Description of Artificial Sequence: Synthetic oligonucleotide
agaucuaauauauuugaga

SEQ ID NO: 1790811 - RNA, 19 nt, Artificial Sequence
  Description of Artificial Sequence: Synthetic oligonucleotide
gaaucuacaacaguuauga

SEQ ID NO: 1790812 - RNA, 19 nt, Artificial Sequence
  Description of Artificial Sequence: Synthetic oligonucleotide
aguauguaaucaaauuucc

SEQ ID NO: 1790813 - RNA, 19 nt, Artificial Sequence
  Description of Artificial Sequence: Synthetic oligonucleotide
aauaaagaccagcugacuu

SEQ ID NO: 1790814 - RNA, 19 nt, Artificial Sequence
  Description of Artificial Sequence: Synthetic oligonucleotide
ugugacuguaacaauacuc

SEQ ID NO: 1790815 - RNA, 19 nt, Artificial Sequence
  Description of Artificial Sequence: Synthetic oligonucleotide
uccacaguauucauagccg

SEQ ID NO: 1790816 - RNA, 19 nt, Artificial Sequence
  Description of Artificial Sequence: Synthetic oligonucleotide
uguugguacaugcugaagu

SEQ ID NO: 1790817 - RNA, 19 nt, Artificial Sequence
  Description of Artificial Sequence: Synthetic oligonucleotide
uuaacgaugaagucaagau

SEQ ID NO: 1790818 - RNA, 19 nt, Artificial Sequence
  Description of Artificial Sequence: Synthetic oligonucleotide
uucuuuaagaauauccuua

SEQ ID NO: 1790819 - RNA, 19 nt, Artificial Sequence
  Description of Artificial Sequence: Synthetic oligonucleotide
augguaucuagugugaugg

SEQ ID NO: 1790820 - RNA, 19 nt, Artificial Sequence
  Description of Artificial Sequence: Synthetic oligonucleotide
gauaauugugacuggaauc

SEQ ID NO: 1790821 - RNA, 19 nt, Artificial Sequence
  Description of Artificial Sequence: Synthetic oligonucleotide
uuaucuaaauucuugccaa

SEQ ID NO: 1790822 - RNA, 19 nt, Artificial Sequence
  Description of Artificial Sequence: Synthetic oligonucleotide
auucucuauagcucuaagg

SEQ ID NO: 1790823 - RNA, 19 nt, Artificial Sequence
  Description of Artificial Sequence: Synthetic oligonucleotide
auaagaaucaugucugcca

SEQ ID NO: 1790824 - RNA, 19 nt, Artificial Sequence
  Description of Artificial Sequence: Synthetic oligonucleotide
uauuaugcuguucagucaa

SEQ ID NO: 1790825 - RNA, 19 nt, Artificial Sequence
  Description of Artificial Sequence: Synthetic oligonucleotide
uggagaucuaauauauuug

SEQ ID NO: 1790826 - RNA, 19 nt, Artificial Sequence
  Description of Artificial Sequence: Synthetic oligonucleotide
uucauugacaaggccaucg

SEQ ID NO: 1790827 - RNA, 19 nt, Artificial Sequence
  Description of Artificial Sequence: Synthetic oligonucleotide
ucuagugugauggacaaac

SEQ ID NO: 1790828 - RNA, 19 nt, Artificial Sequence
  Description of Artificial Sequence: Synthetic oligonucleotide
ucaacccaaaacauagaag

SEQ ID NO: 1790829 - RNA, 19 nt, Artificial Sequence
  Description of Artificial Sequence: Synthetic oligonucleotide
uaauucagcaucaacccaa

SEQ ID NO: 1790830 - RNA, 19 nt, Artificial Sequence
  Description of Artificial Sequence: Synthetic oligonucleotide
auaauugugacuggaaucu

SEQ ID NO: 1790831 - RNA, 19 nt, Artificial Sequence
  Description of Artificial Sequence: Synthetic oligonucleotide
uguaaacuuauuccaguga

SEQ ID NO: 1790832 - RNA, 19 nt, Artificial Sequence
  Description of Artificial Sequence: Synthetic oligonucleotide
auggaugccuugcagaauc

SEQ ID NO: 1790833 - RNA, 19 nt, Artificial Sequence
  Description of Artificial Sequence: Synthetic oligonucleotide
ccauuuauugaucugauag

SEQ ID NO: 1790834 - RNA, 19 nt, Artificial Sequence
  Description of Artificial Sequence: Synthetic oligonucleotide
aaucauuugcugugguuug

SEQ ID NO: 1790835 - RNA, 19 nt, Artificial Sequence
  Description of Artificial Sequence: Synthetic oligonucleotide
uccuuaucuaaauucuugc

SEQ ID NO: 1790836 - RNA, 19 nt, Artificial Sequence
  Description of Artificial Sequence: Synthetic oligonucleotide
aacccaaaacauagaagcc

SEQ ID NO: 1790837 - RNA, 19 nt, Artificial Sequence
  Description of Artificial Sequence: Synthetic oligonucleotide
accguuucuaaguuccagc

SEQ ID NO: 1790838 - RNA, 19 nt, Artificial Sequence
  Description of Artificial Sequence: Synthetic oligonucleotide
ugcagaaucauuugcugug

SEQ ID NO: 1790839 - RNA, 19 nt, Artificial Sequence
  Description of Artificial Sequence: Synthetic oligonucleotide
ugaaucuacaacaguuaug

SEQ ID NO: 1790840 - RNA, 19 nt, Artificial Sequence
  Description of Artificial Sequence: Synthetic oligonucleotide
ugacugauagauaaggauu

SEQ ID NO: 1790841 - RNA, 19 nt, Artificial Sequence
  Description of Artificial Sequence: Synthetic oligonucleotide
auguaaucaaauuuccccu

SEQ ID NO: 1790842 - RNA, 19 nt, Artificial Sequence
  Description of Artificial Sequence: Synthetic oligonucleotide
gguacuucaaaugugacug

SEQ ID NO: 1790843 - RNA, 19 nt, Artificial Sequence
  Description of Artificial Sequence: Synthetic oligonucleotide
ucucuauagcucuaaggcc

SEQ ID NO: 1790844 - RNA, 19 nt, Artificial Sequence
  Description of Artificial Sequence: Synthetic oligonucleotide
uagauaaggauuucucuac

SEQ ID NO: 1790845 - RNA, 19 nt, Artificial Sequence
  Description of Artificial Sequence: Synthetic oligonucleotide
ucuaagaguauguaaucaa

SEQ ID NO: 1790846 - RNA, 19 nt, Artificial Sequence
  Description of Artificial Sequence: Synthetic oligonucleotide
aaggauuucucuacugcac

SEQ ID NO: 1790847 - RNA, 19 nt, Artificial Sequence
  Description of Artificial Sequence: Synthetic oligonucleotide
uuugaaucuacaacaguua

SEQ ID NO: 1790848 - RNA, 19 nt, Artificial Sequence
  Description of Artificial Sequence: Synthetic oligonucleotide
gauaccaucaagauaaaua

SEQ ID NO: 1790849 - RNA, 19 nt, Artificial Sequence
  Description of Artificial Sequence: Synthetic oligonucleotide
gaguauguaaucaaauuuc

SEQ ID NO: 1790850 - RNA, 19 nt, Artificial Sequence
  Description of Artificial Sequence: Synthetic oligonucleotide
aguuaugauaccaucaaga

SEQ ID NO: 1790851 - RNA, 19 nt, Artificial Sequence
  Description of Artificial Sequence: Synthetic oligonucleotide
auggagaucuaauauauuu

SEQ ID NO: 1790852 - RNA, 19 nt, Artificial Sequence
  Description of Artificial Sequence: Synthetic oligonucleotide
ucaagauaaauaucacuuc

SEQ ID NO: 1790853 - RNA, 19 nt, Artificial Sequence
  Description of Artificial Sequence: Synthetic oligonucleotide
uugacugauagauaaggau

SEQ ID NO: 1790854 - RNA, 19 nt, Artificial Sequence
  Description of Artificial Sequence: Synthetic oligonucleotide
uguuucuaccacagcagag

SEQ ID NO: 1790855 - RNA, 19 nt, Artificial Sequence
  Description of Artificial Sequence: Synthetic oligonucleotide
aacauagaagccacugcac

SEQ ID NO: 1790856 - RNA, 19 nt, Artificial Sequence
  Description of Artificial Sequence: Synthetic oligonucleotide
aucuacaacaguuaugaua

SEQ ID NO: 1790857 - RNA, 19 nt, Artificial Sequence
  Description of Artificial Sequence: Synthetic oligonucleotide
uucaaaugugacuguaaca

SEQ ID NO: 1790858 - RNA, 19 nt, Artificial Sequence
  Description of Artificial Sequence: Synthetic oligonucleotide
cuuaucuaaauucuugcca

SEQ ID NO: 1790859 - RNA, 19 nt, Artificial Sequence
  Description of Artificial Sequence: Synthetic oligonucleotide
aucaagauaaauaucacuu

SEQ ID NO: 1790860 - RNA, 19 nt, Artificial Sequence
  Description of Artificial Sequence: Synthetic oligonucleotide
aacaguuaugauaccauca

SEQ ID NO: 1790861 - RNA, 19 nt, Artificial Sequence
  Description of Artificial Sequence: Synthetic oligonucleotide
aagaauauccuuaucuaaa

SEQ ID NO: 1790862 - RNA, 19 nt, Artificial Sequence
  Description of Artificial Sequence: Synthetic oligonucleotide
aucauaggcauggagaucu

SEQ ID NO: 1790863 - RNA, 19 nt, Artificial Sequence
  Description of Artificial Sequence: Synthetic oligonucleotide
uaaacuuauuccagugaga

SEQ ID NO: 1790864 - RNA, 19 nt, Artificial Sequence
  Description of Artificial Sequence: Synthetic oligonucleotide
cuucaaaugugacuguaac

SEQ ID NO: 1790865 - RNA, 19 nt, Artificial Sequence
  Description of Artificial Sequence: Synthetic oligonucleotide
uccaccuugacugauagau

SEQ ID NO: 1790866 - RNA, 19 nt, Artificial Sequence
  Description of Artificial Sequence: Synthetic oligonucleotide
gacuugaucucucagcauc

SEQ ID NO: 1790867 - RNA, 19 nt, Artificial Sequence
  Description of Artificial Sequence: Synthetic oligonucleotide
ugagagaugaacucuugau

SEQ ID NO: 1790868 - RNA, 19 nt, Artificial Sequence
  Description of Artificial Sequence: Synthetic oligonucleotide
gugacuggaaucuuaacga

SEQ ID NO: 1790869 - RNA, 19 nt, Artificial Sequence
  Description of Artificial Sequence: Synthetic oligonucleotide
uauuugagagaugaacucu

SEQ ID NO: 1790870 - RNA, 19 nt, Artificial Sequence
  Description of Artificial Sequence: Synthetic oligonucleotide
auugaucugauaguugcag

SEQ ID NO: 1790871 - RNA, 19 nt, Artificial Sequence
  Description of Artificial Sequence: Synthetic oligonucleotide
gagagaugaacucuugauc

SEQ ID NO: 1790872 - RNA, 19 nt, Artificial Sequence
  Description of Artificial Sequence: Synthetic oligonucleotide
aggacaauccuccgcguac

SEQ ID NO: 1790873 - RNA, 19 nt, Artificial Sequence
  Description of Artificial Sequence: Synthetic oligonucleotide
uaacaauacucugaucaag

SEQ ID NO: 1790874 - RNA, 19 nt, Artificial Sequence
  Description of Artificial Sequence: Synthetic oligonucleotide
agaaucaugucugccaaag

SEQ ID NO: 1790875 - RNA, 19 nt, Artificial Sequence
  Description of Artificial Sequence: Synthetic oligonucleotide
aguucuuuaagaauauccu

SEQ ID NO: 1790876 - RNA, 19 nt, Artificial Sequence
  Description of Artificial Sequence: Synthetic oligonucleotide
aagauaaauaucacuuccu

SEQ ID NO: 1790877 - RNA, 19 nt, Artificial Sequence
  Description of Artificial Sequence: Synthetic oligonucleotide
uacaacaguuaugauacca

SEQ ID NO: 1790878 - RNA, 19 nt, Artificial Sequence
  Description of Artificial Sequence: Synthetic oligonucleotide
uauuccagugagaguauca

SEQ ID NO: 1790879 - RNA, 19 nt, Artificial Sequence
  Description of Artificial Sequence: Synthetic oligonucleotide
agugugauggacaaacuug

SEQ ID NO: 1790880 - RNA, 19 nt, Artificial Sequence
  Description of Artificial Sequence: Synthetic oligonucleotide
cucuauagcucuaaggcca

SEQ ID NO: 1790881 - RNA, 19 nt, Artificial Sequence
  Description of Artificial Sequence: Synthetic oligonucleotide
aauacccggugauaauugu

SEQ ID NO: 1790882 - RNA, 19 nt, Artificial Sequence
  Description of Artificial Sequence: Synthetic oligonucleotide
uacccggugauaauuguga

SEQ ID NO: 1790883 - RNA, 19 nt, Artificial Sequence
  Description of Artificial Sequence: Synthetic oligonucleotide
aucagauucucuauagcuc

SEQ ID NO: 1790884 - RNA, 19 nt, Artificial Sequence
  Description of Artificial Sequence: Synthetic oligonucleotide
uguuuagcuccucuucuga

SEQ ID NO: 1790885 - RNA, 19 nt, Artificial Sequence
  Description of Artificial Sequence: Synthetic oligonucleotide
ucugaaaccaagucuguuu

SEQ ID NO: 1790886 - RNA, 19 nt, Artificial Sequence
  Description of Artificial Sequence: Synthetic oligonucleotide
caaaacauagaagccacug

SEQ ID NO: 1790887 - RNA, 19 nt, Artificial Sequence
  Description of Artificial Sequence: Synthetic oligonucleotide
aucuaauauauuugagaga

SEQ ID NO: 1790888 - RNA, 19 nt, Artificial Sequence
  Description of Artificial Sequence: Synthetic oligonucleotide
acaguuaugauaccaucaa

SEQ ID NO: 1790889 - RNA, 19 nt, Artificial Sequence
  Description of Artificial Sequence: Synthetic oligonucleotide
gugugauggacaaacuugg

SEQ ID NO: 1790890 - RNA, 19 nt, Artificial Sequence
  Description of Artificial Sequence: Synthetic oligonucleotide
gaaucuuaacgaugaaguc

SEQ ID NO: 1790891 - RNA, 19 nt, Artificial Sequence
  Description of Artificial Sequence: Synthetic oligonucleotide
ccuaauucagcaucaaccc

SEQ ID NO: 1790892 - RNA, 19 nt, Artificial Sequence
  Description of Artificial Sequence: Synthetic oligonucleotide
ugccaaagcaacuugccuc

SEQ ID NO: 1790893 - RNA, 19 nt, Artificial Sequence
  Description of Artificial Sequence: Synthetic oligonucleotide
ucacagaacagcagaggca

SEQ ID NO: 1790894 - RNA, 19 nt, Artificial Sequence
  Description of Artificial Sequence: Synthetic oligonucleotide
uuacuaggcucucuuccag

SEQ ID NO: 1790895 - RNA, 19 nt, Artificial Sequence
  Description of Artificial Sequence: Synthetic oligonucleotide
cagugagaguaucauaggc

SEQ ID NO: 1790896 - RNA, 19 nt, Artificial Sequence
  Description of Artificial Sequence: Synthetic oligonucleotide
agauaaauaucacuuccua

SEQ ID NO: 1790897 - RNA, 19 nt, Artificial Sequence
  Description of Artificial Sequence: Synthetic oligonucleotide
uauugaucugauaguugca

SEQ ID NO: 1790898 - RNA, 19 nt, Artificial Sequence
  Description of Artificial Sequence: Synthetic oligonucleotide
uuugcaucagauucucuau

SEQ ID NO: 1790899 - RNA, 19 nt, Artificial Sequence
  Description of Artificial Sequence: Synthetic oligonucleotide
auaguugcagcuaauuugu

SEQ ID NO: 1790900 - RNA, 19 nt, Artificial Sequence
  Description of Artificial Sequence: Synthetic oligonucleotide
auccuuccagcuuacuagg

SEQ ID NO: 1790901 - RNA, 19 nt, Artificial Sequence
  Description of Artificial Sequence: Synthetic oligonucleotide
aauauaguucagaaguguu

SEQ ID NO: 1790902 - RNA, 19 nt, Artificial Sequence
  Description of Artificial Sequence: Synthetic oligonucleotide
gagaucuaauauauuugag

SEQ ID NO: 1790903 - RNA, 19 nt, Artificial Sequence
  Description of Artificial Sequence: Synthetic oligonucleotide
uauagcucuaaggccauug

SEQ ID NO: 1790904 - RNA, 19 nt, Artificial Sequence
  Description of Artificial Sequence: Synthetic oligonucleotide
acuggaaucuuaacgauga

SEQ ID NO: 1790905 - RNA, 19 nt, Artificial Sequence
  Description of Artificial Sequence: Synthetic oligonucleotide
aaauacccggugauaauug

SEQ ID NO: 1790906 - RNA, 19 nt, Artificial Sequence
  Description of Artificial Sequence: Synthetic oligonucleotide
uauugauaagaaucauguc

SEQ ID NO: 1790907 - RNA, 19 nt, Artificial Sequence
  Description of Artificial Sequence: Synthetic oligonucleotide
gauucucuauagcucuaag

SEQ ID NO: 1790908 - RNA, 19 nt, Artificial Sequence
  Description of Artificial Sequence: Synthetic oligonucleotide
ugcuguugguacaugcuga

SEQ ID NO: 1790909 - RNA, 19 nt, Artificial Sequence
  Description of Artificial Sequence: Synthetic oligonucleotide
ucucuaagaguauguaauc

SEQ ID NO: 1790910 - RNA, 19 nt, Artificial Sequence
  Description of Artificial Sequence: Synthetic oligonucleotide
uaucuagugugauggacaa

SEQ ID NO: 1790911 - RNA, 19 nt, Artificial Sequence
  Description of Artificial Sequence: Synthetic oligonucleotide
ugacuguaacaauacucug

SEQ ID NO: 1790912 - RNA, 19 nt, Artificial Sequence
  Description of Artificial Sequence: Synthetic oligonucleotide
auauaguucagaaguguug

SEQ ID NO: 1790913 - RNA, 19 nt, Artificial Sequence
  Description of Artificial Sequence: Synthetic oligonucleotide
uugaucuuugaguuucuaa

SEQ ID NO: 1790914 - RNA, 19 nt, Artificial Sequence
  Description of Artificial Sequence: Synthetic oligonucleotide
aguccaguggucucuaaga

SEQ ID NO: 1790915 - RNA, 19 nt, Artificial Sequence
  Description of Artificial Sequence: Synthetic oligonucleotide
uugucuuuccagcaccuaa

SEQ ID NO: 1790916 - RNA, 19 nt, Artificial Sequence
  Description of Artificial Sequence: Synthetic oligonucleotide
aacuuauuccagugagagu

SEQ ID NO: 1790917 - RNA, 19 nt, Artificial Sequence
  Description of Artificial Sequence: Synthetic oligonucleotide
auaguucagaaguguuguc

SEQ ID NO: 1790918 - RNA, 19 nt, Artificial Sequence
  Description of Artificial Sequence: Synthetic oligonucleotide
guaacaugaccaccggcag

SEQ ID NO: 1790919 - RNA, 19 nt, Artificial Sequence
  Description of Artificial Sequence: Synthetic oligonucleotide
uaguucagaaguguugucu

SEQ ID NO: 1790920 - RNA, 19 nt, Artificial Sequence
  Description of Artificial Sequence: Synthetic oligonucleotide
uaguccaguggucucuaag

SEQ ID NO: 1790921 - RNA, 19 nt, Artificial Sequence
  Description of Artificial Sequence: Synthetic oligonucleotide
ggagaucuaauauauuuga

SEQ ID NO: 1790922 - RNA, 19 nt, Artificial Sequence
  Description of Artificial Sequence: Synthetic oligonucleotide
auagccgguaacaugacca

SEQ ID NO: 1790923 - RNA, 19 nt, Artificial Sequence
  Description of Artificial Sequence: Synthetic oligonucleotide
uugccucguagcuucauug

SEQ ID NO: 1790924 - RNA, 19 nt, Artificial Sequence
  Description of Artificial Sequence: Synthetic oligonucleotide
acaauacucugaucaaggu

SEQ ID NO: 1790925 - RNA, 19 nt, Artificial Sequence
  Description of Artificial Sequence: Synthetic oligonucleotide
cuuuugguaagaaauggua

SEQ ID NO: 1790926 - RNA, 19 nt, Artificial Sequence
  Description of Artificial Sequence: Synthetic oligonucleotide
ugccaauaaagaccagcug

SEQ ID NO: 1790927 - RNA, 19 nt, Artificial Sequence
  Description of Artificial Sequence: Synthetic oligonucleotide
guauguaaucaaauuuccc

SEQ ID NO: 1790928 - RNA, 19 nt, Artificial Sequence
  Description of Artificial Sequence: Synthetic oligonucleotide
uccugguacuucaaaugug

SEQ ID NO: 1790929 - RNA, 19 nt, Artificial Sequence
  Description of Artificial Sequence: Synthetic oligonucleotide
auugacaaggccaucgggu

SEQ ID NO: 1790930 - RNA, 19 nt, Artificial Sequence
  Description of Artificial Sequence: Synthetic oligonucleotide
ugguacaugcugaaguuuu

SEQ ID NO: 1790931 - RNA, 19 nt, Artificial Sequence
  Description of Artificial Sequence: Synthetic oligonucleotide
gccaauaaagaccagcuga

SEQ ID NO: 1790932 - RNA, 19 nt, Artificial Sequence
  Description of Artificial Sequence: Synthetic oligonucleotide
ugagaguaucauaggcaug

SEQ ID NO: 1790933 - RNA, 19 nt, Artificial Sequence
  Description of Artificial Sequence: Synthetic oligonucleotide
cauugacaaggccaucggg

SEQ ID NO: 1790934 - RNA, 19 nt, Artificial Sequence
  Description of Artificial Sequence: Synthetic oligonucleotide
aggauuucucuacugcacu

SEQ ID NO: 1790935 - RNA, 19 nt, Artificial Sequence
  Description of Artificial Sequence: Synthetic oligonucleotide
agcaccuaaauacccggug

SEQ ID NO: 1790936 - RNA, 19 nt, Artificial Sequence
  Description of Artificial Sequence: Synthetic oligonucleotide
agcaacuugccucguagcu

SEQ ID NO: 1790937 - RNA, 19 nt, Artificial Sequence
  Description of Artificial Sequence: Synthetic oligonucleotide
uaugcuguucagucaaaau

SEQ ID NO: 1790938 - RNA, 19 nt, Artificial Sequence
  Description of Artificial Sequence: Synthetic oligonucleotide
aaccguuucuaaguuccag

SEQ ID NO: 1790939 - RNA, 19 nt, Artificial Sequence
  Description of Artificial Sequence: Synthetic oligonucleotide
cguagcuucauugacaagg

SEQ ID NO: 1790940 - RNA, 19 nt, Artificial Sequence
  Description of Artificial Sequence: Synthetic oligonucleotide
uaaauacccggugauaauu

SEQ ID NO: 1790941 - RNA, 19 nt, Artificial Sequence
  Description of Artificial Sequence: Synthetic oligonucleotide
auagaagccacugcaccag

SEQ ID NO: 1790942 - RNA, 19 nt, Artificial Sequence
  Description of Artificial Sequence: Synthetic oligonucleotide
acauuuagacucucuuccu

SEQ ID NO: 1790943 - RNA, 19 nt, Artificial Sequence
  Description of Artificial Sequence: Synthetic oligonucleotide
aucuuaacgaugaagucaa

SEQ ID NO: 1790944 - RNA, 19 nt, Artificial Sequence
  Description of Artificial Sequence: Synthetic oligonucleotide
aauauauuugagagaugaa

SEQ ID NO: 1790945 - RNA, 19 nt, Artificial Sequence
  Description of Artificial Sequence: Synthetic oligonucleotide
cugacuugaucucucagca

SEQ ID NO: 1790946 - RNA, 19 nt, Artificial Sequence
  Description of Artificial Sequence: Synthetic oligonucleotide
uaccaucaagauaaauauc

SEQ ID NO: 1790947 - RNA, 19 nt, Artificial Sequence
  Description of Artificial Sequence: Synthetic oligonucleotide
gagaggaagaguucuuuaa

SEQ ID NO: 1790948 - RNA, 19 nt, Artificial Sequence
  Description of Artificial Sequence: Synthetic oligonucleotide
cugugguuugucuuugaug

SEQ ID NO: 1790949 - RNA, 19 nt, Artificial Sequence
  Description of Artificial Sequence: Synthetic oligonucleotide
auccuuaucuaaauucuug

SEQ ID NO: 1790950 - RNA, 19 nt, Artificial Sequence
  Description of Artificial Sequence: Synthetic oligonucleotide
caacaguuaugauaccauc

SEQ ID NO: 1790951 - RNA, 19 nt, Artificial Sequence
  Description of Artificial Sequence: Synthetic oligonucleotide
agaguucuccaccuugacu

SEQ ID NO: 1790952 - RNA, 19 nt, Artificial Sequence
  Description of Artificial Sequence: Synthetic oligonucleotide
caacuugccucguagcuuc

SEQ ID NO: 1790953 - RNA, 19 nt, Artificial Sequence
  Description of Artificial Sequence: Synthetic oligonucleotide
guaaucaaauuuccccuuc

SEQ ID NO: 1790954 - RNA, 19 nt, Artificial Sequence
  Description of Artificial Sequence: Synthetic oligonucleotide
caguuaugauaccaucaag

SEQ ID NO: 1790955 - RNA, 19 nt, Artificial Sequence
  Description of Artificial Sequence: Synthetic oligonucleotide
cuugacugauagauaagga

SEQ ID NO: 1790956 - RNA, 19 nt, Artificial Sequence
  Description of Artificial Sequence: Synthetic oligonucleotide
uucucuacugcacucccuu

SEQ ID NO: 1790957 - RNA, 19 nt, Artificial Sequence
  Description of Artificial Sequence: Synthetic oligonucleotide
ugugauggacaaacuuggu

SEQ ID NO: 1790958 - RNA, 19 nt, Artificial Sequence
  Description of Artificial Sequence: Synthetic oligonucleotide
uccaguggucucuaagagu

SEQ ID NO: 1790959 - RNA, 19 nt, Artificial Sequence
  Description of Artificial Sequence: Synthetic oligonucleotide
gacuggaaucuuaacgaug

SEQ ID NO: 1790960 - RNA, 19 nt, Artificial Sequence
  Description of Artificial Sequence: Synthetic oligonucleotide
guccaguggucucuaagag

SEQ ID NO: 1790961 - RNA, 19 nt, Artificial Sequence
  Description of Artificial Sequence: Synthetic oligonucleotide
caucagauucucuauagcu

SEQ ID NO: 1790962 - RNA, 19 nt, Artificial Sequence
  Description of Artificial Sequence: Synthetic oligonucleotide
gcuuacuaggcucucuucc

SEQ ID NO: 1790963 - RNA, 19 nt, Artificial Sequence
  Description of Artificial Sequence: Synthetic oligonucleotide
cagucaaaauauaguucag

SEQ ID NO: 1790964 - RNA, 19 nt, Artificial Sequence
  Description of Artificial Sequence: Synthetic oligonucleotide
agcuuacuaggcucucuuc

SEQ ID NO: 1790965 - RNA, 19 nt, Artificial Sequence
  Description of Artificial Sequence: Synthetic oligonucleotide
gaaaugguaucuaguguga

SEQ ID NO: 1790966 - RNA, 19 nt, Artificial Sequence
  Description of Artificial Sequence: Synthetic oligonucleotide
ccuuaucuaaauucuugcc

SEQ ID NO: 1790967 - RNA, 19 nt, Artificial Sequence
  Description of Artificial Sequence: Synthetic oligonucleotide
guaacaauacucugaucaa

SEQ ID NO: 1790968 - RNA, 19 nt, Artificial Sequence
  Description of Artificial Sequence: Synthetic oligonucleotide
acccggugauaauugugac

SEQ ID NO: 1790969 - RNA, 19 nt, Artificial Sequence
  Description of Artificial Sequence: Synthetic oligonucleotide
guuucuaccacagcagaga

SEQ ID NO: 1790970 - RNA, 19 nt, Artificial Sequence
  Description of Artificial Sequence: Synthetic oligonucleotide
guaucuagugugauggaca

SEQ ID NO: 1790971 - RNA, 19 nt, Artificial Sequence
  Description of Artificial Sequence: Synthetic oligonucleotide
ggauaaauacauuuagacu

SEQ ID NO: 1790972 - RNA, 19 nt, Artificial Sequence
  Description of Artificial Sequence: Synthetic oligonucleotide
uaacaugaccaccggcagu

SEQ ID NO: 1790973 - RNA, 19 nt, Artificial Sequence
  Description of Artificial Sequence: Synthetic oligonucleotide
uccgcguacuccucuuccg

SEQ ID NO: 1790974 - RNA, 19 nt, Artificial Sequence
  Description of Artificial Sequence: Synthetic oligonucleotide
caccuugacugauagauaa

SEQ ID NO: 1790975 - RNA, 19 nt, Artificial Sequence
  Description of Artificial Sequence: Synthetic oligonucleotide
cuuuaagaauauccuuauc

SEQ ID NO: 1790976 - RNA, 19 nt, Artificial Sequence
  Description of Artificial Sequence: Synthetic oligonucleotide
guuugucuuugauggacac

SEQ ID NO: 1790977 - RNA, 19 nt, Artificial Sequence
  Description of Artificial Sequence: Synthetic oligonucleotide
auagcucuaaggccauugu

SEQ ID NO: 1790978 - RNA, 19 nt, Artificial Sequence
  Description of Artificial Sequence: Synthetic oligonucleotide
cagcuaauuuguuuagcuc

SEQ ID NO: 1790979 - RNA, 19 nt, Artificial Sequence
  Description of Artificial Sequence: Synthetic oligonucleotide
guucaggacaauccuccgc

SEQ ID NO: 1790980 - RNA, 19 nt, Artificial Sequence
  Description of Artificial Sequence: Synthetic oligonucleotide
ucugaucaagguggggugc

SEQ ID NO: 1790981 - RNA, 19 nt, Artificial Sequence
  Description of Artificial Sequence: Synthetic oligonucleotide
cuuaacgaugaagucaaga

SEQ ID NO: 1790982 - RNA, 19 nt, Artificial Sequence
  Description of Artificial Sequence: Synthetic oligonucleotide
aaucuacaacaguuaugau

SEQ ID NO: 1790983 - RNA, 19 nt, Artificial Sequence
  Description of Artificial Sequence: Synthetic oligonucleotide
agucaagauuuuccuccuc

SEQ ID NO: 1790984 - RNA, 19 nt, Artificial Sequence
  Description of Artificial Sequence: Synthetic oligonucleotide
cuuacuaggcucucuucca

SEQ ID NO: 1790985 - RNA, 19 nt, Artificial Sequence
  Description of Artificial Sequence: Synthetic oligonucleotide
ucuacugcacucccuucuc

SEQ ID NO: 1790986 - RNA, 19 nt, Artificial Sequence
  Description of Artificial Sequence: Synthetic oligonucleotide
cucugaucaagguggggug

SEQ ID NO: 1790987 - RNA, 19 nt, Artificial Sequence
  Description of Artificial Sequence: Synthetic oligonucleotide
ccaauaaagaccagcugac

SEQ ID NO: 1790988 - RNA, 19 nt, Artificial Sequence
  Description of Artificial Sequence: Synthetic oligonucleotide
gcugacuugaucucucagc

SEQ ID NO: 1790989 - RNA, 19 nt, Artificial Sequence
  Description of Artificial Sequence: Synthetic oligonucleotide
uaucuaaauucuugccaau

SEQ ID NO: 1790990 - RNA, 19 nt, Artificial Sequence
  Description of Artificial Sequence: Synthetic oligonucleotide
gguaacaugaccaccggca

SEQ ID NO: 1790991 - RNA, 19 nt, Artificial Sequence
  Description of Artificial Sequence: Synthetic oligonucleotide
aauugugacuggaaucuua

SEQ ID NO: 1790992 - RNA, 19 nt, Artificial Sequence
  Description of Artificial Sequence: Synthetic oligonucleotide
gcaaccguuucuaaguucc

SEQ ID NO: 1790993 - RNA, 19 nt, Artificial Sequence
  Description of Artificial Sequence: Synthetic oligonucleotide
aaaugguaucuagugugau

SEQ ID NO: 1790994 - RNA, 19 nt, Artificial Sequence
  Description of Artificial Sequence: Synthetic oligonucleotide
cuauuaugcuguucaguca

SEQ ID NO: 1790995 - RNA, 19 nt, Artificial Sequence
  Description of Artificial Sequence: Synthetic oligonucleotide
ugcagcuaauuuguuuagc

SEQ ID NO: 1790996 - RNA, 19 nt, Artificial Sequence
  Description of Artificial Sequence: Synthetic oligonucleotide
cauagccgguaacaugacc

SEQ ID NO: 1790997 - RNA, 19 nt, Artificial Sequence
  Description of Artificial Sequence: Synthetic oligonucleotide
aauccauauuuugaaucua

SEQ ID NO: 1790998 - RNA, 19 nt, Artificial Sequence
  Description of Artificial Sequence: Synthetic oligonucleotide
agaaucauuugcugugguu

SEQ ID NO: 1790999 - RNA, 19 nt, Artificial Sequence
  Description of Artificial Sequence: Synthetic oligonucleotide
aggcccuucagccguauga

SEQ ID NO: 1791000 - RNA, 19 nt, Artificial Sequence
  Description of Artificial Sequence: Synthetic oligonucleotide
uuucucuacugcacucccu

SEQ ID NO: 1791001 - RNA, 19 nt, Artificial Sequence
  Description of Artificial Sequence: Synthetic oligonucleotide
ucuuaacgaugaagucaag

SEQ ID NO: 1791002 - RNA, 19 nt, Artificial Sequence
  Description of Artificial Sequence: Synthetic oligonucleotide
cuaauucagcaucaaccca

SEQ ID NO: 1791003 - RNA, 19 nt, Artificial Sequence
  Description of Artificial Sequence: Synthetic oligonucleotide
uagaguucuccaccuugac

SEQ ID NO: 1791004 - RNA, 19 nt, Artificial Sequence
  Description of Artificial Sequence: Synthetic oligonucleotide
caucaagauaaauaucacu

SEQ ID NO: 1791005 - RNA, 19 nt, Artificial Sequence
  Description of Artificial Sequence: Synthetic oligonucleotide
guaucauaggcauggagau

SEQ ID NO: 1791006 - RNA, 19 nt, Artificial Sequence
  Description of Artificial Sequence: Synthetic oligonucleotide
cucuaagaguauguaauca

SEQ ID NO: 1791007 - RNA, 19 nt, Artificial Sequence
  Description of Artificial Sequence: Synthetic oligonucleotide
cucauggaugccuugcaga

SEQ ID NO: 1791008 - RNA, 19 nt, Artificial Sequence
  Description of Artificial Sequence: Synthetic oligonucleotide
cucguagcuucauugacaa

SEQ ID NO: 1791009 - RNA, 19 nt, Artificial Sequence
  Description of Artificial Sequence: Synthetic oligonucleotide
uccuuccagcuuacuaggc

SEQ ID NO: 1791010 - RNA, 19 nt, Artificial Sequence
  Description of Artificial Sequence: Synthetic oligonucleotide
ugccucguagcuucauuga

SEQ ID NO: 1791011 - RNA, 19 nt, Artificial Sequence
  Description of Artificial Sequence: Synthetic oligonucleotide
augugacuguaacaauacu

SEQ ID NO: 1791012 - RNA, 19 nt, Artificial Sequence
  Description of Artificial Sequence: Synthetic oligonucleotide
ccggugauaauugugacug

SEQ ID NO: 1791013 - RNA, 19 nt, Artificial Sequence
  Description of Artificial Sequence: Synthetic oligonucleotide
acucccuucuccaaauuca

SEQ ID NO: 1791014 - RNA, 19 nt, Artificial Sequence
  Description of Artificial Sequence: Synthetic oligonucleotide
aacagcagaggcaaccguu

SEQ ID NO: 1791015 - RNA, 19 nt, Artificial Sequence
  Description of Artificial Sequence: Synthetic oligonucleotide
auugugacuggaaucuuaa

SEQ ID NO: 1791016 - RNA, 19 nt, Artificial Sequence
  Description of Artificial Sequence: Synthetic oligonucleotide
acuuccuaauucagcauca

SEQ ID NO: 1791017 - RNA, 19 nt, Artificial Sequence
  Description of Artificial Sequence: Synthetic oligonucleotide
agccgguaacaugaccacc

SEQ ID NO: 1791018 - RNA, 19 nt, Artificial Sequence
  Description of Artificial Sequence: Synthetic oligonucleotide
ccguuucuaaguuccagcc

SEQ ID NO: 1791019 - RNA, 19 nt, Artificial Sequence
  Description of Artificial Sequence: Synthetic oligonucleotide
gccgguaacaugaccaccg

SEQ ID NO: 1791020 - RNA, 19 nt, Artificial Sequence
  Description of Artificial Sequence: Synthetic oligonucleotide
aauucagcaucaacccaaa

SEQ ID NO: 1791021 - RNA, 19 nt, Artificial Sequence
  Description of Artificial Sequence: Synthetic oligonucleotide
ucaguucuuuugguaagaa

SEQ ID NO: 1791022 - RNA, 19 nt, Artificial Sequence
  Description of Artificial Sequence: Synthetic oligonucleotide
uugugacuggaaucuuaac

SEQ ID NO: 1791023 - RNA, 19 nt, Artificial Sequence
  Description of Artificial Sequence: Synthetic oligonucleotide
gucaagauuuuccuccucu

SEQ ID NO: 1791024 - RNA, 19 nt, Artificial Sequence
  Description of Artificial Sequence: Synthetic oligonucleotide
aucaugucugccaaagcaa

SEQ ID NO: 1791025 - RNA, 19 nt, Artificial Sequence
  Description of Artificial Sequence: Synthetic oligonucleotide
augccuugcagaaucauuu

SEQ ID NO: 1791026 - RNA, 19 nt, Artificial Sequence
  Description of Artificial Sequence: Synthetic oligonucleotide
ucauagccgguaacaugac

SEQ ID NO: 1791027 - RNA, 19 nt, Artificial Sequence
  Description of Artificial Sequence: Synthetic oligonucleotide
uagccgguaacaugaccac

SEQ ID NO: 1791028 - RNA, 19 nt, Artificial Sequence
  Description of Artificial Sequence: Synthetic oligonucleotide
uacucugaucaaggugggg

SEQ ID NO: 1791029 - RNA, 19 nt, Artificial Sequence
  Description of Artificial Sequence: Synthetic oligonucleotide
guaagaaaugguaucuagu

SEQ ID NO: 1791030 - RNA, 19 nt, Artificial Sequence
  Description of Artificial Sequence: Synthetic oligonucleotide
ugcacucccuucuccaaau

SEQ ID NO: 1791031 - RNA, 19 nt, Artificial Sequence
  Description of Artificial Sequence: Synthetic oligonucleotide
uucuaaguuccagccacuc

SEQ ID NO: 1791032 - RNA, 19 nt, Artificial Sequence
  Description of Artificial Sequence: Synthetic oligonucleotide
caguccauuuauugaucug

SEQ ID NO: 1791033 - RNA, 19 nt, Artificial Sequence
  Description of Artificial Sequence: Synthetic oligonucleotide
aucuaaauucuugccaaua

SEQ ID NO: 1791034 - RNA, 19 nt, Artificial Sequence
  Description of Artificial Sequence: Synthetic oligonucleotide
ugauaccaucaagauaaau

SEQ ID NO: 1791035 - RNA, 19 nt, Artificial Sequence
  Description of Artificial Sequence: Synthetic oligonucleotide
auacucugaucaagguggg

SEQ ID NO: 1791036 - RNA, 19 nt, Artificial Sequence
  Description of Artificial Sequence: Synthetic oligonucleotide
cacucccuucuccaaauuc

SEQ ID NO: 1791037 - RNA, 19 nt, Artificial Sequence
  Description of Artificial Sequence: Synthetic oligonucleotide
uggaugccuugcagaauca

SEQ ID NO: 1791038 - RNA, 19 nt, Artificial Sequence
  Description of Artificial Sequence: Synthetic oligonucleotide
ccagcaccuaaauacccgg

SEQ ID NO: 1791039 - RNA, 19 nt, Artificial Sequence
  Description of Artificial Sequence: Synthetic oligonucleotide
gaucugcuaguccaguggu

SEQ ID NO: 1791040 - RNA, 19 nt, Artificial Sequence
  Description of Artificial Sequence: Synthetic oligonucleotide
uuauuccagugagaguauc

SEQ ID NO: 1791041 - RNA, 19 nt, Artificial Sequence
  Description of Artificial Sequence: Synthetic oligonucleotide
auaggcauggagaucuaau

SEQ ID NO: 1791042 - RNA, 19 nt, Artificial Sequence
  Description of Artificial Sequence: Synthetic oligonucleotide
gguaucuagugugauggac

SEQ ID NO: 1791043 - RNA, 19 nt, Artificial Sequence
  Description of Artificial Sequence: Synthetic oligonucleotide
ugguaucuagugugaugga

SEQ ID NO: 1791044 - RNA, 19 nt, Artificial Sequence
  Description of Artificial Sequence: Synthetic oligonucleotide
cuguuucuaccacagcaga

SEQ ID NO: 1791045 - RNA, 19 nt, Artificial Sequence
  Description of Artificial Sequence: Synthetic oligonucleotide
uuugccaggugcuguccuc

SEQ ID NO: 1791046 - RNA, 19 nt, Artificial Sequence
  Description of Artificial Sequence: Synthetic oligonucleotide
guaugaccuccaugcagug

SEQ ID NO: 1791047 - RNA, 19 nt, Artificial Sequence
  Description of Artificial Sequence: Synthetic oligonucleotide
gacugauagauaaggauuu

SEQ ID NO: 1791048 - RNA, 19 nt, Artificial Sequence
  Description of Artificial Sequence: Synthetic oligonucleotide
cuaaguuccagccacucuu

SEQ ID NO: 1791049 - RNA, 19 nt, Artificial Sequence
  Description of Artificial Sequence: Synthetic oligonucleotide
cuccgcguacuccucuucc

SEQ ID NO: 1791050 - RNA, 19 nt, Artificial Sequence
  Description of Artificial Sequence: Synthetic oligonucleotide
ugaccuccaugcaguggcc

SEQ ID NO: 1791051 - RNA, 19 nt, Artificial Sequence
  Description of Artificial Sequence: Synthetic oligonucleotide
gguggggugcuguugguac

SEQ ID NO: 1791052 - RNA, 19 nt, Artificial Sequence
  Description of Artificial Sequence: Synthetic oligonucleotide
ugacuugaucucucagcau

SEQ ID NO: 1791053 - RNA, 19 nt, Artificial Sequence
  Description of Artificial Sequence: Synthetic oligonucleotide
auacccggugauaauugug

SEQ ID NO: 1791054 - RNA, 19 nt, Artificial Sequence
  Description of Artificial Sequence: Synthetic oligonucleotide
guuuagcuccucuucugaa

SEQ ID NO: 1791055 - RNA, 19 nt, Artificial Sequence
  Description of Artificial Sequence: Synthetic oligonucleotide
ccagugagaguaucauagg

SEQ ID NO: 1791056 - RNA, 19 nt, Artificial Sequence
  Description of Artificial Sequence: Synthetic oligonucleotide
acagcucauggaugccuug

SEQ ID NO: 1791057 - RNA, 19 nt, Artificial Sequence
  Description of Artificial Sequence: Synthetic oligonucleotide
ucaggacaauccuccgcgu

SEQ ID NO: 1791058 - RNA, 19 nt, Artificial Sequence
  Description of Artificial Sequence: Synthetic oligonucleotide
acuucaaaugugacuguaa

SEQ ID NO: 1791059 - RNA, 19 nt, Artificial Sequence
  Description of Artificial Sequence: Synthetic oligonucleotide
ccugguacuucaaauguga

SEQ ID NO: 1791060 - RNA, 19 nt, Artificial Sequence
  Description of Artificial Sequence: Synthetic oligonucleotide
ggucucuaagaguauguaa

SEQ ID NO: 1791061 - RNA, 19 nt, Artificial Sequence
  Description of Artificial Sequence: Synthetic oligonucleotide
augucugccaaagcaacuu

SEQ ID NO: 1791062 - RNA, 19 nt, Artificial Sequence
  Description of Artificial Sequence: Synthetic oligonucleotide
ggcauggagaucuaauaua

SEQ ID NO: 1791063 - RNA, 19 nt, Artificial Sequence
  Description of Artificial Sequence: Synthetic oligonucleotide
cuguaacaauacucugauc

SEQ ID NO: 1791064 - RNA, 19 nt, Artificial Sequence
  Description of Artificial Sequence: Synthetic oligonucleotide
ucguagcuucauugacaag

SEQ ID NO: 1791065 - RNA, 19 nt, Artificial Sequence
  Description of Artificial Sequence: Synthetic oligonucleotide
guuaaauguuuuaauccau

SEQ ID NO: 1791066 - RNA, 19 nt, Artificial Sequence
  Description of Artificial Sequence: Synthetic oligonucleotide
ggauuucucuacugcacuc

SEQ ID NO: 1791067 - RNA, 19 nt, Artificial Sequence
  Description of Artificial Sequence: Synthetic oligonucleotide
uugguacaugcugaaguuu

SEQ ID NO: 1791068 - RNA, 19 nt, Artificial Sequence
  Description of Artificial Sequence: Synthetic oligonucleotide
caauggggaccaguucagg

SEQ ID NO: 1791069 - RNA, 19 nt, Artificial Sequence
  Description of Artificial Sequence: Synthetic oligonucleotide
ucagccguaugaccuccau

SEQ ID NO: 1791070 - RNA, 19 nt, Artificial Sequence
  Description of Artificial Sequence: Synthetic oligonucleotide
ucucuacugcacucccuuc

SEQ ID NO: 1791071 - RNA, 19 nt, Artificial Sequence
  Description of Artificial Sequence: Synthetic oligonucleotide
agauucucuauagcucuaa

SEQ ID NO: 1791072 - RNA, 19 nt, Artificial Sequence
  Description of Artificial Sequence: Synthetic oligonucleotide
gaucugauaguugcagcua

SEQ ID NO: 1791073 - RNA, 19 nt, Artificial Sequence
  Description of Artificial Sequence: Synthetic oligonucleotide
gcagcuaauuuguuuagcu

SEQ ID NO: 1791074 - RNA, 19 nt, Artificial Sequence
  Description of Artificial Sequence: Synthetic oligonucleotide
acaugaccaccggcagucc

SEQ ID NO: 1791075 - RNA, 19 nt, Artificial Sequence
  Description of Artificial Sequence: Synthetic oligonucleotide
gugauaauugugacuggaa

SEQ ID NO: 1791076 - RNA, 19 nt, Artificial Sequence
  Description of Artificial Sequence: Synthetic oligonucleotide
accuugacugauagauaag

SEQ ID NO: 1791077 - RNA, 19 nt, Artificial Sequence
  Description of Artificial Sequence: Synthetic oligonucleotide
guugguacaugcugaaguu

SEQ ID NO: 1791078 - RNA, 19 nt, Artificial Sequence
  Description of Artificial Sequence: Synthetic oligonucleotide
gcucauggaugccuugcag

SEQ ID NO: 1791079 - RNA, 19 nt, Artificial Sequence
  Description of Artificial Sequence: Synthetic oligonucleotide
gcaccuaaauacccgguga

SEQ ID NO: 1791080 - RNA, 19 nt, Artificial Sequence
  Description of Artificial Sequence: Synthetic oligonucleotide
aucugcuaguccagugguc

SEQ ID NO: 1791081 - RNA, 19 nt, Artificial Sequence
  Description of Artificial Sequence: Synthetic oligonucleotide
ugaccaccggcaguccacc

SEQ ID NO: 1791082 - RNA, 19 nt, Artificial Sequence
  Description of Artificial Sequence: Synthetic oligonucleotide
ugcugugguuugucuuuga

SEQ ID NO: 1791083 - RNA, 19 nt, Artificial Sequence
  Description of Artificial Sequence: Synthetic oligonucleotide
cuguugguacaugcugaag

SEQ ID NO: 1791084 - RNA, 19 nt, Artificial Sequence
  Description of Artificial Sequence: Synthetic oligonucleotide
uaauugugacuggaaucuu

SEQ ID NO: 1791085 - RNA, 19 nt, Artificial Sequence
  Description of Artificial Sequence: Synthetic oligonucleotide
ucccuucuccaaauucauu

SEQ ID NO: 1791086 - RNA, 19 nt, Artificial Sequence
  Description of Artificial Sequence: Synthetic oligonucleotide
aggcaaccguuucuaaguu

SEQ ID NO: 1791087 - RNA, 19 nt, Artificial Sequence
  Description of Artificial Sequence: Synthetic oligonucleotide
uaguugcagcuaauuuguu

SEQ ID NO: 1791088 - RNA, 19 nt, Artificial Sequence
  Description of Artificial Sequence: Synthetic oligonucleotide
cagccguaugaccuccaug

SEQ ID NO: 1791089 - RNA, 19 nt, Artificial Sequence
  Description of Artificial Sequence: Synthetic oligonucleotide
uccuucgcacuuccuggua

SEQ ID NO: 1791090 - RNA, 19 nt, Artificial Sequence
  Description of Artificial Sequence: Synthetic oligonucleotide
cugaaaccaagucuguuuu

SEQ ID NO: 1791091 - RNA, 19 nt, Artificial Sequence
  Description of Artificial Sequence: Synthetic oligonucleotide
gccguccuuguuuuguaug

SEQ ID NO: 1791092 - RNA, 19 nt, Artificial Sequence
  Description of Artificial Sequence: Synthetic oligonucleotide
cuccaugcaguggccgucc

SEQ ID NO: 1791093 - RNA, 19 nt, Artificial Sequence
  Description of Artificial Sequence: Synthetic oligonucleotide
ucauaggcauggagaucua

SEQ ID NO: 1791094 - RNA, 19 nt, Artificial Sequence
  Description of Artificial Sequence: Synthetic oligonucleotide
accuaaauacccggugaua

SEQ ID NO: 1791095 - RNA, 19 nt, Artificial Sequence
  Description of Artificial Sequence: Synthetic oligonucleotide
cuaaauacccggugauaau

SEQ ID NO: 1791096 - RNA, 19 nt, Artificial Sequence
  Description of Artificial Sequence: Synthetic oligonucleotide
gaacagcagaggcaaccgu

SEQ ID NO: 1791097 - RNA, 19 nt, Artificial Sequence
  Description of Artificial Sequence: Synthetic oligonucleotide
ugcaguggccguccuuguu

SEQ ID NO: 1791098 - RNA, 19 nt, Artificial Sequence
  Description of Artificial Sequence: Synthetic oligonucleotide
aguggccguccuuguuuug

SEQ ID NO: 1791099 - RNA, 19 nt, Artificial Sequence
  Description of Artificial Sequence: Synthetic oligonucleotide
cucuacugcacucccuucu

SEQ ID NO: 1791100 - RNA, 19 nt, Artificial Sequence
  Description of Artificial Sequence: Synthetic oligonucleotide
gccucguagcuucauugac

SEQ ID NO: 1791101 - RNA, 19 nt, Artificial Sequence
  Description of Artificial Sequence: Synthetic oligonucleotide
ggcaaccguuucuaaguuc

SEQ ID NO: 1791102 - RNA, 19 nt, Artificial Sequence
  Description of Artificial Sequence: Synthetic oligonucleotide
cuagugugauggacaaacu

SEQ ID NO: 1791103 - RNA, 19 nt, Artificial Sequence
  Description of Artificial Sequence: Synthetic oligonucleotide
gaugccuugcagaaucauu

SEQ ID NO: 1791104 - RNA, 19 nt, Artificial Sequence
  Description of Artificial Sequence: Synthetic oligonucleotide
ccucguagcuucauugaca

SEQ ID NO: 1791105 - RNA, 19 nt, Artificial Sequence
  Description of Artificial Sequence: Synthetic oligonucleotide
ucgcacuuccugguacuuc

SEQ ID NO: 1791106 - RNA, 19 nt, Artificial Sequence
  Description of Artificial Sequence: Synthetic oligonucleotide
uggccguccuuguuuugua

SEQ ID NO: 1791107 - RNA, 19 nt, Artificial Sequence
  Description of Artificial Sequence: Synthetic oligonucleotide
gcauggagaucuaauauau

SEQ ID NO: 1791108 - RNA, 19 nt, Artificial Sequence
  Description of Artificial Sequence: Synthetic oligonucleotide
gcucuaaggccauuguccu

SEQ ID NO: 1791109 - RNA, 19 nt, Artificial Sequence
  Description of Artificial Sequence: Synthetic oligonucleotide
gaucaagguggggugcugu

SEQ ID NO: 1791110 - RNA, 19 nt, Artificial Sequence
  Description of Artificial Sequence: Synthetic oligonucleotide
uccagcuuacuaggcucuc

SEQ ID NO: 1791111 - RNA, 19 nt, Artificial Sequence
  Description of Artificial Sequence: Synthetic oligonucleotide
cuuauuccagugagaguau

SEQ ID NO: 1791112 - RNA, 19 nt, Artificial Sequence
  Description of Artificial Sequence: Synthetic oligonucleotide
gcuguugguacaugcugaa

SEQ ID NO: 1791113 - RNA, 19 nt, Artificial Sequence
  Description of Artificial Sequence: Synthetic oligonucleotide
acgaugaagucaagauuuu

SEQ ID NO: 1791114 - RNA, 19 nt, Artificial Sequence
  Description of Artificial Sequence: Synthetic oligonucleotide
caaagcaacuugccucgua

SEQ ID NO: 1791115 - RNA, 19 nt, Artificial Sequence
  Description of Artificial Sequence: Synthetic oligonucleotide
caauaaagaccagcugacu

SEQ ID NO: 1791116 - RNA, 19 nt, Artificial Sequence
  Description of Artificial Sequence: Synthetic oligonucleotide
ccgguaacaugaccaccgg

SEQ ID NO: 1791117 - RNA, 19 nt, Artificial Sequence
  Description of Artificial Sequence: Synthetic oligonucleotide
gacaaggccaucggguuuu

SEQ ID NO: 1791118 - RNA, 19 nt, Artificial Sequence
  Description of Artificial Sequence: Synthetic oligonucleotide
uucgcacuuccugguacuu

SEQ ID NO: 1791119 - RNA, 19 nt, Artificial Sequence
  Description of Artificial Sequence: Synthetic oligonucleotide
cacuuccugguacuucaaa

SEQ ID NO: 1791120 - RNA, 19 nt, Artificial Sequence
  Description of Artificial Sequence: Synthetic oligonucleotide
cauaggcauggagaucuaa

SEQ ID NO: 1791121 - RNA, 19 nt, Artificial Sequence
  Description of Artificial Sequence: Synthetic oligonucleotide
cuucgcacuuccugguacu

SEQ ID NO: 1791122 - RNA, 19 nt, Artificial Sequence
  Description of Artificial Sequence: Synthetic oligonucleotide
cagauucucuauagcucua

SEQ ID NO: 1791123 - RNA, 19 nt, Artificial Sequence
  Description of Artificial Sequence: Synthetic oligonucleotide
caccuaaauacccggugau

SEQ ID NO: 1791124 - RNA, 19 nt, Artificial Sequence
  Description of Artificial Sequence: Synthetic oligonucleotide
aucauccuuccagcuuacu

SEQ ID NO: 1791125 - RNA, 19 nt, Artificial Sequence
  Description of Artificial Sequence: Synthetic oligonucleotide
ggcccuucagccguaugac

SEQ ID NO: 1791126 - RNA, 19 nt, Artificial Sequence
  Description of Artificial Sequence: Synthetic oligonucleotide
ccacaggagauucuggaua

SEQ ID NO: 1791127 - RNA, 19 nt, Artificial Sequence
  Description of Artificial Sequence: Synthetic oligonucleotide
cuggaaucuuaacgaugaa

SEQ ID NO: 1791128 - RNA, 19 nt, Artificial Sequence
  Description of Artificial Sequence: Synthetic oligonucleotide
gucucaauggggaccaguu

SEQ ID NO: 1791129 - RNA, 19 nt, Artificial Sequence
  Description of Artificial Sequence: Synthetic oligonucleotide
caggacaauccuccgcgua

SEQ ID NO: 1791130 - RNA, 19 nt, Artificial Sequence
  Description of Artificial Sequence: Synthetic oligonucleotide
aucuagugugauggacaaa

SEQ ID NO: 1791131 - RNA, 19 nt, Artificial Sequence
  Description of Artificial Sequence: Synthetic oligonucleotide
cauggagaucuaauauauu

SEQ ID NO: 1791132 - RNA, 19 nt, Artificial Sequence
  Description of Artificial Sequence: Synthetic oligonucleotide
cagaaucauuugcuguggu

SEQ ID NO: 1791133 - RNA, 19 nt, Artificial Sequence
  Description of Artificial Sequence: Synthetic oligonucleotide
ccuccacaguauucauagc

SEQ ID NO: 1791134 - RNA, 19 nt, Artificial Sequence
  Description of Artificial Sequence: Synthetic oligonucleotide
guccauuuauugaucugau

SEQ ID NO: 1791135 - RNA, 19 nt, Artificial Sequence
  Description of Artificial Sequence: Synthetic oligonucleotide
ccgcguacuccucuuccgc

SEQ ID NO: 1791136 - RNA, 19 nt, Artificial Sequence
  Description of Artificial Sequence: Synthetic oligonucleotide
gaccaccggcaguccacca

SEQ ID NO: 1791137 - RNA, 19 nt, Artificial Sequence
  Description of Artificial Sequence: Synthetic oligonucleotide
cugauaguugcagcuaauu

SEQ ID NO: 1791138 - RNA, 19 nt, Artificial Sequence
  Description of Artificial Sequence: Synthetic oligonucleotide
cagaggcaaccguuucuaa

SEQ ID NO: 1791139 - RNA, 19 nt, Artificial Sequence
  Description of Artificial Sequence: Synthetic oligonucleotide
cgcguacuccucuuccgcc

SEQ ID NO: 1791140 - RNA, 19 nt, Artificial Sequence
  Description of Artificial Sequence: Synthetic oligonucleotide
ggugcuguugguacaugcu

SEQ ID NO: 1791141 - RNA, 19 nt, Artificial Sequence
  Description of Artificial Sequence: Synthetic oligonucleotide
cagcaucauccuuccagcu

SEQ ID NO: 1791142 - RNA, 19 nt, Artificial Sequence
  Description of Artificial Sequence: Synthetic oligonucleotide
cuaguccaguggucucuaa

SEQ ID NO: 1791143 - RNA, 19 nt, Artificial Sequence
  Description of Artificial Sequence: Synthetic oligonucleotide
guggccguccuuguuuugu

SEQ ID NO: 1791144 - RNA, 19 nt, Artificial Sequence
  Description of Artificial Sequence: Synthetic oligonucleotide
ccaggugcuguccucaacu

SEQ ID NO: 1791145 - RNA, 19 nt, Artificial Sequence
  Description of Artificial Sequence: Synthetic oligonucleotide
ccaagucuguuuuauugau

SEQ ID NO: 1791146 - RNA, 19 nt, Artificial Sequence
  Description of Artificial Sequence: Synthetic oligonucleotide
cguuucuaaguuccagcca

SEQ ID NO: 1791147 - RNA, 19 nt, Artificial Sequence
  Description of Artificial Sequence: Synthetic oligonucleotide
gccguaugaccuccaugca

SEQ ID NO: 1791148 - RNA, 19 nt, Artificial Sequence
  Description of Artificial Sequence: Synthetic oligonucleotide
caccaggcccuucagccgu

SEQ ID NO: 1791149 - RNA, 19 nt, Artificial Sequence
  Description of Artificial Sequence: Synthetic oligonucleotide
cagcaccuaaauacccggu

SEQ ID NO: 1791150 - RNA, 19 nt, Artificial Sequence
  Description of Artificial Sequence: Synthetic oligonucleotide
cagcuuacuaggcucucuu

SEQ ID NO: 1791151 - RNA, 19 nt, Artificial Sequence
  Description of Artificial Sequence: Synthetic oligonucleotide
gcugugguuugucuuugau

SEQ ID NO: 1791152 - RNA, 19 nt, Artificial Sequence
  Description of Artificial Sequence: Synthetic oligonucleotide
gccaggugcuguccucaac

SEQ ID NO: 1791153 - RNA, 19 nt, Artificial Sequence
  Description of Artificial Sequence: Synthetic oligonucleotide
gcaguggccguccuuguuu

SEQ ID NO: 1791154 - RNA, 19 nt, Artificial Sequence
  Description of Artificial Sequence: Synthetic oligonucleotide
ccguccuuguuuuguaugu

SEQ ID NO: 1791155 - RNA, 19 nt, Artificial Sequence
  Description of Artificial Sequence: Synthetic oligonucleotide
ggucuuugccaggugcugu

SEQ ID NO: 1791156 - RNA, 19 nt, Artificial Sequence
  Description of Artificial Sequence: Synthetic oligonucleotide
ggacaauccuccgcguacu

SEQ ID NO: 1791157 - RNA, 19 nt, Artificial Sequence
  Description of Artificial Sequence: Synthetic oligonucleotide
ccaaaacauagaagccacu

SEQ ID NO: 1791158 - RNA, 19 nt, Artificial Sequence
  Description of Artificial Sequence: Synthetic oligonucleotide
cccggugauaauugugacu

SEQ ID NO: 1791159 - RNA, 19 nt, Artificial Sequence
  Description of Artificial Sequence: Synthetic oligonucleotide
ggucucaauggggaccagu

SEQ ID NO: 1791160 - RNA, 19 nt, Artificial Sequence
  Description of Artificial Sequence: Synthetic oligonucleotide
caguggccguccuuguuuu

SEQ ID NO: 1791161 - RNA, 19 nt, Artificial Sequence
  Description of Artificial Sequence: Synthetic oligonucleotide
gcaacuugccucguagcuu

SEQ ID NO: 1791162 - RNA, 19 nt, Artificial Sequence
  Description of Artificial Sequence: Synthetic oligonucleotide
gcuaguccaguggucucua

SEQ ID NO: 1791163 - RNA, 19 nt, Artificial Sequence
  Description of Artificial Sequence: Synthetic oligonucleotide
ccucaacucuucuguuucu

SEQ ID NO: 1791164 - RNA, 19 nt, Artificial Sequence
  Description of Artificial Sequence: Synthetic oligonucleotide
ggccguccuuguuuuguau

SEQ ID NO: 1791165 - RNA, 19 nt, Artificial Sequence
  Description of Artificial Sequence: Synthetic oligonucleotide
cuauagcucuaaggccauu

SEQ ID NO: 1791166 - RNA, 19 nt, Artificial Sequence
  Description of Artificial Sequence: Synthetic oligonucleotide
ccagcuuacuaggcucucu

SEQ ID NO: 1791167 - RNA, 19 nt, Artificial Sequence
  Description of Artificial Sequence: Synthetic oligonucleotide
ccaaagcaacuugccucgu

SEQ ID NO: 1791168 - RNA, 19 nt, Artificial Sequence
  Description of Artificial Sequence: Synthetic oligonucleotide
ccgccuccacaguauucau

SEQ ID NO: 1791169 - RNA, 19 nt, Artificial Sequence
  Description of Artificial Sequence: Synthetic oligonucleotide
aaugugguuaucuacaggc

SEQ ID NO: 1791170 - RNA, 19 nt, Artificial Sequence
  Description of Artificial Sequence: Synthetic oligonucleotide
aaaauuuacucacgcagcc

SEQ ID NO: 1791171 - RNA, 19 nt, Artificial Sequence
  Description of Artificial Sequence: Synthetic oligonucleotide
uuaucuacaggcaucaagg

SEQ ID NO: 1791172 - RNA, 19 nt, Artificial Sequence
  Description of Artificial Sequence: Synthetic oligonucleotide
ucuucuauagccaaguaag

SEQ ID NO: 1791173 - RNA, 19 nt, Artificial Sequence
  Description of Artificial Sequence: Synthetic oligonucleotide
uauaucguuauccacuucg

SEQ ID NO: 1791174 - RNA, 19 nt, Artificial Sequence
  Description of Artificial Sequence: Synthetic oligonucleotide
aaaaucauuaucuccaacu

SEQ ID NO: 1791175 - RNA, 19 nt, Artificial Sequence
  Description of Artificial Sequence: Synthetic oligonucleotide
ugacaagucaguauuaagg

SEQ ID NO: 1791176 - RNA, 19 nt, Artificial Sequence
  Description of Artificial Sequence: Synthetic oligonucleotide
auuacaagaacauguacac

SEQ ID NO: 1791177 - RNA, 19 nt, Artificial Sequence
  Description of Artificial Sequence: Synthetic oligonucleotide
acaaauaucccacuauccc

SEQ ID NO: 1791178 - RNA, 19 nt, Artificial Sequence
  Description of Artificial Sequence: Synthetic oligonucleotide
aaggauaauauauuacaag

SEQ ID NO: 1791179 - RNA, 19 nt, Artificial Sequence
  Description of Artificial Sequence: Synthetic oligonucleotide
aauccugugacuccccucc

SEQ ID NO: 1791180 - RNA, 19 nt, Artificial Sequence
  Description of Artificial Sequence: Synthetic oligonucleotide
gauaauauauuacaagaac

SEQ ID NO: 1791181 - RNA, 19 nt, Artificial Sequence
  Description of Artificial Sequence: Synthetic oligonucleotide
aaaucauuaucuccaacuc

SEQ ID NO: 1791182 - RNA, 19 nt, Artificial Sequence
  Description of Artificial Sequence: Synthetic oligonucleotide
aggguuaagagucagcuac

SEQ ID NO: 1791183 - RNA, 19 nt, Artificial Sequence
  Description of Artificial Sequence: Synthetic oligonucleotide
gacauggacacuuuguugg

SEQ ID NO: 1791184 - RNA, 19 nt, Artificial Sequence
  Description of Artificial Sequence: Synthetic oligonucleotide
augaucuuucuucugaccc

SEQ ID NO: 1791185 - RNA, 19 nt, Artificial Sequence
  Description of Artificial Sequence: Synthetic oligonucleotide
ugagccaacaugaaacugg

SEQ ID NO: 1791186 - RNA, 19 nt, Artificial Sequence
  Description of Artificial Sequence: Synthetic oligonucleotide
uacuucuuaagacaaagca

SEQ ID NO: 1791187 - RNA, 19 nt, Artificial Sequence
  Description of Artificial Sequence: Synthetic oligonucleotide
cuucuauucuucuauagcc

SEQ ID NO: 1791188 - RNA, 19 nt, Artificial Sequence
  Description of Artificial Sequence: Synthetic oligonucleotide
aggauaauauauuacaaga

SEQ ID NO: 1791189 - RNA, 19 nt, Artificial Sequence
  Description of Artificial Sequence: Synthetic oligonucleotide
agcaacuucagaaagggcc

SEQ ID NO: 1791190 - RNA, 19 nt, Artificial Sequence
  Description of Artificial Sequence: Synthetic oligonucleotide
uucuauucuggaaauuugg

SEQ ID NO: 1791191 - RNA, 19 nt, Artificial Sequence
  Description of Artificial Sequence: Synthetic oligonucleotide
ucuacaggcaucaagggcu

SEQ ID NO: 1791192 - RNA, 19 nt, Artificial Sequence
  Description of Artificial Sequence: Synthetic oligonucleotide
aaagggcaaguuuaacagc

SEQ ID NO: 1791193 - RNA, 19 nt, Artificial Sequence
  Description of Artificial Sequence: Synthetic oligonucleotide
ugucugaagcuauaaauag

SEQ ID NO: 1791194 - RNA, 19 nt, Artificial Sequence
  Description of Artificial Sequence: Synthetic oligonucleotide
aagaugaagaagcagcccu

SEQ ID NO: 1791195 - RNA, 19 nt, Artificial Sequence
  Description of Artificial Sequence: Synthetic oligonucleotide
uuaggcucuaaacuggucc

SEQ ID NO: 1791196 - RNA, 19 nt, Artificial Sequence
  Description of Artificial Sequence: Synthetic oligonucleotide
uacaagaacauguacacaa

SEQ ID NO: 1791197 - RNA, 19 nt, Artificial Sequence
  Description of Artificial Sequence: Synthetic oligonucleotide
aagaccacaacaaacuuag

SEQ ID NO: 1791198 - RNA, 19 nt, Artificial Sequence
  Description of Artificial Sequence: Synthetic oligonucleotide
aaacuucacgcguagaacu

SEQ ID NO: 1791199 - RNA, 19 nt, Artificial Sequence
  Description of Artificial Sequence: Synthetic oligonucleotide
uaaguuauauucuggaauc

SEQ ID NO: 1791200 - RNA, 19 nt, Artificial Sequence
  Description of Artificial Sequence: Synthetic oligonucleotide
auauauuacaagaacaugu

SEQ ID NO: 1791201 - RNA, 19 nt, Artificial Sequence
  Description of Artificial Sequence: Synthetic oligonucleotide
aaaacuucacgcguagaac

SEQ ID NO: 1791202 - RNA, 19 nt, Artificial Sequence
  Description of Artificial Sequence: Synthetic oligonucleotide
ucguuauccacuucggagg

SEQ ID NO: 1791203 - RNA, 19 nt, Artificial Sequence
  Description of Artificial Sequence: Synthetic oligonucleotide
uauagcuacuucuuaagac

SEQ ID NO: 1791204 - RNA, 19 nt, Artificial Sequence
  Description of Artificial Sequence: Synthetic oligonucleotide
gaccacaacaaacuuaggc

SEQ ID NO: 1791205 - RNA, 19 nt, Artificial Sequence
  Description of Artificial Sequence: Synthetic oligonucleotide
auaauauauuacaagaaca

SEQ ID NO: 1791206 - RNA, 19 nt, Artificial Sequence
  Description of Artificial Sequence: Synthetic oligonucleotide
ugaagcuauaaauaguaaa

SEQ ID NO: 1791207 - RNA, 19 nt, Artificial Sequence
  Description of Artificial Sequence: Synthetic oligonucleotide
acacaaauaucccacuauc

SEQ ID NO: 1791208 - RNA, 19 nt, Artificial Sequence
  Description of Artificial Sequence: Synthetic oligonucleotide
uuugggaaugacuucauuc

SEQ ID NO: 1791209 - RNA, 19 nt, Artificial Sequence
  Description of Artificial Sequence: Synthetic oligonucleotide
uuguagauggguuucuugc

SEQ ID NO: 1791210 - RNA, 19 nt, Artificial Sequence
  Description of Artificial Sequence: Synthetic oligonucleotide
auagcuacuucuuaagaca

SEQ ID NO: 1791211 - RNA, 19 nt, Artificial Sequence
  Description of Artificial Sequence: Synthetic oligonucleotide
aguaaggauaauauauuac

SEQ ID NO: 1791212 - RNA, 19 nt, Artificial Sequence
  Description of Artificial Sequence: Synthetic oligonucleotide
aucguuauccacuucggag

SEQ ID NO: 1791213 - RNA, 19 nt, Artificial Sequence
  Description of Artificial Sequence: Synthetic oligonucleotide
ucuacaaaggcccaccauc

SEQ ID NO: 1791214 - RNA, 19 nt, Artificial Sequence
  Description of Artificial Sequence: Synthetic oligonucleotide
aucuacaggcaucaagggc

SEQ ID NO: 1791215 - RNA, 19 nt, Artificial Sequence
  Description of Artificial Sequence: Synthetic oligonucleotide
uauauuacaagaacaugua

SEQ ID NO: 1791216 - RNA, 19 nt, Artificial Sequence
  Description of Artificial Sequence: Synthetic oligonucleotide
acuacuccagcucaagcac

SEQ ID NO: 1791217 - RNA, 19 nt, Artificial Sequence
  Description of Artificial Sequence: Synthetic oligonucleotide
agaacauuauagcuacuuc

SEQ ID NO: 1791218 - RNA, 19 nt, Artificial Sequence
  Description of Artificial Sequence: Synthetic oligonucleotide
acuucggagggugagaccc

SEQ ID NO: 1791219 - RNA, 19 nt, Artificial Sequence
  Description of Artificial Sequence: Synthetic oligonucleotide
aaaaccauucuauauccua

SEQ ID NO: 1791220 - RNA, 19 nt, Artificial Sequence
  Description of Artificial Sequence: Synthetic oligonucleotide
aaguaaggauaauauauua

SEQ ID NO: 1791221 - RNA, 19 nt, Artificial Sequence
  Description of Artificial Sequence: Synthetic oligonucleotide
guuaucuacaggcaucaag

SEQ ID NO: 1791222 - RNA, 19 nt, Artificial Sequence
  Description of Artificial Sequence: Synthetic oligonucleotide
uauccccuaaguuauauuc

SEQ ID NO: 1791223 - RNA, 19 nt, Artificial Sequence
  Description of Artificial Sequence: Synthetic oligonucleotide
guuggauauaucguuaucc

SEQ ID NO: 1791224 - RNA, 19 nt, Artificial Sequence
  Description of Artificial Sequence: Synthetic oligonucleotide
aagcagcccugucugaagc

SEQ ID NO: 1791225 - RNA, 19 nt, Artificial Sequence
  Description of Artificial Sequence: Synthetic oligonucleotide
ucugaccccagaaagguga

SEQ ID NO: 1791226 - RNA, 19 nt, Artificial Sequence
  Description of Artificial Sequence: Synthetic oligonucleotide
uccccaucaaguccaagcg

SEQ ID NO: 1791227 - RNA, 19 nt, Artificial Sequence
  Description of Artificial Sequence: Synthetic oligonucleotide
gaagaggaugcccaccacg

SEQ ID NO: 1791228 - RNA, 19 nt, Artificial Sequence
  Description of Artificial Sequence: Synthetic oligonucleotide
caggcuugccuuuagaaag

SEQ ID NO: 1791229 - RNA, 19 nt, Artificial Sequence
  Description of Artificial Sequence: Synthetic oligonucleotide
cagcucaagcacaagaagg

SEQ ID NO: 1791230 - RNA, 19 nt, Artificial Sequence
  Description of Artificial Sequence: Synthetic oligonucleotide
uuggauauaucguuaucca

SEQ ID NO: 1791231 - RNA, 19 nt, Artificial Sequence
  Description of Artificial Sequence: Synthetic oligonucleotide
gucguaacugcccucaucc

SEQ ID NO: 1791232 - RNA, 19 nt, Artificial Sequence
  Description of Artificial Sequence: Synthetic oligonucleotide
aggacgaggguuaagaguc

SEQ ID NO: 1791233 - RNA, 19 nt, Artificial Sequence
  Description of Artificial Sequence: Synthetic oligonucleotide
ugaaucacuucagggaagg

SEQ ID NO: 1791234 - RNA, 19 nt, Artificial Sequence
  Description of Artificial Sequence: Synthetic oligonucleotide
aacuuaggcucuaaacugg

SEQ ID NO: 1791235 - RNA, 19 nt, Artificial Sequence
  Description of Artificial Sequence: Synthetic oligonucleotide
ucagcuacccucuacuacu

SEQ ID NO: 1791236 - RNA, 19 nt, Artificial Sequence
  Description of Artificial Sequence: Synthetic oligonucleotide
agcccgacagcucaaaguc

SEQ ID NO: 1791237 - RNA, 19 nt, Artificial Sequence
  Description of Artificial Sequence: Synthetic oligonucleotide
aaccgagacaagaagauga

SEQ ID NO: 1791238 - RNA, 19 nt, Artificial Sequence
  Description of Artificial Sequence: Synthetic oligonucleotide
uacuacuccagcucaagca

SEQ ID NO: 1791239 - RNA, 19 nt, Artificial Sequence
  Description of Artificial Sequence: Synthetic oligonucleotide
ugcuagaacauuauagcua

SEQ ID NO: 1791240 - RNA, 19 nt, Artificial Sequence
  Description of Artificial Sequence: Synthetic oligonucleotide
aagucaguauuaaggugcc

SEQ ID NO: 1791241 - RNA, 19 nt, Artificial Sequence
  Description of Artificial Sequence: Synthetic oligonucleotide
aucugcuagaacauuauag

SEQ ID NO: 1791242 - RNA, 19 nt, Artificial Sequence
  Description of Artificial Sequence: Synthetic oligonucleotide
uuuucuaccugggcaaccg

SEQ ID NO: 1791243 - RNA, 19 nt, Artificial Sequence
  Description of Artificial Sequence: Synthetic oligonucleotide
agcucaagcacaagaaggc

SEQ ID NO: 1791244 - RNA, 19 nt, Artificial Sequence
  Description of Artificial Sequence: Synthetic oligonucleotide
aaagccuacucagccacac

SEQ ID NO: 1791245 - RNA, 19 nt, Artificial Sequence
  Description of Artificial Sequence: Synthetic oligonucleotide
uguagauggguuucuugcc

SEQ ID NO: 1791246 - RNA, 19 nt, Artificial Sequence
  Description of Artificial Sequence: Synthetic oligonucleotide
cuacaaaggcccaccaucc

SEQ ID NO: 1791247 - RNA, 19 nt, Artificial Sequence
  Description of Artificial Sequence: Synthetic oligonucleotide
aaauaucccacuauccccu

SEQ ID NO: 1791248 - RNA, 19 nt, Artificial Sequence
  Description of Artificial Sequence: Synthetic oligonucleotide
gaaaacuucacgcguagaa

SEQ ID NO: 1791249 - RNA, 19 nt, Artificial Sequence
  Description of Artificial Sequence: Synthetic oligonucleotide
ugcccuuccucuacaaagg

SEQ ID NO: 1791250 - RNA, 19 nt, Artificial Sequence
  Description of Artificial Sequence: Synthetic oligonucleotide
gaaugugguuaucuacagg

SEQ ID NO: 1791251 - RNA, 19 nt, Artificial Sequence
  Description of Artificial Sequence: Synthetic oligonucleotide
aaguuuaacagccccuuuu

SEQ ID NO: 1791252 - RNA, 19 nt, Artificial Sequence
  Description of Artificial Sequence: Synthetic oligonucleotide
uuuguuggauauaucguua

SEQ ID NO: 1791253 - RNA, 19 nt, Artificial Sequence
  Description of Artificial Sequence: Synthetic oligonucleotide
ugguccuagauucuauucu

SEQ ID NO: 1791254 - RNA, 19 nt, Artificial Sequence
  Description of Artificial Sequence: Synthetic oligonucleotide
ucuauucuucuauagccaa

SEQ ID NO: 1791255 - RNA, 19 nt, Artificial Sequence
  Description of Artificial Sequence: Synthetic oligonucleotide
acaagucaguauuaaggug

SEQ ID NO: 1791256 - RNA, 19 nt, Artificial Sequence
  Description of Artificial Sequence: Synthetic oligonucleotide
aaaaugacucaaacccagg

SEQ ID NO: 1791257 - RNA, 19 nt, Artificial Sequence
  Description of Artificial Sequence: Synthetic oligonucleotide
gaugaucuuucuucugacc

SEQ ID NO: 1791258 - RNA, 19 nt, Artificial Sequence
  Description of Artificial Sequence: Synthetic oligonucleotide
uauucuucuauagccaagu

SEQ ID NO: 1791259 - RNA, 19 nt, Artificial Sequence
  Description of Artificial Sequence: Synthetic oligonucleotide
uuagaaagggcaaguuuaa

SEQ ID NO: 1791260 - RNA, 19 nt, Artificial Sequence
  Description of Artificial Sequence: Synthetic oligonucleotide
acaaaagaugaagaagcag

SEQ ID NO: 1791261 - RNA, 19 nt, Artificial Sequence
  Description of Artificial Sequence: Synthetic oligonucleotide
ugugguuaucuacaggcau

SEQ ID NO: 1791262 - RNA, 19 nt, Artificial Sequence
  Description of Artificial Sequence: Synthetic oligonucleotide
uaucccacuauccccuaag

SEQ ID NO: 1791263 - RNA, 19 nt, Artificial Sequence
  Description of Artificial Sequence: Synthetic oligonucleotide
cuagauucuauucuggaaa

SEQ ID NO: 1791264 - RNA, 19 nt, Artificial Sequence
  Description of Artificial Sequence: Synthetic oligonucleotide
cacgcguagaacucguugg

SEQ ID NO: 1791265 - RNA, 19 nt, Artificial Sequence
  Description of Artificial Sequence: Synthetic oligonucleotide
uauagccaaguaaggauaa

SEQ ID NO: 1791266 - RNA, 19 nt, Artificial Sequence
  Description of Artificial Sequence: Synthetic oligonucleotide
uucuuaagacaaagcaacu

SEQ ID NO: 1791267 - RNA, 19 nt, Artificial Sequence
  Description of Artificial Sequence: Synthetic oligonucleotide
aaaggcccaccauccaauc

SEQ ID NO: 1791268 - RNA, 19 nt, Artificial Sequence
  Description of Artificial Sequence: Synthetic oligonucleotide
gcuagaacauuauagcuac

SEQ ID NO: 1791269 - RNA, 19 nt, Artificial Sequence
  Description of Artificial Sequence: Synthetic oligonucleotide
ugaccagagauggagacac

SEQ ID NO: 1791270 - RNA, 19 nt, Artificial Sequence
  Description of Artificial Sequence: Synthetic oligonucleotide
guccaagcggcacucaagg

SEQ ID NO: 1791271 - RNA, 19 nt, Artificial Sequence
  Description of Artificial Sequence: Synthetic oligonucleotide
uccccuaaguuauauucug

SEQ ID NO: 1791272 - RNA, 19 nt, Artificial Sequence
  Description of Artificial Sequence: Synthetic oligonucleotide
ucuaaacugguccuagauu

SEQ ID NO: 1791273 - RNA, 19 nt, Artificial Sequence
  Description of Artificial Sequence: Synthetic oligonucleotide
uggauauaucguuauccac

SEQ ID NO: 1791274 - RNA, 19 nt, Artificial Sequence
  Description of Artificial Sequence: Synthetic oligonucleotide
gacaagucaguauuaaggu

SEQ ID NO: 1791275 - RNA, 19 nt, Artificial Sequence
  Description of Artificial Sequence: Synthetic oligonucleotide
uucuaccugggcaaccgag

SEQ ID NO: 1791276 - RNA, 19 nt, Artificial Sequence
  Description of Artificial Sequence: Synthetic oligonucleotide
aagguugcagaguaucuuu

SEQ ID NO: 1791277 - RNA, 19 nt, Artificial Sequence
  Description of Artificial Sequence: Synthetic oligonucleotide
ucacgcguagaacucguug

SEQ ID NO: 1791278 - RNA, 19 nt, Artificial Sequence
  Description of Artificial Sequence: Synthetic oligonucleotide
guagauggguuucuugccc

SEQ ID NO: 1791279 - RNA, 19 nt, Artificial Sequence
  Description of Artificial Sequence: Synthetic oligonucleotide
gugcccuuccucuacaaag

SEQ ID NO: 1791280 - RNA, 19 nt, Artificial Sequence
  Description of Artificial Sequence: Synthetic oligonucleotide
augacucaaacccaggcuu

SEQ ID NO: 1791281 - RNA, 19 nt, Artificial Sequence
  Description of Artificial Sequence: Synthetic oligonucleotide
aaaagguugcagaguaucu

SEQ ID NO: 1791282 - RNA, 19 nt, Artificial Sequence
  Description of Artificial Sequence: Synthetic oligonucleotide
agagucagcuacccucuac

SEQ ID NO: 1791283 - RNA, 19 nt, Artificial Sequence
  Description of Artificial Sequence: Synthetic oligonucleotide
acacugacaagucaguauu

SEQ ID NO: 1791284 - RNA, 19 nt, Artificial Sequence
  Description of Artificial Sequence: Synthetic oligonucleotide
aguuauauucuggaaucug

SEQ ID NO: 1791285 - RNA, 19 nt, Artificial Sequence
  Description of Artificial Sequence: Synthetic oligonucleotide
uaucguuauccacuucgga

SEQ ID NO: 1791286 - RNA, 19 nt, Artificial Sequence
  Description of Artificial Sequence: Synthetic oligonucleotide
aggaaaacuucacgcguag

SEQ ID NO: 1791287 - RNA, 19 nt, Artificial Sequence
  Description of Artificial Sequence: Synthetic oligonucleotide
ugcccgcucaggaaugugg

SEQ ID NO: 1791288 - RNA, 19 nt, Artificial Sequence
  Description of Artificial Sequence: Synthetic oligonucleotide
uagcuacuucuuaagacaa

SEQ ID NO: 1791289 - RNA, 19 nt, Artificial Sequence
  Description of Artificial Sequence: Synthetic oligonucleotide
cugacaagucaguauuaag

SEQ ID NO: 1791290 - RNA, 19 nt, Artificial Sequence
  Description of Artificial Sequence: Synthetic oligonucleotide
aacuucacgcguagaacuc

SEQ ID NO: 1791291 - RNA, 19 nt, Artificial Sequence
  Description of Artificial Sequence: Synthetic oligonucleotide
agggcugaaucacuucagg

SEQ ID NO: 1791292 - RNA, 19 nt, Artificial Sequence
  Description of Artificial Sequence: Synthetic oligonucleotide
uagauucuauucuggaaau

SEQ ID NO: 1791293 - RNA, 19 nt, Artificial Sequence
  Description of Artificial Sequence: Synthetic oligonucleotide
ugacucaaacccaggcuug

SEQ ID NO: 1791294 - RNA, 19 nt, Artificial Sequence
  Description of Artificial Sequence: Synthetic oligonucleotide
aaauuuacucacgcagcca

SEQ ID NO: 1791295 - RNA, 19 nt, Artificial Sequence
  Description of Artificial Sequence: Synthetic oligonucleotide
aaguuauauucuggaaucu

SEQ ID NO: 1791296 - RNA, 19 nt, Artificial Sequence
  Description of Artificial Sequence: Synthetic oligonucleotide
cauuauagcuacuucuuaa

SEQ ID NO: 1791297 - RNA, 19 nt, Artificial Sequence
  Description of Artificial Sequence: Synthetic oligonucleotide
acaaucaaagcugccagga

SEQ ID NO: 1791298 - RNA, 19 nt, Artificial Sequence
  Description of Artificial Sequence: Synthetic oligonucleotide
ucuggaaauuuggagggga

SEQ ID NO: 1791299 - RNA, 19 nt, Artificial Sequence
  Description of Artificial Sequence: Synthetic oligonucleotide
cuauucuucuauagccaag

SEQ ID NO: 1791300 - RNA, 19 nt, Artificial Sequence
  Description of Artificial Sequence: Synthetic oligonucleotide
ucuaccugggcaaccgaga

SEQ ID NO: 1791301 - RNA, 19 nt, Artificial Sequence
  Description of Artificial Sequence: Synthetic oligonucleotide
auccaauccugugacuccc

SEQ ID NO: 1791302 - RNA, 19 nt, Artificial Sequence
  Description of Artificial Sequence: Synthetic oligonucleotide
agaggaugcccaccacgcc

SEQ ID NO: 1791303 - RNA, 19 nt, Artificial Sequence
  Description of Artificial Sequence: Synthetic oligonucleotide
uagaacauuauagcuacuu

SEQ ID NO: 1791304 - RNA, 19 nt, Artificial Sequence
  Description of Artificial Sequence: Synthetic oligonucleotide
uggacauggacacuuuguu

SEQ ID NO: 1791305 - RNA, 19 nt, Artificial Sequence
  Description of Artificial Sequence: Synthetic oligonucleotide
aggcaucaagggcugaauc

SEQ ID NO: 1791306 - RNA, 19 nt, Artificial Sequence
  Description of Artificial Sequence: Synthetic oligonucleotide
uugcccaagucguaacugc

SEQ ID NO: 1791307 - RNA, 19 nt, Artificial Sequence
  Description of Artificial Sequence: Synthetic oligonucleotide
ucuacuacuccagcucaag

SEQ ID NO: 1791308 - RNA, 19 nt, Artificial Sequence
  Description of Artificial Sequence: Synthetic oligonucleotide
caggaucaggaagacagcg

SEQ ID NO: 1791309 - RNA, 19 nt, Artificial Sequence
  Description of Artificial Sequence: Synthetic oligonucleotide
uucagggaaggucuugguc

SEQ ID NO: 1791310 - RNA, 19 nt, Artificial Sequence
  Description of Artificial Sequence: Synthetic oligonucleotide
uacucacgcagccaccuga

SEQ ID NO: 1791311 - RNA, 19 nt, Artificial Sequence
  Description of Artificial Sequence: Synthetic oligonucleotide
uugccuuuagaaagggcaa

SEQ ID NO: 1791312 - RNA, 19 nt, Artificial Sequence
  Description of Artificial Sequence: Synthetic oligonucleotide
aacucuucucucauuuuca

SEQ ID NO: 1791313 - RNA, 19 nt, Artificial Sequence
  Description of Artificial Sequence: Synthetic oligonucleotide
uuuacucacgcagccaccu

SEQ ID NO: 1791314 - RNA, 19 nt, Artificial Sequence
  Description of Artificial Sequence: Synthetic oligonucleotide
uggagacacugacaaguca

SEQ ID NO: 1791315 - RNA, 19 nt, Artificial Sequence
  Description of Artificial Sequence: Synthetic oligonucleotide
auucuauucuggaaauuug

SEQ ID NO: 1791316 - RNA, 19 nt, Artificial Sequence
  Description of Artificial Sequence: Synthetic oligonucleotide
cuaaguuauauucuggaau

SEQ ID NO: 1791317 - RNA, 19 nt, Artificial Sequence
  Description of Artificial Sequence: Synthetic oligonucleotide
agucguaacugcccucauc

SEQ ID NO: 1791318 - RNA, 19 nt, Artificial Sequence
  Description of Artificial Sequence: Synthetic oligonucleotide
aucauuaucuccaacucuu

SEQ ID NO: 1791319 - RNA, 19 nt, Artificial Sequence
  Description of Artificial Sequence: Synthetic oligonucleotide
cacucaaggaaaacuucac

SEQ ID NO: 1791320 - RNA, 19 nt, Artificial Sequence
  Description of Artificial Sequence: Synthetic oligonucleotide
aaagguugcagaguaucuu

SEQ ID NO: 1791321 - RNA, 19 nt, Artificial Sequence
  Description of Artificial Sequence: Synthetic oligonucleotide
auaucguuauccacuucgg

SEQ ID NO: 1791322 - RNA, 19 nt, Artificial Sequence
  Description of Artificial Sequence: Synthetic oligonucleotide
ugcccaagucguaacugcc

SEQ ID NO: 1791323 - RNA, 19 nt, Artificial Sequence
  Description of Artificial Sequence: Synthetic oligonucleotide
uuguuggauauaucguuau

SEQ ID NO: 1791324 - RNA, 19 nt, Artificial Sequence
  Description of Artificial Sequence: Synthetic oligonucleotide
ucuuucuucugaccccaga

SEQ ID NO: 1791325 - RNA, 19 nt, Artificial Sequence
  Description of Artificial Sequence: Synthetic oligonucleotide
auauaucguuauccacuuc

SEQ ID NO: 1791326 - RNA, 19 nt, Artificial Sequence
  Description of Artificial Sequence: Synthetic oligonucleotide
ucuugcccaagucguaacu

SEQ ID NO: 1791327 - RNA, 19 nt, Artificial Sequence
  Description of Artificial Sequence: Synthetic oligonucleotide
ggagacacugacaagucag

SEQ ID NO: 1791328 - RNA, 19 nt, Artificial Sequence
  Description of Artificial Sequence: Synthetic oligonucleotide
gccaacaugaaacugguaa

SEQ ID NO: 1791329 - RNA, 19 nt, Artificial Sequence
  Description of Artificial Sequence: Synthetic oligonucleotide
ggguuucuugcccaagucg

SEQ ID NO: 1791330 - RNA, 19 nt, Artificial Sequence
  Description of Artificial Sequence: Synthetic oligonucleotide
gcguagaacucguuggugg

SEQ ID NO: 1791331 - RNA, 19 nt, Artificial Sequence
  Description of Artificial Sequence: Synthetic oligonucleotide
acuuuguuggauauaucgu

SEQ ID NO: 1791332 - RNA, 19 nt, Artificial Sequence
  Description of Artificial Sequence: Synthetic oligonucleotide
auuuacucacgcagccacc

SEQ ID NO: 1791333 - RNA, 19 nt, Artificial Sequence
  Description of Artificial Sequence: Synthetic oligonucleotide
ggaaugugguuaucuacag

SEQ ID NO: 1791334 - RNA, 19 nt, Artificial Sequence
  Description of Artificial Sequence: Synthetic oligonucleotide
aggcccaccauccaauccu

SEQ ID NO: 1791335 - RNA, 19 nt, Artificial Sequence
  Description of Artificial Sequence: Synthetic oligonucleotide
augaagaagcagcccuguc

SEQ ID NO: 1791336 - RNA, 19 nt, Artificial Sequence
  Description of Artificial Sequence: Synthetic oligonucleotide
cuacccucuacuacuccag

SEQ ID NO: 1791337 - RNA, 19 nt, Artificial Sequence
  Description of Artificial Sequence: Synthetic oligonucleotide
gguccuagauucuauucug

SEQ ID NO: 1791338 - RNA, 19 nt, Artificial Sequence
  Description of Artificial Sequence: Synthetic oligonucleotide
cugucugaagcuauaaaua

SEQ ID NO: 1791339 - RNA, 19 nt, Artificial Sequence
  Description of Artificial Sequence: Synthetic oligonucleotide
agcuacccucuacuacucc

SEQ ID NO: 1791340 - RNA, 19 nt, Artificial Sequence
  Description of Artificial Sequence: Synthetic oligonucleotide
acauuauagcuacuucuua

SEQ ID NO: 1791341 - RNA, 19 nt, Artificial Sequence
  Description of Artificial Sequence: Synthetic oligonucleotide
cuauagccaaguaaggaua

SEQ ID NO: 1791342 - RNA, 19 nt, Artificial Sequence
  Description of Artificial Sequence: Synthetic oligonucleotide
ugccuuuagaaagggcaag

SEQ ID NO: 1791343 - RNA, 19 nt, Artificial Sequence
  Description of Artificial Sequence: Synthetic oligonucleotide
uucuggaaucugcuagaac

SEQ ID NO: 1791344 - RNA, 19 nt, Artificial Sequence
  Description of Artificial Sequence: Synthetic oligonucleotide
uccccuccccaucaagucc

SEQ ID NO: 1791345 - RNA, 19 nt, Artificial Sequence
  Description of Artificial Sequence: Synthetic oligonucleotide
gauauaucguuauccacuu

SEQ ID NO: 1791346 - RNA, 19 nt, Artificial Sequence
  Description of Artificial Sequence: Synthetic oligonucleotide
aaguccaagcggcacucaa

SEQ ID NO: 1791347 - RNA, 19 nt, Artificial Sequence
  Description of Artificial Sequence: Synthetic oligonucleotide
uccucuacaaaggcccacc

SEQ ID NO: 1791348 - RNA, 19 nt, Artificial Sequence
  Description of Artificial Sequence: Synthetic oligonucleotide
gauucuauucuggaaauuu

SEQ ID NO: 1791349 - RNA, 19 nt, Artificial Sequence
  Description of Artificial Sequence: Synthetic oligonucleotide
acagcgaagaggaugccca

SEQ ID NO: 1791350 - RNA, 19 nt, Artificial Sequence
  Description of Artificial Sequence: Synthetic oligonucleotide
uucugaccccagaaaggug

SEQ ID NO: 1791351 - RNA, 19 nt, Artificial Sequence
  Description of Artificial Sequence: Synthetic oligonucleotide
gucagcuacccucuacuac

SEQ ID NO: 1791352 - RNA, 19 nt, Artificial Sequence
  Description of Artificial Sequence: Synthetic oligonucleotide
ucaaacccaggcuugccuu

SEQ ID NO: 1791353 - RNA, 19 nt, Artificial Sequence
  Description of Artificial Sequence: Synthetic oligonucleotide
uagccaaguaaggauaaua

SEQ ID NO: 1791354 - RNA, 19 nt, Artificial Sequence
  Description of Artificial Sequence: Synthetic oligonucleotide
uucugaggggacacggauc

SEQ ID NO: 1791355 - RNA, 19 nt, Artificial Sequence
  Description of Artificial Sequence: Synthetic oligonucleotide
uggguuucuugcccaaguc

SEQ ID NO: 1791356 - RNA, 19 nt, Artificial Sequence
  Description of Artificial Sequence: Synthetic oligonucleotide
aaggaaaacuucacgcgua

SEQ ID NO: 1791357 - RNA, 19 nt, Artificial Sequence
  Description of Artificial Sequence: Synthetic oligonucleotide
uacccucuacuacuccagc

SEQ ID NO: 1791358 - RNA, 19 nt, Artificial Sequence
  Description of Artificial Sequence: Synthetic oligonucleotide
cuaccugggcaaccgagac

SEQ ID NO: 1791359 - RNA, 19 nt, Artificial Sequence
  Description of Artificial Sequence: Synthetic oligonucleotide
ucaagggcugaaucacuuc

SEQ ID NO: 1791360 - RNA, 19 nt, Artificial Sequence
  Description of Artificial Sequence: Synthetic oligonucleotide
uuucuaccugggcaaccga

SEQ ID NO: 1791361 - RNA, 19 nt, Artificial Sequence
  Description of Artificial Sequence: Synthetic oligonucleotide
agucaguauuaaggugccc

SEQ ID NO: 1791362 - RNA, 19 nt, Artificial Sequence
  Description of Artificial Sequence: Synthetic oligonucleotide
uggaaauuuggaggggaaa

SEQ ID NO: 1791363 - RNA, 19 nt, Artificial Sequence
  Description of Artificial Sequence: Synthetic oligonucleotide
ccaaguaaggauaauauau

SEQ ID NO: 1791364 - RNA, 19 nt, Artificial Sequence
  Description of Artificial Sequence: Synthetic oligonucleotide
agggcaaguuuaacagccc

SEQ ID NO: 1791365 - RNA, 19 nt, Artificial Sequence
  Description of Artificial Sequence: Synthetic oligonucleotide
acauggacacuuuguugga

SEQ ID NO: 1791366 - RNA, 19 nt, Artificial Sequence
  Description of Artificial Sequence: Synthetic oligonucleotide
ugugacuccccuccccauc

SEQ ID NO: 1791367 - RNA, 19 nt, Artificial Sequence
  Description of Artificial Sequence: Synthetic oligonucleotide
caagaccacaacaaacuua

SEQ ID NO: 1791368 - RNA, 19 nt, Artificial Sequence
  Description of Artificial Sequence: Synthetic oligonucleotide
gacgaggguuaagagucag

SEQ ID NO: 1791369 - RNA, 19 nt, Artificial Sequence
  Description of Artificial Sequence: Synthetic oligonucleotide
cuugcccaagucguaacug

SEQ ID NO: 1791370 - RNA, 19 nt, Artificial Sequence
  Description of Artificial Sequence: Synthetic oligonucleotide
aacccaggcuugccuuuag

SEQ ID NO: 1791371 - RNA, 19 nt, Artificial Sequence
  Description of Artificial Sequence: Synthetic oligonucleotide
uagaaagggcaaguuuaac

SEQ ID NO: 1791372 - RNA, 19 nt, Artificial Sequence
  Description of Artificial Sequence: Synthetic oligonucleotide
gacacugacaagucaguau

SEQ ID NO: 1791373 - RNA, 19 nt, Artificial Sequence
  Description of Artificial Sequence: Synthetic oligonucleotide
uucuugcccaagucguaac

SEQ ID NO: 1791374 - RNA, 19 nt, Artificial Sequence
  Description of Artificial Sequence: Synthetic oligonucleotide
aaggugcccuuccucuaca

SEQ ID NO: 1791375 - RNA, 19 nt, Artificial Sequence
  Description of Artificial Sequence: Synthetic oligonucleotide
uuacucacgcagccaccug

SEQ ID NO: 1791376 - RNA, 19 nt, Artificial Sequence
  Description of Artificial Sequence: Synthetic oligonucleotide
cuuuguuggauauaucguu

SEQ ID NO: 1791377 - RNA, 19 nt, Artificial Sequence
  Description of Artificial Sequence: Synthetic oligonucleotide
acccuuuugggaaugacuu

SEQ ID NO: 1791378 - RNA, 19 nt, Artificial Sequence
  Description of Artificial Sequence: Synthetic oligonucleotide
caccacgccgcccacaauc

SEQ ID NO: 1791379 - RNA, 19 nt, Artificial Sequence
  Description of Artificial Sequence: Synthetic oligonucleotide
agagcccgacagcucaaag

SEQ ID NO: 1791380 - RNA, 19 nt, Artificial Sequence
  Description of Artificial Sequence: Synthetic oligonucleotide
gggaaugacuucauucugc

SEQ ID NO: 1791381 - RNA, 19 nt, Artificial Sequence
  Description of Artificial Sequence: Synthetic oligonucleotide
uuaaggugcccuuccucua

SEQ ID NO: 1791382 - RNA, 19 nt, Artificial Sequence
  Description of Artificial Sequence: Synthetic oligonucleotide
ggauauaucguuauccacu

SEQ ID NO: 1791383 - RNA, 19 nt, Artificial Sequence
  Description of Artificial Sequence: Synthetic oligonucleotide
ucccacuauccccuaaguu

SEQ ID NO: 1791384 - RNA, 19 nt, Artificial Sequence
  Description of Artificial Sequence: Synthetic oligonucleotide
cuuaggcucuaaacugguc

SEQ ID NO: 1791385 - RNA, 19 nt, Artificial Sequence
  Description of Artificial Sequence: Synthetic oligonucleotide
gauggguuucuugcccaag

SEQ ID NO: 1791386 - RNA, 19 nt, Artificial Sequence
  Description of Artificial Sequence: Synthetic oligonucleotide
uugugcccgcucaggaaug

SEQ ID NO: 1791387 - RNA, 19 nt, Artificial Sequence
  Description of Artificial Sequence: Synthetic oligonucleotide
aagccuacucagccacaca

SEQ ID NO: 1791388 - RNA, 19 nt, Artificial Sequence
  Description of Artificial Sequence: Synthetic oligonucleotide
caagcggcacucaaggaaa

SEQ ID NO: 1791389 - RNA, 19 nt, Artificial Sequence
  Description of Artificial Sequence: Synthetic oligonucleotide
gucaguauuaaggugcccu

SEQ ID NO: 1791390 - RNA, 19 nt, Artificial Sequence
  Description of Artificial Sequence: Synthetic oligonucleotide
aggcuugccuuuagaaagg

SEQ ID NO: 1791391 - RNA, 19 nt, Artificial Sequence
  Description of Artificial Sequence: Synthetic oligonucleotide
acgaggguuaagagucagc

SEQ ID NO: 1791392 - RNA, 19 nt, Artificial Sequence
  Description of Artificial Sequence: Synthetic oligonucleotide
ugcgguacaccagcagcag

SEQ ID NO: 1791393 - RNA, 19 nt, Artificial Sequence
  Description of Artificial Sequence: Synthetic oligonucleotide
gguuaagagucagcuaccc

SEQ ID NO: 1791394 - RNA, 19 nt, Artificial Sequence
  Description of Artificial Sequence: Synthetic oligonucleotide
acgcguagaacucguuggu

SEQ ID NO: 1791395 - RNA, 19 nt, Artificial Sequence
  Description of Artificial Sequence: Synthetic oligonucleotide
caaguaaggauaauauauu

SEQ ID NO: 1791396 - RNA, 19 nt, Artificial Sequence
  Description of Artificial Sequence: Synthetic oligonucleotide
agguugugcccgcucagga

SEQ ID NO: 1791397 - RNA, 19 nt, Artificial Sequence
  Description of Artificial Sequence: Synthetic oligonucleotide
cugcuagaacauuauagcu

SEQ ID NO: 1791398 - RNA, 19 nt, Artificial Sequence
  Description of Artificial Sequence: Synthetic oligonucleotide
acuauccccuaaguuauau

SEQ ID NO: 1791399 - RNA, 19 nt, Artificial Sequence
  Description of Artificial Sequence: Synthetic oligonucleotide
uccaagcggcacucaagga

SEQ ID NO: 1791400 - RNA, 19 nt, Artificial Sequence
  Description of Artificial Sequence: Synthetic oligonucleotide
uauccacuucggaggguga

SEQ ID NO: 1791401 - RNA, 19 nt, Artificial Sequence
  Description of Artificial Sequence: Synthetic oligonucleotide
gugguuaucuacaggcauc

SEQ ID NO: 1791402 - RNA, 19 nt, Artificial Sequence
  Description of Artificial Sequence: Synthetic oligonucleotide
auccccuaaguuauauucu

SEQ ID NO: 1791403 - RNA, 19 nt, Artificial Sequence
  Description of Artificial Sequence: Synthetic oligonucleotide
ggaaauuuggaggggaaaa

SEQ ID NO: 1791404 - RNA, 19 nt, Artificial Sequence
  Description of Artificial Sequence: Synthetic oligonucleotide
ugagacccuuuugggaaug

SEQ ID NO: 1791405 - RNA, 19 nt, Artificial Sequence
  Description of Artificial Sequence: Synthetic oligonucleotide
aucccacuauccccuaagu

SEQ ID NO: 1791406 - RNA, 19 nt, Artificial Sequence
  Description of Artificial Sequence: Synthetic oligonucleotide
aguccaagcggcacucaag

SEQ ID NO: 1791407 - RNA, 19 nt, Artificial Sequence
  Description of Artificial Sequence: Synthetic oligonucleotide
cugagccaacaugaaacug

SEQ ID NO: 1791408 - RNA, 19 nt, Artificial Sequence
  Description of Artificial Sequence: Synthetic oligonucleotide
caaccgagacaagaagaug

SEQ ID NO: 1791409 - RNA, 19 nt, Artificial Sequence
  Description of Artificial Sequence: Synthetic oligonucleotide
agcggcacucaaggaaaac

SEQ ID NO: 1791410 - RNA, 19 nt, Artificial Sequence
  Description of Artificial Sequence: Synthetic oligonucleotide
ucguaacugcccucauccu

SEQ ID NO: 1791411 - RNA, 19 nt, Artificial Sequence
  Description of Artificial Sequence: Synthetic oligonucleotide
acuuaggcucuaaacuggu

SEQ ID NO: 1791412 - RNA, 19 nt, Artificial Sequence
  Description of Artificial Sequence: Synthetic oligonucleotide
cagggaaggucuuggucuc

SEQ ID NO: 1791413 - RNA, 19 nt, Artificial Sequence
  Description of Artificial Sequence: Synthetic oligonucleotide
auguugccguccugggcag

SEQ ID NO: 1791414 - RNA, 19 nt, Artificial Sequence
  Description of Artificial Sequence: Synthetic oligonucleotide
acaagaacauguacacaaa

SEQ ID NO: 1791415 - RNA, 19 nt, Artificial Sequence
  Description of Artificial Sequence: Synthetic oligonucleotide
ccagcucaagcacaagaag

SEQ ID NO: 1791416 - RNA, 19 nt, Artificial Sequence
  Description of Artificial Sequence: Synthetic oligonucleotide
agaucuccagagcccgaca

SEQ ID NO: 1791417 - RNA, 19 nt, Artificial Sequence
  Description of Artificial Sequence: Synthetic oligonucleotide
ccccuaaguuauauucugg

SEQ ID NO: 1791418 - RNA, 19 nt, Artificial Sequence
  Description of Artificial Sequence: Synthetic oligonucleotide
agggaaggucuuggucucc

SEQ ID NO: 1791419 - RNA, 19 nt, Artificial Sequence
  Description of Artificial Sequence: Synthetic oligonucleotide
gggcaaccgagacaagaag

SEQ ID NO: 1791420 - RNA, 19 nt, Artificial Sequence
  Description of Artificial Sequence: Synthetic oligonucleotide
agucagcuacccucuacua

SEQ ID NO: 1791421 - RNA, 19 nt, Artificial Sequence
  Description of Artificial Sequence: Synthetic oligonucleotide
cccacuauccccuaaguua

SEQ ID NO: 1791422 - RNA, 19 nt, Artificial Sequence
  Description of Artificial Sequence: Synthetic oligonucleotide
aagucguaacugcccucau

SEQ ID NO: 1791423 - RNA, 19 nt, Artificial Sequence
  Description of Artificial Sequence: Synthetic oligonucleotide
uccacuucggagggugaga

SEQ ID NO: 1791424 - RNA, 19 nt, Artificial Sequence
  Description of Artificial Sequence: Synthetic oligonucleotide
augcgguacaccagcagca

SEQ ID NO: 1791425 - RNA, 19 nt, Artificial Sequence
  Description of Artificial Sequence: Synthetic oligonucleotide
agacagcgaagaggaugcc

SEQ ID NO: 1791426 - RNA, 19 nt, Artificial Sequence
  Description of Artificial Sequence: Synthetic oligonucleotide
acgccgcccacaaucaaag

SEQ ID NO: 1791427 - RNA, 19 nt, Artificial Sequence
  Description of Artificial Sequence: Synthetic oligonucleotide
cugaccccagaaaggugac

SEQ ID NO: 1791428 - RNA, 19 nt, Artificial Sequence
  Description of Artificial Sequence: Synthetic oligonucleotide
ccgcccacaaucaaagcug

SEQ ID NO: 1791429 - RNA, 19 nt, Artificial Sequence
  Description of Artificial Sequence: Synthetic oligonucleotide
gugacuccccuccccauca

SEQ ID NO: 1791430 - RNA, 19 nt, Artificial Sequence
  Description of Artificial Sequence: Synthetic oligonucleotide
uggaaucugcuagaacauu

SEQ ID NO: 1791431 - RNA, 19 nt, Artificial Sequence
  Description of Artificial Sequence: Synthetic oligonucleotide
gaggguuaagagucagcua

SEQ ID NO: 1791432 - RNA, 19 nt, Artificial Sequence
  Description of Artificial Sequence: Synthetic oligonucleotide
cacggaucccagguugugc

SEQ ID NO: 1791433 - RNA, 19 nt, Artificial Sequence
  Description of Artificial Sequence: Synthetic oligonucleotide
gaccucgguucucucaaaa

SEQ ID NO: 1791434 - RNA, 19 nt, Artificial Sequence
  Description of Artificial Sequence: Synthetic oligonucleotide
gaggggacacggaucccag

SEQ ID NO: 1791435 - RNA, 19 nt, Artificial Sequence
  Description of Artificial Sequence: Synthetic oligonucleotide
gagcccgacagcucaaagu

SEQ ID NO: 1791436 - RNA, 19 nt, Artificial Sequence
  Description of Artificial Sequence: Synthetic oligonucleotide
cuggaaauuuggaggggaa

SEQ ID NO: 1791437 - RNA, 19 nt, Artificial Sequence
  Description of Artificial Sequence: Synthetic oligonucleotide
cccuaaguuauauucugga

SEQ ID NO: 1791438 - RNA, 19 nt, Artificial Sequence
  Description of Artificial Sequence: Synthetic oligonucleotide
gcaacuucagaaagggcca

SEQ ID NO: 1791439 - RNA, 19 nt, Artificial Sequence
  Description of Artificial Sequence: Synthetic oligonucleotide
gaaucugcuagaacauuau

SEQ ID NO: 1791440 - RNA, 19 nt, Artificial Sequence
  Description of Artificial Sequence: Synthetic oligonucleotide
aagagucagcuacccucua

SEQ ID NO: 1791441 - RNA, 19 nt, Artificial Sequence
  Description of Artificial Sequence: Synthetic oligonucleotide
ggcucuaaacugguccuag

SEQ ID NO: 1791442 - RNA, 19 nt, Artificial Sequence
  Description of Artificial Sequence: Synthetic oligonucleotide
uuccucuacaaaggcccac

SEQ ID NO: 1791443 - RNA, 19 nt, Artificial Sequence
  Description of Artificial Sequence: Synthetic oligonucleotide
cagaucuccagagcccgac

SEQ ID NO: 1791444 - RNA, 19 nt, Artificial Sequence
  Description of Artificial Sequence: Synthetic oligonucleotide
auaucccacuauccccuaa

SEQ ID NO: 1791445 - RNA, 19 nt, Artificial Sequence
  Description of Artificial Sequence: Synthetic oligonucleotide
ggaaucugcuagaacauua

SEQ ID NO: 1791446 - RNA, 19 nt, Artificial Sequence
  Description of Artificial Sequence: Synthetic oligonucleotide
gcacucaaggaaaacuuca

SEQ ID NO: 1791447 - RNA, 19 nt, Artificial Sequence
  Description of Artificial Sequence: Synthetic oligonucleotide
cguuauccacuucggaggg

SEQ ID NO: 1791448 - RNA, 19 nt, Artificial Sequence
  Description of Artificial Sequence: Synthetic oligonucleotide
guugugcccgcucaggaau

SEQ ID NO: 1791449 - RNA, 19 nt, Artificial Sequence
  Description of Artificial Sequence: Synthetic oligonucleotide
ugaccccagaaaggugacc

SEQ ID NO: 1791450 - RNA, 19 nt, Artificial Sequence
  Description of Artificial Sequence: Synthetic oligonucleotide
cuucugaccccagaaaggu

SEQ ID NO: 1791451 - RNA, 19 nt, Artificial Sequence
  Description of Artificial Sequence: Synthetic oligonucleotide
cuuccucuacaaaggccca

SEQ ID NO: 1791452 - RNA, 19 nt, Artificial Sequence
  Description of Artificial Sequence: Synthetic oligonucleotide
ggcaggacgaggguuaaga

SEQ ID NO: 1791453 - RNA, 19 nt, Artificial Sequence
  Description of Artificial Sequence: Synthetic oligonucleotide
gccaaguaaggauaauaua

SEQ ID NO: 1791454 - RNA, 19 nt, Artificial Sequence
  Description of Artificial Sequence: Synthetic oligonucleotide
caggacgaggguuaagagu

SEQ ID NO: 1791455 - RNA, 19 nt, Artificial Sequence
  Description of Artificial Sequence: Synthetic oligonucleotide
agaccacaacaaacuuagg

SEQ ID NO: 1791456 - RNA, 19 nt, Artificial Sequence
  Description of Artificial Sequence: Synthetic oligonucleotide
ccuaaguuauauucuggaa

SEQ ID NO: 1791457 - RNA, 19 nt, Artificial Sequence
  Description of Artificial Sequence: Synthetic oligonucleotide
guauuaaggugcccuuccu

SEQ ID NO: 1791458 - RNA, 19 nt, Artificial Sequence
  Description of Artificial Sequence: Synthetic oligonucleotide
ggagggugagacccuuuug

SEQ ID NO: 1791459 - RNA, 19 nt, Artificial Sequence
  Description of Artificial Sequence: Synthetic oligonucleotide
cagcuacccucuacuacuc

SEQ ID NO: 1791460 - RNA, 19 nt, Artificial Sequence
  Description of Artificial Sequence: Synthetic oligonucleotide
aaacccaggcuugccuuua

SEQ ID NO: 1791461 - RNA, 19 nt, Artificial Sequence
  Description of Artificial Sequence: Synthetic oligonucleotide
ccuagauucuauucuggaa

SEQ ID NO: 1791462 - RNA, 19 nt, Artificial Sequence
  Description of Artificial Sequence: Synthetic oligonucleotide
auagccaaguaaggauaau

SEQ ID NO: 1791463 - RNA, 19 nt, Artificial Sequence
  Description of Artificial Sequence: Synthetic oligonucleotide
cgacagcucaaagucaucc

SEQ ID NO: 1791464 - RNA, 19 nt, Artificial Sequence
  Description of Artificial Sequence: Synthetic oligonucleotide
uucacgcguagaacucguu

SEQ ID NO: 1791465 - RNA, 19 nt, Artificial Sequence
  Description of Artificial Sequence: Synthetic oligonucleotide
ccugucugaagcuauaaau

SEQ ID NO: 1791466 - RNA, 19 nt, Artificial Sequence
  Description of Artificial Sequence: Synthetic oligonucleotide
cagcgaagaggaugcccac

SEQ ID NO: 1791467 - RNA, 19 nt, Artificial Sequence
  Description of Artificial Sequence: Synthetic oligonucleotide
ggguuaagagucagcuacc

SEQ ID NO: 1791468 - RNA, 19 nt, Artificial Sequence
  Description of Artificial Sequence: Synthetic oligonucleotide
cccucuacuacuccagcuc

SEQ ID NO: 1791469 - RNA, 19 nt, Artificial Sequence
  Description of Artificial Sequence: Synthetic oligonucleotide
ugcuggacauggacacuuu

SEQ ID NO: 1791470 - RNA, 19 nt, Artificial Sequence
  Description of Artificial Sequence: Synthetic oligonucleotide
gcgguacaccagcagcagg

SEQ ID NO: 1791471 - RNA, 19 nt, Artificial Sequence
  Description of Artificial Sequence: Synthetic oligonucleotide
ugugcccgcucaggaaugu

SEQ ID NO: 1791472 - RNA, 19 nt, Artificial Sequence
  Description of Artificial Sequence: Synthetic oligonucleotide
gagacacugacaagucagu

SEQ ID NO: 1791473 - RNA, 19 nt, Artificial Sequence
  Description of Artificial Sequence: Synthetic oligonucleotide
acccaggcuugccuuuaga

SEQ ID NO: 1791474 - RNA, 19 nt, Artificial Sequence
  Description of Artificial Sequence: Synthetic oligonucleotide
caggaccucgguucucuca

SEQ ID NO: 1791475 - RNA, 19 nt, Artificial Sequence
  Description of Artificial Sequence: Synthetic oligonucleotide
cacugacaagucaguauua

SEQ ID NO: 1791476 - RNA, 19 nt, Artificial Sequence
  Description of Artificial Sequence: Synthetic oligonucleotide
ccaagcggcacucaaggaa

SEQ ID NO: 1791477 - RNA, 19 nt, Artificial Sequence
  Description of Artificial Sequence: Synthetic oligonucleotide
caccugagccaacaugaaa

SEQ ID NO: 1791478 - RNA, 19 nt, Artificial Sequence
  Description of Artificial Sequence: Synthetic oligonucleotide
caaaggcccaccauccaau

SEQ ID NO: 1791479 - RNA, 19 nt, Artificial Sequence
  Description of Artificial Sequence: Synthetic oligonucleotide
cucuacuacuccagcucaa

SEQ ID NO: 1791480 - RNA, 19 nt, Artificial Sequence
  Description of Artificial Sequence: Synthetic oligonucleotide
cacgccgcccacaaucaaa

SEQ ID NO: 1791481 - RNA, 19 nt, Artificial Sequence
  Description of Artificial Sequence: Synthetic oligonucleotide
caucaagggcugaaucacu

SEQ ID NO: 1791482 - RNA, 19 nt, Artificial Sequence
  Description of Artificial Sequence: Synthetic oligonucleotide
cuccagagcccgacagcuc

SEQ ID NO: 1791483 - RNA, 19 nt, Artificial Sequence
  Description of Artificial Sequence: Synthetic oligonucleotide
aagcggcacucaaggaaaa

SEQ ID NO: 1791484 - RNA, 19 nt, Artificial Sequence
  Description of Artificial Sequence: Synthetic oligonucleotide
ccaccauccaauccuguga

SEQ ID NO: 1791485 - RNA, 19 nt, Artificial Sequence
  Description of Artificial Sequence: Synthetic oligonucleotide
ugacuccccuccccaucaa

SEQ ID NO: 1791486 - RNA, 19 nt, Artificial Sequence
  Description of Artificial Sequence: Synthetic oligonucleotide
gcacaagaaggcaccagga

SEQ ID NO: 1791487 - RNA, 19 nt, Artificial Sequence
  Description of Artificial Sequence: Synthetic oligonucleotide
accacgccgcccacaauca

SEQ ID NO: 1791488 - RNA, 19 nt, Artificial Sequence
  Description of Artificial Sequence: Synthetic oligonucleotide
gccgcccacaaucaaagcu

SEQ ID NO: 1791489 - RNA, 19 nt, Artificial Sequence
  Description of Artificial Sequence: Synthetic oligonucleotide
aggugcccuuccucuacaa

SEQ ID NO: 1791490 - RNA, 19 nt, Artificial Sequence
  Description of Artificial Sequence: Synthetic oligonucleotide
cuucacgcguagaacucgu

SEQ ID NO: 1791491 - RNA, 19 nt, Artificial Sequence
  Description of Artificial Sequence: Synthetic oligonucleotide
ccucuacuacuccagcuca

SEQ ID NO: 1791492 - RNA, 19 nt, Artificial Sequence
  Description of Artificial Sequence: Synthetic oligonucleotide
gcucaagcacaagaaggca

SEQ ID NO: 1791493 - RNA, 19 nt, Artificial Sequence
  Description of Artificial Sequence: Synthetic oligonucleotide
uucggagggugagacccuu

SEQ ID NO: 1791494 - RNA, 19 nt, Artificial Sequence
  Description of Artificial Sequence: Synthetic oligonucleotide
gcucuaaacugguccuaga

SEQ ID NO: 1791495 - RNA, 19 nt, Artificial Sequence
  Description of Artificial Sequence: Synthetic oligonucleotide
ccguccugggcagugcugg

SEQ ID NO: 1791496 - RNA, 19 nt, Artificial Sequence
  Description of Artificial Sequence: Synthetic oligonucleotide
ggaaaacuucacgcguaga

SEQ ID NO: 1791497 - RNA, 19 nt, Artificial Sequence
  Description of Artificial Sequence: Synthetic oligonucleotide
ccacuucggagggugagac

SEQ ID NO: 1791498 - RNA, 19 nt, Artificial Sequence
  Description of Artificial Sequence: Synthetic oligonucleotide
cuagaacauuauagcuacu

SEQ ID NO: 1791499 - RNA, 19 nt, Artificial Sequence
  Description of Artificial Sequence: Synthetic oligonucleotide
ucggagggugagacccuuu

SEQ ID NO: 1791500 - RNA, 19 nt, Artificial Sequence
  Description of Artificial Sequence: Synthetic oligonucleotide
gacacggaucccagguugu

SEQ ID NO: 1791501 - RNA, 19 nt, Artificial Sequence
  Description of Artificial Sequence: Synthetic oligonucleotide
gaaucacuucagggaaggu

SEQ ID NO: 1791502 - RNA, 19 nt, Artificial Sequence
  Description of Artificial Sequence: Synthetic oligonucleotide
ccacuauccccuaaguuau

SEQ ID NO: 1791503 - RNA, 19 nt, Artificial Sequence
  Description of Artificial Sequence: Synthetic oligonucleotide
gcaaccgagacaagaagau

SEQ ID NO: 1791504 - RNA, 19 nt, Artificial Sequence
  Description of Artificial Sequence: Synthetic oligonucleotide
gguucugaggggacacgga

SEQ ID NO: 1791505 - RNA, 19 nt, Artificial Sequence
  Description of Artificial Sequence: Synthetic oligonucleotide
ggcaaguuuaacagccccu

SEQ ID NO: 1791506 - RNA, 19 nt, Artificial Sequence
  Description of Artificial Sequence: Synthetic oligonucleotide
cuauccccuaaguuauauu

SEQ ID NO: 1791507 - RNA, 19 nt, Artificial Sequence
  Description of Artificial Sequence: Synthetic oligonucleotide
aggcaggacgaggguuaag

SEQ ID NO: 1791508 - RNA, 19 nt, Artificial Sequence
  Description of Artificial Sequence: Synthetic oligonucleotide
gugagacccuuuugggaau

SEQ ID NO: 1791509 - RNA, 19 nt, Artificial Sequence
  Description of Artificial Sequence: Synthetic oligonucleotide
uguugccguccugggcagu

SEQ ID NO: 1791510 - RNA, 19 nt, Artificial Sequence
  Description of Artificial Sequence: Synthetic oligonucleotide
caaguuuaacagccccuuu

SEQ ID NO: 1791511 - RNA, 19 nt, Artificial Sequence
  Description of Artificial Sequence: Synthetic oligonucleotide
ccgagacaagaagaugauc

SEQ ID NO: 1791512 - RNA, 19 nt, Artificial Sequence
  Description of Artificial Sequence: Synthetic oligonucleotide
gcggcacucaaggaaaacu

SEQ ID NO: 1791513 - RNA, 19 nt, Artificial Sequence
  Description of Artificial Sequence: Synthetic oligonucleotide
cugcuccacuuccuuaggu

SEQ ID NO: 1791514 - RNA, 19 nt, Artificial Sequence
  Description of Artificial Sequence: Synthetic oligonucleotide
gccuuuagaaagggcaagu

SEQ ID NO: 1791515 - RNA, 19 nt, Artificial Sequence
  Description of Artificial Sequence: Synthetic oligonucleotide
cacuauccccuaaguuaua

SEQ ID NO: 1791516 - RNA, 19 nt, Artificial Sequence
  Description of Artificial Sequence: Synthetic oligonucleotide
gugcccgcucaggaaugug

SEQ ID NO: 1791517 - RNA, 19 nt, Artificial Sequence
  Description of Artificial Sequence: Synthetic oligonucleotide
caaguccaagcggcacuca

SEQ ID NO: 1791518 - RNA, 19 nt, Artificial Sequence
  Description of Artificial Sequence: Synthetic oligonucleotide
guuauccacuucggagggu

SEQ ID NO: 1791519 - RNA, 19 nt, Artificial Sequence
  Description of Artificial Sequence: Synthetic oligonucleotide
cuucggagggugagacccu

SEQ ID NO: 1791520 - RNA, 19 nt, Artificial Sequence
  Description of Artificial Sequence: Synthetic oligonucleotide
gcccacaaucaaagcugcc

SEQ ID NO: 1791521 - RNA, 19 nt, Artificial Sequence
  Description of Artificial Sequence: Synthetic oligonucleotide
ggacgaggguuaagaguca

SEQ ID NO: 1791522 - RNA, 19 nt, Artificial Sequence
  Description of Artificial Sequence: Synthetic oligonucleotide
agccaacaugaaacuggua

SEQ ID NO: 1791523 - RNA, 19 nt, Artificial Sequence
  Description of Artificial Sequence: Synthetic oligonucleotide
agcccugucugaagcuaua

SEQ ID NO: 1791524 - RNA, 19 nt, Artificial Sequence
  Description of Artificial Sequence: Synthetic oligonucleotide
cccgacagcucaaagucau

SEQ ID NO: 1791525 - RNA, 19 nt, Artificial Sequence
  Description of Artificial Sequence: Synthetic oligonucleotide
cccaagucguaacugcccu

SEQ ID NO: 1791526 - RNA, 19 nt, Artificial Sequence
  Description of Artificial Sequence: Synthetic oligonucleotide
cccugucugaagcuauaaa

SEQ ID NO: 1791527 - RNA, 19 nt, Artificial Sequence
  Description of Artificial Sequence: Synthetic oligonucleotide
gguuaucuacaggcaucaa

SEQ ID NO: 1791528 - RNA, 19 nt, Artificial Sequence
  Description of Artificial Sequence: Synthetic oligonucleotide
ccgcucaggaaugugguua

SEQ ID NO: 1791529 - RNA, 19 nt, Artificial Sequence
  Description of Artificial Sequence: Synthetic oligonucleotide
cgcguagaacucguuggug

SEQ ID NO: 1791530 - RNA, 19 nt, Artificial Sequence
  Description of Artificial Sequence: Synthetic oligonucleotide
ggacacuuuguuggauaua

SEQ ID NO: 1791531 - RNA, 19 nt, Artificial Sequence
  Description of Artificial Sequence: Synthetic oligonucleotide
gccuacucagccacacaaa

SEQ ID NO: 1791532 - RNA, 19 nt, Artificial Sequence
  Description of Artificial Sequence: Synthetic oligonucleotide
gcccgacagcucaaaguca

SEQ ID NO: 1791533 - RNA, 19 nt, Artificial Sequence
  Description of Artificial Sequence: Synthetic oligonucleotide
ccaagaccacaacaaacuu

SEQ ID NO: 1791534 - RNA, 19 nt, Artificial Sequence
  Description of Artificial Sequence: Synthetic oligonucleotide
cagagcccgacagcucaaa

SEQ ID NO: 1791535 - RNA, 19 nt, Artificial Sequence
  Description of Artificial Sequence: Synthetic oligonucleotide
ccaccugagccaacaugaa

SEQ ID NO: 1791536 - RNA, 19 nt, Artificial Sequence
  Description of Artificial Sequence: Synthetic oligonucleotide
caggcaucaagggcugaau

SEQ ID NO: 1791537 - RNA, 19 nt, Artificial Sequence
  Description of Artificial Sequence: Synthetic oligonucleotide
cuccaacucuucucucauu

SEQ ID NO: 1791538 - RNA, 19 nt, Artificial Sequence
  Description of Artificial Sequence: Synthetic oligonucleotide
ccagaucuccagagcccga

SEQ ID NO: 1791539 - RNA, 19 nt, Artificial Sequence
  Description of Artificial Sequence: Synthetic oligonucleotide
cugugacuccccuccccau

SEQ ID NO: 1791540 - RNA, 19 nt, Artificial Sequence
  Description of Artificial Sequence: Synthetic oligonucleotide
cgccgcccacaaucaaagc

SEQ ID NO: 1791541 - RNA, 19 nt, Artificial Sequence
  Description of Artificial Sequence: Synthetic oligonucleotide
cguaacugcccucauccuu

SEQ ID NO: 1791542 - RNA, 19 nt, Artificial Sequence
  Description of Artificial Sequence: Synthetic oligonucleotide
gcccgcucaggaauguggu

SEQ ID NO: 1791543 - RNA, 19 nt, Artificial Sequence
  Description of Artificial Sequence: Synthetic oligonucleotide
ccacuuccuuagguucuga

SEQ ID NO: 1791544 - RNA, 19 nt, Artificial Sequence
  Description of Artificial Sequence: Synthetic oligonucleotide
ccacgccgcccacaaucaa

SEQ ID NO: 1791545 - RNA, 19 nt, Artificial Sequence
  Description of Artificial Sequence: Synthetic oligonucleotide
cccgcucaggaaugugguu

SEQ ID NO: 1791546 - RNA, 19 nt, Artificial Sequence
  Description of Artificial Sequence: Synthetic oligonucleotide
ccaccacgccgcccacaau

SEQ ID NO: 1791547 - RNA, 19 nt, Artificial Sequence
  Description of Artificial Sequence: Synthetic oligonucleotide
uuuaaugagauuaaaggcu

SEQ ID NO: 1791548 - RNA, 19 nt, Artificial Sequence
  Description of Artificial Sequence: Synthetic oligonucleotide
auaacuggaagccagcccc

SEQ ID NO: 1791549 - RNA, 19 nt, Artificial Sequence
  Description of Artificial Sequence: Synthetic oligonucleotide
ugaaccaguaggaacaggg

SEQ ID NO: 1791550 - RNA, 19 nt, Artificial Sequence
  Description of Artificial Sequence: Synthetic oligonucleotide
uaagccaacaaguugaucu

SEQ ID NO: 1791551 - RNA, 19 nt, Artificial Sequence
  Description of Artificial Sequence: Synthetic oligonucleotide
aaccaguaggaacagggcc

SEQ ID NO: 1791552 - RNA, 19 nt, Artificial Sequence
  Description of Artificial Sequence: Synthetic oligonucleotide
aaaaggaugaggacugucc

SEQ ID NO: 1791553 - RNA, 19 nt, Artificial Sequence
  Description of Artificial Sequence: Synthetic oligonucleotide
aagggcagagcucaauacc

SEQ ID NO: 1791554 - RNA, 19 nt, Artificial Sequence
  Description of Artificial Sequence: Synthetic oligonucleotide
ugagucaccagucaggcga

SEQ ID NO: 1791555 - RNA, 19 nt, Artificial Sequence
  Description of Artificial Sequence: Synthetic oligonucleotide
agcacuagcccucaucucc

SEQ ID NO: 1791556 - RNA, 19 nt, Artificial Sequence
  Description of Artificial Sequence: Synthetic oligonucleotide
agggugguggaccacaucc

SEQ ID NO: 1791557 - RNA, 19 nt, Artificial Sequence
  Description of Artificial Sequence: Synthetic oligonucleotide
ugguaagccaacaaguuga

SEQ ID NO: 1791558 - RNA, 19 nt, Artificial Sequence
  Description of Artificial Sequence: Synthetic oligonucleotide
auugcuguggaugauaaag

SEQ ID NO: 1791559 - RNA, 19 nt, Artificial Sequence
  Description of Artificial Sequence: Synthetic oligonucleotide
cuugaaacuacuuauggga

SEQ ID NO: 1791560 - RNA, 19 nt, Artificial Sequence
  Description of Artificial Sequence: Synthetic oligonucleotide
augauaaaggauggcaucc

SEQ ID NO: 1791561 - RNA, 19 nt, Artificial Sequence
  Description of Artificial Sequence: Synthetic oligonucleotide
aacuacuuaugggaugucc

SEQ ID NO: 1791562 - RNA, 19 nt, Artificial Sequence
  Description of Artificial Sequence: Synthetic oligonucleotide
ucgaagaucaagcagugaa

SEQ ID NO: 1791563 - RNA, 19 nt, Artificial Sequence
  Description of Artificial Sequence: Synthetic oligonucleotide
aguaaagauagcacagucc

SEQ ID NO: 1791564 - RNA, 19 nt, Artificial Sequence
  Description of Artificial Sequence: Synthetic oligonucleotide
cucuuuaaugagauuaaag

SEQ ID NO: 1791565 - RNA, 19 nt, Artificial Sequence
  Description of Artificial Sequence: Synthetic oligonucleotide
ugagauuaaaggcuccugu

SEQ ID NO: 1791566 - RNA, 19 nt, Artificial Sequence
  Description of Artificial Sequence: Synthetic oligonucleotide
aauaccugagucaccaguc

SEQ ID NO: 1791567 - RNA, 19 nt, Artificial Sequence
  Description of Artificial Sequence: Synthetic oligonucleotide
uuuguccccuccaaguggg

SEQ ID NO: 1791568 - RNA, 19 nt, Artificial Sequence
  Description of Artificial Sequence: Synthetic oligonucleotide
agagcucaauaccugaguc

SEQ ID NO: 1791569 - RNA, 19 nt, Artificial Sequence
  Description of Artificial Sequence: Synthetic oligonucleotide
ugggauguccccauaacug

SEQ ID NO: 1791570 - RNA, 19 nt, Artificial Sequence
  Description of Artificial Sequence: Synthetic oligonucleotide
gacgauaccggcaggaagg

SEQ ID NO: 1791571 - RNA, 19 nt, Artificial Sequence
  Description of Artificial Sequence: Synthetic oligonucleotide
uccuguguauguuuugggg

SEQ ID NO: 1791572 - RNA, 19 nt, Artificial Sequence
  Description of Artificial Sequence: Synthetic oligonucleotide
acuacuuaugggauguccc

SEQ ID NO: 1791573 - RNA, 19 nt, Artificial Sequence
  Description of Artificial Sequence: Synthetic oligonucleotide
ugggacauagaaucugggg

SEQ ID NO: 1791574 - RNA, 19 nt, Artificial Sequence
  Description of Artificial Sequence: Synthetic oligonucleotide
auagcacaguccuuaguac

SEQ ID NO: 1791575 - RNA, 19 nt, Artificial Sequence
  Description of Artificial Sequence: Synthetic oligonucleotide
agggagggcacucuggugg

SEQ ID NO: 1791576 - RNA, 19 nt, Artificial Sequence
  Description of Artificial Sequence: Synthetic oligonucleotide
ugcguauucacucccgggc

SEQ ID NO: 1791577 - RNA, 19 nt, Artificial Sequence
  Description of Artificial Sequence: Synthetic oligonucleotide
gaugauaaaggauggcauc

SEQ ID NO: 1791578 - RNA, 19 nt, Artificial Sequence
  Description of Artificial Sequence: Synthetic oligonucleotide
aaagauagcacaguccuua

SEQ ID NO: 1791579 - RNA, 19 nt, Artificial Sequence
  Description of Artificial Sequence: Synthetic oligonucleotide
ugcaguugaaaccaggguu

SEQ ID NO: 1791580 - RNA, 19 nt, Artificial Sequence
  Description of Artificial Sequence: Synthetic oligonucleotide
uuuagcucuccggugacgg

SEQ ID NO: 1791581 - RNA, 19 nt, Artificial Sequence
  Description of Artificial Sequence: Synthetic oligonucleotide
auuuguccccuccaagugg

SEQ ID NO: 1791582 - RNA, 19 nt, Artificial Sequence
  Description of Artificial Sequence: Synthetic oligonucleotide
uccaggcauauucuagugg

SEQ ID NO: 1791583 - RNA, 19 nt, Artificial Sequence
  Description of Artificial Sequence: Synthetic oligonucleotide
gagauuaaaggcuccugug

SEQ ID NO: 1791584 - RNA, 19 nt, Artificial Sequence
  Description of Artificial Sequence: Synthetic oligonucleotide
ucaugucucuuuaaugaga

SEQ ID NO: 1791585 - RNA, 19 nt, Artificial Sequence
  Description of Artificial Sequence: Synthetic oligonucleotide
agugaccacucucacagag

SEQ ID NO: 1791586 - RNA, 19 nt, Artificial Sequence
  Description of Artificial Sequence: Synthetic oligonucleotide
gauagcacaguccuuagua

SEQ ID NO: 1791587 - RNA, 19 nt, Artificial Sequence
  Description of Artificial Sequence: Synthetic oligonucleotide
ugugaacugggcucaaccc

SEQ ID NO: 1791588 - RNA, 19 nt, Artificial Sequence
  Description of Artificial Sequence: Synthetic oligonucleotide
agaucaagcagugaaccag

SEQ ID NO: 1791589 - RNA, 19 nt, Artificial Sequence
  Description of Artificial Sequence: Synthetic oligonucleotide
gaggacugcaguugaaacc

SEQ ID NO: 1791590 - RNA, 19 nt, Artificial Sequence
  Description of Artificial Sequence: Synthetic oligonucleotide
aagaucaagcagugaacca

SEQ ID NO: 1791591 - RNA, 19 nt, Artificial Sequence
  Description of Artificial Sequence: Synthetic oligonucleotide
ucaagcagugaaccaguag

SEQ ID NO: 1791592 - RNA, 19 nt, Artificial Sequence
  Description of Artificial Sequence: Synthetic oligonucleotide
guugaucucacgcugccgc

SEQ ID NO: 1791593 - RNA, 19 nt, Artificial Sequence
  Description of Artificial Sequence: Synthetic oligonucleotide
uggagucaggacaagggca

SEQ ID NO: 1791594 - RNA, 19 nt, Artificial Sequence
  Description of Artificial Sequence: Synthetic oligonucleotide
accucuagccgccaccgcc

SEQ ID NO: 1791595 - RNA, 19 nt, Artificial Sequence
  Description of Artificial Sequence: Synthetic oligonucleotide
augagcagcagauguguuc

SEQ ID NO: 1791596 - RNA, 19 nt, Artificial Sequence
  Description of Artificial Sequence: Synthetic oligonucleotide
aguagcacuagcccucauc

SEQ ID NO: 1791597 - RNA, 19 nt, Artificial Sequence
  Description of Artificial Sequence: Synthetic oligonucleotide
uugaaacuacuuaugggau

SEQ ID NO: 1791598 - RNA, 19 nt, Artificial Sequence
  Description of Artificial Sequence: Synthetic oligonucleotide
augguaagccaacaaguug

SEQ ID NO: 1791599 - RNA, 19 nt, Artificial Sequence
  Description of Artificial Sequence: Synthetic oligonucleotide
aaugagauuaaaggcuccu

SEQ ID NO: 1791600 - RNA, 19 nt, Artificial Sequence
  Description of Artificial Sequence: Synthetic oligonucleotide
gaguaaagauagcacaguc

SEQ ID NO: 1791601 - RNA, 19 nt, Artificial Sequence
  Description of Artificial Sequence: Synthetic oligonucleotide
aagauagcacaguccuuag

SEQ ID NO: 1791602 - RNA, 19 nt, Artificial Sequence
  Description of Artificial Sequence: Synthetic oligonucleotide
aaggggaauggucucccag

SEQ ID NO: 1791603 - RNA, 19 nt, Artificial Sequence
  Description of Artificial Sequence: Synthetic oligonucleotide
ucuaccgccagcugccccg

SEQ ID NO: 1791604 - RNA, 19 nt, Artificial Sequence
  Description of Artificial Sequence: Synthetic oligonucleotide
aggguugcguauucacucc

SEQ ID NO: 1791605 - RNA, 19 nt, Artificial Sequence
  Description of Artificial Sequence: Synthetic oligonucleotide
ucaggacaagggcagagcu

SEQ ID NO: 1791606 - RNA, 19 nt, Artificial Sequence
  Description of Artificial Sequence: Synthetic oligonucleotide
uuaguacugccccucuuca

SEQ ID NO: 1791607 - RNA, 19 nt, Artificial Sequence
  Description of Artificial Sequence: Synthetic oligonucleotide
cuacuuaugggaugucccc

SEQ ID NO: 1791608 - RNA, 19 nt, Artificial Sequence
  Description of Artificial Sequence: Synthetic oligonucleotide
ugaggagucgaagaucaag

SEQ ID NO: 1791609 - RNA, 19 nt, Artificial Sequence
  Description of Artificial Sequence: Synthetic oligonucleotide
uauucuaguggggagggga

SEQ ID NO: 1791610 - RNA, 19 nt, Artificial Sequence
  Description of Artificial Sequence: Synthetic oligonucleotide
gaggagucgaagaucaagc

SEQ ID NO: 1791611 - RNA, 19 nt, Artificial Sequence
  Description of Artificial Sequence: Synthetic oligonucleotide
gugaguaaagauagcacag

SEQ ID NO: 1791612 - RNA, 19 nt, Artificial Sequence
  Description of Artificial Sequence: Synthetic oligonucleotide
uacagaccccugaagacca

SEQ ID NO: 1791613 - RNA, 19 nt, Artificial Sequence
  Description of Artificial Sequence: Synthetic oligonucleotide
aagcagaugagggguggcc

SEQ ID NO: 1791614 - RNA, 19 nt, Artificial Sequence
  Description of Artificial Sequence: Synthetic oligonucleotide
ucuccggugacggaaggcg

SEQ ID NO: 1791615 - RNA, 19 nt, Artificial Sequence
  Description of Artificial Sequence: Synthetic oligonucleotide
ggugaguaaagauagcaca

SEQ ID NO: 1791616 - RNA, 19 nt, Artificial Sequence
  Description of Artificial Sequence: Synthetic oligonucleotide
uaggguugcguauucacuc

SEQ ID NO: 1791617 - RNA, 19 nt, Artificial Sequence
  Description of Artificial Sequence: Synthetic oligonucleotide
ucaagagaagacgcugccg

SEQ ID NO: 1791618 - RNA, 19 nt, Artificial Sequence
  Description of Artificial Sequence: Synthetic oligonucleotide
cucacccuccugaugaggg

SEQ ID NO: 1791619 - RNA, 19 nt, Artificial Sequence
  Description of Artificial Sequence: Synthetic oligonucleotide
uugaguagcacuagcccuc

SEQ ID NO: 1791620 - RNA, 19 nt, Artificial Sequence
  Description of Artificial Sequence: Synthetic oligonucleotide
cauauucuaguggggaggg

SEQ ID NO: 1791621 - RNA, 19 nt, Artificial Sequence
  Description of Artificial Sequence: Synthetic oligonucleotide
caaguaacacccagccucc

SEQ ID NO: 1791622 - RNA, 19 nt, Artificial Sequence
  Description of Artificial Sequence: Synthetic oligonucleotide
uuaaaggcuccuguguaug

SEQ ID NO: 1791623 - RNA, 19 nt, Artificial Sequence
  Description of Artificial Sequence: Synthetic oligonucleotide
uaggaacagggccagcccc

SEQ ID NO: 1791624 - RNA, 19 nt, Artificial Sequence
  Description of Artificial Sequence: Synthetic oligonucleotide
gaguucauaguaguaggug

SEQ ID NO: 1791625 - RNA, 19 nt, Artificial Sequence
  Description of Artificial Sequence: Synthetic oligonucleotide
gauuaaaggcuccugugua

SEQ ID NO: 1791626 - RNA, 19 nt, Artificial Sequence
  Description of Artificial Sequence: Synthetic oligonucleotide
ucuugaagcagaugggauu

SEQ ID NO: 1791627 - RNA, 19 nt, Artificial Sequence
  Description of Artificial Sequence: Synthetic oligonucleotide
aguuuagcucuccggugac

SEQ ID NO: 1791628 - RNA, 19 nt, Artificial Sequence
  Description of Artificial Sequence: Synthetic oligonucleotide
ccaggcauauucuaguggg

SEQ ID NO: 1791629 - RNA, 19 nt, Artificial Sequence
  Description of Artificial Sequence: Synthetic oligonucleotide
cagugaaccaguaggaaca

SEQ ID NO: 1791630 - RNA, 19 nt, Artificial Sequence
  Description of Artificial Sequence: Synthetic oligonucleotide
uuaugggauguccccauaa

SEQ ID NO: 1791631 - RNA, 19 nt, Artificial Sequence
  Description of Artificial Sequence: Synthetic oligonucleotide
uguaaggaggcgguggugu

SEQ ID NO: 1791632 - RNA, 19 nt, Artificial Sequence
  Description of Artificial Sequence: Synthetic oligonucleotide
uccucuaccgccagcugcc

SEQ ID NO: 1791633 - RNA, 19 nt, Artificial Sequence
  Description of Artificial Sequence: Synthetic oligonucleotide
uugcguauucacucccggg

SEQ ID NO: 1791634 - RNA, 19 nt, Artificial Sequence
  Description of Artificial Sequence: Synthetic oligonucleotide
gggucugggacauagaauc

SEQ ID NO: 1791635 - RNA, 19 nt, Artificial Sequence
  Description of Artificial Sequence: Synthetic oligonucleotide
gaguguaaggaggcggugg

SEQ ID NO: 1791636 - RNA, 19 nt, Artificial Sequence
  Description of Artificial Sequence: Synthetic oligonucleotide
ugaguaaagauagcacagu

SEQ ID NO: 1791637 - RNA, 19 nt, Artificial Sequence
  Description of Artificial Sequence: Synthetic oligonucleotide
ucugguucaugucucuuua

SEQ ID NO: 1791638 - RNA, 19 nt, Artificial Sequence
  Description of Artificial Sequence: Synthetic oligonucleotide
guugcguauucacucccgg

SEQ ID NO: 1791639 - RNA, 19 nt, Artificial Sequence
  Description of Artificial Sequence: Synthetic oligonucleotide
gaguuuagcucuccgguga

SEQ ID NO: 1791640 - RNA, 19 nt, Artificial Sequence
  Description of Artificial Sequence: Synthetic oligonucleotide
uccacauuuguccccucca

SEQ ID NO: 1791641 - RNA, 19 nt, Artificial Sequence
  Description of Artificial Sequence: Synthetic oligonucleotide
cuagccgccaccgccaugg

SEQ ID NO: 1791642 - RNA, 19 nt, Artificial Sequence
  Description of Artificial Sequence: Synthetic oligonucleotide
augggauguccccauaacu

SEQ ID NO: 1791643 - RNA, 19 nt, Artificial Sequence
  Description of Artificial Sequence: Synthetic oligonucleotide
gugugaacugggcucaacc

SEQ ID NO: 1791644 - RNA, 19 nt, Artificial Sequence
  Description of Artificial Sequence: Synthetic oligonucleotide
uccaccuacagaccccuga

SEQ ID NO: 1791645 - RNA, 19 nt, Artificial Sequence
  Description of Artificial Sequence: Synthetic oligonucleotide
cagucaggcgacgauaccg

SEQ ID NO: 1791646 - RNA, 19 nt, Artificial Sequence
  Description of Artificial Sequence: Synthetic oligonucleotide
gaugaggacuguccagagc

SEQ ID NO: 1791647 - RNA, 19 nt, Artificial Sequence
  Description of Artificial Sequence: Synthetic oligonucleotide
gggacauagaaucugggga

SEQ ID NO: 1791648 - RNA, 19 nt, Artificial Sequence
  Description of Artificial Sequence: Synthetic oligonucleotide
uuccaggcauauucuagug

SEQ ID NO: 1791649 - RNA, 19 nt, Artificial Sequence
  Description of Artificial Sequence: Synthetic oligonucleotide
cauuuguccccuccaagug

SEQ ID NO: 1791650 - RNA, 19 nt, Artificial Sequence
  Description of Artificial Sequence: Synthetic oligonucleotide
aggacuguccagagcagcc

SEQ ID NO: 1791651 - RNA, 19 nt, Artificial Sequence
  Description of Artificial Sequence: Synthetic oligonucleotide
ggagucgaagaucaagcag

SEQ ID NO: 1791652 - RNA, 19 nt, Artificial Sequence
  Description of Artificial Sequence: Synthetic oligonucleotide
ggacauagaaucuggggac

SEQ ID NO: 1791653 - RNA, 19 nt, Artificial Sequence
  Description of Artificial Sequence: Synthetic oligonucleotide
agcagauguguucacugga

SEQ ID NO: 1791654 - RNA, 19 nt, Artificial Sequence
  Description of Artificial Sequence: Synthetic oligonucleotide
auaguaguaggugcagcag

SEQ ID NO: 1791655 - RNA, 19 nt, Artificial Sequence
  Description of Artificial Sequence: Synthetic oligonucleotide
gaaacuacuuaugggaugu

SEQ ID NO: 1791656 - RNA, 19 nt, Artificial Sequence
  Description of Artificial Sequence: Synthetic oligonucleotide
ucccucuugaaacuacuua

SEQ ID NO: 1791657 - RNA, 19 nt, Artificial Sequence
  Description of Artificial Sequence: Synthetic oligonucleotide
ugacggaaggcgcaacaac

SEQ ID NO: 1791658 - RNA, 19 nt, Artificial Sequence
  Description of Artificial Sequence: Synthetic oligonucleotide
agccagaaccaccagaguu

SEQ ID NO: 1791659 - RNA, 19 nt, Artificial Sequence
  Description of Artificial Sequence: Synthetic oligonucleotide
ugugccagggugguggacc

SEQ ID NO: 1791660 - RNA, 19 nt, Artificial Sequence
  Description of Artificial Sequence: Synthetic oligonucleotide
aaucuggggacaguacaca

SEQ ID NO: 1791661 - RNA, 19 nt, Artificial Sequence
  Description of Artificial Sequence: Synthetic oligonucleotide
ugauaaaggauggcaucca

SEQ ID NO: 1791662 - RNA, 19 nt, Artificial Sequence
  Description of Artificial Sequence: Synthetic oligonucleotide
gaaucuggggacaguacac

SEQ ID NO: 1791663 - RNA, 19 nt, Artificial Sequence
  Description of Artificial Sequence: Synthetic oligonucleotide
agaagacgcugccggacuc

SEQ ID NO: 1791664 - RNA, 19 nt, Artificial Sequence
  Description of Artificial Sequence: Synthetic oligonucleotide
cagauguguucacuggaag

SEQ ID NO: 1791665 - RNA, 19 nt, Artificial Sequence
  Description of Artificial Sequence: Synthetic oligonucleotide
aggagucgaagaucaagca

SEQ ID NO: 1791666 - RNA, 19 nt, Artificial Sequence
  Description of Artificial Sequence: Synthetic oligonucleotide
ucguuuccaaauugcuccc

SEQ ID NO: 1791667 - RNA, 19 nt, Artificial Sequence
  Description of Artificial Sequence: Synthetic oligonucleotide
ucaggcgacgauaccggca

SEQ ID NO: 1791668 - RNA, 19 nt, Artificial Sequence
  Description of Artificial Sequence: Synthetic oligonucleotide
cucaauaccugagucacca

SEQ ID NO: 1791669 - RNA, 19 nt, Artificial Sequence
  Description of Artificial Sequence: Synthetic oligonucleotide
guccccauaacuggaagcc

SEQ ID NO: 1791670 - RNA, 19 nt, Artificial Sequence
  Description of Artificial Sequence: Synthetic oligonucleotide
uggccaaguaacacccagc

SEQ ID NO: 1791671 - RNA, 19 nt, Artificial Sequence
  Description of Artificial Sequence: Synthetic oligonucleotide
guggccaaguaacacccag

SEQ ID NO: 1791672 - RNA, 19 nt, Artificial Sequence
  Description of Artificial Sequence: Synthetic oligonucleotide
aaguaacacccagccuccc

SEQ ID NO: 1791673 - RNA, 19 nt, Artificial Sequence
  Description of Artificial Sequence: Synthetic oligonucleotide
cagcucguuuccaaauugc

SEQ ID NO: 1791674 - RNA, 19 nt, Artificial Sequence
  Description of Artificial Sequence: Synthetic oligonucleotide
uaaaggcuccuguguaugu

SEQ ID NO: 1791675 - RNA, 19 nt, Artificial Sequence
  Description of Artificial Sequence: Synthetic oligonucleotide
caggcgacgauaccggcag

SEQ ID NO: 1791676 - RNA, 19 nt, Artificial Sequence
  Description of Artificial Sequence: Synthetic oligonucleotide
gaaccaguaggaacagggc

SEQ ID NO: 1791677 - RNA, 19 nt, Artificial Sequence
  Description of Artificial Sequence: Synthetic oligonucleotide
gacggaaggcgcaacaaca

SEQ ID NO: 1791678 - RNA, 19 nt, Artificial Sequence
  Description of Artificial Sequence: Synthetic oligonucleotide
caggcauauucuagugggg

SEQ ID NO: 1791679 - RNA, 19 nt, Artificial Sequence
  Description of Artificial Sequence: Synthetic oligonucleotide
gaagcagaugggauugcug

SEQ ID NO: 1791680 - RNA, 19 nt, Artificial Sequence
  Description of Artificial Sequence: Synthetic oligonucleotide
ucaauaccugagucaccag

SEQ ID NO: 1791681 - RNA, 19 nt, Artificial Sequence
  Description of Artificial Sequence: Synthetic oligonucleotide
accagucaggcgacgauac

SEQ ID NO: 1791682 - RNA, 19 nt, Artificial Sequence
  Description of Artificial Sequence: Synthetic oligonucleotide
aaggcgcaacaacagcuaa

SEQ ID NO: 1791683 - RNA, 19 nt, Artificial Sequence
  Description of Artificial Sequence: Synthetic oligonucleotide
uacuuaugggaugucccca

SEQ ID NO: 1791684 - RNA, 19 nt, Artificial Sequence
  Description of Artificial Sequence: Synthetic oligonucleotide
guagcacuagcccucaucu

SEQ ID NO: 1791685 - RNA, 19 nt, Artificial Sequence
  Description of Artificial Sequence: Synthetic oligonucleotide
aaacuacuuaugggauguc

SEQ ID NO: 1791686 - RNA, 19 nt, Artificial Sequence
  Description of Artificial Sequence: Synthetic oligonucleotide
uugaaggcgcugaggaguc

SEQ ID NO: 1791687 - RNA, 19 nt, Artificial Sequence
  Description of Artificial Sequence: Synthetic oligonucleotide
uaguacugccccucuucag

SEQ ID NO: 1791688 - RNA, 19 nt, Artificial Sequence
  Description of Artificial Sequence: Synthetic oligonucleotide
guaggaacagggccagccc

SEQ ID NO: 1791689 - RNA, 19 nt, Artificial Sequence
  Description of Artificial Sequence: Synthetic oligonucleotide
guucauaguaguaggugca

SEQ ID NO: 1791690 - RNA, 19 nt, Artificial Sequence
  Description of Artificial Sequence: Synthetic oligonucleotide
agcagaugggauugcugug

SEQ ID NO: 1791691 - RNA, 19 nt, Artificial Sequence
  Description of Artificial Sequence: Synthetic oligonucleotide
gcauauucuaguggggagg

SEQ ID NO: 1791692 - RNA, 19 nt, Artificial Sequence
  Description of Artificial Sequence: Synthetic oligonucleotide
acaagggcagagcucaaua

SEQ ID NO: 1791693 - RNA, 19 nt, Artificial Sequence
  Description of Artificial Sequence: Synthetic oligonucleotide
guaacacccagccucccuc

SEQ ID NO: 1791694 - RNA, 19 nt, Artificial Sequence
  Description of Artificial Sequence: Synthetic oligonucleotide
uggcucaccuucucuggag

SEQ ID NO: 1791695 - RNA, 19 nt, Artificial Sequence
  Description of Artificial Sequence: Synthetic oligonucleotide
augagauuaaaggcuccug

SEQ ID NO: 1791696 - RNA, 19 nt, Artificial Sequence
  Description of Artificial Sequence: Synthetic oligonucleotide
ccagaguucauaguaguag

SEQ ID NO: 1791697 - RNA, 19 nt, Artificial Sequence
  Description of Artificial Sequence: Synthetic oligonucleotide
acuuaugggauguccccau

SEQ ID NO: 1791698 - RNA, 19 nt, Artificial Sequence
  Description of Artificial Sequence: Synthetic oligonucleotide
ucccucaagagaagacgcu

SEQ ID NO: 1791699 - RNA, 19 nt, Artificial Sequence
  Description of Artificial Sequence: Synthetic oligonucleotide
ggugggaggaaacaccuuc

SEQ ID NO: 1791700 - RNA, 19 nt, Artificial Sequence
  Description of Artificial Sequence: Synthetic oligonucleotide
agauagcacaguccuuagu

SEQ ID NO: 1791701 - RNA, 19 nt, Artificial Sequence
  Description of Artificial Sequence: Synthetic oligonucleotide
ugaagcagaugggauugcu

SEQ ID NO: 1791702 - RNA, 19 nt, Artificial Sequence
  Description of Artificial Sequence: Synthetic oligonucleotide
aggcauauucuagugggga

SEQ ID NO: 1791703 - RNA, 19 nt, Artificial Sequence
  Description of Artificial Sequence: Synthetic oligonucleotide
ccugaguuuagcucuccgg

SEQ ID NO: 1791704 - RNA, 19 nt, Artificial Sequence
  Description of Artificial Sequence: Synthetic oligonucleotide
caaccucuagccgccaccg

SEQ ID NO: 1791705 - RNA, 19 nt, Artificial Sequence
  Description of Artificial Sequence: Synthetic oligonucleotide
gguaggguugcguauucac

SEQ ID NO: 1791706 - RNA, 19 nt, Artificial Sequence
  Description of Artificial Sequence: Synthetic oligonucleotide
ccagccucccucuugaaac

SEQ ID NO: 1791707 - RNA, 19 nt, Artificial Sequence
  Description of Artificial Sequence: Synthetic oligonucleotide
ugguggaccacauccucau

SEQ ID NO: 1791708 - RNA, 19 nt, Artificial Sequence
  Description of Artificial Sequence: Synthetic oligonucleotide
uauucacucccgggcacag

SEQ ID NO: 1791709 - RNA, 19 nt, Artificial Sequence
  Description of Artificial Sequence: Synthetic oligonucleotide
auucuaguggggaggggag

SEQ ID NO: 1791710 - RNA, 19 nt, Artificial Sequence
  Description of Artificial Sequence: Synthetic oligonucleotide
gacauagaaucuggggaca

SEQ ID NO: 1791711 - RNA, 19 nt, Artificial Sequence
  Description of Artificial Sequence: Synthetic oligonucleotide
ggaggacugcaguugaaac

SEQ ID NO: 1791712 - RNA, 19 nt, Artificial Sequence
  Description of Artificial Sequence: Synthetic oligonucleotide
uccagcucguuuccaaauu

SEQ ID NO: 1791713 - RNA, 19 nt, Artificial Sequence
  Description of Artificial Sequence: Synthetic oligonucleotide
cacagcagugaccacucuc

SEQ ID NO: 1791714 - RNA, 19 nt, Artificial Sequence
  Description of Artificial Sequence: Synthetic oligonucleotide
gcagaugggauugcugugg

SEQ ID NO: 1791715 - RNA, 19 nt, Artificial Sequence
  Description of Artificial Sequence: Synthetic oligonucleotide
uccuuaguacugccccucu

SEQ ID NO: 1791716 - RNA, 19 nt, Artificial Sequence
  Description of Artificial Sequence: Synthetic oligonucleotide
gaggacuguccagagcagc

SEQ ID NO: 1791717 - RNA, 19 nt, Artificial Sequence
  Description of Artificial Sequence: Synthetic oligonucleotide
gucagaguguaaggaggcg

SEQ ID NO: 1791718 - RNA, 19 nt, Artificial Sequence
  Description of Artificial Sequence: Synthetic oligonucleotide
acuagcccucaucuccuug

SEQ ID NO: 1791719 - RNA, 19 nt, Artificial Sequence
  Description of Artificial Sequence: Synthetic oligonucleotide
ugccggacucugcugcugc

SEQ ID NO: 1791720 - RNA, 19 nt, Artificial Sequence
  Description of Artificial Sequence: Synthetic oligonucleotide
uugaucucacgcugccgcu

SEQ ID NO: 1791721 - RNA, 19 nt, Artificial Sequence
  Description of Artificial Sequence: Synthetic oligonucleotide
cugccaaccucuagccgcc

SEQ ID NO: 1791722 - RNA, 19 nt, Artificial Sequence
  Description of Artificial Sequence: Synthetic oligonucleotide
aucuggggacaguacacaa

SEQ ID NO: 1791723 - RNA, 19 nt, Artificial Sequence
  Description of Artificial Sequence: Synthetic oligonucleotide
guccccuccaagugggcag

SEQ ID NO: 1791724 - RNA, 19 nt, Artificial Sequence
  Description of Artificial Sequence: Synthetic oligonucleotide
guaaggaggcgguggugug

SEQ ID NO: 1791725 - RNA, 19 nt, Artificial Sequence
  Description of Artificial Sequence: Synthetic oligonucleotide
ugccccaugguaagccaac

SEQ ID NO: 1791726 - RNA, 19 nt, Artificial Sequence
  Description of Artificial Sequence: Synthetic oligonucleotide
ccuuccaggcauauucuag

SEQ ID NO: 1791727 - RNA, 19 nt, Artificial Sequence
  Description of Artificial Sequence: Synthetic oligonucleotide
ccaaauugcucccucaaga

SEQ ID NO: 1791728 - RNA, 19 nt, Artificial Sequence
  Description of Artificial Sequence: Synthetic oligonucleotide
aaaggcuccuguguauguu

SEQ ID NO: 1791729 - RNA, 19 nt, Artificial Sequence
  Description of Artificial Sequence: Synthetic oligonucleotide
ccaacaaguugaucucacg

SEQ ID NO: 1791730 - RNA, 19 nt, Artificial Sequence
  Description of Artificial Sequence: Synthetic oligonucleotide
uaacacccagccucccucu

SEQ ID NO: 1791731 - RNA, 19 nt, Artificial Sequence
  Description of Artificial Sequence: Synthetic oligonucleotide
auauucuaguggggagggg

SEQ ID NO: 1791732 - RNA, 19 nt, Artificial Sequence
  Description of Artificial Sequence: Synthetic oligonucleotide
cugaguuuagcucuccggu

SEQ ID NO: 1791733 - RNA, 19 nt, Artificial Sequence
  Description of Artificial Sequence: Synthetic oligonucleotide
gaccccugaagaccacagc

SEQ ID NO: 1791734 - RNA, 19 nt, Artificial Sequence
  Description of Artificial Sequence: Synthetic oligonucleotide
acgauaccggcaggaaggg

SEQ ID NO: 1791735 - RNA, 19 nt, Artificial Sequence
  Description of Artificial Sequence: Synthetic oligonucleotide
guuuagcucuccggugacg

SEQ ID NO: 1791736 - RNA, 19 nt, Artificial Sequence
  Description of Artificial Sequence: Synthetic oligonucleotide
ccuacagaccccugaagac

SEQ ID NO: 1791737 - RNA, 19 nt, Artificial Sequence
  Description of Artificial Sequence: Synthetic oligonucleotide
uguuccugguggccaagua

SEQ ID NO: 1791738 - RNA, 19 nt, Artificial Sequence
  Description of Artificial Sequence: Synthetic oligonucleotide
ugaguagcacuagcccuca

SEQ ID NO: 1791739 - RNA, 19 nt, Artificial Sequence
  Description of Artificial Sequence: Synthetic oligonucleotide
guggaugauaaaggauggc

SEQ ID NO: 1791740 - RNA, 19 nt, Artificial Sequence
  Description of Artificial Sequence: Synthetic oligonucleotide
uuagcucuccggugacgga

SEQ ID NO: 1791741 - RNA, 19 nt, Artificial Sequence
  Description of Artificial Sequence: Synthetic oligonucleotide
agcucguuuccaaauugcu

SEQ ID NO: 1791742 - RNA, 19 nt, Artificial Sequence
  Description of Artificial Sequence: Synthetic oligonucleotide
gagggcacucuggugggag

SEQ ID NO: 1791743 - RNA, 19 nt, Artificial Sequence
  Description of Artificial Sequence: Synthetic oligonucleotide
ugggcucacccuccugaug

SEQ ID NO: 1791744 - RNA, 19 nt, Artificial Sequence
  Description of Artificial Sequence: Synthetic oligonucleotide
ggggugaguaaagauagca

SEQ ID NO: 1791745 - RNA, 19 nt, Artificial Sequence
  Description of Artificial Sequence: Synthetic oligonucleotide
cauggucccugcccggccc

SEQ ID NO: 1791746 - RNA, 19 nt, Artificial Sequence
  Description of Artificial Sequence: Synthetic oligonucleotide
ucacccuccugaugaggga

SEQ ID NO: 1791747 - RNA, 19 nt, Artificial Sequence
  Description of Artificial Sequence: Synthetic oligonucleotide
cuccggugacggaaggcgc

SEQ ID NO: 1791748 - RNA, 19 nt, Artificial Sequence
  Description of Artificial Sequence: Synthetic oligonucleotide
ggaggggucugggacauag

SEQ ID NO: 1791749 - RNA, 19 nt, Artificial Sequence
  Description of Artificial Sequence: Synthetic oligonucleotide
ggaggggcccacauggagg

SEQ ID NO: 1791750 - RNA, 19 nt, Artificial Sequence
  Description of Artificial Sequence: Synthetic oligonucleotide
gugaacugggcucaacccu

SEQ ID NO: 1791751 - RNA, 19 nt, Artificial Sequence
  Description of Artificial Sequence: Synthetic oligonucleotide
caccuacagaccccugaag

SEQ ID NO: 1791752 - RNA, 19 nt, Artificial Sequence
  Description of Artificial Sequence: Synthetic oligonucleotide
aaccaggguuguuccuggu

SEQ ID NO: 1791753 - RNA, 19 nt, Artificial Sequence
  Description of Artificial Sequence: Synthetic oligonucleotide
aucugguugaguagcacua

SEQ ID NO: 1791754 - RNA, 19 nt, Artificial Sequence
  Description of Artificial Sequence: Synthetic oligonucleotide
ccccauaacuggaagccag

SEQ ID NO: 1791755 - RNA, 19 nt, Artificial Sequence
  Description of Artificial Sequence: Synthetic oligonucleotide
agaccccugaagaccacag

SEQ ID NO: 1791756 - RNA, 19 nt, Artificial Sequence
  Description of Artificial Sequence: Synthetic oligonucleotide
gggcucacccuccugauga

SEQ ID NO: 1791757 - RNA, 19 nt, Artificial Sequence
  Description of Artificial Sequence: Synthetic oligonucleotide
ugcggaugagcagcagaug

SEQ ID NO: 1791758 - RNA, 19 nt, Artificial Sequence
  Description of Artificial Sequence: Synthetic oligonucleotide
caauaccugagucaccagu

SEQ ID NO: 1791759 - RNA, 19 nt, Artificial Sequence
  Description of Artificial Sequence: Synthetic oligonucleotide
agaguguaaggaggcggug

SEQ ID NO: 1791760 - RNA, 19 nt, Artificial Sequence
  Description of Artificial Sequence: Synthetic oligonucleotide
ugcugcggcgcccggugug

SEQ ID NO: 1791761 - RNA, 19 nt, Artificial Sequence
  Description of Artificial Sequence: Synthetic oligonucleotide
gggugaguaaagauagcac

SEQ ID NO: 1791762 - RNA, 19 nt, Artificial Sequence
  Description of Artificial Sequence: Synthetic oligonucleotide
agcagcagauguguucacu

SEQ ID NO: 1791763 - RNA, 19 nt, Artificial Sequence
  Description of Artificial Sequence: Synthetic oligonucleotide
gauugcuguggaugauaaa

SEQ ID NO: 1791764 - RNA, 19 nt, Artificial Sequence
  Description of Artificial Sequence: Synthetic oligonucleotide
agagguaggguugcguauu

SEQ ID NO: 1791765 - RNA, 19 nt, Artificial Sequence
  Description of Artificial Sequence: Synthetic oligonucleotide
gaauggucucccagaucug

SEQ ID NO: 1791766 - RNA, 19 nt, Artificial Sequence
  Description of Artificial Sequence: Synthetic oligonucleotide
gaaggcgcugaggagucga

SEQ ID NO: 1791767 - RNA, 19 nt, Artificial Sequence
  Description of Artificial Sequence: Synthetic oligonucleotide
augcggaugagcagcagau

SEQ ID NO: 1791768 - RNA, 19 nt, Artificial Sequence
  Description of Artificial Sequence: Synthetic oligonucleotide
gguugcguauucacucccg

SEQ ID NO: 1791769 - RNA, 19 nt, Artificial Sequence
  Description of Artificial Sequence: Synthetic oligonucleotide
aggaggacugcaguugaaa

SEQ ID NO: 1791770 - RNA, 19 nt, Artificial Sequence
  Description of Artificial Sequence: Synthetic oligonucleotide
ugugugaacugggcucaac

SEQ ID NO: 1791771 - RNA, 19 nt, Artificial Sequence
  Description of Artificial Sequence: Synthetic oligonucleotide
gauguccccauaacuggaa

SEQ ID NO: 1791772 - RNA, 19 nt, Artificial Sequence
  Description of Artificial Sequence: Synthetic oligonucleotide
cugggcucaacccugcucu

SEQ ID NO: 1791773 - RNA, 19 nt, Artificial Sequence
  Description of Artificial Sequence: Synthetic oligonucleotide
gaacugggcucaacccugc

SEQ ID NO: 1791774 - RNA, 19 nt, Artificial Sequence
  Description of Artificial Sequence: Synthetic oligonucleotide
ggcgcugaggagucgaaga

SEQ ID NO: 1791775 - RNA, 19 nt, Artificial Sequence
  Description of Artificial Sequence: Synthetic oligonucleotide
gagaagacgcugccggacu

SEQ ID NO: 1791776 - RNA, 19 nt, Artificial Sequence
  Description of Artificial Sequence: Synthetic oligonucleotide
uagcacuagcccucaucuc

SEQ ID NO: 1791777 - RNA, 19 nt, Artificial Sequence
  Description of Artificial Sequence: Synthetic oligonucleotide
gucaggcgacgauaccggc

SEQ ID NO: 1791778 - RNA, 19 nt, Artificial Sequence
  Description of Artificial Sequence: Synthetic oligonucleotide
cuaguggggaggggagggg

SEQ ID NO: 1791779 - RNA, 19 nt, Artificial Sequence
  Description of Artificial Sequence: Synthetic oligonucleotide
gaaggcgcaacaacagcua

SEQ ID NO: 1791780 - RNA, 19 nt, Artificial Sequence
  Description of Artificial Sequence: Synthetic oligonucleotide
gacgcugccggacucugcu

SEQ ID NO: 1791781 - RNA, 19 nt, Artificial Sequence
  Description of Artificial Sequence: Synthetic oligonucleotide
cagagcagcuggaugcgga

SEQ ID NO: 1791782 - RNA, 19 nt, Artificial Sequence
  Description of Artificial Sequence: Synthetic oligonucleotide
uccuugacuggcucaccuu

SEQ ID NO: 1791783 - RNA, 19 nt, Artificial Sequence
  Description of Artificial Sequence: Synthetic oligonucleotide
gcgguggugugccagggug

SEQ ID NO: 1791784 - RNA, 19 nt, Artificial Sequence
  Description of Artificial Sequence: Synthetic oligonucleotide
gccugaguuuagcucuccg

SEQ ID NO: 1791785 - RNA, 19 nt, Artificial Sequence
  Description of Artificial Sequence: Synthetic oligonucleotide
agaugggauugcuguggau

SEQ ID NO: 1791786 - RNA, 19 nt, Artificial Sequence
  Description of Artificial Sequence: Synthetic oligonucleotide
gcagagcucaauaccugag

SEQ ID NO: 1791787 - RNA, 19 nt, Artificial Sequence
  Description of Artificial Sequence: Synthetic oligonucleotide
ucuagccgccaccgccaug

SEQ ID NO: 1791788 - RNA, 19 nt, Artificial Sequence
  Description of Artificial Sequence: Synthetic oligonucleotide
uuguccccuccaagugggc

SEQ ID NO: 1791789 - RNA, 19 nt, Artificial Sequence
  Description of Artificial Sequence: Synthetic oligonucleotide
cccagaucugguugaguag

SEQ ID NO: 1791790 - RNA, 19 nt, Artificial Sequence
  Description of Artificial Sequence: Synthetic oligonucleotide
ugaagaccacagccuccuc

SEQ ID NO: 1791791 - RNA, 19 nt, Artificial Sequence
  Description of Artificial Sequence: Synthetic oligonucleotide
gccagaaccaccagaguuc

SEQ ID NO: 1791792 - RNA, 19 nt, Artificial Sequence
  Description of Artificial Sequence: Synthetic oligonucleotide
cccauaacuggaagccagc

SEQ ID NO: 1791793 - RNA, 19 nt, Artificial Sequence
  Description of Artificial Sequence: Synthetic oligonucleotide
ccgggcacagcucuugaag

SEQ ID NO: 1791794 - RNA, 19 nt, Artificial Sequence
  Description of Artificial Sequence: Synthetic oligonucleotide
ggugacggaaggcgcaaca

SEQ ID NO: 1791795 - RNA, 19 nt, Artificial Sequence
  Description of Artificial Sequence: Synthetic oligonucleotide
ggugugugaacugggcuca

SEQ ID NO: 1791796 - RNA, 19 nt, Artificial Sequence
  Description of Artificial Sequence: Synthetic oligonucleotide
caugccccaugguaagcca

SEQ ID NO: 1791797 - RNA, 19 nt, Artificial Sequence
  Description of Artificial Sequence: Synthetic oligonucleotide
cuggcccgagccaugccuc

SEQ ID NO: 1791798 - RNA, 19 nt, Artificial Sequence
  Description of Artificial Sequence: Synthetic oligonucleotide
gagucaccagucaggcgac

SEQ ID NO: 1791799 - RNA, 19 nt, Artificial Sequence
  Description of Artificial Sequence: Synthetic oligonucleotide
cucuccggugacggaaggc

SEQ ID NO: 1791800 - RNA, 19 nt, Artificial Sequence
  Description of Artificial Sequence: Synthetic oligonucleotide
guauucacucccgggcaca

SEQ ID NO: 1791801 - RNA, 19 nt, Artificial Sequence
  Description of Artificial Sequence: Synthetic oligonucleotide
ccaugguaagccaacaagu

SEQ ID NO: 1791802 - RNA, 19 nt, Artificial Sequence
  Description of Artificial Sequence: Synthetic oligonucleotide
caccagaguucauaguagu

SEQ ID NO: 1791803 - RNA, 19 nt, Artificial Sequence
  Description of Artificial Sequence: Synthetic oligonucleotide
ccaaccucuagccgccacc

SEQ ID NO: 1791804 - RNA, 19 nt, Artificial Sequence
  Description of Artificial Sequence: Synthetic oligonucleotide
cagaugggauugcugugga

SEQ ID NO: 1791805 - RNA, 19 nt, Artificial Sequence
  Description of Artificial Sequence: Synthetic oligonucleotide
accagaguucauaguagua

SEQ ID NO: 1791806 - RNA, 19 nt, Artificial Sequence
  Description of Artificial Sequence: Synthetic oligonucleotide
cauggaggaggacugcagu

SEQ ID NO: 1791807 - RNA, 19 nt, Artificial Sequence
  Description of Artificial Sequence: Synthetic oligonucleotide
guccuuaguacugccccuc

SEQ ID NO: 1791808 - RNA, 19 nt, Artificial Sequence
  Description of Artificial Sequence: Synthetic oligonucleotide
gcucguuuccaaauugcuc

SEQ ID NO: 1791809 - RNA, 19 nt, Artificial Sequence
  Description of Artificial Sequence: Synthetic oligonucleotide
gugguggaccacauccuca

SEQ ID NO: 1791810 - RNA, 19 nt, Artificial Sequence
  Description of Artificial Sequence: Synthetic oligonucleotide
guaggguugcguauucacu

SEQ ID NO: 1791811 - RNA, 19 nt, Artificial Sequence
  Description of Artificial Sequence: Synthetic oligonucleotide
agucaccagucaggcgacg

SEQ ID NO: 1791812 - RNA, 19 nt, Artificial Sequence
  Description of Artificial Sequence: Synthetic oligonucleotide
ggaugauaaaggauggcau

SEQ ID NO: 1791813 - RNA, 19 nt, Artificial Sequence
  Description of Artificial Sequence: Synthetic oligonucleotide
uggugggaggaaacaccuu

SEQ ID NO: 1791814 - RNA, 19 nt, Artificial Sequence
  Description of Artificial Sequence: Synthetic oligonucleotide
aggaaacaccuuccacauu

SEQ ID NO: 1791815 - RNA, 19 nt, Artificial Sequence
  Description of Artificial Sequence: Synthetic oligonucleotide
guaguaggugcagcagcca

SEQ ID NO: 1791816 - RNA, 19 nt, Artificial Sequence
  Description of Artificial Sequence: Synthetic oligonucleotide
cacauggaggaggacugca

SEQ ID NO: 1791817 - RNA, 19 nt, Artificial Sequence
  Description of Artificial Sequence: Synthetic oligonucleotide
ggacaguacacaaggggaa

SEQ ID NO: 1791818 - RNA, 19 nt, Artificial Sequence
  Description of Artificial Sequence: Synthetic oligonucleotide
ggauugcuguggaugauaa

SEQ ID NO: 1791819 - RNA, 19 nt, Artificial Sequence
  Description of Artificial Sequence: Synthetic oligonucleotide
gcguauucacucccgggca

SEQ ID NO: 1791820 - RNA, 19 nt, Artificial Sequence
  Description of Artificial Sequence: Synthetic oligonucleotide
cucaacccugcucugggcu

SEQ ID NO: 1791821 - RNA, 19 nt, Artificial Sequence
  Description of Artificial Sequence: Synthetic oligonucleotide
guguaaggaggcgguggug

SEQ ID NO: 1791822 - RNA, 19 nt, Artificial Sequence
  Description of Artificial Sequence: Synthetic oligonucleotide
aggcgcugaggagucgaag

SEQ ID NO: 1791823 - RNA, 19 nt, Artificial Sequence
  Description of Artificial Sequence: Synthetic oligonucleotide
aggcgacgauaccggcagg

SEQ ID NO: 1791824 - RNA, 19 nt, Artificial Sequence
  Description of Artificial Sequence: Synthetic oligonucleotide
gucaccagucaggcgacga

SEQ ID NO: 1791825 - RNA, 19 nt, Artificial Sequence
  Description of Artificial Sequence: Synthetic oligonucleotide
cuggcucaccuucucugga

SEQ ID NO: 1791826 - RNA, 19 nt, Artificial Sequence
  Description of Artificial Sequence: Synthetic oligonucleotide
acagaccccugaagaccac

SEQ ID NO: 1791827 - RNA, 19 nt, Artificial Sequence
  Description of Artificial Sequence: Synthetic oligonucleotide
ggcuccuguguauguuuug

SEQ ID NO: 1791828 - RNA, 19 nt, Artificial Sequence
  Description of Artificial Sequence: Synthetic oligonucleotide
ugccccucuucagggcucc

SEQ ID NO: 1791829 - RNA, 19 nt, Artificial Sequence
  Description of Artificial Sequence: Synthetic oligonucleotide
agguaggguugcguauuca

SEQ ID NO: 1791830 - RNA, 19 nt, Artificial Sequence
  Description of Artificial Sequence: Synthetic oligonucleotide
gcagaugagggguggccca

SEQ ID NO: 1791831 - RNA, 19 nt, Artificial Sequence
  Description of Artificial Sequence: Synthetic oligonucleotide
ugggauugcuguggaugau

SEQ ID NO: 1791832 - RNA, 19 nt, Artificial Sequence
  Description of Artificial Sequence: Synthetic oligonucleotide
gugacggaaggcgcaacaa

SEQ ID NO: 1791833 - RNA, 19 nt, Artificial Sequence
  Description of Artificial Sequence: Synthetic oligonucleotide
ccaguaggaacagggccag

SEQ ID NO: 1791834 - RNA, 19 nt, Artificial Sequence
  Description of Artificial Sequence: Synthetic oligonucleotide
cuuaugggauguccccaua

SEQ ID NO: 1791835 - RNA, 19 nt, Artificial Sequence
  Description of Artificial Sequence: Synthetic oligonucleotide
cgacgauaccggcaggaag

SEQ ID NO: 1791836 - RNA, 19 nt, Artificial Sequence
  Description of Artificial Sequence: Synthetic oligonucleotide
aucaagcagugaaccagua

SEQ ID NO: 1791837 - RNA, 19 nt, Artificial Sequence
  Description of Artificial Sequence: Synthetic oligonucleotide
acgcugccggacucugcug

SEQ ID NO: 1791838 - RNA, 19 nt, Artificial Sequence
  Description of Artificial Sequence: Synthetic oligonucleotide
aggcgcaacaacagcuaaa

SEQ ID NO: 1791839 - RNA, 19 nt, Artificial Sequence
  Description of Artificial Sequence: Synthetic oligonucleotide
gggcucaacccugcucugg

SEQ ID NO: 1791840 - RNA, 19 nt, Artificial Sequence
  Description of Artificial Sequence: Synthetic oligonucleotide
uccagcccuuccaggcaua

SEQ ID NO: 1791841 - RNA, 19 nt, Artificial Sequence
  Description of Artificial Sequence: Synthetic oligonucleotide
gcucaccuucucuggaguc

SEQ ID NO: 1791842 - RNA, 19 nt, Artificial Sequence
  Description of Artificial Sequence: Synthetic oligonucleotide
gggaauggucucccagauc

SEQ ID NO: 1791843 - RNA, 19 nt, Artificial Sequence
  Description of Artificial Sequence: Synthetic oligonucleotide
aucucacgcugccgcugcu

SEQ ID NO: 1791844 - RNA, 19 nt, Artificial Sequence
  Description of Artificial Sequence: Synthetic oligonucleotide
gcucacccuccugaugagg

SEQ ID NO: 1791845 - RNA, 19 nt, Artificial Sequence
  Description of Artificial Sequence: Synthetic oligonucleotide
aaggcgcugaggagucgaa

SEQ ID NO: 1791846 - RNA, 19 nt, Artificial Sequence
  Description of Artificial Sequence: Synthetic oligonucleotide
gcucaacccugcucugggc

SEQ ID NO: 1791847 - RNA, 19 nt, Artificial Sequence
  Description of Artificial Sequence: Synthetic oligonucleotide
agugggcagagcagcugga

SEQ ID NO: 1791848 - RNA, 19 nt, Artificial Sequence
  Description of Artificial Sequence: Synthetic oligonucleotide
ggcucacccuccugaugag

SEQ ID NO: 1791849 - RNA, 19 nt, Artificial Sequence
  Description of Artificial Sequence: Synthetic oligonucleotide
gaagacgcugccggacucu

SEQ ID NO: 1791850 - RNA, 19 nt, Artificial Sequence
  Description of Artificial Sequence: Synthetic oligonucleotide
cagggugguggaccacauc

SEQ ID NO: 1791851 - RNA, 19 nt, Artificial Sequence
  Description of Artificial Sequence: Synthetic oligonucleotide
gcucaauaccugagucacc

SEQ ID NO: 1791852 - RNA, 19 nt, Artificial Sequence
  Description of Artificial Sequence: Synthetic oligonucleotide
gccggacucugcugcugcg

SEQ ID NO: 1791853 - RNA, 19 nt, Artificial Sequence
  Description of Artificial Sequence: Synthetic oligonucleotide
ccagucaggcgacgauacc

SEQ ID NO: 1791854 - RNA, 19 nt, Artificial Sequence
  Description of Artificial Sequence: Synthetic oligonucleotide
ggcgacgauaccggcagga

SEQ ID NO: 1791855 - RNA, 19 nt, Artificial Sequence
  Description of Artificial Sequence: Synthetic oligonucleotide
gaggaggacugcaguugaa

SEQ ID NO: 1791856 - RNA, 19 nt, Artificial Sequence
  Description of Artificial Sequence: Synthetic oligonucleotide
cuccaccuacagaccccug

SEQ ID NO: 1791857 - RNA, 19 nt, Artificial Sequence
  Description of Artificial Sequence: Synthetic oligonucleotide
cccugccaaccucuagccg

SEQ ID NO: 1791858 - RNA, 19 nt, Artificial Sequence
  Description of Artificial Sequence: Synthetic oligonucleotide
ggggugugugaacugggcu

SEQ ID NO: 1791859 - RNA, 19 nt, Artificial Sequence
  Description of Artificial Sequence: Synthetic oligonucleotide
cuaccgccagcugccccgc

SEQ ID NO: 1791860 - RNA, 19 nt, Artificial Sequence
  Description of Artificial Sequence: Synthetic oligonucleotide
gcgagucuggguuccagcu

SEQ ID NO: 1791861 - RNA, 19 nt, Artificial Sequence
  Description of Artificial Sequence: Synthetic oligonucleotide
gacaagggcagagcucaau

SEQ ID NO: 1791862 - RNA, 19 nt, Artificial Sequence
  Description of Artificial Sequence: Synthetic oligonucleotide
gaugagcagcagauguguu

SEQ ID NO: 1791863 - RNA, 19 nt, Artificial Sequence
  Description of Artificial Sequence: Synthetic oligonucleotide
cgguggugugccagggugg

SEQ ID NO: 1791864 - RNA, 19 nt, Artificial Sequence
  Description of Artificial Sequence: Synthetic oligonucleotide
aggcuccuguguauguuuu

SEQ ID NO: 1791865 - RNA, 19 nt, Artificial Sequence
  Description of Artificial Sequence: Synthetic oligonucleotide
cagaccccugaagaccaca

SEQ ID NO: 1791866 - RNA, 19 nt, Artificial Sequence
  Description of Artificial Sequence: Synthetic oligonucleotide
gggauugcuguggaugaua

SEQ ID NO: 1791867 - RNA, 19 nt, Artificial Sequence
  Description of Artificial Sequence: Synthetic oligonucleotide
ggcaugccccaugguaagc

SEQ ID NO: 1791868 - RNA, 19 nt, Artificial Sequence
  Description of Artificial Sequence: Synthetic oligonucleotide
caccagucaggcgacgaua

SEQ ID NO: 1791869 - RNA, 19 nt, Artificial Sequence
  Description of Artificial Sequence: Synthetic oligonucleotide
cugccggacucugcugcug

SEQ ID NO: 1791870 - RNA, 19 nt, Artificial Sequence
  Description of Artificial Sequence: Synthetic oligonucleotide
cagggcgcgagucuggguu

SEQ ID NO: 1791871 - RNA, 19 nt, Artificial Sequence
  Description of Artificial Sequence: Synthetic oligonucleotide
uaccgccagcugccccgcc

SEQ ID NO: 1791872 - RNA, 19 nt, Artificial Sequence
  Description of Artificial Sequence: Synthetic oligonucleotide
cgcgagucuggguuccagc

SEQ ID NO: 1791873 - RNA, 19 nt, Artificial Sequence
  Description of Artificial Sequence: Synthetic oligonucleotide
ggcauccagggcgcgaguc

SEQ ID NO: 1791874 - RNA, 19 nt, Artificial Sequence
  Description of Artificial Sequence: Synthetic oligonucleotide
ggggaauggucucccagau

SEQ ID NO: 1791875 - RNA, 19 nt, Artificial Sequence
  Description of Artificial Sequence: Synthetic oligonucleotide
ccucuagccgccaccgcca

SEQ ID NO: 1791876 - RNA, 19 nt, Artificial Sequence
  Description of Artificial Sequence: Synthetic oligonucleotide
ugccaaccucuagccgcca

SEQ ID NO: 1791877 - RNA, 19 nt, Artificial Sequence
  Description of Artificial Sequence: Synthetic oligonucleotide
cagccucccucuugaaacu

SEQ ID NO: 1791878 - RNA, 19 nt, Artificial Sequence
  Description of Artificial Sequence: Synthetic oligonucleotide
ggauggcauccagggcgcg

SEQ ID NO: 1791879 - RNA, 19 nt, Artificial Sequence
  Description of Artificial Sequence: Synthetic oligonucleotide
agucuggguuccagcucgu

SEQ ID NO: 1791880 - RNA, 19 nt, Artificial Sequence
  Description of Artificial Sequence: Synthetic oligonucleotide
gccauggucccugcccggc

SEQ ID NO: 1791881 - RNA, 19 nt, Artificial Sequence
  Description of Artificial Sequence: Synthetic oligonucleotide
ggcucaccuucucuggagu

SEQ ID NO: 1791882 - RNA, 19 nt, Artificial Sequence
  Description of Artificial Sequence: Synthetic oligonucleotide
uagccgccaccgccauggu

SEQ ID NO: 1791883 - RNA, 19 nt, Artificial Sequence
  Description of Artificial Sequence: Synthetic oligonucleotide
gccaaguaacacccagccu

SEQ ID NO: 1791884 - RNA, 19 nt, Artificial Sequence
  Description of Artificial Sequence: Synthetic oligonucleotide
ccaccuacagaccccugaa

SEQ ID NO: 1791885 - RNA, 19 nt, Artificial Sequence
  Description of Artificial Sequence: Synthetic oligonucleotide
gccagggugguggaccaca

SEQ ID NO: 1791886 - RNA, 19 nt, Artificial Sequence
  Description of Artificial Sequence: Synthetic oligonucleotide
gggcacucuggugggagga

SEQ ID NO: 1791887 - RNA, 19 nt, Artificial Sequence
  Description of Artificial Sequence: Synthetic oligonucleotide
acccagccucccucuugaa

SEQ ID NO: 1791888 - RNA, 19 nt, Artificial Sequence
  Description of Artificial Sequence: Synthetic oligonucleotide
cgagucuggguuccagcuc

SEQ ID NO: 1791889 - RNA, 19 nt, Artificial Sequence
  Description of Artificial Sequence: Synthetic oligonucleotide
aggccucuucgcugcuguu

SEQ ID NO: 1791890 - RNA, 19 nt, Artificial Sequence
  Description of Artificial Sequence: Synthetic oligonucleotide
gcugcggcgcccggugugc

SEQ ID NO: 1791891 - RNA, 19 nt, Artificial Sequence
  Description of Artificial Sequence: Synthetic oligonucleotide
gugugccagggugguggac

SEQ ID NO: 1791892 - RNA, 19 nt, Artificial Sequence
  Description of Artificial Sequence: Synthetic oligonucleotide
gguggugugccaggguggu

SEQ ID NO: 1791893 - RNA, 19 nt, Artificial Sequence
  Description of Artificial Sequence: Synthetic oligonucleotide
cugccccgccccugccaac

SEQ ID NO: 1791894 - RNA, 19 nt, Artificial Sequence
  Description of Artificial Sequence: Synthetic oligonucleotide
gcugccccgccccugccaa

SEQ ID NO: 1791895 - RNA, 19 nt, Artificial Sequence
  Description of Artificial Sequence: Synthetic oligonucleotide
gcgcugaggagucgaagau

SEQ ID NO: 1791896 - RNA, 19 nt, Artificial Sequence
  Description of Artificial Sequence: Synthetic oligonucleotide
cgcugaggagucgaagauc

SEQ ID NO: 1791897 - RNA, 19 nt, Artificial Sequence
  Description of Artificial Sequence: Synthetic oligonucleotide
ggccagccccauggcaugc

SEQ ID NO: 1791898 - RNA, 19 nt, Artificial Sequence
  Description of Artificial Sequence: Synthetic oligonucleotide
gcgcgagucuggguuccag

SEQ ID NO: 1791899 - RNA, 19 nt, Artificial Sequence
  Description of Artificial Sequence: Synthetic oligonucleotide
cgauaccggcaggaagggg

SEQ ID NO: 1791900 - RNA, 19 nt, Artificial Sequence
  Description of Artificial Sequence: Synthetic oligonucleotide
gugugugaacugggcucaa

SEQ ID NO: 1791901 - RNA, 19 nt, Artificial Sequence
  Description of Artificial Sequence: Synthetic oligonucleotide
gcgacgauaccggcaggaa

SEQ ID NO: 1791902 - RNA, 19 nt, Artificial Sequence
  Description of Artificial Sequence: Synthetic oligonucleotide
cccagccucccucuugaaa

SEQ ID NO: 1791903 - RNA, 19 nt, Artificial Sequence
  Description of Artificial Sequence: Synthetic oligonucleotide
ccaccgccauggucccugc

SEQ ID NO: 1791904 - RNA, 19 nt, Artificial Sequence
  Description of Artificial Sequence: Synthetic oligonucleotide
gcugccggacucugcugcu

SEQ ID NO: 1791905 - RNA, 19 nt, Artificial Sequence
  Description of Artificial Sequence: Synthetic oligonucleotide
ggagggcacucugguggga

SEQ ID NO: 1791906 - RNA, 19 nt, Artificial Sequence
  Description of Artificial Sequence: Synthetic oligonucleotide
ggggaggggcccacaugga

SEQ ID NO: 1791907 - RNA, 19 nt, Artificial Sequence
  Description of Artificial Sequence: Synthetic oligonucleotide
ccugaugagggagggcacu

SEQ ID NO: 1791908 - RNA, 19 nt, Artificial Sequence
  Description of Artificial Sequence: Synthetic oligonucleotide
gcccuuccaggcauauucu

SEQ ID NO: 1791909 - RNA, 19 nt, Artificial Sequence
  Description of Artificial Sequence: Synthetic oligonucleotide
cucuagccgccaccgccau

SEQ ID NO: 1791910 - RNA, 19 nt, Artificial Sequence
  Description of Artificial Sequence: Synthetic oligonucleotide
ggcgguggugugccagggu

SEQ ID NO: 1791911 - RNA, 19 nt, Artificial Sequence
  Description of Artificial Sequence: Synthetic oligonucleotide
ggacaagggcagagcucaa

SEQ ID NO: 1791912 - RNA, 19 nt, Artificial Sequence
  Description of Artificial Sequence: Synthetic oligonucleotide
cccgggcacagcucuugaa

SEQ ID NO: 1791913 - RNA, 19 nt, Artificial Sequence
  Description of Artificial Sequence: Synthetic oligonucleotide
ccagccccaagggaggggu

SEQ ID NO: 1791914 - RNA, 19 nt, Artificial Sequence
  Description of Artificial Sequence: Synthetic oligonucleotide
gucuggguuccagcucguu

SEQ ID NO: 1791915 - RNA, 19 nt, Artificial Sequence
  Description of Artificial Sequence: Synthetic oligonucleotide
ccuuaguacugccccucuu

SEQ ID NO: 1791916 - RNA, 19 nt, Artificial Sequence
  Description of Artificial Sequence: Synthetic oligonucleotide
ggcgcgagucuggguucca

SEQ ID NO: 1791917 - RNA, 19 nt, Artificial Sequence
  Description of Artificial Sequence: Synthetic oligonucleotide
ccggugacggaaggcgcaa

SEQ ID NO: 1791918 - RNA, 19 nt, Artificial Sequence
  Description of Artificial Sequence: Synthetic oligonucleotide
cggugacggaaggcgcaac

SEQ ID NO: 1791919 - RNA, 19 nt, Artificial Sequence
  Description of Artificial Sequence: Synthetic oligonucleotide
cguuuccaaauugcucccu

SEQ ID NO: 1791920 - RNA, 19 nt, Artificial Sequence
  Description of Artificial Sequence: Synthetic oligonucleotide
ccauggcaugccccauggu

SEQ ID NO: 1791921 - RNA, 19 nt, Artificial Sequence
  Description of Artificial Sequence: Synthetic oligonucleotide
ccacagcagugaccacucu

SEQ ID NO: 1791922 - RNA, 19 nt, Artificial Sequence
  Description of Artificial Sequence: Synthetic oligonucleotide
cagcccuuccaggcauauu

SEQ ID NO: 1791923 - RNA, 19 nt, Artificial Sequence
  Description of Artificial Sequence: Synthetic oligonucleotide
gcccagggucagaguguaa

SEQ ID NO: 1791924 - RNA, 19 nt, Artificial Sequence
  Description of Artificial Sequence: Synthetic oligonucleotide
ccagggcgcgagucugggu

SEQ ID NO: 1791925 - RNA, 19 nt, Artificial Sequence
  Description of Artificial Sequence: Synthetic oligonucleotide
gccccucuucagggcucca

SEQ ID NO: 1791926 - RNA, 19 nt, Artificial Sequence
  Description of Artificial Sequence: Synthetic oligonucleotide
aaucaagaagaauccaugc

SEQ ID NO: 1791927 - RNA, 19 nt, Artificial Sequence
  Description of Artificial Sequence: Synthetic oligonucleotide
uuaacaauuggccacagga

SEQ ID NO: 1791928 - RNA, 19 nt, Artificial Sequence
  Description of Artificial Sequence: Synthetic oligonucleotide
cucuguaauauacagaccg

SEQ ID NO: 1791929 - RNA, 19 nt, Artificial Sequence
  Description of Artificial Sequence: Synthetic oligonucleotide
acuucaucaauccuggugg

SEQ ID NO: 1791930 - RNA, 19 nt, Artificial Sequence
  Description of Artificial Sequence: Synthetic oligonucleotide
uguaauauacagaccgucg

SEQ ID NO: 1791931 - RNA, 19 nt, Artificial Sequence
  Description of Artificial Sequence: Synthetic oligonucleotide
aacaauuggccacaggaag

SEQ ID NO: 1791932 - RNA, 19 nt, Artificial Sequence
  Description of Artificial Sequence: Synthetic oligonucleotide
uucaagauugcccacaggu

SEQ ID NO: 1791933 - RNA, 19 nt, Artificial Sequence
  Description of Artificial Sequence: Synthetic oligonucleotide
uagacaccaaucaagaaga

SEQ ID NO: 1791934 - RNA, 19 nt, Artificial Sequence
  Description of Artificial Sequence: Synthetic oligonucleotide
ugauagacagcuuggauga

SEQ ID NO: 1791935 - RNA, 19 nt, Artificial Sequence
  Description of Artificial Sequence: Synthetic oligonucleotide
uguguuacuucaucaaucc

SEQ ID NO: 1791936 - RNA, 19 nt, Artificial Sequence
  Description of Artificial Sequence: Synthetic oligonucleotide
uucucaggcuucaagauug

SEQ ID NO: 1791937 - RNA, 19 nt, Artificial Sequence
  Description of Artificial Sequence: Synthetic oligonucleotide
guagaagucagagauaacc

SEQ ID NO: 1791938 - RNA, 19 nt, Artificial Sequence
  Description of Artificial Sequence: Synthetic oligonucleotide
uuuauuuccagcucccugu

SEQ ID NO: 1791939 - RNA, 19 nt, Artificial Sequence
  Description of Artificial Sequence: Synthetic oligonucleotide
uagacuugcaggaaggcca

SEQ ID NO: 1791940 - RNA, 19 nt, Artificial Sequence
  Description of Artificial Sequence: Synthetic oligonucleotide
uaauauacagaccgucgag

SEQ ID NO: 1791941 - RNA, 19 nt, Artificial Sequence
  Description of Artificial Sequence: Synthetic oligonucleotide
uggucuaugguacuggugu

SEQ ID NO: 1791942 - RNA, 19 nt, Artificial Sequence
  Description of Artificial Sequence: Synthetic oligonucleotide
uguacacaacaucagguca

SEQ ID NO: 1791943 - RNA, 19 nt, Artificial Sequence
  Description of Artificial Sequence: Synthetic oligonucleotide
ucaggcuagaacuagugga

SEQ ID NO: 1791944 - RNA, 19 nt, Artificial Sequence
  Description of Artificial Sequence: Synthetic oligonucleotide
uccaugacugcucuuaaca

SEQ ID NO: 1791945 - RNA, 19 nt, Artificial Sequence
  Description of Artificial Sequence: Synthetic oligonucleotide
ucuucuaucccacauuauc

SEQ ID NO: 1791946 - RNA, 19 nt, Artificial Sequence
  Description of Artificial Sequence: Synthetic oligonucleotide
caucacauugcuuauugag

SEQ ID NO: 1791947 - RNA, 19 nt, Artificial Sequence
  Description of Artificial Sequence: Synthetic oligonucleotide
caaacccauauacacaucc

SEQ ID NO: 1791948 - RNA, 19 nt, Artificial Sequence
  Description of Artificial Sequence: Synthetic oligonucleotide
cugauagacagcuuggaug

SEQ ID NO: 1791949 - RNA, 19 nt, Artificial Sequence
  Description of Artificial Sequence: Synthetic oligonucleotide
uaguggagcauccaguggc

SEQ ID NO: 1791950 - RNA, 19 nt, Artificial Sequence
  Description of Artificial Sequence: Synthetic oligonucleotide
ugucugaagcuuaguagcg

SEQ ID NO: 1791951 - RNA, 19 nt, Artificial Sequence
  Description of Artificial Sequence: Synthetic oligonucleotide
auuaucuuguuucucugug

SEQ ID NO: 1791952 - RNA, 19 nt, Artificial Sequence
  Description of Artificial Sequence: Synthetic oligonucleotide
agugaacugaacuuguccu

SEQ ID NO: 1791953 - RNA, 19 nt, Artificial Sequence
  Description of Artificial Sequence: Synthetic oligonucleotide
agaagucagagauaaccag

SEQ ID NO: 1791954 - RNA, 19 nt, Artificial Sequence
  Description of Artificial Sequence: Synthetic oligonucleotide
uuggcucuguaauauacag

SEQ ID NO: 1791955 - RNA, 19 nt, Artificial Sequence
  Description of Artificial Sequence: Synthetic oligonucleotide
gaaggggcacuuuacaccc

SEQ ID NO: 1791956 - RNA, 19 nt, Artificial Sequence
  Description of Artificial Sequence: Synthetic oligonucleotide
uucaggcuagaacuagugg

SEQ ID NO: 1791957 - RNA, 19 nt, Artificial Sequence
  Description of Artificial Sequence: Synthetic oligonucleotide
auuccaguauguccaaccg

SEQ ID NO: 1791958 - RNA, 19 nt, Artificial Sequence
  Description of Artificial Sequence: Synthetic oligonucleotide
aucauagacuugcaggaag

SEQ ID NO: 1791959 - RNA, 19 nt, Artificial Sequence
  Description of Artificial Sequence: Synthetic oligonucleotide
aaccgguacuuugagggcc

SEQ ID NO: 1791960 - RNA, 19 nt, Artificial Sequence
  Description of Artificial Sequence: Synthetic oligonucleotide
gucagagauaaccagacga

SEQ ID NO: 1791961 - RNA, 19 nt, Artificial Sequence
  Description of Artificial Sequence: Synthetic oligonucleotide
ucaagguguuccuucaggc

SEQ ID NO: 1791962 - RNA, 19 nt, Artificial Sequence
  Description of Artificial Sequence: Synthetic oligonucleotide
cucuguaguguccucaagg

SEQ ID NO: 1791963 - RNA, 19 nt, Artificial Sequence
  Description of Artificial Sequence: Synthetic oligonucleotide
gacagcuuggaugaugggg

SEQ ID NO: 1791964 - RNA, 19 nt, Artificial Sequence
  Description of Artificial Sequence: Synthetic oligonucleotide
cugcucuuaacaauuggcc

SEQ ID NO: 1791965 - RNA, 19 nt, Artificial Sequence
  Description of Artificial Sequence: Synthetic oligonucleotide
auagacuugcaggaaggcc

SEQ ID NO: 1791966 - RNA, 19 nt, Artificial Sequence
  Description of Artificial Sequence: Synthetic oligonucleotide
caagauugcccacagguug

SEQ ID NO: 1791967 - RNA, 19 nt, Artificial Sequence
  Description of Artificial Sequence: Synthetic oligonucleotide
ugcaaggaggggcaaaccc

SEQ ID NO: 1791968 - RNA, 19 nt, Artificial Sequence
  Description of Artificial Sequence: Synthetic oligonucleotide
acaguuuggcucuccuugc

SEQ ID NO: 1791969 - RNA, 19 nt, Artificial Sequence
  Description of Artificial Sequence: Synthetic oligonucleotide
uguccuacgcaucucugcc

SEQ ID NO: 1791970 - RNA, 19 nt, Artificial Sequence
  Description of Artificial Sequence: Synthetic oligonucleotide
uuggggcuagacaagagcu

SEQ ID NO: 1791971 - RNA, 19 nt, Artificial Sequence
  Description of Artificial Sequence: Synthetic oligonucleotide
aagcuuaguagcgcucucc

SEQ ID NO: 1791972 - RNA, 19 nt, Artificial Sequence
  Description of Artificial Sequence: Synthetic oligonucleotide
aucaagaagaauccaugca

SEQ ID NO: 1791973 - RNA, 19 nt, Artificial Sequence
  Description of Artificial Sequence: Synthetic oligonucleotide
cuucuggggacacucacgg

SEQ ID NO: 1791974 - RNA, 19 nt, Artificial Sequence
  Description of Artificial Sequence: Synthetic oligonucleotide
cuuuggcucuguaauauac

SEQ ID NO: 1791975 - RNA, 19 nt, Artificial Sequence
  Description of Artificial Sequence: Synthetic oligonucleotide
gucucgaagugucugaagc

SEQ ID NO: 1791976 - RNA, 19 nt, Artificial Sequence
  Description of Artificial Sequence: Synthetic oligonucleotide
gaacuaguggagcauccag

SEQ ID NO: 1791977 - RNA, 19 nt, Artificial Sequence
  Description of Artificial Sequence: Synthetic oligonucleotide
cuuaucccagaguuguugc

SEQ ID NO: 1791978 - RNA, 19 nt, Artificial Sequence
  Description of Artificial Sequence: Synthetic oligonucleotide
aguauguccaaccgguacu

SEQ ID NO: 1791979 - RNA, 19 nt, Artificial Sequence
  Description of Artificial Sequence: Synthetic oligonucleotide
caucagaagauccugguca

SEQ ID NO: 1791980 - RNA, 19 nt, Artificial Sequence
  Description of Artificial Sequence: Synthetic oligonucleotide
cacaacaucaggucauggc

SEQ ID NO: 1791981 - RNA, 19 nt, Artificial Sequence
  Description of Artificial Sequence: Synthetic oligonucleotide
auacagaccgucgaggaag

SEQ ID NO: 1791982 - RNA, 19 nt, Artificial Sequence
  Description of Artificial Sequence: Synthetic oligonucleotide
ucuguaauauacagaccgu

SEQ ID NO: 1791983 - RNA, 19 nt, Artificial Sequence
  Description of Artificial Sequence: Synthetic oligonucleotide
auauacagaccgucgagga

SEQ ID NO: 1791984 - RNA, 19 nt, Artificial Sequence
  Description of Artificial Sequence: Synthetic oligonucleotide
uaacaauuggccacaggaa

SEQ ID NO: 1791985 - RNA, 19 nt, Artificial Sequence
  Description of Artificial Sequence: Synthetic oligonucleotide
uaugguacuggugucaguc

SEQ ID NO: 1791986 - RNA, 19 nt, Artificial Sequence
  Description of Artificial Sequence: Synthetic oligonucleotide
aagauugcccacagguugg

SEQ ID NO: 1791987 - RNA, 19 nt, Artificial Sequence
  Description of Artificial Sequence: Synthetic oligonucleotide
guaauauacagaccgucga

SEQ ID NO: 1791988 - RNA, 19 nt, Artificial Sequence
  Description of Artificial Sequence: Synthetic oligonucleotide
aucugguguacacaacauc

SEQ ID NO: 1791989 - RNA, 19 nt, Artificial Sequence
  Description of Artificial Sequence: Synthetic oligonucleotide
gaacuaccccuccugacag

SEQ ID NO: 1791990 - RNA, 19 nt, Artificial Sequence
  Description of Artificial Sequence: Synthetic oligonucleotide
ucugaagcuuaguagcgcu

SEQ ID NO: 1791991 - RNA, 19 nt, Artificial Sequence
  Description of Artificial Sequence: Synthetic oligonucleotide
ugaacugaacuuguccugc

SEQ ID NO: 1791992 - RNA, 19 nt, Artificial Sequence
  Description of Artificial Sequence: Synthetic oligonucleotide
uagaacuaguggagcaucc

SEQ ID NO: 1791993 - RNA, 19 nt, Artificial Sequence
  Description of Artificial Sequence: Synthetic oligonucleotide
gauaaccagacgaagcuuc

SEQ ID NO: 1791994 - RNA, 19 nt, Artificial Sequence
  Description of Artificial Sequence: Synthetic oligonucleotide
gaggggcaaacccauauac

SEQ ID NO: 1791995 - RNA, 19 nt, Artificial Sequence
  Description of Artificial Sequence: Synthetic oligonucleotide
uacuuugagggccuacaca

SEQ ID NO: 1791996 - RNA, 19 nt, Artificial Sequence
  Description of Artificial Sequence: Synthetic oligonucleotide
agaccgucgaggaaggggc

SEQ ID NO: 1791997 - RNA, 19 nt, Artificial Sequence
  Description of Artificial Sequence: Synthetic oligonucleotide
ucugacugggcagaggggc

SEQ ID NO: 1791998 - RNA, 19 nt, Artificial Sequence
  Description of Artificial Sequence: Synthetic oligonucleotide
uguccaaccgguacuuuga

SEQ ID NO: 1791999 - RNA, 19 nt, Artificial Sequence
  Description of Artificial Sequence: Synthetic oligonucleotide
cuguguuacuucaucaauc

SEQ ID NO: 1792000 - RNA, 19 nt, Artificial Sequence
  Description of Artificial Sequence: Synthetic oligonucleotide
cuuaguagcgcucuccuga

SEQ ID NO: 1792001 - RNA, 19 nt, Artificial Sequence
  Description of Artificial Sequence: Synthetic oligonucleotide
cagugaacugaacuugucc

SEQ ID NO: 1792002 - RNA, 19 nt, Artificial Sequence
  Description of Artificial Sequence: Synthetic oligonucleotide
augguacuggugucagucc

SEQ ID NO: 1792003 - RNA, 19 nt, Artificial Sequence
  Description of Artificial Sequence: Synthetic oligonucleotide
cucaagguguuccuucagg

SEQ ID NO: 1792004 - RNA, 19 nt, Artificial Sequence
  Description of Artificial Sequence: Synthetic oligonucleotide
ugccccaacaguuuggcuc

SEQ ID NO: 1792005 - RNA, 19 nt, Artificial Sequence
  Description of Artificial Sequence: Synthetic oligonucleotide
cuccuguaucuucacaucc

SEQ ID NO: 1792006 - RNA, 19 nt, Artificial Sequence
  Description of Artificial Sequence: Synthetic oligonucleotide
ugcuuccauagcuucagca

SEQ ID NO: 1792007 - RNA, 19 nt, Artificial Sequence
  Description of Artificial Sequence: Synthetic oligonucleotide
agucagagauaaccagacg

SEQ ID NO: 1792008 - RNA, 19 nt, Artificial Sequence
  Description of Artificial Sequence: Synthetic oligonucleotide
guuggggcuagacaagagc

SEQ ID NO: 1792009 - RNA, 19 nt, Artificial Sequence
  Description of Artificial Sequence: Synthetic oligonucleotide
auggccuaguuucaccauc

SEQ ID NO: 1792010 - RNA, 19 nt, Artificial Sequence
  Description of Artificial Sequence: Synthetic oligonucleotide
auagcuucagcagauguau

SEQ ID NO: 1792011 - RNA, 19 nt, Artificial Sequence
  Description of Artificial Sequence: Synthetic oligonucleotide
uuauugagagaggacugca

SEQ ID NO: 1792012 - RNA, 19 nt, Artificial Sequence
  Description of Artificial Sequence: Synthetic oligonucleotide
gagauaaccagacgaagcu

SEQ ID NO: 1792013 - RNA, 19 nt, Artificial Sequence
  Description of Artificial Sequence: Synthetic oligonucleotide
acacacaucuucguaguag

SEQ ID NO: 1792014 - RNA, 19 nt, Artificial Sequence
  Description of Artificial Sequence: Synthetic oligonucleotide
uggcaggucaucacauugc

SEQ ID NO: 1792015 - RNA, 19 nt, Artificial Sequence
  Description of Artificial Sequence: Synthetic oligonucleotide
cuucaggcuagaacuagug

SEQ ID NO: 1792016 - RNA, 19 nt, Artificial Sequence
  Description of Artificial Sequence: Synthetic oligonucleotide
cugguggcuaggcuuaucc

SEQ ID NO: 1792017 - RNA, 19 nt, Artificial Sequence
  Description of Artificial Sequence: Synthetic oligonucleotide
uccuacgcaucucugccug

SEQ ID NO: 1792018 - RNA, 19 nt, Artificial Sequence
  Description of Artificial Sequence: Synthetic oligonucleotide
ucacacacaucuucguagu

SEQ ID NO: 1792019 - RNA, 19 nt, Artificial Sequence
  Description of Artificial Sequence: Synthetic oligonucleotide
cuuaacaauuggccacagg

SEQ ID NO: 1792020 - RNA, 19 nt, Artificial Sequence
  Description of Artificial Sequence: Synthetic oligonucleotide
uucacauccacugcaguuc

SEQ ID NO: 1792021 - RNA, 19 nt, Artificial Sequence
  Description of Artificial Sequence: Synthetic oligonucleotide
uguccugcaaggaggggca

SEQ ID NO: 1792022 - RNA, 19 nt, Artificial Sequence
  Description of Artificial Sequence: Synthetic oligonucleotide
uccaaccgguacuuugagg

SEQ ID NO: 1792023 - RNA, 19 nt, Artificial Sequence
  Description of Artificial Sequence: Synthetic oligonucleotide
caucaucauagacuugcag

SEQ ID NO: 1792024 - RNA, 19 nt, Artificial Sequence
  Description of Artificial Sequence: Synthetic oligonucleotide
ugaagcuuaguagcgcucu

SEQ ID NO: 1792025 - RNA, 19 nt, Artificial Sequence
  Description of Artificial Sequence: Synthetic oligonucleotide
auguccaaccgguacuuug

SEQ ID NO: 1792026 - RNA, 19 nt, Artificial Sequence
  Description of Artificial Sequence: Synthetic oligonucleotide
gauguaucugcaaucucca

SEQ ID NO: 1792027 - RNA, 19 nt, Artificial Sequence
  Description of Artificial Sequence: Synthetic oligonucleotide
caggcuucaagauugccca

SEQ ID NO: 1792028 - RNA, 19 nt, Artificial Sequence
  Description of Artificial Sequence: Synthetic oligonucleotide
ucaagauugcccacagguu

SEQ ID NO: 1792029 - RNA, 19 nt, Artificial Sequence
  Description of Artificial Sequence: Synthetic oligonucleotide
aggacugcauguccagggg

SEQ ID NO: 1792030 - RNA, 19 nt, Artificial Sequence
  Description of Artificial Sequence: Synthetic oligonucleotide
gacagauccagggaggguc

SEQ ID NO: 1792031 - RNA, 19 nt, Artificial Sequence
  Description of Artificial Sequence: Synthetic oligonucleotide
acacauccauuccaguaug

SEQ ID NO: 1792032 - RNA, 19 nt, Artificial Sequence
  Description of Artificial Sequence: Synthetic oligonucleotide
uauugagagaggacugcau

SEQ ID NO: 1792033 - RNA, 19 nt, Artificial Sequence
  Description of Artificial Sequence: Synthetic oligonucleotide
guguacacaacaucagguc

SEQ ID NO: 1792034 - RNA, 19 nt, Artificial Sequence
  Description of Artificial Sequence: Synthetic oligonucleotide
uaggcuuaucccagaguug

SEQ ID NO: 1792035 - RNA, 19 nt, Artificial Sequence
  Description of Artificial Sequence: Synthetic oligonucleotide
uguagacaccaaucaagaa

SEQ ID NO: 1792036 - RNA, 19 nt, Artificial Sequence
  Description of Artificial Sequence: Synthetic oligonucleotide
aacuaguggagcauccagu

SEQ ID NO: 1792037 - RNA, 19 nt, Artificial Sequence
  Description of Artificial Sequence: Synthetic oligonucleotide
acgcuggcagcacuugccc

SEQ ID NO: 1792038 - RNA, 19 nt, Artificial Sequence
  Description of Artificial Sequence: Synthetic oligonucleotide
gugaacugaacuuguccug

SEQ ID NO: 1792039 - RNA, 19 nt, Artificial Sequence
  Description of Artificial Sequence: Synthetic oligonucleotide
acacucacggcccaucaga

SEQ ID NO: 1792040 - RNA, 19 nt, Artificial Sequence
  Description of Artificial Sequence: Synthetic oligonucleotide
acauccauuccaguauguc

SEQ ID NO: 1792041 - RNA, 19 nt, Artificial Sequence
  Description of Artificial Sequence: Synthetic oligonucleotide
uuuacacccuucagcuucu

SEQ ID NO: 1792042 - RNA, 19 nt, Artificial Sequence
  Description of Artificial Sequence: Synthetic oligonucleotide
uugcuuauugagagaggac

SEQ ID NO: 1792043 - RNA, 19 nt, Artificial Sequence
  Description of Artificial Sequence: Synthetic oligonucleotide
cuaguggagcauccagugg

SEQ ID NO: 1792044 - RNA, 19 nt, Artificial Sequence
  Description of Artificial Sequence: Synthetic oligonucleotide
uggcucuguaauauacaga

SEQ ID NO: 1792045 - RNA, 19 nt, Artificial Sequence
  Description of Artificial Sequence: Synthetic oligonucleotide
auguagacaccaaucaaga

SEQ ID NO: 1792046 - RNA, 19 nt, Artificial Sequence
  Description of Artificial Sequence: Synthetic oligonucleotide
caguauguccaaccgguac

SEQ ID NO: 1792047 - RNA, 19 nt, Artificial Sequence
  Description of Artificial Sequence: Synthetic oligonucleotide
agggagggucuucuauccc

SEQ ID NO: 1792048 - RNA, 19 nt, Artificial Sequence
  Description of Artificial Sequence: Synthetic oligonucleotide
aacaccuccacagccgccu

SEQ ID NO: 1792049 - RNA, 19 nt, Artificial Sequence
  Description of Artificial Sequence: Synthetic oligonucleotide
cuguaauauacagaccguc

SEQ ID NO: 1792050 - RNA, 19 nt, Artificial Sequence
  Description of Artificial Sequence: Synthetic oligonucleotide
uggccuaguuucaccaucu

SEQ ID NO: 1792051 - RNA, 19 nt, Artificial Sequence
  Description of Artificial Sequence: Synthetic oligonucleotide
aggcuagaacuaguggagc

SEQ ID NO: 1792052 - RNA, 19 nt, Artificial Sequence
  Description of Artificial Sequence: Synthetic oligonucleotide
aacaucaggucauggccua

SEQ ID NO: 1792053 - RNA, 19 nt, Artificial Sequence
  Description of Artificial Sequence: Synthetic oligonucleotide
aggcuuaucccagaguugu

SEQ ID NO: 1792054 - RNA, 19 nt, Artificial Sequence
  Description of Artificial Sequence: Synthetic oligonucleotide
aucuaccuccuucuuccuc

SEQ ID NO: 1792055 - RNA, 19 nt, Artificial Sequence
  Description of Artificial Sequence: Synthetic oligonucleotide
cccauauacacauccauuc

SEQ ID NO: 1792056 - RNA, 19 nt, Artificial Sequence
  Description of Artificial Sequence: Synthetic oligonucleotide
uggagcauccaguggccag

SEQ ID NO: 1792057 - RNA, 19 nt, Artificial Sequence
  Description of Artificial Sequence: Synthetic oligonucleotide
cucacggcccaucagaaga

SEQ ID NO: 1792058 - RNA, 19 nt, Artificial Sequence
  Description of Artificial Sequence: Synthetic oligonucleotide
agcgcucuccugaagcugc

SEQ ID NO: 1792059 - RNA, 19 nt, Artificial Sequence
  Description of Artificial Sequence: Synthetic oligonucleotide
gcucuuaacaauuggccac

SEQ ID NO: 1792060 - RNA, 19 nt, Artificial Sequence
  Description of Artificial Sequence: Synthetic oligonucleotide
cuguccuacgcaucucugc

SEQ ID NO: 1792061 - RNA, 19 nt, Artificial Sequence
  Description of Artificial Sequence: Synthetic oligonucleotide
ucucuguaguguccucaag

SEQ ID NO: 1792062 - RNA, 19 nt, Artificial Sequence
  Description of Artificial Sequence: Synthetic oligonucleotide
ugucagucccugcuuuaug

SEQ ID NO: 1792063 - RNA, 19 nt, Artificial Sequence
  Description of Artificial Sequence: Synthetic oligonucleotide
auagacagcuuggaugaug

SEQ ID NO: 1792064 - RNA, 19 nt, Artificial Sequence
  Description of Artificial Sequence: Synthetic oligonucleotide
agcuuaguagcgcucuccu

SEQ ID NO: 1792065 - RNA, 19 nt, Artificial Sequence
  Description of Artificial Sequence: Synthetic oligonucleotide
gacgacgcggucaucacac

SEQ ID NO: 1792066 - RNA, 19 nt, Artificial Sequence
  Description of Artificial Sequence: Synthetic oligonucleotide
cuucuaucccacauuaucu

SEQ ID NO: 1792067 - RNA, 19 nt, Artificial Sequence
  Description of Artificial Sequence: Synthetic oligonucleotide
cacuuuacacccuucagcu

SEQ ID NO: 1792068 - RNA, 19 nt, Artificial Sequence
  Description of Artificial Sequence: Synthetic oligonucleotide
cacaucuucguaguagcug

SEQ ID NO: 1792069 - RNA, 19 nt, Artificial Sequence
  Description of Artificial Sequence: Synthetic oligonucleotide
ucagcagauguaucugcaa

SEQ ID NO: 1792070 - RNA, 19 nt, Artificial Sequence
  Description of Artificial Sequence: Synthetic oligonucleotide
ucgaggaaggggcacuuua

SEQ ID NO: 1792071 - RNA, 19 nt, Artificial Sequence
  Description of Artificial Sequence: Synthetic oligonucleotide
acaauuggccacaggaagu

SEQ ID NO: 1792072 - RNA, 19 nt, Artificial Sequence
  Description of Artificial Sequence: Synthetic oligonucleotide
agauccuggucaucuggug

SEQ ID NO: 1792073 - RNA, 19 nt, Artificial Sequence
  Description of Artificial Sequence: Synthetic oligonucleotide
acggcccaucagaagaucc

SEQ ID NO: 1792074 - RNA, 19 nt, Artificial Sequence
  Description of Artificial Sequence: Synthetic oligonucleotide
cacauuaucuuguuucucu

SEQ ID NO: 1792075 - RNA, 19 nt, Artificial Sequence
  Description of Artificial Sequence: Synthetic oligonucleotide
uuaguagcgcucuccugaa

SEQ ID NO: 1792076 - RNA, 19 nt, Artificial Sequence
  Description of Artificial Sequence: Synthetic oligonucleotide
aagauccuggucaucuggu

SEQ ID NO: 1792077 - RNA, 19 nt, Artificial Sequence
  Description of Artificial Sequence: Synthetic oligonucleotide
cugacagauccagggaggg

SEQ ID NO: 1792078 - RNA, 19 nt, Artificial Sequence
  Description of Artificial Sequence: Synthetic oligonucleotide
cagaccgucgaggaagggg

SEQ ID NO: 1792079 - RNA, 19 nt, Artificial Sequence
  Description of Artificial Sequence: Synthetic oligonucleotide
ucuuaacaauuggccacag

SEQ ID NO: 1792080 - RNA, 19 nt, Artificial Sequence
  Description of Artificial Sequence: Synthetic oligonucleotide
uggaacuaccccuccugac

SEQ ID NO: 1792081 - RNA, 19 nt, Artificial Sequence
  Description of Artificial Sequence: Synthetic oligonucleotide
aggacuggaacuaccccuc

SEQ ID NO: 1792082 - RNA, 19 nt, Artificial Sequence
  Description of Artificial Sequence: Synthetic oligonucleotide
cuccaaaauguagacacca

SEQ ID NO: 1792083 - RNA, 19 nt, Artificial Sequence
  Description of Artificial Sequence: Synthetic oligonucleotide
uacacaacaucaggucaug

SEQ ID NO: 1792084 - RNA, 19 nt, Artificial Sequence
  Description of Artificial Sequence: Synthetic oligonucleotide
uccagggagggucuucuau

SEQ ID NO: 1792085 - RNA, 19 nt, Artificial Sequence
  Description of Artificial Sequence: Synthetic oligonucleotide
ucaauccugguggcuaggc

SEQ ID NO: 1792086 - RNA, 19 nt, Artificial Sequence
  Description of Artificial Sequence: Synthetic oligonucleotide
gacacucacggcccaucag

SEQ ID NO: 1792087 - RNA, 19 nt, Artificial Sequence
  Description of Artificial Sequence: Synthetic oligonucleotide
ucucaggcuucaagauugc

SEQ ID NO: 1792088 - RNA, 19 nt, Artificial Sequence
  Description of Artificial Sequence: Synthetic oligonucleotide
caacaaggccucauucuuc

SEQ ID NO: 1792089 - RNA, 19 nt, Artificial Sequence
  Description of Artificial Sequence: Synthetic oligonucleotide
ugguggcuaggcuuauccc

SEQ ID NO: 1792090 - RNA, 19 nt, Artificial Sequence
  Description of Artificial Sequence: Synthetic oligonucleotide
aggaggggcaaacccauau

SEQ ID NO: 1792091 - RNA, 19 nt, Artificial Sequence
  Description of Artificial Sequence: Synthetic oligonucleotide
gcggucaucacacacaucu

SEQ ID NO: 1792092 - RNA, 19 nt, Artificial Sequence
  Description of Artificial Sequence: Synthetic oligonucleotide
agggccuacacagcaguuc

SEQ ID NO: 1792093 - RNA, 19 nt, Artificial Sequence
  Description of Artificial Sequence: Synthetic oligonucleotide
gacgcuggcagcacuugcc

SEQ ID NO: 1792094 - RNA, 19 nt, Artificial Sequence
  Description of Artificial Sequence: Synthetic oligonucleotide
acacagcaguuccagaauu

SEQ ID NO: 1792095 - RNA, 19 nt, Artificial Sequence
  Description of Artificial Sequence: Synthetic oligonucleotide
cuugacgacgcggucauca

SEQ ID NO: 1792096 - RNA, 19 nt, Artificial Sequence
  Description of Artificial Sequence: Synthetic oligonucleotide
acacaacaucaggucaugg

SEQ ID NO: 1792097 - RNA, 19 nt, Artificial Sequence
  Description of Artificial Sequence: Synthetic oligonucleotide
guggcuaggcuuaucccag

SEQ ID NO: 1792098 - RNA, 19 nt, Artificial Sequence
  Description of Artificial Sequence: Synthetic oligonucleotide
gguggcuaggcuuauccca

SEQ ID NO: 1792099 - RNA, 19 nt, Artificial Sequence
  Description of Artificial Sequence: Synthetic oligonucleotide
ggaacuaccccuccugaca

SEQ ID NO: 1792100 - RNA, 19 nt, Artificial Sequence
  Description of Artificial Sequence: Synthetic oligonucleotide
agaggacugcauguccagg

SEQ ID NO: 1792101 - RNA, 19 nt, Artificial Sequence
  Description of Artificial Sequence: Synthetic oligonucleotide
agacagcuuggaugauggg

SEQ ID NO: 1792102 - RNA, 19 nt, Artificial Sequence
  Description of Artificial Sequence: Synthetic oligonucleotide
uggggcuagacaagagcuc

SEQ ID NO: 1792103 - RNA, 19 nt, Artificial Sequence
  Description of Artificial Sequence: Synthetic oligonucleotide
ggcacuuuacacccuucag

SEQ ID NO: 1792104 - RNA, 19 nt, Artificial Sequence
  Description of Artificial Sequence: Synthetic oligonucleotide
auguccaggggccaugguu

SEQ ID NO: 1792105 - RNA, 19 nt, Artificial Sequence
  Description of Artificial Sequence: Synthetic oligonucleotide
uggucaucugguguacaca

SEQ ID NO: 1792106 - RNA, 19 nt, Artificial Sequence
  Description of Artificial Sequence: Synthetic oligonucleotide
aggcuucaagauugcccac

SEQ ID NO: 1792107 - RNA, 19 nt, Artificial Sequence
  Description of Artificial Sequence: Synthetic oligonucleotide
agagaggacugcaugucca

SEQ ID NO: 1792108 - RNA, 19 nt, Artificial Sequence
  Description of Artificial Sequence: Synthetic oligonucleotide
cuaggcuuaucccagaguu

SEQ ID NO: 1792109 - RNA, 19 nt, Artificial Sequence
  Description of Artificial Sequence: Synthetic oligonucleotide
cuggucuaugguacuggug

SEQ ID NO: 1792110 - RNA, 19 nt, Artificial Sequence
  Description of Artificial Sequence: Synthetic oligonucleotide
gauccuggucaucuggugu

SEQ ID NO: 1792111 - RNA, 19 nt, Artificial Sequence
  Description of Artificial Sequence: Synthetic oligonucleotide
acucacggcccaucagaag

SEQ ID NO: 1792112 - RNA, 19 nt, Artificial Sequence
  Description of Artificial Sequence: Synthetic oligonucleotide
cauagcuucagcagaugua

SEQ ID NO: 1792113 - RNA, 19 nt, Artificial Sequence
  Description of Artificial Sequence: Synthetic oligonucleotide
aggggccagcuuuuggcag

SEQ ID NO: 1792114 - RNA, 19 nt, Artificial Sequence
  Description of Artificial Sequence: Synthetic oligonucleotide
gggccuacacagcaguucc

SEQ ID NO: 1792115 - RNA, 19 nt, Artificial Sequence
  Description of Artificial Sequence: Synthetic oligonucleotide
ucguaguagcugucaccag

SEQ ID NO: 1792116 - RNA, 19 nt, Artificial Sequence
  Description of Artificial Sequence: Synthetic oligonucleotide
gucugaagcuuaguagcgc

SEQ ID NO: 1792117 - RNA, 19 nt, Artificial Sequence
  Description of Artificial Sequence: Synthetic oligonucleotide
uaguagcgcucuccugaag

SEQ ID NO: 1792118 - RNA, 19 nt, Artificial Sequence
  Description of Artificial Sequence: Synthetic oligonucleotide
cagguuggggcuagacaag

SEQ ID NO: 1792119 - RNA, 19 nt, Artificial Sequence
  Description of Artificial Sequence: Synthetic oligonucleotide
uaaccagacgaagcuucug

SEQ ID NO: 1792120 - RNA, 19 nt, Artificial Sequence
  Description of Artificial Sequence: Synthetic oligonucleotide
gccugccuaaucuaccucc

SEQ ID NO: 1792121 - RNA, 19 nt, Artificial Sequence
  Description of Artificial Sequence: Synthetic oligonucleotide
gaagcuuaguagcgcucuc

SEQ ID NO: 1792122 - RNA, 19 nt, Artificial Sequence
  Description of Artificial Sequence: Synthetic oligonucleotide
cugaagcuuaguagcgcuc

SEQ ID NO: 1792123 - RNA, 19 nt, Artificial Sequence
  Description of Artificial Sequence: Synthetic oligonucleotide
aacuaccccuccugacaga

SEQ ID NO: 1792124 - RNA, 19 nt, Artificial Sequence
  Description of Artificial Sequence: Synthetic oligonucleotide
uccuuucagugaacugaac

SEQ ID NO: 1792125 - RNA, 19 nt, Artificial Sequence
  Description of Artificial Sequence: Synthetic oligonucleotide
cuacgcaucucugccugcc

SEQ ID NO: 1792126 - RNA, 19 nt, Artificial Sequence
  Description of Artificial Sequence: Synthetic oligonucleotide
ggucaucugguguacacaa

SEQ ID NO: 1792127 - RNA, 19 nt, Artificial Sequence
  Description of Artificial Sequence: Synthetic oligonucleotide
guccaaccgguacuuugag

SEQ ID NO: 1792128 - RNA, 19 nt, Artificial Sequence
  Description of Artificial Sequence: Synthetic oligonucleotide
cuccaugacugcucuuaac

SEQ ID NO: 1792129 - RNA, 19 nt, Artificial Sequence
  Description of Artificial Sequence: Synthetic oligonucleotide
uuacuucaucaauccuggu

SEQ ID NO: 1792130 - RNA, 19 nt, Artificial Sequence
  Description of Artificial Sequence: Synthetic oligonucleotide
aucuucguaguagcuguca

SEQ ID NO: 1792131 - RNA, 19 nt, Artificial Sequence
  Description of Artificial Sequence: Synthetic oligonucleotide
gaggggccagcuuuuggca

SEQ ID NO: 1792132 - RNA, 19 nt, Artificial Sequence
  Description of Artificial Sequence: Synthetic oligonucleotide
agguguuccuucaggcuag

SEQ ID NO: 1792133 - RNA, 19 nt, Artificial Sequence
  Description of Artificial Sequence: Synthetic oligonucleotide
ugcaaagcacuggucucga

SEQ ID NO: 1792134 - RNA, 19 nt, Artificial Sequence
  Description of Artificial Sequence: Synthetic oligonucleotide
uggugucagucccugcuuu

SEQ ID NO: 1792135 - RNA, 19 nt, Artificial Sequence
  Description of Artificial Sequence: Synthetic oligonucleotide
auaaccagacgaagcuucu

SEQ ID NO: 1792136 - RNA, 19 nt, Artificial Sequence
  Description of Artificial Sequence: Synthetic oligonucleotide
cagacgaagcuucuggucu

SEQ ID NO: 1792137 - RNA, 19 nt, Artificial Sequence
  Description of Artificial Sequence: Synthetic oligonucleotide
gacgcggucaucacacaca

SEQ ID NO: 1792138 - RNA, 19 nt, Artificial Sequence
  Description of Artificial Sequence: Synthetic oligonucleotide
ggggccaugguucauucuc

SEQ ID NO: 1792139 - RNA, 19 nt, Artificial Sequence
  Description of Artificial Sequence: Synthetic oligonucleotide
aggucaucacauugcuuau

SEQ ID NO: 1792140 - RNA, 19 nt, Artificial Sequence
  Description of Artificial Sequence: Synthetic oligonucleotide
acgcggucaucacacacau

SEQ ID NO: 1792141 - RNA, 19 nt, Artificial Sequence
  Description of Artificial Sequence: Synthetic oligonucleotide
ggucuucuaucccacauua

SEQ ID NO: 1792142 - RNA, 19 nt, Artificial Sequence
  Description of Artificial Sequence: Synthetic oligonucleotide
ggcuccgcaucauauccag

SEQ ID NO: 1792143 - RNA, 19 nt, Artificial Sequence
  Description of Artificial Sequence: Synthetic oligonucleotide
ggcuagaacuaguggagca

SEQ ID NO: 1792144 - RNA, 19 nt, Artificial Sequence
  Description of Artificial Sequence: Synthetic oligonucleotide
gcaacugguccaugaacug

SEQ ID NO: 1792145 - RNA, 19 nt, Artificial Sequence
  Description of Artificial Sequence: Synthetic oligonucleotide
aguggacgcuggcagcacu

SEQ ID NO: 1792146 - RNA, 19 nt, Artificial Sequence
  Description of Artificial Sequence: Synthetic oligonucleotide
gguaguggacgcuggcagc

SEQ ID NO: 1792147 - RNA, 19 nt, Artificial Sequence
  Description of Artificial Sequence: Synthetic oligonucleotide
cacauugcuuauugagaga

SEQ ID NO: 1792148 - RNA, 19 nt, Artificial Sequence
  Description of Artificial Sequence: Synthetic oligonucleotide
cucuuaacaauuggccaca

SEQ ID NO: 1792149 - RNA, 19 nt, Artificial Sequence
  Description of Artificial Sequence: Synthetic oligonucleotide
aucaauccugguggcuagg

SEQ ID NO: 1792150 - RNA, 19 nt, Artificial Sequence
  Description of Artificial Sequence: Synthetic oligonucleotide
ucgcugcuuccauagcuuc

SEQ ID NO: 1792151 - RNA, 19 nt, Artificial Sequence
  Description of Artificial Sequence: Synthetic oligonucleotide
uacgcaucucugccugccu

SEQ ID NO: 1792152 - RNA, 19 nt, Artificial Sequence
  Description of Artificial Sequence: Synthetic oligonucleotide
agcacuugcccagcucauc

SEQ ID NO: 1792153 - RNA, 19 nt, Artificial Sequence
  Description of Artificial Sequence: Synthetic oligonucleotide
agauccagggagggucuuc

SEQ ID NO: 1792154 - RNA, 19 nt, Artificial Sequence
  Description of Artificial Sequence: Synthetic oligonucleotide
acuuuacacccuucagcuu

SEQ ID NO: 1792155 - RNA, 19 nt, Artificial Sequence
  Description of Artificial Sequence: Synthetic oligonucleotide
acuaccccuccugacagau

SEQ ID NO: 1792156 - RNA, 19 nt, Artificial Sequence
  Description of Artificial Sequence: Synthetic oligonucleotide
uuccuccuuuccuccaaaa

SEQ ID NO: 1792157 - RNA, 19 nt, Artificial Sequence
  Description of Artificial Sequence: Synthetic oligonucleotide
guaguggacgcuggcagca

SEQ ID NO: 1792158 - RNA, 19 nt, Artificial Sequence
  Description of Artificial Sequence: Synthetic oligonucleotide
agacgaagcuucuggucua

SEQ ID NO: 1792159 - RNA, 19 nt, Artificial Sequence
  Description of Artificial Sequence: Synthetic oligonucleotide
ccuguaucuucacauccac

SEQ ID NO: 1792160 - RNA, 19 nt, Artificial Sequence
  Description of Artificial Sequence: Synthetic oligonucleotide
caacaucaggucauggccu

SEQ ID NO: 1792161 - RNA, 19 nt, Artificial Sequence
  Description of Artificial Sequence: Synthetic oligonucleotide
caggacuggaacuaccccu

SEQ ID NO: 1792162 - RNA, 19 nt, Artificial Sequence
  Description of Artificial Sequence: Synthetic oligonucleotide
ugccugccuaaucuaccuc

SEQ ID NO: 1792163 - RNA, 19 nt, Artificial Sequence
  Description of Artificial Sequence: Synthetic oligonucleotide
ggcuaggcuuaucccagag

SEQ ID NO: 1792164 - RNA, 19 nt, Artificial Sequence
  Description of Artificial Sequence: Synthetic oligonucleotide
aucaggucauggccuaguu

SEQ ID NO: 1792165 - RNA, 19 nt, Artificial Sequence
  Description of Artificial Sequence: Synthetic oligonucleotide
gggagggucuucuauccca

SEQ ID NO: 1792166 - RNA, 19 nt, Artificial Sequence
  Description of Artificial Sequence: Synthetic oligonucleotide
caucuucguaguagcuguc

SEQ ID NO: 1792167 - RNA, 19 nt, Artificial Sequence
  Description of Artificial Sequence: Synthetic oligonucleotide
guacuggugucagucccug

SEQ ID NO: 1792168 - RNA, 19 nt, Artificial Sequence
  Description of Artificial Sequence: Synthetic oligonucleotide
cugugcaaugugucaguga

SEQ ID NO: 1792169 - RNA, 19 nt, Artificial Sequence
  Description of Artificial Sequence: Synthetic oligonucleotide
gcuucuggggacacucacg

SEQ ID NO: 1792170 - RNA, 19 nt, Artificial Sequence
  Description of Artificial Sequence: Synthetic oligonucleotide
gcuuuuggcaggucaucac

SEQ ID NO: 1792171 - RNA, 19 nt, Artificial Sequence
  Description of Artificial Sequence: Synthetic oligonucleotide
cuggaacuaccccuccuga

SEQ ID NO: 1792172 - RNA, 19 nt, Artificial Sequence
  Description of Artificial Sequence: Synthetic oligonucleotide
cacagccgccuugacgacg

SEQ ID NO: 1792173 - RNA, 19 nt, Artificial Sequence
  Description of Artificial Sequence: Synthetic oligonucleotide
acacaucuucguaguagcu

SEQ ID NO: 1792174 - RNA, 19 nt, Artificial Sequence
  Description of Artificial Sequence: Synthetic oligonucleotide
uggcuaggcuuaucccaga

SEQ ID NO: 1792175 - RNA, 19 nt, Artificial Sequence
  Description of Artificial Sequence: Synthetic oligonucleotide
cugcuuccauagcuucagc

SEQ ID NO: 1792176 - RNA, 19 nt, Artificial Sequence
  Description of Artificial Sequence: Synthetic oligonucleotide
caagguguuccuucaggcu

SEQ ID NO: 1792177 - RNA, 19 nt, Artificial Sequence
  Description of Artificial Sequence: Synthetic oligonucleotide
cugcaaggaggggcaaacc

SEQ ID NO: 1792178 - RNA, 19 nt, Artificial Sequence
  Description of Artificial Sequence: Synthetic oligonucleotide
acaucaggucauggccuag

SEQ ID NO: 1792179 - RNA, 19 nt, Artificial Sequence
  Description of Artificial Sequence: Synthetic oligonucleotide
uccuggucaucugguguac

SEQ ID NO: 1792180 - RNA, 19 nt, Artificial Sequence
  Description of Artificial Sequence: Synthetic oligonucleotide
gagcauccaguggccaggc

SEQ ID NO: 1792181 - RNA, 19 nt, Artificial Sequence
  Description of Artificial Sequence: Synthetic oligonucleotide
ggcuagacaagagcucccc

SEQ ID NO: 1792182 - RNA, 19 nt, Artificial Sequence
  Description of Artificial Sequence: Synthetic oligonucleotide
ccagacgaagcuucugguc

SEQ ID NO: 1792183 - RNA, 19 nt, Artificial Sequence
  Description of Artificial Sequence: Synthetic oligonucleotide
ggucuaugguacugguguc

SEQ ID NO: 1792184 - RNA, 19 nt, Artificial Sequence
  Description of Artificial Sequence: Synthetic oligonucleotide
ccagggagggucuucuauc

SEQ ID NO: 1792185 - RNA, 19 nt, Artificial Sequence
  Description of Artificial Sequence: Synthetic oligonucleotide
gucaucugguguacacaac

SEQ ID NO: 1792186 - RNA, 19 nt, Artificial Sequence
  Description of Artificial Sequence: Synthetic oligonucleotide
gcaaggaggggcaaaccca

SEQ ID NO: 1792187 - RNA, 19 nt, Artificial Sequence
  Description of Artificial Sequence: Synthetic oligonucleotide
agcuuggaugauggggcca

SEQ ID NO: 1792188 - RNA, 19 nt, Artificial Sequence
  Description of Artificial Sequence: Synthetic oligonucleotide
gcucuguaauauacagacc

SEQ ID NO: 1792189 - RNA, 19 nt, Artificial Sequence
  Description of Artificial Sequence: Synthetic oligonucleotide
acgcaucucugccugccua

SEQ ID NO: 1792190 - RNA, 19 nt, Artificial Sequence
  Description of Artificial Sequence: Synthetic oligonucleotide
cugguagaagucagagaua

SEQ ID NO: 1792191 - RNA, 19 nt, Artificial Sequence
  Description of Artificial Sequence: Synthetic oligonucleotide
acagaccgucgaggaaggg

SEQ ID NO: 1792192 - RNA, 19 nt, Artificial Sequence
  Description of Artificial Sequence: Synthetic oligonucleotide
agacuugcaggaaggccaa

SEQ ID NO: 1792193 - RNA, 19 nt, Artificial Sequence
  Description of Artificial Sequence: Synthetic oligonucleotide
aggucauggccuaguuuca

SEQ ID NO: 1792194 - RNA, 19 nt, Artificial Sequence
  Description of Artificial Sequence: Synthetic oligonucleotide
gguuggggcuagacaagag

SEQ ID NO: 1792195 - RNA, 19 nt, Artificial Sequence
  Description of Artificial Sequence: Synthetic oligonucleotide
ggacuggaacuaccccucc

SEQ ID NO: 1792196 - RNA, 19 nt, Artificial Sequence
  Description of Artificial Sequence: Synthetic oligonucleotide
uauguccaaccgguacuuu

SEQ ID NO: 1792197 - RNA, 19 nt, Artificial Sequence
  Description of Artificial Sequence: Synthetic oligonucleotide
cuguaucuucacauccacu

SEQ ID NO: 1792198 - RNA, 19 nt, Artificial Sequence
  Description of Artificial Sequence: Synthetic oligonucleotide
gggcaaacccauauacaca

SEQ ID NO: 1792199 - RNA, 19 nt, Artificial Sequence
  Description of Artificial Sequence: Synthetic oligonucleotide
gccuaaucuaccuccuucu

SEQ ID NO: 1792200 - RNA, 19 nt, Artificial Sequence
  Description of Artificial Sequence: Synthetic oligonucleotide
cagcagauguaucugcaau

SEQ ID NO: 1792201 - RNA, 19 nt, Artificial Sequence
  Description of Artificial Sequence: Synthetic oligonucleotide
caucugguguacacaacau

SEQ ID NO: 1792202 - RNA, 19 nt, Artificial Sequence
  Description of Artificial Sequence: Synthetic oligonucleotide
ucccucugacugggcagag

SEQ ID NO: 1792203 - RNA, 19 nt, Artificial Sequence
  Description of Artificial Sequence: Synthetic oligonucleotide
gcugccccaacaguuuggc

SEQ ID NO: 1792204 - RNA, 19 nt, Artificial Sequence
  Description of Artificial Sequence: Synthetic oligonucleotide
ccugcaaggaggggcaaac

SEQ ID NO: 1792205 - RNA, 19 nt, Artificial Sequence
  Description of Artificial Sequence: Synthetic oligonucleotide
gcauguccaggggccaugg

SEQ ID NO: 1792206 - RNA, 19 nt, Artificial Sequence
  Description of Artificial Sequence: Synthetic oligonucleotide
ggacacucacggcccauca

SEQ ID NO: 1792207 - RNA, 19 nt, Artificial Sequence
  Description of Artificial Sequence: Synthetic oligonucleotide
auccaguggccaggcuccg

SEQ ID NO: 1792208 - RNA, 19 nt, Artificial Sequence
  Description of Artificial Sequence: Synthetic oligonucleotide
uaguggacgcuggcagcac

SEQ ID NO: 1792209 - RNA, 19 nt, Artificial Sequence
  Description of Artificial Sequence: Synthetic oligonucleotide
ccaugacugcucuuaacaa

SEQ ID NO: 1792210 - RNA, 19 nt, Artificial Sequence
  Description of Artificial Sequence: Synthetic oligonucleotide
cugccugccuaaucuaccu

SEQ ID NO: 1792211 - RNA, 19 nt, Artificial Sequence
  Description of Artificial Sequence: Synthetic oligonucleotide
cuaccccuccugacagauc

SEQ ID NO: 1792212 - RNA, 19 nt, Artificial Sequence
  Description of Artificial Sequence: Synthetic oligonucleotide
acgacgcggucaucacaca

SEQ ID NO: 1792213 - RNA, 19 nt, Artificial Sequence
  Description of Artificial Sequence: Synthetic oligonucleotide
gguagaagucagagauaac

SEQ ID NO: 1792214 - RNA, 19 nt, Artificial Sequence
  Description of Artificial Sequence: Synthetic oligonucleotide
cuuuuauuuccagcucccu

SEQ ID NO: 1792215 - RNA, 19 nt, Artificial Sequence
  Description of Artificial Sequence: Synthetic oligonucleotide
acgaagcuucuggucuaug

SEQ ID NO: 1792216 - RNA, 19 nt, Artificial Sequence
  Description of Artificial Sequence: Synthetic oligonucleotide
ccuguccuacgcaucucug

SEQ ID NO: 1792217 - RNA, 19 nt, Artificial Sequence
  Description of Artificial Sequence: Synthetic oligonucleotide
cucccuguccuacgcaucu

SEQ ID NO: 1792218 - RNA, 19 nt, Artificial Sequence
  Description of Artificial Sequence: Synthetic oligonucleotide
ccccaacaaggccucauuc

SEQ ID NO: 1792219 - RNA, 19 nt, Artificial Sequence
  Description of Artificial Sequence: Synthetic oligonucleotide
cucccucugacugggcaga

SEQ ID NO: 1792220 - RNA, 19 nt, Artificial Sequence
  Description of Artificial Sequence: Synthetic oligonucleotide
cucgaagugucugaagcuu

SEQ ID NO: 1792221 - RNA, 19 nt, Artificial Sequence
  Description of Artificial Sequence: Synthetic oligonucleotide
aaggaggggcaaacccaua

SEQ ID NO: 1792222 - RNA, 19 nt, Artificial Sequence
  Description of Artificial Sequence: Synthetic oligonucleotide
ggaggggcaaacccauaua

SEQ ID NO: 1792223 - RNA, 19 nt, Artificial Sequence
  Description of Artificial Sequence: Synthetic oligonucleotide
caguuccuuucagugaacu

SEQ ID NO: 1792224 - RNA, 19 nt, Artificial Sequence
  Description of Artificial Sequence: Synthetic oligonucleotide
cacggcccaucagaagauc

SEQ ID NO: 1792225 - RNA, 19 nt, Artificial Sequence
  Description of Artificial Sequence: Synthetic oligonucleotide
guccuacgcaucucugccu

SEQ ID NO: 1792226 - RNA, 19 nt, Artificial Sequence
  Description of Artificial Sequence: Synthetic oligonucleotide
ccuacgcaucucugccugc

SEQ ID NO: 1792227 - RNA, 19 nt, Artificial Sequence
  Description of Artificial Sequence: Synthetic oligonucleotide
cucgcugcuuccauagcuu

SEQ ID NO: 1792228 - RNA, 19 nt, Artificial Sequence
  Description of Artificial Sequence: Synthetic oligonucleotide
uaguguccucaagguguuc

SEQ ID NO: 1792229 - RNA, 19 nt, Artificial Sequence
  Description of Artificial Sequence: Synthetic oligonucleotide
gaccgucgaggaaggggca

SEQ ID NO: 1792230 - RNA, 19 nt, Artificial Sequence
  Description of Artificial Sequence: Synthetic oligonucleotide
uuacacccuucagcuucuc

SEQ ID NO: 1792231 - RNA, 19 nt, Artificial Sequence
  Description of Artificial Sequence: Synthetic oligonucleotide
auccagggagggucuucua

SEQ ID NO: 1792232 - RNA, 19 nt, Artificial Sequence
  Description of Artificial Sequence: Synthetic oligonucleotide
ucccuguccuacgcaucuc

SEQ ID NO: 1792233 - RNA, 19 nt, Artificial Sequence
  Description of Artificial Sequence: Synthetic oligonucleotide
ccaagaugagcugguagaa

SEQ ID NO: 1792234 - RNA, 19 nt, Artificial Sequence
  Description of Artificial Sequence: Synthetic oligonucleotide
gggccaugguucauucuca

SEQ ID NO: 1792235 - RNA, 19 nt, Artificial Sequence
  Description of Artificial Sequence: Synthetic oligonucleotide
cuaugguacuggugucagu

SEQ ID NO: 1792236 - RNA, 19 nt, Artificial Sequence
  Description of Artificial Sequence: Synthetic oligonucleotide
caguuuggcucuccuugcu

SEQ ID NO: 1792237 - RNA, 19 nt, Artificial Sequence
  Description of Artificial Sequence: Synthetic oligonucleotide
gcuaggcuuaucccagagu

SEQ ID NO: 1792238 - RNA, 19 nt, Artificial Sequence
  Description of Artificial Sequence: Synthetic oligonucleotide
ggccuaguuucaccaucuc

SEQ ID NO: 1792239 - RNA, 19 nt, Artificial Sequence
  Description of Artificial Sequence: Synthetic oligonucleotide
caacaguuuggcucuccuu

SEQ ID NO: 1792240 - RNA, 19 nt, Artificial Sequence
  Description of Artificial Sequence: Synthetic oligonucleotide
gauagacagcuuggaugau

SEQ ID NO: 1792241 - RNA, 19 nt, Artificial Sequence
  Description of Artificial Sequence: Synthetic oligonucleotide
gcuagaacuaguggagcau

SEQ ID NO: 1792242 - RNA, 19 nt, Artificial Sequence
  Description of Artificial Sequence: Synthetic oligonucleotide
ccccuccugacagauccag

SEQ ID NO: 1792243 - RNA, 19 nt, Artificial Sequence
  Description of Artificial Sequence: Synthetic oligonucleotide
cgcaucauauccagcaacu

SEQ ID NO: 1792244 - RNA, 19 nt, Artificial Sequence
  Description of Artificial Sequence: Synthetic oligonucleotide
ggccacaggaagucagagu

SEQ ID NO: 1792245 - RNA, 19 nt, Artificial Sequence
  Description of Artificial Sequence: Synthetic oligonucleotide
cgacgcggucaucacacac

SEQ ID NO: 1792246 - RNA, 19 nt, Artificial Sequence
  Description of Artificial Sequence: Synthetic oligonucleotide
uccaggggccaugguucau

SEQ ID NO: 1792247 - RNA, 19 nt, Artificial Sequence
  Description of Artificial Sequence: Synthetic oligonucleotide
uggccagaucugccaccuu

SEQ ID NO: 1792248 - RNA, 19 nt, Artificial Sequence
  Description of Artificial Sequence: Synthetic oligonucleotide
caucaggucauggccuagu

SEQ ID NO: 1792249 - RNA, 19 nt, Artificial Sequence
  Description of Artificial Sequence: Synthetic oligonucleotide
aggccaagaugagcuggua

SEQ ID NO: 1792250 - RNA, 19 nt, Artificial Sequence
  Description of Artificial Sequence: Synthetic oligonucleotide
gugucagucccugcuuuau

SEQ ID NO: 1792251 - RNA, 19 nt, Artificial Sequence
  Description of Artificial Sequence: Synthetic oligonucleotide
gguacuggugucagucccu

SEQ ID NO: 1792252 - RNA, 19 nt, Artificial Sequence
  Description of Artificial Sequence: Synthetic oligonucleotide
gcaguuccuuucagugaac

SEQ ID NO: 1792253 - RNA, 19 nt, Artificial Sequence
  Description of Artificial Sequence: Synthetic oligonucleotide
auggggccacuugggugca

SEQ ID NO: 1792254 - RNA, 19 nt, Artificial Sequence
  Description of Artificial Sequence: Synthetic oligonucleotide
gucuucuaucccacauuau

SEQ ID NO: 1792255 - RNA, 19 nt, Artificial Sequence
  Description of Artificial Sequence: Synthetic oligonucleotide
cacuggucucgaagugucu

SEQ ID NO: 1792256 - RNA, 19 nt, Artificial Sequence
  Description of Artificial Sequence: Synthetic oligonucleotide
gggacacucacggcccauc

SEQ ID NO: 1792257 - RNA, 19 nt, Artificial Sequence
  Description of Artificial Sequence: Synthetic oligonucleotide
cagccgccuugacgacgcg

SEQ ID NO: 1792258 - RNA, 19 nt, Artificial Sequence
  Description of Artificial Sequence: Synthetic oligonucleotide
ccagcuuuuggcaggucau

SEQ ID NO: 1792259 - RNA, 19 nt, Artificial Sequence
  Description of Artificial Sequence: Synthetic oligonucleotide
ccugccuaaucuaccuccu

SEQ ID NO: 1792260 - RNA, 19 nt, Artificial Sequence
  Description of Artificial Sequence: Synthetic oligonucleotide
ccaguauguccaaccggua

SEQ ID NO: 1792261 - RNA, 19 nt, Artificial Sequence
  Description of Artificial Sequence: Synthetic oligonucleotide
cugccccaacaguuuggcu

SEQ ID NO: 1792262 - RNA, 19 nt, Artificial Sequence
  Description of Artificial Sequence: Synthetic oligonucleotide
augugucagugaggaucuu

SEQ ID NO: 1792263 - RNA, 19 nt, Artificial Sequence
  Description of Artificial Sequence: Synthetic oligonucleotide
gagggccuacacagcaguu

SEQ ID NO: 1792264 - RNA, 19 nt, Artificial Sequence
  Description of Artificial Sequence: Synthetic oligonucleotide
ccacagccgccuugacgac

SEQ ID NO: 1792265 - RNA, 19 nt, Artificial Sequence
  Description of Artificial Sequence: Synthetic oligonucleotide
cauguccaggggccauggu

SEQ ID NO: 1792266 - RNA, 19 nt, Artificial Sequence
  Description of Artificial Sequence: Synthetic oligonucleotide
cuuggaugauggggccacu

SEQ ID NO: 1792267 - RNA, 19 nt, Artificial Sequence
  Description of Artificial Sequence: Synthetic oligonucleotide
gccaggcuccgcaucauau

SEQ ID NO: 1792268 - RNA, 19 nt, Artificial Sequence
  Description of Artificial Sequence: Synthetic oligonucleotide
cccuguccuacgcaucucu

SEQ ID NO: 1792269 - RNA, 19 nt, Artificial Sequence
  Description of Artificial Sequence: Synthetic oligonucleotide
guccugcaaggaggggcaa

SEQ ID NO: 1792270 - RNA, 19 nt, Artificial Sequence
  Description of Artificial Sequence: Synthetic oligonucleotide
ggccaggcuccgcaucaua

SEQ ID NO: 1792271 - RNA, 19 nt, Artificial Sequence
  Description of Artificial Sequence: Synthetic oligonucleotide
ccgccuugacgacgcgguc

SEQ ID NO: 1792272 - RNA, 19 nt, Artificial Sequence
  Description of Artificial Sequence: Synthetic oligonucleotide
cgcggucaucacacacauc

SEQ ID NO: 1792273 - RNA, 19 nt, Artificial Sequence
  Description of Artificial Sequence: Synthetic oligonucleotide
gccuccucgcugcuuccau

SEQ ID NO: 1792274 - RNA, 19 nt, Artificial Sequence
  Description of Artificial Sequence: Synthetic oligonucleotide
gcaucucugccugccuaau

SEQ ID NO: 1792275 - RNA, 19 nt, Artificial Sequence
  Description of Artificial Sequence: Synthetic oligonucleotide
ggcuuaucccagaguuguu

SEQ ID NO: 1792276 - RNA, 19 nt, Artificial Sequence
  Description of Artificial Sequence: Synthetic oligonucleotide
ccuugacgacgcggucauc

SEQ ID NO: 1792277 - RNA, 19 nt, Artificial Sequence
  Description of Artificial Sequence: Synthetic oligonucleotide
cagauccagggagggucuu

SEQ ID NO: 1792278 - RNA, 19 nt, Artificial Sequence
  Description of Artificial Sequence: Synthetic oligonucleotide
ggccagcuuuuggcagguc

SEQ ID NO: 1792279 - RNA, 19 nt, Artificial Sequence
  Description of Artificial Sequence: Synthetic oligonucleotide
ccccaacaguuuggcucuc

SEQ ID NO: 1792280 - RNA, 19 nt, Artificial Sequence
  Description of Artificial Sequence: Synthetic oligonucleotide
ccgguacuuugagggccua

SEQ ID NO: 1792281 - RNA, 19 nt, Artificial Sequence
  Description of Artificial Sequence: Synthetic oligonucleotide
uuugucuugacccugaucu

SEQ ID NO: 1792282 - RNA, 19 nt, Artificial Sequence
  Description of Artificial Sequence: Synthetic oligonucleotide
aaauacucuagucagucag

SEQ ID NO: 1792283 - RNA, 19 nt, Artificial Sequence
  Description of Artificial Sequence: Synthetic oligonucleotide
uauuauuucauccuguaaa

SEQ ID NO: 1792284 - RNA, 19 nt, Artificial Sequence
  Description of Artificial Sequence: Synthetic oligonucleotide
aaaacaugugaagacaacg

SEQ ID NO: 1792285 - RNA, 19 nt, Artificial Sequence
  Description of Artificial Sequence: Synthetic oligonucleotide
uggaguauagcuuuuaucu

SEQ ID NO: 1792286 - RNA, 19 nt, Artificial Sequence
  Description of Artificial Sequence: Synthetic oligonucleotide
uguuaguauacccagggca

SEQ ID NO: 1792287 - RNA, 19 nt, Artificial Sequence
  Description of Artificial Sequence: Synthetic oligonucleotide
aaauugucgucaaauauuc

SEQ ID NO: 1792288 - RNA, 19 nt, Artificial Sequence
  Description of Artificial Sequence: Synthetic oligonucleotide
uuuaguuagaacagcgcag

SEQ ID NO: 1792289 - RNA, 19 nt, Artificial Sequence
  Description of Artificial Sequence: Synthetic oligonucleotide
ugacaucacacacuaacgg

SEQ ID NO: 1792290 - RNA, 19 nt, Artificial Sequence
  Description of Artificial Sequence: Synthetic oligonucleotide
acagaauauaaagauuucc

SEQ ID NO: 1792291 - RNA, 19 nt, Artificial Sequence
  Description of Artificial Sequence: Synthetic oligonucleotide
aagauaggaagauuugucu

SEQ ID NO: 1792292 - RNA, 19 nt, Artificial Sequence
  Description of Artificial Sequence: Synthetic oligonucleotide
aaggagaaauacucuaguc

SEQ ID NO: 1792293 - RNA, 19 nt, Artificial Sequence
  Description of Artificial Sequence: Synthetic oligonucleotide
ugcaaauaagaccaaguca

SEQ ID NO: 1792294 - RNA, 19 nt, Artificial Sequence
  Description of Artificial Sequence: Synthetic oligonucleotide
uuaucuauuauuucauccu

SEQ ID NO: 1792295 - RNA, 19 nt, Artificial Sequence
  Description of Artificial Sequence: Synthetic oligonucleotide
aaaugaacuucuugucaac

SEQ ID NO: 1792296 - RNA, 19 nt, Artificial Sequence
  Description of Artificial Sequence: Synthetic oligonucleotide
aagauuucccucauuaauc

SEQ ID NO: 1792297 - RNA, 19 nt, Artificial Sequence
  Description of Artificial Sequence: Synthetic oligonucleotide
ucacuaaagcaaaugaacu

SEQ ID NO: 1792298 - RNA, 19 nt, Artificial Sequence
  Description of Artificial Sequence: Synthetic oligonucleotide
aagagcgagugagagaggc

SEQ ID NO: 1792299 - RNA, 19 nt, Artificial Sequence
  Description of Artificial Sequence: Synthetic oligonucleotide
ucuuauuuuagauggagua

SEQ ID NO: 1792300 - RNA, 19 nt, Artificial Sequence
  Description of Artificial Sequence: Synthetic oligonucleotide
uauuuuagauggaguauag

SEQ ID NO: 1792301 - RNA, 19 nt, Artificial Sequence
  Description of Artificial Sequence: Synthetic oligonucleotide
uuaguuagaacagcgcagg

SEQ ID NO: 1792302 - RNA, 19 nt, Artificial Sequence
  Description of Artificial Sequence: Synthetic oligonucleotide
aauaagaccaagucagcaa

SEQ ID NO: 1792303 - RNA, 19 nt, Artificial Sequence
  Description of Artificial Sequence: Synthetic oligonucleotide
ugaguguuaguauacccag

SEQ ID NO: 1792304 - RNA, 19 nt, Artificial Sequence
  Description of Artificial Sequence: Synthetic oligonucleotide
uaucuauuauuucauccug

SEQ ID NO: 1792305 - RNA, 19 nt, Artificial Sequence
  Description of Artificial Sequence: Synthetic oligonucleotide
agggaguuuucacuaaagc

SEQ ID NO: 1792306 - RNA, 19 nt, Artificial Sequence
  Description of Artificial Sequence: Synthetic oligonucleotide
ugcuacguuaguuacaacu

SEQ ID NO: 1792307 - RNA, 19 nt, Artificial Sequence
  Description of Artificial Sequence: Synthetic oligonucleotide
uguggaucaauuguuaaug

SEQ ID NO: 1792308 - RNA, 19 nt, Artificial Sequence
  Description of Artificial Sequence: Synthetic oligonucleotide
uugaguguuaguauaccca

SEQ ID NO: 1792309 - RNA, 19 nt, Artificial Sequence
  Description of Artificial Sequence: Synthetic oligonucleotide
ugucgugcaccuuuaaucc

SEQ ID NO: 1792310 - RNA, 19 nt, Artificial Sequence
  Description of Artificial Sequence: Synthetic oligonucleotide
aagccauucaaaaucacug

SEQ ID NO: 1792311 - RNA, 19 nt, Artificial Sequence
  Description of Artificial Sequence: Synthetic oligonucleotide
uuaguuacaacuucuucau

SEQ ID NO: 1792312 - RNA, 19 nt, Artificial Sequence
  Description of Artificial Sequence: Synthetic oligonucleotide
agcgaccuuguuuauaaac

SEQ ID NO: 1792313 - RNA, 19 nt, Artificial Sequence
  Description of Artificial Sequence: Synthetic oligonucleotide
uccucgaugaaauugucgu

SEQ ID NO: 1792314 - RNA, 19 nt, Artificial Sequence
  Description of Artificial Sequence: Synthetic oligonucleotide
gucgucaaauauuccaucg

SEQ ID NO: 1792315 - RNA, 19 nt, Artificial Sequence
  Description of Artificial Sequence: Synthetic oligonucleotide
aaauaagaccaagucagca

SEQ ID NO: 1792316 - RNA, 19 nt, Artificial Sequence
  Description of Artificial Sequence: Synthetic oligonucleotide
uuaguauauaaauuugauu

SEQ ID NO: 1792317 - RNA, 19 nt, Artificial Sequence
  Description of Artificial Sequence: Synthetic oligonucleotide
guuuauaaacuguuccagc

SEQ ID NO: 1792318 - RNA, 19 nt, Artificial Sequence
  Description of Artificial Sequence: Synthetic oligonucleotide
acaaauggugucgugcacc

SEQ ID NO: 1792319 - RNA, 19 nt, Artificial Sequence
  Description of Artificial Sequence: Synthetic oligonucleotide
aaagacacucugcacacaa

SEQ ID NO: 1792320 - RNA, 19 nt, Artificial Sequence
  Description of Artificial Sequence: Synthetic oligonucleotide
agcaugcuacguuaguuac

SEQ ID NO: 1792321 - RNA, 19 nt, Artificial Sequence
  Description of Artificial Sequence: Synthetic oligonucleotide
guaggcgucauucagguuc

SEQ ID NO: 1792322 - RNA, 19 nt, Artificial Sequence
  Description of Artificial Sequence: Synthetic oligonucleotide
ucgaggaaguugcugggcg

SEQ ID NO: 1792323 - RNA, 19 nt, Artificial Sequence
  Description of Artificial Sequence: Synthetic oligonucleotide
auuacaggccagaagaaag

SEQ ID NO: 1792324 - RNA, 19 nt, Artificial Sequence
  Description of Artificial Sequence: Synthetic oligonucleotide
aauauuccaucgucuccuc

SEQ ID NO: 1792325 - RNA, 19 nt, Artificial Sequence
  Description of Artificial Sequence: Synthetic oligonucleotide
uugacccugaucucguagg

SEQ ID NO: 1792326 - RNA, 19 nt, Artificial Sequence
  Description of Artificial Sequence: Synthetic oligonucleotide
agauuucccucauuaaucu

SEQ ID NO: 1792327 - RNA, 19 nt, Artificial Sequence
  Description of Artificial Sequence: Synthetic oligonucleotide
uuggugaucagccgccggg

SEQ ID NO: 1792328 - RNA, 19 nt, Artificial Sequence
  Description of Artificial Sequence: Synthetic oligonucleotide
auuuuagauggaguauagc

SEQ ID NO: 1792329 - RNA, 19 nt, Artificial Sequence
  Description of Artificial Sequence: Synthetic oligonucleotide
uaauccugcgcagaaauga

SEQ ID NO: 1792330 - RNA, 19 nt, Artificial Sequence
  Description of Artificial Sequence: Synthetic oligonucleotide
uuucccucauuaaucuucc

SEQ ID NO: 1792331 - RNA, 19 nt, Artificial Sequence
  Description of Artificial Sequence: Synthetic oligonucleotide
ugcaccuuuaauccugcgc

SEQ ID NO: 1792332 - RNA, 19 nt, Artificial Sequence
  Description of Artificial Sequence: Synthetic oligonucleotide
cuuuaguuagaacagcgca

SEQ ID NO: 1792333 - RNA, 19 nt, Artificial Sequence
  Description of Artificial Sequence: Synthetic oligonucleotide
acaguagauuccuucagcu

SEQ ID NO: 1792334 - RNA, 19 nt, Artificial Sequence
  Description of Artificial Sequence: Synthetic oligonucleotide
gucagucagacucaagaag

SEQ ID NO: 1792335 - RNA, 19 nt, Artificial Sequence
  Description of Artificial Sequence: Synthetic oligonucleotide
guugaguguuaguauaccc

SEQ ID NO: 1792336 - RNA, 19 nt, Artificial Sequence
  Description of Artificial Sequence: Synthetic oligonucleotide
ggugacaucacacacuaac

SEQ ID NO: 1792337 - RNA, 19 nt, Artificial Sequence
  Description of Artificial Sequence: Synthetic oligonucleotide
ugaagauaggaagauuugu

SEQ ID NO: 1792338 - RNA, 19 nt, Artificial Sequence
  Description of Artificial Sequence: Synthetic oligonucleotide
uccugcgcagaaaugagga

SEQ ID NO: 1792339 - RNA, 19 nt, Artificial Sequence
  Description of Artificial Sequence: Synthetic oligonucleotide
gaagauaggaagauuuguc

SEQ ID NO: 1792340 - RNA, 19 nt, Artificial Sequence
  Description of Artificial Sequence: Synthetic oligonucleotide
acuucgaagccauucaaaa

SEQ ID NO: 1792341 - RNA, 19 nt, Artificial Sequence
  Description of Artificial Sequence: Synthetic oligonucleotide
aucaauuguuaauggucuc

SEQ ID NO: 1792342 - RNA, 19 nt, Artificial Sequence
  Description of Artificial Sequence: Synthetic oligonucleotide
acgggaaggagaaauacuc

SEQ ID NO: 1792343 - RNA, 19 nt, Artificial Sequence
  Description of Artificial Sequence: Synthetic oligonucleotide
ucuauggggcuugugaggc

SEQ ID NO: 1792344 - RNA, 19 nt, Artificial Sequence
  Description of Artificial Sequence: Synthetic oligonucleotide
gaggcgaacgagcacguag

SEQ ID NO: 1792345 - RNA, 19 nt, Artificial Sequence
  Description of Artificial Sequence: Synthetic oligonucleotide
ugcgcagaaaugaggacca

SEQ ID NO: 1792346 - RNA, 19 nt, Artificial Sequence
  Description of Artificial Sequence: Synthetic oligonucleotide
ggaacuacaaccuugcucu

SEQ ID NO: 1792347 - RNA, 19 nt, Artificial Sequence
  Description of Artificial Sequence: Synthetic oligonucleotide
ucguagguggugaagcggc

SEQ ID NO: 1792348 - RNA, 19 nt, Artificial Sequence
  Description of Artificial Sequence: Synthetic oligonucleotide
aacgagggaguuuucacua

SEQ ID NO: 1792349 - RNA, 19 nt, Artificial Sequence
  Description of Artificial Sequence: Synthetic oligonucleotide
uggaucaauuguuaauggu

SEQ ID NO: 1792350 - RNA, 19 nt, Artificial Sequence
  Description of Artificial Sequence: Synthetic oligonucleotide
auacucuagucagucagac

SEQ ID NO: 1792351 - RNA, 19 nt, Artificial Sequence
  Description of Artificial Sequence: Synthetic oligonucleotide
ugaccagcgaccuuguuua

SEQ ID NO: 1792352 - RNA, 19 nt, Artificial Sequence
  Description of Artificial Sequence: Synthetic oligonucleotide
agugagagaggcucaacga

SEQ ID NO: 1792353 - RNA, 19 nt, Artificial Sequence
  Description of Artificial Sequence: Synthetic oligonucleotide
uuccuuuccucgaugaaau

SEQ ID NO: 1792354 - RNA, 19 nt, Artificial Sequence
  Description of Artificial Sequence: Synthetic oligonucleotide
cugcaaauaagaccaaguc

SEQ ID NO: 1792355 - RNA, 19 nt, Artificial Sequence
  Description of Artificial Sequence: Synthetic oligonucleotide
agacaaauggugucgugca

SEQ ID NO: 1792356 - RNA, 19 nt, Artificial Sequence
  Description of Artificial Sequence: Synthetic oligonucleotide
aaaugaggaccauguggug

SEQ ID NO: 1792357 - RNA, 19 nt, Artificial Sequence
  Description of Artificial Sequence: Synthetic oligonucleotide
ggcuauaguguguacacag

SEQ ID NO: 1792358 - RNA, 19 nt, Artificial Sequence
  Description of Artificial Sequence: Synthetic oligonucleotide
uugucgucaaauauuccau

SEQ ID NO: 1792359 - RNA, 19 nt, Artificial Sequence
  Description of Artificial Sequence: Synthetic oligonucleotide
gugagagaggcucaacgag

SEQ ID NO: 1792360 - RNA, 19 nt, Artificial Sequence
  Description of Artificial Sequence: Synthetic oligonucleotide
gaacagcgcaggucuaugg

SEQ ID NO: 1792361 - RNA, 19 nt, Artificial Sequence
  Description of Artificial Sequence: Synthetic oligonucleotide
caaaguacaccacauaugu

SEQ ID NO: 1792362 - RNA, 19 nt, Artificial Sequence
  Description of Artificial Sequence: Synthetic oligonucleotide
auuugucuugacccugauc

SEQ ID NO: 1792363 - RNA, 19 nt, Artificial Sequence
  Description of Artificial Sequence: Synthetic oligonucleotide
gaaaugaggaccauguggu

SEQ ID NO: 1792364 - RNA, 19 nt, Artificial Sequence
  Description of Artificial Sequence: Synthetic oligonucleotide
ucgugcaccuuuaauccug

SEQ ID NO: 1792365 - RNA, 19 nt, Artificial Sequence
  Description of Artificial Sequence: Synthetic oligonucleotide
gugucgugcaccuuuaauc

SEQ ID NO: 1792366 - RNA, 19 nt, Artificial Sequence
  Description of Artificial Sequence: Synthetic oligonucleotide
acuaacgggaaggagaaau

SEQ ID NO: 1792367 - RNA, 19 nt, Artificial Sequence
  Description of Artificial Sequence: Synthetic oligonucleotide
uccgccuucugcuaacgcc

SEQ ID NO: 1792368 - RNA, 19 nt, Artificial Sequence
  Description of Artificial Sequence: Synthetic oligonucleotide
aaggaaauuacaggccaga

SEQ ID NO: 1792369 - RNA, 19 nt, Artificial Sequence
  Description of Artificial Sequence: Synthetic oligonucleotide
ucucgaggaaguugcuggg

SEQ ID NO: 1792370 - RNA, 19 nt, Artificial Sequence
  Description of Artificial Sequence: Synthetic oligonucleotide
cucacgucgaucucgagga

SEQ ID NO: 1792371 - RNA, 19 nt, Artificial Sequence
  Description of Artificial Sequence: Synthetic oligonucleotide
ugugcagcaugcuacguua

SEQ ID NO: 1792372 - RNA, 19 nt, Artificial Sequence
  Description of Artificial Sequence: Synthetic oligonucleotide
uccgccauuucgcuguagc

SEQ ID NO: 1792373 - RNA, 19 nt, Artificial Sequence
  Description of Artificial Sequence: Synthetic oligonucleotide
aaagggagggagcguugag

SEQ ID NO: 1792374 - RNA, 19 nt, Artificial Sequence
  Description of Artificial Sequence: Synthetic oligonucleotide
aauccugcgcagaaaugag

SEQ ID NO: 1792375 - RNA, 19 nt, Artificial Sequence
  Description of Artificial Sequence: Synthetic oligonucleotide
uauguguggcacugaagac

SEQ ID NO: 1792376 - RNA, 19 nt, Artificial Sequence
  Description of Artificial Sequence: Synthetic oligonucleotide
gucuauggggcuugugagg

SEQ ID NO: 1792377 - RNA, 19 nt, Artificial Sequence
  Description of Artificial Sequence: Synthetic oligonucleotide
cgaacgagcacguagggcg

SEQ ID NO: 1792378 - RNA, 19 nt, Artificial Sequence
  Description of Artificial Sequence: Synthetic oligonucleotide
augaaauugucgucaaaua

SEQ ID NO: 1792379 - RNA, 19 nt, Artificial Sequence
  Description of Artificial Sequence: Synthetic oligonucleotide
ucccucauuaaucuuccau

SEQ ID NO: 1792380 - RNA, 19 nt, Artificial Sequence
  Description of Artificial Sequence: Synthetic oligonucleotide
auacccagggcauguuagg

SEQ ID NO: 1792381 - RNA, 19 nt, Artificial Sequence
  Description of Artificial Sequence: Synthetic oligonucleotide
accgaggcgaacgagcacg

SEQ ID NO: 1792382 - RNA, 19 nt, Artificial Sequence
  Description of Artificial Sequence: Synthetic oligonucleotide
uugguguggaucaauuguu

SEQ ID NO: 1792383 - RNA, 19 nt, Artificial Sequence
  Description of Artificial Sequence: Synthetic oligonucleotide
guacaccacauaugugugg

SEQ ID NO: 1792384 - RNA, 19 nt, Artificial Sequence
  Description of Artificial Sequence: Synthetic oligonucleotide
gaucaauuguuaauggucu

SEQ ID NO: 1792385 - RNA, 19 nt, Artificial Sequence
  Description of Artificial Sequence: Synthetic oligonucleotide
uccaucgucuccucuaaaa

SEQ ID NO: 1792386 - RNA, 19 nt, Artificial Sequence
  Description of Artificial Sequence: Synthetic oligonucleotide
uaacgggaaggagaaauac

SEQ ID NO: 1792387 - RNA, 19 nt, Artificial Sequence
  Description of Artificial Sequence: Synthetic oligonucleotide
gggaguuuucacuaaagca

SEQ ID NO: 1792388 - RNA, 19 nt, Artificial Sequence
  Description of Artificial Sequence: Synthetic oligonucleotide
aauacucuagucagucaga

SEQ ID NO: 1792389 - RNA, 19 nt, Artificial Sequence
  Description of Artificial Sequence: Synthetic oligonucleotide
ucucguguuugccucuucu

SEQ ID NO: 1792390 - RNA, 19 nt, Artificial Sequence
  Description of Artificial Sequence: Synthetic oligonucleotide
cuaaaaggaagcugccuca

SEQ ID NO: 1792391 - RNA, 19 nt, Artificial Sequence
  Description of Artificial Sequence: Synthetic oligonucleotide
cugcgcagaaaugaggacc

SEQ ID NO: 1792392 - RNA, 19 nt, Artificial Sequence
  Description of Artificial Sequence: Synthetic oligonucleotide
aaaguacaccacauaugug

SEQ ID NO: 1792393 - RNA, 19 nt, Artificial Sequence
  Description of Artificial Sequence: Synthetic oligonucleotide
auuucgcuguagccgcggc

SEQ ID NO: 1792394 - RNA, 19 nt, Artificial Sequence
  Description of Artificial Sequence: Synthetic oligonucleotide
gaaguugcugggcggcccg

SEQ ID NO: 1792395 - RNA, 19 nt, Artificial Sequence
  Description of Artificial Sequence: Synthetic oligonucleotide
acugcaaauaagaccaagu

SEQ ID NO: 1792396 - RNA, 19 nt, Artificial Sequence
  Description of Artificial Sequence: Synthetic oligonucleotide
aacgccuucccagggagug

SEQ ID NO: 1792397 - RNA, 19 nt, Artificial Sequence
  Description of Artificial Sequence: Synthetic oligonucleotide
gaagacaaauggugucgug

SEQ ID NO: 1792398 - RNA, 19 nt, Artificial Sequence
  Description of Artificial Sequence: Synthetic oligonucleotide
cuacguuaguuacaacuuc

SEQ ID NO: 1792399 - RNA, 19 nt, Artificial Sequence
  Description of Artificial Sequence: Synthetic oligonucleotide
ggaucaauuguuaaugguc

SEQ ID NO: 1792400 - RNA, 19 nt, Artificial Sequence
  Description of Artificial Sequence: Synthetic oligonucleotide
cucauuaaucuuccaugug

SEQ ID NO: 1792401 - RNA, 19 nt, Artificial Sequence
  Description of Artificial Sequence: Synthetic oligonucleotide
cuugacccugaucucguag

SEQ ID NO: 1792402 - RNA, 19 nt, Artificial Sequence
  Description of Artificial Sequence: Synthetic oligonucleotide
aucgucuccucuaaaagga

SEQ ID NO: 1792403 - RNA, 19 nt, Artificial Sequence
  Description of Artificial Sequence: Synthetic oligonucleotide
aacgggaaggagaaauacu

SEQ ID NO: 1792404 - RNA, 19 nt, Artificial Sequence
  Description of Artificial Sequence: Synthetic oligonucleotide
gaagcaaacaugacacaga

SEQ ID NO: 1792405 - RNA, 19 nt, Artificial Sequence
  Description of Artificial Sequence: Synthetic oligonucleotide
gcgucauucagguucugcg

SEQ ID NO: 1792406 - RNA, 19 nt, Artificial Sequence
  Description of Artificial Sequence: Synthetic oligonucleotide
gaaggagaaauacucuagu

SEQ ID NO: 1792407 - RNA, 19 nt, Artificial Sequence
  Description of Artificial Sequence: Synthetic oligonucleotide
uuaggccagugucugugca

SEQ ID NO: 1792408 - RNA, 19 nt, Artificial Sequence
  Description of Artificial Sequence: Synthetic oligonucleotide
uaguucacuucgaagccau

SEQ ID NO: 1792409 - RNA, 19 nt, Artificial Sequence
  Description of Artificial Sequence: Synthetic oligonucleotide
cucaagaagcaaacaugac

SEQ ID NO: 1792410 - RNA, 19 nt, Artificial Sequence
  Description of Artificial Sequence: Synthetic oligonucleotide
acaucacacacuaacggga

SEQ ID NO: 1792411 - RNA, 19 nt, Artificial Sequence
  Description of Artificial Sequence: Synthetic oligonucleotide
uagguggugaagcggcccc

SEQ ID NO: 1792412 - RNA, 19 nt, Artificial Sequence
  Description of Artificial Sequence: Synthetic oligonucleotide
cugcggguugcucacgucg

SEQ ID NO: 1792413 - RNA, 19 nt, Artificial Sequence
  Description of Artificial Sequence: Synthetic oligonucleotide
acauauguguggcacugaa

SEQ ID NO: 1792414 - RNA, 19 nt, Artificial Sequence
  Description of Artificial Sequence: Synthetic oligonucleotide
gaguguuaguauacccagg

SEQ ID NO: 1792415 - RNA, 19 nt, Artificial Sequence
  Description of Artificial Sequence: Synthetic oligonucleotide
cauguuaggccagugucug

SEQ ID NO: 1792416 - RNA, 19 nt, Artificial Sequence
  Description of Artificial Sequence: Synthetic oligonucleotide
uuaguauacccagggcaug

SEQ ID NO: 1792417 - RNA, 19 nt, Artificial Sequence
  Description of Artificial Sequence: Synthetic oligonucleotide
aggcaugucuuauuuuaga

SEQ ID NO: 1792418 - RNA, 19 nt, Artificial Sequence
  Description of Artificial Sequence: Synthetic oligonucleotide
augaccagcgaccuuguuu

SEQ ID NO: 1792419 - RNA, 19 nt, Artificial Sequence
  Description of Artificial Sequence: Synthetic oligonucleotide
auaggaagauuugucuuga

SEQ ID NO: 1792420 - RNA, 19 nt, Artificial Sequence
  Description of Artificial Sequence: Synthetic oligonucleotide
gagggaguuuucacuaaag

SEQ ID NO: 1792421 - RNA, 19 nt, Artificial Sequence
  Description of Artificial Sequence: Synthetic oligonucleotide
agcguugaguguuaguaua

SEQ ID NO: 1792422 - RNA, 19 nt, Artificial Sequence
  Description of Artificial Sequence: Synthetic oligonucleotide
ucguguuugccucuucuuu

SEQ ID NO: 1792423 - RNA, 19 nt, Artificial Sequence
  Description of Artificial Sequence: Synthetic oligonucleotide
aaauuacaggccagaagaa

SEQ ID NO: 1792424 - RNA, 19 nt, Artificial Sequence
  Description of Artificial Sequence: Synthetic oligonucleotide
cucgaugaaauugucguca

SEQ ID NO: 1792425 - RNA, 19 nt, Artificial Sequence
  Description of Artificial Sequence: Synthetic oligonucleotide
caggcaugucuuauuuuag

SEQ ID NO: 1792426 - RNA, 19 nt, Artificial Sequence
  Description of Artificial Sequence: Synthetic oligonucleotide
ucuccucuaaaaggaagcu

SEQ ID NO: 1792427 - RNA, 19 nt, Artificial Sequence
  Description of Artificial Sequence: Synthetic oligonucleotide
uaguguguacacagacaca

SEQ ID NO: 1792428 - RNA, 19 nt, Artificial Sequence
  Description of Artificial Sequence: Synthetic oligonucleotide
gcaaaugaacuucuuguca

SEQ ID NO: 1792429 - RNA, 19 nt, Artificial Sequence
  Description of Artificial Sequence: Synthetic oligonucleotide
ucauucagguucugcggcu

SEQ ID NO: 1792430 - RNA, 19 nt, Artificial Sequence
  Description of Artificial Sequence: Synthetic oligonucleotide
gcaccuuuaauccugcgca

SEQ ID NO: 1792431 - RNA, 19 nt, Artificial Sequence
  Description of Artificial Sequence: Synthetic oligonucleotide
aguacaccacauaugugug

SEQ ID NO: 1792432 - RNA, 19 nt, Artificial Sequence
  Description of Artificial Sequence: Synthetic oligonucleotide
aucacacacuaacgggaag

SEQ ID NO: 1792433 - RNA, 19 nt, Artificial Sequence
  Description of Artificial Sequence: Synthetic oligonucleotide
ugaagacaacguucauucu

SEQ ID NO: 1792434 - RNA, 19 nt, Artificial Sequence
  Description of Artificial Sequence: Synthetic oligonucleotide
ugugaggcuauagugugua

SEQ ID NO: 1792435 - RNA, 19 nt, Artificial Sequence
  Description of Artificial Sequence: Synthetic oligonucleotide
gcucacgucgaucucgagg

SEQ ID NO: 1792436 - RNA, 19 nt, Artificial Sequence
  Description of Artificial Sequence: Synthetic oligonucleotide
guguuaguauacccagggc

SEQ ID NO: 1792437 - RNA, 19 nt, Artificial Sequence
  Description of Artificial Sequence: Synthetic oligonucleotide
aucuauuauuucauccugu

SEQ ID NO: 1792438 - RNA, 19 nt, Artificial Sequence
  Description of Artificial Sequence: Synthetic oligonucleotide
gacaaauggugucgugcac

SEQ ID NO: 1792439 - RNA, 19 nt, Artificial Sequence
  Description of Artificial Sequence: Synthetic oligonucleotide
acucaggcaugucuuauuu

SEQ ID NO: 1792440 - RNA, 19 nt, Artificial Sequence
  Description of Artificial Sequence: Synthetic oligonucleotide
ucgaugaaauugucgucaa

SEQ ID NO: 1792441 - RNA, 19 nt, Artificial Sequence
  Description of Artificial Sequence: Synthetic oligonucleotide
cccucauuaaucuuccaug

SEQ ID NO: 1792442 - RNA, 19 nt, Artificial Sequence
  Description of Artificial Sequence: Synthetic oligonucleotide
uaguauacccagggcaugu

SEQ ID NO: 1792443 - RNA, 19 nt, Artificial Sequence
  Description of Artificial Sequence: Synthetic oligonucleotide
gggaacuacaaccuugcuc

SEQ ID NO: 1792444 - RNA, 19 nt, Artificial Sequence
  Description of Artificial Sequence: Synthetic oligonucleotide
gaucucgaggaaguugcug

SEQ ID NO: 1792445 - RNA, 19 nt, Artificial Sequence
  Description of Artificial Sequence: Synthetic oligonucleotide
uuucgcuguagccgcggca

SEQ ID NO: 1792446 - RNA, 19 nt, Artificial Sequence
  Description of Artificial Sequence: Synthetic oligonucleotide
accauguggugacaucaca

SEQ ID NO: 1792447 - RNA, 19 nt, Artificial Sequence
  Description of Artificial Sequence: Synthetic oligonucleotide
aggcgaacgagcacguagg

SEQ ID NO: 1792448 - RNA, 19 nt, Artificial Sequence
  Description of Artificial Sequence: Synthetic oligonucleotide
caugcuacguuaguuacaa

SEQ ID NO: 1792449 - RNA, 19 nt, Artificial Sequence
  Description of Artificial Sequence: Synthetic oligonucleotide
ucauucugggccagaggau

SEQ ID NO: 1792450 - RNA, 19 nt, Artificial Sequence
  Description of Artificial Sequence: Synthetic oligonucleotide
gaacgagcacguagggcgg

SEQ ID NO: 1792451 - RNA, 19 nt, Artificial Sequence
  Description of Artificial Sequence: Synthetic oligonucleotide
uugcucacgucgaucucga

SEQ ID NO: 1792452 - RNA, 19 nt, Artificial Sequence
  Description of Artificial Sequence: Synthetic oligonucleotide
cagcuugaagauaggaaga

SEQ ID NO: 1792453 - RNA, 19 nt, Artificial Sequence
  Description of Artificial Sequence: Synthetic oligonucleotide
uucugcggcuuggugauca

SEQ ID NO: 1792454 - RNA, 19 nt, Artificial Sequence
  Description of Artificial Sequence: Synthetic oligonucleotide
uacaaccuugcucucucuu

SEQ ID NO: 1792455 - RNA, 19 nt, Artificial Sequence
  Description of Artificial Sequence: Synthetic oligonucleotide
cuuggugaucagccgccgg

SEQ ID NO: 1792456 - RNA, 19 nt, Artificial Sequence
  Description of Artificial Sequence: Synthetic oligonucleotide
ugcggguugcucacgucga

SEQ ID NO: 1792457 - RNA, 19 nt, Artificial Sequence
  Description of Artificial Sequence: Synthetic oligonucleotide
accgucugcggguugcuca

SEQ ID NO: 1792458 - RNA, 19 nt, Artificial Sequence
  Description of Artificial Sequence: Synthetic oligonucleotide
auuccaucgucuccucuaa

SEQ ID NO: 1792459 - RNA, 19 nt, Artificial Sequence
  Description of Artificial Sequence: Synthetic oligonucleotide
guuaggccagugucugugc

SEQ ID NO: 1792460 - RNA, 19 nt, Artificial Sequence
  Description of Artificial Sequence: Synthetic oligonucleotide
agcuugaagauaggaagau

SEQ ID NO: 1792461 - RNA, 19 nt, Artificial Sequence
  Description of Artificial Sequence: Synthetic oligonucleotide
agaggaugaccagcgaccu

SEQ ID NO: 1792462 - RNA, 19 nt, Artificial Sequence
  Description of Artificial Sequence: Synthetic oligonucleotide
auccugcgcagaaaugagg

SEQ ID NO: 1792463 - RNA, 19 nt, Artificial Sequence
  Description of Artificial Sequence: Synthetic oligonucleotide
uucugcuaacgccgccgcc

SEQ ID NO: 1792464 - RNA, 19 nt, Artificial Sequence
  Description of Artificial Sequence: Synthetic oligonucleotide
acacacuaacgggaaggag

SEQ ID NO: 1792465 - RNA, 19 nt, Artificial Sequence
  Description of Artificial Sequence: Synthetic oligonucleotide
augaaagggagggagcguu

SEQ ID NO: 1792466 - RNA, 19 nt, Artificial Sequence
  Description of Artificial Sequence: Synthetic oligonucleotide
uagauggaguauagcuuuu

SEQ ID NO: 1792467 - RNA, 19 nt, Artificial Sequence
  Description of Artificial Sequence: Synthetic oligonucleotide
ccaucgucuccucuaaaag

SEQ ID NO: 1792468 - RNA, 19 nt, Artificial Sequence
  Description of Artificial Sequence: Synthetic oligonucleotide
agaacagcgcaggucuaug

SEQ ID NO: 1792469 - RNA, 19 nt, Artificial Sequence
  Description of Artificial Sequence: Synthetic oligonucleotide
uaguuacaacuucuucauu

SEQ ID NO: 1792470 - RNA, 19 nt, Artificial Sequence
  Description of Artificial Sequence: Synthetic oligonucleotide
augcuacguuaguuacaac

SEQ ID NO: 1792471 - RNA, 19 nt, Artificial Sequence
  Description of Artificial Sequence: Synthetic oligonucleotide
guuaguauacccagggcau

SEQ ID NO: 1792472 - RNA, 19 nt, Artificial Sequence
  Description of Artificial Sequence: Synthetic oligonucleotide
agcacaccgaggcgaacga

SEQ ID NO: 1792473 - RNA, 19 nt, Artificial Sequence
  Description of Artificial Sequence: Synthetic oligonucleotide
ccgccuucugcuaacgccg

SEQ ID NO: 1792474 - RNA, 19 nt, Artificial Sequence
  Description of Artificial Sequence: Synthetic oligonucleotide
caucacacacuaacgggaa

SEQ ID NO: 1792475 - RNA, 19 nt, Artificial Sequence
  Description of Artificial Sequence: Synthetic oligonucleotide
ccuuuccucgaugaaauug

SEQ ID NO: 1792476 - RNA, 19 nt, Artificial Sequence
  Description of Artificial Sequence: Synthetic oligonucleotide
gaagagcgagugagagagg

SEQ ID NO: 1792477 - RNA, 19 nt, Artificial Sequence
  Description of Artificial Sequence: Synthetic oligonucleotide
cucuagucagucagacuca

SEQ ID NO: 1792478 - RNA, 19 nt, Artificial Sequence
  Description of Artificial Sequence: Synthetic oligonucleotide
cuuauuuuagauggaguau

SEQ ID NO: 1792479 - RNA, 19 nt, Artificial Sequence
  Description of Artificial Sequence: Synthetic oligonucleotide
accuuuaauccugcgcaga

SEQ ID NO: 1792480 - RNA, 19 nt, Artificial Sequence
  Description of Artificial Sequence: Synthetic oligonucleotide
cuaacgggaaggagaaaua

SEQ ID NO: 1792481 - RNA, 19 nt, Artificial Sequence
  Description of Artificial Sequence: Synthetic oligonucleotide
uagaacagcgcaggucuau

SEQ ID NO: 1792482 - RNA, 19 nt, Artificial Sequence
  Description of Artificial Sequence: Synthetic oligonucleotide
acgucgaucucgaggaagu

SEQ ID NO: 1792483 - RNA, 19 nt, Artificial Sequence
  Description of Artificial Sequence: Synthetic oligonucleotide
ccucuaaaaggaagcugcc

SEQ ID NO: 1792484 - RNA, 19 nt, Artificial Sequence
  Description of Artificial Sequence: Synthetic oligonucleotide
ugaucagccgccggguguc

SEQ ID NO: 1792485 - RNA, 19 nt, Artificial Sequence
  Description of Artificial Sequence: Synthetic oligonucleotide
guguccgcuacggucuccg

SEQ ID NO: 1792486 - RNA, 19 nt, Artificial Sequence
  Description of Artificial Sequence: Synthetic oligonucleotide
cuaguucacuucgaagcca

SEQ ID NO: 1792487 - RNA, 19 nt, Artificial Sequence
  Description of Artificial Sequence: Synthetic oligonucleotide
cgucauucagguucugcgg

SEQ ID NO: 1792488 - RNA, 19 nt, Artificial Sequence
  Description of Artificial Sequence: Synthetic oligonucleotide
ucugcggcuuggugaucag

SEQ ID NO: 1792489 - RNA, 19 nt, Artificial Sequence
  Description of Artificial Sequence: Synthetic oligonucleotide
ggaguauagcuuuuaucua

SEQ ID NO: 1792490 - RNA, 19 nt, Artificial Sequence
  Description of Artificial Sequence: Synthetic oligonucleotide
gguguggaucaauuguuaa

SEQ ID NO: 1792491 - RNA, 19 nt, Artificial Sequence
  Description of Artificial Sequence: Synthetic oligonucleotide
gaacuacaaccuugcucuc

SEQ ID NO: 1792492 - RNA, 19 nt, Artificial Sequence
  Description of Artificial Sequence: Synthetic oligonucleotide
gaccauguggugacaucac

SEQ ID NO: 1792493 - RNA, 19 nt, Artificial Sequence
  Description of Artificial Sequence: Synthetic oligonucleotide
cagcaugcuacguuaguua

SEQ ID NO: 1792494 - RNA, 19 nt, Artificial Sequence
  Description of Artificial Sequence: Synthetic oligonucleotide
ggcgaacgagcacguaggg

SEQ ID NO: 1792495 - RNA, 19 nt, Artificial Sequence
  Description of Artificial Sequence: Synthetic oligonucleotide
cgaccuuguuuauaaacug

SEQ ID NO: 1792496 - RNA, 19 nt, Artificial Sequence
  Description of Artificial Sequence: Synthetic oligonucleotide
gucuccgccauuucgcugu

SEQ ID NO: 1792497 - RNA, 19 nt, Artificial Sequence
  Description of Artificial Sequence: Synthetic oligonucleotide
gggacuccgggcucgcgcg

SEQ ID NO: 1792498 - RNA, 19 nt, Artificial Sequence
  Description of Artificial Sequence: Synthetic oligonucleotide
uucccucauuaaucuucca

SEQ ID NO: 1792499 - RNA, 19 nt, Artificial Sequence
  Description of Artificial Sequence: Synthetic oligonucleotide
acgagcacguagggcgggc

SEQ ID NO: 1792500 - RNA, 19 nt, Artificial Sequence
  Description of Artificial Sequence: Synthetic oligonucleotide
acgagggaguuuucacuaa

SEQ ID NO: 1792501 - RNA, 19 nt, Artificial Sequence
  Description of Artificial Sequence: Synthetic oligonucleotide
cccguaggcgucauucagg

SEQ ID NO: 1792502 - RNA, 19 nt, Artificial Sequence
  Description of Artificial Sequence: Synthetic oligonucleotide
guagccgcggcagccgcgg

SEQ ID NO: 1792503 - RNA, 19 nt, Artificial Sequence
  Description of Artificial Sequence: Synthetic oligonucleotide
caaauggugucgugcaccu

SEQ ID NO: 1792504 - RNA, 19 nt, Artificial Sequence
  Description of Artificial Sequence: Synthetic oligonucleotide
gcucgcgcgcagcacaccg

SEQ ID NO: 1792505 - RNA, 19 nt, Artificial Sequence
  Description of Artificial Sequence: Synthetic oligonucleotide
augucuuauuuuagaugga

SEQ ID NO: 1792506 - RNA, 19 nt, Artificial Sequence
  Description of Artificial Sequence: Synthetic oligonucleotide
guauacccagggcauguua

SEQ ID NO: 1792507 - RNA, 19 nt, Artificial Sequence
  Description of Artificial Sequence: Synthetic oligonucleotide
caacgagggaguuuucacu

SEQ ID NO: 1792508 - RNA, 19 nt, Artificial Sequence
  Description of Artificial Sequence: Synthetic oligonucleotide
cuucgaagccauucaaaau

SEQ ID NO: 1792509 - RNA, 19 nt, Artificial Sequence
  Description of Artificial Sequence: Synthetic oligonucleotide
gucagcaacuuuaguuaga

SEQ ID NO: 1792510 - RNA, 19 nt, Artificial Sequence
  Description of Artificial Sequence: Synthetic oligonucleotide
cacacacuaacgggaagga

SEQ ID NO: 1792511 - RNA, 19 nt, Artificial Sequence
  Description of Artificial Sequence: Synthetic oligonucleotide
ggcaugucuuauuuuagau

SEQ ID NO: 1792512 - RNA, 19 nt, Artificial Sequence
  Description of Artificial Sequence: Synthetic oligonucleotide
cguuaguuacaacuucuuc

SEQ ID NO: 1792513 - RNA, 19 nt, Artificial Sequence
  Description of Artificial Sequence: Synthetic oligonucleotide
cuuuaauccugcgcagaaa

SEQ ID NO: 1792514 - RNA, 19 nt, Artificial Sequence
  Description of Artificial Sequence: Synthetic oligonucleotide
ucugcggguugcucacguc

SEQ ID NO: 1792515 - RNA, 19 nt, Artificial Sequence
  Description of Artificial Sequence: Synthetic oligonucleotide
uggugucgugcaccuuuaa

SEQ ID NO: 1792516 - RNA, 19 nt, Artificial Sequence
  Description of Artificial Sequence: Synthetic oligonucleotide
acguuaguuacaacuucuu

SEQ ID NO: 1792517 - RNA, 19 nt, Artificial Sequence
  Description of Artificial Sequence: Synthetic oligonucleotide
uccuuuccucgaugaaauu

SEQ ID NO: 1792518 - RNA, 19 nt, Artificial Sequence
  Description of Artificial Sequence: Synthetic oligonucleotide
gcccguaggcgucauucag

SEQ ID NO: 1792519 - RNA, 19 nt, Artificial Sequence
  Description of Artificial Sequence: Synthetic oligonucleotide
cgccauuucgcuguagccg

SEQ ID NO: 1792520 - RNA, 19 nt, Artificial Sequence
  Description of Artificial Sequence: Synthetic oligonucleotide
ccacauauguguggcacug

SEQ ID NO: 1792521 - RNA, 19 nt, Artificial Sequence
  Description of Artificial Sequence: Synthetic oligonucleotide
ggugaucagccgccgggug

SEQ ID NO: 1792522 - RNA, 19 nt, Artificial Sequence
  Description of Artificial Sequence: Synthetic oligonucleotide
uguccgcuacggucuccgc

SEQ ID NO: 1792523 - RNA, 19 nt, Artificial Sequence
  Description of Artificial Sequence: Synthetic oligonucleotide
ugaggaccauguggugaca

SEQ ID NO: 1792524 - RNA, 19 nt, Artificial Sequence
  Description of Artificial Sequence: Synthetic oligonucleotide
agccgcgggcucucuccac

SEQ ID NO: 1792525 - RNA, 19 nt, Artificial Sequence
  Description of Artificial Sequence: Synthetic oligonucleotide
agcgagugagagaggcuca

SEQ ID NO: 1792526 - RNA, 19 nt, Artificial Sequence
  Description of Artificial Sequence: Synthetic oligonucleotide
cgaggaaguugcugggcgg

SEQ ID NO: 1792527 - RNA, 19 nt, Artificial Sequence
  Description of Artificial Sequence: Synthetic oligonucleotide
ggcgucauucagguucugc

SEQ ID NO: 1792528 - RNA, 19 nt, Artificial Sequence
  Description of Artificial Sequence: Synthetic oligonucleotide
gcguugaguguuaguauac

SEQ ID NO: 1792529 - RNA, 19 nt, Artificial Sequence
  Description of Artificial Sequence: Synthetic oligonucleotide
aucagccgccggguguccg

SEQ ID NO: 1792530 - RNA, 19 nt, Artificial Sequence
  Description of Artificial Sequence: Synthetic oligonucleotide
agggagcguugaguguuag

SEQ ID NO: 1792531 - RNA, 19 nt, Artificial Sequence
  Description of Artificial Sequence: Synthetic oligonucleotide
ccgccauuucgcuguagcc

SEQ ID NO: 1792532 - RNA, 19 nt, Artificial Sequence
  Description of Artificial Sequence: Synthetic oligonucleotide
aguauacccagggcauguu

SEQ ID NO: 1792533 - RNA, 19 nt, Artificial Sequence
  Description of Artificial Sequence: Synthetic oligonucleotide
cucuaaaaggaagcugccu

SEQ ID NO: 1792534 - RNA, 19 nt, Artificial Sequence
  Description of Artificial Sequence: Synthetic oligonucleotide
uuccaaacucaggcauguc

SEQ ID NO: 1792535 - RNA, 19 nt, Artificial Sequence
  Description of Artificial Sequence: Synthetic oligonucleotide
uccagcccuugcuuccuuu

SEQ ID NO: 1792536 - RNA, 19 nt, Artificial Sequence
  Description of Artificial Sequence: Synthetic oligonucleotide
acgccuucccagggagugg

SEQ ID NO: 1792537 - RNA, 19 nt, Artificial Sequence
  Description of Artificial Sequence: Synthetic oligonucleotide
gugaucagccgccgggugu

SEQ ID NO: 1792538 - RNA, 19 nt, Artificial Sequence
  Description of Artificial Sequence: Synthetic oligonucleotide
cguugaguguuaguauacc

SEQ ID NO: 1792539 - RNA, 19 nt, Artificial Sequence
  Description of Artificial Sequence: Synthetic oligonucleotide
ccggguguccgcuacgguc

SEQ ID NO: 1792540 - RNA, 19 nt, Artificial Sequence
  Description of Artificial Sequence: Synthetic oligonucleotide
gucgugcaccuuuaauccu

SEQ ID NO: 1792541 - RNA, 19 nt, Artificial Sequence
  Description of Artificial Sequence: Synthetic oligonucleotide
ccugcgcagaaaugaggac

SEQ ID NO: 1792542 - RNA, 19 nt, Artificial Sequence
  Description of Artificial Sequence: Synthetic oligonucleotide
gguucugcggcuuggugau

SEQ ID NO: 1792543 - RNA, 19 nt, Artificial Sequence
  Description of Artificial Sequence: Synthetic oligonucleotide
ccuuuaauccugcgcagaa

SEQ ID NO: 1792544 - RNA, 19 nt, Artificial Sequence
  Description of Artificial Sequence: Synthetic oligonucleotide
gcgaacgagcacguagggc

SEQ ID NO: 1792545 - RNA, 19 nt, Artificial Sequence
  Description of Artificial Sequence: Synthetic oligonucleotide
caccgaggcgaacgagcac

SEQ ID NO: 1792546 - RNA, 19 nt, Artificial Sequence
  Description of Artificial Sequence: Synthetic oligonucleotide
cgugcaccuuuaauccugc

SEQ ID NO: 1792547 - RNA, 19 nt, Artificial Sequence
  Description of Artificial Sequence: Synthetic oligonucleotide
cuacggucuccgccauuuc

SEQ ID NO: 1792548 - RNA, 19 nt, Artificial Sequence
  Description of Artificial Sequence: Synthetic oligonucleotide
gcuacguuaguuacaacuu

SEQ ID NO: 1792549 - RNA, 19 nt, Artificial Sequence
  Description of Artificial Sequence: Synthetic oligonucleotide
gaucagccgccgggugucc

SEQ ID NO: 1792550 - RNA, 19 nt, Artificial Sequence
  Description of Artificial Sequence: Synthetic oligonucleotide
cacauauguguggcacuga

SEQ ID NO: 1792551 - RNA, 19 nt, Artificial Sequence
  Description of Artificial Sequence: Synthetic oligonucleotide
gucucguguuugccucuuc

SEQ ID NO: 1792552 - RNA, 19 nt, Artificial Sequence
  Description of Artificial Sequence: Synthetic oligonucleotide
gguugcucacgucgaucuc

SEQ ID NO: 1792553 - RNA, 19 nt, Artificial Sequence
  Description of Artificial Sequence: Synthetic oligonucleotide
ggugucgugcaccuuuaau

SEQ ID NO: 1792554 - RNA, 19 nt, Artificial Sequence
  Description of Artificial Sequence: Synthetic oligonucleotide
gggcuugugaggcuauagu

SEQ ID NO: 1792555 - RNA, 19 nt, Artificial Sequence
  Description of Artificial Sequence: Synthetic oligonucleotide
gcaugcuacguuaguuaca

SEQ ID NO: 1792556 - RNA, 19 nt, Artificial Sequence
  Description of Artificial Sequence: Synthetic oligonucleotide
gccgcgggcucucuccacc

SEQ ID NO: 1792557 - RNA, 19 nt, Artificial Sequence
  Description of Artificial Sequence: Synthetic oligonucleotide
ggcucaacgagggaguuuu

SEQ ID NO: 1792558 - RNA, 19 nt, Artificial Sequence
  Description of Artificial Sequence: Synthetic oligonucleotide
gaggaccauguggugacau

SEQ ID NO: 1792559 - RNA, 19 nt, Artificial Sequence
  Description of Artificial Sequence: Synthetic oligonucleotide
gucugcggguugcucacgu

SEQ ID NO: 1792560 - RNA, 19 nt, Artificial Sequence
  Description of Artificial Sequence: Synthetic oligonucleotide
caggucuauggggcuugug

SEQ ID NO: 1792561 - RNA, 19 nt, Artificial Sequence
  Description of Artificial Sequence: Synthetic oligonucleotide
cucguguuugccucuucuu

SEQ ID NO: 1792562 - RNA, 19 nt, Artificial Sequence
  Description of Artificial Sequence: Synthetic oligonucleotide
gacuccgggcucgcgcgca

SEQ ID NO: 1792563 - RNA, 19 nt, Artificial Sequence
  Description of Artificial Sequence: Synthetic oligonucleotide
cucgcgcgcagcacaccga

SEQ ID NO: 1792564 - RNA, 19 nt, Artificial Sequence
  Description of Artificial Sequence: Synthetic oligonucleotide
ccgucugcggguugcucac

SEQ ID NO: 1792565 - RNA, 19 nt, Artificial Sequence
  Description of Artificial Sequence: Synthetic oligonucleotide
ggcccguaggcgucauuca

SEQ ID NO: 1792566 - RNA, 19 nt, Artificial Sequence
  Description of Artificial Sequence: Synthetic oligonucleotide
cugggcggcccguaggcgu

SEQ ID NO: 1792567 - RNA, 19 nt, Artificial Sequence
  Description of Artificial Sequence: Synthetic oligonucleotide
aggcucaacgagggaguuu

SEQ ID NO: 1792568 - RNA, 19 nt, Artificial Sequence
  Description of Artificial Sequence: Synthetic oligonucleotide
gcacaccgaggcgaacgag

SEQ ID NO: 1792569 - RNA, 19 nt, Artificial Sequence
  Description of Artificial Sequence: Synthetic oligonucleotide
aguucacuucgaagccauu

SEQ ID NO: 1792570 - RNA, 19 nt, Artificial Sequence
  Description of Artificial Sequence: Synthetic oligonucleotide
cagcgaccuuguuuauaaa

SEQ ID NO: 1792571 - RNA, 19 nt, Artificial Sequence
  Description of Artificial Sequence: Synthetic oligonucleotide
ccgcgggcucucuccaccg

SEQ ID NO: 1792572 - RNA, 19 nt, Artificial Sequence
  Description of Artificial Sequence: Synthetic oligonucleotide
gguguccgcuacggucucc

SEQ ID NO: 1792573 - RNA, 19 nt, Artificial Sequence
  Description of Artificial Sequence: Synthetic oligonucleotide
caccgucugcggguugcuc

SEQ ID NO: 1792574 - RNA, 19 nt, Artificial Sequence
  Description of Artificial Sequence: Synthetic oligonucleotide
gaggcucaacgagggaguu

SEQ ID NO: 1792575 - RNA, 19 nt, Artificial Sequence
  Description of Artificial Sequence: Synthetic oligonucleotide
gccgccggguguccgcuac

SEQ ID NO: 1792576 - RNA, 19 nt, Artificial Sequence
  Description of Artificial Sequence: Synthetic oligonucleotide
gaccagcgaccuuguuuau

SEQ ID NO: 1792577 - RNA, 19 nt, Artificial Sequence
  Description of Artificial Sequence: Synthetic oligonucleotide
ggggaacuacaaccuugcu

SEQ ID NO: 1792578 - RNA, 19 nt, Artificial Sequence
  Description of Artificial Sequence: Synthetic oligonucleotide
cacuaacgggaaggagaaa

SEQ ID NO: 1792579 - RNA, 19 nt, Artificial Sequence
  Description of Artificial Sequence: Synthetic oligonucleotide
gggagcguugaguguuagu

SEQ ID NO: 1792580 - RNA, 19 nt, Artificial Sequence
  Description of Artificial Sequence: Synthetic oligonucleotide
guucugcggcuuggugauc

SEQ ID NO: 1792581 - RNA, 19 nt, Artificial Sequence
  Description of Artificial Sequence: Synthetic oligonucleotide
gcgagugagagaggcucaa

SEQ ID NO: 1792582 - RNA, 19 nt, Artificial Sequence
  Description of Artificial Sequence: Synthetic oligonucleotide
cgagcacguagggcgggcg

SEQ ID NO: 1792583 - RNA, 19 nt, Artificial Sequence
  Description of Artificial Sequence: Synthetic oligonucleotide
ggcagccgcgggcucucuc

SEQ ID NO: 1792584 - RNA, 19 nt, Artificial Sequence
  Description of Artificial Sequence: Synthetic oligonucleotide
cagggcauguuaggccagu

SEQ ID NO: 1792585 - RNA, 19 nt, Artificial Sequence
  Description of Artificial Sequence: Synthetic oligonucleotide
cgccggguguccgcuacgg

SEQ ID NO: 1792586 - RNA, 19 nt, Artificial Sequence
  Description of Artificial Sequence: Synthetic oligonucleotide
ggaugaccagcgaccuugu

SEQ ID NO: 1792587 - RNA, 19 nt, Artificial Sequence
  Description of Artificial Sequence: Synthetic oligonucleotide
cggguugcucacgucgauc

SEQ ID NO: 1792588 - RNA, 19 nt, Artificial Sequence
  Description of Artificial Sequence: Synthetic oligonucleotide
agccgccggguguccgcua

SEQ ID NO: 1792589 - RNA, 19 nt, Artificial Sequence
  Description of Artificial Sequence: Synthetic oligonucleotide
gccgccgccgccgcccgcc

SEQ ID NO: 1792590 - RNA, 19 nt, Artificial Sequence
  Description of Artificial Sequence: Synthetic oligonucleotide
cgucugcggguugcucacg

SEQ ID NO: 1792591 - RNA, 19 nt, Artificial Sequence
  Description of Artificial Sequence: Synthetic oligonucleotide
cccugaucucguagguggu

SEQ ID NO: 1792592 - RNA, 19 nt, Artificial Sequence
  Description of Artificial Sequence: Synthetic oligonucleotide
gcggguugcucacgucgau

SEQ ID NO: 1792593 - RNA, 19 nt, Artificial Sequence
  Description of Artificial Sequence: Synthetic oligonucleotide
ccgaggcgaacgagcacgu

SEQ ID NO: 1792594 - RNA, 19 nt, Artificial Sequence
  Description of Artificial Sequence: Synthetic oligonucleotide
gcggggacuccgggcucgc

SEQ ID NO: 1792595 - RNA, 19 nt, Artificial Sequence
  Description of Artificial Sequence: Synthetic oligonucleotide
gccggguguccgcuacggu

SEQ ID NO: 1792596 - RNA, 19 nt, Artificial Sequence
  Description of Artificial Sequence: Synthetic oligonucleotide
cggucuccgccauuucgcu

SEQ ID NO: 1792597 - RNA, 19 nt, Artificial Sequence
  Description of Artificial Sequence: Synthetic oligonucleotide
gcaggucuauggggcuugu

SEQ ID NO: 1792598 - RNA, 19 nt, Artificial Sequence
  Description of Artificial Sequence: Synthetic oligonucleotide
cagccgccggguguccgcu

SEQ ID NO: 1792599 - RNA, 19 nt, Artificial Sequence
  Description of Artificial Sequence: Synthetic oligonucleotide
cggggacuccgggcucgcg

SEQ ID NO: 1792600 - RNA, 19 nt, Artificial Sequence
  Description of Artificial Sequence: Synthetic oligonucleotide
ccgccgccgccgcccgccg

SEQ ID NO: 1792601 - RNA, 19 nt, Artificial Sequence
  Description of Artificial Sequence: Synthetic oligonucleotide
gcgcaggucuauggggcuu

SEQ ID NO: 1792602 - RNA, 19 nt, Artificial Sequence
  Description of Artificial Sequence: Synthetic oligonucleotide
gcgcagaaaugaggaccau

SEQ ID NO: 1792603 - RNA, 19 nt, Artificial Sequence
  Description of Artificial Sequence: Synthetic oligonucleotide
cguaggcgucauucagguu

SEQ ID NO: 1792604 - RNA, 19 nt, Artificial Sequence
  Description of Artificial Sequence: Synthetic oligonucleotide
ccaccgucugcggguugcu

SEQ ID NO: 1792605 - RNA, 19 nt, Artificial Sequence
  Description of Artificial Sequence: Synthetic oligonucleotide
cgaggcgaacgagcacgua

SEQ ID NO: 1792606 - RNA, 19 nt, Artificial Sequence
  Description of Artificial Sequence: Synthetic oligonucleotide
cgccgccgccgcccgccgc

SEQ ID NO: 1792607 - RNA, 19 nt, Artificial Sequence
  Description of Artificial Sequence: Synthetic oligonucleotide
ggcggcccguaggcgucau

SEQ ID NO: 1792608 - RNA, 19 nt, Artificial Sequence
  Description of Artificial Sequence: Synthetic oligonucleotide
gcggcccguaggcgucauu

SEQ ID NO: 1792609 - RNA, 19 nt, Artificial Sequence
  Description of Artificial Sequence: Synthetic oligonucleotide
cgccgccgccgccgcccgc

SEQ ID NO: 1792610 - RNA, 19 nt, Artificial Sequence
  Description of Artificial Sequence: Synthetic oligonucleotide
aaugaauagacucuauuag

SEQ ID NO: 1792611 - RNA, 19 nt, Artificial Sequence
  Description of Artificial Sequence: Synthetic oligonucleotide
aauguucuuagacauuugc

SEQ ID NO: 1792612 - RNA, 19 nt, Artificial Sequence
  Description of Artificial Sequence: Synthetic oligonucleotide
aagacauguaaacacuggc

SEQ ID NO: 1792613 - RNA, 19 nt, Artificial Sequence
  Description of Artificial Sequence: Synthetic oligonucleotide
aauguuuguaaacacuguc

SEQ ID NO: 1792614 - RNA, 19 nt, Artificial Sequence
  Description of Artificial Sequence: Synthetic oligonucleotide
agaaccacuaacuaugcgg

SEQ ID NO: 1792615 - RNA, 19 nt, Artificial Sequence
  Description of Artificial Sequence: Synthetic oligonucleotide
agauuuuaacuguagaauc

SEQ ID NO: 1792616 - RNA, 19 nt, Artificial Sequence
  Description of Artificial Sequence: Synthetic oligonucleotide
aauagacucuauuagugug

SEQ ID NO: 1792617 - RNA, 19 nt, Artificial Sequence
  Description of Artificial Sequence: Synthetic oligonucleotide
uguucuuagacauuugccc

SEQ ID NO: 1792618 - RNA, 19 nt, Artificial Sequence
  Description of Artificial Sequence: Synthetic oligonucleotide
uuucgaauaaauucacccg

SEQ ID NO: 1792619 - RNA, 19 nt, Artificial Sequence
  Description of Artificial Sequence: Synthetic oligonucleotide
ugaauagacucuauuagug

SEQ ID NO: 1792620 - RNA, 19 nt, Artificial Sequence
  Description of Artificial Sequence: Synthetic oligonucleotide
auuagugugucccugcaac

SEQ ID NO: 1792621 - RNA, 19 nt, Artificial Sequence
  Description of Artificial Sequence: Synthetic oligonucleotide
cuagguuucgaauaaauuc

SEQ ID NO: 1792622 - RNA, 19 nt, Artificial Sequence
  Description of Artificial Sequence: Synthetic oligonucleotide
cuaaugaugauauugucuc

SEQ ID NO: 1792623 - RNA, 19 nt, Artificial Sequence
  Description of Artificial Sequence: Synthetic oligonucleotide
ucauauuguacacagcgga

SEQ ID NO: 1792624 - RNA, 19 nt, Artificial Sequence
  Description of Artificial Sequence: Synthetic oligonucleotide
uucauggagaugcauacag

SEQ ID NO: 1792625 - RNA, 19 nt, Artificial Sequence
  Description of Artificial Sequence: Synthetic oligonucleotide
uaaugugugaauacaauuc

SEQ ID NO: 1792626 - RNA, 19 nt, Artificial Sequence
  Description of Artificial Sequence: Synthetic oligonucleotide
uauuguacacagcggaccg

SEQ ID NO: 1792627 - RNA, 19 nt, Artificial Sequence
  Description of Artificial Sequence: Synthetic oligonucleotide
  modified_base (4)..(4): a, c, u, g, unknown or other
uuuncucuucauuucaugu

SEQ ID NO: 1792628 - RNA, 19 nt, Artificial Sequence
  Description of Artificial Sequence: Synthetic oligonucleotide
gagauuugagcucuccucg

SEQ ID NO: 1792629 - RNA, 19 nt, Artificial Sequence
  Description of Artificial Sequence: Synthetic oligonucleotide
aauguuacuagguuucgaa

SEQ ID NO: 1792630 - RNA, 19 nt, Artificial Sequence
  Description of Artificial Sequence: Synthetic oligonucleotide
uucgaauaaauucacccgu

SEQ ID NO: 1792631 - RNA, 19 nt, Artificial Sequence
  Description of Artificial Sequence: Synthetic oligonucleotide
uaaugaauagacucuauua

SEQ ID NO: 1792632 - RNA, 19 nt, Artificial Sequence
  Description of Artificial Sequence: Synthetic oligonucleotide
aaaaucauaugcuccacua

SEQ ID NO: 1792633 - RNA, 19 nt, Artificial Sequence
  Description of Artificial Sequence: Synthetic oligonucleotide
guucuuagacauuugcccg

SEQ ID NO: 1792634 - RNA, 19 nt, Artificial Sequence
  Description of Artificial Sequence: Synthetic oligonucleotide
aacguguguagacaggucu

SEQ ID NO: 1792635 - RNA, 19 nt, Artificial Sequence
  Description of Artificial Sequence: Synthetic oligonucleotide
auauuguacacagcggacc

SEQ ID NO: 1792636 - RNA, 19 nt, Artificial Sequence
  Description of Artificial Sequence: Synthetic oligonucleotide
ugauccgccacacaacucc

SEQ ID NO: 1792637 - RNA, 19 nt, Artificial Sequence
  Description of Artificial Sequence: Synthetic oligonucleotide
ugugcaaugguucaucaau

SEQ ID NO: 1792638 - RNA, 19 nt, Artificial Sequence
  Description of Artificial Sequence: Synthetic oligonucleotide
  modified_base (7)..(7): a, c, u, g, unknown or other
uuguuuncucuucauuuca

SEQ ID NO: 1792639 - RNA, 19 nt, Artificial Sequence
  Description of Artificial Sequence: Synthetic oligonucleotide
aaguauguauacacucucc

SEQ ID NO: 1792640 - RNA, 19 nt, Artificial Sequence
  Description of Artificial Sequence: Synthetic oligonucleotide
ucaagacauguaaacacug

SEQ ID NO: 1792641 - RNA, 19 nt, Artificial Sequence
  Description of Artificial Sequence: Synthetic oligonucleotide
augcauacagcguacagug

SEQ ID NO: 1792642 - RNA, 19 nt, Artificial Sequence
  Description of Artificial Sequence: Synthetic oligonucleotide
uuacauuucucucuccaga

SEQ ID NO: 1792643 - RNA, 19 nt, Artificial Sequence
  Description of Artificial Sequence: Synthetic oligonucleotide
  modified_base (9)..(9): a, c, u, g, unknown or other
ucuuguuuncucuucauuu

SEQ ID NO: 1792644 - RNA, 19 nt, Artificial Sequence
  Description of Artificial Sequence: Synthetic oligonucleotide
uaugcgguuaccacaaaac

SEQ ID NO: 1792645 - RNA, 19 nt, Artificial Sequence
  Description of Artificial Sequence: Synthetic oligonucleotide
ucaucaugcccuuucagca

SEQ ID NO: 1792646 - RNA, 19 nt, Artificial Sequence
  Description of Artificial Sequence: Synthetic oligonucleotide
uaggcaugugaucacauga

SEQ ID NO: 1792647 - RNA, 19 nt, Artificial Sequence
  Description of Artificial Sequence: Synthetic oligonucleotide
uugauguaucuagagaucc

SEQ ID NO: 1792648 - RNA, 19 nt, Artificial Sequence
  Description of Artificial Sequence: Synthetic oligonucleotide
ugcgguuaccacaaaacug

SEQ ID NO: 1792649 - RNA, 19 nt, Artificial Sequence
  Description of Artificial Sequence: Synthetic oligonucleotide
uaucuagagauccacucac

SEQ ID NO: 1792650 - RNA, 19 nt, Artificial Sequence
  Description of Artificial Sequence: Synthetic oligonucleotide
uguaucuagagauccacuc

SEQ ID NO: 1792651 - RNA, 19 nt, Artificial Sequence
  Description of Artificial Sequence: Synthetic oligonucleotide
agacauguaaacacuggcc

SEQ ID NO: 1792652 - RNA, 19 nt, Artificial Sequence
  Description of Artificial Sequence: Synthetic oligonucleotide
agaguuuuacaguuccauc

SEQ ID NO: 1792653 - RNA, 19 nt, Artificial Sequence
  Description of Artificial Sequence: Synthetic oligonucleotide
uuuaaaguguugucaucag

SEQ ID NO: 1792654 - RNA, 19 nt, Artificial Sequence
  Description of Artificial Sequence: Synthetic oligonucleotide
cucggauugauguaucuag

SEQ ID NO: 1792655 - RNA, 19 nt, Artificial Sequence
  Description of Artificial Sequence: Synthetic oligonucleotide
ugagaguccggucagugga

SEQ ID NO: 1792656 - RNA, 19 nt, Artificial Sequence
  Description of Artificial Sequence: Synthetic oligonucleotide
augaauagacucuauuagu

SEQ ID NO: 1792657 - RNA, 19 nt, Artificial Sequence
  Description of Artificial Sequence: Synthetic oligonucleotide
gauugauguaucuagagau

SEQ ID NO: 1792658 - RNA, 19 nt, Artificial Sequence
  Description of Artificial Sequence: Synthetic oligonucleotide
aguauguauacacucucca

SEQ ID NO: 1792659 - RNA, 19 nt, Artificial Sequence
  Description of Artificial Sequence: Synthetic oligonucleotide
ugcccuuucagcaccuugg

SEQ ID NO: 1792660 - RNA, 19 nt, Artificial Sequence
  Description of Artificial Sequence: Synthetic oligonucleotide
uguaugcacucuuccacgg

SEQ ID NO: 1792661 - RNA, 19 nt, Artificial Sequence
  Description of Artificial Sequence: Synthetic oligonucleotide
aucagaaccacuaacuaug

SEQ ID NO: 1792662 - RNA, 19 nt, Artificial Sequence
  Description of Artificial Sequence: Synthetic oligonucleotide
ugugcccauauaaaguaug

SEQ ID NO: 1792663 - RNA, 19 nt, Artificial Sequence
  Description of Artificial Sequence: Synthetic oligonucleotide
gacaagaauauugucuuug

SEQ ID NO: 1792664 - RNA, 19 nt, Artificial Sequence
  Description of Artificial Sequence: Synthetic oligonucleotide
caagacauguaaacacugg

SEQ ID NO: 1792665 - RNA, 19 nt, Artificial Sequence
  Description of Artificial Sequence: Synthetic oligonucleotide
auguaugcacucuuccacg

SEQ ID NO: 1792666 - RNA, 19 nt, Artificial Sequence
  Description of Artificial Sequence: Synthetic oligonucleotide
cuaacuaugcgguuaccac

SEQ ID NO: 1792667 - RNA, 19 nt, Artificial Sequence
  Description of Artificial Sequence: Synthetic oligonucleotide
cagcuuugguguuagaggc

SEQ ID NO: 1792668 - RNA, 19 nt, Artificial Sequence
  Description of Artificial Sequence: Synthetic oligonucleotide
agauuugagcucuccucgc

SEQ ID NO: 1792669 - RNA, 19 nt, Artificial Sequence
  Description of Artificial Sequence: Synthetic oligonucleotide
aucaaacuguaaugaauag

SEQ ID NO: 1792670 - RNA, 19 nt, Artificial Sequence
  Description of Artificial Sequence: Synthetic oligonucleotide
ucuauuagugugucccugc

SEQ ID NO: 1792671 - RNA, 19 nt, Artificial Sequence
  Description of Artificial Sequence: Synthetic oligonucleotide
uuagugugucccugcaacg

SEQ ID NO: 1792672 - RNA, 19 nt, Artificial Sequence
  Description of Artificial Sequence: Synthetic oligonucleotide
uaacuaugcgguuaccaca

SEQ ID NO: 1792673 - RNA, 19 nt, Artificial Sequence
  Description of Artificial Sequence: Synthetic oligonucleotide
ucugauccgccacacaacu

SEQ ID NO: 1792674 - RNA, 19 nt, Artificial Sequence
  Description of Artificial Sequence: Synthetic oligonucleotide
gugaugaccauacuccacc

SEQ ID NO: 1792675 - RNA, 19 nt, Artificial Sequence
  Description of Artificial Sequence: Synthetic oligonucleotide
guauguauacacucuccag

SEQ ID NO: 1792676 - RNA, 19 nt, Artificial Sequence
  Description of Artificial Sequence: Synthetic oligonucleotide
cuguaaacaggucacagca

SEQ ID NO: 1792677 - RNA, 19 nt, Artificial Sequence
  Description of Artificial Sequence: Synthetic oligonucleotide
uuagacauuugcccgugac

SEQ ID NO: 1792678 - RNA, 19 nt, Artificial Sequence
  Description of Artificial Sequence: Synthetic oligonucleotide
ugauguaugcacucuucca

SEQ ID NO: 1792679 - RNA, 19 nt, Artificial Sequence
  Description of Artificial Sequence: Synthetic oligonucleotide
ucugagcugguaauuacaa

SEQ ID NO: 1792680 - RNA, 19 nt, Artificial Sequence
  Description of Artificial Sequence: Synthetic oligonucleotide
uggagaugcauacagcgua

SEQ ID NO: 1792681 - RNA, 19 nt, Artificial Sequence
  Description of Artificial Sequence: Synthetic oligonucleotide
agacauuugcccgugacug

SEQ ID NO: 1792682 - RNA, 19 nt, Artificial Sequence
  Description of Artificial Sequence: Synthetic oligonucleotide
augaccauacuccaccugu

SEQ ID NO: 1792683 - RNA, 19 nt, Artificial Sequence
  Description of Artificial Sequence: Synthetic oligonucleotide
cauuccuacucccaacugc

SEQ ID NO: 1792684 - RNA, 19 nt, Artificial Sequence
  Description of Artificial Sequence: Synthetic oligonucleotide
gguaauuacaaaguucuug

SEQ ID NO: 1792685 - RNA, 19 nt, Artificial Sequence
  Description of Artificial Sequence: Synthetic oligonucleotide
aacugcacauaccagcuuu

SEQ ID NO: 1792686 - RNA, 19 nt, Artificial Sequence
  Description of Artificial Sequence: Synthetic oligonucleotide
auaaauucacccguuuuca

SEQ ID NO: 1792687 - RNA, 19 nt, Artificial Sequence
  Description of Artificial Sequence: Synthetic oligonucleotide
cacaucgaaguccagcacc

SEQ ID NO: 1792688 - RNA, 19 nt, Artificial Sequence
  Description of Artificial Sequence: Synthetic oligonucleotide
accuugggagauuugagcu

SEQ ID NO: 1792689 - RNA, 19 nt, Artificial Sequence
  Description of Artificial Sequence: Synthetic oligonucleotide
uaugcuccacuaacaaccc

SEQ ID NO: 1792690 - RNA, 19 nt, Artificial Sequence
  Description of Artificial Sequence: Synthetic oligonucleotide
gaugccaucaaacuguaau

SEQ ID NO: 1792691 - RNA, 19 nt, Artificial Sequence
  Description of Artificial Sequence: Synthetic oligonucleotide
acauggaugccaucaaacu

SEQ ID NO: 1792692 - RNA, 19 nt, Artificial Sequence
  Description of Artificial Sequence: Synthetic oligonucleotide
uuugaguuccauuccacuu

SEQ ID NO: 1792693 - RNA, 19 nt, Artificial Sequence
  Description of Artificial Sequence: Synthetic oligonucleotide
acaagaauauugucuuuga

SEQ ID NO: 1792694 - RNA, 19 nt, Artificial Sequence
  Description of Artificial Sequence: Synthetic oligonucleotide
uaagaguggcaucucgaga

SEQ ID NO: 1792695 - RNA, 19 nt, Artificial Sequence
  Description of Artificial Sequence: Synthetic oligonucleotide
cauauuguacacagcggac

SEQ ID NO: 1792696 - RNA, 19 nt, Artificial Sequence
  Description of Artificial Sequence: Synthetic oligonucleotide
agcacucugaugcuuguug

SEQ ID NO: 1792697 - RNA, 19 nt, Artificial Sequence
  Description of Artificial Sequence: Synthetic oligonucleotide
cuugcaauguuuguaaaca

SEQ ID NO: 1792698 - RNA, 19 nt, Artificial Sequence
  Description of Artificial Sequence: Synthetic oligonucleotide
uugagaguccggucagugg

SEQ ID NO: 1792699 - RNA, 19 nt, Artificial Sequence
  Description of Artificial Sequence: Synthetic oligonucleotide
uacuagguuucgaauaaau

SEQ ID NO: 1792700 - RNA, 19 nt, Artificial Sequence
  Description of Artificial Sequence: Synthetic oligonucleotide
ugcuccacuaacaacccuc

SEQ ID NO: 1792701 - RNA, 19 nt, Artificial Sequence
  Description of Artificial Sequence: Synthetic oligonucleotide
agugugcccauauaaagua

SEQ ID NO: 1792702 - RNA, 19 nt, Artificial Sequence
  Description of Artificial Sequence: Synthetic oligonucleotide
acuguaggcaugugaucac

SEQ ID NO: 1792703 - RNA, 19 nt, Artificial Sequence
  Description of Artificial Sequence: Synthetic oligonucleotide
acuaacaacccuccugcca

SEQ ID NO: 1792704 - RNA, 19 nt, Artificial Sequence
  Description of Artificial Sequence: Synthetic oligonucleotide
cuacaugacccaucaagac

SEQ ID NO: 1792705 - RNA, 19 nt, Artificial Sequence
  Description of Artificial Sequence: Synthetic oligonucleotide
gauuugagcucuccucgcc

SEQ ID NO: 1792706 - RNA, 19 nt, Artificial Sequence
  Description of Artificial Sequence: Synthetic oligonucleotide
uauugucucucaucuguga

SEQ ID NO: 1792707 - RNA, 19 nt, Artificial Sequence
  Description of Artificial Sequence: Synthetic oligonucleotide
uguccuguuaaugugugaa

SEQ ID NO: 1792708 - RNA, 19 nt, Artificial Sequence
  Description of Artificial Sequence: Synthetic oligonucleotide
ugcaacguguguagacagg

SEQ ID NO: 1792709 - RNA, 19 nt, Artificial Sequence
  Description of Artificial Sequence: Synthetic oligonucleotide
ucucgagaaccgcuuaaca

SEQ ID NO: 1792710 - RNA, 19 nt, Artificial Sequence
  Description of Artificial Sequence: Synthetic oligonucleotide
uguaaugaauagacucuau

SEQ ID NO: 1792711 - RNA, 19 nt, Artificial Sequence
  Description of Artificial Sequence: Synthetic oligonucleotide
guuacuagguuucgaauaa

SEQ ID NO: 1792712 - RNA, 19 nt, Artificial Sequence
  Description of Artificial Sequence: Synthetic oligonucleotide
acuuugagaguccggucag

SEQ ID NO: 1792713 - RNA, 19 nt, Artificial Sequence
  Description of Artificial Sequence: Synthetic oligonucleotide
ugcauacagcguacagugg

SEQ ID NO: 1792714 - RNA, 19 nt, Artificial Sequence
  Description of Artificial Sequence: Synthetic oligonucleotide
uucccagagacaagaauau

SEQ ID NO: 1792715 - RNA, 19 nt, Artificial Sequence
  Description of Artificial Sequence: Synthetic oligonucleotide
gaauauugucuuugaguuc

SEQ ID NO: 1792716 - RNA, 19 nt, Artificial Sequence
  Description of Artificial Sequence: Synthetic oligonucleotide
ucggauugauguaucuaga

SEQ ID NO: 1792717 - RNA, 19 nt, Artificial Sequence
  Description of Artificial Sequence: Synthetic oligonucleotide
agacucuauuagugugucc

SEQ ID NO: 1792718 - RNA, 19 nt, Artificial Sequence
  Description of Artificial Sequence: Synthetic oligonucleotide
uucuuagacauuugcccgu

SEQ ID NO: 1792719 - RNA, 19 nt, Artificial Sequence
  Description of Artificial Sequence: Synthetic oligonucleotide
ugcaaugguucaucaauuc

SEQ ID NO: 1792720 - RNA, 19 nt, Artificial Sequence
  Description of Artificial Sequence: Synthetic oligonucleotide
cuagagauccacucaccac

SEQ ID NO: 1792721 - RNA, 19 nt, Artificial Sequence
  Description of Artificial Sequence: Synthetic oligonucleotide
ucucuugaugugcaauggu

SEQ ID NO: 1792722 - RNA, 19 nt, Artificial Sequence
  Description of Artificial Sequence: Synthetic oligonucleotide
augcgguuaccacaaaacu

SEQ ID NO: 1792723 - RNA, 19 nt, Artificial Sequence
  Description of Artificial Sequence: Synthetic oligonucleotide
  modified_base (6)..(6): a, c, u, g, unknown or other
uguuuncucuucauuucau

SEQ ID NO: 1792724 - RNA, 19 nt, Artificial Sequence
  Description of Artificial Sequence: Synthetic oligonucleotide
gauuuuaacuguagaaucu

SEQ ID NO: 1792725 - RNA, 19 nt, Artificial Sequence
  Description of Artificial Sequence: Synthetic oligonucleotide
agaaccgcuuaacaacucu

SEQ ID NO: 1792726 - RNA, 19 nt, Artificial Sequence
  Description of Artificial Sequence: Synthetic oligonucleotide
  modified_base (10)..(10): a, c, u, g, unknown or other
aucuuguuuncucuucauu

SEQ ID NO: 1792727 - RNA, 19 nt, Artificial Sequence
  Description of Artificial Sequence: Synthetic oligonucleotide
cuuuuaaaguguugucauc

SEQ ID NO: 1792728 - RNA, 19 nt, Artificial Sequence
  Description of Artificial Sequence: Synthetic oligonucleotide
ucaauucccucuucuuuac

SEQ ID NO: 1792729 - RNA, 19 nt, Artificial Sequence
  Description of Artificial Sequence: Synthetic oligonucleotide
auucacccguuuucaaguc

SEQ ID NO: 1792730 - RNA, 19 nt, Artificial Sequence
  Description of Artificial Sequence: Synthetic oligonucleotide
aguugguaucaauucugug

SEQ ID NO: 1792731 - RNA, 19 nt, Artificial Sequence
  Description of Artificial Sequence: Synthetic oligonucleotide
gcaauguuuguaaacacug

SEQ ID NO: 1792732 - RNA, 19 nt, Artificial Sequence
  Description of Artificial Sequence: Synthetic oligonucleotide
gacccaucaagacauguaa

SEQ ID NO: 1792733 - RNA, 19 nt, Artificial Sequence
  Description of Artificial Sequence: Synthetic oligonucleotide
guaucuagagauccacuca

SEQ ID NO: 1792734 - RNA, 19 nt, Artificial Sequence
  Description of Artificial Sequence: Synthetic oligonucleotide
cuugaugugcaaugguuca

SEQ ID NO: 1792735 - RNA, 19 nt, Artificial Sequence
  Description of Artificial Sequence: Synthetic oligonucleotide
gaauagacucuauuagugu

SEQ ID NO: 1792736 - RNA, 19 nt, Artificial Sequence
  Description of Artificial Sequence: Synthetic oligonucleotide
cucucuccagagaagguug

SEQ ID NO: 1792737 - RNA, 19 nt, Artificial Sequence
  Description of Artificial Sequence: Synthetic oligonucleotide
auugucucucaucugugau

SEQ ID NO: 1792738 - RNA, 19 nt, Artificial Sequence
  Description of Artificial Sequence: Synthetic oligonucleotide
cacucuccaauguuacuag

SEQ ID NO: 1792739 - RNA, 19 nt, Artificial Sequence
  Description of Artificial Sequence: Synthetic oligonucleotide
aacuaugcgguuaccacaa

SEQ ID NO: 1792740 - RNA, 19 nt, Artificial Sequence
  Description of Artificial Sequence: Synthetic oligonucleotide
caauaucccaaacccuaag

SEQ ID NO: 1792741 - RNA, 19 nt, Artificial Sequence
  Description of Artificial Sequence: Synthetic oligonucleotide
ugguguccuguuaaugugu

SEQ ID NO: 1792742 - RNA, 19 nt, Artificial Sequence
  Description of Artificial Sequence: Synthetic oligonucleotide
agucucagcauuccauacu

SEQ ID NO: 1792743 - RNA, 19 nt, Artificial Sequence
  Description of Artificial Sequence: Synthetic oligonucleotide
ugacugcugaccaaacuuu

SEQ ID NO: 1792744 - RNA, 19 nt, Artificial Sequence
  Description of Artificial Sequence: Synthetic oligonucleotide
uacagcguacaguggaagu

SEQ ID NO: 1792745 - RNA, 19 nt, Artificial Sequence
  Description of Artificial Sequence: Synthetic oligonucleotide
ucgaauaaauucacccguu

SEQ ID NO: 1792746 - RNA, 19 nt, Artificial Sequence
  Description of Artificial Sequence: Synthetic oligonucleotide
ugaugauauugucucucau

SEQ ID NO: 1792747 - RNA, 19 nt, Artificial Sequence
  Description of Artificial Sequence: Synthetic oligonucleotide
gaccuugcaauguuuguaa

SEQ ID NO: 1792748 - RNA, 19 nt, Artificial Sequence
  Description of Artificial Sequence: Synthetic oligonucleotide
cacucugaugcuuguuggg

SEQ ID NO: 1792749 - RNA, 19 nt, Artificial Sequence
  Description of Artificial Sequence: Synthetic oligonucleotide
aucuagagauccacucacc

SEQ ID NO: 1792750 - RNA, 19 nt, Artificial Sequence
  Description of Artificial Sequence: Synthetic oligonucleotide
guaaacaggucacagcacu

SEQ ID NO: 1792751 - RNA, 19 nt, Artificial Sequence
  Description of Artificial Sequence: Synthetic oligonucleotide
uugucugauguaugcacuc

SEQ ID NO: 1792752 - RNA, 19 nt, Artificial Sequence
  Description of Artificial Sequence: Synthetic oligonucleotide
uuuucaagucccagaguuu

SEQ ID NO: 1792753 - RNA, 19 nt, Artificial Sequence
  Description of Artificial Sequence: Synthetic oligonucleotide
auuugagcucuccucgccu

SEQ ID NO: 1792754 - RNA, 19 nt, Artificial Sequence
  Description of Artificial Sequence: Synthetic oligonucleotide
aucucgagaaccgcuuaac

SEQ ID NO: 1792755 - RNA, 19 nt, Artificial Sequence
  Description of Artificial Sequence: Synthetic oligonucleotide
gaugaccauacuccaccug

SEQ ID NO: 1792756 - RNA, 19 nt, Artificial Sequence
  Description of Artificial Sequence: Synthetic oligonucleotide
uuugguguuagaggcucug

SEQ ID NO: 1792757 - RNA, 19 nt, Artificial Sequence
  Description of Artificial Sequence: Synthetic oligonucleotide
agugugucccugcaacgug

SEQ ID NO: 1792758 - RNA, 19 nt, Artificial Sequence
  Description of Artificial Sequence: Synthetic oligonucleotide
auguuacuagguuucgaau

SEQ ID NO: 1792759 - RNA, 19 nt, Artificial Sequence
  Description of Artificial Sequence: Synthetic oligonucleotide
ugacccaucaagacaugua

SEQ ID NO: 1792760 - RNA, 19 nt, Artificial Sequence
  Description of Artificial Sequence: Synthetic oligonucleotide
uguaggcaugugaucacau

SEQ ID NO: 1792761 - RNA, 19 nt, Artificial Sequence
  Description of Artificial Sequence: Synthetic oligonucleotide
auagacucuauuagugugu

SEQ ID NO: 1792762 - RNA, 19 nt, Artificial Sequence
  Description of Artificial Sequence: Synthetic oligonucleotide
ccacuaacaacccuccugc

SEQ ID NO: 1792763 - RNA, 19 nt, Artificial Sequence
  Description of Artificial Sequence: Synthetic oligonucleotide
aggacugguguccuguuaa

SEQ ID NO: 1792764 - RNA, 19 nt, Artificial Sequence
  Description of Artificial Sequence: Synthetic oligonucleotide
cagagacaagaauauuguc

SEQ ID NO: 1792765 - RNA, 19 nt, Artificial Sequence
  Description of Artificial Sequence: Synthetic oligonucleotide
gaccgcugcuacaugaccc

SEQ ID NO: 1792766 - RNA, 19 nt, Artificial Sequence
  Description of Artificial Sequence: Synthetic oligonucleotide
ggauugauguaucuagaga

SEQ ID NO: 1792767 - RNA, 19 nt, Artificial Sequence
  Description of Artificial Sequence: Synthetic oligonucleotide
ucccaacugcacauaccag

SEQ ID NO: 1792768 - RNA, 19 nt, Artificial Sequence
  Description of Artificial Sequence: Synthetic oligonucleotide
uguaaacacuguccuguuu

SEQ ID NO: 1792769 - RNA, 19 nt, Artificial Sequence
  Description of Artificial Sequence: Synthetic oligonucleotide
cccaacugcacauaccagc

SEQ ID NO: 1792770 - RNA, 19 nt, Artificial Sequence
  Description of Artificial Sequence: Synthetic oligonucleotide
cagaaccacuaacuaugcg

SEQ ID NO: 1792771 - RNA, 19 nt, Artificial Sequence
  Description of Artificial Sequence: Synthetic oligonucleotide
guacacagcggaccgcugc

SEQ ID NO: 1792772 - RNA, 19 nt, Artificial Sequence
  Description of Artificial Sequence: Synthetic oligonucleotide
uuguacacagcggaccgcu

SEQ ID NO: 1792773 - RNA, 19 nt, Artificial Sequence
  Description of Artificial Sequence: Synthetic oligonucleotide
auacuccaccugugugucc

SEQ ID NO: 1792774 - RNA, 19 nt, Artificial Sequence
  Description of Artificial Sequence: Synthetic oligonucleotide
cucagccaaaauucuccag

SEQ ID NO: 1792775 - RNA, 19 nt, Artificial Sequence
  Description of Artificial Sequence: Synthetic oligonucleotide
cucgagaaccgcuuaacaa

SEQ ID NO: 1792776 - RNA, 19 nt, Artificial Sequence
  Description of Artificial Sequence: Synthetic oligonucleotide
gauccacuaaugaugauau

SEQ ID NO: 1792777 - RNA, 19 nt, Artificial Sequence
  Description of Artificial Sequence: Synthetic oligonucleotide
ugucccacuaauguucuua

SEQ ID NO: 1792778 - RNA, 19 nt, Artificial Sequence
  Description of Artificial Sequence: Synthetic oligonucleotide
ucaucugagcugguaauua

SEQ ID NO: 1792779 - RNA, 19 nt, Artificial Sequence
  Description of Artificial Sequence: Synthetic oligonucleotide
uacacagcggaccgcugcu

SEQ ID NO: 1792780 - RNA, 19 nt, Artificial Sequence
  Description of Artificial Sequence: Synthetic oligonucleotide
gaugcuuguugggaccuug

SEQ ID NO: 1792781 - RNA, 19 nt, Artificial Sequence
  Description of Artificial Sequence: Synthetic oligonucleotide
gucccugcaacguguguag

SEQ ID NO: 1792782 - RNA, 19 nt, Artificial Sequence
  Description of Artificial Sequence: Synthetic oligonucleotide
cuuguugggaccuugcaau

SEQ ID NO: 1792783 - RNA, 19 nt, Artificial Sequence
  Description of Artificial Sequence: Synthetic oligonucleotide
uguuaaggacugguguccu

SEQ ID NO: 1792784 - RNA, 19 nt, Artificial Sequence
  Description of Artificial Sequence: Synthetic oligonucleotide
auacagcguacaguggaag

SEQ ID NO: 1792785 - RNA, 19 nt, Artificial Sequence
  Description of Artificial Sequence: Synthetic oligonucleotide
uagacucuauuaguguguc

SEQ ID NO: 1792786 - RNA, 19 nt, Artificial Sequence
  Description of Artificial Sequence: Synthetic oligonucleotide
gaugcauacagcguacagu

SEQ ID NO: 1792787 - RNA, 19 nt, Artificial Sequence
  Description of Artificial Sequence: Synthetic oligonucleotide
guguauaaaaccuggcuuu

SEQ ID NO: 1792788 - RNA, 19 nt, Artificial Sequence
  Description of Artificial Sequence: Synthetic oligonucleotide
gcacucugaugcuuguugg

SEQ ID NO: 1792789 - RNA, 19 nt, Artificial Sequence
  Description of Artificial Sequence: Synthetic oligonucleotide
gaguccggucaguggaucc

SEQ ID NO: 1792790 - RNA, 19 nt, Artificial Sequence
  Description of Artificial Sequence: Synthetic oligonucleotide
cucugauccgccacacaac

SEQ ID NO: 1792791 - RNA, 19 nt, Artificial Sequence
  Description of Artificial Sequence: Synthetic oligonucleotide
cacuaauguucuuagacau

SEQ ID NO: 1792792 - RNA, 19 nt, Artificial Sequence
  Description of Artificial Sequence: Synthetic oligonucleotide
auauugucucucaucugug

SEQ ID NO: 1792793 - RNA, 19 nt, Artificial Sequence
  Description of Artificial Sequence: Synthetic oligonucleotide
gaaccacuaacuaugcggu

SEQ ID NO: 1792794 - RNA, 19 nt, Artificial Sequence
  Description of Artificial Sequence: Synthetic oligonucleotide
guaucaauucuguguuguc

SEQ ID NO: 1792795 - RNA, 19 nt, Artificial Sequence
  Description of Artificial Sequence: Synthetic oligonucleotide
cacgggcuguguauaaaac

SEQ ID NO: 1792796 - RNA, 19 nt, Artificial Sequence
  Description of Artificial Sequence: Synthetic oligonucleotide
auuugcccgugacugcuga

SEQ ID NO: 1792797 - RNA, 19 nt, Artificial Sequence
  Description of Artificial Sequence: Synthetic oligonucleotide
ucccagacucggauugaug

SEQ ID NO: 1792798 - RNA, 19 nt, Artificial Sequence
  Description of Artificial Sequence: Synthetic oligonucleotide
acuagguuucgaauaaauu

SEQ ID NO: 1792799 - RNA, 19 nt, Artificial Sequence
  Description of Artificial Sequence: Synthetic oligonucleotide
guaaugaauagacucuauu

SEQ ID NO: 1792800 - RNA, 19 nt, Artificial Sequence
  Description of Artificial Sequence: Synthetic oligonucleotide
ccguuuucaagucccagag

SEQ ID NO: 1792801 - RNA, 19 nt, Artificial Sequence
  Description of Artificial Sequence: Synthetic oligonucleotide
cauacuuugagaguccggu

SEQ ID NO: 1792802 - RNA, 19 nt, Artificial Sequence
  Description of Artificial Sequence: Synthetic oligonucleotide
uguacacagcggaccgcug

SEQ ID NO: 1792803 - RNA, 19 nt, Artificial Sequence
  Description of Artificial Sequence: Synthetic oligonucleotide
ugucccugcaacgugugua

SEQ ID NO: 1792804 - RNA, 19 nt, Artificial Sequence
  Description of Artificial Sequence: Synthetic oligonucleotide
acguguguagacaggucuc

SEQ ID NO: 1792805 - RNA, 19 nt, Artificial Sequence
  Description of Artificial Sequence: Synthetic oligonucleotide
ugccauuccuacucccaac

SEQ ID NO: 1792806 - RNA, 19 nt, Artificial Sequence
  Description of Artificial Sequence: Synthetic oligonucleotide
accgcuuaacaacucuuuu

SEQ ID NO: 1792807 - RNA, 19 nt, Artificial Sequence
  Description of Artificial Sequence: Synthetic oligonucleotide
ccuugcaauguuuguaaac

SEQ ID NO: 1792808 - RNA, 19 nt, Artificial Sequence
  Description of Artificial Sequence: Synthetic oligonucleotide
accgcugcuacaugaccca

SEQ ID NO: 1792809 - RNA, 19 nt, Artificial Sequence
  Description of Artificial Sequence: Synthetic oligonucleotide
accacuaacuaugcgguua

SEQ ID NO: 1792810 - RNA, 19 nt, Artificial Sequence
  Description of Artificial Sequence: Synthetic oligonucleotide
gcugcuacaugacccauca

SEQ ID NO: 1792811 - RNA, 19 nt, Artificial Sequence
  Description of Artificial Sequence: Synthetic oligonucleotide
cugugaugaccauacucca

SEQ ID NO: 1792812 - RNA, 19 nt, Artificial Sequence
  Description of Artificial Sequence: Synthetic oligonucleotide
cacuaacaacccuccugcc

SEQ ID NO: 1792813 - RNA, 19 nt, Artificial Sequence
  Description of Artificial Sequence: Synthetic oligonucleotide
cucuccagucucagcauuc

SEQ ID NO: 1792814 - RNA, 19 nt, Artificial Sequence
  Description of Artificial Sequence: Synthetic oligonucleotide
aaccacuaacuaugcgguu

SEQ ID NO: 1792815 - RNA, 19 nt, Artificial Sequence
  Description of Artificial Sequence: Synthetic oligonucleotide
uuacuagguuucgaauaaa

SEQ ID NO: 1792816 - RNA, 19 nt, Artificial Sequence
  Description of Artificial Sequence: Synthetic oligonucleotide
aaccgcuuaacaacucuuu

SEQ ID NO: 1792817 - RNA, 19 nt, Artificial Sequence
  Description of Artificial Sequence: Synthetic oligonucleotide
gcuacaugacccaucaaga

SEQ ID NO: 1792818 - RNA, 19 nt, Artificial Sequence
  Description of Artificial Sequence: Synthetic oligonucleotide
cuaacaacccuccugccau

SEQ ID NO: 1792819 - RNA, 19 nt, Artificial Sequence
  Description of Artificial Sequence: Synthetic oligonucleotide
ccaaacuuuuaaaguguug

SEQ ID NO: 1792820 - RNA, 19 nt, Artificial Sequence
  Description of Artificial Sequence: Synthetic oligonucleotide
caugugaucacaugaucau

SEQ ID NO: 1792821 - RNA, 19 nt, Artificial Sequence
  Description of Artificial Sequence: Synthetic oligonucleotide
uuccuacucccaacugcac

SEQ ID NO: 1792822 - RNA, 19 nt, Artificial Sequence
  Description of Artificial Sequence: Synthetic oligonucleotide
auggagaugcauacagcgu

SEQ ID NO: 1792823 - RNA, 19 nt, Artificial Sequence
  Description of Artificial Sequence: Synthetic oligonucleotide
cuaugcgguuaccacaaaa

SEQ ID NO: 1792824 - RNA, 19 nt, Artificial Sequence
  Description of Artificial Sequence: Synthetic oligonucleotide
ugcccauauaaaguaugua

SEQ ID NO: 1792825 - RNA, 19 nt, Artificial Sequence
  Description of Artificial Sequence: Synthetic oligonucleotide
gauccgccacacaacuccc

SEQ ID NO: 1792826 - RNA, 19 nt, Artificial Sequence
  Description of Artificial Sequence: Synthetic oligonucleotide
cuucaccauaaaaucauau

SEQ ID NO: 1792827 - RNA, 19 nt, Artificial Sequence
  Description of Artificial Sequence: Synthetic oligonucleotide
agacucggauugauguauc

SEQ ID NO: 1792828 - RNA, 19 nt, Artificial Sequence
  Description of Artificial Sequence: Synthetic oligonucleotide
gugacugcugaccaaacuu

SEQ ID NO: 1792829 - RNA, 19 nt, Artificial Sequence
  Description of Artificial Sequence: Synthetic oligonucleotide
cguacaguggaagugugcc

SEQ ID NO: 1792830 - RNA, 19 nt, Artificial Sequence
  Description of Artificial Sequence: Synthetic oligonucleotide
uugggaccuugcaauguuu

SEQ ID NO: 1792831 - RNA, 19 nt, Artificial Sequence
  Description of Artificial Sequence: Synthetic oligonucleotide
caucagaaccacuaacuau

SEQ ID NO: 1792832 - RNA, 19 nt, Artificial Sequence
  Description of Artificial Sequence: Synthetic oligonucleotide
cauacagcguacaguggaa

SEQ ID NO: 1792833 - RNA, 19 nt, Artificial Sequence
  Description of Artificial Sequence: Synthetic oligonucleotide
caauguuuguaaacacugu

SEQ ID NO: 1792834 - RNA, 19 nt, Artificial Sequence
  Description of Artificial Sequence: Synthetic oligonucleotide
caacguguguagacagguc

SEQ ID NO: 1792835 - RNA, 19 nt, Artificial Sequence
  Description of Artificial Sequence: Synthetic oligonucleotide
gagauccacucaccacaug

SEQ ID NO: 1792836 - RNA, 19 nt, Artificial Sequence
  Description of Artificial Sequence: Synthetic oligonucleotide
cggauugauguaucuagag

SEQ ID NO: 1792837 - RNA, 19 nt, Artificial Sequence
  Description of Artificial Sequence: Synthetic oligonucleotide
aucaucugagcugguaauu

SEQ ID NO: 1792838 - RNA, 19 nt, Artificial Sequence
  Description of Artificial Sequence: Synthetic oligonucleotide
acuaauguucuuagacauu

SEQ ID NO: 1792839 - RNA, 19 nt, Artificial Sequence
  Description of Artificial Sequence: Synthetic oligonucleotide
auccgccacacaacucccc

SEQ ID NO: 1792840 - RNA, 19 nt, Artificial Sequence
  Description of Artificial Sequence: Synthetic oligonucleotide
uuugcccgugacugcugac

SEQ ID NO: 1792841 - RNA, 19 nt, Artificial Sequence
  Description of Artificial Sequence: Synthetic oligonucleotide
cccuaagaguggcaucucg

SEQ ID NO: 1792842 - RNA, 19 nt, Artificial Sequence
  Description of Artificial Sequence: Synthetic oligonucleotide
ccauacuuugagaguccgg

SEQ ID NO: 1792843 - RNA, 19 nt, Artificial Sequence
  Description of Artificial Sequence: Synthetic oligonucleotide
cuugggagauuugagcucu

SEQ ID NO: 1792844 - RNA, 19 nt, Artificial Sequence
  Description of Artificial Sequence: Synthetic oligonucleotide
acccguuuucaagucccag

SEQ ID NO: 1792845 - RNA, 19 nt, Artificial Sequence
  Description of Artificial Sequence: Synthetic oligonucleotide
gacucggauugauguaucu

SEQ ID NO: 1792846 - RNA, 19 nt, Artificial Sequence
  Description of Artificial Sequence: Synthetic oligonucleotide
guugucugauguaugcacu

SEQ ID NO: 1792847 - RNA, 19 nt, Artificial Sequence
  Description of Artificial Sequence: Synthetic oligonucleotide
cuccagagaagguuguccu

SEQ ID NO: 1792848 - RNA, 19 nt, Artificial Sequence
  Description of Artificial Sequence: Synthetic oligonucleotide
acucggauugauguaucua

SEQ ID NO: 1792849 - RNA, 19 nt, Artificial Sequence
  Description of Artificial Sequence: Synthetic oligonucleotide
cugauccgccacacaacuc

SEQ ID NO: 1792850 - RNA, 19 nt, Artificial Sequence
  Description of Artificial Sequence: Synthetic oligonucleotide
guggcaucucgagaaccgc

SEQ ID NO: 1792851 - RNA, 19 nt, Artificial Sequence
  Description of Artificial Sequence: Synthetic oligonucleotide
ucgccuccaguugguauca

SEQ ID NO: 1792852 - RNA, 19 nt, Artificial Sequence
  Description of Artificial Sequence: Synthetic oligonucleotide
aguccggucaguggaucca

SEQ ID NO: 1792853 - RNA, 19 nt, Artificial Sequence
  Description of Artificial Sequence: Synthetic oligonucleotide
gagaaccgcuuaacaacuc

SEQ ID NO: 1792854 - RNA, 19 nt, Artificial Sequence
  Description of Artificial Sequence: Synthetic oligonucleotide
gcgguuaccacaaaacugu

SEQ ID NO: 1792855 - RNA, 19 nt, Artificial Sequence
  Description of Artificial Sequence: Synthetic oligonucleotide
ggagaugcauacagcguac

SEQ ID NO: 1792856 - RNA, 19 nt, Artificial Sequence
  Description of Artificial Sequence: Synthetic oligonucleotide
ggaccgcugcuacaugacc

SEQ ID NO: 1792857 - RNA, 19 nt, Artificial Sequence
  Description of Artificial Sequence: Synthetic oligonucleotide
ccuaagaguggcaucucga

SEQ ID NO: 1792858 - RNA, 19 nt, Artificial Sequence
  Description of Artificial Sequence: Synthetic oligonucleotide
caguugguaucaauucugu

SEQ ID NO: 1792859 - RNA, 19 nt, Artificial Sequence
  Description of Artificial Sequence: Synthetic oligonucleotide
uccacgggcuguguauaaa

SEQ ID NO: 1792860 - RNA, 19 nt, Artificial Sequence
  Description of Artificial Sequence: Synthetic oligonucleotide
caucucgagaaccgcuuaa

SEQ ID NO: 1792861 - RNA, 19 nt, Artificial Sequence
  Description of Artificial Sequence: Synthetic oligonucleotide
acccuaagaguggcaucuc

SEQ ID NO: 1792862 - RNA, 19 nt, Artificial Sequence
  Description of Artificial Sequence: Synthetic oligonucleotide
gcuccacuaacaacccucc

SEQ ID NO: 1792863 - RNA, 19 nt, Artificial Sequence
  Description of Artificial Sequence: Synthetic oligonucleotide
ccuugggagauuugagcuc

SEQ ID NO: 1792864 - RNA, 19 nt, Artificial Sequence
  Description of Artificial Sequence: Synthetic oligonucleotide
uugggagauuugagcucuc

SEQ ID NO: 1792865 - RNA, 19 nt, Artificial Sequence
  Description of Artificial Sequence: Synthetic oligonucleotide
cacuaacuaugcgguuacc

SEQ ID NO: 1792866 - RNA, 19 nt, Artificial Sequence
  Description of Artificial Sequence: Synthetic oligonucleotide
cuuagacauuugcccguga

SEQ ID NO: 1792867 - RNA, 19 nt, Artificial Sequence
  Description of Artificial Sequence: Synthetic oligonucleotide
cuguaggcaugugaucaca

SEQ ID NO: 1792868 - RNA, 19 nt, Artificial Sequence
  Description of Artificial Sequence: Synthetic oligonucleotide
acuaugcgguuaccacaaa

SEQ ID NO: 1792869 - RNA, 19 nt, Artificial Sequence
  Description of Artificial Sequence: Synthetic oligonucleotide
caaacccuaagaguggcau

SEQ ID NO: 1792870 - RNA, 19 nt, Artificial Sequence
  Description of Artificial Sequence: Synthetic oligonucleotide
agcggaccgcugcuacaug

SEQ ID NO: 1792871 - RNA, 19 nt, Artificial Sequence
  Description of Artificial Sequence: Synthetic oligonucleotide
gugcccauauaaaguaugu

SEQ ID NO: 1792872 - RNA, 19 nt, Artificial Sequence
  Description of Artificial Sequence: Synthetic oligonucleotide
acaacccuccugccaucau

SEQ ID NO: 1792873 - RNA, 19 nt, Artificial Sequence
  Description of Artificial Sequence: Synthetic oligonucleotide
ucccugcaacguguguaga

SEQ ID NO: 1792874 - RNA, 19 nt, Artificial Sequence
  Description of Artificial Sequence: Synthetic oligonucleotide
guggaagugugcccauaua

SEQ ID NO: 1792875 - RNA, 19 nt, Artificial Sequence
  Description of Artificial Sequence: Synthetic oligonucleotide
cccagacucggauugaugu

SEQ ID NO: 1792876 - RNA, 19 nt, Artificial Sequence
  Description of Artificial Sequence: Synthetic oligonucleotide
caacccuccugccaucaua

SEQ ID NO: 1792877 - RNA, 19 nt, Artificial Sequence
  Description of Artificial Sequence: Synthetic oligonucleotide
gaaccgcuuaacaacucuu

SEQ ID NO: 1792878 - RNA, 19 nt, Artificial Sequence
  Description of Artificial Sequence: Synthetic oligonucleotide
guccuguuaaugugugaau

SEQ ID NO: 1792879 - RNA, 19 nt, Artificial Sequence
  Description of Artificial Sequence: Synthetic oligonucleotide
ccaacugcacauaccagcu

SEQ ID NO: 1792880 - RNA, 19 nt, Artificial Sequence
  Description of Artificial Sequence: Synthetic oligonucleotide
cuucagugccauuccuacu

SEQ ID NO: 1792881 - RNA, 19 nt, Artificial Sequence
  Description of Artificial Sequence: Synthetic oligonucleotide
ccuccugccaucauauugu

SEQ ID NO: 1792882 - RNA, 19 nt, Artificial Sequence
  Description of Artificial Sequence: Synthetic oligonucleotide
cagacucggauugauguau

SEQ ID NO: 1792883 - RNA, 19 nt, Artificial Sequence
  Description of Artificial Sequence: Synthetic oligonucleotide
gcaacguguguagacaggu

SEQ ID NO: 1792884 - RNA, 19 nt, Artificial Sequence
  Description of Artificial Sequence: Synthetic oligonucleotide
gggagauuugagcucuccu

SEQ ID NO: 1792885 - RNA, 19 nt, Artificial Sequence
  Description of Artificial Sequence: Synthetic oligonucleotide
gacugcugaccaaacuuuu

SEQ ID NO: 1792886 - RNA, 19 nt, Artificial Sequence
  Description of Artificial Sequence: Synthetic oligonucleotide
cuuugguguuagaggcucu

SEQ ID NO: 1792887 - RNA, 19 nt, Artificial Sequence
  Description of Artificial Sequence: Synthetic oligonucleotide
cacccguuuucaaguccca

SEQ ID NO: 1792888 - RNA, 19 nt, Artificial Sequence
  Description of Artificial Sequence: Synthetic oligonucleotide
ugaugcuuguugggaccuu

SEQ ID NO: 1792889 - RNA, 19 nt, Artificial Sequence
  Description of Artificial Sequence: Synthetic oligonucleotide
cagcguacaguggaagugu

SEQ ID NO: 1792890 - RNA, 19 nt, Artificial Sequence
  Description of Artificial Sequence: Synthetic oligonucleotide
gggaccuugcaauguuugu

SEQ ID NO: 1792891 - RNA, 19 nt, Artificial Sequence
  Description of Artificial Sequence: Synthetic oligonucleotide
ccuacucccaacugcacau

SEQ ID NO: 1792892 - RNA, 19 nt, Artificial Sequence
  Description of Artificial Sequence: Synthetic oligonucleotide
ccacgggcuguguauaaaa

SEQ ID NO: 1792893 - RNA, 19 nt, Artificial Sequence
  Description of Artificial Sequence: Synthetic oligonucleotide
ccaaacccuaagaguggca

SEQ ID NO: 1792894 - RNA, 19 nt, Artificial Sequence
  Description of Artificial Sequence: Synthetic oligonucleotide
cgagaaccgcuuaacaacu

SEQ ID NO: 1792895 - RNA, 19 nt, Artificial Sequence
  Description of Artificial Sequence: Synthetic oligonucleotide
uccucgccuccaguuggua

SEQ ID NO: 1792896 - RNA, 19 nt, Artificial Sequence
  Description of Artificial Sequence: Synthetic oligonucleotide
ccgugacugcugaccaaac

SEQ ID NO: 1792897 - RNA, 19 nt, Artificial Sequence
  Description of Artificial Sequence: Synthetic oligonucleotide
gugugcccauauaaaguau

SEQ ID NO: 1792898 - RNA, 19 nt, Artificial Sequence
  Description of Artificial Sequence: Synthetic oligonucleotide
gagaguccggucaguggau

SEQ ID NO: 1792899 - RNA, 19 nt, Artificial Sequence
  Description of Artificial Sequence: Synthetic oligonucleotide
ccagacucggauugaugua

SEQ ID NO: 1792900 - RNA, 19 nt, Artificial Sequence
  Description of Artificial Sequence: Synthetic oligonucleotide
acacagcggaccgcugcua

SEQ ID NO: 1792901 - RNA, 19 nt, Artificial Sequence
  Description of Artificial Sequence: Synthetic oligonucleotide
cggaccgcugcuacaugac

SEQ ID NO: 1792902 - RNA, 19 nt, Artificial Sequence
  Description of Artificial Sequence: Synthetic oligonucleotide
cuacucccaacugcacaua

SEQ ID NO: 1792903 - RNA, 19 nt, Artificial Sequence
  Description of Artificial Sequence: Synthetic oligonucleotide
cuccacuaacaacccuccu

SEQ ID NO: 1792904 - RNA, 19 nt, Artificial Sequence
  Description of Artificial Sequence: Synthetic oligonucleotide
caucgaaguccagcaccaa

SEQ ID NO: 1792905 - RNA, 19 nt, Artificial Sequence
  Description of Artificial Sequence: Synthetic oligonucleotide
cugcuacaugacccaucaa

SEQ ID NO: 1792906 - RNA, 19 nt, Artificial Sequence
  Description of Artificial Sequence: Synthetic oligonucleotide
gugucccugcaacgugugu

SEQ ID NO: 1792907 - RNA, 19 nt, Artificial Sequence
  Description of Artificial Sequence: Synthetic oligonucleotide
cgcugcuacaugacccauc

SEQ ID NO: 1792908 - RNA, 19 nt, Artificial Sequence
  Description of Artificial Sequence: Synthetic oligonucleotide
cguguguagacaggucuca

SEQ ID NO: 1792909 - RNA, 19 nt, Artificial Sequence
  Description of Artificial Sequence: Synthetic oligonucleotide
caacugcacauaccagcuu

SEQ ID NO: 1792910 - RNA, 19 nt, Artificial Sequence
  Description of Artificial Sequence: Synthetic oligonucleotide
ggacugguguccuguuaau

SEQ ID NO: 1792911 - RNA, 19 nt, Artificial Sequence
  Description of Artificial Sequence: Synthetic oligonucleotide
cccgugacugcugaccaaa

SEQ ID NO: 1792912 - RNA, 19 nt, Artificial Sequence
  Description of Artificial Sequence: Synthetic oligonucleotide
cuccucgccuccaguuggu

SEQ ID NO: 1792913 - RNA, 19 nt, Artificial Sequence
  Description of Artificial Sequence: Synthetic oligonucleotide
cagcggaccgcugcuacau

SEQ ID NO: 1792914 - RNA, 19 nt, Artificial Sequence
  Description of Artificial Sequence: Synthetic oligonucleotide
cgaauaaauucacccguuu

SEQ ID NO: 1792915 - RNA, 19 nt, Artificial Sequence
  Description of Artificial Sequence: Synthetic oligonucleotide
cggucaguggauccacuaa

SEQ ID NO: 1792916 - RNA, 19 nt, Artificial Sequence
  Description of Artificial Sequence: Synthetic oligonucleotide
gcccgugacugcugaccaa

SEQ ID NO: 1792917 - RNA, 19 nt, Artificial Sequence
  Description of Artificial Sequence: Synthetic oligonucleotide
cguuuucaagucccagagu

SEQ ID NO: 1792918 - RNA, 19 nt, Artificial Sequence
  Description of Artificial Sequence: Synthetic oligonucleotide
cgguuaccacaaaacugua

SEQ ID NO: 1792919 - RNA, 19 nt, Artificial Sequence
  Description of Artificial Sequence: Synthetic oligonucleotide
cagcaccaacagcuugguu

SEQ ID NO: 1792920 - RNA, 19 nt, Artificial Sequence
  Description of Artificial Sequence: Synthetic oligonucleotide
aaaauuagcccauugaaac

SEQ ID NO: 1792921 - RNA, 19 nt, Artificial Sequence
  Description of Artificial Sequence: Synthetic oligonucleotide
auuacagugauuuuguccc

SEQ ID NO: 1792922 - RNA, 19 nt, Artificial Sequence
  Description of Artificial Sequence: Synthetic oligonucleotide
aaggggaaaacacaggacc

SEQ ID NO: 1792923 - RNA, 19 nt, Artificial Sequence
  Description of Artificial Sequence: Synthetic oligonucleotide
aaaggggauagcuaggccc

SEQ ID NO: 1792924 - RNA, 19 nt, Artificial Sequence
  Description of Artificial Sequence: Synthetic oligonucleotide
aauaaaauuagcccauuga

SEQ ID NO: 1792925 - RNA, 19 nt, Artificial Sequence
  Description of Artificial Sequence: Synthetic oligonucleotide
ucguauacgagguagaaag

SEQ ID NO: 1792926 - RNA, 19 nt, Artificial Sequence
  Description of Artificial Sequence: Synthetic oligonucleotide
auugaaacuccccacuacc

SEQ ID NO: 1792927 - RNA, 19 nt, Artificial Sequence
  Description of Artificial Sequence: Synthetic oligonucleotide
uccagauagggauucaccg

SEQ ID NO: 1792928 - RNA, 19 nt, Artificial Sequence
  Description of Artificial Sequence: Synthetic oligonucleotide
acuaccuaagguucuaaac

SEQ ID NO: 1792929 - RNA, 19 nt, Artificial Sequence
  Description of Artificial Sequence: Synthetic oligonucleotide
aaaaggccgacacuucugg

SEQ ID NO: 1792930 - RNA, 19 nt, Artificial Sequence
  Description of Artificial Sequence: Synthetic oligonucleotide
agaggcucaguccagauag

SEQ ID NO: 1792931 - RNA, 19 nt, Artificial Sequence
  Description of Artificial Sequence: Synthetic oligonucleotide
auaaaauuagcccauugaa

SEQ ID NO: 1792932 - RNA, 19 nt, Artificial Sequence
  Description of Artificial Sequence: Synthetic oligonucleotide
aaaaggggauagcuaggcc

SEQ ID NO: 1792933 - RNA, 19 nt, Artificial Sequence
  Description of Artificial Sequence: Synthetic oligonucleotide
aauaugauccauuucucuu

SEQ ID NO: 1792934 - RNA, 19 nt, Artificial Sequence
  Description of Artificial Sequence: Synthetic oligonucleotide
auaugauccauuucucuuc

SEQ ID NO: 1792935 - RNA, 19 nt, Artificial Sequence
  Description of Artificial Sequence: Synthetic oligonucleotide
aaacaauaugauccauuuc

SEQ ID NO: 1792936 - RNA, 19 nt, Artificial Sequence
  Description of Artificial Sequence: Synthetic oligonucleotide
aagagaaugggaacgcggc

SEQ ID NO: 1792937 - RNA, 19 nt, Artificial Sequence
  Description of Artificial Sequence: Synthetic oligonucleotide
uggguugugaauugagucg

SEQ ID NO: 1792938 - RNA, 19 nt, Artificial Sequence
  Description of Artificial Sequence: Synthetic oligonucleotide
guaagcuucucccaaaccc

SEQ ID NO: 1792939 - RNA, 19 nt, Artificial Sequence
  Description of Artificial Sequence: Synthetic oligonucleotide
guaaucaagucacuucugg

SEQ ID NO: 1792940 - RNA, 19 nt, Artificial Sequence
  Description of Artificial Sequence: Synthetic oligonucleotide
uauacgagguagaaagcag

SEQ ID NO: 1792941 - RNA, 19 nt, Artificial Sequence
  Description of Artificial Sequence: Synthetic oligonucleotide
aagguucuaaacuugggau

SEQ ID NO: 1792942 - RNA, 19 nt, Artificial Sequence
  Description of Artificial Sequence: Synthetic oligonucleotide
uuaaaagggccuuugugga

SEQ ID NO: 1792943 - RNA, 19 nt, Artificial Sequence
  Description of Artificial Sequence: Synthetic oligonucleotide
gauagaugcaaaauuccag

SEQ ID NO: 1792944 - RNA, 19 nt, Artificial Sequence
  Description of Artificial Sequence: Synthetic oligonucleotide
auagaugcaaaauuccagu

SEQ ID NO: 1792945 - RNA, 19 nt, Artificial Sequence
  Description of Artificial Sequence: Synthetic oligonucleotide
acgaagaugggguaaacug

SEQ ID NO: 1792946 - RNA, 19 nt, Artificial Sequence
  Description of Artificial Sequence: Synthetic oligonucleotide
ugcagaguaacucaccuuc

SEQ ID NO: 1792947 - RNA, 19 nt, Artificial Sequence
  Description of Artificial Sequence: Synthetic oligonucleotide
aggccuguaagcuucuccc

SEQ ID NO: 1792948 - RNA, 19 nt, Artificial Sequence
  Description of Artificial Sequence: Synthetic oligonucleotide
ucaagucacuucuggaagg

SEQ ID NO: 1792949 - RNA, 19 nt, Artificial Sequence
  Description of Artificial Sequence: Synthetic oligonucleotide
ugauccauuucucuucacc

SEQ ID NO: 1792950 - RNA, 19 nt, Artificial Sequence
  Description of Artificial Sequence: Synthetic oligonucleotide
uucucuucaccaaagccug

SEQ ID NO: 1792951 - RNA, 19 nt, Artificial Sequence
  Description of Artificial Sequence: Synthetic oligonucleotide
uugugaauugagucgcugg

SEQ ID NO: 1792952 - RNA, 19 nt, Artificial Sequence
  Description of Artificial Sequence: Synthetic oligonucleotide
aacgaaggggaaaacacag

SEQ ID NO: 1792953 - RNA, 19 nt, Artificial Sequence
  Description of Artificial Sequence: Synthetic oligonucleotide
aucaagucacuucuggaag

SEQ ID NO: 1792954 - RNA, 19 nt, Artificial Sequence
  Description of Artificial Sequence: Synthetic oligonucleotide
uuuugucccggccacacca

SEQ ID NO: 1792955 - RNA, 19 nt, Artificial Sequence
  Description of Artificial Sequence: Synthetic oligonucleotide
caagcugaagaaaggacgc

SEQ ID NO: 1792956 - RNA, 19 nt, Artificial Sequence
  Description of Artificial Sequence: Synthetic oligonucleotide
aauugagucgcugggaaga

SEQ ID NO: 1792957 - RNA, 19 nt, Artificial Sequence
  Description of Artificial Sequence: Synthetic oligonucleotide
aaugggaacgcggcggccc

SEQ ID NO: 1792958 - RNA, 19 nt, Artificial Sequence
  Description of Artificial Sequence: Synthetic oligonucleotide
gaugggguaaacugguaug

SEQ ID NO: 1792959 - RNA, 19 nt, Artificial Sequence
  Description of Artificial Sequence: Synthetic oligonucleotide
gacaucguauacgagguag

SEQ ID NO: 1792960 - RNA, 19 nt, Artificial Sequence
  Description of Artificial Sequence: Synthetic oligonucleotide
uacgagguagaaagcagag

SEQ ID NO: 1792961 - RNA, 19 nt, Artificial Sequence
  Description of Artificial Sequence: Synthetic oligonucleotide
cuuuccgugagggaggugg

SEQ ID NO: 1792962 - RNA, 19 nt, Artificial Sequence
  Description of Artificial Sequence: Synthetic oligonucleotide
ugagcgaucgucacgccgc

SEQ ID NO: 1792963 - RNA, 19 nt, Artificial Sequence
  Description of Artificial Sequence: Synthetic oligonucleotide
ugaauugagucgcugggaa

SEQ ID NO: 1792964 - RNA, 19 nt, Artificial Sequence
  Description of Artificial Sequence: Synthetic oligonucleotide
agugauuuugucccggcca

SEQ ID NO: 1792965 - RNA, 19 nt, Artificial Sequence
  Description of Artificial Sequence: Synthetic oligonucleotide
uuggguugugaauugaguc

SEQ ID NO: 1792966 - RNA, 19 nt, Artificial Sequence
  Description of Artificial Sequence: Synthetic oligonucleotide
guaacucaccuucaggccc

SEQ ID NO: 1792967 - RNA, 19 nt, Artificial Sequence
  Description of Artificial Sequence: Synthetic oligonucleotide
aaauuccaguucagaagcc

SEQ ID NO: 1792968 - RNA, 19 nt, Artificial Sequence
  Description of Artificial Sequence: Synthetic oligonucleotide
uccugcggcaagaacacag

SEQ ID NO: 1792969 - RNA, 19 nt, Artificial Sequence
  Description of Artificial Sequence: Synthetic oligonucleotide
ggugguggcccuuaaaagg

SEQ ID NO: 1792970 - RNA, 19 nt, Artificial Sequence
  Description of Artificial Sequence: Synthetic oligonucleotide
agcugaagaaaggacgccc

SEQ ID NO: 1792971 - RNA, 19 nt, Artificial Sequence
  Description of Artificial Sequence: Synthetic oligonucleotide
uuuggguugugaauugagu

SEQ ID NO: 1792972 - RNA, 19 nt, Artificial Sequence
  Description of Artificial Sequence: Synthetic oligonucleotide
cuaagguucuaaacuuggg

SEQ ID NO: 1792973 - RNA, 19 nt, Artificial Sequence
  Description of Artificial Sequence: Synthetic oligonucleotide
aaaccagcucauauuacag

SEQ ID NO: 1792974 - RNA, 19 nt, Artificial Sequence
  Description of Artificial Sequence: Synthetic oligonucleotide
gauagcuaggcccggcugc

SEQ ID NO: 1792975 - RNA, 19 nt, Artificial Sequence
  Description of Artificial Sequence: Synthetic oligonucleotide
uccgguuuuaccgcgaccc

SEQ ID NO: 1792976 - RNA, 19 nt, Artificial Sequence
  Description of Artificial Sequence: Synthetic oligonucleotide
aauuguagaccggcgcgcg

SEQ ID NO: 1792977 - RNA, 19 nt, Artificial Sequence
  Description of Artificial Sequence: Synthetic oligonucleotide
ucgcugggaagaaaagggg

SEQ ID NO: 1792978 - RNA, 19 nt, Artificial Sequence
  Description of Artificial Sequence: Synthetic oligonucleotide
agcuccagaaucucagcgg

SEQ ID NO: 1792979 - RNA, 19 nt, Artificial Sequence
  Description of Artificial Sequence: Synthetic oligonucleotide
auauuacagugauuuuguc

SEQ ID NO: 1792980 - RNA, 19 nt, Artificial Sequence
  Description of Artificial Sequence: Synthetic oligonucleotide
ugagucgcugggaagaaaa

SEQ ID NO: 1792981 - RNA, 19 nt, Artificial Sequence
  Description of Artificial Sequence: Synthetic oligonucleotide
cacaggaccaaacaauaug

SEQ ID NO: 1792982 - RNA, 19 nt, Artificial Sequence
  Description of Artificial Sequence: Synthetic oligonucleotide
ugaagaaaggacgcccggg

SEQ ID NO: 1792983 - RNA, 19 nt, Artificial Sequence
  Description of Artificial Sequence: Synthetic oligonucleotide
aaggggauagcuaggcccg

SEQ ID NO: 1792984 - RNA, 19 nt, Artificial Sequence
  Description of Artificial Sequence: Synthetic oligonucleotide
ggaauuguagaccggcgcg

SEQ ID NO: 1792985 - RNA, 19 nt, Artificial Sequence
  Description of Artificial Sequence: Synthetic oligonucleotide
acgcgcucggcauaguggc

SEQ ID NO: 1792986 - RNA, 19 nt, Artificial Sequence
  Description of Artificial Sequence: Synthetic oligonucleotide
agaaaggacgcccggguug

SEQ ID NO: 1792987 - RNA, 19 nt, Artificial Sequence
  Description of Artificial Sequence: Synthetic oligonucleotide
agagaaugggaacgcggcg

SEQ ID NO: 1792988 - RNA, 19 nt, Artificial Sequence
  Description of Artificial Sequence: Synthetic oligonucleotide
agccaguagaggcucaguc

SEQ ID NO: 1792989 - RNA, 19 nt, Artificial Sequence
  Description of Artificial Sequence: Synthetic oligonucleotide
agggcuaaagcaccaagcu

SEQ ID NO: 1792990 - RNA, 19 nt, Artificial Sequence
  Description of Artificial Sequence: Synthetic oligonucleotide
aauuccaguucagaagcca

SEQ ID NO: 1792991 - RNA, 19 nt, Artificial Sequence
  Description of Artificial Sequence: Synthetic oligonucleotide
uugaaacuccccacuaccu

SEQ ID NO: 1792992 - RNA, 19 nt, Artificial Sequence
  Description of Artificial Sequence: Synthetic oligonucleotide
ucagcggugagguacucga

SEQ ID NO: 1792993 - RNA, 19 nt, Artificial Sequence
  Description of Artificial Sequence: Synthetic oligonucleotide
uaaaagggccuuuguggag

SEQ ID NO: 1792994 - RNA, 19 nt, Artificial Sequence
  Description of Artificial Sequence: Synthetic oligonucleotide
auaguggccuuuccucagc

SEQ ID NO: 1792995 - RNA, 19 nt, Artificial Sequence
  Description of Artificial Sequence: Synthetic oligonucleotide
cuucuggaagggaaagggg

SEQ ID NO: 1792996 - RNA, 19 nt, Artificial Sequence
  Description of Artificial Sequence: Synthetic oligonucleotide
uaucuagguguuuggguug

SEQ ID NO: 1792997 - RNA, 19 nt, Artificial Sequence
  Description of Artificial Sequence: Synthetic oligonucleotide
gauucaccgacuugugcug

SEQ ID NO: 1792998 - RNA, 19 nt, Artificial Sequence
  Description of Artificial Sequence: Synthetic oligonucleotide
acaauaugauccauuucuc

SEQ ID NO: 1792999 - RNA, 19 nt, Artificial Sequence
  Description of Artificial Sequence: Synthetic oligonucleotide
gaauugagucgcugggaag

SEQ ID NO: 1793000 - RNA, 19 nt, Artificial Sequence
  Description of Artificial Sequence: Synthetic oligonucleotide
cugguaaucaagucacuuc

SEQ ID NO: 1793001 - RNA, 19 nt, Artificial Sequence
  Description of Artificial Sequence: Synthetic oligonucleotide
cagauagggauucaccgac

SEQ ID NO: 1793002 - RNA, 19 nt, Artificial Sequence
  Description of Artificial Sequence: Synthetic oligonucleotide
uuacagugauuuugucccg

SEQ ID NO: 1793003 - RNA, 19 nt, Artificial Sequence
  Description of Artificial Sequence: Synthetic oligonucleotide
agcucuuuccgugagggag

SEQ ID NO: 1793004 - RNA, 19 nt, Artificial Sequence
  Description of Artificial Sequence: Synthetic oligonucleotide
aacuccccacuaccuaagg

SEQ ID NO: 1793005 - RNA, 19 nt, Artificial Sequence
  Description of Artificial Sequence: Synthetic oligonucleotide
aaggccgacacuucuggaa

SEQ ID NO: 1793006 - RNA, 19 nt, Artificial Sequence
  Description of Artificial Sequence: Synthetic oligonucleotide
uaccuaagguucuaaacuu

SEQ ID NO: 1793007 - RNA, 19 nt, Artificial Sequence
  Description of Artificial Sequence: Synthetic oligonucleotide
gguucuaaacuugggauag

SEQ ID NO: 1793008 - RNA, 19 nt, Artificial Sequence
  Description of Artificial Sequence: Synthetic oligonucleotide
agucgcugggaagaaaagg

SEQ ID NO: 1793009 - RNA, 19 nt, Artificial Sequence
  Description of Artificial Sequence: Synthetic oligonucleotide
cuucaggcccaccucagcc

SEQ ID NO: 1793010 - RNA, 19 nt, Artificial Sequence
  Description of Artificial Sequence: Synthetic oligonucleotide
gacuugugcugguaucuag

SEQ ID NO: 1793011 - RNA, 19 nt, Artificial Sequence
  Description of Artificial Sequence: Synthetic oligonucleotide
aacgaagaugggguaaacu

SEQ ID NO: 1793012 - RNA, 19 nt, Artificial Sequence
  Description of Artificial Sequence: Synthetic oligonucleotide
aggugguggcccuuaaaag

SEQ ID NO: 1793013 - RNA, 19 nt, Artificial Sequence
  Description of Artificial Sequence: Synthetic oligonucleotide
gguaugaggccaacgaagg

SEQ ID NO: 1793014 - RNA, 19 nt, Artificial Sequence
  Description of Artificial Sequence: Synthetic oligonucleotide
ggccgaugaacgaagaugg

SEQ ID NO: 1793015 - RNA, 19 nt, Artificial Sequence
  Description of Artificial Sequence: Synthetic oligonucleotide
cuguccacaggccuguaag

SEQ ID NO: 1793016 - RNA, 19 nt, Artificial Sequence
  Description of Artificial Sequence: Synthetic oligonucleotide
gaccaaacaauaugaucca

SEQ ID NO: 1793017 - RNA, 19 nt, Artificial Sequence
  Description of Artificial Sequence: Synthetic oligonucleotide
aacugguaugaggccaacg

SEQ ID NO: 1793018 - RNA, 19 nt, Artificial Sequence
  Description of Artificial Sequence: Synthetic oligonucleotide
agcccauugaaacucccca

SEQ ID NO: 1793019 - RNA, 19 nt, Artificial Sequence
  Description of Artificial Sequence: Synthetic oligonucleotide
ugaaacuccccacuaccua

SEQ ID NO: 1793020 - RNA, 19 nt, Artificial Sequence
  Description of Artificial Sequence: Synthetic oligonucleotide
ccuaagguucuaaacuugg

SEQ ID NO: 1793021 - RNA, 19 nt, Artificial Sequence
  Description of Artificial Sequence: Synthetic oligonucleotide
guauacgagguagaaagca

SEQ ID NO: 1793022 - RNA, 19 nt, Artificial Sequence
  Description of Artificial Sequence: Synthetic oligonucleotide
cauugaaacuccccacuac

SEQ ID NO: 1793023 - RNA, 19 nt, Artificial Sequence
  Description of Artificial Sequence: Synthetic oligonucleotide
gggguaaacugguaugagg

SEQ ID NO: 1793024 - RNA, 19 nt, Artificial Sequence
  Description of Artificial Sequence: Synthetic oligonucleotide
gaaacuccccacuaccuaa

SEQ ID NO: 1793025 - RNA, 19 nt, Artificial Sequence
  Description of Artificial Sequence: Synthetic oligonucleotide
gaugcacgcggccuaccgg

SEQ ID NO: 1793026 - RNA, 19 nt, Artificial Sequence
  Description of Artificial Sequence: Synthetic oligonucleotide
uugugcugguaucuaggug

SEQ ID NO: 1793027 - RNA, 19 nt, Artificial Sequence
  Description of Artificial Sequence: Synthetic oligonucleotide
cugguaucuagguguuugg

SEQ ID NO: 1793028 - RNA, 19 nt, Artificial Sequence
  Description of Artificial Sequence: Synthetic oligonucleotide
uuagcccauugaaacuccc

SEQ ID NO: 1793029 - RNA, 19 nt, Artificial Sequence
  Description of Artificial Sequence: Synthetic oligonucleotide
cccgacaucguauacgagg

SEQ ID NO: 1793030 - RNA, 19 nt, Artificial Sequence
  Description of Artificial Sequence: Synthetic oligonucleotide
uuuuaccgcgacccgacau

SEQ ID NO: 1793031 - RNA, 19 nt, Artificial Sequence
  Description of Artificial Sequence: Synthetic oligonucleotide
uuaccgcgacccgacaucg

SEQ ID NO: 1793032 - RNA, 19 nt, Artificial Sequence
  Description of Artificial Sequence: Synthetic oligonucleotide
gaauuguagaccggcgcgc

SEQ ID NO: 1793033 - RNA, 19 nt, Artificial Sequence
  Description of Artificial Sequence: Synthetic oligonucleotide
gacccgacaucguauacga

SEQ ID NO: 1793034 - RNA, 19 nt, Artificial Sequence
  Description of Artificial Sequence: Synthetic oligonucleotide
aggccgacacuucuggaag

SEQ ID NO: 1793035 - RNA, 19 nt, Artificial Sequence
  Description of Artificial Sequence: Synthetic oligonucleotide
aggcauccuggagaaaacc

SEQ ID NO: 1793036 - RNA, 19 nt, Artificial Sequence
  Description of Artificial Sequence: Synthetic oligonucleotide
cuaccuaagguucuaaacu

SEQ ID NO: 1793037 - RNA, 19 nt, Artificial Sequence
  Description of Artificial Sequence: Synthetic oligonucleotide
gaggugguggcccuuaaaa

SEQ ID NO: 1793038 - RNA, 19 nt, Artificial Sequence
  Description of Artificial Sequence: Synthetic oligonucleotide
uccccacuaccuaagguuc

SEQ ID NO: 1793039 - RNA, 19 nt, Artificial Sequence
  Description of Artificial Sequence: Synthetic oligonucleotide
caaaaggccgacacuucug

SEQ ID NO: 1793040 - RNA, 19 nt, Artificial Sequence
  Description of Artificial Sequence: Synthetic oligonucleotide
accgacuugugcugguauc

SEQ ID NO: 1793041 - RNA, 19 nt, Artificial Sequence
  Description of Artificial Sequence: Synthetic oligonucleotide
cugaagaaaggacgcccgg

SEQ ID NO: 1793042 - RNA, 19 nt, Artificial Sequence
  Description of Artificial Sequence: Synthetic oligonucleotide
cucgccggcgccuugggcc

SEQ ID NO: 1793043 - RNA, 19 nt, Artificial Sequence
  Description of Artificial Sequence: Synthetic oligonucleotide
uagcccauugaaacucccc

SEQ ID NO: 1793044 - RNA, 19 nt, Artificial Sequence
  Description of Artificial Sequence: Synthetic oligonucleotide
aaguacaccggggcgccgg

SEQ ID NO: 1793045 - RNA, 19 nt, Artificial Sequence
  Description of Artificial Sequence: Synthetic oligonucleotide
ugcggcaagaacacagcuc

SEQ ID NO: 1793046 - RNA, 19 nt, Artificial Sequence
  Description of Artificial Sequence: Synthetic oligonucleotide
auagggauucaccgacuug

SEQ ID NO: 1793047 - RNA, 19 nt, Artificial Sequence
  Description of Artificial Sequence: Synthetic oligonucleotide
guggcgcucgucuucuugg

SEQ ID NO: 1793048 - RNA, 19 nt, Artificial Sequence
  Description of Artificial Sequence: Synthetic oligonucleotide
uguagaccggcgcgcgagg

SEQ ID NO: 1793049 - RNA, 19 nt, Artificial Sequence
  Description of Artificial Sequence: Synthetic oligonucleotide
gguaaacugguaugaggcc

SEQ ID NO: 1793050 - RNA, 19 nt, Artificial Sequence
  Description of Artificial Sequence: Synthetic oligonucleotide
cacgcgcucggcauagugg

SEQ ID NO: 1793051 - RNA, 19 nt, Artificial Sequence
  Description of Artificial Sequence: Synthetic oligonucleotide
gaaaggacgcccggguugc

SEQ ID NO: 1793052 - RNA, 19 nt, Artificial Sequence
  Description of Artificial Sequence: Synthetic oligonucleotide
ugaacgaagaugggguaaa

SEQ ID NO: 1793053 - RNA, 19 nt, Artificial Sequence
  Description of Artificial Sequence: Synthetic oligonucleotide
acuugggauagaugcaaaa

SEQ ID NO: 1793054 - RNA, 19 nt, Artificial Sequence
  Description of Artificial Sequence: Synthetic oligonucleotide
cugagcgaucgucacgccg

SEQ ID NO: 1793055 - RNA, 19 nt, Artificial Sequence
  Description of Artificial Sequence: Synthetic oligonucleotide
cuaccgggaauuguagacc

SEQ ID NO: 1793056 - RNA, 19 nt, Artificial Sequence
  Description of Artificial Sequence: Synthetic oligonucleotide
ucccucaguacuccugaga

SEQ ID NO: 1793057 - RNA, 19 nt, Artificial Sequence
  Description of Artificial Sequence: Synthetic oligonucleotide
uuguagaccggcgcgcgag

SEQ ID NO: 1793058 - RNA, 19 nt, Artificial Sequence
  Description of Artificial Sequence: Synthetic oligonucleotide
aaacuccccacuaccuaag

SEQ ID NO: 1793059 - RNA, 19 nt, Artificial Sequence
  Description of Artificial Sequence: Synthetic oligonucleotide
cuguaagcuucucccaaac

SEQ ID NO: 1793060 - RNA, 19 nt, Artificial Sequence
  Description of Artificial Sequence: Synthetic oligonucleotide
gggauagaugcaaaauucc

SEQ ID NO: 1793061 - RNA, 19 nt, Artificial Sequence
  Description of Artificial Sequence: Synthetic oligonucleotide
gggaauuguagaccggcgc

SEQ ID NO: 1793062 - RNA, 19 nt, Artificial Sequence
  Description of Artificial Sequence: Synthetic oligonucleotide
caaacaauaugauccauuu

SEQ ID NO: 1793063 - RNA, 19 nt, Artificial Sequence
  Description of Artificial Sequence: Synthetic oligonucleotide
augggguaaacugguauga

SEQ ID NO: 1793064 - RNA, 19 nt, Artificial Sequence
  Description of Artificial Sequence: Synthetic oligonucleotide
ugggguaaacugguaugag

SEQ ID NO: 1793065 - RNA, 19 nt, Artificial Sequence
  Description of Artificial Sequence: Synthetic oligonucleotide
ucaguacuccugagaggcc

SEQ ID NO: 1793066 - RNA, 19 nt, Artificial Sequence
  Description of Artificial Sequence: Synthetic oligonucleotide
agccguacgucacagcaaa

SEQ ID NO: 1793067 - RNA, 19 nt, Artificial Sequence
  Description of Artificial Sequence: Synthetic oligonucleotide
uugccuccgguuuuaccgc

SEQ ID NO: 1793068 - RNA, 19 nt, Artificial Sequence
  Description of Artificial Sequence: Synthetic oligonucleotide
gaagaaaggacgcccgggu

SEQ ID NO: 1793069 - RNA, 19 nt, Artificial Sequence
  Description of Artificial Sequence: Synthetic oligonucleotide
ucaguccagauagggauuc

SEQ ID NO: 1793070 - RNA, 19 nt, Artificial Sequence
  Description of Artificial Sequence: Synthetic oligonucleotide
uguuuggguugugaauuga

SEQ ID NO: 1793071 - RNA, 19 nt, Artificial Sequence
  Description of Artificial Sequence: Synthetic oligonucleotide
agcugcagaguaacucacc

SEQ ID NO: 1793072 - RNA, 19 nt, Artificial Sequence
  Description of Artificial Sequence: Synthetic oligonucleotide
uccaggcgagggcuaaagc

SEQ ID NO: 1793073 - RNA, 19 nt, Artificial Sequence
  Description of Artificial Sequence: Synthetic oligonucleotide
guguuuggguugugaauug

SEQ ID NO: 1793074 - RNA, 19 nt, Artificial Sequence
  Description of Artificial Sequence: Synthetic oligonucleotide
guugugaauugagucgcug

SEQ ID NO: 1793075 - RNA, 19 nt, Artificial Sequence
  Description of Artificial Sequence: Synthetic oligonucleotide
acgucacagcaaaaggccg

SEQ ID NO: 1793076 - RNA, 19 nt, Artificial Sequence
  Description of Artificial Sequence: Synthetic oligonucleotide
ugguggcccuuaaaagggc

SEQ ID NO: 1793077 - RNA, 19 nt, Artificial Sequence
  Description of Artificial Sequence: Synthetic oligonucleotide
ggccacaccacacaccggc

SEQ ID NO: 1793078 - RNA, 19 nt, Artificial Sequence
  Description of Artificial Sequence: Synthetic oligonucleotide
acgcccggguugcagcugc

SEQ ID NO: 1793079 - RNA, 19 nt, Artificial Sequence
  Description of Artificial Sequence: Synthetic oligonucleotide
cagugauuuugucccggcc

SEQ ID NO: 1793080 - RNA, 19 nt, Artificial Sequence
  Description of Artificial Sequence: Synthetic oligonucleotide
gaagccaguagaggcucag

SEQ ID NO: 1793081 - RNA, 19 nt, Artificial Sequence
  Description of Artificial Sequence: Synthetic oligonucleotide
gauuucgccuuggcgcggg

SEQ ID NO: 1793082 - RNA, 19 nt, Artificial Sequence
  Description of Artificial Sequence: Synthetic oligonucleotide
ucggcauaguggccuuucc

SEQ ID NO: 1793083 - RNA, 19 nt, Artificial Sequence
  Description of Artificial Sequence: Synthetic oligonucleotide
ccuaccgggaauuguagac

SEQ ID NO: 1793084 - RNA, 19 nt, Artificial Sequence
  Description of Artificial Sequence: Synthetic oligonucleotide
uuugucccggccacaccac

SEQ ID NO: 1793085 - RNA, 19 nt, Artificial Sequence
  Description of Artificial Sequence: Synthetic oligonucleotide
caauaugauccauuucucu

SEQ ID NO: 1793086 - RNA, 19 nt, Artificial Sequence
  Description of Artificial Sequence: Synthetic oligonucleotide
accuaagguucuaaacuug

SEQ ID NO: 1793087 - RNA, 19 nt, Artificial Sequence
  Description of Artificial Sequence: Synthetic oligonucleotide
acuccccacuaccuaaggu

SEQ ID NO: 1793088 - RNA, 19 nt, Artificial Sequence
  Description of Artificial Sequence: Synthetic oligonucleotide
agcaaaaggccgacacuuc

SEQ ID NO: 1793089 - RNA, 19 nt, Artificial Sequence
  Description of Artificial Sequence: Synthetic oligonucleotide
cuucaccaaagccugguaa

SEQ ID NO: 1793090 - RNA, 19 nt, Artificial Sequence
  Description of Artificial Sequence: Synthetic oligonucleotide
aggggaaaacacaggacca

SEQ ID NO: 1793091 - RNA, 19 nt, Artificial Sequence
  Description of Artificial Sequence: Synthetic oligonucleotide
ucuguccacaggccuguaa

SEQ ID NO: 1793092 - RNA, 19 nt, Artificial Sequence
  Description of Artificial Sequence: Synthetic oligonucleotide
ggguugugaauugagucgc

SEQ ID NO: 1793093 - RNA, 19 nt, Artificial Sequence
  Description of Artificial Sequence: Synthetic oligonucleotide
uggcgcucgucuucuuggg

SEQ ID NO: 1793094 - RNA, 19 nt, Artificial Sequence
  Description of Artificial Sequence: Synthetic oligonucleotide
ggauucaccgacuugugcu

SEQ ID NO: 1793095 - RNA, 19 nt, Artificial Sequence
  Description of Artificial Sequence: Synthetic oligonucleotide
augggaacgcggcggcccg

SEQ ID NO: 1793096 - RNA, 19 nt, Artificial Sequence
  Description of Artificial Sequence: Synthetic oligonucleotide
uagaccggcgcgcgaggag

SEQ ID NO: 1793097 - RNA, 19 nt, Artificial Sequence
  Description of Artificial Sequence: Synthetic oligonucleotide
agggccuuuguggaggugu

SEQ ID NO: 1793098 - RNA, 19 nt, Artificial Sequence
  Description of Artificial Sequence: Synthetic oligonucleotide
gagucgcugggaagaaaag

SEQ ID NO: 1793099 - RNA, 19 nt, Artificial Sequence
  Description of Artificial Sequence: Synthetic oligonucleotide
gcucauauuacagugauuu

SEQ ID NO: 1793100 - RNA, 19 nt, Artificial Sequence
  Description of Artificial Sequence: Synthetic oligonucleotide
gggcuaaagcaccaagcug

SEQ ID NO: 1793101 - RNA, 19 nt, Artificial Sequence
  Description of Artificial Sequence: Synthetic oligonucleotide
agcuaggcccggcugccag

SEQ ID NO: 1793102 - RNA, 19 nt, Artificial Sequence
  Description of Artificial Sequence: Synthetic oligonucleotide
ccggccacaccacacaccg

SEQ ID NO: 1793103 - RNA, 19 nt, Artificial Sequence
  Description of Artificial Sequence: Synthetic oligonucleotide
acacaccggccgaugaacg

SEQ ID NO: 1793104 - RNA, 19 nt, Artificial Sequence
  Description of Artificial Sequence: Synthetic oligonucleotide
aggagcgcgauuucgccuu

SEQ ID NO: 1793105 - RNA, 19 nt, Artificial Sequence
  Description of Artificial Sequence: Synthetic oligonucleotide
acaccggggcgccggcucc

SEQ ID NO: 1793106 - RNA, 19 nt, Artificial Sequence
  Description of Artificial Sequence: Synthetic oligonucleotide
ggcgccuugggccccacgg

SEQ ID NO: 1793107 - RNA, 19 nt, Artificial Sequence
  Description of Artificial Sequence: Synthetic oligonucleotide
cgucacgccgcccagaagc

SEQ ID NO: 1793108 - RNA, 19 nt, Artificial Sequence
  Description of Artificial Sequence: Synthetic oligonucleotide
aucguauacgagguagaaa

SEQ ID NO: 1793109 - RNA, 19 nt, Artificial Sequence
  Description of Artificial Sequence: Synthetic oligonucleotide
auuguagaccggcgcgcga

SEQ ID NO: 1793110 - RNA, 19 nt, Artificial Sequence
  Description of Artificial Sequence: Synthetic oligonucleotide
cacacaccggccgaugaac

SEQ ID NO: 1793111 - RNA, 19 nt, Artificial Sequence
  Description of Artificial Sequence: Synthetic oligonucleotide
acaucguauacgagguaga

SEQ ID NO: 1793112 - RNA, 19 nt, Artificial Sequence
  Description of Artificial Sequence: Synthetic oligonucleotide
aucgucacgccgcccagaa

SEQ ID NO: 1793113 - RNA, 19 nt, Artificial Sequence
  Description of Artificial Sequence: Synthetic oligonucleotide
augcaaaauuccaguucag

SEQ ID NO: 1793114 - RNA, 19 nt, Artificial Sequence
  Description of Artificial Sequence: Synthetic oligonucleotide
uugucccggccacaccaca

SEQ ID NO: 1793115 - RNA, 19 nt, Artificial Sequence
  Description of Artificial Sequence: Synthetic oligonucleotide
uucaccgacuugugcuggu

SEQ ID NO: 1793116 - RNA, 19 nt, Artificial Sequence
  Description of Artificial Sequence: Synthetic oligonucleotide
acccuuuccaggaggcauc

SEQ ID NO: 1793117 - RNA, 19 nt, Artificial Sequence
  Description of Artificial Sequence: Synthetic oligonucleotide
gaacgaagaugggguaaac

SEQ ID NO: 1793118 - RNA, 19 nt, Artificial Sequence
  Description of Artificial Sequence: Synthetic oligonucleotide
gguaucuagguguuugggu

SEQ ID NO: 1793119 - RNA, 19 nt, Artificial Sequence
  Description of Artificial Sequence: Synthetic oligonucleotide
acgagguagaaagcagaga

SEQ ID NO: 1793120 - RNA, 19 nt, Artificial Sequence
  Description of Artificial Sequence: Synthetic oligonucleotide
gugaauugagucgcuggga

SEQ ID NO: 1793121 - RNA, 19 nt, Artificial Sequence
  Description of Artificial Sequence: Synthetic oligonucleotide
gcggcaagaacacagcucu

SEQ ID NO: 1793122 - RNA, 19 nt, Artificial Sequence
  Description of Artificial Sequence: Synthetic oligonucleotide
uacaccggggcgccggcuc

SEQ ID NO: 1793123 - RNA, 19 nt, Artificial Sequence
  Description of Artificial Sequence: Synthetic oligonucleotide
ccuucuugccgcucgccgg

SEQ ID NO: 1793124 - RNA, 19 nt, Artificial Sequence
  Description of Artificial Sequence: Synthetic oligonucleotide
ugggcggccacggcgcggg

SEQ ID NO: 1793125 - RNA, 19 nt, Artificial Sequence
  Description of Artificial Sequence: Synthetic oligonucleotide
gucacagcaaaaggccgac

SEQ ID NO: 1793126 - RNA, 19 nt, Artificial Sequence
  Description of Artificial Sequence: Synthetic oligonucleotide
aggccaacgaaggggaaaa

SEQ ID NO: 1793127 - RNA, 19 nt, Artificial Sequence
  Description of Artificial Sequence: Synthetic oligonucleotide
ccuuuguggaggugugggg

SEQ ID NO: 1793128 - RNA, 19 nt, Artificial Sequence
  Description of Artificial Sequence: Synthetic oligonucleotide
gguuuuaccgcgacccgac

SEQ ID NO: 1793129 - RNA, 19 nt, Artificial Sequence
  Description of Artificial Sequence: Synthetic oligonucleotide
caccucagccguacgucac

SEQ ID NO: 1793130 - RNA, 19 nt, Artificial Sequence
  Description of Artificial Sequence: Synthetic oligonucleotide
ccucaguacuccugagagg

SEQ ID NO: 1793131 - RNA, 19 nt, Artificial Sequence
  Description of Artificial Sequence: Synthetic oligonucleotide
aggcccaccucagccguac

SEQ ID NO: 1793132 - RNA, 19 nt, Artificial Sequence
  Description of Artificial Sequence: Synthetic oligonucleotide
ggccgacacuucuggaagg

SEQ ID NO: 1793133 - RNA, 19 nt, Artificial Sequence
  Description of Artificial Sequence: Synthetic oligonucleotide
cucagccguacgucacagc

SEQ ID NO: 1793134 - RNA, 19 nt, Artificial Sequence
  Description of Artificial Sequence: Synthetic oligonucleotide
ugaggccaacgaaggggaa

SEQ ID NO: 1793135 - RNA, 19 nt, Artificial Sequence
  Description of Artificial Sequence: Synthetic oligonucleotide
cacuaccuaagguucuaaa

SEQ ID NO: 1793136 - RNA, 19 nt, Artificial Sequence
  Description of Artificial Sequence: Synthetic oligonucleotide
gcucaguccagauagggau

SEQ ID NO: 1793137 - RNA, 19 nt, Artificial Sequence
  Description of Artificial Sequence: Synthetic oligonucleotide
ccaggcgagggcuaaagca

SEQ ID NO: 1793138 - RNA, 19 nt, Artificial Sequence
  Description of Artificial Sequence: Synthetic oligonucleotide
cguauacgagguagaaagc

SEQ ID NO: 1793139 - RNA, 19 nt, Artificial Sequence
  Description of Artificial Sequence: Synthetic oligonucleotide
gaaugggaacgcggcggcc

SEQ ID NO: 1793140 - RNA, 19 nt, Artificial Sequence
  Description of Artificial Sequence: Synthetic oligonucleotide
uggccuucuugccgcucgc

SEQ ID NO: 1793141 - RNA, 19 nt, Artificial Sequence
  Description of Artificial Sequence: Synthetic oligonucleotide
accgcgacccgacaucgua

SEQ ID NO: 1793142 - RNA, 19 nt, Artificial Sequence
  Description of Artificial Sequence: Synthetic oligonucleotide
ucgucacgccgcccagaag

SEQ ID NO: 1793143 - RNA, 19 nt, Artificial Sequence
  Description of Artificial Sequence: Synthetic oligonucleotide
acacaggaccaaacaauau

SEQ ID NO: 1793144 - RNA, 19 nt, Artificial Sequence
  Description of Artificial Sequence: Synthetic oligonucleotide
auugagucgcugggaagaa

SEQ ID NO: 1793145 - RNA, 19 nt, Artificial Sequence
  Description of Artificial Sequence: Synthetic oligonucleotide
cuccgguuuuaccgcgacc

SEQ ID NO: 1793146 - RNA, 19 nt, Artificial Sequence
  Description of Artificial Sequence: Synthetic oligonucleotide
cccugagcgaucgucacgc

SEQ ID NO: 1793147 - RNA, 19 nt, Artificial Sequence
  Description of Artificial Sequence: Synthetic oligonucleotide
ccugcggcaagaacacagc

SEQ ID NO: 1793148 - RNA, 19 nt, Artificial Sequence
  Description of Artificial Sequence: Synthetic oligonucleotide
ccguacgucacagcaaaag

SEQ ID NO: 1793149 - RNA, 19 nt, Artificial Sequence
  Description of Artificial Sequence: Synthetic oligonucleotide
caucguauacgagguagaa

SEQ ID NO: 1793150 - RNA, 19 nt, Artificial Sequence
  Description of Artificial Sequence: Synthetic oligonucleotide
ccacaggccuguaagcuuc

SEQ ID NO: 1793151 - RNA, 19 nt, Artificial Sequence
  Description of Artificial Sequence: Synthetic oligonucleotide
gaggccaacgaaggggaaa

SEQ ID NO: 1793152 - RNA, 19 nt, Artificial Sequence
  Description of Artificial Sequence: Synthetic oligonucleotide
aagaugggguaaacuggua

SEQ ID NO: 1793153 - RNA, 19 nt, Artificial Sequence
  Description of Artificial Sequence: Synthetic oligonucleotide
gguggcccuuaaaagggcc

SEQ ID NO: 1793154 - RNA, 19 nt, Artificial Sequence
  Description of Artificial Sequence: Synthetic oligonucleotide
agggauucaccgacuugug

SEQ ID NO: 1793155 - RNA, 19 nt, Artificial Sequence
  Description of Artificial Sequence: Synthetic oligonucleotide
guuuuaccgcgacccgaca

SEQ ID NO: 1793156 - RNA, 19 nt, Artificial Sequence
  Description of Artificial Sequence: Synthetic oligonucleotide
gguguuuggguugugaauu

SEQ ID NO: 1793157 - RNA, 19 nt, Artificial Sequence
  Description of Artificial Sequence: Synthetic oligonucleotide
cuccccacuaccuaagguu

SEQ ID NO: 1793158 - RNA, 19 nt, Artificial Sequence
  Description of Artificial Sequence: Synthetic oligonucleotide
gcccauugaaacuccccac

SEQ ID NO: 1793159 - RNA, 19 nt, Artificial Sequence
  Description of Artificial Sequence: Synthetic oligonucleotide
ccacaccacacaccggccg

SEQ ID NO: 1793160 - RNA, 19 nt, Artificial Sequence
  Description of Artificial Sequence: Synthetic oligonucleotide
uugagucgcugggaagaaa

SEQ ID NO: 1793161 - RNA, 19 nt, Artificial Sequence
  Description of Artificial Sequence: Synthetic oligonucleotide
ccgggaauuguagaccggc

SEQ ID NO: 1793162 - RNA, 19 nt, Artificial Sequence
  Description of Artificial Sequence: Synthetic oligonucleotide
acaccggccgaugaacgaa

SEQ ID NO: 1793163 - RNA, 19 nt, Artificial Sequence
  Description of Artificial Sequence: Synthetic oligonucleotide
aucucagcggugagguacu

SEQ ID NO: 1793164 - RNA, 19 nt, Artificial Sequence
  Description of Artificial Sequence: Synthetic oligonucleotide
agcagccgaugcacgcggc

SEQ ID NO: 1793165 - RNA, 19 nt, Artificial Sequence
  Description of Artificial Sequence: Synthetic oligonucleotide
cacgguggcgcucgucuuc

SEQ ID NO: 1793166 - RNA, 19 nt, Artificial Sequence
  Description of Artificial Sequence: Synthetic oligonucleotide
cagcucauauuacagugau

SEQ ID NO: 1793167 - RNA, 19 nt, Artificial Sequence
  Description of Artificial Sequence: Synthetic oligonucleotide
gccaacgaaggggaaaaca

SEQ ID NO: 1793168 - RNA, 19 nt, Artificial Sequence
  Description of Artificial Sequence: Synthetic oligonucleotide
aggggauagcuaggcccgg

SEQ ID NO: 1793169 - RNA, 19 nt, Artificial Sequence
  Description of Artificial Sequence: Synthetic oligonucleotide
gcaaaaggccgacacuucu

SEQ ID NO: 1793170 - RNA, 19 nt, Artificial Sequence
  Description of Artificial Sequence: Synthetic oligonucleotide
cacaccggccgaugaacga

SEQ ID NO: 1793171 - RNA, 19 nt, Artificial Sequence
  Description of Artificial Sequence: Synthetic oligonucleotide
uggcccuuaaaagggccuu

SEQ ID NO: 1793172 - RNA, 19 nt, Artificial Sequence
  Description of Artificial Sequence: Synthetic oligonucleotide
gcucccucaguacuccuga

SEQ ID NO: 1793173 - RNA, 19 nt, Artificial Sequence
  Description of Artificial Sequence: Synthetic oligonucleotide
gcgcucgucuucuugggca

SEQ ID NO: 1793174 - RNA, 19 nt, Artificial Sequence
  Description of Artificial Sequence: Synthetic oligonucleotide
cgggaauuguagaccggcg

SEQ ID NO: 1793175 - RNA, 19 nt, Artificial Sequence
  Description of Artificial Sequence: Synthetic oligonucleotide
cccuaaguggcucagcucu

SEQ ID NO: 1793176 - RNA, 19 nt, Artificial Sequence
  Description of Artificial Sequence: Synthetic oligonucleotide
ggccuuuccucagcagccg

SEQ ID NO: 1793177 - RNA, 19 nt, Artificial Sequence
  Description of Artificial Sequence: Synthetic oligonucleotide
aagggccuuuguggaggug

SEQ ID NO: 1793178 - RNA, 19 nt, Artificial Sequence
  Description of Artificial Sequence: Synthetic oligonucleotide
cuaggcccggcugccaguc

SEQ ID NO: 1793179 - RNA, 19 nt, Artificial Sequence
  Description of Artificial Sequence: Synthetic oligonucleotide
gccgccaaguacaccgggg

SEQ ID NO: 1793180 - RNA, 19 nt, Artificial Sequence
  Description of Artificial Sequence: Synthetic oligonucleotide
cgaugaacgaagauggggu

SEQ ID NO: 1793181 - RNA, 19 nt, Artificial Sequence
  Description of Artificial Sequence: Synthetic oligonucleotide
uaccgcgacccgacaucgu

SEQ ID NO: 1793182 - RNA, 19 nt, Artificial Sequence
  Description of Artificial Sequence: Synthetic oligonucleotide
gccuguaagcuucucccaa

SEQ ID NO: 1793183 - RNA, 19 nt, Artificial Sequence
  Description of Artificial Sequence: Synthetic oligonucleotide
ucaccgacuugugcuggua

SEQ ID NO: 1793184 - RNA, 19 nt, Artificial Sequence
  Description of Artificial Sequence: Synthetic oligonucleotide
ccagaaucucagcggugag

SEQ ID NO: 1793185 - RNA, 19 nt, Artificial Sequence
  Description of Artificial Sequence: Synthetic oligonucleotide
gccgaugaacgaagauggg

SEQ ID NO: 1793186 - RNA, 19 nt, Artificial Sequence
  Description of Artificial Sequence: Synthetic oligonucleotide
agaagccaguagaggcuca

SEQ ID NO: 1793187 - RNA, 19 nt, Artificial Sequence
  Description of Artificial Sequence: Synthetic oligonucleotide
ggccuaccgggaauuguag

SEQ ID NO: 1793188 - RNA, 19 nt, Artificial Sequence
  Description of Artificial Sequence: Synthetic oligonucleotide
cucauauuacagugauuuu

SEQ ID NO: 1793189 - RNA, 19 nt, Artificial Sequence
  Description of Artificial Sequence: Synthetic oligonucleotide
caaguacaccggggcgccg

SEQ ID NO: 1793190 - RNA, 19 nt, Artificial Sequence
  Description of Artificial Sequence: Synthetic oligonucleotide
aaaggacgcccggguugca

SEQ ID NO: 1793191 - RNA, 19 nt, Artificial Sequence
  Description of Artificial Sequence: Synthetic oligonucleotide
ggcgcucgucuucuugggc

SEQ ID NO: 1793192 - RNA, 19 nt, Artificial Sequence
  Description of Artificial Sequence: Synthetic oligonucleotide
cgacccgacaucguauacg

SEQ ID NO: 1793193 - RNA, 19 nt, Artificial Sequence
  Description of Artificial Sequence: Synthetic oligonucleotide
ggccuguaagcuucuccca

SEQ ID NO: 1793194 - RNA, 19 nt, Artificial Sequence
  Description of Artificial Sequence: Synthetic oligonucleotide
caagucacuucuggaaggu

SEQ ID NO: 1793195 - RNA, 19 nt, Artificial Sequence
  Description of Artificial Sequence: Synthetic oligonucleotide
ugggaacgcggcggcccgg

SEQ ID NO: 1793196 - RNA, 19 nt, Artificial Sequence
  Description of Artificial Sequence: Synthetic oligonucleotide
guagaggcucaguccagau

SEQ ID NO: 1793197 - RNA, 19 nt, Artificial Sequence
  Description of Artificial Sequence: Synthetic oligonucleotide
gaucgucacgccgcccaga

SEQ ID NO: 1793198 - RNA, 19 nt, Artificial Sequence
  Description of Artificial Sequence: Synthetic oligonucleotide
ccgguuuuaccgcgacccg

SEQ ID NO: 1793199 - RNA, 19 nt, Artificial Sequence
  Description of Artificial Sequence: Synthetic oligonucleotide
ggcucaguccagauaggga

SEQ ID NO: 1793200 - RNA, 19 nt, Artificial Sequence
  Description of Artificial Sequence: Synthetic oligonucleotide
caguacuccugagaggccu

SEQ ID NO: 1793201 - RNA, 19 nt, Artificial Sequence
  Description of Artificial Sequence: Synthetic oligonucleotide
agcucauauuacagugauu

SEQ ID NO: 1793202 - RNA, 19 nt, Artificial Sequence
  Description of Artificial Sequence: Synthetic oligonucleotide
ggggaaaacacaggaccaa

SEQ ID NO: 1793203 - RNA, 19 nt, Artificial Sequence
  Description of Artificial Sequence: Synthetic oligonucleotide
acggcgcgggcucccucag

SEQ ID NO: 1793204 - RNA, 19 nt, Artificial Sequence
  Description of Artificial Sequence: Synthetic oligonucleotide
gcagaguaacucaccuuca

SEQ ID NO: 1793205 - RNA, 19 nt, Artificial Sequence
  Description of Artificial Sequence: Synthetic oligonucleotide
gccuaccgggaauuguaga

SEQ ID NO: 1793206 - RNA, 19 nt, Artificial Sequence
  Description of Artificial Sequence: Synthetic oligonucleotide
uaggcccggcugccagucu

SEQ ID NO: 1793207 - RNA, 19 nt, Artificial Sequence
  Description of Artificial Sequence: Synthetic oligonucleotide
cagccguacgucacagcaa

SEQ ID NO: 1793208 - RNA, 19 nt, Artificial Sequence
  Description of Artificial Sequence: Synthetic oligonucleotide
ccgacaucguauacgaggu

SEQ ID NO: 1793209 - RNA, 19 nt, Artificial Sequence
  Description of Artificial Sequence: Synthetic oligonucleotide
guagaccggcgcgcgagga

SEQ ID NO: 1793210 - RNA, 19 nt, Artificial Sequence
  Description of Artificial Sequence: Synthetic oligonucleotide
cugcggcaagaacacagcu

SEQ ID NO: 1793211 - RNA, 19 nt, Artificial Sequence
  Description of Artificial Sequence: Synthetic oligonucleotide
acccgacaucguauacgag

SEQ ID NO: 1793212 - RNA, 19 nt, Artificial Sequence
  Description of Artificial Sequence: Synthetic oligonucleotide
cacggcgcgggcucccuca

SEQ ID NO: 1793213 - RNA, 19 nt, Artificial Sequence
  Description of Artificial Sequence: Synthetic oligonucleotide
aagguccaggcgagggcua

SEQ ID NO: 1793214 - RNA, 19 nt, Artificial Sequence
  Description of Artificial Sequence: Synthetic oligonucleotide
ccuguaagcuucucccaaa

SEQ ID NO: 1793215 - RNA, 19 nt, Artificial Sequence
  Description of Artificial Sequence: Synthetic oligonucleotide
gacgcccggguugcagcug

SEQ ID NO: 1793216 - RNA, 19 nt, Artificial Sequence
  Description of Artificial Sequence: Synthetic oligonucleotide
cucaguccagauagggauu

SEQ ID NO: 1793217 - RNA, 19 nt, Artificial Sequence
  Description of Artificial Sequence: Synthetic oligonucleotide
cagcucuuuccgugaggga

SEQ ID NO: 1793218 - RNA, 19 nt, Artificial Sequence
  Description of Artificial Sequence: Synthetic oligonucleotide
ccauugaaacuccccacua

SEQ ID NO: 1793219 - RNA, 19 nt, Artificial Sequence
  Description of Artificial Sequence: Synthetic oligonucleotide
gcagcccuaaguggcucag

SEQ ID NO: 1793220 - RNA, 19 nt, Artificial Sequence
  Description of Artificial Sequence: Synthetic oligonucleotide
cgucacagcaaaaggccga

SEQ ID NO: 1793221 - RNA, 19 nt, Artificial Sequence
  Description of Artificial Sequence: Synthetic oligonucleotide
gcuaaagcaccaagcugaa

SEQ ID NO: 1793222 - RNA, 19 nt, Artificial Sequence
  Description of Artificial Sequence: Synthetic oligonucleotide
ugcugguaucuagguguuu

SEQ ID NO: 1793223 - RNA, 19 nt, Artificial Sequence
  Description of Artificial Sequence: Synthetic oligonucleotide
cuucuguccacaggccugu

SEQ ID NO: 1793224 - RNA, 19 nt, Artificial Sequence
  Description of Artificial Sequence: Synthetic oligonucleotide
ggggauagcuaggcccggc

SEQ ID NO: 1793225 - RNA, 19 nt, Artificial Sequence
  Description of Artificial Sequence: Synthetic oligonucleotide
cccauugaaacuccccacu

SEQ ID NO: 1793226 - RNA, 19 nt, Artificial Sequence
  Description of Artificial Sequence: Synthetic oligonucleotide
gcgacccgacaucguauac

SEQ ID NO: 1793227 - RNA, 19 nt, Artificial Sequence
  Description of Artificial Sequence: Synthetic oligonucleotide
cgcucgucuucuugggcag

SEQ ID NO: 1793228 - RNA, 19 nt, Artificial Sequence
  Description of Artificial Sequence: Synthetic oligonucleotide
ccucagccguacgucacag

SEQ ID NO: 1793229 - RNA, 19 nt, Artificial Sequence
  Description of Artificial Sequence: Synthetic oligonucleotide
gggccuuuguggaggugug

SEQ ID NO: 1793230 - RNA, 19 nt, Artificial Sequence
  Description of Artificial Sequence: Synthetic oligonucleotide
ccuccgguuuuaccgcgac

SEQ ID NO: 1793231 - RNA, 19 nt, Artificial Sequence
  Description of Artificial Sequence: Synthetic oligonucleotide
ccaccucagccguacguca

SEQ ID NO: 1793232 - RNA, 19 nt, Artificial Sequence
  Description of Artificial Sequence: Synthetic oligonucleotide
ggaggugguggcccuuaaa

SEQ ID NO: 1793233 - RNA, 19 nt, Artificial Sequence
  Description of Artificial Sequence: Synthetic oligonucleotide
guggcccuuaaaagggccu

SEQ ID NO: 1793234 - RNA, 19 nt, Artificial Sequence
  Description of Artificial Sequence: Synthetic oligonucleotide
cccaccucagccguacguc

SEQ ID NO: 1793235 - RNA, 19 nt, Artificial Sequence
  Description of Artificial Sequence: Synthetic oligonucleotide
ggcgcgggcucccucagua

SEQ ID NO: 1793236 - RNA, 19 nt, Artificial Sequence
  Description of Artificial Sequence: Synthetic oligonucleotide
gggauagcuaggcccggcu

SEQ ID NO: 1793237 - RNA, 19 nt, Artificial Sequence
  Description of Artificial Sequence: Synthetic oligonucleotide
ccugagcgaucgucacgcc

SEQ ID NO: 1793238 - RNA, 19 nt, Artificial Sequence
  Description of Artificial Sequence: Synthetic oligonucleotide
ggcggcccggcccgcagcc

SEQ ID NO: 1793239 - RNA, 19 nt, Artificial Sequence
  Description of Artificial Sequence: Synthetic oligonucleotide
ucacgccgcccagaagcuu

SEQ ID NO: 1793240 - RNA, 19 nt, Artificial Sequence
  Description of Artificial Sequence: Synthetic oligonucleotide
gccacaccacacaccggcc

SEQ ID NO: 1793241 - RNA, 19 nt, Artificial Sequence
  Description of Artificial Sequence: Synthetic oligonucleotide
ggcgagggcuaaagcacca

SEQ ID NO: 1793242 - RNA, 19 nt, Artificial Sequence
  Description of Artificial Sequence: Synthetic oligonucleotide
ggcucccacgcgcucggca

SEQ ID NO: 1793243 - RNA, 19 nt, Artificial Sequence
  Description of Artificial Sequence: Synthetic oligonucleotide
ggcccaccucagccguacg

SEQ ID NO: 1793244 - RNA, 19 nt, Artificial Sequence
  Description of Artificial Sequence: Synthetic oligonucleotide
cucuuuccgugagggaggu

SEQ ID NO: 1793245 - RNA, 19 nt, Artificial Sequence
  Description of Artificial Sequence: Synthetic oligonucleotide
cuaaguggcucagcucuuu

SEQ ID NO: 1793246 - RNA, 19 nt, Artificial Sequence
  Description of Artificial Sequence: Synthetic oligonucleotide
caccgacuugugcugguau

SEQ ID NO: 1793247 - RNA, 19 nt, Artificial Sequence
  Description of Artificial Sequence: Synthetic oligonucleotide
gucacgccgcccagaagcu

SEQ ID NO: 1793248 - RNA, 19 nt, Artificial Sequence
  Description of Artificial Sequence: Synthetic oligonucleotide
ggccaacgaaggggaaaac

SEQ ID NO: 1793249 - RNA, 19 nt, Artificial Sequence
  Description of Artificial Sequence: Synthetic oligonucleotide
cggugagguacucgagcac

SEQ ID NO: 1793250 - RNA, 19 nt, Artificial Sequence
  Description of Artificial Sequence: Synthetic oligonucleotide
acgcggccuaccgggaauu

SEQ ID NO: 1793251 - RNA, 19 nt, Artificial Sequence
  Description of Artificial Sequence: Synthetic oligonucleotide
gguugugaauugagucgcu

SEQ ID NO: 1793252 - RNA, 19 nt, Artificial Sequence
  Description of Artificial Sequence: Synthetic oligonucleotide
ggcccggcugccagucucc

SEQ ID NO: 1793253 - RNA, 19 nt, Artificial Sequence
  Description of Artificial Sequence: Synthetic oligonucleotide
ccugguaaucaagucacuu

SEQ ID NO: 1793254 - RNA, 19 nt, Artificial Sequence
  Description of Artificial Sequence: Synthetic oligonucleotide
cagccgaugcacgcggccu

SEQ ID NO: 1793255 - RNA, 19 nt, Artificial Sequence
  Description of Artificial Sequence: Synthetic oligonucleotide
cuccugcggcaagaacaca

SEQ ID NO: 1793256 - RNA, 19 nt, Artificial Sequence
  Description of Artificial Sequence: Synthetic oligonucleotide
gcgggcucccucaguacuc

SEQ ID NO: 1793257 - RNA, 19 nt, Artificial Sequence
  Description of Artificial Sequence: Synthetic oligonucleotide
cccacgguggcgcucgucu

SEQ ID NO: 1793258 - RNA, 19 nt, Artificial Sequence
  Description of Artificial Sequence: Synthetic oligonucleotide
ccgacuugugcugguaucu

SEQ ID NO: 1793259 - RNA, 19 nt, Artificial Sequence
  Description of Artificial Sequence: Synthetic oligonucleotide
gccgaugcacgcggccuac

SEQ ID NO: 1793260 - RNA, 19 nt, Artificial Sequence
  Description of Artificial Sequence: Synthetic oligonucleotide
gugcugguaucuagguguu

SEQ ID NO: 1793261 - RNA, 19 nt, Artificial Sequence
  Description of Artificial Sequence: Synthetic oligonucleotide
cucccacgcgcucggcaua

SEQ ID NO: 1793262 - RNA, 19 nt, Artificial Sequence
  Description of Artificial Sequence: Synthetic oligonucleotide
gcgcgggcucccucaguac

SEQ ID NO: 1793263 - RNA, 19 nt, Artificial Sequence
  Description of Artificial Sequence: Synthetic oligonucleotide
ggacgcccggguugcagcu

SEQ ID NO: 1793264 - RNA, 19 nt, Artificial Sequence
  Description of Artificial Sequence: Synthetic oligonucleotide
ccacacaccggccgaugaa

SEQ ID NO: 1793265 - RNA, 19 nt, Artificial Sequence
  Description of Artificial Sequence: Synthetic oligonucleotide
gcccaccucagccguacgu

SEQ ID NO: 1793266 - RNA, 19 nt, Artificial Sequence
  Description of Artificial Sequence: Synthetic oligonucleotide
cgcgcucggcauaguggcc

SEQ ID NO: 1793267 - RNA, 19 nt, Artificial Sequence
  Description of Artificial Sequence: Synthetic oligonucleotide
cacgcggccuaccgggaau

SEQ ID NO: 1793268 - RNA, 19 nt, Artificial Sequence
  Description of Artificial Sequence: Synthetic oligonucleotide
cggccuaccgggaauugua

SEQ ID NO: 1793269 - RNA, 19 nt, Artificial Sequence
  Description of Artificial Sequence: Synthetic oligonucleotide
gcgcucggcauaguggccu

SEQ ID NO: 1793270 - RNA, 19 nt, Artificial Sequence
  Description of Artificial Sequence: Synthetic oligonucleotide
cgguuuuaccgcgacccga

SEQ ID NO: 1793271 - RNA, 19 nt, Artificial Sequence
  Description of Artificial Sequence: Synthetic oligonucleotide
gcacgcggccuaccgggaa

SEQ ID NO: 1793272 - RNA, 19 nt, Artificial Sequence
  Description of Artificial Sequence: Synthetic oligonucleotide
cccggcugccagucuccug

SEQ ID NO: 1793273 - RNA, 19 nt, Artificial Sequence
  Description of Artificial Sequence: Synthetic oligonucleotide
cggccacaccacacaccgg

SEQ ID NO: 1793274 - RNA, 19 nt, Artificial Sequence
  Description of Artificial Sequence: Synthetic oligonucleotide
ccgaugcacgcggccuacc

SEQ ID NO: 1793275 - RNA, 19 nt, Artificial Sequence
  Description of Artificial Sequence: Synthetic oligonucleotide
ccacuaccuaagguucuaa

SEQ ID NO: 1793276 - RNA, 19 nt, Artificial Sequence
  Description of Artificial Sequence: Synthetic oligonucleotide
cccacuaccuaagguucua

SEQ ID NO: 1793277 - RNA, 19 nt, Artificial Sequence
  Description of Artificial Sequence: Synthetic oligonucleotide
cgcagcccuaaguggcuca

SEQ ID NO: 1793278 - RNA, 19 nt, Artificial Sequence
  Description of Artificial Sequence: Synthetic oligonucleotide
gccuccgguuuuaccgcga

SEQ ID NO: 1793279 - RNA, 19 nt, Artificial Sequence
  Description of Artificial Sequence: Synthetic oligonucleotide
gguccaggcgagggcuaaa

SEQ ID NO: 1793280 - RNA, 19 nt, Artificial Sequence
  Description of Artificial Sequence: Synthetic oligonucleotide
gcgccuugggccccacggu

SEQ ID NO: 1793281 - RNA, 19 nt, Artificial Sequence
  Description of Artificial Sequence: Synthetic oligonucleotide
cgcgacccgacaucguaua

SEQ ID NO: 1793282 - RNA, 19 nt, Artificial Sequence
  Description of Artificial Sequence: Synthetic oligonucleotide
gccugguaaucaagucacu

SEQ ID NO: 1793283 - RNA, 19 nt, Artificial Sequence
  Description of Artificial Sequence: Synthetic oligonucleotide
ccgcagcccuaaguggcuc

SEQ ID NO: 1793284 - RNA, 19 nt, Artificial Sequence
  Description of Artificial Sequence: Synthetic oligonucleotide
gccguacgucacagcaaaa

SEQ ID NO: 1793285 - RNA, 19 nt, Artificial Sequence
  Description of Artificial Sequence: Synthetic oligonucleotide
ccuaaguggcucagcucuu

SEQ ID NO: 1793286 - RNA, 19 nt, Artificial Sequence
  Description of Artificial Sequence: Synthetic oligonucleotide
gcggccuaccgggaauugu

SEQ ID NO: 1793287 - RNA, 19 nt, Artificial Sequence
  Description of Artificial Sequence: Synthetic oligonucleotide
ggcccuuaaaagggccuuu

SEQ ID NO: 1793288 - RNA, 19 nt, Artificial Sequence
  Description of Artificial Sequence: Synthetic oligonucleotide
gccgcucgccggcgccuug

SEQ ID NO: 1793289 - RNA, 19 nt, Artificial Sequence
  Description of Artificial Sequence: Synthetic oligonucleotide
cgacaucguauacgaggua

SEQ ID NO: 1793290 - RNA, 19 nt, Artificial Sequence
  Description of Artificial Sequence: Synthetic oligonucleotide
cgcgggcucccucaguacu

SEQ ID NO: 1793291 - RNA, 19 nt, Artificial Sequence
  Description of Artificial Sequence: Synthetic oligonucleotide
cgacuugugcugguaucua

SEQ ID NO: 1793292 - RNA, 19 nt, Artificial Sequence
  Description of Artificial Sequence: Synthetic oligonucleotide
ccggccgaugaacgaagau

SEQ ID NO: 1793293 - RNA, 19 nt, Artificial Sequence
  Description of Artificial Sequence: Synthetic oligonucleotide
ccgcgacccgacaucguau

SEQ ID NO: 1793294 - RNA, 19 nt, Artificial Sequence
  Description of Artificial Sequence: Synthetic oligonucleotide
ccggcccgcagcccuaagu

SEQ ID NO: 1793295 - RNA, 19 nt, Artificial Sequence
  Description of Artificial Sequence: Synthetic oligonucleotide
cgcggccuaccgggaauug

SEQ ID NO: 1793296 - RNA, 19 nt, Artificial Sequence
  Description of Artificial Sequence: Synthetic oligonucleotide
gcgggccuugccuccgguu

SEQ ID NO: 1793297 - RNA, 19 nt, Artificial Sequence
  Description of Artificial Sequence: Synthetic oligonucleotide
cggcggcccggcccgcagc

SEQ ID NO: 1793298 - RNA, 19 nt, Artificial Sequence
  Description of Artificial Sequence: Synthetic oligonucleotide
ccccacgguggcgcucguc

SEQ ID NO: 1793299 - RNA, 19 nt, Artificial Sequence
  Description of Artificial Sequence: Synthetic oligonucleotide
ccacgguggcgcucgucuu

SEQ ID NO: 1793300 - RNA, 19 nt, Artificial Sequence
  Description of Artificial Sequence: Synthetic oligonucleotide
cggcgcgcgaggagcgcga

SEQ ID NO: 1793301 - RNA, 19 nt, Artificial Sequence
  Description of Artificial Sequence: Synthetic oligonucleotide
gccggcgccuugggcccca

SEQ ID NO: 1793302 - RNA, 19 nt, Artificial Sequence
  Description of Artificial Sequence: Synthetic oligonucleotide
gcccggcugccagucuccu

SEQ ID NO: 1793303 - RNA, 19 nt, Artificial Sequence
  Description of Artificial Sequence: Synthetic oligonucleotide
gcucggcauaguggccuuu

SEQ ID NO: 1793304 - RNA, 19 nt, Artificial Sequence
  Description of Artificial Sequence: Synthetic oligonucleotide
ggcccggcccgcagcccua

SEQ ID NO: 1793305 - RNA, 19 nt, Artificial Sequence
  Description of Artificial Sequence: Synthetic oligonucleotide
gcccggcccgcagcccuaa

SEQ ID NO: 1793306 - RNA, 19 nt, Artificial Sequence
  Description of Artificial Sequence: Synthetic oligonucleotide
gccacggcgcgggcucccu

SEQ ID NO: 1793307 - RNA, 19 nt, Artificial Sequence
  Description of Artificial Sequence: Synthetic oligonucleotide
gcgcgcgaggagcgcgauu

SEQ ID NO: 1793308 - RNA, 19 nt, Artificial Sequence
  Description of Artificial Sequence: Synthetic oligonucleotide
cgcgggccuugccuccggu

SEQ ID NO: 1793309 - RNA, 19 nt, Artificial Sequence
  Description of Artificial Sequence: Synthetic oligonucleotide
cggcgcgggcucccucagu

SEQ ID NO: 1793310 - RNA, 19 nt, Artificial Sequence
  Description of Artificial Sequence: Synthetic oligonucleotide
cgguggcgcucgucuucuu

SEQ ID NO: 1793311 - RNA, 19 nt, Artificial Sequence
  Description of Artificial Sequence: Synthetic oligonucleotide
gauuccacaacauacucgg

SEQ ID NO: 1793312 - RNA, 19 nt, Artificial Sequence
  Description of Artificial Sequence: Synthetic oligonucleotide
uccaauacggccaaauccg

SEQ ID NO: 1793313 - RNA, 19 nt, Artificial Sequence
  Description of Artificial Sequence: Synthetic oligonucleotide
aauacggccaaauccguuc

SEQ ID NO: 1793314 - RNA, 19 nt, Artificial Sequence
  Description of Artificial Sequence: Synthetic oligonucleotide
aguagauuccacaacauac

SEQ ID NO: 1793315 - RNA, 19 nt, Artificial Sequence
  Description of Artificial Sequence: Synthetic oligonucleotide
ugucauaccaggaaaugag

SEQ ID NO: 1793316 - RNA, 19 nt, Artificial Sequence
  Description of Artificial Sequence: Synthetic oligonucleotide
uacuggaacauguagacca

SEQ ID NO: 1793317 - RNA, 19 nt, Artificial Sequence
  Description of Artificial Sequence: Synthetic oligonucleotide
ucugggaugacuuugccca

SEQ ID NO: 1793318 - RNA, 19 nt, Artificial Sequence
  Description of Artificial Sequence: Synthetic oligonucleotide
uugacugugccuuugaacu

SEQ ID NO: 1793319 - RNA, 19 nt, Artificial Sequence
  Description of Artificial Sequence: Synthetic oligonucleotide
acaugucagauccacaacg

SEQ ID NO: 1793320 - RNA, 19 nt, Artificial Sequence
  Description of Artificial Sequence: Synthetic oligonucleotide
uuccacaacauacucggcg

SEQ ID NO: 1793321 - RNA, 19 nt, Artificial Sequence
  Description of Artificial Sequence: Synthetic oligonucleotide
acacccaucacaaacaugg

SEQ ID NO: 1793322 - RNA, 19 nt, Artificial Sequence
  Description of Artificial Sequence: Synthetic oligonucleotide
gaaacugugagggagauga

SEQ ID NO: 1793323 - RNA, 19 nt, Artificial Sequence
  Description of Artificial Sequence: Synthetic oligonucleotide
cagugaacuuuauugaugg

SEQ ID NO: 1793324 - RNA, 19 nt, Artificial Sequence
  Description of Artificial Sequence: Synthetic oligonucleotide
ucuugguucacacccauca

SEQ ID NO: 1793325 - RNA, 19 nt, Artificial Sequence
  Description of Artificial Sequence: Synthetic oligonucleotide
uccacaacggacacguugg

SEQ ID NO: 1793326 - RNA, 19 nt, Artificial Sequence
  Description of Artificial Sequence: Synthetic oligonucleotide
aacaacuuccacuuugcca

SEQ ID NO: 1793327 - RNA, 19 nt, Artificial Sequence
  Description of Artificial Sequence: Synthetic oligonucleotide
ugguauucaagagaguagg

SEQ ID NO: 1793328 - RNA, 19 nt, Artificial Sequence
  Description of Artificial Sequence: Synthetic oligonucleotide
ucauacuggaacauguaga

SEQ ID NO: 1793329 - RNA, 19 nt, Artificial Sequence
  Description of Artificial Sequence: Synthetic oligonucleotide
aauccguucacgccgaccu

SEQ ID NO: 1793330 - RNA, 19 nt, Artificial Sequence
  Description of Artificial Sequence: Synthetic oligonucleotide
ucagugggcccucagaugc

SEQ ID NO: 1793331 - RNA, 19 nt, Artificial Sequence
  Description of Artificial Sequence: Synthetic oligonucleotide
uagaccauguaguugaggu

SEQ ID NO: 1793332 - RNA, 19 nt, Artificial Sequence
  Description of Artificial Sequence: Synthetic oligonucleotide
uauugaugguauucaagag

SEQ ID NO: 1793333 - RNA, 19 nt, Artificial Sequence
  Description of Artificial Sequence: Synthetic oligonucleotide
gaugaugacccucuuggcc

SEQ ID NO: 1793334 - RNA, 19 nt, Artificial Sequence
  Description of Artificial Sequence: Synthetic oligonucleotide
uuacaaaguugucauugag

SEQ ID NO: 1793335 - RNA, 19 nt, Artificial Sequence
  Description of Artificial Sequence: Synthetic oligonucleotide
uguugcuguagccaaauuc

SEQ ID NO: 1793336 - RNA, 19 nt, Artificial Sequence
  Description of Artificial Sequence: Synthetic oligonucleotide
uuccacaaugccaaaguug

SEQ ID NO: 1793337 - RNA, 19 nt, Artificial Sequence
  Description of Artificial Sequence: Synthetic oligonucleotide
uaaccaggcguccaauacg

SEQ ID NO: 1793338 - RNA, 19 nt, Artificial Sequence
  Description of Artificial Sequence: Synthetic oligonucleotide
ucauaccaggaaaugagcu

SEQ ID NO: 1793339 - RNA, 19 nt, Artificial Sequence
  Description of Artificial Sequence: Synthetic oligonucleotide
uguaguugaggucaaugaa

SEQ ID NO: 1793340 - RNA, 19 nt, Artificial Sequence
  Description of Artificial Sequence: Synthetic oligonucleotide
acugugagggagaugaucg

SEQ ID NO: 1793341 - RNA, 19 nt, Artificial Sequence
  Description of Artificial Sequence: Synthetic oligonucleotide
ugucagauccacaacggac

SEQ ID NO: 1793342 - RNA, 19 nt, Artificial Sequence
  Description of Artificial Sequence: Synthetic oligonucleotide
caggcgacaugucagaucc

SEQ ID NO: 1793343 - RNA, 19 nt, Artificial Sequence
  Description of Artificial Sequence: Synthetic oligonucleotide
caucaaagguggaagagug

SEQ ID NO: 1793344 - RNA, 19 nt, Artificial Sequence
  Description of Artificial Sequence: Synthetic oligonucleotide
uggaccguggucaugaguc

SEQ ID NO: 1793345 - RNA, 19 nt, Artificial Sequence
  Description of Artificial Sequence: Synthetic oligonucleotide
caugucagauccacaacgg

SEQ ID NO: 1793346 - RNA, 19 nt, Artificial Sequence
  Description of Artificial Sequence: Synthetic oligonucleotide
accauugcgucuccggagc

SEQ ID NO: 1793347 - RNA, 19 nt, Artificial Sequence
  Description of Artificial Sequence: Synthetic oligonucleotide
agaguagggcucccuaagc

SEQ ID NO: 1793348 - RNA, 19 nt, Artificial Sequence
  Description of Artificial Sequence: Synthetic oligonucleotide
uuugauguuggcgggaucu

SEQ ID NO: 1793349 - RNA, 19 nt, Artificial Sequence
  Description of Artificial Sequence: Synthetic oligonucleotide
gguagagucauacuggaac

SEQ ID NO: 1793350 - RNA, 19 nt, Artificial Sequence
  Description of Artificial Sequence: Synthetic oligonucleotide
uccacaacauacucggcgc

SEQ ID NO: 1793351 - RNA, 19 nt, Artificial Sequence
  Description of Artificial Sequence: Synthetic oligonucleotide
uucacgccgaccuucacca

SEQ ID NO: 1793352 - RNA, 19 nt, Artificial Sequence
  Description of Artificial Sequence: Synthetic oligonucleotide
aacugugagggagaugauc

SEQ ID NO: 1793353 - RNA, 19 nt, Artificial Sequence
  Description of Artificial Sequence: Synthetic oligonucleotide
ucauugauggcaacaacuu

SEQ ID NO: 1793354 - RNA, 19 nt, Artificial Sequence
  Description of Artificial Sequence: Synthetic oligonucleotide
agaugaugacccucuuggc

SEQ ID NO: 1793355 - RNA, 19 nt, Artificial Sequence
  Description of Artificial Sequence: Synthetic oligonucleotide
acuugucuugguucacacc

SEQ ID NO: 1793356 - RNA, 19 nt, Artificial Sequence
  Description of Artificial Sequence: Synthetic oligonucleotide
aaccaggcguccaauacgg

SEQ ID NO: 1793357 - RNA, 19 nt, Artificial Sequence
  Description of Artificial Sequence: Synthetic oligonucleotide
guugucauggaugaccuug

SEQ ID NO: 1793358 - RNA, 19 nt, Artificial Sequence
  Description of Artificial Sequence: Synthetic oligonucleotide
uguccucauacuuggcagg

SEQ ID NO: 1793359 - RNA, 19 nt, Artificial Sequence
  Description of Artificial Sequence: Synthetic oligonucleotide
acuugccauggguagaguc

SEQ ID NO: 1793360 - RNA, 19 nt, Artificial Sequence
  Description of Artificial Sequence: Synthetic oligonucleotide
gaagucgcaggagacaacc

SEQ ID NO: 1793361 - RNA, 19 nt, Artificial Sequence
  Description of Artificial Sequence: Synthetic oligonucleotide
uugcucgaguccuugcugg

SEQ ID NO: 1793362 - RNA, 19 nt, Artificial Sequence
  Description of Artificial Sequence: Synthetic oligonucleotide
guauucaagagaguagggc

SEQ ID NO: 1793363 - RNA, 19 nt, Artificial Sequence
  Description of Artificial Sequence: Synthetic oligonucleotide
aaauccguucacgccgacc

SEQ ID NO: 1793364 - RNA, 19 nt, Artificial Sequence
  Description of Artificial Sequence: Synthetic oligonucleotide
agcaucaccccauuugaug

SEQ ID NO: 1793365 - RNA, 19 nt, Artificial Sequence
  Description of Artificial Sequence: Synthetic oligonucleotide
cucgguguagcccaggaug

SEQ ID NO: 1793366 - RNA, 19 nt, Artificial Sequence
  Description of Artificial Sequence: Synthetic oligonucleotide
gggauggaaacugugaggg

SEQ ID NO: 1793367 - RNA, 19 nt, Artificial Sequence
  Description of Artificial Sequence: Synthetic oligonucleotide
auggcaacaacuuccacuu

SEQ ID NO: 1793368 - RNA, 19 nt, Artificial Sequence
  Description of Artificial Sequence: Synthetic oligonucleotide
cuugacugugccuuugaac

SEQ ID NO: 1793369 - RNA, 19 nt, Artificial Sequence
  Description of Artificial Sequence: Synthetic oligonucleotide
caggaugcccuucaguggg

SEQ ID NO: 1793370 - RNA, 19 nt, Artificial Sequence
  Description of Artificial Sequence: Synthetic oligonucleotide
uugauggcaacaacuucca

SEQ ID NO: 1793371 - RNA, 19 nt, Artificial Sequence
  Description of Artificial Sequence: Synthetic oligonucleotide
cuucaagugggccccagcc

SEQ ID NO: 1793372 - RNA, 19 nt, Artificial Sequence
  Description of Artificial Sequence: Synthetic oligonucleotide
gauggcaacaacuuccacu

SEQ ID NO: 1793373 - RNA, 19 nt, Artificial Sequence
  Description of Artificial Sequence: Synthetic oligonucleotide
gagaguagggcucccuaag

SEQ ID NO: 1793374 - RNA, 19 nt, Artificial Sequence
  Description of Artificial Sequence: Synthetic oligonucleotide
agggccucccucuugcucg

SEQ ID NO: 1793375 - RNA, 19 nt, Artificial Sequence
  Description of Artificial Sequence: Synthetic oligonucleotide
cucggcgccagcaucaccc

SEQ ID NO: 1793376 - RNA, 19 nt, Artificial Sequence
  Description of Artificial Sequence: Synthetic oligonucleotide
agauuccacaacauacucg

SEQ ID NO: 1793377 - RNA, 19 nt, Artificial Sequence
  Description of Artificial Sequence: Synthetic oligonucleotide
gccaaauccguucacgccg

SEQ ID NO: 1793378 - RNA, 19 nt, Artificial Sequence
  Description of Artificial Sequence: Synthetic oligonucleotide
uucccguugaugacaagcu

SEQ ID NO: 1793379 - RNA, 19 nt, Artificial Sequence
  Description of Artificial Sequence: Synthetic oligonucleotide
auacuggaacauguagacc

SEQ ID NO: 1793380 - RNA, 19 nt, Artificial Sequence
  Description of Artificial Sequence: Synthetic oligonucleotide
cuucccguugaugacaagc

SEQ ID NO: 1793381 - RNA, 19 nt, Artificial Sequence
  Description of Artificial Sequence: Synthetic oligonucleotide
gagacaaccugguccucgg

SEQ ID NO: 1793382 - RNA, 19 nt, Artificial Sequence
  Description of Artificial Sequence: Synthetic oligonucleotide
guagagucauacuggaaca

SEQ ID NO: 1793383 - RNA, 19 nt, Artificial Sequence
  Description of Artificial Sequence: Synthetic oligonucleotide
gucauugagagcaaugcca

SEQ ID NO: 1793384 - RNA, 19 nt, Artificial Sequence
  Description of Artificial Sequence: Synthetic oligonucleotide
auugucauaccaggaaaug

SEQ ID NO: 1793385 - RNA, 19 nt, Artificial Sequence
  Description of Artificial Sequence: Synthetic oligonucleotide
ggggcuaagcaguuggugg

SEQ ID NO: 1793386 - RNA, 19 nt, Artificial Sequence
  Description of Artificial Sequence: Synthetic oligonucleotide
gaagacgccaguagauucc

SEQ ID NO: 1793387 - RNA, 19 nt, Artificial Sequence
  Description of Artificial Sequence: Synthetic oligonucleotide
agucgcaggagacaaccug

SEQ ID NO: 1793388 - RNA, 19 nt, Artificial Sequence
  Description of Artificial Sequence: Synthetic oligonucleotide
ugaguccuuccacaaugcc

SEQ ID NO: 1793389 - RNA, 19 nt, Artificial Sequence
  Description of Artificial Sequence: Synthetic oligonucleotide
ucuugcucgaguccuugcu

SEQ ID NO: 1793390 - RNA, 19 nt, Artificial Sequence
  Description of Artificial Sequence: Synthetic oligonucleotide
guaaccaggcguccaauac

SEQ ID NO: 1793391 - RNA, 19 nt, Artificial Sequence
  Description of Artificial Sequence: Synthetic oligonucleotide
uggguagagucauacugga

SEQ ID NO: 1793392 - RNA, 19 nt, Artificial Sequence
  Description of Artificial Sequence: Synthetic oligonucleotide
ucaccauugcgucuccgga

SEQ ID NO: 1793393 - RNA, 19 nt, Artificial Sequence
  Description of Artificial Sequence: Synthetic oligonucleotide
uucaagagaguagggcucc

SEQ ID NO: 1793394 - RNA, 19 nt, Artificial Sequence
  Description of Artificial Sequence: Synthetic oligonucleotide
ugauguuggcgggaucucg

SEQ ID NO: 1793395 - RNA, 19 nt, Artificial Sequence
  Description of Artificial Sequence: Synthetic oligonucleotide
ucuuacuccuuggaggcca

SEQ ID NO: 1793396 - RNA, 19 nt, Artificial Sequence
  Description of Artificial Sequence: Synthetic oligonucleotide
gacaaccugguccucggug

SEQ ID NO: 1793397 - RNA, 19 nt, Artificial Sequence
  Description of Artificial Sequence: Synthetic oligonucleotide
guuggcgggaucucgcucc

SEQ ID NO: 1793398 - RNA, 19 nt, Artificial Sequence
  Description of Artificial Sequence: Synthetic oligonucleotide
ugagggaguugucauacuu

SEQ ID NO: 1793399 - RNA, 19 nt, Artificial Sequence
  Description of Artificial Sequence: Synthetic oligonucleotide
gaacuugccauggguagag

SEQ ID NO: 1793400 - RNA, 19 nt, Artificial Sequence
  Description of Artificial Sequence: Synthetic oligonucleotide
gucauggaugaccuuggcc

SEQ ID NO: 1793401 - RNA, 19 nt, Artificial Sequence
  Description of Artificial Sequence: Synthetic oligonucleotide
cuuugccagaagugaaggc

SEQ ID NO: 1793402 - RNA, 19 nt, Artificial Sequence
  Description of Artificial Sequence: Synthetic oligonucleotide
guucugggcagccccacgg

SEQ ID NO: 1793403 - RNA, 19 nt, Artificial Sequence
  Description of Artificial Sequence: Synthetic oligonucleotide
uugaagucgcaggagacaa

SEQ ID NO: 1793404 - RNA, 19 nt, Artificial Sequence
  Description of Artificial Sequence: Synthetic oligonucleotide
acaaccugguccucggugu

SEQ ID NO: 1793405 - RNA, 19 nt, Artificial Sequence
  Description of Artificial Sequence: Synthetic oligonucleotide
acugcacggaaagaugcgg

SEQ ID NO: 1793406 - RNA, 19 nt, Artificial Sequence
  Description of Artificial Sequence: Synthetic oligonucleotide
uucccguucagcucuggga

SEQ ID NO: 1793407 - RNA, 19 nt, Artificial Sequence
  Description of Artificial Sequence: Synthetic oligonucleotide
ugagggagaugaucggugu

SEQ ID NO: 1793408 - RNA, 19 nt, Artificial Sequence
  Description of Artificial Sequence: Synthetic oligonucleotide
ucccguucagcucugggau

SEQ ID NO: 1793409 - RNA, 19 nt, Artificial Sequence
  Description of Artificial Sequence: Synthetic oligonucleotide
augccagucagcuucccgu

SEQ ID NO: 1793410 - RNA, 19 nt, Artificial Sequence
  Description of Artificial Sequence: Synthetic oligonucleotide
aacauacucggcgccagca

SEQ ID NO: 1793411 - RNA, 19 nt, Artificial Sequence
  Description of Artificial Sequence: Synthetic oligonucleotide
aguugguggugcaggacgc

SEQ ID NO: 1793412 - RNA, 19 nt, Artificial Sequence
  Description of Artificial Sequence: Synthetic oligonucleotide
gggguaggaacacggaagg

SEQ ID NO: 1793413 - RNA, 19 nt, Artificial Sequence
  Description of Artificial Sequence: Synthetic oligonucleotide
aagguggaagagugggagu

SEQ ID NO: 1793414 - RNA, 19 nt, Artificial Sequence
  Description of Artificial Sequence: Synthetic oligonucleotide
gauggcauggaccgugguc

SEQ ID NO: 1793415 - RNA, 19 nt, Artificial Sequence
  Description of Artificial Sequence: Synthetic oligonucleotide
cucugggaugacuuugccc

SEQ ID NO: 1793416 - RNA, 19 nt, Artificial Sequence
  Description of Artificial Sequence: Synthetic oligonucleotide
agcgccaguggaugcaggg

SEQ ID NO: 1793417 - RNA, 19 nt, Artificial Sequence
  Description of Artificial Sequence: Synthetic oligonucleotide
gaaggggcggagaugauga

SEQ ID NO: 1793418 - RNA, 19 nt, Artificial Sequence
  Description of Artificial Sequence: Synthetic oligonucleotide
gacgccaguagauuccaca

SEQ ID NO: 1793419 - RNA, 19 nt, Artificial Sequence
  Description of Artificial Sequence: Synthetic oligonucleotide
gucgcaggagacaaccugg

SEQ ID NO: 1793420 - RNA, 19 nt, Artificial Sequence
  Description of Artificial Sequence: Synthetic oligonucleotide
uggaugaccuuggccaggg

SEQ ID NO: 1793421 - RNA, 19 nt, Artificial Sequence
  Description of Artificial Sequence: Synthetic oligonucleotide
accuucaccauugcgucuc

SEQ ID NO: 1793422 - RNA, 19 nt, Artificial Sequence
  Description of Artificial Sequence: Synthetic oligonucleotide
accccauuugauguuggcg

SEQ ID NO: 1793423 - RNA, 19 nt, Artificial Sequence
  Description of Artificial Sequence: Synthetic oligonucleotide
aguggaugcagggaugaug

SEQ ID NO: 1793424 - RNA, 19 nt, Artificial Sequence
  Description of Artificial Sequence: Synthetic oligonucleotide
uuggcagguuucuccaggc

SEQ ID NO: 1793425 - RNA, 19 nt, Artificial Sequence
  Description of Artificial Sequence: Synthetic oligonucleotide
uccggagcgaggcuggcac

SEQ ID NO: 1793426 - RNA, 19 nt, Artificial Sequence
  Description of Artificial Sequence: Synthetic oligonucleotide
uaagccccuccuuauucug

SEQ ID NO: 1793427 - RNA, 19 nt, Artificial Sequence
  Description of Artificial Sequence: Synthetic oligonucleotide
gauguuggcgggaucucgc

SEQ ID NO: 1793428 - RNA, 19 nt, Artificial Sequence
  Description of Artificial Sequence: Synthetic oligonucleotide
uggcagguuucuccaggcg

SEQ ID NO: 1793429 - RNA, 19 nt, Artificial Sequence
  Description of Artificial Sequence: Synthetic oligonucleotide
ugcacggaaagaugcggcu

SEQ ID NO: 1793430 - RNA, 19 nt, Artificial Sequence
  Description of Artificial Sequence: Synthetic oligonucleotide
cugcacggaaagaugcggc

SEQ ID NO: 1793431 - RNA, 19 nt, Artificial Sequence
  Description of Artificial Sequence: Synthetic oligonucleotide
aaggggcggagaugaugac

SEQ ID NO: 1793432 - RNA, 19 nt, Artificial Sequence
  Description of Artificial Sequence: Synthetic oligonucleotide
gacugugccuuugaacuug

SEQ ID NO: 1793433 - RNA, 19 nt, Artificial Sequence
  Description of Artificial Sequence: Synthetic oligonucleotide
agagucauacuggaacaug

SEQ ID NO: 1793434 - RNA, 19 nt, Artificial Sequence
  Description of Artificial Sequence: Synthetic oligonucleotide
aggggcggagaugaugacc

SEQ ID NO: 1793435 - RNA, 19 nt, Artificial Sequence
  Description of Artificial Sequence: Synthetic oligonucleotide
ugugagggagaugaucggu

SEQ ID NO: 1793436 - RNA, 19 nt, Artificial Sequence
  Description of Artificial Sequence: Synthetic oligonucleotide
auaccaggaaaugagcuuu

SEQ ID NO: 1793437 - RNA, 19 nt, Artificial Sequence
  Description of Artificial Sequence: Synthetic oligonucleotide
gucauaccaggaaaugagc

SEQ ID NO: 1793438 - RNA, 19 nt, Artificial Sequence
  Description of Artificial Sequence: Synthetic oligonucleotide
augucagauccacaacgga

SEQ ID NO: 1793439 - RNA, 19 nt, Artificial Sequence
  Description of Artificial Sequence: Synthetic oligonucleotide
ggaagagugggagucacug

SEQ ID NO: 1793440 - RNA, 19 nt, Artificial Sequence
  Description of Artificial Sequence: Synthetic oligonucleotide
aucaaagguggaagagugg

SEQ ID NO: 1793441 - RNA, 19 nt, Artificial Sequence
  Description of Artificial Sequence: Synthetic oligonucleotide
gaaaugagcuuuacaaagu

SEQ ID NO: 1793442 - RNA, 19 nt, Artificial Sequence
  Description of Artificial Sequence: Synthetic oligonucleotide
cuugcucgaguccuugcug

SEQ ID NO: 1793443 - RNA, 19 nt, Artificial Sequence
  Description of Artificial Sequence: Synthetic oligonucleotide
cugugagggagaugaucgg

SEQ ID NO: 1793444 - RNA, 19 nt, Artificial Sequence
  Description of Artificial Sequence: Synthetic oligonucleotide
ugaugguauucaagagagu

SEQ ID NO: 1793445 - RNA, 19 nt, Artificial Sequence
  Description of Artificial Sequence: Synthetic oligonucleotide
caugccagucagcuucccg

SEQ ID NO: 1793446 - RNA, 19 nt, Artificial Sequence
  Description of Artificial Sequence: Synthetic oligonucleotide
caacaacuuccacuuugcc

SEQ ID NO: 1793447 - RNA, 19 nt, Artificial Sequence
  Description of Artificial Sequence: Synthetic oligonucleotide
ugaugacccucuuggcccc

SEQ ID NO: 1793448 - RNA, 19 nt, Artificial Sequence
  Description of Artificial Sequence: Synthetic oligonucleotide
gguauucaagagaguaggg

SEQ ID NO: 1793449 - RNA, 19 nt, Artificial Sequence
  Description of Artificial Sequence: Synthetic oligonucleotide
gugaacuuuauugauggua

SEQ ID NO: 1793450 - RNA, 19 nt, Artificial Sequence
  Description of Artificial Sequence: Synthetic oligonucleotide
ugcucgaguccuugcuggg

SEQ ID NO: 1793451 - RNA, 19 nt, Artificial Sequence
  Description of Artificial Sequence: Synthetic oligonucleotide
ugaugacaagcuuuccauu

SEQ ID NO: 1793452 - RNA, 19 nt, Artificial Sequence
  Description of Artificial Sequence: Synthetic oligonucleotide
ggaggggccauccacaguc

SEQ ID NO: 1793453 - RNA, 19 nt, Artificial Sequence
  Description of Artificial Sequence: Synthetic oligonucleotide
gaugcagggaugauguucu

SEQ ID NO: 1793454 - RNA, 19 nt, Artificial Sequence
  Description of Artificial Sequence: Synthetic oligonucleotide
ucucagccuugacugugcc

SEQ ID NO: 1793455 - RNA, 19 nt, Artificial Sequence
  Description of Artificial Sequence: Synthetic oligonucleotide
gccaguagauuccacaaca

SEQ ID NO: 1793456 - RNA, 19 nt, Artificial Sequence
  Description of Artificial Sequence: Synthetic oligonucleotide
caccauugcgucuccggag

SEQ ID NO: 1793457 - RNA, 19 nt, Artificial Sequence
  Description of Artificial Sequence: Synthetic oligonucleotide
agagaguagggcucccuaa

SEQ ID NO: 1793458 - RNA, 19 nt, Artificial Sequence
  Description of Artificial Sequence: Synthetic oligonucleotide
agugaacuuuauugauggu

SEQ ID NO: 1793459 - RNA, 19 nt, Artificial Sequence
  Description of Artificial Sequence: Synthetic oligonucleotide
cuugguucacacccaucac

SEQ ID NO: 1793460 - RNA, 19 nt, Artificial Sequence
  Description of Artificial Sequence: Synthetic oligonucleotide
cucagaugccugcuucacc

SEQ ID NO: 1793461 - RNA, 19 nt, Artificial Sequence
  Description of Artificial Sequence: Synthetic oligonucleotide
acggccaaauccguucacg

SEQ ID NO: 1793462 - RNA, 19 nt, Artificial Sequence
  Description of Artificial Sequence: Synthetic oligonucleotide
auacggccaaauccguuca

SEQ ID NO: 1793463 - RNA, 19 nt, Artificial Sequence
  Description of Artificial Sequence: Synthetic oligonucleotide
uugucauacuugucuuggu

SEQ ID NO: 1793464 - RNA, 19 nt, Artificial Sequence
  Description of Artificial Sequence: Synthetic oligonucleotide
guagaccauguaguugagg

SEQ ID NO: 1793465 - RNA, 19 nt, Artificial Sequence
  Description of Artificial Sequence: Synthetic oligonucleotide
gagggagaugaucggugug

SEQ ID NO: 1793466 - RNA, 19 nt, Artificial Sequence
  Description of Artificial Sequence: Synthetic oligonucleotide
auucauugucauaccagga

SEQ ID NO: 1793467 - RNA, 19 nt, Artificial Sequence
  Description of Artificial Sequence: Synthetic oligonucleotide
ugcgucuccggagcgaggc

SEQ ID NO: 1793468 - RNA, 19 nt, Artificial Sequence
  Description of Artificial Sequence: Synthetic oligonucleotide
aagacgccaguagauucca

SEQ ID NO: 1793469 - RNA, 19 nt, Artificial Sequence
  Description of Artificial Sequence: Synthetic oligonucleotide
cauacucggcgccagcauc

SEQ ID NO: 1793470 - RNA, 19 nt, Artificial Sequence
  Description of Artificial Sequence: Synthetic oligonucleotide
acgccaguagauuccacaa

SEQ ID NO: 1793471 - RNA, 19 nt, Artificial Sequence
  Description of Artificial Sequence: Synthetic oligonucleotide
gggaucucgcuccuggaag

SEQ ID NO: 1793472 - RNA, 19 nt, Artificial Sequence
  Description of Artificial Sequence: Synthetic oligonucleotide
ccaaaguugucauggauga

SEQ ID NO: 1793473 - RNA, 19 nt, Artificial Sequence
  Description of Artificial Sequence: Synthetic oligonucleotide
agaaggggcggagaugaug

SEQ ID NO: 1793474 - RNA, 19 nt, Artificial Sequence
  Description of Artificial Sequence: Synthetic oligonucleotide
gcuggcacugcacggaaag

SEQ ID NO: 1793475 - RNA, 19 nt, Artificial Sequence
  Description of Artificial Sequence: Synthetic oligonucleotide
acugugccuuugaacuugc

SEQ ID NO: 1793476 - RNA, 19 nt, Artificial Sequence
  Description of Artificial Sequence: Synthetic oligonucleotide
uccucgguguagcccagga

SEQ ID NO: 1793477 - RNA, 19 nt, Artificial Sequence
  Description of Artificial Sequence: Synthetic oligonucleotide
cacccaucacaaacauggg

SEQ ID NO: 1793478 - RNA, 19 nt, Artificial Sequence
  Description of Artificial Sequence: Synthetic oligonucleotide
cacaacggacacguugggg

SEQ ID NO: 1793479 - RNA, 19 nt, Artificial Sequence
  Description of Artificial Sequence: Synthetic oligonucleotide
gagucauacuggaacaugu

SEQ ID NO: 1793480 - RNA, 19 nt, Artificial Sequence
  Description of Artificial Sequence: Synthetic oligonucleotide
gugagggagaugaucggug

SEQ ID NO: 1793481 - RNA, 19 nt, Artificial Sequence
  Description of Artificial Sequence: Synthetic oligonucleotide
aucacgccacagcuucccg

SEQ ID NO: 1793482 - RNA, 19 nt, Artificial Sequence
  Description of Artificial Sequence: Synthetic oligonucleotide
guagauuccacaacauacu

SEQ ID NO: 1793483 - RNA, 19 nt, Artificial Sequence
  Description of Artificial Sequence: Synthetic oligonucleotide
ggagaugaugacccucuug

SEQ ID NO: 1793484 - RNA, 19 nt, Artificial Sequence
  Description of Artificial Sequence: Synthetic oligonucleotide
ucgcaggagacaaccuggu

SEQ ID NO: 1793485 - RNA, 19 nt, Artificial Sequence
  Description of Artificial Sequence: Synthetic oligonucleotide
gaugcccuucagugggccc

SEQ ID NO: 1793486 - RNA, 19 nt, Artificial Sequence
  Description of Artificial Sequence: Synthetic oligonucleotide
caaugccaaaguugucaug

SEQ ID NO: 1793487 - RNA, 19 nt, Artificial Sequence
  Description of Artificial Sequence: Synthetic oligonucleotide
gguagggccucccucuugc

SEQ ID NO: 1793488 - RNA, 19 nt, Artificial Sequence
  Description of Artificial Sequence: Synthetic oligonucleotide
auacuugucuugguucaca

SEQ ID NO: 1793489 - RNA, 19 nt, Artificial Sequence
  Description of Artificial Sequence: Synthetic oligonucleotide
uagagucauacuggaacau

SEQ ID NO: 1793490 - RNA, 19 nt, Artificial Sequence
  Description of Artificial Sequence: Synthetic oligonucleotide
ggagacaaccugguccucg

SEQ ID NO: 1793491 - RNA, 19 nt, Artificial Sequence
  Description of Artificial Sequence: Synthetic oligonucleotide
augagguccaccacucugu

SEQ ID NO: 1793492 - RNA, 19 nt, Artificial Sequence
  Description of Artificial Sequence: Synthetic oligonucleotide
uguuggcgggaucucgcuc

SEQ ID NO: 1793493 - RNA, 19 nt, Artificial Sequence
  Description of Artificial Sequence: Synthetic oligonucleotide
ggggcggagaugaugaccc

SEQ ID NO: 1793494 - RNA, 19 nt, Artificial Sequence
  Description of Artificial Sequence: Synthetic oligonucleotide
ucccucuugcucgaguccu

SEQ ID NO: 1793495 - RNA, 19 nt, Artificial Sequence
  Description of Artificial Sequence: Synthetic oligonucleotide
caucacgccacagcuuccc

SEQ ID NO: 1793496 - RNA, 19 nt, Artificial Sequence
  Description of Artificial Sequence: Synthetic oligonucleotide
ggcgggaucucgcuccugg

SEQ ID NO: 1793497 - RNA, 19 nt, Artificial Sequence
  Description of Artificial Sequence: Synthetic oligonucleotide
ggacgcauugcugacaauc

SEQ ID NO: 1793498 - RNA, 19 nt, Artificial Sequence
  Description of Artificial Sequence: Synthetic oligonucleotide
ccaggcguccaauacggcc

SEQ ID NO: 1793499 - RNA, 19 nt, Artificial Sequence
  Description of Artificial Sequence: Synthetic oligonucleotide
uggcagugauggcauggac

SEQ ID NO: 1793500 - RNA, 19 nt, Artificial Sequence
  Description of Artificial Sequence: Synthetic oligonucleotide
ggucaugaguccuuccaca

SEQ ID NO: 1793501 - RNA, 19 nt, Artificial Sequence
  Description of Artificial Sequence: Synthetic oligonucleotide
cacacccaucacaaacaug

SEQ ID NO: 1793502 - RNA, 19 nt, Artificial Sequence
  Description of Artificial Sequence: Synthetic oligonucleotide
uucuuacuccuuggaggcc

SEQ ID NO: 1793503 - RNA, 19 nt, Artificial Sequence
  Description of Artificial Sequence: Synthetic oligonucleotide
ugcugacaaucuugaggga

SEQ ID NO: 1793504 - RNA, 19 nt, Artificial Sequence
  Description of Artificial Sequence: Synthetic oligonucleotide
ggugauggccuucccguug

SEQ ID NO: 1793505 - RNA, 19 nt, Artificial Sequence
  Description of Artificial Sequence: Synthetic oligonucleotide
ugacugugccuuugaacuu

SEQ ID NO: 1793506 - RNA, 19 nt, Artificial Sequence
  Description of Artificial Sequence: Synthetic oligonucleotide
ucgaguccuugcuggggug

SEQ ID NO: 1793507 - RNA, 19 nt, Artificial Sequence
  Description of Artificial Sequence: Synthetic oligonucleotide
auggaccguggucaugagu

SEQ ID NO: 1793508 - RNA, 19 nt, Artificial Sequence
  Description of Artificial Sequence: Synthetic oligonucleotide
gccaucacgccacagcuuc

SEQ ID NO: 1793509 - RNA, 19 nt, Artificial Sequence
  Description of Artificial Sequence: Synthetic oligonucleotide
acggaaggccaugccaguc

SEQ ID NO: 1793510 - RNA, 19 nt, Artificial Sequence
  Description of Artificial Sequence: Synthetic oligonucleotide
caccccauuugauguuggc

SEQ ID NO: 1793511 - RNA, 19 nt, Artificial Sequence
  Description of Artificial Sequence: Synthetic oligonucleotide
uaccaggaaaugagcuuua

SEQ ID NO: 1793512 - RNA, 19 nt, Artificial Sequence
  Description of Artificial Sequence: Synthetic oligonucleotide
auguuggcgggaucucgcu

SEQ ID NO: 1793513 - RNA, 19 nt, Artificial Sequence
  Description of Artificial Sequence: Synthetic oligonucleotide
acauacucggcgccagcau

SEQ ID NO: 1793514 - RNA, 19 nt, Artificial Sequence
  Description of Artificial Sequence: Synthetic oligonucleotide
gccuuugaacuugccaugg

SEQ ID NO: 1793515 - RNA, 19 nt, Artificial Sequence
  Description of Artificial Sequence: Synthetic oligonucleotide
ugagguccaccacucuguu

SEQ ID NO: 1793516 - RNA, 19 nt, Artificial Sequence
  Description of Artificial Sequence: Synthetic oligonucleotide
uacggccaaauccguucac

SEQ ID NO: 1793517 - RNA, 19 nt, Artificial Sequence
  Description of Artificial Sequence: Synthetic oligonucleotide
cauacuugucuugguucac

SEQ ID NO: 1793518 - RNA, 19 nt, Artificial Sequence
  Description of Artificial Sequence: Synthetic oligonucleotide
cauugucauaccaggaaau

SEQ ID NO: 1793519 - RNA, 19 nt, Artificial Sequence
  Description of Artificial Sequence: Synthetic oligonucleotide
auacucggcgccagcauca

SEQ ID NO: 1793520 - RNA, 19 nt, Artificial Sequence
  Description of Artificial Sequence: Synthetic oligonucleotide
ggcagguuucuccaggcga

SEQ ID NO: 1793521 - RNA, 19 nt, Artificial Sequence
  Description of Artificial Sequence: Synthetic oligonucleotide
ucccuaagccccuccuuau

SEQ ID NO: 1793522 - RNA, 19 nt, Artificial Sequence
  Description of Artificial Sequence: Synthetic oligonucleotide
agccaaauucauugucaua

SEQ ID NO: 1793523 - RNA, 19 nt, Artificial Sequence
  Description of Artificial Sequence: Synthetic oligonucleotide
acccucuuggccccgcccu

SEQ ID NO: 1793524 - RNA, 19 nt, Artificial Sequence
  Description of Artificial Sequence: Synthetic oligonucleotide
ggaugcagggaugauguuc

SEQ ID NO: 1793525 - RNA, 19 nt, Artificial Sequence
  Description of Artificial Sequence: Synthetic oligonucleotide
gcagaaggggcggagauga

SEQ ID NO: 1793526 - RNA, 19 nt, Artificial Sequence
  Description of Artificial Sequence: Synthetic oligonucleotide
caacauacucggcgccagc

SEQ ID NO: 1793527 - RNA, 19 nt, Artificial Sequence
  Description of Artificial Sequence: Synthetic oligonucleotide
uugcgucuccggagcgagg

SEQ ID NO: 1793528 - RNA, 19 nt, Artificial Sequence
  Description of Artificial Sequence: Synthetic oligonucleotide
gcgaggcuggcacugcacg

SEQ ID NO: 1793529 - RNA, 19 nt, Artificial Sequence
  Description of Artificial Sequence: Synthetic oligonucleotide
gaagagugggagucacugu

SEQ ID NO: 1793530 - RNA, 19 nt, Artificial Sequence
  Description of Artificial Sequence: Synthetic oligonucleotide
cuaagcaguugguggugca

SEQ ID NO: 1793531 - RNA, 19 nt, Artificial Sequence
  Description of Artificial Sequence: Synthetic oligonucleotide
ggccccgcccuucaagugg

SEQ ID NO: 1793532 - RNA, 19 nt, Artificial Sequence
  Description of Artificial Sequence: Synthetic oligonucleotide
caaugaaggggucauugau

SEQ ID NO: 1793533 - RNA, 19 nt, Artificial Sequence
  Description of Artificial Sequence: Synthetic oligonucleotide
gacgcauugcugacaaucu

SEQ ID NO: 1793534 - RNA, 19 nt, Artificial Sequence
  Description of Artificial Sequence: Synthetic oligonucleotide
aagucgcaggagacaaccu

SEQ ID NO: 1793535 - RNA, 19 nt, Artificial Sequence
  Description of Artificial Sequence: Synthetic oligonucleotide
ucgcuccuggaagauggug

SEQ ID NO: 1793536 - RNA, 19 nt, Artificial Sequence
  Description of Artificial Sequence: Synthetic oligonucleotide
aguugucauugagagcaau

SEQ ID NO: 1793537 - RNA, 19 nt, Artificial Sequence
  Description of Artificial Sequence: Synthetic oligonucleotide
uuucuccaggcgacauguc

SEQ ID NO: 1793538 - RNA, 19 nt, Artificial Sequence
  Description of Artificial Sequence: Synthetic oligonucleotide
acgcauugcugacaaucuu

SEQ ID NO: 1793539 - RNA, 19 nt, Artificial Sequence
  Description of Artificial Sequence: Synthetic oligonucleotide
gacccucuuggccccgccc

SEQ ID NO: 1793540 - RNA, 19 nt, Artificial Sequence
  Description of Artificial Sequence: Synthetic oligonucleotide
cugggaugacuuugcccac

SEQ ID NO: 1793541 - RNA, 19 nt, Artificial Sequence
  Description of Artificial Sequence: Synthetic oligonucleotide
cacgccacagcuucccgga

SEQ ID NO: 1793542 - RNA, 19 nt, Artificial Sequence
  Description of Artificial Sequence: Synthetic oligonucleotide
aggaugcccuucagugggc

SEQ ID NO: 1793543 - RNA, 19 nt, Artificial Sequence
  Description of Artificial Sequence: Synthetic oligonucleotide
uugauguuggcgggaucuc

SEQ ID NO: 1793544 - RNA, 19 nt, Artificial Sequence
  Description of Artificial Sequence: Synthetic oligonucleotide
ccuaagccccuccuuauuc

SEQ ID NO: 1793545 - RNA, 19 nt, Artificial Sequence
  Description of Artificial Sequence: Synthetic oligonucleotide
gcaucaccccauuugaugu

SEQ ID NO: 1793546 - RNA, 19 nt, Artificial Sequence
  Description of Artificial Sequence: Synthetic oligonucleotide
acggaaagaugcggcuguc

SEQ ID NO: 1793547 - RNA, 19 nt, Artificial Sequence
  Description of Artificial Sequence: Synthetic oligonucleotide
cauaccaggaaaugagcuu

SEQ ID NO: 1793548 - RNA, 19 nt, Artificial Sequence
  Description of Artificial Sequence: Synthetic oligonucleotide
ggaucucgcuccuggaaga

SEQ ID NO: 1793549 - RNA, 19 nt, Artificial Sequence
  Description of Artificial Sequence: Synthetic oligonucleotide
agcgaggcuggcacugcac

SEQ ID NO: 1793550 - RNA, 19 nt, Artificial Sequence
  Description of Artificial Sequence: Synthetic oligonucleotide
gcaucagcagaaggggcgg

SEQ ID NO: 1793551 - RNA, 19 nt, Artificial Sequence
  Description of Artificial Sequence: Synthetic oligonucleotide
augcccuucagugggcccu

SEQ ID NO: 1793552 - RNA, 19 nt, Artificial Sequence
  Description of Artificial Sequence: Synthetic oligonucleotide
acgccgaccuucaccauug

SEQ ID NO: 1793553 - RNA, 19 nt, Artificial Sequence
  Description of Artificial Sequence: Synthetic oligonucleotide
caggacgcauugcugacaa

SEQ ID NO: 1793554 - RNA, 19 nt, Artificial Sequence
  Description of Artificial Sequence: Synthetic oligonucleotide
ggcgacaugucagauccac

SEQ ID NO: 1793555 - RNA, 19 nt, Artificial Sequence
  Description of Artificial Sequence: Synthetic oligonucleotide
uuggcgggaucucgcuccu

SEQ ID NO: 1793556 - RNA, 19 nt, Artificial Sequence
  Description of Artificial Sequence: Synthetic oligonucleotide
cauggaccguggucaugag

SEQ ID NO: 1793557 - RNA, 19 nt, Artificial Sequence
  Description of Artificial Sequence: Synthetic oligonucleotide
gucuccggagcgaggcugg

SEQ ID NO: 1793558 - RNA, 19 nt, Artificial Sequence
  Description of Artificial Sequence: Synthetic oligonucleotide
ugacccucuuggccccgcc

SEQ ID NO: 1793559 - RNA, 19 nt, Artificial Sequence
  Description of Artificial Sequence: Synthetic oligonucleotide
gaugacccucuuggccccg

SEQ ID NO: 1793560 - RNA, 19 nt, Artificial Sequence
  Description of Artificial Sequence: Synthetic oligonucleotide
gccgaccuucaccauugcg

SEQ ID NO: 1793561 - RNA, 19 nt, Artificial Sequence
  Description of Artificial Sequence: Synthetic oligonucleotide
caccacucuguugcuguag

SEQ ID NO: 1793562 - RNA, 19 nt, Artificial Sequence
  Description of Artificial Sequence: Synthetic oligonucleotide
agacaaccugguccucggu

SEQ ID NO: 1793563 - RNA, 19 nt, Artificial Sequence
  Description of Artificial Sequence: Synthetic oligonucleotide
aacuugccauggguagagu

SEQ ID NO: 1793564 - RNA, 19 nt, Artificial Sequence
  Description of Artificial Sequence: Synthetic oligonucleotide
cugugccuuugaacuugcc

SEQ ID NO: 1793565 - RNA, 19 nt, Artificial Sequence
  Description of Artificial Sequence: Synthetic oligonucleotide
uggaugguccagggugggc

SEQ ID NO: 1793566 - RNA, 19 nt, Artificial Sequence
  Description of Artificial Sequence: Synthetic oligonucleotide
augacccucuuggccccgc

SEQ ID NO: 1793567 - RNA, 19 nt, Artificial Sequence
  Description of Artificial Sequence: Synthetic oligonucleotide
ggaccguggucaugagucc

SEQ ID NO: 1793568 - RNA, 19 nt, Artificial Sequence
  Description of Artificial Sequence: Synthetic oligonucleotide
cacaacauacucggcgcca

SEQ ID NO: 1793569 - RNA, 19 nt, Artificial Sequence
  Description of Artificial Sequence: Synthetic oligonucleotide
aucucgcuccuggaagaug

SEQ ID NO: 1793570 - RNA, 19 nt, Artificial Sequence
  Description of Artificial Sequence: Synthetic oligonucleotide
gcuaagcaguugguggugc

SEQ ID NO: 1793571 - RNA, 19 nt, Artificial Sequence
  Description of Artificial Sequence: Synthetic oligonucleotide
cucccuaagccccuccuua

SEQ ID NO: 1793572 - RNA, 19 nt, Artificial Sequence
  Description of Artificial Sequence: Synthetic oligonucleotide
agugggcccucagaugccu

SEQ ID NO: 1793573 - RNA, 19 nt, Artificial Sequence
  Description of Artificial Sequence: Synthetic oligonucleotide
uggccccgcccuucaagug

SEQ ID NO: 1793574 - RNA, 19 nt, Artificial Sequence
  Description of Artificial Sequence: Synthetic oligonucleotide
cuccaggcgacaugucaga

SEQ ID NO: 1793575 - RNA, 19 nt, Artificial Sequence
  Description of Artificial Sequence: Synthetic oligonucleotide
gcagguuucuccaggcgac

SEQ ID NO: 1793576 - RNA, 19 nt, Artificial Sequence
  Description of Artificial Sequence: Synthetic oligonucleotide
uccaggcgacaugucagau

SEQ ID NO: 1793577 - RNA, 19 nt, Artificial Sequence
  Description of Artificial Sequence: Synthetic oligonucleotide
ccacaacauacucggcgcc

SEQ ID NO: 1793578 - RNA, 19 nt, Artificial Sequence
  Description of Artificial Sequence: Synthetic oligonucleotide
ugguaaccaggcguccaau

SEQ ID NO: 1793579 - RNA, 19 nt, Artificial Sequence
  Description of Artificial Sequence: Synthetic oligonucleotide
cagcgccaguggaugcagg

SEQ ID NO: 1793580 - RNA, 19 nt, Artificial Sequence
  Description of Artificial Sequence: Synthetic oligonucleotide
cacggaaagaugcggcugu

SEQ ID NO: 1793581 - RNA, 19 nt, Artificial Sequence
  Description of Artificial Sequence: Synthetic oligonucleotide
agacgccaguagauuccac

SEQ ID NO: 1793582 - RNA, 19 nt, Artificial Sequence
  Description of Artificial Sequence: Synthetic oligonucleotide
cugguaaccaggcguccaa

SEQ ID NO: 1793583 - RNA, 19 nt, Artificial Sequence
  Description of Artificial Sequence: Synthetic oligonucleotide
ggauggaaacugugaggga

SEQ ID NO: 1793584 - RNA, 19 nt, Artificial Sequence
  Description of Artificial Sequence: Synthetic oligonucleotide
ccgcccuucaagugggccc

SEQ ID NO: 1793585 - RNA, 19 nt, Artificial Sequence
  Description of Artificial Sequence: Synthetic oligonucleotide
gguaaccaggcguccaaua

SEQ ID NO: 1793586 - RNA, 19 nt, Artificial Sequence
  Description of Artificial Sequence: Synthetic oligonucleotide
ccacucuguugcuguagcc

SEQ ID NO: 1793587 - RNA, 19 nt, Artificial Sequence
  Description of Artificial Sequence: Synthetic oligonucleotide
cgacaugucagauccacaa

SEQ ID NO: 1793588 - RNA, 19 nt, Artificial Sequence
  Description of Artificial Sequence: Synthetic oligonucleotide
acgccacagcuucccggag

SEQ ID NO: 1793589 - RNA, 19 nt, Artificial Sequence
  Description of Artificial Sequence: Synthetic oligonucleotide
ugggugcagugaacuuuau

SEQ ID NO: 1793590 - RNA, 19 nt, Artificial Sequence
  Description of Artificial Sequence: Synthetic oligonucleotide
aggagacaaccugguccuc

SEQ ID NO: 1793591 - RNA, 19 nt, Artificial Sequence
  Description of Artificial Sequence: Synthetic oligonucleotide
uggaggccauguaggccau

SEQ ID NO: 1793592 - RNA, 19 nt, Artificial Sequence
  Description of Artificial Sequence: Synthetic oligonucleotide
caaauccguucacgccgac

SEQ ID NO: 1793593 - RNA, 19 nt, Artificial Sequence
  Description of Artificial Sequence: Synthetic oligonucleotide
cggccaaauccguucacgc

SEQ ID NO: 1793594 - RNA, 19 nt, Artificial Sequence
  Description of Artificial Sequence: Synthetic oligonucleotide
aggcguccaauacggccaa

SEQ ID NO: 1793595 - RNA, 19 nt, Artificial Sequence
  Description of Artificial Sequence: Synthetic oligonucleotide
uggcaacaacuuccacuuu

SEQ ID NO: 1793596 - RNA, 19 nt, Artificial Sequence
  Description of Artificial Sequence: Synthetic oligonucleotide
gcucgaguccuugcugggg

SEQ ID NO: 1793597 - RNA, 19 nt, Artificial Sequence
  Description of Artificial Sequence: Synthetic oligonucleotide
ucuuggccccgcccuucaa

SEQ ID NO: 1793598 - RNA, 19 nt, Artificial Sequence
  Description of Artificial Sequence: Synthetic oligonucleotide
gcacggaaagaugcggcug

SEQ ID NO: 1793599 - RNA, 19 nt, Artificial Sequence
  Description of Artificial Sequence: Synthetic oligonucleotide
ccgaccuucaccauugcgu

SEQ ID NO: 1793600 - RNA, 19 nt, Artificial Sequence
  Description of Artificial Sequence: Synthetic oligonucleotide
ggcuaagcaguugguggug

SEQ ID NO: 1793601 - RNA, 19 nt, Artificial Sequence
  Description of Artificial Sequence: Synthetic oligonucleotide
cucgaguccuugcuggggu

SEQ ID NO: 1793602 - RNA, 19 nt, Artificial Sequence
  Description of Artificial Sequence: Synthetic oligonucleotide
ccaggcgacaugucagauc

SEQ ID NO: 1793603 - RNA, 19 nt, Artificial Sequence
  Description of Artificial Sequence: Synthetic oligonucleotide
uccucauacuuggcagguu

SEQ ID NO: 1793604 - RNA, 19 nt, Artificial Sequence
  Description of Artificial Sequence: Synthetic oligonucleotide
ggguaggaacacggaaggc

SEQ ID NO: 1793605 - RNA, 19 nt, Artificial Sequence
  Description of Artificial Sequence: Synthetic oligonucleotide
uacucggcgccagcaucac

SEQ ID NO: 1793606 - RNA, 19 nt, Artificial Sequence
  Description of Artificial Sequence: Synthetic oligonucleotide
gaguccuugcuggggugga

SEQ ID NO: 1793607 - RNA, 19 nt, Artificial Sequence
  Description of Artificial Sequence: Synthetic oligonucleotide
ggugaagacgccaguagau

SEQ ID NO: 1793608 - RNA, 19 nt, Artificial Sequence
  Description of Artificial Sequence: Synthetic oligonucleotide
ccauugcgucuccggagcg

SEQ ID NO: 1793609 - RNA, 19 nt, Artificial Sequence
  Description of Artificial Sequence: Synthetic oligonucleotide
gggcuaagcaguugguggu

SEQ ID NO: 1793610 - RNA, 19 nt, Artificial Sequence
  Description of Artificial Sequence: Synthetic oligonucleotide
ccacaacggacacguuggg

SEQ ID NO: 1793611 - RNA, 19 nt, Artificial Sequence
  Description of Artificial Sequence: Synthetic oligonucleotide
gguggugaagacgccagua

SEQ ID NO: 1793612 - RNA, 19 nt, Artificial Sequence
  Description of Artificial Sequence: Synthetic oligonucleotide
aggggccauccacagucuu

SEQ ID NO: 1793613 - RNA, 19 nt, Artificial Sequence
  Description of Artificial Sequence: Synthetic oligonucleotide
gguggaagagugggaguca

SEQ ID NO: 1793614 - RNA, 19 nt, Artificial Sequence
  Description of Artificial Sequence: Synthetic oligonucleotide
gucuugguucacacccauc

SEQ ID NO: 1793615 - RNA, 19 nt, Artificial Sequence
  Description of Artificial Sequence: Synthetic oligonucleotide
cauugcgucuccggagcga

SEQ ID NO: 1793616 - RNA, 19 nt, Artificial Sequence
  Description of Artificial Sequence: Synthetic oligonucleotide
ccacuuugccagaagugaa

SEQ ID NO: 1793617 - RNA, 19 nt, Artificial Sequence
  Description of Artificial Sequence: Synthetic oligonucleotide
gaccguggucaugaguccu

SEQ ID NO: 1793618 - RNA, 19 nt, Artificial Sequence
  Description of Artificial Sequence: Synthetic oligonucleotide
ccaaauccguucacgccga

SEQ ID NO: 1793619 - RNA, 19 nt, Artificial Sequence
  Description of Artificial Sequence: Synthetic oligonucleotide
cauuugauguuggcgggau

SEQ ID NO: 1793620 - RNA, 19 nt, Artificial Sequence
  Description of Artificial Sequence: Synthetic oligonucleotide
ccaugguggugaagacgcc

SEQ ID NO: 1793621 - RNA, 19 nt, Artificial Sequence
  Description of Artificial Sequence: Synthetic oligonucleotide
caauacggccaaauccguu

SEQ ID NO: 1793622 - RNA, 19 nt, Artificial Sequence
  Description of Artificial Sequence: Synthetic oligonucleotide
guccucgguguagcccagg

SEQ ID NO: 1793623 - RNA, 19 nt, Artificial Sequence
  Description of Artificial Sequence: Synthetic oligonucleotide
ccggaggggccauccacag

SEQ ID NO: 1793624 - RNA, 19 nt, Artificial Sequence
  Description of Artificial Sequence: Synthetic oligonucleotide
ggcggagaugaugacccuc

SEQ ID NO: 1793625 - RNA, 19 nt, Artificial Sequence
  Description of Artificial Sequence: Synthetic oligonucleotide
aggacgcauugcugacaau

SEQ ID NO: 1793626 - RNA, 19 nt, Artificial Sequence
  Description of Artificial Sequence: Synthetic oligonucleotide
ggguagggccucccucuug

SEQ ID NO: 1793627 - RNA, 19 nt, Artificial Sequence
  Description of Artificial Sequence: Synthetic oligonucleotide
ucacgccgaccuucaccau

SEQ ID NO: 1793628 - RNA, 19 nt, Artificial Sequence
  Description of Artificial Sequence: Synthetic oligonucleotide
gcagcgccaguggaugcag

SEQ ID NO: 1793629 - RNA, 19 nt, Artificial Sequence
  Description of Artificial Sequence: Synthetic oligonucleotide
ccuucagugggcccucaga

SEQ ID NO: 1793630 - RNA, 19 nt, Artificial Sequence
  Description of Artificial Sequence: Synthetic oligonucleotide
ggccuucccguugaugaca

SEQ ID NO: 1793631 - RNA, 19 nt, Artificial Sequence
  Description of Artificial Sequence: Synthetic oligonucleotide
gggaguugucauacuuguc

SEQ ID NO: 1793632 - RNA, 19 nt, Artificial Sequence
  Description of Artificial Sequence: Synthetic oligonucleotide
gcaguugguggugcaggac

SEQ ID NO: 1793633 - RNA, 19 nt, Artificial Sequence
  Description of Artificial Sequence: Synthetic oligonucleotide
cagguuucuccaggcgaca

SEQ ID NO: 1793634 - RNA, 19 nt, Artificial Sequence
  Description of Artificial Sequence: Synthetic oligonucleotide
gccccgcccuucaaguggg

SEQ ID NO: 1793635 - RNA, 19 nt, Artificial Sequence
  Description of Artificial Sequence: Synthetic oligonucleotide
ugcccuucagugggcccuc

SEQ ID NO: 1793636 - RNA, 19 nt, Artificial Sequence
  Description of Artificial Sequence: Synthetic oligonucleotide
ggggccauccacagucuuc

SEQ ID NO: 1793637 - RNA, 19 nt, Artificial Sequence
  Description of Artificial Sequence: Synthetic oligonucleotide
cccguucagcucugggaug

SEQ ID NO: 1793638 - RNA, 19 nt, Artificial Sequence
  Description of Artificial Sequence: Synthetic oligonucleotide
gaucucgcuccuggaagau

SEQ ID NO: 1793639 - RNA, 19 nt, Artificial Sequence
  Description of Artificial Sequence: Synthetic oligonucleotide
ccaguggaugcagggauga

SEQ ID NO: 1793640 - RNA, 19 nt, Artificial Sequence
  Description of Artificial Sequence: Synthetic oligonucleotide
caaccugguccucggugua

SEQ ID NO: 1793641 - RNA, 19 nt, Artificial Sequence
  Description of Artificial Sequence: Synthetic oligonucleotide
cgaguccuugcuggggugg

SEQ ID NO: 1793642 - RNA, 19 nt, Artificial Sequence
  Description of Artificial Sequence: Synthetic oligonucleotide
gcccugguaaccaggcguc

SEQ ID NO: 1793643 - RNA, 19 nt, Artificial Sequence
  Description of Artificial Sequence: Synthetic oligonucleotide
cagccuucuccaugguggu

SEQ ID NO: 1793644 - RNA, 19 nt, Artificial Sequence
  Description of Artificial Sequence: Synthetic oligonucleotide
cccguugaugacaagcuuu

SEQ ID NO: 1793645 - RNA, 19 nt, Artificial Sequence
  Description of Artificial Sequence: Synthetic oligonucleotide
gcggagaugaugacccucu

SEQ ID NO: 1793646 - RNA, 19 nt, Artificial Sequence
  Description of Artificial Sequence: Synthetic oligonucleotide
ccguucagcucugggauga

SEQ ID NO: 1793647 - RNA, 19 nt, Artificial Sequence
  Description of Artificial Sequence: Synthetic oligonucleotide
cuuacuccuuggaggccau

SEQ ID NO: 1793648 - RNA, 19 nt, Artificial Sequence
  Description of Artificial Sequence: Synthetic oligonucleotide
ggcagcgccaguggaugca

SEQ ID NO: 1793649 - RNA, 19 nt, Artificial Sequence
  Description of Artificial Sequence: Synthetic oligonucleotide
ggcauggaccguggucaug

SEQ ID NO: 1793650 - RNA, 19 nt, Artificial Sequence
  Description of Artificial Sequence: Synthetic oligonucleotide
ccucauacuuggcagguuu

SEQ ID NO: 1793651 - RNA, 19 nt, Artificial Sequence
  Description of Artificial Sequence: Synthetic oligonucleotide
gcgacaugucagauccaca

SEQ ID NO: 1793652 - RNA, 19 nt, Artificial Sequence
  Description of Artificial Sequence: Synthetic oligonucleotide
ggguagagucauacuggaa

SEQ ID NO: 1793653 - RNA, 19 nt, Artificial Sequence
  Description of Artificial Sequence: Synthetic oligonucleotide
uggcgggaucucgcuccug

SEQ ID NO: 1793654 - RNA, 19 nt, Artificial Sequence
  Description of Artificial Sequence: Synthetic oligonucleotide
cgcccuucaagugggcccc

SEQ ID NO: 1793655 - RNA, 19 nt, Artificial Sequence
  Description of Artificial Sequence: Synthetic oligonucleotide
guagggccucccucuugcu

SEQ ID NO: 1793656 - RNA, 19 nt, Artificial Sequence
  Description of Artificial Sequence: Synthetic oligonucleotide
ccaauacggccaaauccgu

SEQ ID NO: 1793657 - RNA, 19 nt, Artificial Sequence
  Description of Artificial Sequence: Synthetic oligonucleotide
cccgcccuucaagugggcc

SEQ ID NO: 1793658 - RNA, 19 nt, Artificial Sequence
  Description of Artificial Sequence: Synthetic oligonucleotide
gggcucccuaagccccucc

SEQ ID NO: 1793659 - RNA, 19 nt, Artificial Sequence
  Description of Artificial Sequence: Synthetic oligonucleotide
cccuucagugggcccucag

SEQ ID NO: 1793660 - RNA, 19 nt, Artificial Sequence
  Description of Artificial Sequence: Synthetic oligonucleotide
gguccucgguguagcccag

SEQ ID NO: 1793661 - RNA, 19 nt, Artificial Sequence
  Description of Artificial Sequence: Synthetic oligonucleotide
aggcgacaugucagaucca

SEQ ID NO: 1793662 - RNA, 19 nt, Artificial Sequence
  Description of Artificial Sequence: Synthetic oligonucleotide
ccuucccguugaugacaag

SEQ ID NO: 1793663 - RNA, 19 nt, Artificial Sequence
  Description of Artificial Sequence: Synthetic oligonucleotide
cucgcuccuggaagauggu

SEQ ID NO: 1793664 - RNA, 19 nt, Artificial Sequence
  Description of Artificial Sequence: Synthetic oligonucleotide
ccguucacgccgaccuuca

SEQ ID NO: 1793665 - RNA, 19 nt, Artificial Sequence
  Description of Artificial Sequence: Synthetic oligonucleotide
ggucugggauggaaacugu

SEQ ID NO: 1793666 - RNA, 19 nt, Artificial Sequence
  Description of Artificial Sequence: Synthetic oligonucleotide
gcgccaguggaugcaggga

SEQ ID NO: 1793667 - RNA, 19 nt, Artificial Sequence
  Description of Artificial Sequence: Synthetic oligonucleotide
ccguggucaugaguccuuc

SEQ ID NO: 1793668 - RNA, 19 nt, Artificial Sequence
  Description of Artificial Sequence: Synthetic oligonucleotide
cuguugcuguagccaaauu

SEQ ID NO: 1793669 - RNA, 19 nt, Artificial Sequence
  Description of Artificial Sequence: Synthetic oligonucleotide
ccccacggccaucacgcca

SEQ ID NO: 1793670 - RNA, 19 nt, Artificial Sequence
  Description of Artificial Sequence: Synthetic oligonucleotide
gggccucccucuugcucga

SEQ ID NO: 1793671 - RNA, 19 nt, Artificial Sequence
  Description of Artificial Sequence: Synthetic oligonucleotide
gcguccaauacggccaaau

SEQ ID NO: 1793672 - RNA, 19 nt, Artificial Sequence
  Description of Artificial Sequence: Synthetic oligonucleotide
cggagcgaggcuggcacug

SEQ ID NO: 1793673 - RNA, 19 nt, Artificial Sequence
  Description of Artificial Sequence: Synthetic oligonucleotide
ccaugccagucagcuuccc

SEQ ID NO: 1793674 - RNA, 19 nt, Artificial Sequence
  Description of Artificial Sequence: Synthetic oligonucleotide
gccccacggccaucacgcc

SEQ ID NO: 1793675 - RNA, 19 nt, Artificial Sequence
  Description of Artificial Sequence: Synthetic oligonucleotide
cgguguagcccaggaugcc

SEQ ID NO: 1793676 - RNA, 19 nt, Artificial Sequence
  Description of Artificial Sequence: Synthetic oligonucleotide
cagaaggggcggagaugau

SEQ ID NO: 1793677 - RNA, 19 nt, Artificial Sequence
  Description of Artificial Sequence: Synthetic oligonucleotide
cagugauggcauggaccgu

SEQ ID NO: 1793678 - RNA, 19 nt, Artificial Sequence
  Description of Artificial Sequence: Synthetic oligonucleotide
ggucaaugaaggggucauu

SEQ ID NO: 1793679 - RNA, 19 nt, Artificial Sequence
  Description of Artificial Sequence: Synthetic oligonucleotide
gggcggagaugaugacccu

SEQ ID NO: 1793680 - RNA, 19 nt, Artificial Sequence
  Description of Artificial Sequence: Synthetic oligonucleotide
cgccgaccuucaccauugc

SEQ ID NO: 1793681 - RNA, 19 nt, Artificial Sequence
  Description of Artificial Sequence: Synthetic oligonucleotide
gggcccucagaugccugcu

SEQ ID NO: 1793682 - RNA, 19 nt, Artificial Sequence
  Description of Artificial Sequence: Synthetic oligonucleotide
ggcccucagaugccugcuu

SEQ ID NO: 1793683 - RNA, 19 nt, Artificial Sequence
  Description of Artificial Sequence: Synthetic oligonucleotide
ccccagcaucaaaggugga

SEQ ID NO: 1793684 - RNA, 19 nt, Artificial Sequence
  Description of Artificial Sequence: Synthetic oligonucleotide
gcgucuccggagcgaggcu

SEQ ID NO: 1793685 - RNA, 19 nt, Artificial Sequence
  Description of Artificial Sequence: Synthetic oligonucleotide
ccucgguguagcccaggau

SEQ ID NO: 1793686 - RNA, 19 nt, Artificial Sequence
  Description of Artificial Sequence: Synthetic oligonucleotide
ggccaucacgccacagcuu

SEQ ID NO: 1793687 - RNA, 19 nt, Artificial Sequence
  Description of Artificial Sequence: Synthetic oligonucleotide
ggcguccaauacggccaaa

SEQ ID NO: 1793688 - RNA, 19 nt, Artificial Sequence
  Description of Artificial Sequence: Synthetic oligonucleotide
cccuaagccccuccuuauu

SEQ ID NO: 1793689 - RNA, 19 nt, Artificial Sequence
  Description of Artificial Sequence: Synthetic oligonucleotide
ggugggcuucuuacuccuu

SEQ ID NO: 1793690 - RNA, 19 nt, Artificial Sequence
  Description of Artificial Sequence: Synthetic oligonucleotide
gcccuucaagugggcccca

SEQ ID NO: 1793691 - RNA, 19 nt, Artificial Sequence
  Description of Artificial Sequence: Synthetic oligonucleotide
ccggagcgaggcuggcacu

SEQ ID NO: 1793692 - RNA, 19 nt, Artificial Sequence
  Description of Artificial Sequence: Synthetic oligonucleotide
gcgccagcaucaccccauu

SEQ ID NO: 1793693 - RNA, 19 nt, Artificial Sequence
  Description of Artificial Sequence: Synthetic oligonucleotide
gggcagccccacggccauc

SEQ ID NO: 1793694 - RNA, 19 nt, Artificial Sequence
  Description of Artificial Sequence: Synthetic oligonucleotide
cggaggggccauccacagu

SEQ ID NO: 1793695 - RNA, 19 nt, Artificial Sequence
  Description of Artificial Sequence: Synthetic oligonucleotide
uauaagauaaaccacaggu

SEQ ID NO: 1793696 - RNA, 19 nt, Artificial Sequence
  Description of Artificial Sequence: Synthetic oligonucleotide
ucauuuauaagauaaacca

SEQ ID NO: 1793697 - RNA, 19 nt, Artificial Sequence
  Description of Artificial Sequence: Synthetic oligonucleotide
auuuauaaguucuuuauuc

SEQ ID NO: 1793698 - RNA, 19 nt, Artificial Sequence
  Description of Artificial Sequence: Synthetic oligonucleotide
uucgauaaaaucaucagcu

SEQ ID NO: 1793699 - RNA, 19 nt, Artificial Sequence
  Description of Artificial Sequence: Synthetic oligonucleotide
aguucauauucauauaaac

SEQ ID NO: 1793700 - RNA, 19 nt, Artificial Sequence
  Description of Artificial Sequence: Synthetic oligonucleotide
uuuggaguaaaccagugga

SEQ ID NO: 1793701 - RNA, 19 nt, Artificial Sequence
  Description of Artificial Sequence: Synthetic oligonucleotide
uuuauaagauaaaccacag

SEQ ID NO: 1793702 - RNA, 19 nt, Artificial Sequence
  Description of Artificial Sequence: Synthetic oligonucleotide
ucuucaauuuauaaguucu

SEQ ID NO: 1793703 - RNA, 19 nt, Artificial Sequence
  Description of Artificial Sequence: Synthetic oligonucleotide
gaaaggaggagacaaaccc

SEQ ID NO: 1793704 - RNA, 19 nt, Artificial Sequence
  Description of Artificial Sequence: Synthetic oligonucleotide
agacaaacccucuacaaac

SEQ ID NO: 1793705 - RNA, 19 nt, Artificial Sequence
  Description of Artificial Sequence: Synthetic oligonucleotide
ugugucuucaauuuauaag

SEQ ID NO: 1793706 - RNA, 19 nt, Artificial Sequence
  Description of Artificial Sequence: Synthetic oligonucleotide
aagcaaaucaaguucauau

SEQ ID NO: 1793707 - RNA, 19 nt, Artificial Sequence
  Description of Artificial Sequence: Synthetic oligonucleotide
aucauuuauaagauaaacc

SEQ ID NO: 1793708 - RNA, 19 nt, Artificial Sequence
  Description of Artificial Sequence: Synthetic oligonucleotide
uauagaugagaaauuggag

SEQ ID NO: 1793709 - RNA, 19 nt, Artificial Sequence
  Description of Artificial Sequence: Synthetic oligonucleotide
auagaugagaaauuggaga

SEQ ID NO: 1793710 - RNA, 19 nt, Artificial Sequence
  Description of Artificial Sequence: Synthetic oligonucleotide
uuucgauaaaaucaucagc

SEQ ID NO: 1793711 - RNA, 19 nt, Artificial Sequence
  Description of Artificial Sequence: Synthetic oligonucleotide
ucagucauuauagauauug

SEQ ID NO: 1793712 - RNA, 19 nt, Artificial Sequence
  Description of Artificial Sequence: Synthetic oligonucleotide
uaaaccaguggaaaacccg

SEQ ID NO: 1793713 - RNA, 19 nt, Artificial Sequence
  Description of Artificial Sequence: Synthetic oligonucleotide
uaccugauuguuuucaggg

SEQ ID NO: 1793714 - RNA, 19 nt, Artificial Sequence
  Description of Artificial Sequence: Synthetic oligonucleotide
acgucuuuaaccuccaggg

SEQ ID NO: 1793715 - RNA, 19 nt, Artificial Sequence
  Description of Artificial Sequence: Synthetic oligonucleotide
aacugguucauaaucugcc

SEQ ID NO: 1793716 - RNA, 19 nt, Artificial Sequence
  Description of Artificial Sequence: Synthetic oligonucleotide
uuauaagauaaaccacagg

SEQ ID NO: 1793717 - RNA, 19 nt, Artificial Sequence
  Description of Artificial Sequence: Synthetic oligonucleotide
uaucuccaaauacaugucg

SEQ ID NO: 1793718 - RNA, 19 nt, Artificial Sequence
  Description of Artificial Sequence: Synthetic oligonucleotide
aaacccucuacaaaccugc

SEQ ID NO: 1793719 - RNA, 19 nt, Artificial Sequence
  Description of Artificial Sequence: Synthetic oligonucleotide
cagucaaucauuuauaaga

SEQ ID NO: 1793720 - RNA, 19 nt, Artificial Sequence
  Description of Artificial Sequence: Synthetic oligonucleotide
ugagaaauuggagagguug

SEQ ID NO: 1793721 - RNA, 19 nt, Artificial Sequence
  Description of Artificial Sequence: Synthetic oligonucleotide
ucuacaaaccugcuaacac

SEQ ID NO: 1793722 - RNA, 19 nt, Artificial Sequence
  Description of Artificial Sequence: Synthetic oligonucleotide
aaucugccgagcuuuggac

SEQ ID NO: 1793723 - RNA, 19 nt, Artificial Sequence
  Description of Artificial Sequence: Synthetic oligonucleotide
aauaccugauuguuuucag

SEQ ID NO: 1793724 - RNA, 19 nt, Artificial Sequence
  Description of Artificial Sequence: Synthetic oligonucleotide
ucuuuaaccuccagggugc

SEQ ID NO: 1793725 - RNA, 19 nt, Artificial Sequence
  Description of Artificial Sequence: Synthetic oligonucleotide
acuacaguggugcuauugg

SEQ ID NO: 1793726 - RNA, 19 nt, Artificial Sequence
  Description of Artificial Sequence: Synthetic oligonucleotide
uaugcuucucuguaaagca

SEQ ID NO: 1793727 - RNA, 19 nt, Artificial Sequence
  Description of Artificial Sequence: Synthetic oligonucleotide
uugauuagggcugaggggc

SEQ ID NO: 1793728 - RNA, 19 nt, Artificial Sequence
  Description of Artificial Sequence: Synthetic oligonucleotide
aguaaaccaguggaaaacc

SEQ ID NO: 1793729 - RNA, 19 nt, Artificial Sequence
  Description of Artificial Sequence: Synthetic oligonucleotide
cuuucgauaaaaucaucag

SEQ ID NO: 1793730 - RNA, 19 nt, Artificial Sequence
  Description of Artificial Sequence: Synthetic oligonucleotide
uacaaaccugcuaacacug

SEQ ID NO: 1793731 - RNA, 19 nt, Artificial Sequence
  Description of Artificial Sequence: Synthetic oligonucleotide
aaacugguucauaaucugc

SEQ ID NO: 1793732 - RNA, 19 nt, Artificial Sequence
  Description of Artificial Sequence: Synthetic oligonucleotide
ucugacuaaaucuuguaau

SEQ ID NO: 1793733 - RNA, 19 nt, Artificial Sequence
  Description of Artificial Sequence: Synthetic oligonucleotide
ucuagaugcagcuggacgu

SEQ ID NO: 1793734 - RNA, 19 nt, Artificial Sequence
  Description of Artificial Sequence: Synthetic oligonucleotide
uucagggcuaagacgaccg

SEQ ID NO: 1793735 - RNA, 19 nt, Artificial Sequence
  Description of Artificial Sequence: Synthetic oligonucleotide
aaaugcacagaugggcccc

SEQ ID NO: 1793736 - RNA, 19 nt, Artificial Sequence
  Description of Artificial Sequence: Synthetic oligonucleotide
uuguuuuccggaucaaugc

SEQ ID NO: 1793737 - RNA, 19 nt, Artificial Sequence
  Description of Artificial Sequence: Synthetic oligonucleotide
ucugguagcagagaaccgg

SEQ ID NO: 1793738 - RNA, 19 nt, Artificial Sequence
  Description of Artificial Sequence: Synthetic oligonucleotide
gacgucuuuaaccuccagg

SEQ ID NO: 1793739 - RNA, 19 nt, Artificial Sequence
  Description of Artificial Sequence: Synthetic oligonucleotide
ucaauuuauaaguucuuua

SEQ ID NO: 1793740 - RNA, 19 nt, Artificial Sequence
  Description of Artificial Sequence: Synthetic oligonucleotide
acugacauuacaaaguaca

SEQ ID NO: 1793741 - RNA, 19 nt, Artificial Sequence
  Description of Artificial Sequence: Synthetic oligonucleotide
agauaaaccacagguaaag

SEQ ID NO: 1793742 - RNA, 19 nt, Artificial Sequence
  Description of Artificial Sequence: Synthetic oligonucleotide
aaccugcuaacacugucuc

SEQ ID NO: 1793743 - RNA, 19 nt, Artificial Sequence
  Description of Artificial Sequence: Synthetic oligonucleotide
gguugauuagggcugaggg

SEQ ID NO: 1793744 - RNA, 19 nt, Artificial Sequence
  Description of Artificial Sequence: Synthetic oligonucleotide
uguuuuccggaucaaugcc

SEQ ID NO: 1793745 - RNA, 19 nt, Artificial Sequence
  Description of Artificial Sequence: Synthetic oligonucleotide
uucucagucauuauagaua

SEQ ID NO: 1793746 - RNA, 19 nt, Artificial Sequence
  Description of Artificial Sequence: Synthetic oligonucleotide
uauagauauugcugcacug

SEQ ID NO: 1793747 - RNA, 19 nt, Artificial Sequence
  Description of Artificial Sequence: Synthetic oligonucleotide
ucccuuuggaguaaaccag

SEQ ID NO: 1793748 - RNA, 19 nt, Artificial Sequence
  Description of Artificial Sequence: Synthetic oligonucleotide
uacaguggugcuauuggcc

SEQ ID NO: 1793749 - RNA, 19 nt, Artificial Sequence
  Description of Artificial Sequence: Synthetic oligonucleotide
auacaugucguccauuccu

SEQ ID NO: 1793750 - RNA, 19 nt, Artificial Sequence
  Description of Artificial Sequence: Synthetic oligonucleotide
uugguuguuuuccggauca

SEQ ID NO: 1793751 - RNA, 19 nt, Artificial Sequence
  Description of Artificial Sequence: Synthetic oligonucleotide
ggaaaagcaaaucaaguuc

SEQ ID NO: 1793752 - RNA, 19 nt, Artificial Sequence
  Description of Artificial Sequence: Synthetic oligonucleotide
auuuccucagagccaaauc

SEQ ID NO: 1793753 - RNA, 19 nt, Artificial Sequence
  Description of Artificial Sequence: Synthetic oligonucleotide
ugguuugucccuuuggagu

SEQ ID NO: 1793754 - RNA, 19 nt, Artificial Sequence
  Description of Artificial Sequence: Synthetic oligonucleotide
augauaugcggagacugcc

SEQ ID NO: 1793755 - RNA, 19 nt, Artificial Sequence
  Description of Artificial Sequence: Synthetic oligonucleotide
acugguucauaaucugccg

SEQ ID NO: 1793756 - RNA, 19 nt, Artificial Sequence
  Description of Artificial Sequence: Synthetic oligonucleotide
ucugccuacagucaaucau

SEQ ID NO: 1793757 - RNA, 19 nt, Artificial Sequence
  Description of Artificial Sequence: Synthetic oligonucleotide
auaaguucuuuauucugga

SEQ ID NO: 1793758 - RNA, 19 nt, Artificial Sequence
  Description of Artificial Sequence: Synthetic oligonucleotide
uuuuggagcugugaggacc

SEQ ID NO: 1793759 - RNA, 19 nt, Artificial Sequence
  Description of Artificial Sequence: Synthetic oligonucleotide
cuuggucaauaccugauug

SEQ ID NO: 1793760 - RNA, 19 nt, Artificial Sequence
  Description of Artificial Sequence: Synthetic oligonucleotide
cuuuggaguaaaccagugg

SEQ ID NO: 1793761 - RNA, 19 nt, Artificial Sequence
  Description of Artificial Sequence: Synthetic oligonucleotide
aaagggaccagaaguuggg

SEQ ID NO: 1793762 - RNA, 19 nt, Artificial Sequence
  Description of Artificial Sequence: Synthetic oligonucleotide
cucuagaugcagcuggacg

SEQ ID NO: 1793763 - RNA, 19 nt, Artificial Sequence
  Description of Artificial Sequence: Synthetic oligonucleotide
cugacauuacaaaguacag

SEQ ID NO: 1793764 - RNA, 19 nt, Artificial Sequence
  Description of Artificial Sequence: Synthetic oligonucleotide
uaagacgaccgccuguccc

SEQ ID NO: 1793765 - RNA, 19 nt, Artificial Sequence
  Description of Artificial Sequence: Synthetic oligonucleotide
ggaggcuuuauucuuuugg

SEQ ID NO: 1793766 - RNA, 19 nt, Artificial Sequence
  Description of Artificial Sequence: Synthetic oligonucleotide
gguaucuuuacuacagugg

SEQ ID NO: 1793767 - RNA, 19 nt, Artificial Sequence
  Description of Artificial Sequence: Synthetic oligonucleotide
uaucuccccaugauaugcg

SEQ ID NO: 1793768 - RNA, 19 nt, Artificial Sequence
  Description of Artificial Sequence: Synthetic oligonucleotide
gauaugcggagacugcccc

SEQ ID NO: 1793769 - RNA, 19 nt, Artificial Sequence
  Description of Artificial Sequence: Synthetic oligonucleotide
uccacuggcgcucuagaug

SEQ ID NO: 1793770 - RNA, 19 nt, Artificial Sequence
  Description of Artificial Sequence: Synthetic oligonucleotide
aucuucucagucauuauag

SEQ ID NO: 1793771 - RNA, 19 nt, Artificial Sequence
  Description of Artificial Sequence: Synthetic oligonucleotide
aaaauccaaggaugagaug

SEQ ID NO: 1793772 - RNA, 19 nt, Artificial Sequence
  Description of Artificial Sequence: Synthetic oligonucleotide
acuuucgauaaaaucauca

SEQ ID NO: 1793773 - RNA, 19 nt, Artificial Sequence
  Description of Artificial Sequence: Synthetic oligonucleotide
agucuucuccggaagauac

SEQ ID NO: 1793774 - RNA, 19 nt, Artificial Sequence
  Description of Artificial Sequence: Synthetic oligonucleotide
guuaggauccaccucucug

SEQ ID NO: 1793775 - RNA, 19 nt, Artificial Sequence
  Description of Artificial Sequence: Synthetic oligonucleotide
guaaagucuucuccggaag

SEQ ID NO: 1793776 - RNA, 19 nt, Artificial Sequence
  Description of Artificial Sequence: Synthetic oligonucleotide
aaauccugggauccacaug

SEQ ID NO: 1793777 - RNA, 19 nt, Artificial Sequence
  Description of Artificial Sequence: Synthetic oligonucleotide
ugcuaacacugucucaccc

SEQ ID NO: 1793778 - RNA, 19 nt, Artificial Sequence
  Description of Artificial Sequence: Synthetic oligonucleotide
guuguuuuccggaucaaug

SEQ ID NO: 1793779 - RNA, 19 nt, Artificial Sequence
  Description of Artificial Sequence: Synthetic oligonucleotide
gagacugccccagugaagc

SEQ ID NO: 1793780 - RNA, 19 nt, Artificial Sequence
  Description of Artificial Sequence: Synthetic oligonucleotide
ugucucacccagcaugacc

SEQ ID NO: 1793781 - RNA, 19 nt, Artificial Sequence
  Description of Artificial Sequence: Synthetic oligonucleotide
uccacauguuccacuggcg

SEQ ID NO: 1793782 - RNA, 19 nt, Artificial Sequence
  Description of Artificial Sequence: Synthetic oligonucleotide
aucaaugccauucucuguu

SEQ ID NO: 1793783 - RNA, 19 nt, Artificial Sequence
  Description of Artificial Sequence: Synthetic oligonucleotide
ucguccauuccuuaacugu

SEQ ID NO: 1793784 - RNA, 19 nt, Artificial Sequence
  Description of Artificial Sequence: Synthetic oligonucleotide
uuaacuguccccuguguua

SEQ ID NO: 1793785 - RNA, 19 nt, Artificial Sequence
  Description of Artificial Sequence: Synthetic oligonucleotide
gaguaaaccaguggaaaac

SEQ ID NO: 1793786 - RNA, 19 nt, Artificial Sequence
  Description of Artificial Sequence: Synthetic oligonucleotide
caugauaugcggagacugc

SEQ ID NO: 1793787 - RNA, 19 nt, Artificial Sequence
  Description of Artificial Sequence: Synthetic oligonucleotide
gcucauagaguuuaucaag

SEQ ID NO: 1793788 - RNA, 19 nt, Artificial Sequence
  Description of Artificial Sequence: Synthetic oligonucleotide
cuaucuccccaugauaugc

SEQ ID NO: 1793789 - RNA, 19 nt, Artificial Sequence
  Description of Artificial Sequence: Synthetic oligonucleotide
cucauagaguuuaucaaga

SEQ ID NO: 1793790 - RNA, 19 nt, Artificial Sequence
  Description of Artificial Sequence: Synthetic oligonucleotide
aaaccaguggaaaacccgu

SEQ ID NO: 1793791 - RNA, 19 nt, Artificial Sequence
  Description of Artificial Sequence: Synthetic oligonucleotide
uuugagacggcagggaaaa

SEQ ID NO: 1793792 - RNA, 19 nt, Artificial Sequence
  Description of Artificial Sequence: Synthetic oligonucleotide
ugucccuuuggaguaaacc

SEQ ID NO: 1793793 - RNA, 19 nt, Artificial Sequence
  Description of Artificial Sequence: Synthetic oligonucleotide
ucucuuugagacggcaggg

SEQ ID NO: 1793794 - RNA, 19 nt, Artificial Sequence
  Description of Artificial Sequence: Synthetic oligonucleotide
uuggucaauaccugauugu

SEQ ID NO: 1793795 - RNA, 19 nt, Artificial Sequence
  Description of Artificial Sequence: Synthetic oligonucleotide
aaaggaggagacaaacccu

SEQ ID NO: 1793796 - RNA, 19 nt, Artificial Sequence
  Description of Artificial Sequence: Synthetic oligonucleotide
agcucauagaguuuaucaa

SEQ ID NO: 1793797 - RNA, 19 nt, Artificial Sequence
  Description of Artificial Sequence: Synthetic oligonucleotide
uguagggucggauuuccuc

SEQ ID NO: 1793798 - RNA, 19 nt, Artificial Sequence
  Description of Artificial Sequence: Synthetic oligonucleotide
cuccaaauacaugucgucc

SEQ ID NO: 1793799 - RNA, 19 nt, Artificial Sequence
  Description of Artificial Sequence: Synthetic oligonucleotide
agaugagaaauuggagagg

SEQ ID NO: 1793800 - RNA, 19 nt, Artificial Sequence
  Description of Artificial Sequence: Synthetic oligonucleotide
uuggaguaaaccaguggaa

SEQ ID NO: 1793801 - RNA, 19 nt, Artificial Sequence
  Description of Artificial Sequence: Synthetic oligonucleotide
cagguaaagucuucuccgg

SEQ ID NO: 1793802 - RNA, 19 nt, Artificial Sequence
  Description of Artificial Sequence: Synthetic oligonucleotide
agcucaaguaucuccaaau

SEQ ID NO: 1793803 - RNA, 19 nt, Artificial Sequence
  Description of Artificial Sequence: Synthetic oligonucleotide
aaaccugcuaacacugucu

SEQ ID NO: 1793804 - RNA, 19 nt, Artificial Sequence
  Description of Artificial Sequence: Synthetic oligonucleotide
cacugucucacccagcaug

SEQ ID NO: 1793805 - RNA, 19 nt, Artificial Sequence
  Description of Artificial Sequence: Synthetic oligonucleotide
ucuucucagucauuauaga

SEQ ID NO: 1793806 - RNA, 19 nt, Artificial Sequence
  Description of Artificial Sequence: Synthetic oligonucleotide
ugaggucucagcucaagua

SEQ ID NO: 1793807 - RNA, 19 nt, Artificial Sequence
  Description of Artificial Sequence: Synthetic oligonucleotide
uuacaaaguacaggacaag

SEQ ID NO: 1793808 - RNA, 19 nt, Artificial Sequence
  Description of Artificial Sequence: Synthetic oligonucleotide
gucuucaauuuauaaguuc

SEQ ID NO: 1793809 - RNA, 19 nt, Artificial Sequence
  Description of Artificial Sequence: Synthetic oligonucleotide
uggcugaggucucagcuca

SEQ ID NO: 1793810 - RNA, 19 nt, Artificial Sequence
  Description of Artificial Sequence: Synthetic oligonucleotide
uucaauuuauaaguucuuu

SEQ ID NO: 1793811 - RNA, 19 nt, Artificial Sequence
  Description of Artificial Sequence: Synthetic oligonucleotide
ucuaucuccccaugauaug

SEQ ID NO: 1793812 - RNA, 19 nt, Artificial Sequence
  Description of Artificial Sequence: Synthetic oligonucleotide
ugagcuucuguggugcaag

SEQ ID NO: 1793813 - RNA, 19 nt, Artificial Sequence
  Description of Artificial Sequence: Synthetic oligonucleotide
ugaggaccaaggccaauca

SEQ ID NO: 1793814 - RNA, 19 nt, Artificial Sequence
  Description of Artificial Sequence: Synthetic oligonucleotide
ugcucguuaggauccaccu

SEQ ID NO: 1793815 - RNA, 19 nt, Artificial Sequence
  Description of Artificial Sequence: Synthetic oligonucleotide
ucauagaguuuaucaagau

SEQ ID NO: 1793816 - RNA, 19 nt, Artificial Sequence
  Description of Artificial Sequence: Synthetic oligonucleotide
ucuccaaauacaugucguc

SEQ ID NO: 1793817 - RNA, 19 nt, Artificial Sequence
  Description of Artificial Sequence: Synthetic oligonucleotide
cuacaguggugcuauuggc

SEQ ID NO: 1793818 - RNA, 19 nt, Artificial Sequence
  Description of Artificial Sequence: Synthetic oligonucleotide
ucagcuaggcacccugugu

SEQ ID NO: 1793819 - RNA, 19 nt, Artificial Sequence
  Description of Artificial Sequence: Synthetic oligonucleotide
ugucguccauuccuuaacu

SEQ ID NO: 1793820 - RNA, 19 nt, Artificial Sequence
  Description of Artificial Sequence: Synthetic oligonucleotide
acaaacccucuacaaaccu

SEQ ID NO: 1793821 - RNA, 19 nt, Artificial Sequence
  Description of Artificial Sequence: Synthetic oligonucleotide
guaucuuuacuacaguggu

SEQ ID NO: 1793822 - RNA, 19 nt, Artificial Sequence
  Description of Artificial Sequence: Synthetic oligonucleotide
acuggcauuucaaaggccu

SEQ ID NO: 1793823 - RNA, 19 nt, Artificial Sequence
  Description of Artificial Sequence: Synthetic oligonucleotide
agcaaaucaaguucauauu

SEQ ID NO: 1793824 - RNA, 19 nt, Artificial Sequence
  Description of Artificial Sequence: Synthetic oligonucleotide
ccugguaucuuuacuacag

SEQ ID NO: 1793825 - RNA, 19 nt, Artificial Sequence
  Description of Artificial Sequence: Synthetic oligonucleotide
uagauauugcugcacuguu

SEQ ID NO: 1793826 - RNA, 19 nt, Artificial Sequence
  Description of Artificial Sequence: Synthetic oligonucleotide
uccuuaacuguccccugug

SEQ ID NO: 1793827 - RNA, 19 nt, Artificial Sequence
  Description of Artificial Sequence: Synthetic oligonucleotide
ucuccggaagauacacugc

SEQ ID NO: 1793828 - RNA, 19 nt, Artificial Sequence
  Description of Artificial Sequence: Synthetic oligonucleotide
acagaugggccccugugcu

SEQ ID NO: 1793829 - RNA, 19 nt, Artificial Sequence
  Description of Artificial Sequence: Synthetic oligonucleotide
ucaaaggccucagcuaggc

SEQ ID NO: 1793830 - RNA, 19 nt, Artificial Sequence
  Description of Artificial Sequence: Synthetic oligonucleotide
agagaaccggacuccaacu

SEQ ID NO: 1793831 - RNA, 19 nt, Artificial Sequence
  Description of Artificial Sequence: Synthetic oligonucleotide
caaacccucuacaaaccug

SEQ ID NO: 1793832 - RNA, 19 nt, Artificial Sequence
  Description of Artificial Sequence: Synthetic oligonucleotide
cuucucuuugagacggcag

SEQ ID NO: 1793833 - RNA, 19 nt, Artificial Sequence
  Description of Artificial Sequence: Synthetic oligonucleotide
ucgauaaaaucaucagcua

SEQ ID NO: 1793834 - RNA, 19 nt, Artificial Sequence
  Description of Artificial Sequence: Synthetic oligonucleotide
acccguuucuuaaaugcac

SEQ ID NO: 1793835 - RNA, 19 nt, Artificial Sequence
  Description of Artificial Sequence: Synthetic oligonucleotide
uccuacugcugguuugucc

SEQ ID NO: 1793836 - RNA, 19 nt, Artificial Sequence
  Description of Artificial Sequence: Synthetic oligonucleotide
uacuacaguggugcuauug

SEQ ID NO: 1793837 - RNA, 19 nt, Artificial Sequence
  Description of Artificial Sequence: Synthetic oligonucleotide
uuccggaucaaugccauuc

SEQ ID NO: 1793838 - RNA, 19 nt, Artificial Sequence
  Description of Artificial Sequence: Synthetic oligonucleotide
agucaaucauuuauaagau

SEQ ID NO: 1793839 - RNA, 19 nt, Artificial Sequence
  Description of Artificial Sequence: Synthetic oligonucleotide
aagauaaaccacagguaaa

SEQ ID NO: 1793840 - RNA, 19 nt, Artificial Sequence
  Description of Artificial Sequence: Synthetic oligonucleotide
guaaaccaguggaaaaccc

SEQ ID NO: 1793841 - RNA, 19 nt, Artificial Sequence
  Description of Artificial Sequence: Synthetic oligonucleotide
ccuacugcugguuuguccc

SEQ ID NO: 1793842 - RNA, 19 nt, Artificial Sequence
  Description of Artificial Sequence: Synthetic oligonucleotide
aggagacaaacccucuaca

SEQ ID NO: 1793843 - RNA, 19 nt, Artificial Sequence
  Description of Artificial Sequence: Synthetic oligonucleotide
ugucaccacacuuucgaua

SEQ ID NO: 1793844 - RNA, 19 nt, Artificial Sequence
  Description of Artificial Sequence: Synthetic oligonucleotide
auaagauaaaccacaggua

SEQ ID NO: 1793845 - RNA, 19 nt, Artificial Sequence
  Description of Artificial Sequence: Synthetic oligonucleotide
ugauuagggcugaggggcc

SEQ ID NO: 1793846 - RNA, 19 nt, Artificial Sequence
  Description of Artificial Sequence: Synthetic oligonucleotide
guagggucggauuuccuca

SEQ ID NO: 1793847 - RNA, 19 nt, Artificial Sequence
  Description of Artificial Sequence: Synthetic oligonucleotide
uggagagguugauuagggc

SEQ ID NO: 1793848 - RNA, 19 nt, Artificial Sequence
  Description of Artificial Sequence: Synthetic oligonucleotide
gauccugacuggcauuuca

SEQ ID NO: 1793849 - RNA, 19 nt, Artificial Sequence
  Description of Artificial Sequence: Synthetic oligonucleotide
cagagaaccggacuccaac

SEQ ID NO: 1793850 - RNA, 19 nt, Artificial Sequence
  Description of Artificial Sequence: Synthetic oligonucleotide
uaugcggagacugccccag

SEQ ID NO: 1793851 - RNA, 19 nt, Artificial Sequence
  Description of Artificial Sequence: Synthetic oligonucleotide
aaggccaaucagaggcagc

SEQ ID NO: 1793852 - RNA, 19 nt, Artificial Sequence
  Description of Artificial Sequence: Synthetic oligonucleotide
ugccugguaucuuuacuac

SEQ ID NO: 1793853 - RNA, 19 nt, Artificial Sequence
  Description of Artificial Sequence: Synthetic oligonucleotide
auauucauauaaacacuga

SEQ ID NO: 1793854 - RNA, 19 nt, Artificial Sequence
  Description of Artificial Sequence: Synthetic oligonucleotide
gaccauaccgcucugccua

SEQ ID NO: 1793855 - RNA, 19 nt, Artificial Sequence
  Description of Artificial Sequence: Synthetic oligonucleotide
agugccugguaucuuuacu

SEQ ID NO: 1793856 - RNA, 19 nt, Artificial Sequence
  Description of Artificial Sequence: Synthetic oligonucleotide
caaaccugcuaacacuguc

SEQ ID NO: 1793857 - RNA, 19 nt, Artificial Sequence
  Description of Artificial Sequence: Synthetic oligonucleotide
uccggaucaaugccauucu

SEQ ID NO: 1793858 - RNA, 19 nt, Artificial Sequence
  Description of Artificial Sequence: Synthetic oligonucleotide
gaggaccaaggccaaucag

SEQ ID NO: 1793859 - RNA, 19 nt, Artificial Sequence
  Description of Artificial Sequence: Synthetic oligonucleotide
ccaaucagaggcagcagcg

SEQ ID NO: 1793860 - RNA, 19 nt, Artificial Sequence
  Description of Artificial Sequence: Synthetic oligonucleotide
ugcugauccugacuggcau

SEQ ID NO: 1793861 - RNA, 19 nt, Artificial Sequence
  Description of Artificial Sequence: Synthetic oligonucleotide
gauggcugaggucucagcu

SEQ ID NO: 1793862 - RNA, 19 nt, Artificial Sequence
  Description of Artificial Sequence: Synthetic oligonucleotide
cagcugcucguuaggaucc

SEQ ID NO: 1793863 - RNA, 19 nt, Artificial Sequence
  Description of Artificial Sequence: Synthetic oligonucleotide
guacaggacaagggaaagg

SEQ ID NO: 1793864 - RNA, 19 nt, Artificial Sequence
  Description of Artificial Sequence: Synthetic oligonucleotide
uacaugucguccauuccuu

SEQ ID NO: 1793865 - RNA, 19 nt, Artificial Sequence
  Description of Artificial Sequence: Synthetic oligonucleotide
agguaaagucuucuccgga

SEQ ID NO: 1793866 - RNA, 19 nt, Artificial Sequence
  Description of Artificial Sequence: Synthetic oligonucleotide
accggacuccaacuccuac

SEQ ID NO: 1793867 - RNA, 19 nt, Artificial Sequence
  Description of Artificial Sequence: Synthetic oligonucleotide
auaaucugccgagcuuugg

SEQ ID NO: 1793868 - RNA, 19 nt, Artificial Sequence
  Description of Artificial Sequence: Synthetic oligonucleotide
aacccguuucuuaaaugca

SEQ ID NO: 1793869 - RNA, 19 nt, Artificial Sequence
  Description of Artificial Sequence: Synthetic oligonucleotide
uguuccacuggcgcucuag

SEQ ID NO: 1793870 - RNA, 19 nt, Artificial Sequence
  Description of Artificial Sequence: Synthetic oligonucleotide
uggcauuucaaaggccuca

SEQ ID NO: 1793871 - RNA, 19 nt, Artificial Sequence
  Description of Artificial Sequence: Synthetic oligonucleotide
uuuuguagggucggauuuc

SEQ ID NO: 1793872 - RNA, 19 nt, Artificial Sequence
  Description of Artificial Sequence: Synthetic oligonucleotide
uagggucggauuuccucag

SEQ ID NO: 1793873 - RNA, 19 nt, Artificial Sequence
  Description of Artificial Sequence: Synthetic oligonucleotide
cauaaucugccgagcuuug

SEQ ID NO: 1793874 - RNA, 19 nt, Artificial Sequence
  Description of Artificial Sequence: Synthetic oligonucleotide
ucuuuacuacaguggugcu

SEQ ID NO: 1793875 - RNA, 19 nt, Artificial Sequence
  Description of Artificial Sequence: Synthetic oligonucleotide
aucuccaaauacaugucgu

SEQ ID NO: 1793876 - RNA, 19 nt, Artificial Sequence
  Description of Artificial Sequence: Synthetic oligonucleotide
ggacuugcgaugccgggcg

SEQ ID NO: 1793877 - RNA, 19 nt, Artificial Sequence
  Description of Artificial Sequence: Synthetic oligonucleotide
uggucaauaccugauuguu

SEQ ID NO: 1793878 - RNA, 19 nt, Artificial Sequence
  Description of Artificial Sequence: Synthetic oligonucleotide
agguugauuagggcugagg

SEQ ID NO: 1793879 - RNA, 19 nt, Artificial Sequence
  Description of Artificial Sequence: Synthetic oligonucleotide
cuugguuguuuuccggauc

SEQ ID NO: 1793880 - RNA, 19 nt, Artificial Sequence
  Description of Artificial Sequence: Synthetic oligonucleotide
cacugacauuacaaaguac

SEQ ID NO: 1793881 - RNA, 19 nt, Artificial Sequence
  Description of Artificial Sequence: Synthetic oligonucleotide
cugcucguuaggauccacc

SEQ ID NO: 1793882 - RNA, 19 nt, Artificial Sequence
  Description of Artificial Sequence: Synthetic oligonucleotide
gccaaacugguucauaauc

SEQ ID NO: 1793883 - RNA, 19 nt, Artificial Sequence
  Description of Artificial Sequence: Synthetic oligonucleotide
ccacuggcgcucuagaugc

SEQ ID NO: 1793884 - RNA, 19 nt, Artificial Sequence
  Description of Artificial Sequence: Synthetic oligonucleotide
ucugccgagcuuuggacuu

SEQ ID NO: 1793885 - RNA, 19 nt, Artificial Sequence
  Description of Artificial Sequence: Synthetic oligonucleotide
cucguuaggauccaccucu

SEQ ID NO: 1793886 - RNA, 19 nt, Artificial Sequence
  Description of Artificial Sequence: Synthetic oligonucleotide
aaccacagguaaagucuuc

SEQ ID NO: 1793887 - RNA, 19 nt, Artificial Sequence
  Description of Artificial Sequence: Synthetic oligonucleotide
gucguccauuccuuaacug

SEQ ID NO: 1793888 - RNA, 19 nt, Artificial Sequence
  Description of Artificial Sequence: Synthetic oligonucleotide
aaaccacagguaaagucuu

SEQ ID NO: 1793889 - RNA, 19 nt, Artificial Sequence
  Description of Artificial Sequence: Synthetic oligonucleotide
uccugggauccacauguuc

SEQ ID NO: 1793890 - RNA, 19 nt, Artificial Sequence
  Description of Artificial Sequence: Synthetic oligonucleotide
uaacuguccccuguguuau

SEQ ID NO: 1793891 - RNA, 19 nt, Artificial Sequence
  Description of Artificial Sequence: Synthetic oligonucleotide
cucugacuaaaucuuguaa

SEQ ID NO: 1793892 - RNA, 19 nt, Artificial Sequence
  Description of Artificial Sequence: Synthetic oligonucleotide
accauaccgcucugccuac

SEQ ID NO: 1793893 - RNA, 19 nt, Artificial Sequence
  Description of Artificial Sequence: Synthetic oligonucleotide
uagcagagaaccggacucc

SEQ ID NO: 1793894 - RNA, 19 nt, Artificial Sequence
  Description of Artificial Sequence: Synthetic oligonucleotide
cuacaaaccugcuaacacu

SEQ ID NO: 1793895 - RNA, 19 nt, Artificial Sequence
  Description of Artificial Sequence: Synthetic oligonucleotide
ggauccaccucucugacua

SEQ ID NO: 1793896 - RNA, 19 nt, Artificial Sequence
  Description of Artificial Sequence: Synthetic oligonucleotide
caauaccugauuguuuuca

SEQ ID NO: 1793897 - RNA, 19 nt, Artificial Sequence
  Description of Artificial Sequence: Synthetic oligonucleotide
cagcuaggcacccuguguc

SEQ ID NO: 1793898 - RNA, 19 nt, Artificial Sequence
  Description of Artificial Sequence: Synthetic oligonucleotide
agcgucuaucuccccauga

SEQ ID NO: 1793899 - RNA, 19 nt, Artificial Sequence
  Description of Artificial Sequence: Synthetic oligonucleotide
gcugucaccacacuuucga

SEQ ID NO: 1793900 - RNA, 19 nt, Artificial Sequence
  Description of Artificial Sequence: Synthetic oligonucleotide
guuuuccggaucaaugcca

SEQ ID NO: 1793901 - RNA, 19 nt, Artificial Sequence
  Description of Artificial Sequence: Synthetic oligonucleotide
ugccuacagucaaucauuu

SEQ ID NO: 1793902 - RNA, 19 nt, Artificial Sequence
  Description of Artificial Sequence: Synthetic oligonucleotide
cugguucauaaucugccga

SEQ ID NO: 1793903 - RNA, 19 nt, Artificial Sequence
  Description of Artificial Sequence: Synthetic oligonucleotide
accaguggaaaacccguuu

SEQ ID NO: 1793904 - RNA, 19 nt, Artificial Sequence
  Description of Artificial Sequence: Synthetic oligonucleotide
cugcuaacacugucucacc

SEQ ID NO: 1793905 - RNA, 19 nt, Artificial Sequence
  Description of Artificial Sequence: Synthetic oligonucleotide
ugauuguuuucagggcuaa

SEQ ID NO: 1793906 - RNA, 19 nt, Artificial Sequence
  Description of Artificial Sequence: Synthetic oligonucleotide
ggaguaaaccaguggaaaa

SEQ ID NO: 1793907 - RNA, 19 nt, Artificial Sequence
  Description of Artificial Sequence: Synthetic oligonucleotide
gucaaucauuuauaagaua

SEQ ID NO: 1793908 - RNA, 19 nt, Artificial Sequence
  Description of Artificial Sequence: Synthetic oligonucleotide
cacuuucgauaaaaucauc

SEQ ID NO: 1793909 - RNA, 19 nt, Artificial Sequence
  Description of Artificial Sequence: Synthetic oligonucleotide
gugccugguaucuuuacua

SEQ ID NO: 1793910 - RNA, 19 nt, Artificial Sequence
  Description of Artificial Sequence: Synthetic oligonucleotide
uccaccucucugacuaaau

SEQ ID NO: 1793911 - RNA, 19 nt, Artificial Sequence
  Description of Artificial Sequence: Synthetic oligonucleotide
cuucucagucauuauagau

SEQ ID NO: 1793912 - RNA, 19 nt, Artificial Sequence
  Description of Artificial Sequence: Synthetic oligonucleotide
acugucucacccagcauga

SEQ ID NO: 1793913 - RNA, 19 nt, Artificial Sequence
  Description of Artificial Sequence: Synthetic oligonucleotide
ccuccagccuugcugaucc

SEQ ID NO: 1793914 - RNA, 19 nt, Artificial Sequence
  Description of Artificial Sequence: Synthetic oligonucleotide
auaugcggagacugcccca

SEQ ID NO: 1793915 - RNA, 19 nt, Artificial Sequence
  Description of Artificial Sequence: Synthetic oligonucleotide
agggugcuggacuugcgau

SEQ ID NO: 1793916 - RNA, 19 nt, Artificial Sequence
  Description of Artificial Sequence: Synthetic oligonucleotide
agcuaggcacccugugucu

SEQ ID NO: 1793917 - RNA, 19 nt, Artificial Sequence
  Description of Artificial Sequence: Synthetic oligonucleotide
uuuauucuuuuggcagauc

SEQ ID NO: 1793918 - RNA, 19 nt, Artificial Sequence
  Description of Artificial Sequence: Synthetic oligonucleotide
ugugagcuucuguggugca

SEQ ID NO: 1793919 - RNA, 19 nt, Artificial Sequence
  Description of Artificial Sequence: Synthetic oligonucleotide
ugcacagaugggccccugu

SEQ ID NO: 1793920 - RNA, 19 nt, Artificial Sequence
  Description of Artificial Sequence: Synthetic oligonucleotide
cuaagacgaccgccugucc

SEQ ID NO: 1793921 - RNA, 19 nt, Artificial Sequence
  Description of Artificial Sequence: Synthetic oligonucleotide
gagugccugguaucuuuac

SEQ ID NO: 1793922 - RNA, 19 nt, Artificial Sequence
  Description of Artificial Sequence: Synthetic oligonucleotide
ccacauguuccacuggcgc

SEQ ID NO: 1793923 - RNA, 19 nt, Artificial Sequence
  Description of Artificial Sequence: Synthetic oligonucleotide
cugguagcagagaaccgga

SEQ ID NO: 1793924 - RNA, 19 nt, Artificial Sequence
  Description of Artificial Sequence: Synthetic oligonucleotide
agggcuaagacgaccgccu

SEQ ID NO: 1793925 - RNA, 19 nt, Artificial Sequence
  Description of Artificial Sequence: Synthetic oligonucleotide
aaugcacagaugggccccu

SEQ ID NO: 1793926 - RNA, 19 nt, Artificial Sequence
  Description of Artificial Sequence: Synthetic oligonucleotide
gauaaaccacagguaaagu

SEQ ID NO: 1793927 - RNA, 19 nt, Artificial Sequence
  Description of Artificial Sequence: Synthetic oligonucleotide
gagauggcugaggucucag

SEQ ID NO: 1793928 - RNA, 19 nt, Artificial Sequence
  Description of Artificial Sequence: Synthetic oligonucleotide
ccaaggaugagauggcuga

SEQ ID NO: 1793929 - RNA, 19 nt, Artificial Sequence
  Description of Artificial Sequence: Synthetic oligonucleotide
cugacuaaaucuuguaauu

SEQ ID NO: 1793930 - RNA, 19 nt, Artificial Sequence
  Description of Artificial Sequence: Synthetic oligonucleotide
gggucggauuuccucagag

SEQ ID NO: 1793931 - RNA, 19 nt, Artificial Sequence
  Description of Artificial Sequence: Synthetic oligonucleotide
ggucggauuuccucagagc

SEQ ID NO: 1793932 - RNA, 19 nt, Artificial Sequence
  Description of Artificial Sequence: Synthetic oligonucleotide
gcugguuugucccuuugga

SEQ ID NO: 1793933 - RNA, 19 nt, Artificial Sequence
  Description of Artificial Sequence: Synthetic oligonucleotide
uuuaaccuccagggugcug

SEQ ID NO: 1793934 - RNA, 19 nt, Artificial Sequence
  Description of Artificial Sequence: Synthetic oligonucleotide
cauuccuuaacuguccccu

SEQ ID NO: 1793935 - RNA, 19 nt, Artificial Sequence
  Description of Artificial Sequence: Synthetic oligonucleotide
acgaccgccugucccagga

SEQ ID NO: 1793936 - RNA, 19 nt, Artificial Sequence
  Description of Artificial Sequence: Synthetic oligonucleotide
acuggcgcucuagaugcag

SEQ ID NO: 1793937 - RNA, 19 nt, Artificial Sequence
  Description of Artificial Sequence: Synthetic oligonucleotide
gucugguagcagagaaccg

SEQ ID NO: 1793938 - RNA, 19 nt, Artificial Sequence
  Description of Artificial Sequence: Synthetic oligonucleotide
caugucguccauuccuuaa

SEQ ID NO: 1793939 - RNA, 19 nt, Artificial Sequence
  Description of Artificial Sequence: Synthetic oligonucleotide
ccguuucuuaaaugcacag

SEQ ID NO: 1793940 - RNA, 19 nt, Artificial Sequence
  Description of Artificial Sequence: Synthetic oligonucleotide
accugcuaacacugucuca

SEQ ID NO: 1793941 - RNA, 19 nt, Artificial Sequence
  Description of Artificial Sequence: Synthetic oligonucleotide
ucguuaggauccaccucuc

SEQ ID NO: 1793942 - RNA, 19 nt, Artificial Sequence
  Description of Artificial Sequence: Synthetic oligonucleotide
auaccgcucugccuacagu

SEQ ID NO: 1793943 - RNA, 19 nt, Artificial Sequence
  Description of Artificial Sequence: Synthetic oligonucleotide
cuaggcacccugugucuuc

SEQ ID NO: 1793944 - RNA, 19 nt, Artificial Sequence
  Description of Artificial Sequence: Synthetic oligonucleotide
uugucccuuuggaguaaac

SEQ ID NO: 1793945 - RNA, 19 nt, Artificial Sequence
  Description of Artificial Sequence: Synthetic oligonucleotide
ccggaagauacacugcuuc

SEQ ID NO: 1793946 - RNA, 19 nt, Artificial Sequence
  Description of Artificial Sequence: Synthetic oligonucleotide
cuugcgaugccgggcgagc

SEQ ID NO: 1793947 - RNA, 19 nt, Artificial Sequence
  Description of Artificial Sequence: Synthetic oligonucleotide
ggcauuucaaaggccucag

SEQ ID NO: 1793948 - RNA, 19 nt, Artificial Sequence
  Description of Artificial Sequence: Synthetic oligonucleotide
gguuugucccuuuggagua

SEQ ID NO: 1793949 - RNA, 19 nt, Artificial Sequence
  Description of Artificial Sequence: Synthetic oligonucleotide
ccuacagucaaucauuuau

SEQ ID NO: 1793950 - RNA, 19 nt, Artificial Sequence
  Description of Artificial Sequence: Synthetic oligonucleotide
agauauugcugcacuguua

SEQ ID NO: 1793951 - RNA, 19 nt, Artificial Sequence
  Description of Artificial Sequence: Synthetic oligonucleotide
uggagccuuguggaggggu

SEQ ID NO: 1793952 - RNA, 19 nt, Artificial Sequence
  Description of Artificial Sequence: Synthetic oligonucleotide
ggccauggagccuugugga

SEQ ID NO: 1793953 - RNA, 19 nt, Artificial Sequence
  Description of Artificial Sequence: Synthetic oligonucleotide
ggaccagaaguugggguag

SEQ ID NO: 1793954 - RNA, 19 nt, Artificial Sequence
  Description of Artificial Sequence: Synthetic oligonucleotide
agcugucaccacacuuucg

SEQ ID NO: 1793955 - RNA, 19 nt, Artificial Sequence
  Description of Artificial Sequence: Synthetic oligonucleotide
acuugcgaugccgggcgag

SEQ ID NO: 1793956 - RNA, 19 nt, Artificial Sequence
  Description of Artificial Sequence: Synthetic oligonucleotide
acccucuacaaaccugcua

SEQ ID NO: 1793957 - RNA, 19 nt, Artificial Sequence
  Description of Artificial Sequence: Synthetic oligonucleotide
accacacuuucgauaaaau

SEQ ID NO: 1793958 - RNA, 19 nt, Artificial Sequence
  Description of Artificial Sequence: Synthetic oligonucleotide
guggugcuauuggccaugg

SEQ ID NO: 1793959 - RNA, 19 nt, Artificial Sequence
  Description of Artificial Sequence: Synthetic oligonucleotide
ucaccacacuuucgauaaa

SEQ ID NO: 1793960 - RNA, 19 nt, Artificial Sequence
  Description of Artificial Sequence: Synthetic oligonucleotide
cuccggaagauacacugcu

SEQ ID NO: 1793961 - RNA, 19 nt, Artificial Sequence
  Description of Artificial Sequence: Synthetic oligonucleotide
cagaugggccccugugcug

SEQ ID NO: 1793962 - RNA, 19 nt, Artificial Sequence
  Description of Artificial Sequence: Synthetic oligonucleotide
aacccucuacaaaccugcu

SEQ ID NO: 1793963 - RNA, 19 nt, Artificial Sequence
  Description of Artificial Sequence: Synthetic oligonucleotide
gcuaagacgaccgccuguc

SEQ ID NO: 1793964 - RNA, 19 nt, Artificial Sequence
  Description of Artificial Sequence: Synthetic oligonucleotide
gggugcuggacuugcgaug

SEQ ID NO: 1793965 - RNA, 19 nt, Artificial Sequence
  Description of Artificial Sequence: Synthetic oligonucleotide
uugagacggcagggaaaag

SEQ ID NO: 1793966 - RNA, 19 nt, Artificial Sequence
  Description of Artificial Sequence: Synthetic oligonucleotide
ccauuccuuaacugucccc

SEQ ID NO: 1793967 - RNA, 19 nt, Artificial Sequence
  Description of Artificial Sequence: Synthetic oligonucleotide
gguagcagagaaccggacu

SEQ ID NO: 1793968 - RNA, 19 nt, Artificial Sequence
  Description of Artificial Sequence: Synthetic oligonucleotide
gcauuucaaaggccucagc

SEQ ID NO: 1793969 - RNA, 19 nt, Artificial Sequence
  Description of Artificial Sequence: Synthetic oligonucleotide
cguccauuccuuaacuguc

SEQ ID NO: 1793970 - RNA, 19 nt, Artificial Sequence
  Description of Artificial Sequence: Synthetic oligonucleotide
acuguccccuguguuauuu

SEQ ID NO: 1793971 - RNA, 19 nt, Artificial Sequence
  Description of Artificial Sequence: Synthetic oligonucleotide
caucagcuaucugcagcag

SEQ ID NO: 1793972 - RNA, 19 nt, Artificial Sequence
  Description of Artificial Sequence: Synthetic oligonucleotide
gacgaccgccugucccagg

SEQ ID NO: 1793973 - RNA, 19 nt, Artificial Sequence
  Description of Artificial Sequence: Synthetic oligonucleotide
caccacacuuucgauaaaa

SEQ ID NO: 1793974 - RNA, 19 nt, Artificial Sequence
  Description of Artificial Sequence: Synthetic oligonucleotide
uggugcuauuggccaugga

SEQ ID NO: 1793975 - RNA, 19 nt, Artificial Sequence
  Description of Artificial Sequence: Synthetic oligonucleotide
gagguugauuagggcugag

SEQ ID NO: 1793976 - RNA, 19 nt, Artificial Sequence
  Description of Artificial Sequence: Synthetic oligonucleotide
gcucaaguaucuccaaaua

SEQ ID NO: 1793977 - RNA, 19 nt, Artificial Sequence
  Description of Artificial Sequence: Synthetic oligonucleotide
ccgagcuuuggacuucagc

SEQ ID NO: 1793978 - RNA, 19 nt, Artificial Sequence
  Description of Artificial Sequence: Synthetic oligonucleotide
agacugccccagugaagcu

SEQ ID NO: 1793979 - RNA, 19 nt, Artificial Sequence
  Description of Artificial Sequence: Synthetic oligonucleotide
cucuuugagacggcaggga

SEQ ID NO: 1793980 - RNA, 19 nt, Artificial Sequence
  Description of Artificial Sequence: Synthetic oligonucleotide
gaaccggacuccaacuccu

SEQ ID NO: 1793981 - RNA, 19 nt, Artificial Sequence
  Description of Artificial Sequence: Synthetic oligonucleotide
cuuaacuguccccuguguu

SEQ ID NO: 1793982 - RNA, 19 nt, Artificial Sequence
  Description of Artificial Sequence: Synthetic oligonucleotide
ccuuguggaggggugcugg

SEQ ID NO: 1793983 - RNA, 19 nt, Artificial Sequence
  Description of Artificial Sequence: Synthetic oligonucleotide
cugccuacagucaaucauu

SEQ ID NO: 1793984 - RNA, 19 nt, Artificial Sequence
  Description of Artificial Sequence: Synthetic oligonucleotide
ggaugagauggcugagguc

SEQ ID NO: 1793985 - RNA, 19 nt, Artificial Sequence
  Description of Artificial Sequence: Synthetic oligonucleotide
cagggugcuggacuugcga

SEQ ID NO: 1793986 - RNA, 19 nt, Artificial Sequence
  Description of Artificial Sequence: Synthetic oligonucleotide
ugccgagcuuuggacuuca

SEQ ID NO: 1793987 - RNA, 19 nt, Artificial Sequence
  Description of Artificial Sequence: Synthetic oligonucleotide
ccccuguguuauuucuugg

SEQ ID NO: 1793988 - RNA, 19 nt, Artificial Sequence
  Description of Artificial Sequence: Synthetic oligonucleotide
agggucggauuuccucaga

SEQ ID NO: 1793989 - RNA, 19 nt, Artificial Sequence
  Description of Artificial Sequence: Synthetic oligonucleotide
uugcgaugccgggcgagcu

SEQ ID NO: 1793990 - RNA, 19 nt, Artificial Sequence
  Description of Artificial Sequence: Synthetic oligonucleotide
ccccaugauaugcggagac

SEQ ID NO: 1793991 - RNA, 19 nt, Artificial Sequence
  Description of Artificial Sequence: Synthetic oligonucleotide
uuuccggaucaaugccauu

SEQ ID NO: 1793992 - RNA, 19 nt, Artificial Sequence
  Description of Artificial Sequence: Synthetic oligonucleotide
accgccugucccaggagug

SEQ ID NO: 1793993 - RNA, 19 nt, Artificial Sequence
  Description of Artificial Sequence: Synthetic oligonucleotide
cccguuucuuaaaugcaca

SEQ ID NO: 1793994 - RNA, 19 nt, Artificial Sequence
  Description of Artificial Sequence: Synthetic oligonucleotide
ccugauuguuuucagggcu

SEQ ID NO: 1793995 - RNA, 19 nt, Artificial Sequence
  Description of Artificial Sequence: Synthetic oligonucleotide
gccugguaucuuuacuaca

SEQ ID NO: 1793996 - RNA, 19 nt, Artificial Sequence
  Description of Artificial Sequence: Synthetic oligonucleotide
gaaguugggguaggaggcu

SEQ ID NO: 1793997 - RNA, 19 nt, Artificial Sequence
  Description of Artificial Sequence: Synthetic oligonucleotide
acugccccagugaagcuuu

SEQ ID NO: 1793998 - RNA, 19 nt, Artificial Sequence
  Description of Artificial Sequence: Synthetic oligonucleotide
ccaccucucugacuaaauc

SEQ ID NO: 1793999 - RNA, 19 nt, Artificial Sequence
  Description of Artificial Sequence: Synthetic oligonucleotide
ugauccugacuggcauuuc

SEQ ID NO: 1794000 - RNA, 19 nt, Artificial Sequence
  Description of Artificial Sequence: Synthetic oligonucleotide
gguaggaggcuuuauucuu

SEQ ID NO: 1794001 - RNA, 19 nt, Artificial Sequence
  Description of Artificial Sequence: Synthetic oligonucleotide
agacgaccgccugucccag

SEQ ID NO: 1794002 - RNA, 19 nt, Artificial Sequence
  Description of Artificial Sequence: Synthetic oligonucleotide
gcgaugccgggcgagcugg

SEQ ID NO: 1794003 - RNA, 19 nt, Artificial Sequence
  Description of Artificial Sequence: Synthetic oligonucleotide
agccuuguggaggggugcu

SEQ ID NO: 1794004 - RNA, 19 nt, Artificial Sequence
  Description of Artificial Sequence: Synthetic oligonucleotide
auccaccucucugacuaaa

SEQ ID NO: 1794005 - RNA, 19 nt, Artificial Sequence
  Description of Artificial Sequence: Synthetic oligonucleotide
ggaggagacaaacccucua

SEQ ID NO: 1794006 - RNA, 19 nt, Artificial Sequence
  Description of Artificial Sequence: Synthetic oligonucleotide
cagagccaaauccugggau

SEQ ID NO: 1794007 - RNA, 19 nt, Artificial Sequence
  Description of Artificial Sequence: Synthetic oligonucleotide
gcucguuaggauccaccuc

SEQ ID NO: 1794008 - RNA, 19 nt, Artificial Sequence
  Description of Artificial Sequence: Synthetic oligonucleotide
uugggguaggaggcuuuau

SEQ ID NO: 1794009 - RNA, 19 nt, Artificial Sequence
  Description of Artificial Sequence: Synthetic oligonucleotide
cagcgucuaucuccccaug

SEQ ID NO: 1794010 - RNA, 19 nt, Artificial Sequence
  Description of Artificial Sequence: Synthetic oligonucleotide
caaaggccucagcuaggca

SEQ ID NO: 1794011 - RNA, 19 nt, Artificial Sequence
  Description of Artificial Sequence: Synthetic oligonucleotide
uuagggcugaggggccaaa

SEQ ID NO: 1794012 - RNA, 19 nt, Artificial Sequence
  Description of Artificial Sequence: Synthetic oligonucleotide
gaugcagcuggacgucuuu

SEQ ID NO: 1794013 - RNA, 19 nt, Artificial Sequence
  Description of Artificial Sequence: Synthetic oligonucleotide
uuacuacaguggugcuauu

SEQ ID NO: 1794014 - RNA, 19 nt, Artificial Sequence
  Description of Artificial Sequence: Synthetic oligonucleotide
gggcuaagacgaccgccug

SEQ ID NO: 1794015 - RNA, 19 nt, Artificial Sequence
  Description of Artificial Sequence: Synthetic oligonucleotide
auggagccuuguggagggg

SEQ ID NO: 1794016 - RNA, 19 nt, Artificial Sequence
  Description of Artificial Sequence: Synthetic oligonucleotide
gacuugcgaugccgggcga

SEQ ID NO: 1794017 - RNA, 19 nt, Artificial Sequence
  Description of Artificial Sequence: Synthetic oligonucleotide
cuauuggccauggagccuu

SEQ ID NO: 1794018 - RNA, 19 nt, Artificial Sequence
  Description of Artificial Sequence: Synthetic oligonucleotide
gaugccgggcgagcuggca

SEQ ID NO: 1794019 - RNA, 19 nt, Artificial Sequence
  Description of Artificial Sequence: Synthetic oligonucleotide
auuggccauggagccuugu

SEQ ID NO: 1794020 - RNA, 19 nt, Artificial Sequence
  Description of Artificial Sequence: Synthetic oligonucleotide
gugcuggacuugcgaugcc

SEQ ID NO: 1794021 - RNA, 19 nt, Artificial Sequence
  Description of Artificial Sequence: Synthetic oligonucleotide
cuucuccggaagauacacu

SEQ ID NO: 1794022 - RNA, 19 nt, Artificial Sequence
  Description of Artificial Sequence: Synthetic oligonucleotide
gcuggacgucuuuaaccuc

SEQ ID NO: 1794023 - RNA, 19 nt, Artificial Sequence
  Description of Artificial Sequence: Synthetic oligonucleotide
cgauaaaaucaucagcuau

SEQ ID NO: 1794024 - RNA, 19 nt, Artificial Sequence
  Description of Artificial Sequence: Synthetic oligonucleotide
cugucucacccagcaugac

SEQ ID NO: 1794025 - RNA, 19 nt, Artificial Sequence
  Description of Artificial Sequence: Synthetic oligonucleotide
ccaaauccugggauccaca

SEQ ID NO: 1794026 - RNA, 19 nt, Artificial Sequence
  Description of Artificial Sequence: Synthetic oligonucleotide
cccaggagugccugguauc

SEQ ID NO: 1794027 - RNA, 19 nt, Artificial Sequence
  Description of Artificial Sequence: Synthetic oligonucleotide
gcucugccuacagucaauc

SEQ ID NO: 1794028 - RNA, 19 nt, Artificial Sequence
  Description of Artificial Sequence: Synthetic oligonucleotide
ggcgcucuagaugcagcug

SEQ ID NO: 1794029 - RNA, 19 nt, Artificial Sequence
  Description of Artificial Sequence: Synthetic oligonucleotide
aaccggacuccaacuccua

SEQ ID NO: 1794030 - RNA, 19 nt, Artificial Sequence
  Description of Artificial Sequence: Synthetic oligonucleotide
gcuuuauagaugagaaauu

SEQ ID NO: 1794031 - RNA, 19 nt, Artificial Sequence
  Description of Artificial Sequence: Synthetic oligonucleotide
agaugcagcuggacgucuu

SEQ ID NO: 1794032 - RNA, 19 nt, Artificial Sequence
  Description of Artificial Sequence: Synthetic oligonucleotide
caaucagaggcagcagcgu

SEQ ID NO: 1794033 - RNA, 19 nt, Artificial Sequence
  Description of Artificial Sequence: Synthetic oligonucleotide
cuacugcugguuugucccu

SEQ ID NO: 1794034 - RNA, 19 nt, Artificial Sequence
  Description of Artificial Sequence: Synthetic oligonucleotide
cugauccugacuggcauuu

SEQ ID NO: 1794035 - RNA, 19 nt, Artificial Sequence
  Description of Artificial Sequence: Synthetic oligonucleotide
augcacagaugggccccug

SEQ ID NO: 1794036 - RNA, 19 nt, Artificial Sequence
  Description of Artificial Sequence: Synthetic oligonucleotide
uuggagcugugaggaccaa

SEQ ID NO: 1794037 - RNA, 19 nt, Artificial Sequence
  Description of Artificial Sequence: Synthetic oligonucleotide
ggcuaagacgaccgccugu

SEQ ID NO: 1794038 - RNA, 19 nt, Artificial Sequence
  Description of Artificial Sequence: Synthetic oligonucleotide
cccugugucuucaauuuau

SEQ ID NO: 1794039 - RNA, 19 nt, Artificial Sequence
  Description of Artificial Sequence: Synthetic oligonucleotide
cccuguguuauuucuuggu

SEQ ID NO: 1794040 - RNA, 19 nt, Artificial Sequence
  Description of Artificial Sequence: Synthetic oligonucleotide
cccuuuggaguaaaccagu

SEQ ID NO: 1794041 - RNA, 19 nt, Artificial Sequence
  Description of Artificial Sequence: Synthetic oligonucleotide
cgggcgagcuggcaggcag

SEQ ID NO: 1794042 - RNA, 19 nt, Artificial Sequence
  Description of Artificial Sequence: Synthetic oligonucleotide
gcgucuaucuccccaugau

SEQ ID NO: 1794043 - RNA, 19 nt, Artificial Sequence
  Description of Artificial Sequence: Synthetic oligonucleotide
aggggccaaacugguucau

SEQ ID NO: 1794044 - RNA, 19 nt, Artificial Sequence
  Description of Artificial Sequence: Synthetic oligonucleotide
gccuacagucaaucauuua

SEQ ID NO: 1794045 - RNA, 19 nt, Artificial Sequence
  Description of Artificial Sequence: Synthetic oligonucleotide
ccuguguuauuucuugguu

SEQ ID NO: 1794046 - RNA, 19 nt, Artificial Sequence
  Description of Artificial Sequence: Synthetic oligonucleotide
cucacccagcaugaccaua

SEQ ID NO: 1794047 - RNA, 19 nt, Artificial Sequence
  Description of Artificial Sequence: Synthetic oligonucleotide
cacuggcgcucuagaugca

SEQ ID NO: 1794048 - RNA, 19 nt, Artificial Sequence
  Description of Artificial Sequence: Synthetic oligonucleotide
ccaaauacaugucguccau

SEQ ID NO: 1794049 - RNA, 19 nt, Artificial Sequence
  Description of Artificial Sequence: Synthetic oligonucleotide
aggcacccugugucuucaa

SEQ ID NO: 1794050 - RNA, 19 nt, Artificial Sequence
  Description of Artificial Sequence: Synthetic oligonucleotide
cuuuaaccuccagggugcu

SEQ ID NO: 1794051 - RNA, 19 nt, Artificial Sequence
  Description of Artificial Sequence: Synthetic oligonucleotide
ggagugccugguaucuuua

SEQ ID NO: 1794052 - RNA, 19 nt, Artificial Sequence
  Description of Artificial Sequence: Synthetic oligonucleotide
gcugcucguuaggauccac

SEQ ID NO: 1794053 - RNA, 19 nt, Artificial Sequence
  Description of Artificial Sequence: Synthetic oligonucleotide
gcugaggggccaaacuggu

SEQ ID NO: 1794054 - RNA, 19 nt, Artificial Sequence
  Description of Artificial Sequence: Synthetic oligonucleotide
ccggacuccaacuccuacu

SEQ ID NO: 1794055 - RNA, 19 nt, Artificial Sequence
  Description of Artificial Sequence: Synthetic oligonucleotide
auguuccacuggcgcucua

SEQ ID NO: 1794056 - RNA, 19 nt, Artificial Sequence
  Description of Artificial Sequence: Synthetic oligonucleotide
gcuauuggccauggagccu

SEQ ID NO: 1794057 - RNA, 19 nt, Artificial Sequence
  Description of Artificial Sequence: Synthetic oligonucleotide
ccuuaacuguccccugugu

SEQ ID NO: 1794058 - RNA, 19 nt, Artificial Sequence
  Description of Artificial Sequence: Synthetic oligonucleotide
gccuuguggaggggugcug

SEQ ID NO: 1794059 - RNA, 19 nt, Artificial Sequence
  Description of Artificial Sequence: Synthetic oligonucleotide
gcagagaaccggacuccaa

SEQ ID NO: 1794060 - RNA, 19 nt, Artificial Sequence
  Description of Artificial Sequence: Synthetic oligonucleotide
gcugauccugacuggcauu

SEQ ID NO: 1794061 - RNA, 19 nt, Artificial Sequence
  Description of Artificial Sequence: Synthetic oligonucleotide
cggagacugccccagugaa

SEQ ID NO: 1794062 - RNA, 19 nt, Artificial Sequence
  Description of Artificial Sequence: Synthetic oligonucleotide
cugaggggccaaacugguu

SEQ ID NO: 1794063 - RNA, 19 nt, Artificial Sequence
  Description of Artificial Sequence: Synthetic oligonucleotide
cgccugucccaggagugcc

SEQ ID NO: 1794064 - RNA, 19 nt, Artificial Sequence
  Description of Artificial Sequence: Synthetic oligonucleotide
cgcucuagaugcagcugga

SEQ ID NO: 1794065 - RNA, 19 nt, Artificial Sequence
  Description of Artificial Sequence: Synthetic oligonucleotide
ggggccaaacugguucaua

SEQ ID NO: 1794066 - RNA, 19 nt, Artificial Sequence
  Description of Artificial Sequence: Synthetic oligonucleotide
ccgcucugccuacagucaa

SEQ ID NO: 1794067 - RNA, 19 nt, Artificial Sequence
  Description of Artificial Sequence: Synthetic oligonucleotide
cgucuuuaaccuccagggu

SEQ ID NO: 1794068 - RNA, 19 nt, Artificial Sequence
  Description of Artificial Sequence: Synthetic oligonucleotide
gccgagcuuuggacuucag

SEQ ID NO: 1794069 - RNA, 19 nt, Artificial Sequence
  Description of Artificial Sequence: Synthetic oligonucleotide
ggcuggcucuggcuuuaua

SEQ ID NO: 1794070 - RNA, 19 nt, Artificial Sequence
  Description of Artificial Sequence: Synthetic oligonucleotide
cccaugauaugcggagacu

SEQ ID NO: 1794071 - RNA, 19 nt, Artificial Sequence
  Description of Artificial Sequence: Synthetic oligonucleotide
gcuaggcacccugugucuu

SEQ ID NO: 1794072 - RNA, 19 nt, Artificial Sequence
  Description of Artificial Sequence: Synthetic oligonucleotide
cuccagccuugcugauccu

SEQ ID NO: 1794073 - RNA, 19 nt, Artificial Sequence
  Description of Artificial Sequence: Synthetic oligonucleotide
cguuaggauccaccucucu

SEQ ID NO: 1794074 - RNA, 19 nt, Artificial Sequence
  Description of Artificial Sequence: Synthetic oligonucleotide
caggagugccugguaucuu

SEQ ID NO: 1794075 - RNA, 19 nt, Artificial Sequence
  Description of Artificial Sequence: Synthetic oligonucleotide
aauaguacaaaauaggacc

SEQ ID NO: 1794076 - RNA, 19 nt, Artificial Sequence
  Description of Artificial Sequence: Synthetic oligonucleotide
aacaggaaaauacauaggc

SEQ ID NO: 1794077 - RNA, 19 nt, Artificial Sequence
  Description of Artificial Sequence: Synthetic oligonucleotide
aaugggagcacauccaagc

SEQ ID NO: 1794078 - RNA, 19 nt, Artificial Sequence
  Description of Artificial Sequence: Synthetic oligonucleotide
aucaauauuggcuaaguac

SEQ ID NO: 1794079 - RNA, 19 nt, Artificial Sequence
  Description of Artificial Sequence: Synthetic oligonucleotide
aauacagccaccaagagca

SEQ ID NO: 1794080 - RNA, 19 nt, Artificial Sequence
  Description of Artificial Sequence: Synthetic oligonucleotide
aauacauaggcggagcugc

SEQ ID NO: 1794081 - RNA, 19 nt, Artificial Sequence
  Description of Artificial Sequence: Synthetic oligonucleotide
uaggacauaagcuaauugg

SEQ ID NO: 1794082 - RNA, 19 nt, Artificial Sequence
  Description of Artificial Sequence: Synthetic oligonucleotide
ucuuggaaggauaaguggg

SEQ ID NO: 1794083 - RNA, 19 nt, Artificial Sequence
  Description of Artificial Sequence: Synthetic oligonucleotide
uuauaaucugucaauaaga

SEQ ID NO: 1794084 - RNA, 19 nt, Artificial Sequence
  Description of Artificial Sequence: Synthetic oligonucleotide
aaaguacuaagaaaagagc

SEQ ID NO: 1794085 - RNA, 19 nt, Artificial Sequence
  Description of Artificial Sequence: Synthetic oligonucleotide
cuuuauuaaaggcuaauag

SEQ ID NO: 1794086 - RNA, 19 nt, Artificial Sequence
  Description of Artificial Sequence: Synthetic oligonucleotide
uguacuguaagagaaauga

SEQ ID NO: 1794087 - RNA, 19 nt, Artificial Sequence
  Description of Artificial Sequence: Synthetic oligonucleotide
caggaaaauacauaggcgg

SEQ ID NO: 1794088 - RNA, 19 nt, Artificial Sequence
  Description of Artificial Sequence: Synthetic oligonucleotide
uggugugaagaacagaagg

SEQ ID NO: 1794089 - RNA, 19 nt, Artificial Sequence
  Description of Artificial Sequence: Synthetic oligonucleotide
uuagggacagcccaaacag

SEQ ID NO: 1794090 - RNA, 19 nt, Artificial Sequence
  Description of Artificial Sequence: Synthetic oligonucleotide
uaucacaucaauauuggcu

SEQ ID NO: 1794091 - RNA, 19 nt, Artificial Sequence
  Description of Artificial Sequence: Synthetic oligonucleotide
agagaaaugaugaauguac

SEQ ID NO: 1794092 - RNA, 19 nt, Artificial Sequence
  Description of Artificial Sequence: Synthetic oligonucleotide
ugaucugugaaaaccacag

SEQ ID NO: 1794093 - RNA, 19 nt, Artificial Sequence
  Description of Artificial Sequence: Synthetic oligonucleotide
aagaugacuggucaaaugu

SEQ ID NO: 1794094 - RNA, 19 nt, Artificial Sequence
  Description of Artificial Sequence: Synthetic oligonucleotide
guuauaaucugucaauaag

SEQ ID NO: 1794095 - RNA, 19 nt, Artificial Sequence
  Description of Artificial Sequence: Synthetic oligonucleotide
uacuguaagagaaaugaug

SEQ ID NO: 1794096 - RNA, 19 nt, Artificial Sequence
  Description of Artificial Sequence: Synthetic oligonucleotide
auaggaccaaguuauaauc

SEQ ID NO: 1794097 - RNA, 19 nt, Artificial Sequence
  Description of Artificial Sequence: Synthetic oligonucleotide
uaauaguacaaaauaggac

SEQ ID NO: 1794098 - RNA, 19 nt, Artificial Sequence
  Description of Artificial Sequence: Synthetic oligonucleotide
aguccaaaaucauacacag

SEQ ID NO: 1794099 - RNA, 19 nt, Artificial Sequence
  Description of Artificial Sequence: Synthetic oligonucleotide
cauguaucaaaggagaggg

SEQ ID NO: 1794100 - RNA, 19 nt, Artificial Sequence
  Description of Artificial Sequence: Synthetic oligonucleotide
aauauuggcuaaguacagc

SEQ ID NO: 1794101 - RNA, 19 nt, Artificial Sequence
  Description of Artificial Sequence: Synthetic oligonucleotide
uuauuuacgaaacccuggc

SEQ ID NO: 1794102 - RNA, 19 nt, Artificial Sequence
  Description of Artificial Sequence: Synthetic oligonucleotide
ugggguauagccuugaccu

SEQ ID NO: 1794103 - RNA, 19 nt, Artificial Sequence
  Description of Artificial Sequence: Synthetic oligonucleotide
aagaggguguuacuugagc

SEQ ID NO: 1794104 - RNA, 19 nt, Artificial Sequence
  Description of Artificial Sequence: Synthetic oligonucleotide
augaauguacuucaucagg

SEQ ID NO: 1794105 - RNA, 19 nt, Artificial Sequence
  Description of Artificial Sequence: Synthetic oligonucleotide
gacauaagcuaauuggcag

SEQ ID NO: 1794106 - RNA, 19 nt, Artificial Sequence
  Description of Artificial Sequence: Synthetic oligonucleotide
aauaggaccaaguuauaau

SEQ ID NO: 1794107 - RNA, 19 nt, Artificial Sequence
  Description of Artificial Sequence: Synthetic oligonucleotide
aaacccaagggaccaaggg

SEQ ID NO: 1794108 - RNA, 19 nt, Artificial Sequence
  Description of Artificial Sequence: Synthetic oligonucleotide
aaguacuaagaaaagagca

SEQ ID NO: 1794109 - RNA, 19 nt, Artificial Sequence
  Description of Artificial Sequence: Synthetic oligonucleotide
ucaauaagaauuuaccauu

SEQ ID NO: 1794110 - RNA, 19 nt, Artificial Sequence
  Description of Artificial Sequence: Synthetic oligonucleotide
aacauuauggaaagaugac

SEQ ID NO: 1794111 - RNA, 19 nt, Artificial Sequence
  Description of Artificial Sequence: Synthetic oligonucleotide
auuaaaggcuaauaguaca

SEQ ID NO: 1794112 - RNA, 19 nt, Artificial Sequence
  Description of Artificial Sequence: Synthetic oligonucleotide
aaaaucauacacaggcuuc

SEQ ID NO: 1794113 - RNA, 19 nt, Artificial Sequence
  Description of Artificial Sequence: Synthetic oligonucleotide
uuaccaguuguccagaaaa

SEQ ID NO: 1794114 - RNA, 19 nt, Artificial Sequence
  Description of Artificial Sequence: Synthetic oligonucleotide
ucugucaauaagaauuuac

SEQ ID NO: 1794115 - RNA, 19 nt, Artificial Sequence
  Description of Artificial Sequence: Synthetic oligonucleotide
acaggcacagucuugguuc

SEQ ID NO: 1794116 - RNA, 19 nt, Artificial Sequence
  Description of Artificial Sequence: Synthetic oligonucleotide
cugcucuacaacauuaugg

SEQ ID NO: 1794117 - RNA, 19 nt, Artificial Sequence
  Description of Artificial Sequence: Synthetic oligonucleotide
aaaucaaagccccgucuuc

SEQ ID NO: 1794118 - RNA, 19 nt, Artificial Sequence
  Description of Artificial Sequence: Synthetic oligonucleotide
uuguucuugggguauagcc

SEQ ID NO: 1794119 - RNA, 19 nt, Artificial Sequence
  Description of Artificial Sequence: Synthetic oligonucleotide
uuuccuaguucccaaaagu

SEQ ID NO: 1794120 - RNA, 19 nt, Artificial Sequence
  Description of Artificial Sequence: Synthetic oligonucleotide
aaagaugacuggucaaaug

SEQ ID NO: 1794121 - RNA, 19 nt, Artificial Sequence
  Description of Artificial Sequence: Synthetic oligonucleotide
ugcucuacaacauuaugga

SEQ ID NO: 1794122 - RNA, 19 nt, Artificial Sequence
  Description of Artificial Sequence: Synthetic oligonucleotide
uuuagggacagcccaaaca

SEQ ID NO: 1794123 - RNA, 19 nt, Artificial Sequence
  Description of Artificial Sequence: Synthetic oligonucleotide
aauccaaacccaagggacc

SEQ ID NO: 1794124 - RNA, 19 nt, Artificial Sequence
  Description of Artificial Sequence: Synthetic oligonucleotide
cuaauaguacaaaauagga

SEQ ID NO: 1794125 - RNA, 19 nt, Artificial Sequence
  Description of Artificial Sequence: Synthetic oligonucleotide
uccuaaugggagcacaucc

SEQ ID NO: 1794126 - RNA, 19 nt, Artificial Sequence
  Description of Artificial Sequence: Synthetic oligonucleotide
ugugaugggcuccuggcgg

SEQ ID NO: 1794127 - RNA, 19 nt, Artificial Sequence
  Description of Artificial Sequence: Synthetic oligonucleotide
acauaagcuaauuggcagg

SEQ ID NO: 1794128 - RNA, 19 nt, Artificial Sequence
  Description of Artificial Sequence: Synthetic oligonucleotide
aaacauguaucaaaggaga

SEQ ID NO: 1794129 - RNA, 19 nt, Artificial Sequence
  Description of Artificial Sequence: Synthetic oligonucleotide
auauuggcuaaguacagcu

SEQ ID NO: 1794130 - RNA, 19 nt, Artificial Sequence
  Description of Artificial Sequence: Synthetic oligonucleotide
agaccaagaagccagcuug

SEQ ID NO: 1794131 - RNA, 19 nt, Artificial Sequence
  Description of Artificial Sequence: Synthetic oligonucleotide
aagaacagaaggccacuuc

SEQ ID NO: 1794132 - RNA, 19 nt, Artificial Sequence
  Description of Artificial Sequence: Synthetic oligonucleotide
uuuggcauguuuuccuagg

SEQ ID NO: 1794133 - RNA, 19 nt, Artificial Sequence
  Description of Artificial Sequence: Synthetic oligonucleotide
aggacauaagcuaauuggc

SEQ ID NO: 1794134 - RNA, 19 nt, Artificial Sequence
  Description of Artificial Sequence: Synthetic oligonucleotide
uuaggacauaagcuaauug

SEQ ID NO: 1794135 - RNA, 19 nt, Artificial Sequence
  Description of Artificial Sequence: Synthetic oligonucleotide
auuggcagguaucacauca

SEQ ID NO: 1794136 - RNA, 19 nt, Artificial Sequence
  Description of Artificial Sequence: Synthetic oligonucleotide
auaagugggauggagcugg

SEQ ID NO: 1794137 - RNA, 19 nt, Artificial Sequence
  Description of Artificial Sequence: Synthetic oligonucleotide
gaacagaaguuuuauuuac

SEQ ID NO: 1794138 - RNA, 19 nt, Artificial Sequence
  Description of Artificial Sequence: Synthetic oligonucleotide
agcccaaacaggcacaguc

SEQ ID NO: 1794139 - RNA, 19 nt, Artificial Sequence
  Description of Artificial Sequence: Synthetic oligonucleotide
auuuacgaaacccuggcaa

SEQ ID NO: 1794140 - RNA, 19 nt, Artificial Sequence
  Description of Artificial Sequence: Synthetic oligonucleotide
aacagaaguuuuauuuacg

SEQ ID NO: 1794141 - RNA, 19 nt, Artificial Sequence
  Description of Artificial Sequence: Synthetic oligonucleotide
agaaaaucaaagccccguc

SEQ ID NO: 1794142 - RNA, 19 nt, Artificial Sequence
  Description of Artificial Sequence: Synthetic oligonucleotide
uccucugaacaccacuugg

SEQ ID NO: 1794143 - RNA, 19 nt, Artificial Sequence
  Description of Artificial Sequence: Synthetic oligonucleotide
uguaagagaaaugaugaau

SEQ ID NO: 1794144 - RNA, 19 nt, Artificial Sequence
  Description of Artificial Sequence: Synthetic oligonucleotide
agaauuuaccauuuugaaa

SEQ ID NO: 1794145 - RNA, 19 nt, Artificial Sequence
  Description of Artificial Sequence: Synthetic oligonucleotide
gagcuuuugucaaauacag

SEQ ID NO: 1794146 - RNA, 19 nt, Artificial Sequence
  Description of Artificial Sequence: Synthetic oligonucleotide
ugugcuuacacuggagagg

SEQ ID NO: 1794147 - RNA, 19 nt, Artificial Sequence
  Description of Artificial Sequence: Synthetic oligonucleotide
aggugcaaggacuaucaac

SEQ ID NO: 1794148 - RNA, 19 nt, Artificial Sequence
  Description of Artificial Sequence: Synthetic oligonucleotide
aaauguugcuagaggaagg

SEQ ID NO: 1794149 - RNA, 19 nt, Artificial Sequence
  Description of Artificial Sequence: Synthetic oligonucleotide
uaagagaaaugaugaaugu

SEQ ID NO: 1794150 - RNA, 19 nt, Artificial Sequence
  Description of Artificial Sequence: Synthetic oligonucleotide
aguacuaagaaaagagcag

SEQ ID NO: 1794151 - RNA, 19 nt, Artificial Sequence
  Description of Artificial Sequence: Synthetic oligonucleotide
ggaaggauaagugggaugg

SEQ ID NO: 1794152 - RNA, 19 nt, Artificial Sequence
  Description of Artificial Sequence: Synthetic oligonucleotide
gaggguuuguuguucuugg

SEQ ID NO: 1794153 - RNA, 19 nt, Artificial Sequence
  Description of Artificial Sequence: Synthetic oligonucleotide
uccuaguucccaaaaguac

SEQ ID NO: 1794154 - RNA, 19 nt, Artificial Sequence
  Description of Artificial Sequence: Synthetic oligonucleotide
uguuacuugagcugaucug

SEQ ID NO: 1794155 - RNA, 19 nt, Artificial Sequence
  Description of Artificial Sequence: Synthetic oligonucleotide
gacaaagggagguuuagga

SEQ ID NO: 1794156 - RNA, 19 nt, Artificial Sequence
  Description of Artificial Sequence: Synthetic oligonucleotide
acauguaucaaaggagagg

SEQ ID NO: 1794157 - RNA, 19 nt, Artificial Sequence
  Description of Artificial Sequence: Synthetic oligonucleotide
ucugugcuuacacuggaga

SEQ ID NO: 1794158 - RNA, 19 nt, Artificial Sequence
  Description of Artificial Sequence: Synthetic oligonucleotide
caaaauaggaccaaguuau

SEQ ID NO: 1794159 - RNA, 19 nt, Artificial Sequence
  Description of Artificial Sequence: Synthetic oligonucleotide
ucaaauguugcuagaggaa

SEQ ID NO: 1794160 - RNA, 19 nt, Artificial Sequence
  Description of Artificial Sequence: Synthetic oligonucleotide
ucugaacaccacuugggcc

SEQ ID NO: 1794161 - RNA, 19 nt, Artificial Sequence
  Description of Artificial Sequence: Synthetic oligonucleotide
auugggguggccuugggca

SEQ ID NO: 1794162 - RNA, 19 nt, Artificial Sequence
  Description of Artificial Sequence: Synthetic oligonucleotide
auuuccuaguucccaaaag

SEQ ID NO: 1794163 - RNA, 19 nt, Artificial Sequence
  Description of Artificial Sequence: Synthetic oligonucleotide
uucaagaggguguuacuug

SEQ ID NO: 1794164 - RNA, 19 nt, Artificial Sequence
  Description of Artificial Sequence: Synthetic oligonucleotide
ggcaaauccaaacccaagg

SEQ ID NO: 1794165 - RNA, 19 nt, Artificial Sequence
  Description of Artificial Sequence: Synthetic oligonucleotide
uauggaaagaugacugguc

SEQ ID NO: 1794166 - RNA, 19 nt, Artificial Sequence
  Description of Artificial Sequence: Synthetic oligonucleotide
gucaaauguugcuagagga

SEQ ID NO: 1794167 - RNA, 19 nt, Artificial Sequence
  Description of Artificial Sequence: Synthetic oligonucleotide
aaggauaagugggauggag

SEQ ID NO: 1794168 - RNA, 19 nt, Artificial Sequence
  Description of Artificial Sequence: Synthetic oligonucleotide
agcacuguuuaccaguugu

SEQ ID NO: 1794169 - RNA, 19 nt, Artificial Sequence
  Description of Artificial Sequence: Synthetic oligonucleotide
aaagccccgucuucaagag

SEQ ID NO: 1794170 - RNA, 19 nt, Artificial Sequence
  Description of Artificial Sequence: Synthetic oligonucleotide
acaggaaaauacauaggcg

SEQ ID NO: 1794171 - RNA, 19 nt, Artificial Sequence
  Description of Artificial Sequence: Synthetic oligonucleotide
aaggacuaucaacugcucu

SEQ ID NO: 1794172 - RNA, 19 nt, Artificial Sequence
  Description of Artificial Sequence: Synthetic oligonucleotide
uaggaccaaguuauaaucu

SEQ ID NO: 1794173 - RNA, 19 nt, Artificial Sequence
  Description of Artificial Sequence: Synthetic oligonucleotide
augggagcacauccaagcc

SEQ ID NO: 1794174 - RNA, 19 nt, Artificial Sequence
  Description of Artificial Sequence: Synthetic oligonucleotide
ucaagaggguguuacuuga

SEQ ID NO: 1794175 - RNA, 19 nt, Artificial Sequence
  Description of Artificial Sequence: Synthetic oligonucleotide
auggaaagaugacugguca

SEQ ID NO: 1794176 - RNA, 19 nt, Artificial Sequence
  Description of Artificial Sequence: Synthetic oligonucleotide
cuaucaacugcucuacaac

SEQ ID NO: 1794177 - RNA, 19 nt, Artificial Sequence
  Description of Artificial Sequence: Synthetic oligonucleotide
aguuauaaucugucaauaa

SEQ ID NO: 1794178 - RNA, 19 nt, Artificial Sequence
  Description of Artificial Sequence: Synthetic oligonucleotide
uugggguauagccuugacc

SEQ ID NO: 1794179 - RNA, 19 nt, Artificial Sequence
  Description of Artificial Sequence: Synthetic oligonucleotide
agguuuaggacauaagcua

SEQ ID NO: 1794180 - RNA, 19 nt, Artificial Sequence
  Description of Artificial Sequence: Synthetic oligonucleotide
agggacagcccaaacaggc

SEQ ID NO: 1794181 - RNA, 19 nt, Artificial Sequence
  Description of Artificial Sequence: Synthetic oligonucleotide
aaauacauaggcggagcug

SEQ ID NO: 1794182 - RNA, 19 nt, Artificial Sequence
  Description of Artificial Sequence: Synthetic oligonucleotide
gaugacuggucaaauguug

SEQ ID NO: 1794183 - RNA, 19 nt, Artificial Sequence
  Description of Artificial Sequence: Synthetic oligonucleotide
aaauaggaccaaguuauaa

SEQ ID NO: 1794184 - RNA, 19 nt, Artificial Sequence
  Description of Artificial Sequence: Synthetic oligonucleotide
aggauaagugggauggagc

SEQ ID NO: 1794185 - RNA, 19 nt, Artificial Sequence
  Description of Artificial Sequence: Synthetic oligonucleotide
uugcucugugcuuacacug

SEQ ID NO: 1794186 - RNA, 19 nt, Artificial Sequence
  Description of Artificial Sequence: Synthetic oligonucleotide
acuguuuaccaguugucca

SEQ ID NO: 1794187 - RNA, 19 nt, Artificial Sequence
  Description of Artificial Sequence: Synthetic oligonucleotide
caauauuggcuaaguacag

SEQ ID NO: 1794188 - RNA, 19 nt, Artificial Sequence
  Description of Artificial Sequence: Synthetic oligonucleotide
caaagaauguacuguaaga

SEQ ID NO: 1794189 - RNA, 19 nt, Artificial Sequence
  Description of Artificial Sequence: Synthetic oligonucleotide
cuguuuaccaguuguccag

SEQ ID NO: 1794190 - RNA, 19 nt, Artificial Sequence
  Description of Artificial Sequence: Synthetic oligonucleotide
aggaccaaguuauaaucug

SEQ ID NO: 1794191 - RNA, 19 nt, Artificial Sequence
  Description of Artificial Sequence: Synthetic oligonucleotide
aggcuaauaguacaaaaua

SEQ ID NO: 1794192 - RNA, 19 nt, Artificial Sequence
  Description of Artificial Sequence: Synthetic oligonucleotide
cagucuugguuccugagag

SEQ ID NO: 1794193 - RNA, 19 nt, Artificial Sequence
  Description of Artificial Sequence: Synthetic oligonucleotide
uauuuacgaaacccuggca

SEQ ID NO: 1794194 - RNA, 19 nt, Artificial Sequence
  Description of Artificial Sequence: Synthetic oligonucleotide
augacuggucaaauguugc

SEQ ID NO: 1794195 - RNA, 19 nt, Artificial Sequence
  Description of Artificial Sequence: Synthetic oligonucleotide
cuaauuggcagguaucaca

SEQ ID NO: 1794196 - RNA, 19 nt, Artificial Sequence
  Description of Artificial Sequence: Synthetic oligonucleotide
gguccgagaaccuucuugg

SEQ ID NO: 1794197 - RNA, 19 nt, Artificial Sequence
  Description of Artificial Sequence: Synthetic oligonucleotide
acuaucaacugcucuacaa

SEQ ID NO: 1794198 - RNA, 19 nt, Artificial Sequence
  Description of Artificial Sequence: Synthetic oligonucleotide
gagcugaucugugaaaacc

SEQ ID NO: 1794199 - RNA, 19 nt, Artificial Sequence
  Description of Artificial Sequence: Synthetic oligonucleotide
ugguccgagaaccuucuug

SEQ ID NO: 1794200 - RNA, 19 nt, Artificial Sequence
  Description of Artificial Sequence: Synthetic oligonucleotide
uuuacgaaacccuggcaau

SEQ ID NO: 1794201 - RNA, 19 nt, Artificial Sequence
  Description of Artificial Sequence: Synthetic oligonucleotide
auuggcuaaguacagcuuu

SEQ ID NO: 1794202 - RNA, 19 nt, Artificial Sequence
  Description of Artificial Sequence: Synthetic oligonucleotide
ggaaggcaaauccaaaccc

SEQ ID NO: 1794203 - RNA, 19 nt, Artificial Sequence
  Description of Artificial Sequence: Synthetic oligonucleotide
guggaguccaaaaucauac

SEQ ID NO: 1794204 - RNA, 19 nt, Artificial Sequence
  Description of Artificial Sequence: Synthetic oligonucleotide
uuggcuaaguacagcuuug

SEQ ID NO: 1794205 - RNA, 19 nt, Artificial Sequence
  Description of Artificial Sequence: Synthetic oligonucleotide
uuccuaguucccaaaagua

SEQ ID NO: 1794206 - RNA, 19 nt, Artificial Sequence
  Description of Artificial Sequence: Synthetic oligonucleotide
uggcugucuuuccagguag

SEQ ID NO: 1794207 - RNA, 19 nt, Artificial Sequence
  Description of Artificial Sequence: Synthetic oligonucleotide
ggcuaauaguacaaaauag

SEQ ID NO: 1794208 - RNA, 19 nt, Artificial Sequence
  Description of Artificial Sequence: Synthetic oligonucleotide
ugggauuuagggacagccc

SEQ ID NO: 1794209 - RNA, 19 nt, Artificial Sequence
  Description of Artificial Sequence: Synthetic oligonucleotide
agaacagagcaucgucuuc

SEQ ID NO: 1794210 - RNA, 19 nt, Artificial Sequence
  Description of Artificial Sequence: Synthetic oligonucleotide
aaguuauaaucugucaaua

SEQ ID NO: 1794211 - RNA, 19 nt, Artificial Sequence
  Description of Artificial Sequence: Synthetic oligonucleotide
gucaauaagaauuuaccau

SEQ ID NO: 1794212 - RNA, 19 nt, Artificial Sequence
  Description of Artificial Sequence: Synthetic oligonucleotide
ggucaaauguugcuagagg

SEQ ID NO: 1794213 - RNA, 19 nt, Artificial Sequence
  Description of Artificial Sequence: Synthetic oligonucleotide
aagagaaaugaugaaugua

SEQ ID NO: 1794214 - RNA, 19 nt, Artificial Sequence
  Description of Artificial Sequence: Synthetic oligonucleotide
aagcuaauuggcagguauc

SEQ ID NO: 1794215 - RNA, 19 nt, Artificial Sequence
  Description of Artificial Sequence: Synthetic oligonucleotide
cugugcuuacacuggagag

SEQ ID NO: 1794216 - RNA, 19 nt, Artificial Sequence
  Description of Artificial Sequence: Synthetic oligonucleotide
auaguacaaaauaggacca

SEQ ID NO: 1794217 - RNA, 19 nt, Artificial Sequence
  Description of Artificial Sequence: Synthetic oligonucleotide
cugugaaaaccacaggcuc

SEQ ID NO: 1794218 - RNA, 19 nt, Artificial Sequence
  Description of Artificial Sequence: Synthetic oligonucleotide
gagaagggugguugguccg

SEQ ID NO: 1794219 - RNA, 19 nt, Artificial Sequence
  Description of Artificial Sequence: Synthetic oligonucleotide
aggacuaucaacugcucua

SEQ ID NO: 1794220 - RNA, 19 nt, Artificial Sequence
  Description of Artificial Sequence: Synthetic oligonucleotide
uccccuguuccuaauggga

SEQ ID NO: 1794221 - RNA, 19 nt, Artificial Sequence
  Description of Artificial Sequence: Synthetic oligonucleotide
uggaaggauaagugggaug

SEQ ID NO: 1794222 - RNA, 19 nt, Artificial Sequence
  Description of Artificial Sequence: Synthetic oligonucleotide
accaguuguccagaaaauc

SEQ ID NO: 1794223 - RNA, 19 nt, Artificial Sequence
  Description of Artificial Sequence: Synthetic oligonucleotide
augccggaggaagagaagg

SEQ ID NO: 1794224 - RNA, 19 nt, Artificial Sequence
  Description of Artificial Sequence: Synthetic oligonucleotide
gcuaaguacagcuuuggca

SEQ ID NO: 1794225 - RNA, 19 nt, Artificial Sequence
  Description of Artificial Sequence: Synthetic oligonucleotide
uuuaccaguuguccagaaa

SEQ ID NO: 1794226 - RNA, 19 nt, Artificial Sequence
  Description of Artificial Sequence: Synthetic oligonucleotide
cccaaaaguacuaagaaaa

SEQ ID NO: 1794227 - RNA, 19 nt, Artificial Sequence
  Description of Artificial Sequence: Synthetic oligonucleotide
ugugugguggaguccaaaa

SEQ ID NO: 1794228 - RNA, 19 nt, Artificial Sequence
  Description of Artificial Sequence: Synthetic oligonucleotide
caaauacagccaccaagag

SEQ ID NO: 1794229 - RNA, 19 nt, Artificial Sequence
  Description of Artificial Sequence: Synthetic oligonucleotide
cacuguuuaccaguugucc

SEQ ID NO: 1794230 - RNA, 19 nt, Artificial Sequence
  Description of Artificial Sequence: Synthetic oligonucleotide
uguacuucaucaggaugcc

SEQ ID NO: 1794231 - RNA, 19 nt, Artificial Sequence
  Description of Artificial Sequence: Synthetic oligonucleotide
gcaugagggacacaccugg

SEQ ID NO: 1794232 - RNA, 19 nt, Artificial Sequence
  Description of Artificial Sequence: Synthetic oligonucleotide
gccaccaagagcaagacac

SEQ ID NO: 1794233 - RNA, 19 nt, Artificial Sequence
  Description of Artificial Sequence: Synthetic oligonucleotide
aacccuggcaauauuuccu

SEQ ID NO: 1794234 - RNA, 19 nt, Artificial Sequence
  Description of Artificial Sequence: Synthetic oligonucleotide
acuugagcugaucugugaa

SEQ ID NO: 1794235 - RNA, 19 nt, Artificial Sequence
  Description of Artificial Sequence: Synthetic oligonucleotide
agcuuuugucaaauacagc

SEQ ID NO: 1794236 - RNA, 19 nt, Artificial Sequence
  Description of Artificial Sequence: Synthetic oligonucleotide
caaacccaagggaccaagg

SEQ ID NO: 1794237 - RNA, 19 nt, Artificial Sequence
  Description of Artificial Sequence: Synthetic oligonucleotide
gaaaaucaaagccccgucu

SEQ ID NO: 1794238 - RNA, 19 nt, Artificial Sequence
  Description of Artificial Sequence: Synthetic oligonucleotide
aaguacagcuuuggcaugu

SEQ ID NO: 1794239 - RNA, 19 nt, Artificial Sequence
  Description of Artificial Sequence: Synthetic oligonucleotide
uaucaaaggagaggguggu

SEQ ID NO: 1794240 - RNA, 19 nt, Artificial Sequence
  Description of Artificial Sequence: Synthetic oligonucleotide
cuagaggaaggcaaaucca

SEQ ID NO: 1794241 - RNA, 19 nt, Artificial Sequence
  Description of Artificial Sequence: Synthetic oligonucleotide
guucccaaaaguacuaaga

SEQ ID NO: 1794242 - RNA, 19 nt, Artificial Sequence
  Description of Artificial Sequence: Synthetic oligonucleotide
ggugguugguccgagaacc

SEQ ID NO: 1794243 - RNA, 19 nt, Artificial Sequence
  Description of Artificial Sequence: Synthetic oligonucleotide
agcuaauuggcagguauca

SEQ ID NO: 1794244 - RNA, 19 nt, Artificial Sequence
  Description of Artificial Sequence: Synthetic oligonucleotide
gagaaggugguaaacaccu

SEQ ID NO: 1794245 - RNA, 19 nt, Artificial Sequence
  Description of Artificial Sequence: Synthetic oligonucleotide
uaaguacagcuuuggcaug

SEQ ID NO: 1794246 - RNA, 19 nt, Artificial Sequence
  Description of Artificial Sequence: Synthetic oligonucleotide
ggaaaauacauaggcggag

SEQ ID NO: 1794247 - RNA, 19 nt, Artificial Sequence
  Description of Artificial Sequence: Synthetic oligonucleotide
uacuugagcugaucuguga

SEQ ID NO: 1794248 - RNA, 19 nt, Artificial Sequence
  Description of Artificial Sequence: Synthetic oligonucleotide
acaggcucugagaacagag

SEQ ID NO: 1794249 - RNA, 19 nt, Artificial Sequence
  Description of Artificial Sequence: Synthetic oligonucleotide
acacaccuggccaggaggc

SEQ ID NO: 1794250 - RNA, 19 nt, Artificial Sequence
  Description of Artificial Sequence: Synthetic oligonucleotide
uguuccuaaugggagcaca

SEQ ID NO: 1794251 - RNA, 19 nt, Artificial Sequence
  Description of Artificial Sequence: Synthetic oligonucleotide
ugagcugaucugugaaaac

SEQ ID NO: 1794252 - RNA, 19 nt, Artificial Sequence
  Description of Artificial Sequence: Synthetic oligonucleotide
agccaaagaauguacugua

SEQ ID NO: 1794253 - RNA, 19 nt, Artificial Sequence
  Description of Artificial Sequence: Synthetic oligonucleotide
uggaaagaugacuggucaa

SEQ ID NO: 1794254 - RNA, 19 nt, Artificial Sequence
  Description of Artificial Sequence: Synthetic oligonucleotide
gauaagugggauggagcug

SEQ ID NO: 1794255 - RNA, 19 nt, Artificial Sequence
  Description of Artificial Sequence: Synthetic oligonucleotide
uuuaggacauaagcuaauu

SEQ ID NO: 1794256 - RNA, 19 nt, Artificial Sequence
  Description of Artificial Sequence: Synthetic oligonucleotide
uucuggcccuagcaugagg

SEQ ID NO: 1794257 - RNA, 19 nt, Artificial Sequence
  Description of Artificial Sequence: Synthetic oligonucleotide
gaccaaguuauaaucuguc

SEQ ID NO: 1794258 - RNA, 19 nt, Artificial Sequence
  Description of Artificial Sequence: Synthetic oligonucleotide
acaucaauauuggcuaagu

SEQ ID NO: 1794259 - RNA, 19 nt, Artificial Sequence
  Description of Artificial Sequence: Synthetic oligonucleotide
aggaaaauacauaggcgga

SEQ ID NO: 1794260 - RNA, 19 nt, Artificial Sequence
  Description of Artificial Sequence: Synthetic oligonucleotide
ugggauggagcugggaaca

SEQ ID NO: 1794261 - RNA, 19 nt, Artificial Sequence
  Description of Artificial Sequence: Synthetic oligonucleotide
cuagcaugagggacacacc

SEQ ID NO: 1794262 - RNA, 19 nt, Artificial Sequence
  Description of Artificial Sequence: Synthetic oligonucleotide
ggcauguuuuccuagggga

SEQ ID NO: 1794263 - RNA, 19 nt, Artificial Sequence
  Description of Artificial Sequence: Synthetic oligonucleotide
uaccaguuguccagaaaau

SEQ ID NO: 1794264 - RNA, 19 nt, Artificial Sequence
  Description of Artificial Sequence: Synthetic oligonucleotide
uauuggcuaaguacagcuu

SEQ ID NO: 1794265 - RNA, 19 nt, Artificial Sequence
  Description of Artificial Sequence: Synthetic oligonucleotide
auggcuuuauuaaaggcua

SEQ ID NO: 1794266 - RNA, 19 nt, Artificial Sequence
  Description of Artificial Sequence: Synthetic oligonucleotide
auauuuccuaguucccaaa

SEQ ID NO: 1794267 - RNA, 19 nt, Artificial Sequence
  Description of Artificial Sequence: Synthetic oligonucleotide
caaaggagaggguggugug

SEQ ID NO: 1794268 - RNA, 19 nt, Artificial Sequence
  Description of Artificial Sequence: Synthetic oligonucleotide
ccgagaaccuucuuggaag

SEQ ID NO: 1794269 - RNA, 19 nt, Artificial Sequence
  Description of Artificial Sequence: Synthetic oligonucleotide
gaggccgcuccccuguucc

SEQ ID NO: 1794270 - RNA, 19 nt, Artificial Sequence
  Description of Artificial Sequence: Synthetic oligonucleotide
cacuggagaggguuuguug

SEQ ID NO: 1794271 - RNA, 19 nt, Artificial Sequence
  Description of Artificial Sequence: Synthetic oligonucleotide
uguuuaccaguuguccaga

SEQ ID NO: 1794272 - RNA, 19 nt, Artificial Sequence
  Description of Artificial Sequence: Synthetic oligonucleotide
gggauuuagggacagccca

SEQ ID NO: 1794273 - RNA, 19 nt, Artificial Sequence
  Description of Artificial Sequence: Synthetic oligonucleotide
guuacuugagcugaucugu

SEQ ID NO: 1794274 - RNA, 19 nt, Artificial Sequence
  Description of Artificial Sequence: Synthetic oligonucleotide
aggcgaugacuucucuggg

SEQ ID NO: 1794275 - RNA, 19 nt, Artificial Sequence
  Description of Artificial Sequence: Synthetic oligonucleotide
guagcaagcggccaugacu

SEQ ID NO: 1794276 - RNA, 19 nt, Artificial Sequence
  Description of Artificial Sequence: Synthetic oligonucleotide
aggguguuacuugagcuga

SEQ ID NO: 1794277 - RNA, 19 nt, Artificial Sequence
  Description of Artificial Sequence: Synthetic oligonucleotide
caaguuauaaucugucaau

SEQ ID NO: 1794278 - RNA, 19 nt, Artificial Sequence
  Description of Artificial Sequence: Synthetic oligonucleotide
ggaacagaaguuuuauuua

SEQ ID NO: 1794279 - RNA, 19 nt, Artificial Sequence
  Description of Artificial Sequence: Synthetic oligonucleotide
gcagguaucacaucaauau

SEQ ID NO: 1794280 - RNA, 19 nt, Artificial Sequence
  Description of Artificial Sequence: Synthetic oligonucleotide
auacauaggcggagcugcc

SEQ ID NO: 1794281 - RNA, 19 nt, Artificial Sequence
  Description of Artificial Sequence: Synthetic oligonucleotide
caccaagagcaagacacag

SEQ ID NO: 1794282 - RNA, 19 nt, Artificial Sequence
  Description of Artificial Sequence: Synthetic oligonucleotide
agaaccuucuuggaaggau

SEQ ID NO: 1794283 - RNA, 19 nt, Artificial Sequence
  Description of Artificial Sequence: Synthetic oligonucleotide
ggcgaugacuucucugggg

SEQ ID NO: 1794284 - RNA, 19 nt, Artificial Sequence
  Description of Artificial Sequence: Synthetic oligonucleotide
uccuaggggagagaagggu

SEQ ID NO: 1794285 - RNA, 19 nt, Artificial Sequence
  Description of Artificial Sequence: Synthetic oligonucleotide
ccaguuguccagaaaauca

SEQ ID NO: 1794286 - RNA, 19 nt, Artificial Sequence
  Description of Artificial Sequence: Synthetic oligonucleotide
cuggcgguagcaagcggcc

SEQ ID NO: 1794287 - RNA, 19 nt, Artificial Sequence
  Description of Artificial Sequence: Synthetic oligonucleotide
gaauguacuguaagagaaa

SEQ ID NO: 1794288 - RNA, 19 nt, Artificial Sequence
  Description of Artificial Sequence: Synthetic oligonucleotide
uccauugggguggccuugg

SEQ ID NO: 1794289 - RNA, 19 nt, Artificial Sequence
  Description of Artificial Sequence: Synthetic oligonucleotide
uggcuuuauuaaaggcuaa

SEQ ID NO: 1794290 - RNA, 19 nt, Artificial Sequence
  Description of Artificial Sequence: Synthetic oligonucleotide
ugcuagaggaaggcaaauc

SEQ ID NO: 1794291 - RNA, 19 nt, Artificial Sequence
  Description of Artificial Sequence: Synthetic oligonucleotide
ugaccuccuugucuuuugu

SEQ ID NO: 1794292 - RNA, 19 nt, Artificial Sequence
  Description of Artificial Sequence: Synthetic oligonucleotide
uugagggccugggauuuag

SEQ ID NO: 1794293 - RNA, 19 nt, Artificial Sequence
  Description of Artificial Sequence: Synthetic oligonucleotide
aacugcucuacaacauuau

SEQ ID NO: 1794294 - RNA, 19 nt, Artificial Sequence
  Description of Artificial Sequence: Synthetic oligonucleotide
caaaaucauacacaggcuu

SEQ ID NO: 1794295 - RNA, 19 nt, Artificial Sequence
  Description of Artificial Sequence: Synthetic oligonucleotide
gggaacagaaguuuuauuu

SEQ ID NO: 1794296 - RNA, 19 nt, Artificial Sequence
  Description of Artificial Sequence: Synthetic oligonucleotide
uacgaaacccuggcaauau

SEQ ID NO: 1794297 - RNA, 19 nt, Artificial Sequence
  Description of Artificial Sequence: Synthetic oligonucleotide
cuaaugggagcacauccaa

SEQ ID NO: 1794298 - RNA, 19 nt, Artificial Sequence
  Description of Artificial Sequence: Synthetic oligonucleotide
uuacgaaacccuggcaaua

SEQ ID NO: 1794299 - RNA, 19 nt, Artificial Sequence
  Description of Artificial Sequence: Synthetic oligonucleotide
ugguggaguccaaaaucau

SEQ ID NO: 1794300 - RNA, 19 nt, Artificial Sequence
  Description of Artificial Sequence: Synthetic oligonucleotide
auccaaacccaagggacca

SEQ ID NO: 1794301 - RNA, 19 nt, Artificial Sequence
  Description of Artificial Sequence: Synthetic oligonucleotide
gaugccggaggaagagaag

SEQ ID NO: 1794302 - RNA, 19 nt, Artificial Sequence
  Description of Artificial Sequence: Synthetic oligonucleotide
gcuccccuguuccuaaugg

SEQ ID NO: 1794303 - RNA, 19 nt, Artificial Sequence
  Description of Artificial Sequence: Synthetic oligonucleotide
ggauaagugggauggagcu

SEQ ID NO: 1794304 - RNA, 19 nt, Artificial Sequence
  Description of Artificial Sequence: Synthetic oligonucleotide
gugcaaggacuaucaacug

SEQ ID NO: 1794305 - RNA, 19 nt, Artificial Sequence
  Description of Artificial Sequence: Synthetic oligonucleotide
auguacuguaagagaaaug

SEQ ID NO: 1794306 - RNA, 19 nt, Artificial Sequence
  Description of Artificial Sequence: Synthetic oligonucleotide
ugggaacagaaguuuuauu

SEQ ID NO: 1794307 - RNA, 19 nt, Artificial Sequence
  Description of Artificial Sequence: Synthetic oligonucleotide
acuucuggcccuagcauga

SEQ ID NO: 1794308 - RNA, 19 nt, Artificial Sequence
  Description of Artificial Sequence: Synthetic oligonucleotide
aaaauaggaccaaguuaua

SEQ ID NO: 1794309 - RNA, 19 nt, Artificial Sequence
  Description of Artificial Sequence: Synthetic oligonucleotide
guguuacuugagcugaucu

SEQ ID NO: 1794310 - RNA, 19 nt, Artificial Sequence
  Description of Artificial Sequence: Synthetic oligonucleotide
caacugcucuacaacauua

SEQ ID NO: 1794311 - RNA, 19 nt, Artificial Sequence
  Description of Artificial Sequence: Synthetic oligonucleotide
cuugagcugaucugugaaa

SEQ ID NO: 1794312 - RNA, 19 nt, Artificial Sequence
  Description of Artificial Sequence: Synthetic oligonucleotide
uccuggcgguagcaagcgg

SEQ ID NO: 1794313 - RNA, 19 nt, Artificial Sequence
  Description of Artificial Sequence: Synthetic oligonucleotide
aucaacugcucuacaacau

SEQ ID NO: 1794314 - RNA, 19 nt, Artificial Sequence
  Description of Artificial Sequence: Synthetic oligonucleotide
caaggacuaucaacugcuc

SEQ ID NO: 1794315 - RNA, 19 nt, Artificial Sequence
  Description of Artificial Sequence: Synthetic oligonucleotide
acauaggcggagcugccuu

SEQ ID NO: 1794316 - RNA, 19 nt, Artificial Sequence
  Description of Artificial Sequence: Synthetic oligonucleotide
ggacauaagcuaauuggca

SEQ ID NO: 1794317 - RNA, 19 nt, Artificial Sequence
  Description of Artificial Sequence: Synthetic oligonucleotide
ggcuaaguacagcuuuggc

SEQ ID NO: 1794318 - RNA, 19 nt, Artificial Sequence
  Description of Artificial Sequence: Synthetic oligonucleotide
gguagcacuguuuaccagu

SEQ ID NO: 1794319 - RNA, 19 nt, Artificial Sequence
  Description of Artificial Sequence: Synthetic oligonucleotide
ccuggcgguagcaagcggc

SEQ ID NO: 1794320 - RNA, 19 nt, Artificial Sequence
  Description of Artificial Sequence: Synthetic oligonucleotide
uggcccuagcaugagggac

SEQ ID NO: 1794321 - RNA, 19 nt, Artificial Sequence
  Description of Artificial Sequence: Synthetic oligonucleotide
ucuugggguauagccuuga

SEQ ID NO: 1794322 - RNA, 19 nt, Artificial Sequence
  Description of Artificial Sequence: Synthetic oligonucleotide
ccuaggggagagaagggug

SEQ ID NO: 1794323 - RNA, 19 nt, Artificial Sequence
  Description of Artificial Sequence: Synthetic oligonucleotide
gaaccuucuuggaaggaua

SEQ ID NO: 1794324 - RNA, 19 nt, Artificial Sequence
  Description of Artificial Sequence: Synthetic oligonucleotide
uacauaggcggagcugccu

SEQ ID NO: 1794325 - RNA, 19 nt, Artificial Sequence
  Description of Artificial Sequence: Synthetic oligonucleotide
uuccuaaugggagcacauc

SEQ ID NO: 1794326 - RNA, 19 nt, Artificial Sequence
  Description of Artificial Sequence: Synthetic oligonucleotide
cuucaucaggaugccggag

SEQ ID NO: 1794327 - RNA, 19 nt, Artificial Sequence
  Description of Artificial Sequence: Synthetic oligonucleotide
ggaggcgaugacuucucug

SEQ ID NO: 1794328 - RNA, 19 nt, Artificial Sequence
  Description of Artificial Sequence: Synthetic oligonucleotide
gguuuaggacauaagcuaa

SEQ ID NO: 1794329 - RNA, 19 nt, Artificial Sequence
  Description of Artificial Sequence: Synthetic oligonucleotide
cuugggguauagccuugac

SEQ ID NO: 1794330 - RNA, 19 nt, Artificial Sequence
  Description of Artificial Sequence: Synthetic oligonucleotide
gaagggugguugguccgag

SEQ ID NO: 1794331 - RNA, 19 nt, Artificial Sequence
  Description of Artificial Sequence: Synthetic oligonucleotide
caucaauauuggcuaagua

SEQ ID NO: 1794332 - RNA, 19 nt, Artificial Sequence
  Description of Artificial Sequence: Synthetic oligonucleotide
agggagguuuaggacauaa

SEQ ID NO: 1794333 - RNA, 19 nt, Artificial Sequence
  Description of Artificial Sequence: Synthetic oligonucleotide
acccuggcaauauuuccua

SEQ ID NO: 1794334 - RNA, 19 nt, Artificial Sequence
  Description of Artificial Sequence: Synthetic oligonucleotide
gucuugguuccugagagcu

SEQ ID NO: 1794335 - RNA, 19 nt, Artificial Sequence
  Description of Artificial Sequence: Synthetic oligonucleotide
aggggcuugcacaggcugg

SEQ ID NO: 1794336 - RNA, 19 nt, Artificial Sequence
  Description of Artificial Sequence: Synthetic oligonucleotide
agaugacuggucaaauguu

SEQ ID NO: 1794337 - RNA, 19 nt, Artificial Sequence
  Description of Artificial Sequence: Synthetic oligonucleotide
cauaggcggagcugccuuc

SEQ ID NO: 1794338 - RNA, 19 nt, Artificial Sequence
  Description of Artificial Sequence: Synthetic oligonucleotide
gacccugcccaggugcaag

SEQ ID NO: 1794339 - RNA, 19 nt, Artificial Sequence
  Description of Artificial Sequence: Synthetic oligonucleotide
guucuugggguauagccuu

SEQ ID NO: 1794340 - RNA, 19 nt, Artificial Sequence
  Description of Artificial Sequence: Synthetic oligonucleotide
ugaaaaccacaggcucuga

SEQ ID NO: 1794341 - RNA, 19 nt, Artificial Sequence
  Description of Artificial Sequence: Synthetic oligonucleotide
ggacuaucaacugcucuac

SEQ ID NO: 1794342 - RNA, 19 nt, Artificial Sequence
  Description of Artificial Sequence: Synthetic oligonucleotide
gaugggcuccuggcgguag

SEQ ID NO: 1794343 - RNA, 19 nt, Artificial Sequence
  Description of Artificial Sequence: Synthetic oligonucleotide
gaaggauaagugggaugga

SEQ ID NO: 1794344 - RNA, 19 nt, Artificial Sequence
  Description of Artificial Sequence: Synthetic oligonucleotide
cgagaaccuucuuggaagg

SEQ ID NO: 1794345 - RNA, 19 nt, Artificial Sequence
  Description of Artificial Sequence: Synthetic oligonucleotide
uugcuagaggaaggcaaau

SEQ ID NO: 1794346 - RNA, 19 nt, Artificial Sequence
  Description of Artificial Sequence: Synthetic oligonucleotide
cauaagcuaauuggcaggu

SEQ ID NO: 1794347 - RNA, 19 nt, Artificial Sequence
  Description of Artificial Sequence: Synthetic oligonucleotide
cagaaaaucaaagccccgu

SEQ ID NO: 1794348 - RNA, 19 nt, Artificial Sequence
  Description of Artificial Sequence: Synthetic oligonucleotide
ccuaaugggagcacaucca

SEQ ID NO: 1794349 - RNA, 19 nt, Artificial Sequence
  Description of Artificial Sequence: Synthetic oligonucleotide
uaggggagagaaggguggu

SEQ ID NO: 1794350 - RNA, 19 nt, Artificial Sequence
  Description of Artificial Sequence: Synthetic oligonucleotide
ccuaguucccaaaaguacu

SEQ ID NO: 1794351 - RNA, 19 nt, Artificial Sequence
  Description of Artificial Sequence: Synthetic oligonucleotide
auaggcggagcugccuucu

SEQ ID NO: 1794352 - RNA, 19 nt, Artificial Sequence
  Description of Artificial Sequence: Synthetic oligonucleotide
gacuccauugggguggccu

SEQ ID NO: 1794353 - RNA, 19 nt, Artificial Sequence
  Description of Artificial Sequence: Synthetic oligonucleotide
auguaucaaaggagagggu

SEQ ID NO: 1794354 - RNA, 19 nt, Artificial Sequence
  Description of Artificial Sequence: Synthetic oligonucleotide
gagaccaagaagccagcuu

SEQ ID NO: 1794355 - RNA, 19 nt, Artificial Sequence
  Description of Artificial Sequence: Synthetic oligonucleotide
gcaaggacuaucaacugcu

SEQ ID NO: 1794356 - RNA, 19 nt, Artificial Sequence
  Description of Artificial Sequence: Synthetic oligonucleotide
gagaaccuucuuggaagga

SEQ ID NO: 1794357 - RNA, 19 nt, Artificial Sequence
  Description of Artificial Sequence: Synthetic oligonucleotide
acgaaacccuggcaauauu

SEQ ID NO: 1794358 - RNA, 19 nt, Artificial Sequence
  Description of Artificial Sequence: Synthetic oligonucleotide
gcuaauuggcagguaucac

SEQ ID NO: 1794359 - RNA, 19 nt, Artificial Sequence
  Description of Artificial Sequence: Synthetic oligonucleotide
cagccaaagaauguacugu

SEQ ID NO: 1794360 - RNA, 19 nt, Artificial Sequence
  Description of Artificial Sequence: Synthetic oligonucleotide
ggggcuugcacaggcuggg

SEQ ID NO: 1794361 - RNA, 19 nt, Artificial Sequence
  Description of Artificial Sequence: Synthetic oligonucleotide
cuggggacuccauuggggu

SEQ ID NO: 1794362 - RNA, 19 nt, Artificial Sequence
  Description of Artificial Sequence: Synthetic oligonucleotide
auaagcuaauuggcaggua

SEQ ID NO: 1794363 - RNA, 19 nt, Artificial Sequence
  Description of Artificial Sequence: Synthetic oligonucleotide
uuguuguucuugggguaua

SEQ ID NO: 1794364 - RNA, 19 nt, Artificial Sequence
  Description of Artificial Sequence: Synthetic oligonucleotide
gguagcaagcggccaugac

SEQ ID NO: 1794365 - RNA, 19 nt, Artificial Sequence
  Description of Artificial Sequence: Synthetic oligonucleotide
gcucuacaacauuauggaa

SEQ ID NO: 1794366 - RNA, 19 nt, Artificial Sequence
  Description of Artificial Sequence: Synthetic oligonucleotide
ugguugguccgagaaccuu

SEQ ID NO: 1794367 - RNA, 19 nt, Artificial Sequence
  Description of Artificial Sequence: Synthetic oligonucleotide
cuucuggcccuagcaugag

SEQ ID NO: 1794368 - RNA, 19 nt, Artificial Sequence
  Description of Artificial Sequence: Synthetic oligonucleotide
aggaugccggaggaagaga

SEQ ID NO: 1794369 - RNA, 19 nt, Artificial Sequence
  Description of Artificial Sequence: Synthetic oligonucleotide
guuuaggacauaagcuaau

SEQ ID NO: 1794370 - RNA, 19 nt, Artificial Sequence
  Description of Artificial Sequence: Synthetic oligonucleotide
gguggaguccaaaaucaua

SEQ ID NO: 1794371 - RNA, 19 nt, Artificial Sequence
  Description of Artificial Sequence: Synthetic oligonucleotide
cuccauugggguggccuug

SEQ ID NO: 1794372 - RNA, 19 nt, Artificial Sequence
  Description of Artificial Sequence: Synthetic oligonucleotide
gguguuacuugagcugauc

SEQ ID NO: 1794373 - RNA, 19 nt, Artificial Sequence
  Description of Artificial Sequence: Synthetic oligonucleotide
cuucaagaggguguuacuu

SEQ ID NO: 1794374 - RNA, 19 nt, Artificial Sequence
  Description of Artificial Sequence: Synthetic oligonucleotide
ggaugccggaggaagagaa

SEQ ID NO: 1794375 - RNA, 19 nt, Artificial Sequence
  Description of Artificial Sequence: Synthetic oligonucleotide
cuguuccuaaugggagcac

SEQ ID NO: 1794376 - RNA, 19 nt, Artificial Sequence
  Description of Artificial Sequence: Synthetic oligonucleotide
ccaaacccaagggaccaag

SEQ ID NO: 1794377 - RNA, 19 nt, Artificial Sequence
  Description of Artificial Sequence: Synthetic oligonucleotide
cuacaacauuauggaaaga

SEQ ID NO: 1794378 - RNA, 19 nt, Artificial Sequence
  Description of Artificial Sequence: Synthetic oligonucleotide
cuggcccuagcaugaggga

SEQ ID NO: 1794379 - RNA, 19 nt, Artificial Sequence
  Description of Artificial Sequence: Synthetic oligonucleotide
acacuggagaggguuuguu

SEQ ID NO: 1794380 - RNA, 19 nt, Artificial Sequence
  Description of Artificial Sequence: Synthetic oligonucleotide
uggcgguagcaagcggcca

SEQ ID NO: 1794381 - RNA, 19 nt, Artificial Sequence
  Description of Artificial Sequence: Synthetic oligonucleotide
gaaggccacuucuggcccu

SEQ ID NO: 1794382 - RNA, 19 nt, Artificial Sequence
  Description of Artificial Sequence: Synthetic oligonucleotide
guugguccgagaaccuucu

SEQ ID NO: 1794383 - RNA, 19 nt, Artificial Sequence
  Description of Artificial Sequence: Synthetic oligonucleotide
ggaccaaguuauaaucugu

SEQ ID NO: 1794384 - RNA, 19 nt, Artificial Sequence
  Description of Artificial Sequence: Synthetic oligonucleotide
ggauuuagggacagcccaa

SEQ ID NO: 1794385 - RNA, 19 nt, Artificial Sequence
  Description of Artificial Sequence: Synthetic oligonucleotide
uugguccgagaaccuucuu

SEQ ID NO: 1794386 - RNA, 19 nt, Artificial Sequence
  Description of Artificial Sequence: Synthetic oligonucleotide
cccuggcaauauuuccuag

SEQ ID NO: 1794387 - RNA, 19 nt, Artificial Sequence
  Description of Artificial Sequence: Synthetic oligonucleotide
ggcagguaucacaucaaua

SEQ ID NO: 1794388 - RNA, 19 nt, Artificial Sequence
  Description of Artificial Sequence: Synthetic oligonucleotide
ggcccuagcaugagggaca

SEQ ID NO: 1794389 - RNA, 19 nt, Artificial Sequence
  Description of Artificial Sequence: Synthetic oligonucleotide
aguacagcuuuggcauguu

SEQ ID NO: 1794390 - RNA, 19 nt, Artificial Sequence
  Description of Artificial Sequence: Synthetic oligonucleotide
gcacuguuuaccaguuguc

SEQ ID NO: 1794391 - RNA, 19 nt, Artificial Sequence
  Description of Artificial Sequence: Synthetic oligonucleotide
caagggaccaagggacaaa

SEQ ID NO: 1794392 - RNA, 19 nt, Artificial Sequence
  Description of Artificial Sequence: Synthetic oligonucleotide
agcaagcggccaugacuuu

SEQ ID NO: 1794393 - RNA, 19 nt, Artificial Sequence
  Description of Artificial Sequence: Synthetic oligonucleotide
ggcugucuuuccagguagc

SEQ ID NO: 1794394 - RNA, 19 nt, Artificial Sequence
  Description of Artificial Sequence: Synthetic oligonucleotide
ccuggcaauauuuccuagu

SEQ ID NO: 1794395 - RNA, 19 nt, Artificial Sequence
  Description of Artificial Sequence: Synthetic oligonucleotide
ccaccaagagcaagacaca

SEQ ID NO: 1794396 - RNA, 19 nt, Artificial Sequence
  Description of Artificial Sequence: Synthetic oligonucleotide
ggccacuucuggcccuagc

SEQ ID NO: 1794397 - RNA, 19 nt, Artificial Sequence
  Description of Artificial Sequence: Synthetic oligonucleotide
caggugcaaggacuaucaa

SEQ ID NO: 1794398 - RNA, 19 nt, Artificial Sequence
  Description of Artificial Sequence: Synthetic oligonucleotide
gcuuacacuggagaggguu

SEQ ID NO: 1794399 - RNA, 19 nt, Artificial Sequence
  Description of Artificial Sequence: Synthetic oligonucleotide
aagggagguuuaggacaua

SEQ ID NO: 1794400 - RNA, 19 nt, Artificial Sequence
  Description of Artificial Sequence: Synthetic oligonucleotide
aggccgcuccccuguuccu

SEQ ID NO: 1794401 - RNA, 19 nt, Artificial Sequence
  Description of Artificial Sequence: Synthetic oligonucleotide
gggacagcccaaacaggca

SEQ ID NO: 1794402 - RNA, 19 nt, Artificial Sequence
  Description of Artificial Sequence: Synthetic oligonucleotide
gugugugguggaguccaaa

SEQ ID NO: 1794403 - RNA, 19 nt, Artificial Sequence
  Description of Artificial Sequence: Synthetic oligonucleotide
ggcuuuauuaaaggcuaau

SEQ ID NO: 1794404 - RNA, 19 nt, Artificial Sequence
  Description of Artificial Sequence: Synthetic oligonucleotide
cccaggugcaaggacuauc

SEQ ID NO: 1794405 - RNA, 19 nt, Artificial Sequence
  Description of Artificial Sequence: Synthetic oligonucleotide
gccaaucuccugggcacug

SEQ ID NO: 1794406 - RNA, 19 nt, Artificial Sequence
  Description of Artificial Sequence: Synthetic oligonucleotide
cgaugacuucucuggggac

SEQ ID NO: 1794407 - RNA, 19 nt, Artificial Sequence
  Description of Artificial Sequence: Synthetic oligonucleotide
ccugagagcuuuugucaaa

SEQ ID NO: 1794408 - RNA, 19 nt, Artificial Sequence
  Description of Artificial Sequence: Synthetic oligonucleotide
aggcacagucuugguuccu

SEQ ID NO: 1794409 - RNA, 19 nt, Artificial Sequence
  Description of Artificial Sequence: Synthetic oligonucleotide
gggcaccucuugcucugug

SEQ ID NO: 1794410 - RNA, 19 nt, Artificial Sequence
  Description of Artificial Sequence: Synthetic oligonucleotide
cagcgggaggcgaugacuu

SEQ ID NO: 1794411 - RNA, 19 nt, Artificial Sequence
  Description of Artificial Sequence: Synthetic oligonucleotide
gggagcacauccaagccuu

SEQ ID NO: 1794412 - RNA, 19 nt, Artificial Sequence
  Description of Artificial Sequence: Synthetic oligonucleotide
caucaggaugccggaggaa

SEQ ID NO: 1794413 - RNA, 19 nt, Artificial Sequence
  Description of Artificial Sequence: Synthetic oligonucleotide
cccgucuucaagagggugu

SEQ ID NO: 1794414 - RNA, 19 nt, Artificial Sequence
  Description of Artificial Sequence: Synthetic oligonucleotide
gggcuugcacaggcugggg

SEQ ID NO: 1794415 - RNA, 19 nt, Artificial Sequence
  Description of Artificial Sequence: Synthetic oligonucleotide
gcgguagcaagcggccaug

SEQ ID NO: 1794416 - RNA, 19 nt, Artificial Sequence
  Description of Artificial Sequence: Synthetic oligonucleotide
cccaagggaccaagggaca

SEQ ID NO: 1794417 - RNA, 19 nt, Artificial Sequence
  Description of Artificial Sequence: Synthetic oligonucleotide
gguauagccuugaccuccu

SEQ ID NO: 1794418 - RNA, 19 nt, Artificial Sequence
  Description of Artificial Sequence: Synthetic oligonucleotide
caggaggccgcuccccugu

SEQ ID NO: 1794419 - RNA, 19 nt, Artificial Sequence
  Description of Artificial Sequence: Synthetic oligonucleotide
gcaagcuggcaggggcuug

SEQ ID NO: 1794420 - RNA, 19 nt, Artificial Sequence
  Description of Artificial Sequence: Synthetic oligonucleotide
gcccuagcaugagggacac

SEQ ID NO: 1794421 - RNA, 19 nt, Artificial Sequence
  Description of Artificial Sequence: Synthetic oligonucleotide
ggagaccaagaagccagcu

SEQ ID NO: 1794422 - RNA, 19 nt, Artificial Sequence
  Description of Artificial Sequence: Synthetic oligonucleotide
aggccacuucuggcccuag

SEQ ID NO: 1794423 - RNA, 19 nt, Artificial Sequence
  Description of Artificial Sequence: Synthetic oligonucleotide
ggcgguagcaagcggccau

SEQ ID NO: 1794424 - RNA, 19 nt, Artificial Sequence
  Description of Artificial Sequence: Synthetic oligonucleotide
ggaggccgcuccccuguuc

SEQ ID NO: 1794425 - RNA, 19 nt, Artificial Sequence
  Description of Artificial Sequence: Synthetic oligonucleotide
caagggacaaagggagguu

SEQ ID NO: 1794426 - RNA, 19 nt, Artificial Sequence
  Description of Artificial Sequence: Synthetic oligonucleotide
cgaaacccuggcaauauuu

SEQ ID NO: 1794427 - RNA, 19 nt, Artificial Sequence
  Description of Artificial Sequence: Synthetic oligonucleotide
gcggagcugccuucuccuc

SEQ ID NO: 1794428 - RNA, 19 nt, Artificial Sequence
  Description of Artificial Sequence: Synthetic oligonucleotide
gccgcuccccuguuccuaa

SEQ ID NO: 1794429 - RNA, 19 nt, Artificial Sequence
  Description of Artificial Sequence: Synthetic oligonucleotide
gcgggaggcgaugacuucu

SEQ ID NO: 1794430 - RNA, 19 nt, Artificial Sequence
  Description of Artificial Sequence: Synthetic oligonucleotide
cgggaggcgaugacuucuc

SEQ ID NO: 1794431 - RNA, 19 nt, Artificial Sequence
  Description of Artificial Sequence: Synthetic oligonucleotide
cgcuccccuguuccuaaug

SEQ ID NO: 1794432 - RNA, 19 nt, Artificial Sequence
  Description of Artificial Sequence: Synthetic oligonucleotide
gggaggcgaugacuucucu

SEQ ID NO: 1794433 - RNA, 19 nt, Artificial Sequence
  Description of Artificial Sequence: Synthetic oligonucleotide
gcaagcggccaugacuuuu

SEQ ID NO: 1794434 - RNA, 19 nt, Artificial Sequence
  Description of Artificial Sequence: Synthetic oligonucleotide
ggggcucuuggcugucuuu

SEQ ID NO: 1794435 - RNA, 19 nt, Artificial Sequence
  Description of Artificial Sequence: Synthetic oligonucleotide
gggcuccuggcgguagcaa

SEQ ID NO: 1794436 - RNA, 19 nt, Artificial Sequence
  Description of Artificial Sequence: Synthetic oligonucleotide
ggccgcuccccuguuccua

SEQ ID NO: 1794437 - RNA, 19 nt, Artificial Sequence
  Description of Artificial Sequence: Synthetic oligonucleotide
cagcccaaacaggcacagu

SEQ ID NO: 1794438 - RNA, 19 nt, Artificial Sequence
  Description of Artificial Sequence: Synthetic oligonucleotide
ccgucuucaagaggguguu

SEQ ID NO: 1794439 - RNA, 19 nt, Artificial Sequence
  Description of Artificial Sequence: Synthetic oligonucleotide
cgguagcaagcggccauga

SEQ ID NO: 1794440 - RNA, 19 nt, Artificial Sequence
  Description of Artificial Sequence: Synthetic oligonucleotide
ccagcuugguguggacccu

SEQ ID NO: 1794441 - RNA, 19 nt, Artificial Sequence
  Description of Artificial Sequence: Synthetic oligonucleotide
ggggcaccucuugcucugu

SEQ ID NO: 1794442 - RNA, 19 nt, Artificial Sequence
  Description of Artificial Sequence: Synthetic oligonucleotide
gccccgucuucaagagggu

SEQ ID NO: 1794443 - RNA, 19 nt, Artificial Sequence
  Description of Artificial Sequence: Synthetic oligonucleotide
cgucuucaagaggguguua

SEQ ID NO: 1794444 - RNA, 19 nt, Artificial Sequence
  Description of Artificial Sequence: Synthetic oligonucleotide
gcccaggugcaaggacuau

SEQ ID NO: 1794445 - RNA, 19 nt, Artificial Sequence
  Description of Artificial Sequence: Synthetic oligonucleotide
cccuagcaugagggacaca

SEQ ID NO: 1794446 - RNA, 19 nt, Artificial Sequence
  Description of Artificial Sequence: Synthetic oligonucleotide
ccgcuccccuguuccuaau

SEQ ID NO: 1794447 - RNA, 19 nt, Artificial Sequence
  Description of Artificial Sequence: Synthetic oligonucleotide
auacaaaagcuuuugagcc

SEQ ID NO: 1794448 - RNA, 19 nt, Artificial Sequence
  Description of Artificial Sequence: Synthetic oligonucleotide
agaucaaacaaacuugggc

SEQ ID NO: 1794449 - RNA, 19 nt, Artificial Sequence
  Description of Artificial Sequence: Synthetic oligonucleotide
aauucagcuucuuggaagc

SEQ ID NO: 1794450 - RNA, 19 nt, Artificial Sequence
  Description of Artificial Sequence: Synthetic oligonucleotide
uuuaauaagguagaggugc

SEQ ID NO: 1794451 - RNA, 19 nt, Artificial Sequence
  Description of Artificial Sequence: Synthetic oligonucleotide
uauacaaaagcuuuugagc

SEQ ID NO: 1794452 - RNA, 19 nt, Artificial Sequence
  Description of Artificial Sequence: Synthetic oligonucleotide
acucaaaguauauauggcc

SEQ ID NO: 1794453 - RNA, 19 nt, Artificial Sequence
  Description of Artificial Sequence: Synthetic oligonucleotide
agaacgaugaagcaguaac

SEQ ID NO: 1794454 - RNA, 19 nt, Artificial Sequence
  Description of Artificial Sequence: Synthetic oligonucleotide
aagcaauucagcuucuugg

SEQ ID NO: 1794455 - RNA, 19 nt, Artificial Sequence
  Description of Artificial Sequence: Synthetic oligonucleotide
accugauauagucauaugc

SEQ ID NO: 1794456 - RNA, 19 nt, Artificial Sequence
  Description of Artificial Sequence: Synthetic oligonucleotide
auaauuugauguuuccugc

SEQ ID NO: 1794457 - RNA, 19 nt, Artificial Sequence
  Description of Artificial Sequence: Synthetic oligonucleotide
auaaaugagagacauguug

SEQ ID NO: 1794458 - RNA, 19 nt, Artificial Sequence
  Description of Artificial Sequence: Synthetic oligonucleotide
aaugaauaauauuccagug

SEQ ID NO: 1794459 - RNA, 19 nt, Artificial Sequence
  Description of Artificial Sequence: Synthetic oligonucleotide
ucucagaagacacuggucc

SEQ ID NO: 1794460 - RNA, 19 nt, Artificial Sequence
  Description of Artificial Sequence: Synthetic oligonucleotide
aauauuccagugaagaauc

SEQ ID NO: 1794461 - RNA, 19 nt, Artificial Sequence
  Description of Artificial Sequence: Synthetic oligonucleotide
ugaauaauauuccagugaa

SEQ ID NO: 1794462 - RNA, 19 nt, Artificial Sequence
  Description of Artificial Sequence: Synthetic oligonucleotide
ucuucgaaggucuaacugg

SEQ ID NO: 1794463 - RNA, 19 nt, Artificial Sequence
  Description of Artificial Sequence: Synthetic oligonucleotide
guauauauggccuucaaga

SEQ ID NO: 1794464 - RNA, 19 nt, Artificial Sequence
  Description of Artificial Sequence: Synthetic oligonucleotide
aauuugauguuuccugcuc

SEQ ID NO: 1794465 - RNA, 19 nt, Artificial Sequence
  Description of Artificial Sequence: Synthetic oligonucleotide
uaaaugagagacauguugu

SEQ ID NO: 1794466 - RNA, 19 nt, Artificial Sequence
  Description of Artificial Sequence: Synthetic oligonucleotide
ucuugacacuuuaauaagg

SEQ ID NO: 1794467 - RNA, 19 nt, Artificial Sequence
  Description of Artificial Sequence: Synthetic oligonucleotide
agaauugcagcagauagac

SEQ ID NO: 1794468 - RNA, 19 nt, Artificial Sequence
  Description of Artificial Sequence: Synthetic oligonucleotide
gcuuauaugacacaauagg

SEQ ID NO: 1794469 - RNA, 19 nt, Artificial Sequence
  Description of Artificial Sequence: Synthetic oligonucleotide
uaagguauccagauaacca

SEQ ID NO: 1794470 - RNA, 19 nt, Artificial Sequence
  Description of Artificial Sequence: Synthetic oligonucleotide
  modified_base (2)..(2): a, c, u, g, unknown or other
gnuaaaagcaguguuucag

SEQ ID NO: 1794471 - RNA, 19 nt, Artificial Sequence
  Description of Artificial Sequence: Synthetic oligonucleotide
uguaacacagcuagcagug

SEQ ID NO: 1794472 - RNA, 19 nt, Artificial Sequence
  Description of Artificial Sequence: Synthetic oligonucleotide
uauauauggccuucaagag

SEQ ID NO: 1794473 - RNA, 19 nt, Artificial Sequence
  Description of Artificial Sequence: Synthetic oligonucleotide
uauaugacacaauagguau

SEQ ID NO: 1794474 - RNA, 19 nt, Artificial Sequence
  Description of Artificial Sequence: Synthetic oligonucleotide
cuuaugcauacaaagcagg

SEQ ID NO: 1794475 - RNA, 19 nt, Artificial Sequence
  Description of Artificial Sequence: Synthetic oligonucleotide
uguagaacgauuccuggca

SEQ ID NO: 1794476 - RNA, 19 nt, Artificial Sequence
  Description of Artificial Sequence: Synthetic oligonucleotide
aagcuuuugagccauugca

SEQ ID NO: 1794477 - RNA, 19 nt, Artificial Sequence
  Description of Artificial Sequence: Synthetic oligonucleotide
auuguugucugauauuuug

SEQ ID NO: 1794478 - RNA, 19 nt, Artificial Sequence
  Description of Artificial Sequence: Synthetic oligonucleotide
accaucaccugauauaguc

SEQ ID NO: 1794479 - RNA, 19 nt, Artificial Sequence
  Description of Artificial Sequence: Synthetic oligonucleotide
aauaauagaguagaacgau

SEQ ID NO: 1794480 - RNA, 19 nt, Artificial Sequence
  Description of Artificial Sequence: Synthetic oligonucleotide
uugugaaaauaauagagua

SEQ ID NO: 1794481 - RNA, 19 nt, Artificial Sequence
  Description of Artificial Sequence: Synthetic oligonucleotide
aaauaauagaguagaacga

SEQ ID NO: 1794482 - RNA, 19 nt, Artificial Sequence
  Description of Artificial Sequence: Synthetic oligonucleotide
uucaucgcaaccuuuaaaa

SEQ ID NO: 1794483 - RNA, 19 nt, Artificial Sequence
  Description of Artificial Sequence: Synthetic oligonucleotide
aacgauuccuggcaaaggu

SEQ ID NO: 1794484 - RNA, 19 nt, Artificial Sequence
  Description of Artificial Sequence: Synthetic oligonucleotide
aaugagagacauguuguag

SEQ ID NO: 1794485 - RNA, 19 nt, Artificial Sequence
  Description of Artificial Sequence: Synthetic oligonucleotide
caucgcaaccuuuaaaagc

SEQ ID NO: 1794486 - RNA, 19 nt, Artificial Sequence
  Description of Artificial Sequence: Synthetic oligonucleotide
aguauauauggccuucaag

SEQ ID NO: 1794487 - RNA, 19 nt, Artificial Sequence
  Description of Artificial Sequence: Synthetic oligonucleotide
aaauuguagaacgauuccu

SEQ ID NO: 1794488 - RNA, 19 nt, Artificial Sequence
  Description of Artificial Sequence: Synthetic oligonucleotide
aagguauccagauaaccau

SEQ ID NO: 1794489 - RNA, 19 nt, Artificial Sequence
  Description of Artificial Sequence: Synthetic oligonucleotide
acuucuauccccucuacca

SEQ ID NO: 1794490 - RNA, 19 nt, Artificial Sequence
  Description of Artificial Sequence: Synthetic oligonucleotide
uucaagagaagguuccacc

SEQ ID NO: 1794491 - RNA, 19 nt, Artificial Sequence
  Description of Artificial Sequence: Synthetic oligonucleotide
agucacucaaaguauauau

SEQ ID NO: 1794492 - RNA, 19 nt, Artificial Sequence
  Description of Artificial Sequence: Synthetic oligonucleotide
augguaacuugauuauuac

SEQ ID NO: 1794493 - RNA, 19 nt, Artificial Sequence
  Description of Artificial Sequence: Synthetic oligonucleotide
uuaauaagguagaggugcc

SEQ ID NO: 1794494 - RNA, 19 nt, Artificial Sequence
  Description of Artificial Sequence: Synthetic oligonucleotide
auagaguagaacgaugaag

SEQ ID NO: 1794495 - RNA, 19 nt, Artificial Sequence
  Description of Artificial Sequence: Synthetic oligonucleotide
cacaauagguauacaaaag

SEQ ID NO: 1794496 - RNA, 19 nt, Artificial Sequence
  Description of Artificial Sequence: Synthetic oligonucleotide
uguuguaggcaauaucucu

SEQ ID NO: 1794497 - RNA, 19 nt, Artificial Sequence
  Description of Artificial Sequence: Synthetic oligonucleotide
accgaaguauucuuaguuc

SEQ ID NO: 1794498 - RNA, 19 nt, Artificial Sequence
  Description of Artificial Sequence: Synthetic oligonucleotide
ugucaucauaaaaugaaua

SEQ ID NO: 1794499 - RNA, 19 nt, Artificial Sequence
  Description of Artificial Sequence: Synthetic oligonucleotide
aaucuacaagcaauucagc

SEQ ID NO: 1794500 - RNA, 19 nt, Artificial Sequence
  Description of Artificial Sequence: Synthetic oligonucleotide
cacaucuugagaaugcaug

SEQ ID NO: 1794501 - RNA, 19 nt, Artificial Sequence
  Description of Artificial Sequence: Synthetic oligonucleotide
auacauuuugccuugugaa

SEQ ID NO: 1794502 - RNA, 19 nt, Artificial Sequence
  Description of Artificial Sequence: Synthetic oligonucleotide
caauucagcuucuuggaag

SEQ ID NO: 1794503 - RNA, 19 nt, Artificial Sequence
  Description of Artificial Sequence: Synthetic oligonucleotide
uuggcaagacacuugugag

SEQ ID NO: 1794504 - RNA, 19 nt, Artificial Sequence
  Description of Artificial Sequence: Synthetic oligonucleotide
uaugacacaauagguauac

SEQ ID NO: 1794505 - RNA, 19 nt, Artificial Sequence
  Description of Artificial Sequence: Synthetic oligonucleotide
ucgaaggucuaacugguca

SEQ ID NO: 1794506 - RNA, 19 nt, Artificial Sequence
  Description of Artificial Sequence: Synthetic oligonucleotide
aucuacaagcaauucagcu

SEQ ID NO: 1794507 - RNA, 19 nt, Artificial Sequence
  Description of Artificial Sequence: Synthetic oligonucleotide
cacauacuguccaagugcg

SEQ ID NO: 1794508 - RNA, 19 nt, Artificial Sequence
  Description of Artificial Sequence: Synthetic oligonucleotide
acacaauagguauacaaaa

SEQ ID NO: 1794509 - RNA, 19 nt, Artificial Sequence
  Description of Artificial Sequence: Synthetic oligonucleotide
uuaugcauacaaagcaggu

SEQ ID NO: 1794510 - RNA, 19 nt, Artificial Sequence
  Description of Artificial Sequence: Synthetic oligonucleotide
caaauuguagaacgauucc

SEQ ID NO: 1794511 - RNA, 19 nt, Artificial Sequence
  Description of Artificial Sequence: Synthetic oligonucleotide
uagaccgaaguauucuuag

SEQ ID NO: 1794512 - RNA, 19 nt, Artificial Sequence
  Description of Artificial Sequence: Synthetic oligonucleotide
  modified_base (8)..(8): a, c, u, g, unknown or other
uccagagnuaaaagcagug

SEQ ID NO: 1794513 - RNA, 19 nt, Artificial Sequence
  Description of Artificial Sequence: Synthetic oligonucleotide
ucaucaagcauaguugucu

SEQ ID NO: 1794514 - RNA, 19 nt, Artificial Sequence
  Description of Artificial Sequence: Synthetic oligonucleotide
ucucacaucuugagaaugc

SEQ ID NO: 1794515 - RNA, 19 nt, Artificial Sequence
  Description of Artificial Sequence: Synthetic oligonucleotide
uguccauuuagaacgcaca

SEQ ID NO: 1794516 - RNA, 19 nt, Artificial Sequence
  Description of Artificial Sequence: Synthetic oligonucleotide
uccaccagucaucuuuugg

SEQ ID NO: 1794517 - RNA, 19 nt, Artificial Sequence
  Description of Artificial Sequence: Synthetic oligonucleotide
cauuguguccauuuagaac

SEQ ID NO: 1794518 - RNA, 19 nt, Artificial Sequence
  Description of Artificial Sequence: Synthetic oligonucleotide
augucucacaucuugagaa

SEQ ID NO: 1794519 - RNA, 19 nt, Artificial Sequence
  Description of Artificial Sequence: Synthetic oligonucleotide
ucaucgcaaccuuuaaaag

SEQ ID NO: 1794520 - RNA, 19 nt, Artificial Sequence
  Description of Artificial Sequence: Synthetic oligonucleotide
aaccauacauuuugccuug

SEQ ID NO: 1794521 - RNA, 19 nt, Artificial Sequence
  Description of Artificial Sequence: Synthetic oligonucleotide
aguuguaacacagcuagca

SEQ ID NO: 1794522 - RNA, 19 nt, Artificial Sequence
  Description of Artificial Sequence: Synthetic oligonucleotide
  modified_base (4)..(4): a, c, u, g, unknown or other
gagnuaaaagcaguguuuc

SEQ ID NO: 1794523 - RNA, 19 nt, Artificial Sequence
  Description of Artificial Sequence: Synthetic oligonucleotide
agauacaaaagcauugugu

SEQ ID NO: 1794524 - RNA, 19 nt, Artificial Sequence
  Description of Artificial Sequence: Synthetic oligonucleotide
gguaacuugauuauuacca

SEQ ID NO: 1794525 - RNA, 19 nt, Artificial Sequence
  Description of Artificial Sequence: Synthetic oligonucleotide
agagacauguuguaggcaa

SEQ ID NO: 1794526 - RNA, 19 nt, Artificial Sequence
  Description of Artificial Sequence: Synthetic oligonucleotide
auuaccaucaccugauaua

SEQ ID NO: 1794527 - RNA, 19 nt, Artificial Sequence
  Description of Artificial Sequence: Synthetic oligonucleotide
ccugauauagucauaugcc

SEQ ID NO: 1794528 - RNA, 19 nt, Artificial Sequence
  Description of Artificial Sequence: Synthetic oligonucleotide
gagaaugcaugguaacuug

SEQ ID NO: 1794529 - RNA, 19 nt, Artificial Sequence
  Description of Artificial Sequence: Synthetic oligonucleotide
ucauaugccuuucuguaau

SEQ ID NO: 1794530 - RNA, 19 nt, Artificial Sequence
  Description of Artificial Sequence: Synthetic oligonucleotide
ucuacagccaagccacacc

SEQ ID NO: 1794531 - RNA, 19 nt, Artificial Sequence
  Description of Artificial Sequence: Synthetic oligonucleotide
gaguagaacgaugaagcag

SEQ ID NO: 1794532 - RNA, 19 nt, Artificial Sequence
  Description of Artificial Sequence: Synthetic oligonucleotide
ugauuauuaccaucaccug

SEQ ID NO: 1794533 - RNA, 19 nt, Artificial Sequence
  Description of Artificial Sequence: Synthetic oligonucleotide
ugcggcauuugcauccugg

SEQ ID NO: 1794534 - RNA, 19 nt, Artificial Sequence
  Description of Artificial Sequence: Synthetic oligonucleotide
acuggucaacuucuauccc

SEQ ID NO: 1794535 - RNA, 19 nt, Artificial Sequence
  Description of Artificial Sequence: Synthetic oligonucleotide
uuguagaacgauuccuggc

SEQ ID NO: 1794536 - RNA, 19 nt, Artificial Sequence
  Description of Artificial Sequence: Synthetic oligonucleotide
uuugccuugugaaaauaau

SEQ ID NO: 1794537 - RNA, 19 nt, Artificial Sequence
  Description of Artificial Sequence: Synthetic oligonucleotide
uugggcucuauucaucgca

SEQ ID NO: 1794538 - RNA, 19 nt, Artificial Sequence
  Description of Artificial Sequence: Synthetic oligonucleotide
auacauugguuccuuccuc

SEQ ID NO: 1794539 - RNA, 19 nt, Artificial Sequence
  Description of Artificial Sequence: Synthetic oligonucleotide
agucagucccaguugauga

SEQ ID NO: 1794540 - RNA, 19 nt, Artificial Sequence
  Description of Artificial Sequence: Synthetic oligonucleotide
aauguaucugggucauaca

SEQ ID NO: 1794541 - RNA, 19 nt, Artificial Sequence
  Description of Artificial Sequence: Synthetic oligonucleotide
uugugaguacagcaaauau

SEQ ID NO: 1794542 - RNA, 19 nt, Artificial Sequence
  Description of Artificial Sequence: Synthetic oligonucleotide
cuuggaagcgggauaaguc

SEQ ID NO: 1794543 - RNA, 19 nt, Artificial Sequence
  Description of Artificial Sequence: Synthetic oligonucleotide
uaguggauugcaaggugag

SEQ ID NO: 1794544 - RNA, 19 nt, Artificial Sequence
  Description of Artificial Sequence: Synthetic oligonucleotide
auuugauguuuccugcuca

SEQ ID NO: 1794545 - RNA, 19 nt, Artificial Sequence
  Description of Artificial Sequence: Synthetic oligonucleotide
  modified_base (9)..(9): a, c, u, g, unknown or other
uuccagagnuaaaagcagu

SEQ ID NO: 1794546 - RNA, 19 nt, Artificial Sequence
  Description of Artificial Sequence: Synthetic oligonucleotide
uccaagugcguguuugaag

SEQ ID NO: 1794547 - RNA, 19 nt, Artificial Sequence
  Description of Artificial Sequence: Synthetic oligonucleotide
aaugcaugguaacuugauu

SEQ ID NO: 1794548 - RNA, 19 nt, Artificial Sequence
  Description of Artificial Sequence: Synthetic oligonucleotide
cuugagaaugcaugguaac

SEQ ID NO: 1794549 - RNA, 19 nt, Artificial Sequence
  Description of Artificial Sequence: Synthetic oligonucleotide
agaagacacugguccacgc

SEQ ID NO: 1794550 - RNA, 19 nt, Artificial Sequence
  Description of Artificial Sequence: Synthetic oligonucleotide
aucgcaaccuuuaaaagca

SEQ ID NO: 1794551 - RNA, 19 nt, Artificial Sequence
  Description of Artificial Sequence: Synthetic oligonucleotide
ugaguacagcaaauauugc

SEQ ID NO: 1794552 - RNA, 19 nt, Artificial Sequence
  Description of Artificial Sequence: Synthetic oligonucleotide
cuacagccaagccacaccc

SEQ ID NO: 1794553 - RNA, 19 nt, Artificial Sequence
  Description of Artificial Sequence: Synthetic oligonucleotide
ucggggauaggcacggaag

SEQ ID NO: 1794554 - RNA, 19 nt, Artificial Sequence
  Description of Artificial Sequence: Synthetic oligonucleotide
agucauaugccuuucugua

SEQ ID NO: 1794555 - RNA, 19 nt, Artificial Sequence
  Description of Artificial Sequence: Synthetic oligonucleotide
aguaguggauugcaaggug

SEQ ID NO: 1794556 - RNA, 19 nt, Artificial Sequence
  Description of Artificial Sequence: Synthetic oligonucleotide
auguaucugggucauacau

SEQ ID NO: 1794557 - RNA, 19 nt, Artificial Sequence
  Description of Artificial Sequence: Synthetic oligonucleotide
uuaaaagcauggcuagcau

SEQ ID NO: 1794558 - RNA, 19 nt, Artificial Sequence
  Description of Artificial Sequence: Synthetic oligonucleotide
guaagguauccagauaacc

SEQ ID NO: 1794559 - RNA, 19 nt, Artificial Sequence
  Description of Artificial Sequence: Synthetic oligonucleotide
auuauuaccaucaccugau

SEQ ID NO: 1794560 - RNA, 19 nt, Artificial Sequence
  Description of Artificial Sequence: Synthetic oligonucleotide
aucugggucauacauuggu

SEQ ID NO: 1794561 - RNA, 19 nt, Artificial Sequence
  Description of Artificial Sequence: Synthetic oligonucleotide
acagaagcgaugaugucuc

SEQ ID NO: 1794562 - RNA, 19 nt, Artificial Sequence
  Description of Artificial Sequence: Synthetic oligonucleotide
agcaaauauugcuuuugca

SEQ ID NO: 1794563 - RNA, 19 nt, Artificial Sequence
  Description of Artificial Sequence: Synthetic oligonucleotide
gaagcgaugaugucucaca

SEQ ID NO: 1794564 - RNA, 19 nt, Artificial Sequence
  Description of Artificial Sequence: Synthetic oligonucleotide
aagugcguguuugaagcuc

SEQ ID NO: 1794565 - RNA, 19 nt, Artificial Sequence
  Description of Artificial Sequence: Synthetic oligonucleotide
uuuagaacgcacagugcau

SEQ ID NO: 1794566 - RNA, 19 nt, Artificial Sequence
  Description of Artificial Sequence: Synthetic oligonucleotide
ccagaauugcagcagauag

SEQ ID NO: 1794567 - RNA, 19 nt, Artificial Sequence
  Description of Artificial Sequence: Synthetic oligonucleotide
cacagugcaugauuuucgg

SEQ ID NO: 1794568 - RNA, 19 nt, Artificial Sequence
  Description of Artificial Sequence: Synthetic oligonucleotide
uaagucacucaaaguauau

SEQ ID NO: 1794569 - RNA, 19 nt, Artificial Sequence
  Description of Artificial Sequence: Synthetic oligonucleotide
uugccuugugaaaauaaua

SEQ ID NO: 1794570 - RNA, 19 nt, Artificial Sequence
  Description of Artificial Sequence: Synthetic oligonucleotide
aucucuucgaaggucuaac

SEQ ID NO: 1794571 - RNA, 19 nt, Artificial Sequence
  Description of Artificial Sequence: Synthetic oligonucleotide
cugcucugauaaaugagag

SEQ ID NO: 1794572 - RNA, 19 nt, Artificial Sequence
  Description of Artificial Sequence: Synthetic oligonucleotide
aauaagguagaggugccuu

SEQ ID NO: 1794573 - RNA, 19 nt, Artificial Sequence
  Description of Artificial Sequence: Synthetic oligonucleotide
aguucugcgcuuauaugac

SEQ ID NO: 1794574 - RNA, 19 nt, Artificial Sequence
  Description of Artificial Sequence: Synthetic oligonucleotide
auucuuaguucuuugcguu

SEQ ID NO: 1794575 - RNA, 19 nt, Artificial Sequence
  Description of Artificial Sequence: Synthetic oligonucleotide
agugcguguuugaagcucc

SEQ ID NO: 1794576 - RNA, 19 nt, Artificial Sequence
  Description of Artificial Sequence: Synthetic oligonucleotide
ccaagugcguguuugaagc

SEQ ID NO: 1794577 - RNA, 19 nt, Artificial Sequence
  Description of Artificial Sequence: Synthetic oligonucleotide
gguuuucagcaucaggcgg

SEQ ID NO: 1794578 - RNA, 19 nt, Artificial Sequence
  Description of Artificial Sequence: Synthetic oligonucleotide
ucaaaguauauauggccuu

SEQ ID NO: 1794579 - RNA, 19 nt, Artificial Sequence
  Description of Artificial Sequence: Synthetic oligonucleotide
auaauagaguagaacgaug

SEQ ID NO: 1794580 - RNA, 19 nt, Artificial Sequence
  Description of Artificial Sequence: Synthetic oligonucleotide
uaaaagcaguguuucaguu

SEQ ID NO: 1794581 - RNA, 19 nt, Artificial Sequence
  Description of Artificial Sequence: Synthetic oligonucleotide
  modified_base (3)..(3): a, c, u, g, unknown or other
agnuaaaagcaguguuuca

SEQ ID NO: 1794582 - RNA, 19 nt, Artificial Sequence
  Description of Artificial Sequence: Synthetic oligonucleotide
caguaagguauccagauaa

SEQ ID NO: 1794583 - RNA, 19 nt, Artificial Sequence
  Description of Artificial Sequence: Synthetic oligonucleotide
ccaaauuguagaacgauuc

SEQ ID NO: 1794584 - RNA, 19 nt, Artificial Sequence
  Description of Artificial Sequence: Synthetic oligonucleotide
gacacaauagguauacaaa

SEQ ID NO: 1794585 - RNA, 19 nt, Artificial Sequence
  Description of Artificial Sequence: Synthetic oligonucleotide
ucaguucugcgcuuauaug

SEQ ID NO: 1794586 - RNA, 19 nt, Artificial Sequence
  Description of Artificial Sequence: Synthetic oligonucleotide
uugagaaugcaugguaacu

SEQ ID NO: 1794587 - RNA, 19 nt, Artificial Sequence
  Description of Artificial Sequence: Synthetic oligonucleotide
cauacauuuugccuuguga

SEQ ID NO: 1794588 - RNA, 19 nt, Artificial Sequence
  Description of Artificial Sequence: Synthetic oligonucleotide
aaguauauauggccuucaa

SEQ ID NO: 1794589 - RNA, 19 nt, Artificial Sequence
  Description of Artificial Sequence: Synthetic oligonucleotide
ucaccugauauagucauau

SEQ ID NO: 1794590 - RNA, 19 nt, Artificial Sequence
  Description of Artificial Sequence: Synthetic oligonucleotide
agcgggauaagucacucaa

SEQ ID NO: 1794591 - RNA, 19 nt, Artificial Sequence
  Description of Artificial Sequence: Synthetic oligonucleotide
agaacgauuccuggcaaag

SEQ ID NO: 1794592 - RNA, 19 nt, Artificial Sequence
  Description of Artificial Sequence: Synthetic oligonucleotide
cucuucgaaggucuaacug

SEQ ID NO: 1794593 - RNA, 19 nt, Artificial Sequence
  Description of Artificial Sequence: Synthetic oligonucleotide
aguaagguauccagauaac

SEQ ID NO: 1794594 - RNA, 19 nt, Artificial Sequence
  Description of Artificial Sequence: Synthetic oligonucleotide
ugcucugauaaaugagaga

SEQ ID NO: 1794595 - RNA, 19 nt, Artificial Sequence
  Description of Artificial Sequence: Synthetic oligonucleotide
gggccuuaugcauacaaag

SEQ ID NO: 1794596 - RNA, 19 nt, Artificial Sequence
  Description of Artificial Sequence: Synthetic oligonucleotide
agcagauagaccgaaguau

SEQ ID NO: 1794597 - RNA, 19 nt, Artificial Sequence
  Description of Artificial Sequence: Synthetic oligonucleotide
agauagaccgaaguauucu

SEQ ID NO: 1794598 - RNA, 19 nt, Artificial Sequence
  Description of Artificial Sequence: Synthetic oligonucleotide
uucuauccccucuaccaca

SEQ ID NO: 1794599 - RNA, 19 nt, Artificial Sequence
  Description of Artificial Sequence: Synthetic oligonucleotide
uaucugggucauacauugg

SEQ ID NO: 1794600 - RNA, 19 nt, Artificial Sequence
  Description of Artificial Sequence: Synthetic oligonucleotide
caauagguauacaaaagcu

SEQ ID NO: 1794601 - RNA, 19 nt, Artificial Sequence
  Description of Artificial Sequence: Synthetic oligonucleotide
aggcaauaucucuucgaag

SEQ ID NO: 1794602 - RNA, 19 nt, Artificial Sequence
  Description of Artificial Sequence: Synthetic oligonucleotide
uuccuaaaggccuguggcu

SEQ ID NO: 1794603 - RNA, 19 nt, Artificial Sequence
  Description of Artificial Sequence: Synthetic oligonucleotide
ucccagauacaaaagcauu

SEQ ID NO: 1794604 - RNA, 19 nt, Artificial Sequence
  Description of Artificial Sequence: Synthetic oligonucleotide
aagcgaugaugucucacau

SEQ ID NO: 1794605 - RNA, 19 nt, Artificial Sequence
  Description of Artificial Sequence: Synthetic oligonucleotide
agaagcgaugaugucucac

SEQ ID NO: 1794606 - RNA, 19 nt, Artificial Sequence
  Description of Artificial Sequence: Synthetic oligonucleotide
ugggcuaauguaucugggu

SEQ ID NO: 1794607 - RNA, 19 nt, Artificial Sequence
  Description of Artificial Sequence: Synthetic oligonucleotide
uuugauguuuccugcucau

SEQ ID NO: 1794608 - RNA, 19 nt, Artificial Sequence
  Description of Artificial Sequence: Synthetic oligonucleotide
aacuugggcucuauucauc

SEQ ID NO: 1794609 - RNA, 19 nt, Artificial Sequence
  Description of Artificial Sequence: Synthetic oligonucleotide
gaacgauuccuggcaaagg

SEQ ID NO: 1794610 - RNA, 19 nt, Artificial Sequence
  Description of Artificial Sequence: Synthetic oligonucleotide
uuguaggcaauaucucuuc

SEQ ID NO: 1794611 - RNA, 19 nt, Artificial Sequence
  Description of Artificial Sequence: Synthetic oligonucleotide
cugggcuaauguaucuggg

SEQ ID NO: 1794612 - RNA, 19 nt, Artificial Sequence
  Description of Artificial Sequence: Synthetic oligonucleotide
uccacguaugcugagguau

SEQ ID NO: 1794613 - RNA, 19 nt, Artificial Sequence
  Description of Artificial Sequence: Synthetic oligonucleotide
gguagaggugccuuucucc

SEQ ID NO: 1794614 - RNA, 19 nt, Artificial Sequence
  Description of Artificial Sequence: Synthetic oligonucleotide
cucaaaguauauauggccu

SEQ ID NO: 1794615 - RNA, 19 nt, Artificial Sequence
  Description of Artificial Sequence: Synthetic oligonucleotide
uugacacuuuaauaaggua

SEQ ID NO: 1794616 - RNA, 19 nt, Artificial Sequence
  Description of Artificial Sequence: Synthetic oligonucleotide
  modified_base (5)..(5): a, c, u, g, unknown or other
agagnuaaaagcaguguuu

SEQ ID NO: 1794617 - RNA, 19 nt, Artificial Sequence
  Description of Artificial Sequence: Synthetic oligonucleotide
ucuuggaagcgggauaagu

SEQ ID NO: 1794618 - RNA, 19 nt, Artificial Sequence
  Description of Artificial Sequence: Synthetic oligonucleotide
auauagucauaugccuuuc

SEQ ID NO: 1794619 - RNA, 19 nt, Artificial Sequence
  Description of Artificial Sequence: Synthetic oligonucleotide
ccuuaugcauacaaagcag

SEQ ID NO: 1794620 - RNA, 19 nt, Artificial Sequence
  Description of Artificial Sequence: Synthetic oligonucleotide
uccauuuagaacgcacagu

SEQ ID NO: 1794621 - RNA, 19 nt, Artificial Sequence
  Description of Artificial Sequence: Synthetic oligonucleotide
aaagguccacguaugcuga

SEQ ID NO: 1794622 - RNA, 19 nt, Artificial Sequence
  Description of Artificial Sequence: Synthetic oligonucleotide
gucacucaaaguauauaug

SEQ ID NO: 1794623 - RNA, 19 nt, Artificial Sequence
  Description of Artificial Sequence: Synthetic oligonucleotide
uaguaguggauugcaaggu

SEQ ID NO: 1794624 - RNA, 19 nt, Artificial Sequence
  Description of Artificial Sequence: Synthetic oligonucleotide
ucaguaagguauccagaua

SEQ ID NO: 1794625 - RNA, 19 nt, Artificial Sequence
  Description of Artificial Sequence: Synthetic oligonucleotide
uggcaaagguccacguaug

SEQ ID NO: 1794626 - RNA, 19 nt, Artificial Sequence
  Description of Artificial Sequence: Synthetic oligonucleotide
aaggucuaacuggucaacu

SEQ ID NO: 1794627 - RNA, 19 nt, Artificial Sequence
  Description of Artificial Sequence: Synthetic oligonucleotide
auucaucgcaaccuuuaaa

SEQ ID NO: 1794628 - RNA, 19 nt, Artificial Sequence
  Description of Artificial Sequence: Synthetic oligonucleotide
guagaggugccuuucucca

SEQ ID NO: 1794629 - RNA, 19 nt, Artificial Sequence
  Description of Artificial Sequence: Synthetic oligonucleotide
ucucuucgaaggucuaacu

SEQ ID NO: 1794630 - RNA, 19 nt, Artificial Sequence
  Description of Artificial Sequence: Synthetic oligonucleotide
auacuguccaagugcgugu

SEQ ID NO: 1794631 - RNA, 19 nt, Artificial Sequence
  Description of Artificial Sequence: Synthetic oligonucleotide
agcauggcuagcaugguca

SEQ ID NO: 1794632 - RNA, 19 nt, Artificial Sequence
  Description of Artificial Sequence: Synthetic oligonucleotide
agaggugccuuucuccaga

SEQ ID NO: 1794633 - RNA, 19 nt, Artificial Sequence
  Description of Artificial Sequence: Synthetic oligonucleotide
caaaguauauauggccuuc

SEQ ID NO: 1794634 - RNA, 19 nt, Artificial Sequence
  Description of Artificial Sequence: Synthetic oligonucleotide
ucaguuccugcugugcggc

SEQ ID NO: 1794635 - RNA, 19 nt, Artificial Sequence
  Description of Artificial Sequence: Synthetic oligonucleotide
cagauagaccgaaguauuc

SEQ ID NO: 1794636 - RNA, 19 nt, Artificial Sequence
  Description of Artificial Sequence: Synthetic oligonucleotide
gacuuggaacuggagauca

SEQ ID NO: 1794637 - RNA, 19 nt, Artificial Sequence
  Description of Artificial Sequence: Synthetic oligonucleotide
guucccgcugcucugauaa

SEQ ID NO: 1794638 - RNA, 19 nt, Artificial Sequence
  Description of Artificial Sequence: Synthetic oligonucleotide
cugauauuuugucucuuga

SEQ ID NO: 1794639 - RNA, 19 nt, Artificial Sequence
  Description of Artificial Sequence: Synthetic oligonucleotide
gaagacacugguccacgca

SEQ ID NO: 1794640 - RNA, 19 nt, Artificial Sequence
  Description of Artificial Sequence: Synthetic oligonucleotide
gauaagucacucaaaguau

SEQ ID NO: 1794641 - RNA, 19 nt, Artificial Sequence
  Description of Artificial Sequence: Synthetic oligonucleotide
ugcugugcggcauuugcau

SEQ ID NO: 1794642 - RNA, 19 nt, Artificial Sequence
  Description of Artificial Sequence: Synthetic oligonucleotide
agagaagguuccaccaguc

SEQ ID NO: 1794643 - RNA, 19 nt, Artificial Sequence
  Description of Artificial Sequence: Synthetic oligonucleotide
uuucgggguuuucagcauc

SEQ ID NO: 1794644 - RNA, 19 nt, Artificial Sequence
  Description of Artificial Sequence: Synthetic oligonucleotide
guaucggggauaggcacgg

SEQ ID NO: 1794645 - RNA, 19 nt, Artificial Sequence
  Description of Artificial Sequence: Synthetic oligonucleotide
uugcauccugggcuaaugu

SEQ ID NO: 1794646 - RNA, 19 nt, Artificial Sequence
  Description of Artificial Sequence: Synthetic oligonucleotide
agacuuggaacuggagauc

SEQ ID NO: 1794647 - RNA, 19 nt, Artificial Sequence
  Description of Artificial Sequence: Synthetic oligonucleotide
aaggugcaguuguaacaca

SEQ ID NO: 1794648 - RNA, 19 nt, Artificial Sequence
  Description of Artificial Sequence: Synthetic oligonucleotide
ggcucuauucaucgcaacc

SEQ ID NO: 1794649 - RNA, 19 nt, Artificial Sequence
  Description of Artificial Sequence: Synthetic oligonucleotide
ucuaacuggucaacuucua

SEQ ID NO: 1794650 - RNA, 19 nt, Artificial Sequence
  Description of Artificial Sequence: Synthetic oligonucleotide
ugggccuuaugcauacaaa

SEQ ID NO: 1794651 - RNA, 19 nt, Artificial Sequence
  Description of Artificial Sequence: Synthetic oligonucleotide
caauaucucuucgaagguc

SEQ ID NO: 1794652 - RNA, 19 nt, Artificial Sequence
  Description of Artificial Sequence: Synthetic oligonucleotide
aucaucaagcauaguuguc

SEQ ID NO: 1794653 - RNA, 19 nt, Artificial Sequence
  Description of Artificial Sequence: Synthetic oligonucleotide
cacgcagccccuuucucag

SEQ ID NO: 1794654 - RNA, 19 nt, Artificial Sequence
  Description of Artificial Sequence: Synthetic oligonucleotide
cccagauacaaaagcauug

SEQ ID NO: 1794655 - RNA, 19 nt, Artificial Sequence
  Description of Artificial Sequence: Synthetic oligonucleotide
caguguuucaguuuuccua

SEQ ID NO: 1794656 - RNA, 19 nt, Artificial Sequence
  Description of Artificial Sequence: Synthetic oligonucleotide
aggugcaguuguaacacag

SEQ ID NO: 1794657 - RNA, 19 nt, Artificial Sequence
  Description of Artificial Sequence: Synthetic oligonucleotide
cugauauagucauaugccu

SEQ ID NO: 1794658 - RNA, 19 nt, Artificial Sequence
  Description of Artificial Sequence: Synthetic oligonucleotide
aacgcacagugcaugauuu

SEQ ID NO: 1794659 - RNA, 19 nt, Artificial Sequence
  Description of Artificial Sequence: Synthetic oligonucleotide
agaccgaaguauucuuagu

SEQ ID NO: 1794660 - RNA, 19 nt, Artificial Sequence
  Description of Artificial Sequence: Synthetic oligonucleotide
aagucacucaaaguauaua

SEQ ID NO: 1794661 - RNA, 19 nt, Artificial Sequence
  Description of Artificial Sequence: Synthetic oligonucleotide
caguuuuccuaaaggccug

SEQ ID NO: 1794662 - RNA, 19 nt, Artificial Sequence
  Description of Artificial Sequence: Synthetic oligonucleotide
ugcgcuuauaugacacaau

SEQ ID NO: 1794663 - RNA, 19 nt, Artificial Sequence
  Description of Artificial Sequence: Synthetic oligonucleotide
ugggcucuauucaucgcaa

SEQ ID NO: 1794664 - RNA, 19 nt, Artificial Sequence
  Description of Artificial Sequence: Synthetic oligonucleotide
aagcgggauaagucacuca

SEQ ID NO: 1794665 - RNA, 19 nt, Artificial Sequence
  Description of Artificial Sequence: Synthetic oligonucleotide
guaguggauugcaagguga

SEQ ID NO: 1794666 - RNA, 19 nt, Artificial Sequence
  Description of Artificial Sequence: Synthetic oligonucleotide
ugcauccugggcuaaugua

SEQ ID NO: 1794667 - RNA, 19 nt, Artificial Sequence
  Description of Artificial Sequence: Synthetic oligonucleotide
agccuucugguaguagugg

SEQ ID NO: 1794668 - RNA, 19 nt, Artificial Sequence
  Description of Artificial Sequence: Synthetic oligonucleotide
acgauuccuggcaaagguc

SEQ ID NO: 1794669 - RNA, 19 nt, Artificial Sequence
  Description of Artificial Sequence: Synthetic oligonucleotide
gucaguaagguauccagau

SEQ ID NO: 1794670 - RNA, 19 nt, Artificial Sequence
  Description of Artificial Sequence: Synthetic oligonucleotide
ugguaguaguggauugcaa

SEQ ID NO: 1794671 - RNA, 19 nt, Artificial Sequence
  Description of Artificial Sequence: Synthetic oligonucleotide
acggcccaaauuguagaac

SEQ ID NO: 1794672 - RNA, 19 nt, Artificial Sequence
  Description of Artificial Sequence: Synthetic oligonucleotide
uagaacgauuccuggcaaa

SEQ ID NO: 1794673 - RNA, 19 nt, Artificial Sequence
  Description of Artificial Sequence: Synthetic oligonucleotide
cuugggcucuauucaucgc

SEQ ID NO: 1794674 - RNA, 19 nt, Artificial Sequence
  Description of Artificial Sequence: Synthetic oligonucleotide
auaagucacucaaaguaua

SEQ ID NO: 1794675 - RNA, 19 nt, Artificial Sequence
  Description of Artificial Sequence: Synthetic oligonucleotide
uuauuaccaucaccugaua

SEQ ID NO: 1794676 - RNA, 19 nt, Artificial Sequence
  Description of Artificial Sequence: Synthetic oligonucleotide
cacguaugcugagguaucg

SEQ ID NO: 1794677 - RNA, 19 nt, Artificial Sequence
  Description of Artificial Sequence: Synthetic oligonucleotide
uucuuaguucuuugcguuu

SEQ ID NO: 1794678 - RNA, 19 nt, Artificial Sequence
  Description of Artificial Sequence: Synthetic oligonucleotide
uuuucgggguuuucagcau

SEQ ID NO: 1794679 - RNA, 19 nt, Artificial Sequence
  Description of Artificial Sequence: Synthetic oligonucleotide
aaagcauggcuagcauggu

SEQ ID NO: 1794680 - RNA, 19 nt, Artificial Sequence
  Description of Artificial Sequence: Synthetic oligonucleotide
aggucuaacuggucaacuu

SEQ ID NO: 1794681 - RNA, 19 nt, Artificial Sequence
  Description of Artificial Sequence: Synthetic oligonucleotide
ggugagucagucccaguug

SEQ ID NO: 1794682 - RNA, 19 nt, Artificial Sequence
  Description of Artificial Sequence: Synthetic oligonucleotide
gguauccagauaaccauac

SEQ ID NO: 1794683 - RNA, 19 nt, Artificial Sequence
  Description of Artificial Sequence: Synthetic oligonucleotide
cacagcuagcagugaagac

SEQ ID NO: 1794684 - RNA, 19 nt, Artificial Sequence
  Description of Artificial Sequence: Synthetic oligonucleotide
gaccgaaguauucuuaguu

SEQ ID NO: 1794685 - RNA, 19 nt, Artificial Sequence
  Description of Artificial Sequence: Synthetic oligonucleotide
guaacuugauuauuaccau

SEQ ID NO: 1794686 - RNA, 19 nt, Artificial Sequence
  Description of Artificial Sequence: Synthetic oligonucleotide
aucuuuuggcaagacacuu

SEQ ID NO: 1794687 - RNA, 19 nt, Artificial Sequence
  Description of Artificial Sequence: Synthetic oligonucleotide
gucauaugccuuucuguaa

SEQ ID NO: 1794688 - RNA, 19 nt, Artificial Sequence
  Description of Artificial Sequence: Synthetic oligonucleotide
cuaccacaagcggagggag

SEQ ID NO: 1794689 - RNA, 19 nt, Artificial Sequence
  Description of Artificial Sequence: Synthetic oligonucleotide
guaggcacucuacagccaa

SEQ ID NO: 1794690 - RNA, 19 nt, Artificial Sequence
  Description of Artificial Sequence: Synthetic oligonucleotide
acguaugcugagguaucgg

SEQ ID NO: 1794691 - RNA, 19 nt, Artificial Sequence
  Description of Artificial Sequence: Synthetic oligonucleotide
gauagaccgaaguauucuu

SEQ ID NO: 1794692 - RNA, 19 nt, Artificial Sequence
  Description of Artificial Sequence: Synthetic oligonucleotide
uccagaauugcagcagaua

SEQ ID NO: 1794693 - RNA, 19 nt, Artificial Sequence
  Description of Artificial Sequence: Synthetic oligonucleotide
gguaucggggauaggcacg

SEQ ID NO: 1794694 - RNA, 19 nt, Artificial Sequence
  Description of Artificial Sequence: Synthetic oligonucleotide
cauacauugguuccuuccu

SEQ ID NO: 1794695 - RNA, 19 nt, Artificial Sequence
  Description of Artificial Sequence: Synthetic oligonucleotide
caagcggagggagugccag

SEQ ID NO: 1794696 - RNA, 19 nt, Artificial Sequence
  Description of Artificial Sequence: Synthetic oligonucleotide
auccugggcuaauguaucu

SEQ ID NO: 1794697 - RNA, 19 nt, Artificial Sequence
  Description of Artificial Sequence: Synthetic oligonucleotide
guguccauuuagaacgcac

SEQ ID NO: 1794698 - RNA, 19 nt, Artificial Sequence
  Description of Artificial Sequence: Synthetic oligonucleotide
uaucucuucgaaggucuaa

SEQ ID NO: 1794699 - RNA, 19 nt, Artificial Sequence
  Description of Artificial Sequence: Synthetic oligonucleotide
agguccacguaugcugagg

SEQ ID NO: 1794700 - RNA, 19 nt, Artificial Sequence
  Description of Artificial Sequence: Synthetic oligonucleotide
ugagucagucccaguugau

SEQ ID NO: 1794701 - RNA, 19 nt, Artificial Sequence
  Description of Artificial Sequence: Synthetic oligonucleotide
cggcccaaauuguagaacg

SEQ ID NO: 1794702 - RNA, 19 nt, Artificial Sequence
  Description of Artificial Sequence: Synthetic oligonucleotide
guagaacgauuccuggcaa

SEQ ID NO: 1794703 - RNA, 19 nt, Artificial Sequence
  Description of Artificial Sequence: Synthetic oligonucleotide
gaacgaugaagcaguaacu

SEQ ID NO: 1794704 - RNA, 19 nt, Artificial Sequence
  Description of Artificial Sequence: Synthetic oligonucleotide
ugcaugauuuucgggguuu

SEQ ID NO: 1794705 - RNA, 19 nt, Artificial Sequence
  Description of Artificial Sequence: Synthetic oligonucleotide
caccugauauagucauaug

SEQ ID NO: 1794706 - RNA, 19 nt, Artificial Sequence
  Description of Artificial Sequence: Synthetic oligonucleotide
ggcaaagguccacguaugc

SEQ ID NO: 1794707 - RNA, 19 nt, Artificial Sequence
  Description of Artificial Sequence: Synthetic oligonucleotide
uuuuaucaucaagcauagu

SEQ ID NO: 1794708 - RNA, 19 nt, Artificial Sequence
  Description of Artificial Sequence: Synthetic oligonucleotide
cuucgaaggucuaacuggu

SEQ ID NO: 1794709 - RNA, 19 nt, Artificial Sequence
  Description of Artificial Sequence: Synthetic oligonucleotide
gccauugcaguguucccgc

SEQ ID NO: 1794710 - RNA, 19 nt, Artificial Sequence
  Description of Artificial Sequence: Synthetic oligonucleotide
ggcuagcauggucaguaag

SEQ ID NO: 1794711 - RNA, 19 nt, Artificial Sequence
  Description of Artificial Sequence: Synthetic oligonucleotide
uccuggcaaagguccacgu

SEQ ID NO: 1794712 - RNA, 19 nt, Artificial Sequence
  Description of Artificial Sequence: Synthetic oligonucleotide
  modified_base (6)..(6): a, c, u, g, unknown or other
cagagnuaaaagcaguguu

SEQ ID NO: 1794713 - RNA, 19 nt, Artificial Sequence
  Description of Artificial Sequence: Synthetic oligonucleotide
cuugugaguacagcaaaua

SEQ ID NO: 1794714 - RNA, 19 nt, Artificial Sequence
  Description of Artificial Sequence: Synthetic oligonucleotide
cucuacagccaagccacac

SEQ ID NO: 1794715 - RNA, 19 nt, Artificial Sequence
  Description of Artificial Sequence: Synthetic oligonucleotide
ggauugcaaggugagucag

SEQ ID NO: 1794716 - RNA, 19 nt, Artificial Sequence
  Description of Artificial Sequence: Synthetic oligonucleotide
aguggauugcaaggugagu

SEQ ID NO: 1794717 - RNA, 19 nt, Artificial Sequence
  Description of Artificial Sequence: Synthetic oligonucleotide
uuucucaguucugcgcuua

SEQ ID NO: 1794718 - RNA, 19 nt, Artificial Sequence
  Description of Artificial Sequence: Synthetic oligonucleotide
auauuccagugaagaaucu

SEQ ID NO: 1794719 - RNA, 19 nt, Artificial Sequence
  Description of Artificial Sequence: Synthetic oligonucleotide
ucgcaaccuuuaaaagcau

SEQ ID NO: 1794720 - RNA, 19 nt, Artificial Sequence
  Description of Artificial Sequence: Synthetic oligonucleotide
gaggugccuuucuccagac

SEQ ID NO: 1794721 - RNA, 19 nt, Artificial Sequence
  Description of Artificial Sequence: Synthetic oligonucleotide
cuggcaaagguccacguau

SEQ ID NO: 1794722 - RNA, 19 nt, Artificial Sequence
  Description of Artificial Sequence: Synthetic oligonucleotide
auaugacacaauagguaua

SEQ ID NO: 1794723 - RNA, 19 nt, Artificial Sequence
  Description of Artificial Sequence: Synthetic oligonucleotide
uucucaguucugcgcuuau

SEQ ID NO: 1794724 - RNA, 19 nt, Artificial Sequence
  Description of Artificial Sequence: Synthetic oligonucleotide
ccagcuuucaaaggugcag

SEQ ID NO: 1794725 - RNA, 19 nt, Artificial Sequence
  Description of Artificial Sequence: Synthetic oligonucleotide
gcugagguaucggggauag

SEQ ID NO: 1794726 - RNA, 19 nt, Artificial Sequence
  Description of Artificial Sequence: Synthetic oligonucleotide
ugcguguuugaagcuccca

SEQ ID NO: 1794727 - RNA, 19 nt, Artificial Sequence
  Description of Artificial Sequence: Synthetic oligonucleotide
gcucccagauacaaaagca

SEQ ID NO: 1794728 - RNA, 19 nt, Artificial Sequence
  Description of Artificial Sequence: Synthetic oligonucleotide
ucccgcugcucugauaaau

SEQ ID NO: 1794729 - RNA, 19 nt, Artificial Sequence
  Description of Artificial Sequence: Synthetic oligonucleotide
uccacgcagccccuuucuc

SEQ ID NO: 1794730 - RNA, 19 nt, Artificial Sequence
  Description of Artificial Sequence: Synthetic oligonucleotide
gaaugcaugguaacuugau

SEQ ID NO: 1794731 - RNA, 19 nt, Artificial Sequence
  Description of Artificial Sequence: Synthetic oligonucleotide
caugauuuucgggguuuuc

SEQ ID NO: 1794732 - RNA, 19 nt, Artificial Sequence
  Description of Artificial Sequence: Synthetic oligonucleotide
ugugcggcauuugcauccu

SEQ ID NO: 1794733 - RNA, 19 nt, Artificial Sequence
  Description of Artificial Sequence: Synthetic oligonucleotide
cuagcauggucaguaaggu

SEQ ID NO: 1794734 - RNA, 19 nt, Artificial Sequence
  Description of Artificial Sequence: Synthetic oligonucleotide
cucccagauacaaaagcau

SEQ ID NO: 1794735 - RNA, 19 nt, Artificial Sequence
  Description of Artificial Sequence: Synthetic oligonucleotide
cggagggagugccagagcc

SEQ ID NO: 1794736 - RNA, 19 nt, Artificial Sequence
  Description of Artificial Sequence: Synthetic oligonucleotide
cugcugugcggcauuugca

SEQ ID NO: 1794737 - RNA, 19 nt, Artificial Sequence
  Description of Artificial Sequence: Synthetic oligonucleotide
uggcuagcauggucaguaa

SEQ ID NO: 1794738 - RNA, 19 nt, Artificial Sequence
  Description of Artificial Sequence: Synthetic oligonucleotide
cugcgcuuauaugacacaa

SEQ ID NO: 1794739 - RNA, 19 nt, Artificial Sequence
  Description of Artificial Sequence: Synthetic oligonucleotide
uacuguccaagugcguguu

SEQ ID NO: 1794740 - RNA, 19 nt, Artificial Sequence
  Description of Artificial Sequence: Synthetic oligonucleotide
ggucaguaagguauccaga

SEQ ID NO: 1794741 - RNA, 19 nt, Artificial Sequence
  Description of Artificial Sequence: Synthetic oligonucleotide
gcaauucagcuucuuggaa

SEQ ID NO: 1794742 - RNA, 19 nt, Artificial Sequence
  Description of Artificial Sequence: Synthetic oligonucleotide
gggauaagucacucaaagu

SEQ ID NO: 1794743 - RNA, 19 nt, Artificial Sequence
  Description of Artificial Sequence: Synthetic oligonucleotide
cuaacuggucaacuucuau

SEQ ID NO: 1794744 - RNA, 19 nt, Artificial Sequence
  Description of Artificial Sequence: Synthetic oligonucleotide
ugcugagguaucggggaua

SEQ ID NO: 1794745 - RNA, 19 nt, Artificial Sequence
  Description of Artificial Sequence: Synthetic oligonucleotide
aguuccugcugugcggcau

SEQ ID NO: 1794746 - RNA, 19 nt, Artificial Sequence
  Description of Artificial Sequence: Synthetic oligonucleotide
auuugcauccugggcuaau

SEQ ID NO: 1794747 - RNA, 19 nt, Artificial Sequence
  Description of Artificial Sequence: Synthetic oligonucleotide
gauugcaaggugagucagu

SEQ ID NO: 1794748 - RNA, 19 nt, Artificial Sequence
  Description of Artificial Sequence: Synthetic oligonucleotide
uguucccgcugcucugaua

SEQ ID NO: 1794749 - RNA, 19 nt, Artificial Sequence
  Description of Artificial Sequence: Synthetic oligonucleotide
gcucuauucaucgcaaccu

SEQ ID NO: 1794750 - RNA, 19 nt, Artificial Sequence
  Description of Artificial Sequence: Synthetic oligonucleotide
cccgcugcucugauaaaug

SEQ ID NO: 1794751 - RNA, 19 nt, Artificial Sequence
  Description of Artificial Sequence: Synthetic oligonucleotide
ccaucaccugauauaguca

SEQ ID NO: 1794752 - RNA, 19 nt, Artificial Sequence
  Description of Artificial Sequence: Synthetic oligonucleotide
acgcacagugcaugauuuu

SEQ ID NO: 1794753 - RNA, 19 nt, Artificial Sequence
  Description of Artificial Sequence: Synthetic oligonucleotide
ggccuucaagagaagguuc

SEQ ID NO: 1794754 - RNA, 19 nt, Artificial Sequence
  Description of Artificial Sequence: Synthetic oligonucleotide
caucuugagaaugcauggu

SEQ ID NO: 1794755 - RNA, 19 nt, Artificial Sequence
  Description of Artificial Sequence: Synthetic oligonucleotide
gguccacguaugcugaggu

SEQ ID NO: 1794756 - RNA, 19 nt, Artificial Sequence
  Description of Artificial Sequence: Synthetic oligonucleotide
ccacguaugcugagguauc

SEQ ID NO: 1794757 - RNA, 19 nt, Artificial Sequence
  Description of Artificial Sequence: Synthetic oligonucleotide
ccaguugaugaaggccacg

SEQ ID NO: 1794758 - RNA, 19 nt, Artificial Sequence
  Description of Artificial Sequence: Synthetic oligonucleotide
auaucucuucgaaggucua

SEQ ID NO: 1794759 - RNA, 19 nt, Artificial Sequence
  Description of Artificial Sequence: Synthetic oligonucleotide
cauuguugucugauauuuu

SEQ ID NO: 1794760 - RNA, 19 nt, Artificial Sequence
  Description of Artificial Sequence: Synthetic oligonucleotide
uucccgcugcucugauaaa

SEQ ID NO: 1794761 - RNA, 19 nt, Artificial Sequence
  Description of Artificial Sequence: Synthetic oligonucleotide
gcugugcggcauuugcauc

SEQ ID NO: 1794762 - RNA, 19 nt, Artificial Sequence
  Description of Artificial Sequence: Synthetic oligonucleotide
gggcucuauucaucgcaac

SEQ ID NO: 1794763 - RNA, 19 nt, Artificial Sequence
  Description of Artificial Sequence: Synthetic oligonucleotide
agggagugccagagccuuc

SEQ ID NO: 1794764 - RNA, 19 nt, Artificial Sequence
  Description of Artificial Sequence: Synthetic oligonucleotide
caagugcguguuugaagcu

SEQ ID NO: 1794765 - RNA, 19 nt, Artificial Sequence
  Description of Artificial Sequence: Synthetic oligonucleotide
guagaacgaugaagcagua

SEQ ID NO: 1794766 - RNA, 19 nt, Artificial Sequence
  Description of Artificial Sequence: Synthetic oligonucleotide
acuuggaacuggagaucaa

SEQ ID NO: 1794767 - RNA, 19 nt, Artificial Sequence
  Description of Artificial Sequence: Synthetic oligonucleotide
cagaagcgaugaugucuca

SEQ ID NO: 1794768 - RNA, 19 nt, Artificial Sequence
  Description of Artificial Sequence: Synthetic oligonucleotide
  modified_base (7)..(7): a, c, u, g, unknown or other
ccagagnuaaaagcagugu

SEQ ID NO: 1794769 - RNA, 19 nt, Artificial Sequence
  Description of Artificial Sequence: Synthetic oligonucleotide
guccacguaugcugaggua

SEQ ID NO: 1794770 - RNA, 19 nt, Artificial Sequence
  Description of Artificial Sequence: Synthetic oligonucleotide
aggcggagacagaagcgau

SEQ ID NO: 1794771 - RNA, 19 nt, Artificial Sequence
  Description of Artificial Sequence: Synthetic oligonucleotide
uaucggggauaggcacgga

SEQ ID NO: 1794772 - RNA, 19 nt, Artificial Sequence
  Description of Artificial Sequence: Synthetic oligonucleotide
cggcauuugcauccugggc

SEQ ID NO: 1794773 - RNA, 19 nt, Artificial Sequence
  Description of Artificial Sequence: Synthetic oligonucleotide
acgcagccccuuucucagu

SEQ ID NO: 1794774 - RNA, 19 nt, Artificial Sequence
  Description of Artificial Sequence: Synthetic oligonucleotide
gcagauagaccgaaguauu

SEQ ID NO: 1794775 - RNA, 19 nt, Artificial Sequence
  Description of Artificial Sequence: Synthetic oligonucleotide
ccgcugcucugauaaauga

SEQ ID NO: 1794776 - RNA, 19 nt, Artificial Sequence
  Description of Artificial Sequence: Synthetic oligonucleotide
ccccucuaccacaagcgga

SEQ ID NO: 1794777 - RNA, 19 nt, Artificial Sequence
  Description of Artificial Sequence: Synthetic oligonucleotide
gguaggcacucuacagcca

SEQ ID NO: 1794778 - RNA, 19 nt, Artificial Sequence
  Description of Artificial Sequence: Synthetic oligonucleotide
gugcggcauuugcauccug

SEQ ID NO: 1794779 - RNA, 19 nt, Artificial Sequence
  Description of Artificial Sequence: Synthetic oligonucleotide
cgaaggucuaacuggucaa

SEQ ID NO: 1794780 - RNA, 19 nt, Artificial Sequence
  Description of Artificial Sequence: Synthetic oligonucleotide
ccagauaaccauacauuuu

SEQ ID NO: 1794781 - RNA, 19 nt, Artificial Sequence
  Description of Artificial Sequence: Synthetic oligonucleotide
cccaaauuguagaacgauu

SEQ ID NO: 1794782 - RNA, 19 nt, Artificial Sequence
  Description of Artificial Sequence: Synthetic oligonucleotide
cccagcuuucaaaggugca

SEQ ID NO: 1794783 - RNA, 19 nt, Artificial Sequence
  Description of Artificial Sequence: Synthetic oligonucleotide
caguuccugcugugcggca

SEQ ID NO: 1794784 - RNA, 19 nt, Artificial Sequence
  Description of Artificial Sequence: Synthetic oligonucleotide
ggauaggcacggaaggcuu

SEQ ID NO: 1794785 - RNA, 19 nt, Artificial Sequence
  Description of Artificial Sequence: Synthetic oligonucleotide
gcgggauaagucacucaaa

SEQ ID NO: 1794786 - RNA, 19 nt, Artificial Sequence
  Description of Artificial Sequence: Synthetic oligonucleotide
ccuggcaaagguccacgua

SEQ ID NO: 1794787 - RNA, 19 nt, Artificial Sequence
  Description of Artificial Sequence: Synthetic oligonucleotide
gcaugauuuucgggguuuu

SEQ ID NO: 1794788 - RNA, 19 nt, Artificial Sequence
  Description of Artificial Sequence: Synthetic oligonucleotide
ccauugcaguguucccgcu

SEQ ID NO: 1794789 - RNA, 19 nt, Artificial Sequence
  Description of Artificial Sequence: Synthetic oligonucleotide
aaggucuaauuuuauaucc

SEQ ID NO: 1794790 - RNA, 19 nt, Artificial Sequence
  Description of Artificial Sequence: Synthetic oligonucleotide
uuuaaaauuacaagguuug

SEQ ID NO: 1794791 - RNA, 19 nt, Artificial Sequence
  Description of Artificial Sequence: Synthetic oligonucleotide
aaaugcuucccuuucacac

SEQ ID NO: 1794792 - RNA, 19 nt, Artificial Sequence
  Description of Artificial Sequence: Synthetic oligonucleotide
auauuuaucgcauauuauc

SEQ ID NO: 1794793 - RNA, 19 nt, Artificial Sequence
  Description of Artificial Sequence: Synthetic oligonucleotide
aaggaaugaaauuacagcu

SEQ ID NO: 1794794 - RNA, 19 nt, Artificial Sequence
  Description of Artificial Sequence: Synthetic oligonucleotide
ucuguugacaaacaccucg

SEQ ID NO: 1794795 - RNA, 19 nt, Artificial Sequence
  Description of Artificial Sequence: Synthetic oligonucleotide
aaugucaagucccucuacc

SEQ ID NO: 1794796 - RNA, 19 nt, Artificial Sequence
  Description of Artificial Sequence: Synthetic oligonucleotide
agugauauaucuuuuagca

SEQ ID NO: 1794797 - RNA, 19 nt, Artificial Sequence
  Description of Artificial Sequence: Synthetic oligonucleotide
aaaauuacaagguuugaau

SEQ ID NO: 1794798 - RNA, 19 nt, Artificial Sequence
  Description of Artificial Sequence: Synthetic oligonucleotide
ugauauaucuuuuagcacu

SEQ ID NO: 1794799 - RNA, 19 nt, Artificial Sequence
  Description of Artificial Sequence: Synthetic oligonucleotide
aaugcuucccuuucacacc

SEQ ID NO: 1794800 - RNA, 19 nt, Artificial Sequence
  Description of Artificial Sequence: Synthetic oligonucleotide
uucaccuuauucauggacg

SEQ ID NO: 1794801 - RNA, 19 nt, Artificial Sequence
  Description of Artificial Sequence: Synthetic oligonucleotide
aaaccuccaaaauacagug

SEQ ID NO: 1794802 - RNA, 19 nt, Artificial Sequence
  Description of Artificial Sequence: Synthetic oligonucleotide
uugauuauguuuaaagacu

SEQ ID NO: 1794803 - RNA, 19 nt, Artificial Sequence
  Description of Artificial Sequence: Synthetic oligonucleotide
gguuugaauauauuuaucg

SEQ ID NO: 1794804 - RNA, 19 nt, Artificial Sequence
  Description of Artificial Sequence: Synthetic oligonucleotide
uauuuaucgcauauuaucu

SEQ ID NO: 1794805 - RNA, 19 nt, Artificial Sequence
  Description of Artificial Sequence: Synthetic oligonucleotide
ucucuuaaaacacuagaca

SEQ ID NO: 1794806 - RNA, 19 nt, Artificial Sequence
  Description of Artificial Sequence: Synthetic oligonucleotide
aauacagugaucgauucug

SEQ ID NO: 1794807 - RNA, 19 nt, Artificial Sequence
  Description of Artificial Sequence: Synthetic oligonucleotide
uagcacaaaaucuaaaucu

SEQ ID NO: 1794808 - RNA, 19 nt, Artificial Sequence
  Description of Artificial Sequence: Synthetic oligonucleotide
cuugaugugauccaccugc

SEQ ID NO: 1794809 - RNA, 19 nt, Artificial Sequence
  Description of Artificial Sequence: Synthetic oligonucleotide
aguuaggucagcuuggcag

SEQ ID NO: 1794810 - RNA, 19 nt, Artificial Sequence
  Description of Artificial Sequence: Synthetic oligonucleotide
agugaugucugacccaugc

SEQ ID NO: 1794811 - RNA, 19 nt, Artificial Sequence
  Description of Artificial Sequence: Synthetic oligonucleotide
uuuaguugaaagcuugcug

SEQ ID NO: 1794812 - RNA, 19 nt, Artificial Sequence
  Description of Artificial Sequence: Synthetic oligonucleotide
gaaauuacagcucauucuc

SEQ ID NO: 1794813 - RNA, 19 nt, Artificial Sequence
  Description of Artificial Sequence: Synthetic oligonucleotide
uguuuuaguugaaagcuug

SEQ ID NO: 1794814 - RNA, 19 nt, Artificial Sequence
  Description of Artificial Sequence: Synthetic oligonucleotide
uuauguuuaaagacuuugc

SEQ ID NO: 1794815 - RNA, 19 nt, Artificial Sequence
  Description of Artificial Sequence: Synthetic oligonucleotide
uacaaugaaguggugaagg

SEQ ID NO: 1794816 - RNA, 19 nt, Artificial Sequence
  Description of Artificial Sequence: Synthetic oligonucleotide
uuugcacucucuuaaaaca

SEQ ID NO: 1794817 - RNA, 19 nt, Artificial Sequence
  Description of Artificial Sequence: Synthetic oligonucleotide
ucgcauauuaucuauguac

SEQ ID NO: 1794818 - RNA, 19 nt, Artificial Sequence
  Description of Artificial Sequence: Synthetic oligonucleotide
aauuacagcucauucucug

SEQ ID NO: 1794819 - RNA, 19 nt, Artificial Sequence
  Description of Artificial Sequence: Synthetic oligonucleotide
cuccaaaauacagugaucg

SEQ ID NO: 1794820 - RNA, 19 nt, Artificial Sequence
  Description of Artificial Sequence: Synthetic oligonucleotide
uucgugaucucuuccaagg

SEQ ID NO: 1794821 - RNA, 19 nt, Artificial Sequence
  Description of Artificial Sequence: Synthetic oligonucleotide
acuguuauuggaucggauc

SEQ ID NO: 1794822 - RNA, 19 nt, Artificial Sequence
  Description of Artificial Sequence: Synthetic oligonucleotide
agaagugaccuucugcugg

SEQ ID NO: 1794823 - RNA, 19 nt, Artificial Sequence
  Description of Artificial Sequence: Synthetic oligonucleotide
acaaacaugaaaugucaag

SEQ ID NO: 1794824 - RNA, 19 nt, Artificial Sequence
  Description of Artificial Sequence: Synthetic oligonucleotide
uugaauauauuuaucgcau

SEQ ID NO: 1794825 - RNA, 19 nt, Artificial Sequence
  Description of Artificial Sequence: Synthetic oligonucleotide
acaugaaaugucaaguccc

SEQ ID NO: 1794826 - RNA, 19 nt, Artificial Sequence
  Description of Artificial Sequence: Synthetic oligonucleotide
guuugaauauauuuaucgc

SEQ ID NO: 1794827 - RNA, 19 nt, Artificial Sequence
  Description of Artificial Sequence: Synthetic oligonucleotide
ugauccaccugccagaagu

SEQ ID NO: 1794828 - RNA, 19 nt, Artificial Sequence
  Description of Artificial Sequence: Synthetic oligonucleotide
uuagcacaaaaucuaaauc

SEQ ID NO: 1794829 - RNA, 19 nt, Artificial Sequence
  Description of Artificial Sequence: Synthetic oligonucleotide
uucauuuagcugcugacac

SEQ ID NO: 1794830 - RNA, 19 nt, Artificial Sequence
  Description of Artificial Sequence: Synthetic oligonucleotide
aaaucucaguucuugauua

SEQ ID NO: 1794831 - RNA, 19 nt, Artificial Sequence
  Description of Artificial Sequence: Synthetic oligonucleotide
gaugugauccaccugccag

SEQ ID NO: 1794832 - RNA, 19 nt, Artificial Sequence
  Description of Artificial Sequence: Synthetic oligonucleotide
uguacaaugaaguggugaa

SEQ ID NO: 1794833 - RNA, 19 nt, Artificial Sequence
  Description of Artificial Sequence: Synthetic oligonucleotide
gacuauuccacucucggac

SEQ ID NO: 1794834 - RNA, 19 nt, Artificial Sequence
  Description of Artificial Sequence: Synthetic oligonucleotide
agaaaugcuucccuuucac

SEQ ID NO: 1794835 - RNA, 19 nt, Artificial Sequence
  Description of Artificial Sequence: Synthetic oligonucleotide
cacaaaaucuaaaucucag

SEQ ID NO: 1794836 - RNA, 19 nt, Artificial Sequence
  Description of Artificial Sequence: Synthetic oligonucleotide
cuguuauuggaucggaucc

SEQ ID NO: 1794837 - RNA, 19 nt, Artificial Sequence
  Description of Artificial Sequence: Synthetic oligonucleotide
ucagguaacuguuauugga

SEQ ID NO: 1794838 - RNA, 19 nt, Artificial Sequence
  Description of Artificial Sequence: Synthetic oligonucleotide
aaaugucaagucccucuac

SEQ ID NO: 1794839 - RNA, 19 nt, Artificial Sequence
  Description of Artificial Sequence: Synthetic oligonucleotide
uaauuggcaaucugcauga

SEQ ID NO: 1794840 - RNA, 19 nt, Artificial Sequence
  Description of Artificial Sequence: Synthetic oligonucleotide
uuuagcugcugacacacac

SEQ ID NO: 1794841 - RNA, 19 nt, Artificial Sequence
  Description of Artificial Sequence: Synthetic oligonucleotide
cucucuuaaaacacuagac

SEQ ID NO: 1794842 - RNA, 19 nt, Artificial Sequence
  Description of Artificial Sequence: Synthetic oligonucleotide
uuguagaagggucccgugg

SEQ ID NO: 1794843 - RNA, 19 nt, Artificial Sequence
  Description of Artificial Sequence: Synthetic oligonucleotide
aagucauuugcucuguuua

SEQ ID NO: 1794844 - RNA, 19 nt, Artificial Sequence
  Description of Artificial Sequence: Synthetic oligonucleotide
uguagaagggucccguggc

SEQ ID NO: 1794845 - RNA, 19 nt, Artificial Sequence
  Description of Artificial Sequence: Synthetic oligonucleotide
cuaccugcaagucauuugc

SEQ ID NO: 1794846 - RNA, 19 nt, Artificial Sequence
  Description of Artificial Sequence: Synthetic oligonucleotide
ugauuauguuuaaagacuu

SEQ ID NO: 1794847 - RNA, 19 nt, Artificial Sequence
  Description of Artificial Sequence: Synthetic oligonucleotide
aaaucuugcugaaacauaa

SEQ ID NO: 1794848 - RNA, 19 nt, Artificial Sequence
  Description of Artificial Sequence: Synthetic oligonucleotide
uuuaucgcauauuaucuau

SEQ ID NO: 1794849 - RNA, 19 nt, Artificial Sequence
  Description of Artificial Sequence: Synthetic oligonucleotide
auuacagcucauucucugg

SEQ ID NO: 1794850 - RNA, 19 nt, Artificial Sequence
  Description of Artificial Sequence: Synthetic oligonucleotide
ucgauucuguuuuaguuga

SEQ ID NO: 1794851 - RNA, 19 nt, Artificial Sequence
  Description of Artificial Sequence: Synthetic oligonucleotide
ucucaguucuugauuaugu

SEQ ID NO: 1794852 - RNA, 19 nt, Artificial Sequence
  Description of Artificial Sequence: Synthetic oligonucleotide
cuuuggaugaggauggcuc

SEQ ID NO: 1794853 - RNA, 19 nt, Artificial Sequence
  Description of Artificial Sequence: Synthetic oligonucleotide
agucauuugcucuguuuac

SEQ ID NO: 1794854 - RNA, 19 nt, Artificial Sequence
  Description of Artificial Sequence: Synthetic oligonucleotide
ugacccaugcuucaaugcc

SEQ ID NO: 1794855 - RNA, 19 nt, Artificial Sequence
  Description of Artificial Sequence: Synthetic oligonucleotide
uauuggaucggauccagaa

SEQ ID NO: 1794856 - RNA, 19 nt, Artificial Sequence
  Description of Artificial Sequence: Synthetic oligonucleotide
gguaacuguuauuggaucg

SEQ ID NO: 1794857 - RNA, 19 nt, Artificial Sequence
  Description of Artificial Sequence: Synthetic oligonucleotide
acuagacaaacaugaaaug

SEQ ID NO: 1794858 - RNA, 19 nt, Artificial Sequence
  Description of Artificial Sequence: Synthetic oligonucleotide
ucagacuauuccacucucg

SEQ ID NO: 1794859 - RNA, 19 nt, Artificial Sequence
  Description of Artificial Sequence: Synthetic oligonucleotide
uaucgcauauuaucuaugu

SEQ ID NO: 1794860 - RNA, 19 nt, Artificial Sequence
  Description of Artificial Sequence: Synthetic oligonucleotide
ucuaaaucucaguucuuga

SEQ ID NO: 1794861 - RNA, 19 nt, Artificial Sequence
  Description of Artificial Sequence: Synthetic oligonucleotide
guuaggucagcuuggcagg

SEQ ID NO: 1794862 - RNA, 19 nt, Artificial Sequence
  Description of Artificial Sequence: Synthetic oligonucleotide
acucucuuaaaacacuaga

SEQ ID NO: 1794863 - RNA, 19 nt, Artificial Sequence
  Description of Artificial Sequence: Synthetic oligonucleotide
uaaaucucaguucuugauu

SEQ ID NO: 1794864 - RNA, 19 nt, Artificial Sequence
  Description of Artificial Sequence: Synthetic oligonucleotide
cacuucagggagcagaacc

SEQ ID NO: 1794865 - RNA, 19 nt, Artificial Sequence
  Description of Artificial Sequence: Synthetic oligonucleotide
agaaccgugagucccaggu

SEQ ID NO: 1794866 - RNA, 19 nt, Artificial Sequence
  Description of Artificial Sequence: Synthetic oligonucleotide
caacaguuaggucagcuug

SEQ ID NO: 1794867 - RNA, 19 nt, Artificial Sequence
  Description of Artificial Sequence: Synthetic oligonucleotide
augaggauggcucaacagu

SEQ ID NO: 1794868 - RNA, 19 nt, Artificial Sequence
  Description of Artificial Sequence: Synthetic oligonucleotide
aacaguuaggucagcuugg

SEQ ID NO: 1794869 - RNA, 19 nt, Artificial Sequence
  Description of Artificial Sequence: Synthetic oligonucleotide
uguuucgugaucucuucca

SEQ ID NO: 1794870 - RNA, 19 nt, Artificial Sequence
  Description of Artificial Sequence: Synthetic oligonucleotide
uuggaucggauccagaauu

SEQ ID NO: 1794871 - RNA, 19 nt, Artificial Sequence
  Description of Artificial Sequence: Synthetic oligonucleotide
accuuauucauggacgccg

SEQ ID NO: 1794872 - RNA, 19 nt, Artificial Sequence
  Description of Artificial Sequence: Synthetic oligonucleotide
gggugcuuaacacaaagag

SEQ ID NO: 1794873 - RNA, 19 nt, Artificial Sequence
  Description of Artificial Sequence: Synthetic oligonucleotide
ucaccuuauucauggacgc

SEQ ID NO: 1794874 - RNA, 19 nt, Artificial Sequence
  Description of Artificial Sequence: Synthetic oligonucleotide
cagacuauuccacucucgg

SEQ ID NO: 1794875 - RNA, 19 nt, Artificial Sequence
  Description of Artificial Sequence: Synthetic oligonucleotide
uuaaagacuuugcacucuc

SEQ ID NO: 1794876 - RNA, 19 nt, Artificial Sequence
  Description of Artificial Sequence: Synthetic oligonucleotide
gaagugaccuucugcuggg

SEQ ID NO: 1794877 - RNA, 19 nt, Artificial Sequence
  Description of Artificial Sequence: Synthetic oligonucleotide
cucccuggugaucagacgg

SEQ ID NO: 1794878 - RNA, 19 nt, Artificial Sequence
  Description of Artificial Sequence: Synthetic oligonucleotide
aaugaaauuacagcucauu

SEQ ID NO: 1794879 - RNA, 19 nt, Artificial Sequence
  Description of Artificial Sequence: Synthetic oligonucleotide
uggucuuggacccuugcac

SEQ ID NO: 1794880 - RNA, 19 nt, Artificial Sequence
  Description of Artificial Sequence: Synthetic oligonucleotide
auauccaaaggaaugaaau

SEQ ID NO: 1794881 - RNA, 19 nt, Artificial Sequence
  Description of Artificial Sequence: Synthetic oligonucleotide
aacaccucgggcccucagg

SEQ ID NO: 1794882 - RNA, 19 nt, Artificial Sequence
  Description of Artificial Sequence: Synthetic oligonucleotide
ucauuugcucuguuuacac

SEQ ID NO: 1794883 - RNA, 19 nt, Artificial Sequence
  Description of Artificial Sequence: Synthetic oligonucleotide
ugcaugaagcccacaagac

SEQ ID NO: 1794884 - RNA, 19 nt, Artificial Sequence
  Description of Artificial Sequence: Synthetic oligonucleotide
cuguugacaaacaccucgg

SEQ ID NO: 1794885 - RNA, 19 nt, Artificial Sequence
  Description of Artificial Sequence: Synthetic oligonucleotide
guaacuguuauuggaucgg

SEQ ID NO: 1794886 - RNA, 19 nt, Artificial Sequence
  Description of Artificial Sequence: Synthetic oligonucleotide
uuuggaugaggauggcuca

SEQ ID NO: 1794887 - RNA, 19 nt, Artificial Sequence
  Description of Artificial Sequence: Synthetic oligonucleotide
uuuuaguugaaagcuugcu

SEQ ID NO: 1794888 - RNA, 19 nt, Artificial Sequence
  Description of Artificial Sequence: Synthetic oligonucleotide
uuaaaauuacaagguuuga

SEQ ID NO: 1794889 - RNA, 19 nt, Artificial Sequence
  Description of Artificial Sequence: Synthetic oligonucleotide
aggaaugaaauuacagcuc

SEQ ID NO: 1794890 - RNA, 19 nt, Artificial Sequence
  Description of Artificial Sequence: Synthetic oligonucleotide
aggccgaacaaaaucuugc

SEQ ID NO: 1794891 - RNA, 19 nt, Artificial Sequence
  Description of Artificial Sequence: Synthetic oligonucleotide
cuguuuacaccucugucug

SEQ ID NO: 1794892 - RNA, 19 nt, Artificial Sequence
  Description of Artificial Sequence: Synthetic oligonucleotide
uuucgugaucucuuccaag

SEQ ID NO: 1794893 - RNA, 19 nt, Artificial Sequence
  Description of Artificial Sequence: Synthetic oligonucleotide
aagacuuugcacucucuua

SEQ ID NO: 1794894 - RNA, 19 nt, Artificial Sequence
  Description of Artificial Sequence: Synthetic oligonucleotide
gucaagucccucuaccugc

SEQ ID NO: 1794895 - RNA, 19 nt, Artificial Sequence
  Description of Artificial Sequence: Synthetic oligonucleotide
cauuuagcugcugacacac

SEQ ID NO: 1794896 - RNA, 19 nt, Artificial Sequence
  Description of Artificial Sequence: Synthetic oligonucleotide
acacuagacaaacaugaaa

SEQ ID NO: 1794897 - RNA, 19 nt, Artificial Sequence
  Description of Artificial Sequence: Synthetic oligonucleotide
caagguuugaauauauuua

SEQ ID NO: 1794898 - RNA, 19 nt, Artificial Sequence
  Description of Artificial Sequence: Synthetic oligonucleotide
acaaaccuccaaaauacag

SEQ ID NO: 1794899 - RNA, 19 nt, Artificial Sequence
  Description of Artificial Sequence: Synthetic oligonucleotide
cucuccuuguggcacaccg

SEQ ID NO: 1794900 - RNA, 19 nt, Artificial Sequence
  Description of Artificial Sequence: Synthetic oligonucleotide
ugcacucucuuaaaacacu

SEQ ID NO: 1794901 - RNA, 19 nt, Artificial Sequence
  Description of Artificial Sequence: Synthetic oligonucleotide
uaguugaaagcuugcuggc

SEQ ID NO: 1794902 - RNA, 19 nt, Artificial Sequence
  Description of Artificial Sequence: Synthetic oligonucleotide
cuauguacaaugaaguggu

SEQ ID NO: 1794903 - RNA, 19 nt, Artificial Sequence
  Description of Artificial Sequence: Synthetic oligonucleotide
ggaaugaaauuacagcuca

SEQ ID NO: 1794904 - RNA, 19 nt, Artificial Sequence
  Description of Artificial Sequence: Synthetic oligonucleotide
ucucggacaaaccuccaaa

SEQ ID NO: 1794905 - RNA, 19 nt, Artificial Sequence
  Description of Artificial Sequence: Synthetic oligonucleotide
cuggcaagugggaugcugg

SEQ ID NO: 1794906 - RNA, 19 nt, Artificial Sequence
  Description of Artificial Sequence: Synthetic oligonucleotide
cacucucggacaaaccucc

SEQ ID NO: 1794907 - RNA, 19 nt, Artificial Sequence
  Description of Artificial Sequence: Synthetic oligonucleotide
gugauauaucuuuuagcac

SEQ ID NO: 1794908 - RNA, 19 nt, Artificial Sequence
  Description of Artificial Sequence: Synthetic oligonucleotide
acauaauuggcaaucugca

SEQ ID NO: 1794909 - RNA, 19 nt, Artificial Sequence
  Description of Artificial Sequence: Synthetic oligonucleotide
auccaaaggaaugaaauua

SEQ ID NO: 1794910 - RNA, 19 nt, Artificial Sequence
  Description of Artificial Sequence: Synthetic oligonucleotide
uuuaaagacuuugcacucu

SEQ ID NO: 1794911 - RNA, 19 nt, Artificial Sequence
  Description of Artificial Sequence: Synthetic oligonucleotide
cuugcuggcaagucuuccc

SEQ ID NO: 1794912 - RNA, 19 nt, Artificial Sequence
  Description of Artificial Sequence: Synthetic oligonucleotide
ucggauccagaauucuucc

SEQ ID NO: 1794913 - RNA, 19 nt, Artificial Sequence
  Description of Artificial Sequence: Synthetic oligonucleotide
aucggauccagaauucuuc

SEQ ID NO: 1794914 - RNA, 19 nt, Artificial Sequence
  Description of Artificial Sequence: Synthetic oligonucleotide
ugaauauauuuaucgcaua

SEQ ID NO: 1794915 - RNA, 19 nt, Artificial Sequence
  Description of Artificial Sequence: Synthetic oligonucleotide
uuuuguagaagggucccgu

SEQ ID NO: 1794916 - RNA, 19 nt, Artificial Sequence
  Description of Artificial Sequence: Synthetic oligonucleotide
agucagacuauuccacucu

SEQ ID NO: 1794917 - RNA, 19 nt, Artificial Sequence
  Description of Artificial Sequence: Synthetic oligonucleotide
auuuaucgcauauuaucua

SEQ ID NO: 1794918 - RNA, 19 nt, Artificial Sequence
  Description of Artificial Sequence: Synthetic oligonucleotide
acuucagggagcagaaccg

SEQ ID NO: 1794919 - RNA, 19 nt, Artificial Sequence
  Description of Artificial Sequence: Synthetic oligonucleotide
gacacaggcuuugucaagc

SEQ ID NO: 1794920 - RNA, 19 nt, Artificial Sequence
  Description of Artificial Sequence: Synthetic oligonucleotide
uccaaaauacagugaucga

SEQ ID NO: 1794921 - RNA, 19 nt, Artificial Sequence
  Description of Artificial Sequence: Synthetic oligonucleotide
ucauuuagcugcugacaca

SEQ ID NO: 1794922 - RNA, 19 nt, Artificial Sequence
  Description of Artificial Sequence: Synthetic oligonucleotide
agacaaacaugaaauguca

SEQ ID NO: 1794923 - RNA, 19 nt, Artificial Sequence
  Description of Artificial Sequence: Synthetic oligonucleotide
auuccacucucggacaaac

SEQ ID NO: 1794924 - RNA, 19 nt, Artificial Sequence
  Description of Artificial Sequence: Synthetic oligonucleotide
uuuguagaagggucccgug

SEQ ID NO: 1794925 - RNA, 19 nt, Artificial Sequence
  Description of Artificial Sequence: Synthetic oligonucleotide
aauguagccuuuggaugag

SEQ ID NO: 1794926 - RNA, 19 nt, Artificial Sequence
  Description of Artificial Sequence: Synthetic oligonucleotide
uuauauccaaaggaaugaa

SEQ ID NO: 1794927 - RNA, 19 nt, Artificial Sequence
  Description of Artificial Sequence: Synthetic oligonucleotide
agaacagcugcccacuuuu

SEQ ID NO: 1794928 - RNA, 19 nt, Artificial Sequence
  Description of Artificial Sequence: Synthetic oligonucleotide
ucccaaaggucuaauuuua

SEQ ID NO: 1794929 - RNA, 19 nt, Artificial Sequence
  Description of Artificial Sequence: Synthetic oligonucleotide
uguuauuggaucggaucca

SEQ ID NO: 1794930 - RNA, 19 nt, Artificial Sequence
  Description of Artificial Sequence: Synthetic oligonucleotide
aaaaucuugcugaaacaua

SEQ ID NO: 1794931 - RNA, 19 nt, Artificial Sequence
  Description of Artificial Sequence: Synthetic oligonucleotide
auguacaaugaagugguga

SEQ ID NO: 1794932 - RNA, 19 nt, Artificial Sequence
  Description of Artificial Sequence: Synthetic oligonucleotide
gaucagacggauguggcca

SEQ ID NO: 1794933 - RNA, 19 nt, Artificial Sequence
  Description of Artificial Sequence: Synthetic oligonucleotide
acuauuccacucucggaca

SEQ ID NO: 1794934 - RNA, 19 nt, Artificial Sequence
  Description of Artificial Sequence: Synthetic oligonucleotide
ucgugaucucuuccaaggc

SEQ ID NO: 1794935 - RNA, 19 nt, Artificial Sequence
  Description of Artificial Sequence: Synthetic oligonucleotide
agucccucuaccugcaagu

SEQ ID NO: 1794936 - RNA, 19 nt, Artificial Sequence
  Description of Artificial Sequence: Synthetic oligonucleotide
agccuuuggaugaggaugg

SEQ ID NO: 1794937 - RNA, 19 nt, Artificial Sequence
  Description of Artificial Sequence: Synthetic oligonucleotide
aaucucaguucuugauuau

SEQ ID NO: 1794938 - RNA, 19 nt, Artificial Sequence
  Description of Artificial Sequence: Synthetic oligonucleotide
uguugggcgguucucuccu

SEQ ID NO: 1794939 - RNA, 19 nt, Artificial Sequence
  Description of Artificial Sequence: Synthetic oligonucleotide
gauguggccaccaucagcu

SEQ ID NO: 1794940 - RNA, 19 nt, Artificial Sequence
  Description of Artificial Sequence: Synthetic oligonucleotide
augucaagucccucuaccu

SEQ ID NO: 1794941 - RNA, 19 nt, Artificial Sequence
  Description of Artificial Sequence: Synthetic oligonucleotide
gaaaccggagugaugucug

SEQ ID NO: 1794942 - RNA, 19 nt, Artificial Sequence
  Description of Artificial Sequence: Synthetic oligonucleotide
augcuucaaugccagggag

SEQ ID NO: 1794943 - RNA, 19 nt, Artificial Sequence
  Description of Artificial Sequence: Synthetic oligonucleotide
ucggacaaaccuccaaaau

SEQ ID NO: 1794944 - RNA, 19 nt, Artificial Sequence
  Description of Artificial Sequence: Synthetic oligonucleotide
cuuggacccuugcacaggc

SEQ ID NO: 1794945 - RNA, 19 nt, Artificial Sequence
  Description of Artificial Sequence: Synthetic oligonucleotide
uuucacaccucaguuccug

SEQ ID NO: 1794946 - RNA, 19 nt, Artificial Sequence
  Description of Artificial Sequence: Synthetic oligonucleotide
uucuuuggccuguuguuuc

SEQ ID NO: 1794947 - RNA, 19 nt, Artificial Sequence
  Description of Artificial Sequence: Synthetic oligonucleotide
gaaaugcuucccuuucaca

SEQ ID NO: 1794948 - RNA, 19 nt, Artificial Sequence
  Description of Artificial Sequence: Synthetic oligonucleotide
aaccggagugaugucugac

SEQ ID NO: 1794949 - RNA, 19 nt, Artificial Sequence
  Description of Artificial Sequence: Synthetic oligonucleotide
uaaagacuuugcacucucu

SEQ ID NO: 1794950 - RNA, 19 nt, Artificial Sequence
  Description of Artificial Sequence: Synthetic oligonucleotide
uccaccugccagaagugac

SEQ ID NO: 1794951 - RNA, 19 nt, Artificial Sequence
  Description of Artificial Sequence: Synthetic oligonucleotide
cugcugacacacaccaugc

SEQ ID NO: 1794952 - RNA, 19 nt, Artificial Sequence
  Description of Artificial Sequence: Synthetic oligonucleotide
agguuugaauauauuuauc

SEQ ID NO: 1794953 - RNA, 19 nt, Artificial Sequence
  Description of Artificial Sequence: Synthetic oligonucleotide
aaacugaggccgaacaaaa

SEQ ID NO: 1794954 - RNA, 19 nt, Artificial Sequence
  Description of Artificial Sequence: Synthetic oligonucleotide
uucagggagcagaaccgug

SEQ ID NO: 1794955 - RNA, 19 nt, Artificial Sequence
  Description of Artificial Sequence: Synthetic oligonucleotide
ucaacaguuaggucagcuu

SEQ ID NO: 1794956 - RNA, 19 nt, Artificial Sequence
  Description of Artificial Sequence: Synthetic oligonucleotide
caaugaaguggugaaggug

SEQ ID NO: 1794957 - RNA, 19 nt, Artificial Sequence
  Description of Artificial Sequence: Synthetic oligonucleotide
uugaucagccucugcuuca

SEQ ID NO: 1794958 - RNA, 19 nt, Artificial Sequence
  Description of Artificial Sequence: Synthetic oligonucleotide
gcuucaaugccagggagcg

SEQ ID NO: 1794959 - RNA, 19 nt, Artificial Sequence
  Description of Artificial Sequence: Synthetic oligonucleotide
guuuuaguugaaagcuugc

SEQ ID NO: 1794960 - RNA, 19 nt, Artificial Sequence
  Description of Artificial Sequence: Synthetic oligonucleotide
agaaaccggagugaugucu

SEQ ID NO: 1794961 - RNA, 19 nt, Artificial Sequence
  Description of Artificial Sequence: Synthetic oligonucleotide
auuggaucggauccagaau

SEQ ID NO: 1794962 - RNA, 19 nt, Artificial Sequence
  Description of Artificial Sequence: Synthetic oligonucleotide
aucagacggauguggccac

SEQ ID NO: 1794963 - RNA, 19 nt, Artificial Sequence
  Description of Artificial Sequence: Synthetic oligonucleotide
uuaacacaaagaguacuuu

SEQ ID NO: 1794964 - RNA, 19 nt, Artificial Sequence
  Description of Artificial Sequence: Synthetic oligonucleotide
uuaggucagcuuggcaggg

SEQ ID NO: 1794965 - RNA, 19 nt, Artificial Sequence
  Description of Artificial Sequence: Synthetic oligonucleotide
auaucuuuuagcacuguuu

SEQ ID NO: 1794966 - RNA, 19 nt, Artificial Sequence
  Description of Artificial Sequence: Synthetic oligonucleotide
uuauuggaucggauccaga

SEQ ID NO: 1794967 - RNA, 19 nt, Artificial Sequence
  Description of Artificial Sequence: Synthetic oligonucleotide
uguuuacaccucugucugc

SEQ ID NO: 1794968 - RNA, 19 nt, Artificial Sequence
  Description of Artificial Sequence: Synthetic oligonucleotide
gaucgauucuguuuuaguu

SEQ ID NO: 1794969 - RNA, 19 nt, Artificial Sequence
  Description of Artificial Sequence: Synthetic oligonucleotide
gaaaugucaagucccucua

SEQ ID NO: 1794970 - RNA, 19 nt, Artificial Sequence
  Description of Artificial Sequence: Synthetic oligonucleotide
uuugcucuguuuacaccuc

SEQ ID NO: 1794971 - RNA, 19 nt, Artificial Sequence
  Description of Artificial Sequence: Synthetic oligonucleotide
uucauggacgccguggcaa

SEQ ID NO: 1794972 - RNA, 19 nt, Artificial Sequence
  Description of Artificial Sequence: Synthetic oligonucleotide
cuccuuguggcacaccgug

SEQ ID NO: 1794973 - RNA, 19 nt, Artificial Sequence
  Description of Artificial Sequence: Synthetic oligonucleotide
agacuauuccacucucgga

SEQ ID NO: 1794974 - RNA, 19 nt, Artificial Sequence
  Description of Artificial Sequence: Synthetic oligonucleotide
ugccgggugcuuaacacaa

SEQ ID NO: 1794975 - RNA, 19 nt, Artificial Sequence
  Description of Artificial Sequence: Synthetic oligonucleotide
gaagcccacaagaccacag

SEQ ID NO: 1794976 - RNA, 19 nt, Artificial Sequence
  Description of Artificial Sequence: Synthetic oligonucleotide
gagcagaaccgugaguccc

SEQ ID NO: 1794977 - RNA, 19 nt, Artificial Sequence
  Description of Artificial Sequence: Synthetic oligonucleotide
guacuuuagcacaaaaucu

SEQ ID NO: 1794978 - RNA, 19 nt, Artificial Sequence
  Description of Artificial Sequence: Synthetic oligonucleotide
gauugggcugcagaacagc

SEQ ID NO: 1794979 - RNA, 19 nt, Artificial Sequence
  Description of Artificial Sequence: Synthetic oligonucleotide
uggcuugaugugauccacc

SEQ ID NO: 1794980 - RNA, 19 nt, Artificial Sequence
  Description of Artificial Sequence: Synthetic oligonucleotide
uuuuagcacuguuuucuuu

SEQ ID NO: 1794981 - RNA, 19 nt, Artificial Sequence
  Description of Artificial Sequence: Synthetic oligonucleotide
guuguuucgugaucucuuc

SEQ ID NO: 1794982 - RNA, 19 nt, Artificial Sequence
  Description of Artificial Sequence: Synthetic oligonucleotide
uggaucggauccagaauuc

SEQ ID NO: 1794983 - RNA, 19 nt, Artificial Sequence
  Description of Artificial Sequence: Synthetic oligonucleotide
ucccucuaccugcaaguca

SEQ ID NO: 1794984 - RNA, 19 nt, Artificial Sequence
  Description of Artificial Sequence: Synthetic oligonucleotide
gcugaaacauaauuggcaa

SEQ ID NO: 1794985 - RNA, 19 nt, Artificial Sequence
  Description of Artificial Sequence: Synthetic oligonucleotide
cuagacaaacaugaaaugu

SEQ ID NO: 1794986 - RNA, 19 nt, Artificial Sequence
  Description of Artificial Sequence: Synthetic oligonucleotide
uaacuguuauuggaucgga

SEQ ID NO: 1794987 - RNA, 19 nt, Artificial Sequence
  Description of Artificial Sequence: Synthetic oligonucleotide
guacaaugaaguggugaag

SEQ ID NO: 1794988 - RNA, 19 nt, Artificial Sequence
  Description of Artificial Sequence: Synthetic oligonucleotide
uucacaccucaguuccugc

SEQ ID NO: 1794989 - RNA, 19 nt, Artificial Sequence
  Description of Artificial Sequence: Synthetic oligonucleotide
aaaccggagugaugucuga

SEQ ID NO: 1794990 - RNA, 19 nt, Artificial Sequence
  Description of Artificial Sequence: Synthetic oligonucleotide
cacaccaugcucuguugac

SEQ ID NO: 1794991 - RNA, 19 nt, Artificial Sequence
  Description of Artificial Sequence: Synthetic oligonucleotide
cuuccuggcacuucaggga

SEQ ID NO: 1794992 - RNA, 19 nt, Artificial Sequence
  Description of Artificial Sequence: Synthetic oligonucleotide
uuccacucucggacaaacc

SEQ ID NO: 1794993 - RNA, 19 nt, Artificial Sequence
  Description of Artificial Sequence: Synthetic oligonucleotide
aggucuaauuuuauaucca

SEQ ID NO: 1794994 - RNA, 19 nt, Artificial Sequence
  Description of Artificial Sequence: Synthetic oligonucleotide
caugcuucaaugccaggga

SEQ ID NO: 1794995 - RNA, 19 nt, Artificial Sequence
  Description of Artificial Sequence: Synthetic oligonucleotide
ugaggccgaacaaaaucuu

SEQ ID NO: 1794996 - RNA, 19 nt, Artificial Sequence
  Description of Artificial Sequence: Synthetic oligonucleotide
gaaccgugagucccaggug

SEQ ID NO: 1794997 - RNA, 19 nt, Artificial Sequence
  Description of Artificial Sequence: Synthetic oligonucleotide
caaaauacagugaucgauu

SEQ ID NO: 1794998 - RNA, 19 nt, Artificial Sequence
  Description of Artificial Sequence: Synthetic oligonucleotide
acaccgugcagagagucug

SEQ ID NO: 1794999 - RNA, 19 nt, Artificial Sequence
  Description of Artificial Sequence: Synthetic oligonucleotide
ccuuuccuuggcuuguugg

SEQ ID NO: 1795000 - RNA, 19 nt, Artificial Sequence
  Description of Artificial Sequence: Synthetic oligonucleotide
uguggccaccaucagcuuu

SEQ ID NO: 1795001 - RNA, 19 nt, Artificial Sequence
  Description of Artificial Sequence: Synthetic oligonucleotide
aguugaaagcuugcuggca

SEQ ID NO: 1795002 - RNA, 19 nt, Artificial Sequence
  Description of Artificial Sequence: Synthetic oligonucleotide
auacacuggcuugauguga

SEQ ID NO: 1795003 - RNA, 19 nt, Artificial Sequence
  Description of Artificial Sequence: Synthetic oligonucleotide
cuggugaucagacggaugu

SEQ ID NO: 1795004 - RNA, 19 nt, Artificial Sequence
  Description of Artificial Sequence: Synthetic oligonucleotide
gugaucgauucuguuuuag

SEQ ID NO: 1795005 - RNA, 19 nt, Artificial Sequence
  Description of Artificial Sequence: Synthetic oligonucleotide
uugggcgguucucuccuug

SEQ ID NO: 1795006 - RNA, 19 nt, Artificial Sequence
  Description of Artificial Sequence: Synthetic oligonucleotide
acaccucgggcccucaggu

SEQ ID NO: 1795007 - RNA, 19 nt, Artificial Sequence
  Description of Artificial Sequence: Synthetic oligonucleotide
ucccuggugaucagacgga

SEQ ID NO: 1795008 - RNA, 19 nt, Artificial Sequence
  Description of Artificial Sequence: Synthetic oligonucleotide
ggucuaauuuuauauccaa

SEQ ID NO: 1795009 - RNA, 19 nt, Artificial Sequence
  Description of Artificial Sequence: Synthetic oligonucleotide
aucgcauauuaucuaugua

SEQ ID NO: 1795010 - RNA, 19 nt, Artificial Sequence
  Description of Artificial Sequence: Synthetic oligonucleotide
ggcgguucucuccuugugg

SEQ ID NO: 1795011 - RNA, 19 nt, Artificial Sequence
  Description of Artificial Sequence: Synthetic oligonucleotide
uggcaagugggaugcuggc

SEQ ID NO: 1795012 - RNA, 19 nt, Artificial Sequence
  Description of Artificial Sequence: Synthetic oligonucleotide
gggagcagaaccgugaguc

SEQ ID NO: 1795013 - RNA, 19 nt, Artificial Sequence
  Description of Artificial Sequence: Synthetic oligonucleotide
uccuuuccuuggcuuguug

SEQ ID NO: 1795014 - RNA, 19 nt, Artificial Sequence
  Description of Artificial Sequence: Synthetic oligonucleotide
cugaggccgaacaaaaucu

SEQ ID NO: 1795015 - RNA, 19 nt, Artificial Sequence
  Description of Artificial Sequence: Synthetic oligonucleotide
uaccugcaagucauuugcu

SEQ ID NO: 1795016 - RNA, 19 nt, Artificial Sequence
  Description of Artificial Sequence: Synthetic oligonucleotide
ucuccuuguggcacaccgu

SEQ ID NO: 1795017 - RNA, 19 nt, Artificial Sequence
  Description of Artificial Sequence: Synthetic oligonucleotide
aaucuugcugaaacauaau

SEQ ID NO: 1795018 - RNA, 19 nt, Artificial Sequence
  Description of Artificial Sequence: Synthetic oligonucleotide
gugaucagacggauguggc

SEQ ID NO: 1795019 - RNA, 19 nt, Artificial Sequence
  Description of Artificial Sequence: Synthetic oligonucleotide
ucauggacgccguggcaac

SEQ ID NO: 1795020 - RNA, 19 nt, Artificial Sequence
  Description of Artificial Sequence: Synthetic oligonucleotide
cuuguugggcgguucucuc

SEQ ID NO: 1795021 - RNA, 19 nt, Artificial Sequence
  Description of Artificial Sequence: Synthetic oligonucleotide
aacuguuauuggaucggau

SEQ ID NO: 1795022 - RNA, 19 nt, Artificial Sequence
  Description of Artificial Sequence: Synthetic oligonucleotide
gucagacuauuccacucuc

SEQ ID NO: 1795023 - RNA, 19 nt, Artificial Sequence
  Description of Artificial Sequence: Synthetic oligonucleotide
ugugauccaccugccagaa

SEQ ID NO: 1795024 - RNA, 19 nt, Artificial Sequence
  Description of Artificial Sequence: Synthetic oligonucleotide
agagagucugcagguuguc

SEQ ID NO: 1795025 - RNA, 19 nt, Artificial Sequence
  Description of Artificial Sequence: Synthetic oligonucleotide
gauucagagaugggacaca

SEQ ID NO: 1795026 - RNA, 19 nt, Artificial Sequence
  Description of Artificial Sequence: Synthetic oligonucleotide
ugcaagucauuugcucugu

SEQ ID NO: 1795027 - RNA, 19 nt, Artificial Sequence
  Description of Artificial Sequence: Synthetic oligonucleotide
uccugccgggugcuuaaca

SEQ ID NO: 1795028 - RNA, 19 nt, Artificial Sequence
  Description of Artificial Sequence: Synthetic oligonucleotide
uggcuuguugggcgguucu

SEQ ID NO: 1795029 - RNA, 19 nt, Artificial Sequence
  Description of Artificial Sequence: Synthetic oligonucleotide
ggauucagagaugggacac

SEQ ID NO: 1795030 - RNA, 19 nt, Artificial Sequence
  Description of Artificial Sequence: Synthetic oligonucleotide
acaaacaccucgggcccuc

SEQ ID NO: 1795031 - RNA, 19 nt, Artificial Sequence
  Description of Artificial Sequence: Synthetic oligonucleotide
cuucccaaaggucuaauuu

SEQ ID NO: 1795032 - RNA, 19 nt, Artificial Sequence
  Description of Artificial Sequence: Synthetic oligonucleotide
gaagggucccguggccugg

SEQ ID NO: 1795033 - RNA, 19 nt, Artificial Sequence
  Description of Artificial Sequence: Synthetic oligonucleotide
ugaagcccacaagaccaca

SEQ ID NO: 1795034 - RNA, 19 nt, Artificial Sequence
  Description of Artificial Sequence: Synthetic oligonucleotide
cucggacaaaccuccaaaa

SEQ ID NO: 1795035 - RNA, 19 nt, Artificial Sequence
  Description of Artificial Sequence: Synthetic oligonucleotide
uggaugaggauggcucaac

SEQ ID NO: 1795036 - RNA, 19 nt, Artificial Sequence
  Description of Artificial Sequence: Synthetic oligonucleotide
ggucuuggacccuugcaca

SEQ ID NO: 1795037 - RNA, 19 nt, Artificial Sequence
  Description of Artificial Sequence: Synthetic oligonucleotide
ccggagugaugucugaccc

SEQ ID NO: 1795038 - RNA, 19 nt, Artificial Sequence
  Description of Artificial Sequence: Synthetic oligonucleotide
gcgguucucuccuuguggc

SEQ ID NO: 1795039 - RNA, 19 nt, Artificial Sequence
  Description of Artificial Sequence: Synthetic oligonucleotide
uggcaacaucuucuuuagu

SEQ ID NO: 1795040 - RNA, 19 nt, Artificial Sequence
  Description of Artificial Sequence: Synthetic oligonucleotide
aagucuucccaaaggucua

SEQ ID NO: 1795041 - RNA, 19 nt, Artificial Sequence
  Description of Artificial Sequence: Synthetic oligonucleotide
guuuacaccucugucugcu

SEQ ID NO: 1795042 - RNA, 19 nt, Artificial Sequence
  Description of Artificial Sequence: Synthetic oligonucleotide
cucuguugacaaacaccuc

SEQ ID NO: 1795043 - RNA, 19 nt, Artificial Sequence
  Description of Artificial Sequence: Synthetic oligonucleotide
auacagugaucgauucugu

SEQ ID NO: 1795044 - RNA, 19 nt, Artificial Sequence
  Description of Artificial Sequence: Synthetic oligonucleotide
caccuuauucauggacgcc

SEQ ID NO: 1795045 - RNA, 19 nt, Artificial Sequence
  Description of Artificial Sequence: Synthetic oligonucleotide
gggauucagagaugggaca

SEQ ID NO: 1795046 - RNA, 19 nt, Artificial Sequence
  Description of Artificial Sequence: Synthetic oligonucleotide
augccagggagcgucgucu

SEQ ID NO: 1795047 - RNA, 19 nt, Artificial Sequence
  Description of Artificial Sequence: Synthetic oligonucleotide
uuggaugaggauggcucaa

SEQ ID NO: 1795048 - RNA, 19 nt, Artificial Sequence
  Description of Artificial Sequence: Synthetic oligonucleotide
agcggagacagaguggcuu

SEQ ID NO: 1795049 - RNA, 19 nt, Artificial Sequence
  Description of Artificial Sequence: Synthetic oligonucleotide
agugaucgauucuguuuua

SEQ ID NO: 1795050 - RNA, 19 nt, Artificial Sequence
  Description of Artificial Sequence: Synthetic oligonucleotide
ugggcgguucucuccuugu

SEQ ID NO: 1795051 - RNA, 19 nt, Artificial Sequence
  Description of Artificial Sequence: Synthetic oligonucleotide
ugcuggcaagucuucccaa

SEQ ID NO: 1795052 - RNA, 19 nt, Artificial Sequence
  Description of Artificial Sequence: Synthetic oligonucleotide
acaagaccacagaaaugcu

SEQ ID NO: 1795053 - RNA, 19 nt, Artificial Sequence
  Description of Artificial Sequence: Synthetic oligonucleotide
ccuugcacaggcuggcaag

SEQ ID NO: 1795054 - RNA, 19 nt, Artificial Sequence
  Description of Artificial Sequence: Synthetic oligonucleotide
cauaauuggcaaucugcau

SEQ ID NO: 1795055 - RNA, 19 nt, Artificial Sequence
  Description of Artificial Sequence: Synthetic oligonucleotide
ggcagucagacuauuccac

SEQ ID NO: 1795056 - RNA, 19 nt, Artificial Sequence
  Description of Artificial Sequence: Synthetic oligonucleotide
cuuuagugauauaucuuuu

SEQ ID NO: 1795057 - RNA, 19 nt, Artificial Sequence
  Description of Artificial Sequence: Synthetic oligonucleotide
gggagcgucgucucgccug

SEQ ID NO: 1795058 - RNA, 19 nt, Artificial Sequence
  Description of Artificial Sequence: Synthetic oligonucleotide
uauuccacucucggacaaa

SEQ ID NO: 1795059 - RNA, 19 nt, Artificial Sequence
  Description of Artificial Sequence: Synthetic oligonucleotide
caccgugcagagagucugc

SEQ ID NO: 1795060 - RNA, 19 nt, Artificial Sequence
  Description of Artificial Sequence: Synthetic oligonucleotide
ggaugaggauggcucaaca

SEQ ID NO: 1795061 - RNA, 19 nt, Artificial Sequence
  Description of Artificial Sequence: Synthetic oligonucleotide
cuauuccacucucggacaa

SEQ ID NO: 1795062 - RNA, 19 nt, Artificial Sequence
  Description of Artificial Sequence: Synthetic oligonucleotide
ccaccugccagaagugacc

SEQ ID NO: 1795063 - RNA, 19 nt, Artificial Sequence
  Description of Artificial Sequence: Synthetic oligonucleotide
cagugaucgauucuguuuu

SEQ ID NO: 1795064 - RNA, 19 nt, Artificial Sequence
  Description of Artificial Sequence: Synthetic oligonucleotide
aauuggcaaucugcaugaa

SEQ ID NO: 1795065 - RNA, 19 nt, Artificial Sequence
  Description of Artificial Sequence: Synthetic oligonucleotide
ucagacggauguggccacc

SEQ ID NO: 1795066 - RNA, 19 nt, Artificial Sequence
  Description of Artificial Sequence: Synthetic oligonucleotide
ccugccgggugcuuaacac

SEQ ID NO: 1795067 - RNA, 19 nt, Artificial Sequence
  Description of Artificial Sequence: Synthetic oligonucleotide
cagaaccgugagucccagg

SEQ ID NO: 1795068 - RNA, 19 nt, Artificial Sequence
  Description of Artificial Sequence: Synthetic oligonucleotide
agcagaaccgugaguccca

SEQ ID NO: 1795069 - RNA, 19 nt, Artificial Sequence
  Description of Artificial Sequence: Synthetic oligonucleotide
cagaaaccggagugauguc

SEQ ID NO: 1795070 - RNA, 19 nt, Artificial Sequence
  Description of Artificial Sequence: Synthetic oligonucleotide
gcuuaacacaaagaguacu

SEQ ID NO: 1795071 - RNA, 19 nt, Artificial Sequence
  Description of Artificial Sequence: Synthetic oligonucleotide
ggagcgucgucucgccugc

SEQ ID NO: 1795072 - RNA, 19 nt, Artificial Sequence
  Description of Artificial Sequence: Synthetic oligonucleotide
uggacgccguggcaacauc

SEQ ID NO: 1795073 - RNA, 19 nt, Artificial Sequence
  Description of Artificial Sequence: Synthetic oligonucleotide
ccacucucggacaaaccuc

SEQ ID NO: 1795074 - RNA, 19 nt, Artificial Sequence
  Description of Artificial Sequence: Synthetic oligonucleotide
ccagaaaccggagugaugu

SEQ ID NO: 1795075 - RNA, 19 nt, Artificial Sequence
  Description of Artificial Sequence: Synthetic oligonucleotide
agucuucccaaaggucuaa

SEQ ID NO: 1795076 - RNA, 19 nt, Artificial Sequence
  Description of Artificial Sequence: Synthetic oligonucleotide
ugccagggagcgucgucuc

SEQ ID NO: 1795077 - RNA, 19 nt, Artificial Sequence
  Description of Artificial Sequence: Synthetic oligonucleotide
gugaaggugugcaggggaa

SEQ ID NO: 1795078 - RNA, 19 nt, Artificial Sequence
  Description of Artificial Sequence: Synthetic oligonucleotide
guuccugccgggugcuuaa

SEQ ID NO: 1795079 - RNA, 19 nt, Artificial Sequence
  Description of Artificial Sequence: Synthetic oligonucleotide
ggaugcuggcagcggagac

SEQ ID NO: 1795080 - RNA, 19 nt, Artificial Sequence
  Description of Artificial Sequence: Synthetic oligonucleotide
auuuagcugcugacacaca

SEQ ID NO: 1795081 - RNA, 19 nt, Artificial Sequence
  Description of Artificial Sequence: Synthetic oligonucleotide
cucucggacaaaccuccaa

SEQ ID NO: 1795082 - RNA, 19 nt, Artificial Sequence
  Description of Artificial Sequence: Synthetic oligonucleotide
accgugcagagagucugca

SEQ ID NO: 1795083 - RNA, 19 nt, Artificial Sequence
  Description of Artificial Sequence: Synthetic oligonucleotide
agcgucgucucgccugcau

SEQ ID NO: 1795084 - RNA, 19 nt, Artificial Sequence
  Description of Artificial Sequence: Synthetic oligonucleotide
gaucggauccagaauucuu

SEQ ID NO: 1795085 - RNA, 19 nt, Artificial Sequence
  Description of Artificial Sequence: Synthetic oligonucleotide
cguggcaacaucuucuuua

SEQ ID NO: 1795086 - RNA, 19 nt, Artificial Sequence
  Description of Artificial Sequence: Synthetic oligonucleotide
ucauggcagucagacuauu

SEQ ID NO: 1795087 - RNA, 19 nt, Artificial Sequence
  Description of Artificial Sequence: Synthetic oligonucleotide
caguuaggucagcuuggca

SEQ ID NO: 1795088 - RNA, 19 nt, Artificial Sequence
  Description of Artificial Sequence: Synthetic oligonucleotide
ucgucucgccugcauccuu

SEQ ID NO: 1795089 - RNA, 19 nt, Artificial Sequence
  Description of Artificial Sequence: Synthetic oligonucleotide
cccacaagaccacagaaau

SEQ ID NO: 1795090 - RNA, 19 nt, Artificial Sequence
  Description of Artificial Sequence: Synthetic oligonucleotide
auggacgccguggcaacau

SEQ ID NO: 1795091 - RNA, 19 nt, Artificial Sequence
  Description of Artificial Sequence: Synthetic oligonucleotide
ggccgaacaaaaucuugcu

SEQ ID NO: 1795092 - RNA, 19 nt, Artificial Sequence
  Description of Artificial Sequence: Synthetic oligonucleotide
ccaaaauacagugaucgau

SEQ ID NO: 1795093 - RNA, 19 nt, Artificial Sequence
  Description of Artificial Sequence: Synthetic oligonucleotide
agggagcgucgucucgccu

SEQ ID NO: 1795094 - RNA, 19 nt, Artificial Sequence
  Description of Artificial Sequence: Synthetic oligonucleotide
cggacaaaccuccaaaaua

SEQ ID NO: 1795095 - RNA, 19 nt, Artificial Sequence
  Description of Artificial Sequence: Synthetic oligonucleotide
gucccucuaccugcaaguc

SEQ ID NO: 1795096 - RNA, 19 nt, Artificial Sequence
  Description of Artificial Sequence: Synthetic oligonucleotide
gccagggagcgucgucucg

SEQ ID NO: 1795097 - RNA, 19 nt, Artificial Sequence
  Description of Artificial Sequence: Synthetic oligonucleotide
ccagggagcgucgucucgc

SEQ ID NO: 1795098 - RNA, 19 nt, Artificial Sequence
  Description of Artificial Sequence: Synthetic oligonucleotide
ucgggcccucagguaacug

SEQ ID NO: 1795099 - RNA, 19 nt, Artificial Sequence
  Description of Artificial Sequence: Synthetic oligonucleotide
ggcacuucagggagcagaa

SEQ ID NO: 1795100 - RNA, 19 nt, Artificial Sequence
  Description of Artificial Sequence: Synthetic oligonucleotide
ggagugaugucugacccau

SEQ ID NO: 1795101 - RNA, 19 nt, Artificial Sequence
  Description of Artificial Sequence: Synthetic oligonucleotide
gggcgguucucuccuugug

SEQ ID NO: 1795102 - RNA, 19 nt, Artificial Sequence
  Description of Artificial Sequence: Synthetic oligonucleotide
cuuucacaccucaguuccu

SEQ ID NO: 1795103 - RNA, 19 nt, Artificial Sequence
  Description of Artificial Sequence: Synthetic oligonucleotide
ccgugcagagagucugcag

SEQ ID NO: 1795104 - RNA, 19 nt, Artificial Sequence
  Description of Artificial Sequence: Synthetic oligonucleotide
cagacggauguggccacca

SEQ ID NO: 1795105 - RNA, 19 nt, Artificial Sequence
  Description of Artificial Sequence: Synthetic oligonucleotide
gcacaccgugcagagaguc

SEQ ID NO: 1795106 - RNA, 19 nt, Artificial Sequence
  Description of Artificial Sequence: Synthetic oligonucleotide
acucucggacaaaccucca

SEQ ID NO: 1795107 - RNA, 19 nt, Artificial Sequence
  Description of Artificial Sequence: Synthetic oligonucleotide
ggccuguuguuucgugauc

SEQ ID NO: 1795108 - RNA, 19 nt, Artificial Sequence
  Description of Artificial Sequence: Synthetic oligonucleotide
cuucagggagcagaaccgu

SEQ ID NO: 1795109 - RNA, 19 nt, Artificial Sequence
  Description of Artificial Sequence: Synthetic oligonucleotide
gcagaaccgugagucccag

SEQ ID NO: 1795110 - RNA, 19 nt, Artificial Sequence
  Description of Artificial Sequence: Synthetic oligonucleotide
uuccugccgggugcuuaac

SEQ ID NO: 1795111 - RNA, 19 nt, Artificial Sequence
  Description of Artificial Sequence: Synthetic oligonucleotide
cugccagaagugaccuucu

SEQ ID NO: 1795112 - RNA, 19 nt, Artificial Sequence
  Description of Artificial Sequence: Synthetic oligonucleotide
gcgucgucucgccugcauc

SEQ ID NO: 1795113 - RNA, 19 nt, Artificial Sequence
  Description of Artificial Sequence: Synthetic oligonucleotide
cauggacgccguggcaaca

SEQ ID NO: 1795114 - RNA, 19 nt, Artificial Sequence
  Description of Artificial Sequence: Synthetic oligonucleotide
ggaucggauccagaauucu

SEQ ID NO: 1795115 - RNA, 19 nt, Artificial Sequence
  Description of Artificial Sequence: Synthetic oligonucleotide
cugcauccuuuccuuggcu

SEQ ID NO: 1795116 - RNA, 19 nt, Artificial Sequence
  Description of Artificial Sequence: Synthetic oligonucleotide
gagaugggacacaggcuuu

SEQ ID NO: 1795117 - RNA, 19 nt, Artificial Sequence
  Description of Artificial Sequence: Synthetic oligonucleotide
caccugccagaagugaccu

SEQ ID NO: 1795118 - RNA, 19 nt, Artificial Sequence
  Description of Artificial Sequence: Synthetic oligonucleotide
ccuuauucauggacgccgu

SEQ ID NO: 1795119 - RNA, 19 nt, Artificial Sequence
  Description of Artificial Sequence: Synthetic oligonucleotide
caccagaaaccggagugau

SEQ ID NO: 1795120 - RNA, 19 nt, Artificial Sequence
  Description of Artificial Sequence: Synthetic oligonucleotide
ccucgggcccucagguaac

SEQ ID NO: 1795121 - RNA, 19 nt, Artificial Sequence
  Description of Artificial Sequence: Synthetic oligonucleotide
cagaacagcugcccacuuu

SEQ ID NO: 1795122 - RNA, 19 nt, Artificial Sequence
  Description of Artificial Sequence: Synthetic oligonucleotide
cgggugcuuaacacaaaga

SEQ ID NO: 1795123 - RNA, 19 nt, Artificial Sequence
  Description of Artificial Sequence: Synthetic oligonucleotide
cuuuggccuguuguuucgu

SEQ ID NO: 1795124 - RNA, 19 nt, Artificial Sequence
  Description of Artificial Sequence: Synthetic oligonucleotide
guggcacaccgugcagaga

SEQ ID NO: 1795125 - RNA, 19 nt, Artificial Sequence
  Description of Artificial Sequence: Synthetic oligonucleotide
ggacucccuggugaucaga

SEQ ID NO: 1795126 - RNA, 19 nt, Artificial Sequence
  Description of Artificial Sequence: Synthetic oligonucleotide
gcccucagguaacuguuau

SEQ ID NO: 1795127 - RNA, 19 nt, Artificial Sequence
  Description of Artificial Sequence: Synthetic oligonucleotide
ggacgccguggcaacaucu

SEQ ID NO: 1795128 - RNA, 19 nt, Artificial Sequence
  Description of Artificial Sequence: Synthetic oligonucleotide
gucgucucgccugcauccu

SEQ ID NO: 1795129 - RNA, 19 nt, Artificial Sequence
  Description of Artificial Sequence: Synthetic oligonucleotide
caccucgggcccucaggua

SEQ ID NO: 1795130 - RNA, 19 nt, Artificial Sequence
  Description of Artificial Sequence: Synthetic oligonucleotide
cuucaaugccagggagcgu

SEQ ID NO: 1795131 - RNA, 19 nt, Artificial Sequence
  Description of Artificial Sequence: Synthetic oligonucleotide
gggucccguggccuggacu

SEQ ID NO: 1795132 - RNA, 19 nt, Artificial Sequence
  Description of Artificial Sequence: Synthetic oligonucleotide
gagcgucgucucgccugca

SEQ ID NO: 1795133 - RNA, 19 nt, Artificial Sequence
  Description of Artificial Sequence: Synthetic oligonucleotide
caaugccagggagcgucgu

SEQ ID NO: 1795134 - RNA, 19 nt, Artificial Sequence
  Description of Artificial Sequence: Synthetic oligonucleotide
gcaagucauuugcucuguu

SEQ ID NO: 1795135 - RNA, 19 nt, Artificial Sequence
  Description of Artificial Sequence: Synthetic oligonucleotide
guugggcgguucucuccuu

SEQ ID NO: 1795136 - RNA, 19 nt, Artificial Sequence
  Description of Artificial Sequence: Synthetic oligonucleotide
cgauucuguuuuaguugaa

SEQ ID NO: 1795137 - RNA, 19 nt, Artificial Sequence
  Description of Artificial Sequence: Synthetic oligonucleotide
ccaucagcuuucaccuuau

SEQ ID NO: 1795138 - RNA, 19 nt, Artificial Sequence
  Description of Artificial Sequence: Synthetic oligonucleotide
gggcccucagguaacuguu

SEQ ID NO: 1795139 - RNA, 19 nt, Artificial Sequence
  Description of Artificial Sequence: Synthetic oligonucleotide
ccguggccuggacucccug

SEQ ID NO: 1795140 - RNA, 19 nt, Artificial Sequence
  Description of Artificial Sequence: Synthetic oligonucleotide
gcagaacagcugcccacuu

SEQ ID NO: 1795141 - RNA, 19 nt, Artificial Sequence
  Description of Artificial Sequence: Synthetic oligonucleotide
ggugcuggucuuggacccu

SEQ ID NO: 1795142 - RNA, 19 nt, Artificial Sequence
  Description of Artificial Sequence: Synthetic oligonucleotide
cggauccagaauucuuccu

SEQ ID NO: 1795143 - RNA, 19 nt, Artificial Sequence
  Description of Artificial Sequence: Synthetic oligonucleotide
cucgggcccucagguaacu

SEQ ID NO: 1795144 - RNA, 19 nt, Artificial Sequence
  Description of Artificial Sequence: Synthetic oligonucleotide
gccgggugcuuaacacaaa

SEQ ID NO: 1795145 - RNA, 19 nt, Artificial Sequence
  Description of Artificial Sequence: Synthetic oligonucleotide
ggcacaccgugcagagagu

SEQ ID NO: 1795146 - RNA, 19 nt, Artificial Sequence
  Description of Artificial Sequence: Synthetic oligonucleotide
cccucagguaacuguuauu

SEQ ID NO: 1795147 - RNA, 19 nt, Artificial Sequence
  Description of Artificial Sequence: Synthetic oligonucleotide
cccuggugaucagacggau

SEQ ID NO: 1795148 - RNA, 19 nt, Artificial Sequence
  Description of Artificial Sequence: Synthetic oligonucleotide
caguuccugccgggugcuu

SEQ ID NO: 1795149 - RNA, 19 nt, Artificial Sequence
  Description of Artificial Sequence: Synthetic oligonucleotide
ucuaauaauaucauguucc

SEQ ID NO: 1795150 - RNA, 19 nt, Artificial Sequence
  Description of Artificial Sequence: Synthetic oligonucleotide
aauaauaucauguuccugu

SEQ ID NO: 1795151 - RNA, 19 nt, Artificial Sequence
  Description of Artificial Sequence: Synthetic oligonucleotide
aauaaguuuucauauaaug

SEQ ID NO: 1795152 - RNA, 19 nt, Artificial Sequence
  Description of Artificial Sequence: Synthetic oligonucleotide
uuuaugagagaaaaguacg

SEQ ID NO: 1795153 - RNA, 19 nt, Artificial Sequence
  Description of Artificial Sequence: Synthetic oligonucleotide
agauuaaauacacaauacc

SEQ ID NO: 1795154 - RNA, 19 nt, Artificial Sequence
  Description of Artificial Sequence: Synthetic oligonucleotide
gagacaauaucacugaccg

SEQ ID NO: 1795155 - RNA, 19 nt, Artificial Sequence
  Description of Artificial Sequence: Synthetic oligonucleotide
uccaauaauacuuuaaaac

SEQ ID NO: 1795156 - RNA, 19 nt, Artificial Sequence
  Description of Artificial Sequence: Synthetic oligonucleotide
uuaguaauuacacuggccu

SEQ ID NO: 1795157 - RNA, 19 nt, Artificial Sequence
  Description of Artificial Sequence: Synthetic oligonucleotide
aauaccaccuuucaugaag

SEQ ID NO: 1795158 - RNA, 19 nt, Artificial Sequence
  Description of Artificial Sequence: Synthetic oligonucleotide
ugaagaagagcaaacauga

SEQ ID NO: 1795159 - RNA, 19 nt, Artificial Sequence
  Description of Artificial Sequence: Synthetic oligonucleotide
acuccuuauacauacacac

SEQ ID NO: 1795160 - RNA, 19 nt, Artificial Sequence
  Description of Artificial Sequence: Synthetic oligonucleotide
uuaaauacacaauaccacc

SEQ ID NO: 1795161 - RNA, 19 nt, Artificial Sequence
  Description of Artificial Sequence: Synthetic oligonucleotide
uuucugucuaauaauauca

SEQ ID NO: 1795162 - RNA, 19 nt, Artificial Sequence
  Description of Artificial Sequence: Synthetic oligonucleotide
aaagagagccauucuauuc

SEQ ID NO: 1795163 - RNA, 19 nt, Artificial Sequence
  Description of Artificial Sequence: Synthetic oligonucleotide
uauucuuccguauuaauga

SEQ ID NO: 1795164 - RNA, 19 nt, Artificial Sequence
  Description of Artificial Sequence: Synthetic oligonucleotide
uacuagaaauuccaaaucc

SEQ ID NO: 1795165 - RNA, 19 nt, Artificial Sequence
  Description of Artificial Sequence: Synthetic oligonucleotide
agaaauuccaaauccagug

SEQ ID NO: 1795166 - RNA, 19 nt, Artificial Sequence
  Description of Artificial Sequence: Synthetic oligonucleotide
augacaagucaccugaggc

SEQ ID NO: 1795167 - RNA, 19 nt, Artificial Sequence
  Description of Artificial Sequence: Synthetic oligonucleotide
uuuacuagaaauuccaaau

SEQ ID NO: 1795168 - RNA, 19 nt, Artificial Sequence
  Description of Artificial Sequence: Synthetic oligonucleotide
gucgauuuccuuuagacag

SEQ ID NO: 1795169 - RNA, 19 nt, Artificial Sequence
  Description of Artificial Sequence: Synthetic oligonucleotide
auuuaugagagaaaaguac

SEQ ID NO: 1795170 - RNA, 19 nt, Artificial Sequence
  Description of Artificial Sequence: Synthetic oligonucleotide
aucaagauuaaauacacaa

SEQ ID NO: 1795171 - RNA, 19 nt, Artificial Sequence
  Description of Artificial Sequence: Synthetic oligonucleotide
gaaaaguacguacaguccc

SEQ ID NO: 1795172 - RNA, 19 nt, Artificial Sequence
  Description of Artificial Sequence: Synthetic oligonucleotide
augagagaaaaguacguac

SEQ ID NO: 1795173 - RNA, 19 nt, Artificial Sequence
  Description of Artificial Sequence: Synthetic oligonucleotide
gaaccuaaaguuuuacuag

SEQ ID NO: 1795174 - RNA, 19 nt, Artificial Sequence
  Description of Artificial Sequence: Synthetic oligonucleotide
auaggaaggacacagguca

SEQ ID NO: 1795175 - RNA, 19 nt, Artificial Sequence
  Description of Artificial Sequence: Synthetic oligonucleotide
aucaacaaacuccugcccc

SEQ ID NO: 1795176 - RNA, 19 nt, Artificial Sequence
  Description of Artificial Sequence: Synthetic oligonucleotide
aguaauucugaagaagagc

SEQ ID NO: 1795177 - RNA, 19 nt, Artificial Sequence
  Description of Artificial Sequence: Synthetic oligonucleotide
ucaacuaaacagaucaaga

SEQ ID NO: 1795178 - RNA, 19 nt, Artificial Sequence
  Description of Artificial Sequence: Synthetic oligonucleotide
cucaagaagauuauccagg

SEQ ID NO: 1795179 - RNA, 19 nt, Artificial Sequence
  Description of Artificial Sequence: Synthetic oligonucleotide
acuacugguuuccagaguc

SEQ ID NO: 1795180 - RNA, 19 nt, Artificial Sequence
  Description of Artificial Sequence: Synthetic oligonucleotide
aacagaucaagauuaaaua

SEQ ID NO: 1795181 - RNA, 19 nt, Artificial Sequence
  Description of Artificial Sequence: Synthetic oligonucleotide
auagacauucccuuucaac

SEQ ID NO: 1795182 - RNA, 19 nt, Artificial Sequence
  Description of Artificial Sequence: Synthetic oligonucleotide
gagaaaaguacguacaguc

SEQ ID NO: 1795183 - RNA, 19 nt, Artificial Sequence
  Description of Artificial Sequence: Synthetic oligonucleotide
ucuguuggaauauacuuca

SEQ ID NO: 1795184 - RNA, 19 nt, Artificial Sequence
  Description of Artificial Sequence: Synthetic oligonucleotide
aagaagagcaaacaugaau

SEQ ID NO: 1795185 - RNA, 19 nt, Artificial Sequence
  Description of Artificial Sequence: Synthetic oligonucleotide
uuuaguaauuacacuggcc

SEQ ID NO: 1795186 - RNA, 19 nt, Artificial Sequence
  Description of Artificial Sequence: Synthetic oligonucleotide
agagcaaacaugaauguac

SEQ ID NO: 1795187 - RNA, 19 nt, Artificial Sequence
  Description of Artificial Sequence: Synthetic oligonucleotide
ccaauaauacuuuaaaacc

SEQ ID NO: 1795188 - RNA, 19 nt, Artificial Sequence
  Description of Artificial Sequence: Synthetic oligonucleotide
cuaccaaaugaccacaggg

SEQ ID NO: 1795189 - RNA, 19 nt, Artificial Sequence
  Description of Artificial Sequence: Synthetic oligonucleotide
ugaaccuaaaguuuuacua

SEQ ID NO: 1795190 - RNA, 19 nt, Artificial Sequence
  Description of Artificial Sequence: Synthetic oligonucleotide
cacaauaccaccuuucaug

SEQ ID NO: 1795191 - RNA, 19 nt, Artificial Sequence
  Description of Artificial Sequence: Synthetic oligonucleotide
uccuuauacauacacacuc

SEQ ID NO: 1795192 - RNA, 19 nt, Artificial Sequence
  Description of Artificial Sequence: Synthetic oligonucleotide
acuacuacuccuuauacau

SEQ ID NO: 1795193 - RNA, 19 nt, Artificial Sequence
  Description of Artificial Sequence: Synthetic oligonucleotide
ugcugagacaauaucacug

SEQ ID NO: 1795194 - RNA, 19 nt, Artificial Sequence
  Description of Artificial Sequence: Synthetic oligonucleotide
ucaugaagcaagaugagua

SEQ ID NO: 1795195 - RNA, 19 nt, Artificial Sequence
  Description of Artificial Sequence: Synthetic oligonucleotide
aguucguuccucuugcaac

SEQ ID NO: 1795196 - RNA, 19 nt, Artificial Sequence
  Description of Artificial Sequence: Synthetic oligonucleotide
uauaauguggagucgauuu

SEQ ID NO: 1795197 - RNA, 19 nt, Artificial Sequence
  Description of Artificial Sequence: Synthetic oligonucleotide
aagauuauccaggauagga

SEQ ID NO: 1795198 - RNA, 19 nt, Artificial Sequence
  Description of Artificial Sequence: Synthetic oligonucleotide
aaaaguacguacagucccc

SEQ ID NO: 1795199 - RNA, 19 nt, Artificial Sequence
  Description of Artificial Sequence: Synthetic oligonucleotide
uccuguuuaguaauuacac

SEQ ID NO: 1795200 - RNA, 19 nt, Artificial Sequence
  Description of Artificial Sequence: Synthetic oligonucleotide
acuaaaacggugucaauca

SEQ ID NO: 1795201 - RNA, 19 nt, Artificial Sequence
  Description of Artificial Sequence: Synthetic oligonucleotide
aguaauccauucuuuguuc

SEQ ID NO: 1795202 - RNA, 19 nt, Artificial Sequence
  Description of Artificial Sequence: Synthetic oligonucleotide
agaucaagauuaaauacac

SEQ ID NO: 1795203 - RNA, 19 nt, Artificial Sequence
  Description of Artificial Sequence: Synthetic oligonucleotide
ucaucaacaaacuccugcc

SEQ ID NO: 1795204 - RNA, 19 nt, Artificial Sequence
  Description of Artificial Sequence: Synthetic oligonucleotide
ugagacaauaucacugacc

SEQ ID NO: 1795205 - RNA, 19 nt, Artificial Sequence
  Description of Artificial Sequence: Synthetic oligonucleotide
gacaauaucacugaccguc

SEQ ID NO: 1795206 - RNA, 19 nt, Artificial Sequence
  Description of Artificial Sequence: Synthetic oligonucleotide
uuagcuuaucagcauagac

SEQ ID NO: 1795207 - RNA, 19 nt, Artificial Sequence
  Description of Artificial Sequence: Synthetic oligonucleotide
uucaacuaaacagaucaag

SEQ ID NO: 1795208 - RNA, 19 nt, Artificial Sequence
  Description of Artificial Sequence: Synthetic oligonucleotide
ugucaaucagcucucuugc

SEQ ID NO: 1795209 - RNA, 19 nt, Artificial Sequence
  Description of Artificial Sequence: Synthetic oligonucleotide
uucauccguaucaagaacu

SEQ ID NO: 1795210 - RNA, 19 nt, Artificial Sequence
  Description of Artificial Sequence: Synthetic oligonucleotide
uauacauacacacucccuu

SEQ ID NO: 1795211 - RNA, 19 nt, Artificial Sequence
  Description of Artificial Sequence: Synthetic oligonucleotide
uacuacuccuuauacauac

SEQ ID NO: 1795212 - RNA, 19 nt, Artificial Sequence
  Description of Artificial Sequence: Synthetic oligonucleotide
uaaaacggugucaaucagc

SEQ ID NO: 1795213 - RNA, 19 nt, Artificial Sequence
  Description of Artificial Sequence: Synthetic oligonucleotide
auuaaugacaagucaccug

SEQ ID NO: 1795214 - RNA, 19 nt, Artificial Sequence
  Description of Artificial Sequence: Synthetic oligonucleotide
acagcaaacacuacuacuc

SEQ ID NO: 1795215 - RNA, 19 nt, Artificial Sequence
  Description of Artificial Sequence: Synthetic oligonucleotide
auuguaccccggcagaugg

SEQ ID NO: 1795216 - RNA, 19 nt, Artificial Sequence
  Description of Artificial Sequence: Synthetic oligonucleotide
ucaagaacucacaccuugg

SEQ ID NO: 1795217 - RNA, 19 nt, Artificial Sequence
  Description of Artificial Sequence: Synthetic oligonucleotide
augaacacaauagaaaccu

SEQ ID NO: 1795218 - RNA, 19 nt, Artificial Sequence
  Description of Artificial Sequence: Synthetic oligonucleotide
aaaacggugucaaucagcu

SEQ ID NO: 1795219 - RNA, 19 nt, Artificial Sequence
  Description of Artificial Sequence: Synthetic oligonucleotide
auauacuucauauucuuuu

SEQ ID NO: 1795220 - RNA, 19 nt, Artificial Sequence
  Description of Artificial Sequence: Synthetic oligonucleotide
cuuauacauacacacuccc

SEQ ID NO: 1795221 - RNA, 19 nt, Artificial Sequence
  Description of Artificial Sequence: Synthetic oligonucleotide
uuccguauuaaugacaagu

SEQ ID NO: 1795222 - RNA, 19 nt, Artificial Sequence
  Description of Artificial Sequence: Synthetic oligonucleotide
agaaaaguacguacagucc

SEQ ID NO: 1795223 - RNA, 19 nt, Artificial Sequence
  Description of Artificial Sequence: Synthetic oligonucleotide
ucccuuucaacuaaacaga

SEQ ID NO: 1795224 - RNA, 19 nt, Artificial Sequence
  Description of Artificial Sequence: Synthetic oligonucleotide
uaccaaaugaccacaggga

SEQ ID NO: 1795225 - RNA, 19 nt, Artificial Sequence
  Description of Artificial Sequence: Synthetic oligonucleotide
ugaaagagagccauucuau

SEQ ID NO: 1795226 - RNA, 19 nt, Artificial Sequence
  Description of Artificial Sequence: Synthetic oligonucleotide
uacugguugaaucaguaau

SEQ ID NO: 1795227 - RNA, 19 nt, Artificial Sequence
  Description of Artificial Sequence: Synthetic oligonucleotide
ugaaucaguaauccauucu

SEQ ID NO: 1795228 - RNA, 19 nt, Artificial Sequence
  Description of Artificial Sequence: Synthetic oligonucleotide
aucaagaacucacaccuug

SEQ ID NO: 1795229 - RNA, 19 nt, Artificial Sequence
  Description of Artificial Sequence: Synthetic oligonucleotide
ucaagaagauuauccagga

SEQ ID NO: 1795230 - RNA, 19 nt, Artificial Sequence
  Description of Artificial Sequence: Synthetic oligonucleotide
gaauguacugguugaauca

SEQ ID NO: 1795231 - RNA, 19 nt, Artificial Sequence
  Description of Artificial Sequence: Synthetic oligonucleotide
aauguacugguugaaucag

SEQ ID NO: 1795232 - RNA, 19 nt, Artificial Sequence
  Description of Artificial Sequence: Synthetic oligonucleotide
agaacucacaccuuggaaa

SEQ ID NO: 1795233 - RNA, 19 nt, Artificial Sequence
  Description of Artificial Sequence: Synthetic oligonucleotide
gagucgauuuccuuuagac

SEQ ID NO: 1795234 - RNA, 19 nt, Artificial Sequence
  Description of Artificial Sequence: Synthetic oligonucleotide
ucugucuaauaauaucaug

SEQ ID NO: 1795235 - RNA, 19 nt, Artificial Sequence
  Description of Artificial Sequence: Synthetic oligonucleotide
acacuacuacuccuuauac

SEQ ID NO: 1795236 - RNA, 19 nt, Artificial Sequence
  Description of Artificial Sequence: Synthetic oligonucleotide
auaauguggagucgauuuc

SEQ ID NO: 1795237 - RNA, 19 nt, Artificial Sequence
  Description of Artificial Sequence: Synthetic oligonucleotide
gacaagucaccugaggccg

SEQ ID NO: 1795238 - RNA, 19 nt, Artificial Sequence
  Description of Artificial Sequence: Synthetic oligonucleotide
guaucaagaacucacaccu

SEQ ID NO: 1795239 - RNA, 19 nt, Artificial Sequence
  Description of Artificial Sequence: Synthetic oligonucleotide
uucuguuggaauauacuuc

SEQ ID NO: 1795240 - RNA, 19 nt, Artificial Sequence
  Description of Artificial Sequence: Synthetic oligonucleotide
agcauagacauucccuuuc

SEQ ID NO: 1795241 - RNA, 19 nt, Artificial Sequence
  Description of Artificial Sequence: Synthetic oligonucleotide
  modified_base (6)..(6): a, c, u, g, unknown or other
aaaccnuuuggcauguucu

SEQ ID NO: 1795242 - RNA, 19 nt, Artificial Sequence
  Description of Artificial Sequence: Synthetic oligonucleotide
ugaaugacacacagcaaac

SEQ ID NO: 1795243 - RNA, 19 nt, Artificial Sequence
  Description of Artificial Sequence: Synthetic oligonucleotide
aauccagugacuccugaau

SEQ ID NO: 1795244 - RNA, 19 nt, Artificial Sequence
  Description of Artificial Sequence: Synthetic oligonucleotide
cuugauuguaccccggcag

SEQ ID NO: 1795245 - RNA, 19 nt, Artificial Sequence
  Description of Artificial Sequence: Synthetic oligonucleotide
agcauuaagaagugcugag

SEQ ID NO: 1795246 - RNA, 19 nt, Artificial Sequence
  Description of Artificial Sequence: Synthetic oligonucleotide
acaauaccaccuuucauga

SEQ ID NO: 1795247 - RNA, 19 nt, Artificial Sequence
  Description of Artificial Sequence: Synthetic oligonucleotide
  modified_base (7)..(7): a, c, u, g, unknown or other
gaaaccnuuuggcauguuc

SEQ ID NO: 1795248 - RNA, 19 nt, Artificial Sequence
  Description of Artificial Sequence: Synthetic oligonucleotide
ucugguguccaauaauacu

SEQ ID NO: 1795249 - RNA, 19 nt, Artificial Sequence
  Description of Artificial Sequence: Synthetic oligonucleotide
agcaagaugaguaauucug

SEQ ID NO: 1795250 - RNA, 19 nt, Artificial Sequence
  Description of Artificial Sequence: Synthetic oligonucleotide
aaauacacaauaccaccuu

SEQ ID NO: 1795251 - RNA, 19 nt, Artificial Sequence
  Description of Artificial Sequence: Synthetic oligonucleotide
gcaaacaugaauguacugg

SEQ ID NO: 1795252 - RNA, 19 nt, Artificial Sequence
  Description of Artificial Sequence: Synthetic oligonucleotide
aaaugcauaauuggagggu

SEQ ID NO: 1795253 - RNA, 19 nt, Artificial Sequence
  Description of Artificial Sequence: Synthetic oligonucleotide
ucauauaauguggagucga

SEQ ID NO: 1795254 - RNA, 19 nt, Artificial Sequence
  Description of Artificial Sequence: Synthetic oligonucleotide
uccguauuaaugacaaguc

SEQ ID NO: 1795255 - RNA, 19 nt, Artificial Sequence
  Description of Artificial Sequence: Synthetic oligonucleotide
aguuuuacuagaaauucca

SEQ ID NO: 1795256 - RNA, 19 nt, Artificial Sequence
  Description of Artificial Sequence: Synthetic oligonucleotide
guuuaguaauuacacuggc

SEQ ID NO: 1795257 - RNA, 19 nt, Artificial Sequence
  Description of Artificial Sequence: Synthetic oligonucleotide
gaagaugaggguaucuagc

SEQ ID NO: 1795258 - RNA, 19 nt, Artificial Sequence
  Description of Artificial Sequence: Synthetic oligonucleotide
aauacacaauaccaccuuu

SEQ ID NO: 1795259 - RNA, 19 nt, Artificial Sequence
  Description of Artificial Sequence: Synthetic oligonucleotide
auccguaucaagaacucac

SEQ ID NO: 1795260 - RNA, 19 nt, Artificial Sequence
  Description of Artificial Sequence: Synthetic oligonucleotide
aggguugccauuuucuucu

SEQ ID NO: 1795261 - RNA, 19 nt, Artificial Sequence
  Description of Artificial Sequence: Synthetic oligonucleotide
uauuaaugacaagucaccu

SEQ ID NO: 1795262 - RNA, 19 nt, Artificial Sequence
  Description of Artificial Sequence: Synthetic oligonucleotide
aagugcugagacaauauca

SEQ ID NO: 1795263 - RNA, 19 nt, Artificial Sequence
  Description of Artificial Sequence: Synthetic oligonucleotide
gaacucacaccuuggaaac

SEQ ID NO: 1795264 - RNA, 19 nt, Artificial Sequence
  Description of Artificial Sequence: Synthetic oligonucleotide
aguacguacaguccccuug

SEQ ID NO: 1795265 - RNA, 19 nt, Artificial Sequence
  Description of Artificial Sequence: Synthetic oligonucleotide
aaguggacaacagcuguuc

SEQ ID NO: 1795266 - RNA, 19 nt, Artificial Sequence
  Description of Artificial Sequence: Synthetic oligonucleotide
uucauauaauguggagucg

SEQ ID NO: 1795267 - RNA, 19 nt, Artificial Sequence
  Description of Artificial Sequence: Synthetic oligonucleotide
acacagcaaacacuacuac

SEQ ID NO: 1795268 - RNA, 19 nt, Artificial Sequence
  Description of Artificial Sequence: Synthetic oligonucleotide
acuaccaaaugaccacagg

SEQ ID NO: 1795269 - RNA, 19 nt, Artificial Sequence
  Description of Artificial Sequence: Synthetic oligonucleotide
acaugaauguacugguuga

SEQ ID NO: 1795270 - RNA, 19 nt, Artificial Sequence
  Description of Artificial Sequence: Synthetic oligonucleotide
cucgucucuucuuucaccc

SEQ ID NO: 1795271 - RNA, 19 nt, Artificial Sequence
  Description of Artificial Sequence: Synthetic oligonucleotide
ugucuaauaauaucauguu

SEQ ID NO: 1795272 - RNA, 19 nt, Artificial Sequence
  Description of Artificial Sequence: Synthetic oligonucleotide
  modified_base (2)..(2): a, c, u, g, unknown or other
cnuuuggcauguucuaccc

SEQ ID NO: 1795273 - RNA, 19 nt, Artificial Sequence
  Description of Artificial Sequence: Synthetic oligonucleotide
agcucuacaucaccugaac

SEQ ID NO: 1795274 - RNA, 19 nt, Artificial Sequence
  Description of Artificial Sequence: Synthetic oligonucleotide
uggcagacuaccaaaugac

SEQ ID NO: 1795275 - RNA, 19 nt, Artificial Sequence
  Description of Artificial Sequence: Synthetic oligonucleotide
aguaauuacacuggccuca

SEQ ID NO: 1795276 - RNA, 19 nt, Artificial Sequence
  Description of Artificial Sequence: Synthetic oligonucleotide
uguacugguugaaucagua

SEQ ID NO: 1795277 - RNA, 19 nt, Artificial Sequence
  Description of Artificial Sequence: Synthetic oligonucleotide
accgucuuguaguuuucgc

SEQ ID NO: 1795278 - RNA, 19 nt, Artificial Sequence
  Description of Artificial Sequence: Synthetic oligonucleotide
caggauaggaaggacacag

SEQ ID NO: 1795279 - RNA, 19 nt, Artificial Sequence
  Description of Artificial Sequence: Synthetic oligonucleotide
cugucuaauaauaucaugu

SEQ ID NO: 1795280 - RNA, 19 nt, Artificial Sequence
  Description of Artificial Sequence: Synthetic oligonucleotide
cauucuuuguucagauggc

SEQ ID NO: 1795281 - RNA, 19 nt, Artificial Sequence
  Description of Artificial Sequence: Synthetic oligonucleotide
acugguugaaucaguaauc

SEQ ID NO: 1795282 - RNA, 19 nt, Artificial Sequence
  Description of Artificial Sequence: Synthetic oligonucleotide
aguccccuugauuguaccc

SEQ ID NO: 1795283 - RNA, 19 nt, Artificial Sequence
  Description of Artificial Sequence: Synthetic oligonucleotide
ucacccucagcauuaagaa

SEQ ID NO: 1795284 - RNA, 19 nt, Artificial Sequence
  Description of Artificial Sequence: Synthetic oligonucleotide
gaguaauucugaagaagag

SEQ ID NO: 1795285 - RNA, 19 nt, Artificial Sequence
  Description of Artificial Sequence: Synthetic oligonucleotide
ugccccuucauccguauca

SEQ ID NO: 1795286 - RNA, 19 nt, Artificial Sequence
  Description of Artificial Sequence: Synthetic oligonucleotide
guuggaauauacuucauau

SEQ ID NO: 1795287 - RNA, 19 nt, Artificial Sequence
  Description of Artificial Sequence: Synthetic oligonucleotide
gagccauucuauucuuccg

SEQ ID NO: 1795288 - RNA, 19 nt, Artificial Sequence
  Description of Artificial Sequence: Synthetic oligonucleotide
auaccaccuuucaugaagc

SEQ ID NO: 1795289 - RNA, 19 nt, Artificial Sequence
  Description of Artificial Sequence: Synthetic oligonucleotide
uggcauguucuacccaggg

SEQ ID NO: 1795290 - RNA, 19 nt, Artificial Sequence
  Description of Artificial Sequence: Synthetic oligonucleotide
uugauuguaccccggcaga

SEQ ID NO: 1795291 - RNA, 19 nt, Artificial Sequence
  Description of Artificial Sequence: Synthetic oligonucleotide
ucaacaaacuccugccccu

SEQ ID NO: 1795292 - RNA, 19 nt, Artificial Sequence
  Description of Artificial Sequence: Synthetic oligonucleotide
cagacuaccaaaugaccac

SEQ ID NO: 1795293 - RNA, 19 nt, Artificial Sequence
  Description of Artificial Sequence: Synthetic oligonucleotide
agucgauuuccuuuagaca

SEQ ID NO: 1795294 - RNA, 19 nt, Artificial Sequence
  Description of Artificial Sequence: Synthetic oligonucleotide
cugaaugacacacagcaaa

SEQ ID NO: 1795295 - RNA, 19 nt, Artificial Sequence
  Description of Artificial Sequence: Synthetic oligonucleotide
uaauaauaucauguuccug

SEQ ID NO: 1795296 - RNA, 19 nt, Artificial Sequence
  Description of Artificial Sequence: Synthetic oligonucleotide
cugguugaaucaguaaucc

SEQ ID NO: 1795297 - RNA, 19 nt, Artificial Sequence
  Description of Artificial Sequence: Synthetic oligonucleotide
cugaaacaucuucuguugg

SEQ ID NO: 1795298 - RNA, 19 nt, Artificial Sequence
  Description of Artificial Sequence: Synthetic oligonucleotide
uguggagucgauuuccuuu

SEQ ID NO: 1795299 - RNA, 19 nt, Artificial Sequence
  Description of Artificial Sequence: Synthetic oligonucleotide
aggguaucuagccugaauu

SEQ ID NO: 1795300 - RNA, 19 nt, Artificial Sequence
  Description of Artificial Sequence: Synthetic oligonucleotide
uacacacucccuuagcuua

SEQ ID NO: 1795301 - RNA, 19 nt, Artificial Sequence
  Description of Artificial Sequence: Synthetic oligonucleotide
aaauaaguuuucauauaau

SEQ ID NO: 1795302 - RNA, 19 nt, Artificial Sequence
  Description of Artificial Sequence: Synthetic oligonucleotide
acaggucaacugcugaaag

SEQ ID NO: 1795303 - RNA, 19 nt, Artificial Sequence
  Description of Artificial Sequence: Synthetic oligonucleotide
guucguuccucuugcaacc

SEQ ID NO: 1795304 - RNA, 19 nt, Artificial Sequence
  Description of Artificial Sequence: Synthetic oligonucleotide
aaugcauaauuggaggguu

SEQ ID NO: 1795305 - RNA, 19 nt, Artificial Sequence
  Description of Artificial Sequence: Synthetic oligonucleotide
auaucauguuccuguuuag

SEQ ID NO: 1795306 - RNA, 19 nt, Artificial Sequence
  Description of Artificial Sequence: Synthetic oligonucleotide
uccguaucaagaacucaca

SEQ ID NO: 1795307 - RNA, 19 nt, Artificial Sequence
  Description of Artificial Sequence: Synthetic oligonucleotide
auacacaauaccaccuuuc

SEQ ID NO: 1795308 - RNA, 19 nt, Artificial Sequence
  Description of Artificial Sequence: Synthetic oligonucleotide
guuuccagagucucugagc

SEQ ID NO: 1795309 - RNA, 19 nt, Artificial Sequence
  Description of Artificial Sequence: Synthetic oligonucleotide
ucuugcaaccuccgcaacu

SEQ ID NO: 1795310 - RNA, 19 nt, Artificial Sequence
  Description of Artificial Sequence: Synthetic oligonucleotide
acccuaaccugcugagugc

SEQ ID NO: 1795311 - RNA, 19 nt, Artificial Sequence
  Description of Artificial Sequence: Synthetic oligonucleotide
ugcauaauuggaggguugc

SEQ ID NO: 1795312 - RNA, 19 nt, Artificial Sequence
  Description of Artificial Sequence: Synthetic oligonucleotide
ucucuugcuuguaagggua

SEQ ID NO: 1795313 - RNA, 19 nt, Artificial Sequence
  Description of Artificial Sequence: Synthetic oligonucleotide
uaaugacaagucaccugag

SEQ ID NO: 1795314 - RNA, 19 nt, Artificial Sequence
  Description of Artificial Sequence: Synthetic oligonucleotide
acuagaaauuccaaaucca

SEQ ID NO: 1795315 - RNA, 19 nt, Artificial Sequence
  Description of Artificial Sequence: Synthetic oligonucleotide
gaagugcugagacaauauc

SEQ ID NO: 1795316 - RNA, 19 nt, Artificial Sequence
  Description of Artificial Sequence: Synthetic oligonucleotide
  modified_base (4)..(4): a, c, u, g, unknown or other
accnuuuggcauguucuac

SEQ ID NO: 1795317 - RNA, 19 nt, Artificial Sequence
  Description of Artificial Sequence: Synthetic oligonucleotide
aaacacuacuacuccuuau

SEQ ID NO: 1795318 - RNA, 19 nt, Artificial Sequence
  Description of Artificial Sequence: Synthetic oligonucleotide
cguauuaaugacaagucac

SEQ ID NO: 1795319 - RNA, 19 nt, Artificial Sequence
  Description of Artificial Sequence: Synthetic oligonucleotide
uuucaacuaaacagaucaa

SEQ ID NO: 1795320 - RNA, 19 nt, Artificial Sequence
  Description of Artificial Sequence: Synthetic oligonucleotide
cuaaaacggugucaaucag

SEQ ID NO: 1795321 - RNA, 19 nt, Artificial Sequence
  Description of Artificial Sequence: Synthetic oligonucleotide
cgaaaugcauaauuggagg

SEQ ID NO: 1795322 - RNA, 19 nt, Artificial Sequence
  Description of Artificial Sequence: Synthetic oligonucleotide
uuggcauguucuacccagg

SEQ ID NO: 1795323 - RNA, 19 nt, Artificial Sequence
  Description of Artificial Sequence: Synthetic oligonucleotide
aaacggugucaaucagcuc

SEQ ID NO: 1795324 - RNA, 19 nt, Artificial Sequence
  Description of Artificial Sequence: Synthetic oligonucleotide
ucuauucuuccguauuaau

SEQ ID NO: 1795325 - RNA, 19 nt, Artificial Sequence
  Description of Artificial Sequence: Synthetic oligonucleotide
ccaccuuucaugaagcaag

SEQ ID NO: 1795326 - RNA, 19 nt, Artificial Sequence
  Description of Artificial Sequence: Synthetic oligonucleotide
ugcuuguaaggguaucugu

SEQ ID NO: 1795327 - RNA, 19 nt, Artificial Sequence
  Description of Artificial Sequence: Synthetic oligonucleotide
gaagauuauccaggauagg

SEQ ID NO: 1795328 - RNA, 19 nt, Artificial Sequence
  Description of Artificial Sequence: Synthetic oligonucleotide
uccccuugauuguaccccg

SEQ ID NO: 1795329 - RNA, 19 nt, Artificial Sequence
  Description of Artificial Sequence: Synthetic oligonucleotide
uuggaauauacuucauauu

SEQ ID NO: 1795330 - RNA, 19 nt, Artificial Sequence
  Description of Artificial Sequence: Synthetic oligonucleotide
cugagugccaggacuacug

SEQ ID NO: 1795331 - RNA, 19 nt, Artificial Sequence
  Description of Artificial Sequence: Synthetic oligonucleotide
  modified_base (5)..(5): a, c, u, g, unknown or other
aaccnuuuggcauguucua

SEQ ID NO: 1795332 - RNA, 19 nt, Artificial Sequence
  Description of Artificial Sequence: Synthetic oligonucleotide
caucaacaaacuccugccc

SEQ ID NO: 1795333 - RNA, 19 nt, Artificial Sequence
  Description of Artificial Sequence: Synthetic oligonucleotide
uaguaauuacacuggccuc

SEQ ID NO: 1795334 - RNA, 19 nt, Artificial Sequence
  Description of Artificial Sequence: Synthetic oligonucleotide
uguuggcugcagcauuucc

SEQ ID NO: 1795335 - RNA, 19 nt, Artificial Sequence
  Description of Artificial Sequence: Synthetic oligonucleotide
ccagcgacaagccugaaac

SEQ ID NO: 1795336 - RNA, 19 nt, Artificial Sequence
  Description of Artificial Sequence: Synthetic oligonucleotide
agcaaacaugaauguacug

SEQ ID NO: 1795337 - RNA, 19 nt, Artificial Sequence
  Description of Artificial Sequence: Synthetic oligonucleotide
aggaguugacucugaacug

SEQ ID NO: 1795338 - RNA, 19 nt, Artificial Sequence
  Description of Artificial Sequence: Synthetic oligonucleotide
auaucacugaccgucuugu

SEQ ID NO: 1795339 - RNA, 19 nt, Artificial Sequence
  Description of Artificial Sequence: Synthetic oligonucleotide
gauaggaaggacacagguc

SEQ ID NO: 1795340 - RNA, 19 nt, Artificial Sequence
  Description of Artificial Sequence: Synthetic oligonucleotide
ugcugaaagagagccauuc

SEQ ID NO: 1795341 - RNA, 19 nt, Artificial Sequence
  Description of Artificial Sequence: Synthetic oligonucleotide
uucuuuguucagauggcuu

SEQ ID NO: 1795342 - RNA, 19 nt, Artificial Sequence
  Description of Artificial Sequence: Synthetic oligonucleotide
auaauaucauguuccuguu

SEQ ID NO: 1795343 - RNA, 19 nt, Artificial Sequence
  Description of Artificial Sequence: Synthetic oligonucleotide
acaucaccugaaccuaaag

SEQ ID NO: 1795344 - RNA, 19 nt, Artificial Sequence
  Description of Artificial Sequence: Synthetic oligonucleotide
uguaaggguaucuguguuu

SEQ ID NO: 1795345 - RNA, 19 nt, Artificial Sequence
  Description of Artificial Sequence: Synthetic oligonucleotide
ucgauuuccuuuagacagu

SEQ ID NO: 1795346 - RNA, 19 nt, Artificial Sequence
  Description of Artificial Sequence: Synthetic oligonucleotide
aagaagugcugagacaaua

SEQ ID NO: 1795347 - RNA, 19 nt, Artificial Sequence
  Description of Artificial Sequence: Synthetic oligonucleotide
ucuacaucaccugaaccua

SEQ ID NO: 1795348 - RNA, 19 nt, Artificial Sequence
  Description of Artificial Sequence: Synthetic oligonucleotide
cuucauccguaucaagaac

SEQ ID NO: 1795349 - RNA, 19 nt, Artificial Sequence
  Description of Artificial Sequence: Synthetic oligonucleotide
aaaguacguacaguccccu

SEQ ID NO: 1795350 - RNA, 19 nt, Artificial Sequence
  Description of Artificial Sequence: Synthetic oligonucleotide
ccuuauacauacacacucc

SEQ ID NO: 1795351 - RNA, 19 nt, Artificial Sequence
  Description of Artificial Sequence: Synthetic oligonucleotide
gaagagcaaacaugaaugu

SEQ ID NO: 1795352 - RNA, 19 nt, Artificial Sequence
  Description of Artificial Sequence: Synthetic oligonucleotide
cuuugacuaaaacgguguc

SEQ ID NO: 1795353 - RNA, 19 nt, Artificial Sequence
  Description of Artificial Sequence: Synthetic oligonucleotide
cucuacaucaccugaaccu

SEQ ID NO: 1795354 - RNA, 19 nt, Artificial Sequence
  Description of Artificial Sequence: Synthetic oligonucleotide
uaucuagccugaauuucau

SEQ ID NO: 1795355 - RNA, 19 nt, Artificial Sequence
  Description of Artificial Sequence: Synthetic oligonucleotide
uaauaucauguuccuguuu

SEQ ID NO: 1795356 - RNA, 19 nt, Artificial Sequence
  Description of Artificial Sequence: Synthetic oligonucleotide
gaacacaauagaaaccucu

SEQ ID NO: 1795357 - RNA, 19 nt, Artificial Sequence
  Description of Artificial Sequence: Synthetic oligonucleotide
uccauucuuuguucagaug

SEQ ID NO: 1795358 - RNA, 19 nt, Artificial Sequence
  Description of Artificial Sequence: Synthetic oligonucleotide
caaacaugaauguacuggu

SEQ ID NO: 1795359 - RNA, 19 nt, Artificial Sequence
  Description of Artificial Sequence: Synthetic oligonucleotide
auuccuggcagacuaccaa

SEQ ID NO: 1795360 - RNA, 19 nt, Artificial Sequence
  Description of Artificial Sequence: Synthetic oligonucleotide
ucuuguaguuuucgccagu

SEQ ID NO: 1795361 - RNA, 19 nt, Artificial Sequence
  Description of Artificial Sequence: Synthetic oligonucleotide
cucccuuagcuuaucagca

SEQ ID NO: 1795362 - RNA, 19 nt, Artificial Sequence
  Description of Artificial Sequence: Synthetic oligonucleotide
uugcuuguaaggguaucug

SEQ ID NO: 1795363 - RNA, 19 nt, Artificial Sequence
  Description of Artificial Sequence: Synthetic oligonucleotide
aauguggagucgauuuccu

SEQ ID NO: 1795364 - RNA, 19 nt, Artificial Sequence
  Description of Artificial Sequence: Synthetic oligonucleotide
uucuauucuuccguauuaa

SEQ ID NO: 1795365 - RNA, 19 nt, Artificial Sequence
  Description of Artificial Sequence: Synthetic oligonucleotide
guaucuagccugaauuuca

SEQ ID NO: 1795366 - RNA, 19 nt, Artificial Sequence
  Description of Artificial Sequence: Synthetic oligonucleotide
uacaucaccugaaccuaaa

SEQ ID NO: 1795367 - RNA, 19 nt, Artificial Sequence
  Description of Artificial Sequence: Synthetic oligonucleotide
aagauguuggcugcagcau

SEQ ID NO: 1795368 - RNA, 19 nt, Artificial Sequence
  Description of Artificial Sequence: Synthetic oligonucleotide
cuucugguguccaauaaua

SEQ ID NO: 1795369 - RNA, 19 nt, Artificial Sequence
  Description of Artificial Sequence: Synthetic oligonucleotide
caugaagcaagaugaguaa

SEQ ID NO: 1795370 - RNA, 19 nt, Artificial Sequence
  Description of Artificial Sequence: Synthetic oligonucleotide
  modified_base (3)..(3): a, c, u, g, unknown or other
ccnuuuggcauguucuacc

SEQ ID NO: 1795371 - RNA, 19 nt, Artificial Sequence
  Description of Artificial Sequence: Synthetic oligonucleotide
ggccucaagaagauuaucc

SEQ ID NO: 1795372 - RNA, 19 nt, Artificial Sequence
  Description of Artificial Sequence: Synthetic oligonucleotide
gacauucccuuucaacuaa

SEQ ID NO: 1795373 - RNA, 19 nt, Artificial Sequence
  Description of Artificial Sequence: Synthetic oligonucleotide
ucucugagcucuacaucac

SEQ ID NO: 1795374 - RNA, 19 nt, Artificial Sequence
  Description of Artificial Sequence: Synthetic oligonucleotide
gcaaguucguuccucuugc

SEQ ID NO: 1795375 - RNA, 19 nt, Artificial Sequence
  Description of Artificial Sequence: Synthetic oligonucleotide
cguaucaagaacucacacc

SEQ ID NO: 1795376 - RNA, 19 nt, Artificial Sequence
  Description of Artificial Sequence: Synthetic oligonucleotide
acuggccucaagaagauua

SEQ ID NO: 1795377 - RNA, 19 nt, Artificial Sequence
  Description of Artificial Sequence: Synthetic oligonucleotide
auacacacucccuuagcuu

SEQ ID NO: 1795378 - RNA, 19 nt, Artificial Sequence
  Description of Artificial Sequence: Synthetic oligonucleotide
cugagcucuacaucaccug

SEQ ID NO: 1795379 - RNA, 19 nt, Artificial Sequence
  Description of Artificial Sequence: Synthetic oligonucleotide
agccugaaacaucuucugu

SEQ ID NO: 1795380 - RNA, 19 nt, Artificial Sequence
  Description of Artificial Sequence: Synthetic oligonucleotide
cuaaccugcugagugccag

SEQ ID NO: 1795381 - RNA, 19 nt, Artificial Sequence
  Description of Artificial Sequence: Synthetic oligonucleotide
cucugagcucuacaucacc

SEQ ID NO: 1795382 - RNA, 19 nt, Artificial Sequence
  Description of Artificial Sequence: Synthetic oligonucleotide
uggagucgauuuccuuuag

SEQ ID NO: 1795383 - RNA, 19 nt, Artificial Sequence
  Description of Artificial Sequence: Synthetic oligonucleotide
cugagacaauaucacugac

SEQ ID NO: 1795384 - RNA, 19 nt, Artificial Sequence
  Description of Artificial Sequence: Synthetic oligonucleotide
ggacuacugguuuccagag

SEQ ID NO: 1795385 - RNA, 19 nt, Artificial Sequence
  Description of Artificial Sequence: Synthetic oligonucleotide
uguuccuguuuaguaauua

SEQ ID NO: 1795386 - RNA, 19 nt, Artificial Sequence
  Description of Artificial Sequence: Synthetic oligonucleotide
cugaaagagagccauucua

SEQ ID NO: 1795387 - RNA, 19 nt, Artificial Sequence
  Description of Artificial Sequence: Synthetic oligonucleotide
uaagaagugcugagacaau

SEQ ID NO: 1795388 - RNA, 19 nt, Artificial Sequence
  Description of Artificial Sequence: Synthetic oligonucleotide
gauuguaccccggcagaug

SEQ ID NO: 1795389 - RNA, 19 nt, Artificial Sequence
  Description of Artificial Sequence: Synthetic oligonucleotide
gaccgucuuguaguuuucg

SEQ ID NO: 1795390 - RNA, 19 nt, Artificial Sequence
  Description of Artificial Sequence: Synthetic oligonucleotide
uuguaccccggcagauggg

SEQ ID NO: 1795391 - RNA, 19 nt, Artificial Sequence
  Description of Artificial Sequence: Synthetic oligonucleotide
ggcauguucuacccagggg

SEQ ID NO: 1795392 - RNA, 19 nt, Artificial Sequence
  Description of Artificial Sequence: Synthetic oligonucleotide
cacuacuacuccuuauaca

SEQ ID NO: 1795393 - RNA, 19 nt, Artificial Sequence
  Description of Artificial Sequence: Synthetic oligonucleotide
gcagcauuuccuuugacua

SEQ ID NO: 1795394 - RNA, 19 nt, Artificial Sequence
  Description of Artificial Sequence: Synthetic oligonucleotide
gcuuguaaggguaucugug

SEQ ID NO: 1795395 - RNA, 19 nt, Artificial Sequence
  Description of Artificial Sequence: Synthetic oligonucleotide
agauguuggcugcagcauu

SEQ ID NO: 1795396 - RNA, 19 nt, Artificial Sequence
  Description of Artificial Sequence: Synthetic oligonucleotide
guacguacaguccccuuga

SEQ ID NO: 1795397 - RNA, 19 nt, Artificial Sequence
  Description of Artificial Sequence: Synthetic oligonucleotide
agacuaccaaaugaccaca

SEQ ID NO: 1795398 - RNA, 19 nt, Artificial Sequence
  Description of Artificial Sequence: Synthetic oligonucleotide
gugucugaaguggacaaca

SEQ ID NO: 1795399 - RNA, 19 nt, Artificial Sequence
  Description of Artificial Sequence: Synthetic oligonucleotide
uccagcgacaagccugaaa

SEQ ID NO: 1795400 - RNA, 19 nt, Artificial Sequence
  Description of Artificial Sequence: Synthetic oligonucleotide
aaacaugaauguacugguu

SEQ ID NO: 1795401 - RNA, 19 nt, Artificial Sequence
  Description of Artificial Sequence: Synthetic oligonucleotide
cugguguccaauaauacuu

SEQ ID NO: 1795402 - RNA, 19 nt, Artificial Sequence
  Description of Artificial Sequence: Synthetic oligonucleotide
uaucaagaacucacaccuu

SEQ ID NO: 1795403 - RNA, 19 nt, Artificial Sequence
  Description of Artificial Sequence: Synthetic oligonucleotide
aggauaggaaggacacagg

SEQ ID NO: 1795404 - RNA, 19 nt, Artificial Sequence
  Description of Artificial Sequence: Synthetic oligonucleotide
caagaacucacaccuugga

SEQ ID NO: 1795405 - RNA, 19 nt, Artificial Sequence
  Description of Artificial Sequence: Synthetic oligonucleotide
cuuccguauuaaugacaag

SEQ ID NO: 1795406 - RNA, 19 nt, Artificial Sequence
  Description of Artificial Sequence: Synthetic oligonucleotide
uacugguuuccagagucuc

SEQ ID NO: 1795407 - RNA, 19 nt, Artificial Sequence
  Description of Artificial Sequence: Synthetic oligonucleotide
agacaauaucacugaccgu

SEQ ID NO: 1795408 - RNA, 19 nt, Artificial Sequence
  Description of Artificial Sequence: Synthetic oligonucleotide
augaauguacugguugaau

SEQ ID NO: 1795409 - RNA, 19 nt, Artificial Sequence
  Description of Artificial Sequence: Synthetic oligonucleotide
ccgucuuguaguuuucgcc

SEQ ID NO: 1795410 - RNA, 19 nt, Artificial Sequence
  Description of Artificial Sequence: Synthetic oligonucleotide
agaagugcugagacaauau

SEQ ID NO: 1795411 - RNA, 19 nt, Artificial Sequence
  Description of Artificial Sequence: Synthetic oligonucleotide
cucuucuuucacccucagc

SEQ ID NO: 1795412 - RNA, 19 nt, Artificial Sequence
  Description of Artificial Sequence: Synthetic oligonucleotide
augaagcaagaugaguaau

SEQ ID NO: 1795413 - RNA, 19 nt, Artificial Sequence
  Description of Artificial Sequence: Synthetic oligonucleotide
uaccccggcagauggggca

SEQ ID NO: 1795414 - RNA, 19 nt, Artificial Sequence
  Description of Artificial Sequence: Synthetic oligonucleotide
  modified_base (9)..(9): a, c, u, g, unknown or other
uggaaaccnuuuggcaugu

SEQ ID NO: 1795415 - RNA, 19 nt, Artificial Sequence
  Description of Artificial Sequence: Synthetic oligonucleotide
cauacacacucccuuagcu

SEQ ID NO: 1795416 - RNA, 19 nt, Artificial Sequence
  Description of Artificial Sequence: Synthetic oligonucleotide
auauaauguggagucgauu

SEQ ID NO: 1795417 - RNA, 19 nt, Artificial Sequence
  Description of Artificial Sequence: Synthetic oligonucleotide
gaaagagagccauucuauu

SEQ ID NO: 1795418 - RNA, 19 nt, Artificial Sequence
  Description of Artificial Sequence: Synthetic oligonucleotide
gcagacuaccaaaugacca

SEQ ID NO: 1795419 - RNA, 19 nt, Artificial Sequence
  Description of Artificial Sequence: Synthetic oligonucleotide
gcucuacaucaccugaacc

SEQ ID NO: 1795420 - RNA, 19 nt, Artificial Sequence
  Description of Artificial Sequence: Synthetic oligonucleotide
cuuccagcgacaagccuga

SEQ ID NO: 1795421 - RNA, 19 nt, Artificial Sequence
  Description of Artificial Sequence: Synthetic oligonucleotide
gguaucuagccugaauuuc

SEQ ID NO: 1795422 - RNA, 19 nt, Artificial Sequence
  Description of Artificial Sequence: Synthetic oligonucleotide
accuccgcaacugcucuuc

SEQ ID NO: 1795423 - RNA, 19 nt, Artificial Sequence
  Description of Artificial Sequence: Synthetic oligonucleotide
cuuuuccacaaauaaguuu

SEQ ID NO: 1795424 - RNA, 19 nt, Artificial Sequence
  Description of Artificial Sequence: Synthetic oligonucleotide
ucccuuagcuuaucagcau

SEQ ID NO: 1795425 - RNA, 19 nt, Artificial Sequence
  Description of Artificial Sequence: Synthetic oligonucleotide
aaguacguacaguccccuu

SEQ ID NO: 1795426 - RNA, 19 nt, Artificial Sequence
  Description of Artificial Sequence: Synthetic oligonucleotide
ugauuguaccccggcagau

SEQ ID NO: 1795427 - RNA, 19 nt, Artificial Sequence
  Description of Artificial Sequence: Synthetic oligonucleotide
caggucaacugcugaaaga

SEQ ID NO: 1795428 - RNA, 19 nt, Artificial Sequence
  Description of Artificial Sequence: Synthetic oligonucleotide
caguccccuugauuguacc

SEQ ID NO: 1795429 - RNA, 19 nt, Artificial Sequence
  Description of Artificial Sequence: Synthetic oligonucleotide
ccacaaauaaguuuucaua

SEQ ID NO: 1795430 - RNA, 19 nt, Artificial Sequence
  Description of Artificial Sequence: Synthetic oligonucleotide
accuaaaguuuuacuagaa

SEQ ID NO: 1795431 - RNA, 19 nt, Artificial Sequence
  Description of Artificial Sequence: Synthetic oligonucleotide
gagcaaacaugaauguacu

SEQ ID NO: 1795432 - RNA, 19 nt, Artificial Sequence
  Description of Artificial Sequence: Synthetic oligonucleotide
guggagucgauuuccuuua

SEQ ID NO: 1795433 - RNA, 19 nt, Artificial Sequence
  Description of Artificial Sequence: Synthetic oligonucleotide
accaccuuucaugaagcaa

SEQ ID NO: 1795434 - RNA, 19 nt, Artificial Sequence
  Description of Artificial Sequence: Synthetic oligonucleotide
uaaggguaucuguguuuuc

SEQ ID NO: 1795435 - RNA, 19 nt, Artificial Sequence
  Description of Artificial Sequence: Synthetic oligonucleotide
aggacacaggucaacugcu

SEQ ID NO: 1795436 - RNA, 19 nt, Artificial Sequence
  Description of Artificial Sequence: Synthetic oligonucleotide
gaguugacucugaacuguc

SEQ ID NO: 1795437 - RNA, 19 nt, Artificial Sequence
  Description of Artificial Sequence: Synthetic oligonucleotide
augcauaauuggaggguug

SEQ ID NO: 1795438 - RNA, 19 nt, Artificial Sequence
  Description of Artificial Sequence: Synthetic oligonucleotide
ggcagacuaccaaaugacc

SEQ ID NO: 1795439 - RNA, 19 nt, Artificial Sequence
  Description of Artificial Sequence: Synthetic oligonucleotide
guguccaauaauacuuuaa

SEQ ID NO: 1795440 - RNA, 19 nt, Artificial Sequence
  Description of Artificial Sequence: Synthetic oligonucleotide
cugaaccuaaaguuuuacu

SEQ ID NO: 1795441 - RNA, 19 nt, Artificial Sequence
  Description of Artificial Sequence: Synthetic oligonucleotide
ugaccgucuuguaguuuuc

SEQ ID NO: 1795442 - RNA, 19 nt, Artificial Sequence
  Description of Artificial Sequence: Synthetic oligonucleotide
ugccaggacuacugguuuc

SEQ ID NO: 1795443 - RNA, 19 nt, Artificial Sequence
  Description of Artificial Sequence: Synthetic oligonucleotide
ucgucucuucuuucacccu

SEQ ID NO: 1795444 - RNA, 19 nt, Artificial Sequence
  Description of Artificial Sequence: Synthetic oligonucleotide
acguacaguccccuugauu

SEQ ID NO: 1795445 - RNA, 19 nt, Artificial Sequence
  Description of Artificial Sequence: Synthetic oligonucleotide
caccuuucaugaagcaaga

SEQ ID NO: 1795446 - RNA, 19 nt, Artificial Sequence
  Description of Artificial Sequence: Synthetic oligonucleotide
gcaagaugaguaauucuga

SEQ ID NO: 1795447 - RNA, 19 nt, Artificial Sequence
  Description of Artificial Sequence: Synthetic oligonucleotide
caaacacuacuacuccuua

SEQ ID NO: 1795448 - RNA, 19 nt, Artificial Sequence
  Description of Artificial Sequence: Synthetic oligonucleotide
ucguuccucuugcaaccuc

SEQ ID NO: 1795449 - RNA, 19 nt, Artificial Sequence
  Description of Artificial Sequence: Synthetic oligonucleotide
uucguuccucuugcaaccu

SEQ ID NO: 1795450 - RNA, 19 nt, Artificial Sequence
  Description of Artificial Sequence: Synthetic oligonucleotide
acaagucaccugaggccgg

SEQ ID NO: 1795451 - RNA, 19 nt, Artificial Sequence
  Description of Artificial Sequence: Synthetic oligonucleotide
uacaguccccuugauugua

SEQ ID NO: 1795452 - RNA, 19 nt, Artificial Sequence
  Description of Artificial Sequence: Synthetic oligonucleotide
caaauccagugacuccuga

SEQ ID NO: 1795453 - RNA, 19 nt, Artificial Sequence
  Description of Artificial Sequence: Synthetic oligonucleotide
ccguaucaagaacucacac

SEQ ID NO: 1795454 - RNA, 19 nt, Artificial Sequence
  Description of Artificial Sequence: Synthetic oligonucleotide
cuacaucaccugaaccuaa

SEQ ID NO: 1795455 - RNA, 19 nt, Artificial Sequence
  Description of Artificial Sequence: Synthetic oligonucleotide
uacguacaguccccuugau

SEQ ID NO: 1795456 - RNA, 19 nt, Artificial Sequence
  Description of Artificial Sequence: Synthetic oligonucleotide
acuacuccuuauacauaca

SEQ ID NO: 1795457 - RNA, 19 nt, Artificial Sequence
  Description of Artificial Sequence: Synthetic oligonucleotide
gcacauuccuggcagacua

SEQ ID NO: 1795458 - RNA, 19 nt, Artificial Sequence
  Description of Artificial Sequence: Synthetic oligonucleotide
cagcauuuccuuugacuaa

SEQ ID NO: 1795459 - RNA, 19 nt, Artificial Sequence
  Description of Artificial Sequence: Synthetic oligonucleotide
ccguauuaaugacaaguca

SEQ ID NO: 1795460 - RNA, 19 nt, Artificial Sequence
  Description of Artificial Sequence: Synthetic oligonucleotide
cauauaauguggagucgau

SEQ ID NO: 1795461 - RNA, 19 nt, Artificial Sequence
  Description of Artificial Sequence: Synthetic oligonucleotide
uugcaaguucguuccucuu

SEQ ID NO: 1795462 - RNA, 19 nt, Artificial Sequence
  Description of Artificial Sequence: Synthetic oligonucleotide
cuacuacuccuuauacaua

SEQ ID NO: 1795463 - RNA, 19 nt, Artificial Sequence
  Description of Artificial Sequence: Synthetic oligonucleotide
uggccucaagaagauuauc

SEQ ID NO: 1795464 - RNA, 19 nt, Artificial Sequence
  Description of Artificial Sequence: Synthetic oligonucleotide
gcauaauuggaggguugcc

SEQ ID NO: 1795465 - RNA, 19 nt, Artificial Sequence
  Description of Artificial Sequence: Synthetic oligonucleotide
gaggguaucuagccugaau

SEQ ID NO: 1795466 - RNA, 19 nt, Artificial Sequence
  Description of Artificial Sequence: Synthetic oligonucleotide
cugaccgucuuguaguuuu

SEQ ID NO: 1795467 - RNA, 19 nt, Artificial Sequence
  Description of Artificial Sequence: Synthetic oligonucleotide
aaccuccgcaacugcucuu

SEQ ID NO: 1795468 - RNA, 19 nt, Artificial Sequence
  Description of Artificial Sequence: Synthetic oligonucleotide
ggagucgauuuccuuuaga

SEQ ID NO: 1795469 - RNA, 19 nt, Artificial Sequence
  Description of Artificial Sequence: Synthetic oligonucleotide
gacuacugguuuccagagu

SEQ ID NO: 1795470 - RNA, 19 nt, Artificial Sequence
  Description of Artificial Sequence: Synthetic oligonucleotide
ccuuugacuaaaacggugu

SEQ ID NO: 1795471 - RNA, 19 nt, Artificial Sequence
  Description of Artificial Sequence: Synthetic oligonucleotide
cagcgacaagccugaaaca

SEQ ID NO: 1795472 - RNA, 19 nt, Artificial Sequence
  Description of Artificial Sequence: Synthetic oligonucleotide
ggaguugacucugaacugu

SEQ ID NO: 1795473 - RNA, 19 nt, Artificial Sequence
  Description of Artificial Sequence: Synthetic oligonucleotide
uccugccccuucauccgua

SEQ ID NO: 1795474 - RNA, 19 nt, Artificial Sequence
  Description of Artificial Sequence: Synthetic oligonucleotide
gcaacugcucuuccagcga

SEQ ID NO: 1795475 - RNA, 19 nt, Artificial Sequence
  Description of Artificial Sequence: Synthetic oligonucleotide
ggugucugaaguggacaac

SEQ ID NO: 1795476 - RNA, 19 nt, Artificial Sequence
  Description of Artificial Sequence: Synthetic oligonucleotide
acauucccuuucaacuaaa

SEQ ID NO: 1795477 - RNA, 19 nt, Artificial Sequence
  Description of Artificial Sequence: Synthetic oligonucleotide
agauggcuucuggugucca

SEQ ID NO: 1795478 - RNA, 19 nt, Artificial Sequence
  Description of Artificial Sequence: Synthetic oligonucleotide
cccuaaccugcugagugcc

SEQ ID NO: 1795479 - RNA, 19 nt, Artificial Sequence
  Description of Artificial Sequence: Synthetic oligonucleotide
ggaaggacacaggucaacu

SEQ ID NO: 1795480 - RNA, 19 nt, Artificial Sequence
  Description of Artificial Sequence: Synthetic oligonucleotide
gcugaaagagagccauucu

SEQ ID NO: 1795481 - RNA, 19 nt, Artificial Sequence
  Description of Artificial Sequence: Synthetic oligonucleotide
ucaccugaggccgguucuu

SEQ ID NO: 1795482 - RNA, 19 nt, Artificial Sequence
  Description of Artificial Sequence: Synthetic oligonucleotide
caagaagauuauccaggau

SEQ ID NO: 1795483 - RNA, 19 nt, Artificial Sequence
  Description of Artificial Sequence: Synthetic oligonucleotide
gccauucuauucuuccgua

SEQ ID NO: 1795484 - RNA, 19 nt, Artificial Sequence
  Description of Artificial Sequence: Synthetic oligonucleotide
guaccccggcagauggggc

SEQ ID NO: 1795485 - RNA, 19 nt, Artificial Sequence
  Description of Artificial Sequence: Synthetic oligonucleotide
acacacucccuuagcuuau

SEQ ID NO: 1795486 - RNA, 19 nt, Artificial Sequence
  Description of Artificial Sequence: Synthetic oligonucleotide
ccuugauuguaccccggca

SEQ ID NO: 1795487 - RNA, 19 nt, Artificial Sequence
  Description of Artificial Sequence: Synthetic oligonucleotide
gcgacaagccugaaacauc

SEQ ID NO: 1795488 - RNA, 19 nt, Artificial Sequence
  Description of Artificial Sequence: Synthetic oligonucleotide
caaccuccgcaacugcucu

SEQ ID NO: 1795489 - RNA, 19 nt, Artificial Sequence
  Description of Artificial Sequence: Synthetic oligonucleotide
cuggccucaagaagauuau

SEQ ID NO: 1795490 - RNA, 19 nt, Artificial Sequence
  Description of Artificial Sequence: Synthetic oligonucleotide
cacacucccuuagcuuauc

SEQ ID NO: 1795491 - RNA, 19 nt, Artificial Sequence
  Description of Artificial Sequence: Synthetic oligonucleotide
ccccuugauuguaccccgg

SEQ ID NO: 1795492 - RNA, 19 nt, Artificial Sequence
  Description of Artificial Sequence: Synthetic oligonucleotide
caccugaggccgguucuuc

SEQ ID NO: 1795493 - RNA, 19 nt, Artificial Sequence
  Description of Artificial Sequence: Synthetic oligonucleotide
ccugaaugacacacagcaa

SEQ ID NO: 1795494 - RNA, 19 nt, Artificial Sequence
  Description of Artificial Sequence: Synthetic oligonucleotide
cuuucacccucagcauuaa

SEQ ID NO: 1795495 - RNA, 19 nt, Artificial Sequence
  Description of Artificial Sequence: Synthetic oligonucleotide
cugccccuucauccguauc

SEQ ID NO: 1795496 - RNA, 19 nt, Artificial Sequence
  Description of Artificial Sequence: Synthetic oligonucleotide
caucuucuguuggaauaua

SEQ ID NO: 1795497 - RNA, 19 nt, Artificial Sequence
  Description of Artificial Sequence: Synthetic oligonucleotide
aagucaccugaggccgguu

SEQ ID NO: 1795498 - RNA, 19 nt, Artificial Sequence
  Description of Artificial Sequence: Synthetic oligonucleotide
cucuugcuuguaaggguau

SEQ ID NO: 1795499 - RNA, 19 nt, Artificial Sequence
  Description of Artificial Sequence: Synthetic oligonucleotide
gugccaggacuacugguuu

SEQ ID NO: 1795500 - RNA, 19 nt, Artificial Sequence
  Description of Artificial Sequence: Synthetic oligonucleotide
guucuacccaggggucauc

SEQ ID NO: 1795501 - RNA, 19 nt, Artificial Sequence
  Description of Artificial Sequence: Synthetic oligonucleotide
ccuaaccugcugagugcca

SEQ ID NO: 1795502 - RNA, 19 nt, Artificial Sequence
  Description of Artificial Sequence: Synthetic oligonucleotide
cacugaccgucuuguaguu

SEQ ID NO: 1795503 - RNA, 19 nt, Artificial Sequence
  Description of Artificial Sequence: Synthetic oligonucleotide
ccauucuauucuuccguau

SEQ ID NO: 1795504 - RNA, 19 nt, Artificial Sequence
  Description of Artificial Sequence: Synthetic oligonucleotide
uuccagcgacaagccugaa

SEQ ID NO: 1795505 - RNA, 19 nt, Artificial Sequence
  Description of Artificial Sequence: Synthetic oligonucleotide
gacaagccugaaacaucuu

SEQ ID NO: 1795506 - RNA, 19 nt, Artificial Sequence
  Description of Artificial Sequence: Synthetic oligonucleotide
gccccuucauccguaucaa

SEQ ID NO: 1795507 - RNA, 19 nt, Artificial Sequence
  Description of Artificial Sequence: Synthetic oligonucleotide
ccagagucucugagcucua

SEQ ID NO: 1795508 - RNA, 19 nt, Artificial Sequence
  Description of Artificial Sequence: Synthetic oligonucleotide
ccugccccuucauccguau

SEQ ID NO: 1795509 - RNA, 19 nt, Artificial Sequence
  Description of Artificial Sequence: Synthetic oligonucleotide
  modified_base (8)..(8): a, c, u, g, unknown or other
ggaaaccnuuuggcauguu

SEQ ID NO: 1795510 - RNA, 19 nt, Artificial Sequence
  Description of Artificial Sequence: Synthetic oligonucleotide
uuaaacuccaguuuccggg

SEQ ID NO: 1795511 - RNA, 19 nt, Artificial Sequence
  Description of Artificial Sequence: Synthetic oligonucleotide
acaaucuugccccauaugg

SEQ ID NO: 1795512 - RNA, 19 nt, Artificial Sequence
  Description of Artificial Sequence: Synthetic oligonucleotide
aacgugauagggaucaacc

SEQ ID NO: 1795513 - RNA, 19 nt, Artificial Sequence
  Description of Artificial Sequence: Synthetic oligonucleotide
auugucaggaacgugauag

SEQ ID NO: 1795514 - RNA, 19 nt, Artificial Sequence
  Description of Artificial Sequence: Synthetic oligonucleotide
uauucauggggcuagguca

SEQ ID NO: 1795515 - RNA, 19 nt, Artificial Sequence
  Description of Artificial Sequence: Synthetic oligonucleotide
uuggagauguccaccaugg

SEQ ID NO: 1795516 - RNA, 19 nt, Artificial Sequence
  Description of Artificial Sequence: Synthetic oligonucleotide
uggaaggccacaauaaggc

SEQ ID NO: 1795517 - RNA, 19 nt, Artificial Sequence
  Description of Artificial Sequence: Synthetic oligonucleotide
ugcguguucauguagagcu

SEQ ID NO: 1795518 - RNA, 19 nt, Artificial Sequence
  Description of Artificial Sequence: Synthetic oligonucleotide
uggcggaacguguagaugg

SEQ ID NO: 1795519 - RNA, 19 nt, Artificial Sequence
  Description of Artificial Sequence: Synthetic oligonucleotide
cuuguuaaacuccaguuuc

SEQ ID NO: 1795520 - RNA, 19 nt, Artificial Sequence
  Description of Artificial Sequence: Synthetic oligonucleotide
uugucggucaugaacagcu

SEQ ID NO: 1795521 - RNA, 19 nt, Artificial Sequence
  Description of Artificial Sequence: Synthetic oligonucleotide
uagccgauugucaggaacg

SEQ ID NO: 1795522 - RNA, 19 nt, Artificial Sequence
  Description of Artificial Sequence: Synthetic oligonucleotide
aagcggacuugguugagcg

SEQ ID NO: 1795523 - RNA, 19 nt, Artificial Sequence
  Description of Artificial Sequence: Synthetic oligonucleotide
agggugaucaaacacuuca

SEQ ID NO: 1795524 - RNA, 19 nt, Artificial Sequence
  Description of Artificial Sequence: Synthetic oligonucleotide
ugcccgguggcauugacgg

SEQ ID NO: 1795525 - RNA, 19 nt, Artificial Sequence
  Description of Artificial Sequence: Synthetic oligonucleotide
uguuaaacuccaguuuccg

SEQ ID NO: 1795526 - RNA, 19 nt, Artificial Sequence
  Description of Artificial Sequence: Synthetic oligonucleotide
uguuucuccgccuuguuaa

SEQ ID NO: 1795527 - RNA, 19 nt, Artificial Sequence
  Description of Artificial Sequence: Synthetic oligonucleotide
uuguuaaacuccaguuucc

SEQ ID NO: 1795528 - RNA, 19 nt, Artificial Sequence
  Description of Artificial Sequence: Synthetic oligonucleotide
ucauaugcaucuuggagau

SEQ ID NO: 1795529 - RNA, 19 nt, Artificial Sequence
  Description of Artificial Sequence: Synthetic oligonucleotide
aggcgcuuuauucaugggg

SEQ ID NO: 1795530 - RNA, 19 nt, Artificial Sequence
  Description of Artificial Sequence: Synthetic oligonucleotide
agcaacuugcguugaugcc

SEQ ID NO: 1795531 - RNA, 19 nt, Artificial Sequence
  Description of Artificial Sequence: Synthetic oligonucleotide
guuaaacuccaguuuccgg

SEQ ID NO: 1795532 - RNA, 19 nt, Artificial Sequence
  Description of Artificial Sequence: Synthetic oligonucleotide
agcucgaggcgcuuuauuc

SEQ ID NO: 1795533 - RNA, 19 nt, Artificial Sequence
  Description of Artificial Sequence: Synthetic oligonucleotide
ugcuuguaguacauccagg

SEQ ID NO: 1795534 - RNA, 19 nt, Artificial Sequence
  Description of Artificial Sequence: Synthetic oligonucleotide
ugucaggaacgugauaggg

SEQ ID NO: 1795535 - RNA, 19 nt, Artificial Sequence
  Description of Artificial Sequence: Synthetic oligonucleotide
agggccgugcaacagacuc

SEQ ID NO: 1795536 - RNA, 19 nt, Artificial Sequence
  Description of Artificial Sequence: Synthetic oligonucleotide
uaaacuccaguuuccgggc

SEQ ID NO: 1795537 - RNA, 19 nt, Artificial Sequence
  Description of Artificial Sequence: Synthetic oligonucleotide
uuucagccguaccuggcgg

SEQ ID NO: 1795538 - RNA, 19 nt, Artificial Sequence
  Description of Artificial Sequence: Synthetic oligonucleotide
ugcguugaugccuucgggc

SEQ ID NO: 1795539 - RNA, 19 nt, Artificial Sequence
  Description of Artificial Sequence: Synthetic oligonucleotide
caacagacucccaugacuc

SEQ ID NO: 1795540 - RNA, 19 nt, Artificial Sequence
  Description of Artificial Sequence: Synthetic oligonucleotide
guuucagccguaccuggcg

SEQ ID NO: 1795541 - RNA, 19 nt, Artificial Sequence
  Description of Artificial Sequence: Synthetic oligonucleotide
guggaaggccacaauaagg

SEQ ID NO: 1795542 - RNA, 19 nt, Artificial Sequence
  Description of Artificial Sequence: Synthetic oligonucleotide
guagauggcggccagcaac

SEQ ID NO: 1795543 - RNA, 19 nt, Artificial Sequence
  Description of Artificial Sequence: Synthetic oligonucleotide
cagcaacuugcguugaugc

SEQ ID NO: 1795544 - RNA, 19 nt, Artificial Sequence
  Description of Artificial Sequence: Synthetic oligonucleotide
gacgcguugagcaggacgc

SEQ ID NO: 1795545 - RNA, 19 nt, Artificial Sequence
  Description of Artificial Sequence: Synthetic oligonucleotide
uugucaggaacgugauagg

SEQ ID NO: 1795546 - RNA, 19 nt, Artificial Sequence
  Description of Artificial Sequence: Synthetic oligonucleotide
cuugcguugaugccuucgg

SEQ ID NO: 1795547 - RNA, 19 nt, Artificial Sequence
  Description of Artificial Sequence: Synthetic oligonucleotide
gcuuguaguacauccaggc

SEQ ID NO: 1795548 - RNA, 19 nt, Artificial Sequence
  Description of Artificial Sequence: Synthetic oligonucleotide
ucggucaugaacagcugga

SEQ ID NO: 1795549 - RNA, 19 nt, Artificial Sequence
  Description of Artificial Sequence: Synthetic oligonucleotide
gaaccaguggcggaagcgg

SEQ ID NO: 1795550 - RNA, 19 nt, Artificial Sequence
  Description of Artificial Sequence: Synthetic oligonucleotide
uccgccuuguuaaacucca

SEQ ID NO: 1795551 - RNA, 19 nt, Artificial Sequence
  Description of Artificial Sequence: Synthetic oligonucleotide
guagagacgcagcagcaug

SEQ ID NO: 1795552 - RNA, 19 nt, Artificial Sequence
  Description of Artificial Sequence: Synthetic oligonucleotide
gucggucaugaacagcugg

SEQ ID NO: 1795553 - RNA, 19 nt, Artificial Sequence
  Description of Artificial Sequence: Synthetic oligonucleotide
aggaacgugauagggauca

SEQ ID NO: 1795554 - RNA, 19 nt, Artificial Sequence
  Description of Artificial Sequence: Synthetic oligonucleotide
gacuccggugcacaggcag

SEQ ID NO: 1795555 - RNA, 19 nt, Artificial Sequence
  Description of Artificial Sequence: Synthetic oligonucleotide
cuaggucacaaguggcggg

SEQ ID NO: 1795556 - RNA, 19 nt, Artificial Sequence
  Description of Artificial Sequence: Synthetic oligonucleotide
uguacauguuucuccgccu

SEQ ID NO: 1795557 - RNA, 19 nt, Artificial Sequence
  Description of Artificial Sequence: Synthetic oligonucleotide
uccuggggugcauugcccg

SEQ ID NO: 1795558 - RNA, 19 nt, Artificial Sequence
  Description of Artificial Sequence: Synthetic oligonucleotide
agcuggaccuccuuggagu

SEQ ID NO: 1795559 - RNA, 19 nt, Artificial Sequence
  Description of Artificial Sequence: Synthetic oligonucleotide
auaauggauguccaucaua

SEQ ID NO: 1795560 - RNA, 19 nt, Artificial Sequence
  Description of Artificial Sequence: Synthetic oligonucleotide
ucaaccacagugugucugu

SEQ ID NO: 1795561 - RNA, 19 nt, Artificial Sequence
  Description of Artificial Sequence: Synthetic oligonucleotide
uucuccgccuuguuaaacu

SEQ ID NO: 1795562 - RNA, 19 nt, Artificial Sequence
  Description of Artificial Sequence: Synthetic oligonucleotide
acagacucccaugacuccg

SEQ ID NO: 1795563 - RNA, 19 nt, Artificial Sequence
  Description of Artificial Sequence: Synthetic oligonucleotide
uggggcuaggucacaagug

SEQ ID NO: 1795564 - RNA, 19 nt, Artificial Sequence
  Description of Artificial Sequence: Synthetic oligonucleotide
uuuccgggccaccacggcc

SEQ ID NO: 1795565 - RNA, 19 nt, Artificial Sequence
  Description of Artificial Sequence: Synthetic oligonucleotide
cauugcccgauucuucugc

SEQ ID NO: 1795566 - RNA, 19 nt, Artificial Sequence
  Description of Artificial Sequence: Synthetic oligonucleotide
ucugguagcgguugcugcu

SEQ ID NO: 1795567 - RNA, 19 nt, Artificial Sequence
  Description of Artificial Sequence: Synthetic oligonucleotide
uucugguagcgguugcugc

SEQ ID NO: 1795568 - RNA, 19 nt, Artificial Sequence
  Description of Artificial Sequence: Synthetic oligonucleotide
ugcgguaggacgcguugag

SEQ ID NO: 1795569 - RNA, 19 nt, Artificial Sequence
  Description of Artificial Sequence: Synthetic oligonucleotide
aucuugccccauauggugc

SEQ ID NO: 1795570 - RNA, 19 nt, Artificial Sequence
  Description of Artificial Sequence: Synthetic oligonucleotide
uagcgguugcugcugcagg

SEQ ID NO: 1795571 - RNA, 19 nt, Artificial Sequence
  Description of Artificial Sequence: Synthetic oligonucleotide
ucuugccccauauggugcc

SEQ ID NO: 1795572 - RNA, 19 nt, Artificial Sequence
  Description of Artificial Sequence: Synthetic oligonucleotide
uugagcgcuccgaugcugc

SEQ ID NO: 1795573 - RNA, 19 nt, Artificial Sequence
  Description of Artificial Sequence: Synthetic oligonucleotide
uacauguuucuccgccuug

SEQ ID NO: 1795574 - RNA, 19 nt, Artificial Sequence
  Description of Artificial Sequence: Synthetic oligonucleotide
auucauggggcuaggucac

SEQ ID NO: 1795575 - RNA, 19 nt, Artificial Sequence
  Description of Artificial Sequence: Synthetic oligonucleotide
guagccgauugucaggaac

SEQ ID NO: 1795576 - RNA, 19 nt, Artificial Sequence
  Description of Artificial Sequence: Synthetic oligonucleotide
agggaucaaccacagugug

SEQ ID NO: 1795577 - RNA, 19 nt, Artificial Sequence
  Description of Artificial Sequence: Synthetic oligonucleotide
uggacagggugaucaaaca

SEQ ID NO: 1795578 - RNA, 19 nt, Artificial Sequence
  Description of Artificial Sequence: Synthetic oligonucleotide
agccguaccuggcggaacg

SEQ ID NO: 1795579 - RNA, 19 nt, Artificial Sequence
  Description of Artificial Sequence: Synthetic oligonucleotide
acgugauagggaucaacca

SEQ ID NO: 1795580 - RNA, 19 nt, Artificial Sequence
  Description of Artificial Sequence: Synthetic oligonucleotide
aacuccaguuuccgggcca

SEQ ID NO: 1795581 - RNA, 19 nt, Artificial Sequence
  Description of Artificial Sequence: Synthetic oligonucleotide
ugcccgauucuucugcagu

SEQ ID NO: 1795582 - RNA, 19 nt, Artificial Sequence
  Description of Artificial Sequence: Synthetic oligonucleotide
gaugcugcgguaggacgcg

SEQ ID NO: 1795583 - RNA, 19 nt, Artificial Sequence
  Description of Artificial Sequence: Synthetic oligonucleotide
agcucgagaguccuuccug

SEQ ID NO: 1795584 - RNA, 19 nt, Artificial Sequence
  Description of Artificial Sequence: Synthetic oligonucleotide
ugcaacagacucccaugac

SEQ ID NO: 1795585 - RNA, 19 nt, Artificial Sequence
  Description of Artificial Sequence: Synthetic oligonucleotide
agcggacuugguugagcgc

SEQ ID NO: 1795586 - RNA, 19 nt, Artificial Sequence
  Description of Artificial Sequence: Synthetic oligonucleotide
guaggacgcguugagcagg

SEQ ID NO: 1795587 - RNA, 19 nt, Artificial Sequence
  Description of Artificial Sequence: Synthetic oligonucleotide
uaccacguccccguagccg

SEQ ID NO: 1795588 - RNA, 19 nt, Artificial Sequence
  Description of Artificial Sequence: Synthetic oligonucleotide
uugguugagcgcuccgaug

SEQ ID NO: 1795589 - RNA, 19 nt, Artificial Sequence
  Description of Artificial Sequence: Synthetic oligonucleotide
gugauagggaucaaccaca

SEQ ID NO: 1795590 - RNA, 19 nt, Artificial Sequence
  Description of Artificial Sequence: Synthetic oligonucleotide
uuuauucauggggcuaggu

SEQ ID NO: 1795591 - RNA, 19 nt, Artificial Sequence
  Description of Artificial Sequence: Synthetic oligonucleotide
guagagcuuggccacgaac

SEQ ID NO: 1795592 - RNA, 19 nt, Artificial Sequence
  Description of Artificial Sequence: Synthetic oligonucleotide
ggcgcuuuauucauggggc

SEQ ID NO: 1795593 - RNA, 19 nt, Artificial Sequence
  Description of Artificial Sequence: Synthetic oligonucleotide
accacguccccguagccga

SEQ ID NO: 1795594 - RNA, 19 nt, Artificial Sequence
  Description of Artificial Sequence: Synthetic oligonucleotide
ggacgcguugagcaggacg

SEQ ID NO: 1795595 - RNA, 19 nt, Artificial Sequence
  Description of Artificial Sequence: Synthetic oligonucleotide
gacgccgcugcgcagcagc

SEQ ID NO: 1795596 - RNA, 19 nt, Artificial Sequence
  Description of Artificial Sequence: Synthetic oligonucleotide
cuccgccuuguuaaacucc

SEQ ID NO: 1795597 - RNA, 19 nt, Artificial Sequence
  Description of Artificial Sequence: Synthetic oligonucleotide
gucacaaguggcggggagg

SEQ ID NO: 1795598 - RNA, 19 nt, Artificial Sequence
  Description of Artificial Sequence: Synthetic oligonucleotide
ucggucagggcguccagcu

SEQ ID NO: 1795599 - RNA, 19 nt, Artificial Sequence
  Description of Artificial Sequence: Synthetic oligonucleotide
gacuugguugagcgcuccg

SEQ ID NO: 1795600 - RNA, 19 nt, Artificial Sequence
  Description of Artificial Sequence: Synthetic oligonucleotide
cuuggccacgaaccagugg

SEQ ID NO: 1795601 - RNA, 19 nt, Artificial Sequence
  Description of Artificial Sequence: Synthetic oligonucleotide
gguaccacguccccguagc

SEQ ID NO: 1795602 - RNA, 19 nt, Artificial Sequence
  Description of Artificial Sequence: Synthetic oligonucleotide
uaccuggcggaacguguag

SEQ ID NO: 1795603 - RNA, 19 nt, Artificial Sequence
  Description of Artificial Sequence: Synthetic oligonucleotide
gaggcgcuuuauucauggg

SEQ ID NO: 1795604 - RNA, 19 nt, Artificial Sequence
  Description of Artificial Sequence: Synthetic oligonucleotide
ugucggucaugaacagcug

SEQ ID NO: 1795605 - RNA, 19 nt, Artificial Sequence
  Description of Artificial Sequence: Synthetic oligonucleotide
cuuuauucauggggcuagg

SEQ ID NO: 1795606 - RNA, 19 nt, Artificial Sequence
  Description of Artificial Sequence: Synthetic oligonucleotide
ucuccgccuuguuaaacuc

SEQ ID NO: 1795607 - RNA, 19 nt, Artificial Sequence
  Description of Artificial Sequence: Synthetic oligonucleotide
caugacuccggugcacagg

SEQ ID NO: 1795608 - RNA, 19 nt, Artificial Sequence
  Description of Artificial Sequence: Synthetic oligonucleotide
ugagcgcuccgaugcugcg

SEQ ID NO: 1795609 - RNA, 19 nt, Artificial Sequence
  Description of Artificial Sequence: Synthetic oligonucleotide
uccccguagccgauuguca

SEQ ID NO: 1795610 - RNA, 19 nt, Artificial Sequence
  Description of Artificial Sequence: Synthetic oligonucleotide
auugcccgauucuucugca

SEQ ID NO: 1795611 - RNA, 19 nt, Artificial Sequence
  Description of Artificial Sequence: Synthetic oligonucleotide
gaagcggacuugguugagc

SEQ ID NO: 1795612 - RNA, 19 nt, Artificial Sequence
  Description of Artificial Sequence: Synthetic oligonucleotide
ggacagggugaucaaacac

SEQ ID NO: 1795613 - RNA, 19 nt, Artificial Sequence
  Description of Artificial Sequence: Synthetic oligonucleotide
uaggacgcguugagcagga

SEQ ID NO: 1795614 - RNA, 19 nt, Artificial Sequence
  Description of Artificial Sequence: Synthetic oligonucleotide
aacuugcguugaugccuuc

SEQ ID NO: 1795615 - RNA, 19 nt, Artificial Sequence
  Description of Artificial Sequence: Synthetic oligonucleotide
uaugcaucuuggagauguc

SEQ ID NO: 1795616 - RNA, 19 nt, Artificial Sequence
  Description of Artificial Sequence: Synthetic oligonucleotide
uugcccgauucuucugcag

SEQ ID NO: 1795617 - RNA, 19 nt, Artificial Sequence
  Description of Artificial Sequence: Synthetic oligonucleotide
ggugcguguucauguagag

SEQ ID NO: 1795618 - RNA, 19 nt, Artificial Sequence
  Description of Artificial Sequence: Synthetic oligonucleotide
uggagauguccaccaugga

SEQ ID NO: 1795619 - RNA, 19 nt, Artificial Sequence
  Description of Artificial Sequence: Synthetic oligonucleotide
aguuuccgggccaccacgg

SEQ ID NO: 1795620 - RNA, 19 nt, Artificial Sequence
  Description of Artificial Sequence: Synthetic oligonucleotide
ucgaggcgcuuuauucaug

SEQ ID NO: 1795621 - RNA, 19 nt, Artificial Sequence
  Description of Artificial Sequence: Synthetic oligonucleotide
uuucuccgccuuguuaaac

SEQ ID NO: 1795622 - RNA, 19 nt, Artificial Sequence
  Description of Artificial Sequence: Synthetic oligonucleotide
ccgauugucaggaacguga

SEQ ID NO: 1795623 - RNA, 19 nt, Artificial Sequence
  Description of Artificial Sequence: Synthetic oligonucleotide
gaguucacuuguucccgga

SEQ ID NO: 1795624 - RNA, 19 nt, Artificial Sequence
  Description of Artificial Sequence: Synthetic oligonucleotide
guugucggucaugaacagc

SEQ ID NO: 1795625 - RNA, 19 nt, Artificial Sequence
  Description of Artificial Sequence: Synthetic oligonucleotide
agccgacuccuucaucucu

SEQ ID NO: 1795626 - RNA, 19 nt, Artificial Sequence
  Description of Artificial Sequence: Synthetic oligonucleotide
auauggugccggguaccac

SEQ ID NO: 1795627 - RNA, 19 nt, Artificial Sequence
  Description of Artificial Sequence: Synthetic oligonucleotide
gagccgugcagccgacucc

SEQ ID NO: 1795628 - RNA, 19 nt, Artificial Sequence
  Description of Artificial Sequence: Synthetic oligonucleotide
accgggugcaccccgcaca

SEQ ID NO: 1795629 - RNA, 19 nt, Artificial Sequence
  Description of Artificial Sequence: Synthetic oligonucleotide
uguagagcuuggccacgaa

SEQ ID NO: 1795630 - RNA, 19 nt, Artificial Sequence
  Description of Artificial Sequence: Synthetic oligonucleotide
aagcagggccgugcaacag

SEQ ID NO: 1795631 - RNA, 19 nt, Artificial Sequence
  Description of Artificial Sequence: Synthetic oligonucleotide
cagcuacguggcuuccugg

SEQ ID NO: 1795632 - RNA, 19 nt, Artificial Sequence
  Description of Artificial Sequence: Synthetic oligonucleotide
uugccccauauggugccgg

SEQ ID NO: 1795633 - RNA, 19 nt, Artificial Sequence
  Description of Artificial Sequence: Synthetic oligonucleotide
gacucccaugacuccggug

SEQ ID NO: 1795634 - RNA, 19 nt, Artificial Sequence
  Description of Artificial Sequence: Synthetic oligonucleotide
uucgggcagcucgagaguc

SEQ ID NO: 1795635 - RNA, 19 nt, Artificial Sequence
  Description of Artificial Sequence: Synthetic oligonucleotide
acaaguggcggggaggauu

SEQ ID NO: 1795636 - RNA, 19 nt, Artificial Sequence
  Description of Artificial Sequence: Synthetic oligonucleotide
agcuuggccacgaaccagu

SEQ ID NO: 1795637 - RNA, 19 nt, Artificial Sequence
  Description of Artificial Sequence: Synthetic oligonucleotide
aaccaguggcggaagcgga

SEQ ID NO: 1795638 - RNA, 19 nt, Artificial Sequence
  Description of Artificial Sequence: Synthetic oligonucleotide
gcucgagaguccuuccugc

SEQ ID NO: 1795639 - RNA, 19 nt, Artificial Sequence
  Description of Artificial Sequence: Synthetic oligonucleotide
cacggcgcggggcacgagg

SEQ ID NO: 1795640 - RNA, 19 nt, Artificial Sequence
  Description of Artificial Sequence: Synthetic oligonucleotide
cuuguaguacauccaggcu

SEQ ID NO: 1795641 - RNA, 19 nt, Artificial Sequence
  Description of Artificial Sequence: Synthetic oligonucleotide
gugcguguucauguagagc

SEQ ID NO: 1795642 - RNA, 19 nt, Artificial Sequence
  Description of Artificial Sequence: Synthetic oligonucleotide
gauugucaggaacgugaua

SEQ ID NO: 1795643 - RNA, 19 nt, Artificial Sequence
  Description of Artificial Sequence: Synthetic oligonucleotide
guugagcgcuccgaugcug

SEQ ID NO: 1795644 - RNA, 19 nt, Artificial Sequence
  Description of Artificial Sequence: Synthetic oligonucleotide
cagcccgucgauucucuuc

SEQ ID NO: 1795645 - RNA, 19 nt, Artificial Sequence
  Description of Artificial Sequence: Synthetic oligonucleotide
ggaaggccacaauaaggca

SEQ ID NO: 1795646 - RNA, 19 nt, Artificial Sequence
  Description of Artificial Sequence: Synthetic oligonucleotide
cggaacguguagauggcgg

SEQ ID NO: 1795647 - RNA, 19 nt, Artificial Sequence
  Description of Artificial Sequence: Synthetic oligonucleotide
guuuccgggccaccacggc

SEQ ID NO: 1795648 - RNA, 19 nt, Artificial Sequence
  Description of Artificial Sequence: Synthetic oligonucleotide
ccacaauaaggcagagcag

SEQ ID NO: 1795649 - RNA, 19 nt, Artificial Sequence
  Description of Artificial Sequence: Synthetic oligonucleotide
agugcgggcuccgcagggg

SEQ ID NO: 1795650 - RNA, 19 nt, Artificial Sequence
  Description of Artificial Sequence: Synthetic oligonucleotide
ggucacaaguggcggggag

SEQ ID NO: 1795651 - RNA, 19 nt, Artificial Sequence
  Description of Artificial Sequence: Synthetic oligonucleotide
ccgauucuucugcaguggg

SEQ ID NO: 1795652 - RNA, 19 nt, Artificial Sequence
  Description of Artificial Sequence: Synthetic oligonucleotide
ccugcgagugugcuuguag

SEQ ID NO: 1795653 - RNA, 19 nt, Artificial Sequence
  Description of Artificial Sequence: Synthetic oligonucleotide
cugccgccgggucagcgcc

SEQ ID NO: 1795654 - RNA, 19 nt, Artificial Sequence
  Description of Artificial Sequence: Synthetic oligonucleotide
cagggugaucaaacacuuc

SEQ ID NO: 1795655 - RNA, 19 nt, Artificial Sequence
  Description of Artificial Sequence: Synthetic oligonucleotide
acguccccguagccgauug

SEQ ID NO: 1795656 - RNA, 19 nt, Artificial Sequence
  Description of Artificial Sequence: Synthetic oligonucleotide
cuuucccgccagcccgucg

SEQ ID NO: 1795657 - RNA, 19 nt, Artificial Sequence
  Description of Artificial Sequence: Synthetic oligonucleotide
gcguugaugccuucgggca

SEQ ID NO: 1795658 - RNA, 19 nt, Artificial Sequence
  Description of Artificial Sequence: Synthetic oligonucleotide
gggccucgcagcucgaggc

SEQ ID NO: 1795659 - RNA, 19 nt, Artificial Sequence
  Description of Artificial Sequence: Synthetic oligonucleotide
caggaacgugauagggauc

SEQ ID NO: 1795660 - RNA, 19 nt, Artificial Sequence
  Description of Artificial Sequence: Synthetic oligonucleotide
cccucgcccaggaagcucg

SEQ ID NO: 1795661 - RNA, 19 nt, Artificial Sequence
  Description of Artificial Sequence: Synthetic oligonucleotide
ccaccauggaguucacuug

SEQ ID NO: 1795662 - RNA, 19 nt, Artificial Sequence
  Description of Artificial Sequence: Synthetic oligonucleotide
uggcauugacggccugccu

SEQ ID NO: 1795663 - RNA, 19 nt, Artificial Sequence
  Description of Artificial Sequence: Synthetic oligonucleotide
gugcccgguggcauugacg

SEQ ID NO: 1795664 - RNA, 19 nt, Artificial Sequence
  Description of Artificial Sequence: Synthetic oligonucleotide
guaccacguccccguagcc

SEQ ID NO: 1795665 - RNA, 19 nt, Artificial Sequence
  Description of Artificial Sequence: Synthetic oligonucleotide
cagugcgggcuccgcaggg

SEQ ID NO: 1795666 - RNA, 19 nt, Artificial Sequence
  Description of Artificial Sequence: Synthetic oligonucleotide
ugcgcuucggcggccuccc

SEQ ID NO: 1795667 - RNA, 19 nt, Artificial Sequence
  Description of Artificial Sequence: Synthetic oligonucleotide
ggccgugcaacagacuccc

SEQ ID NO: 1795668 - RNA, 19 nt, Artificial Sequence
  Description of Artificial Sequence: Synthetic oligonucleotide
cuugccccauauggugccg

SEQ ID NO: 1795669 - RNA, 19 nt, Artificial Sequence
  Description of Artificial Sequence: Synthetic oligonucleotide
gcuccgaugcugcgguagg

SEQ ID NO: 1795670 - RNA, 19 nt, Artificial Sequence
  Description of Artificial Sequence: Synthetic oligonucleotide
cauauggugccggguacca

SEQ ID NO: 1795671 - RNA, 19 nt, Artificial Sequence
  Description of Artificial Sequence: Synthetic oligonucleotide
gcagccgacuccuucaucu

SEQ ID NO: 1795672 - RNA, 19 nt, Artificial Sequence
  Description of Artificial Sequence: Synthetic oligonucleotide
ugccggguaccacgucccc

SEQ ID NO: 1795673 - RNA, 19 nt, Artificial Sequence
  Description of Artificial Sequence: Synthetic oligonucleotide
ucagccguaccuggcggaa

SEQ ID NO: 1795674 - RNA, 19 nt, Artificial Sequence
  Description of Artificial Sequence: Synthetic oligonucleotide
ggggaggauuccuugagcu

SEQ ID NO: 1795675 - RNA, 19 nt, Artificial Sequence
  Description of Artificial Sequence: Synthetic oligonucleotide
agccgauugucaggaacgu

SEQ ID NO: 1795676 - RNA, 19 nt, Artificial Sequence
  Description of Artificial Sequence: Synthetic oligonucleotide
gauagggaucaaccacagu

SEQ ID NO: 1795677 - RNA, 19 nt, Artificial Sequence
  Description of Artificial Sequence: Synthetic oligonucleotide
ugacuccggugcacaggca

SEQ ID NO: 1795678 - RNA, 19 nt, Artificial Sequence
  Description of Artificial Sequence: Synthetic oligonucleotide
guuucuccgccuuguuaaa

SEQ ID NO: 1795679 - RNA, 19 nt, Artificial Sequence
  Description of Artificial Sequence: Synthetic oligonucleotide
cuggcggaacguguagaug

SEQ ID NO: 1795680 - RNA, 19 nt, Artificial Sequence
  Description of Artificial Sequence: Synthetic oligonucleotide
augcuguggugagccagag

SEQ ID NO: 1795681 - RNA, 19 nt, Artificial Sequence
  Description of Artificial Sequence: Synthetic oligonucleotide
gcugcgguaggacgcguug

SEQ ID NO: 1795682 - RNA, 19 nt, Artificial Sequence
  Description of Artificial Sequence: Synthetic oligonucleotide
cccgguggcauugacggcc

SEQ ID NO: 1795683 - RNA, 19 nt, Artificial Sequence
  Description of Artificial Sequence: Synthetic oligonucleotide
cuccggugcacaggcagac

SEQ ID NO: 1795684 - RNA, 19 nt, Artificial Sequence
  Description of Artificial Sequence: Synthetic oligonucleotide
gagcaggacgccgcugcgc

SEQ ID NO: 1795685 - RNA, 19 nt, Artificial Sequence
  Description of Artificial Sequence: Synthetic oligonucleotide
agcucggucagggcgucca

SEQ ID NO: 1795686 - RNA, 19 nt, Artificial Sequence
  Description of Artificial Sequence: Synthetic oligonucleotide
guccccguagccgauuguc

SEQ ID NO: 1795687 - RNA, 19 nt, Artificial Sequence
  Description of Artificial Sequence: Synthetic oligonucleotide
gcaacuugcguugaugccu

SEQ ID NO: 1795688 - RNA, 19 nt, Artificial Sequence
  Description of Artificial Sequence: Synthetic oligonucleotide
uucauggggcuaggucaca

SEQ ID NO: 1795689 - RNA, 19 nt, Artificial Sequence
  Description of Artificial Sequence: Synthetic oligonucleotide
ggccacgaaccaguggcgg

SEQ ID NO: 1795690 - RNA, 19 nt, Artificial Sequence
  Description of Artificial Sequence: Synthetic oligonucleotide
guaguacauccaggcuucc

SEQ ID NO: 1795691 - RNA, 19 nt, Artificial Sequence
  Description of Artificial Sequence: Synthetic oligonucleotide
ggagccgugcagccgacuc

SEQ ID NO: 1795692 - RNA, 19 nt, Artificial Sequence
  Description of Artificial Sequence: Synthetic oligonucleotide
gugcauugcccgauucuuc

SEQ ID NO: 1795693 - RNA, 19 nt, Artificial Sequence
  Description of Artificial Sequence: Synthetic oligonucleotide
cauaugcaucuuggagaug

SEQ ID NO: 1795694 - RNA, 19 nt, Artificial Sequence
  Description of Artificial Sequence: Synthetic oligonucleotide
cacgaaccaguggcggaag

SEQ ID NO: 1795695 - RNA, 19 nt, Artificial Sequence
  Description of Artificial Sequence: Synthetic oligonucleotide
ccagcuacguggcuuccug

SEQ ID NO: 1795696 - RNA, 19 nt, Artificial Sequence
  Description of Artificial Sequence: Synthetic oligonucleotide
cagccgacuccuucaucuc

SEQ ID NO: 1795697 - RNA, 19 nt, Artificial Sequence
  Description of Artificial Sequence: Synthetic oligonucleotide
caacaggaucugcgccacc

SEQ ID NO: 1795698 - RNA, 19 nt, Artificial Sequence
  Description of Artificial Sequence: Synthetic oligonucleotide
ugcugcgguaggacgcguu

SEQ ID NO: 1795699 - RNA, 19 nt, Artificial Sequence
  Description of Artificial Sequence: Synthetic oligonucleotide
guccuggggugcauugccc

SEQ ID NO: 1795700 - RNA, 19 nt, Artificial Sequence
  Description of Artificial Sequence: Synthetic oligonucleotide
gcagugcgggcuccgcagg

SEQ ID NO: 1795701 - RNA, 19 nt, Artificial Sequence
  Description of Artificial Sequence: Synthetic oligonucleotide
cauaauggauguccaucau

SEQ ID NO: 1795702 - RNA, 19 nt, Artificial Sequence
  Description of Artificial Sequence: Synthetic oligonucleotide
guacauguuucuccgccuu

SEQ ID NO: 1795703 - RNA, 19 nt, Artificial Sequence
  Description of Artificial Sequence: Synthetic oligonucleotide
uccggugcacaggcagaca

SEQ ID NO: 1795704 - RNA, 19 nt, Artificial Sequence
  Description of Artificial Sequence: Synthetic oligonucleotide
gcggaacguguagauggcg

SEQ ID NO: 1795705 - RNA, 19 nt, Artificial Sequence
  Description of Artificial Sequence: Synthetic oligonucleotide
ggcgcggggcacgagguag

SEQ ID NO: 1795706 - RNA, 19 nt, Artificial Sequence
  Description of Artificial Sequence: Synthetic oligonucleotide
cccauauggugccggguac

SEQ ID NO: 1795707 - RNA, 19 nt, Artificial Sequence
  Description of Artificial Sequence: Synthetic oligonucleotide
uugaugccuucgggcagcu

SEQ ID NO: 1795708 - RNA, 19 nt, Artificial Sequence
  Description of Artificial Sequence: Synthetic oligonucleotide
ccauauggugccggguacc

SEQ ID NO: 1795709 - RNA, 19 nt, Artificial Sequence
  Description of Artificial Sequence: Synthetic oligonucleotide
ucgggccucgcagcucgag

SEQ ID NO: 1795710 - RNA, 19 nt, Artificial Sequence
  Description of Artificial Sequence: Synthetic oligonucleotide
acuccggugcacaggcaga

SEQ ID NO: 1795711 - RNA, 19 nt, Artificial Sequence
  Description of Artificial Sequence: Synthetic oligonucleotide
cucgaggcgcuuuauucau

SEQ ID NO: 1795712 - RNA, 19 nt, Artificial Sequence
  Description of Artificial Sequence: Synthetic oligonucleotide
cugcgcuucggcggccucc

SEQ ID NO: 1795713 - RNA, 19 nt, Artificial Sequence
  Description of Artificial Sequence: Synthetic oligonucleotide
cccgcccggaugcagugcg

SEQ ID NO: 1795714 - RNA, 19 nt, Artificial Sequence
  Description of Artificial Sequence: Synthetic oligonucleotide
gggugcguguucauguaga

SEQ ID NO: 1795715 - RNA, 19 nt, Artificial Sequence
  Description of Artificial Sequence: Synthetic oligonucleotide
accugccgccgggucagcg

SEQ ID NO: 1795716 - RNA, 19 nt, Artificial Sequence
  Description of Artificial Sequence: Synthetic oligonucleotide
ggcggaacguguagauggc

SEQ ID NO: 1795717 - RNA, 19 nt, Artificial Sequence
  Description of Artificial Sequence: Synthetic oligonucleotide
gagcccguugucggucaug

SEQ ID NO: 1795718 - RNA, 19 nt, Artificial Sequence
  Description of Artificial Sequence: Synthetic oligonucleotide
uuccugcgagugugcuugu

SEQ ID NO: 1795719 - RNA, 19 nt, Artificial Sequence
  Description of Artificial Sequence: Synthetic oligonucleotide
aggucacaaguggcgggga

SEQ ID NO: 1795720 - RNA, 19 nt, Artificial Sequence
  Description of Artificial Sequence: Synthetic oligonucleotide
cccgcacaccagcagcucc

SEQ ID NO: 1795721 - RNA, 19 nt, Artificial Sequence
  Description of Artificial Sequence: Synthetic oligonucleotide
ggacuugguugagcgcucc

SEQ ID NO: 1795722 - RNA, 19 nt, Artificial Sequence
  Description of Artificial Sequence: Synthetic oligonucleotide
gcguugagcaggacgccgc

SEQ ID NO: 1795723 - RNA, 19 nt, Artificial Sequence
  Description of Artificial Sequence: Synthetic oligonucleotide
cguugucggucaugaacag

SEQ ID NO: 1795724 - RNA, 19 nt, Artificial Sequence
  Description of Artificial Sequence: Synthetic oligonucleotide
ccgucgauucucuucucca

SEQ ID NO: 1795725 - RNA, 19 nt, Artificial Sequence
  Description of Artificial Sequence: Synthetic oligonucleotide
aggacgcguugagcaggac

SEQ ID NO: 1795726 - RNA, 19 nt, Artificial Sequence
  Description of Artificial Sequence: Synthetic oligonucleotide
gucagcgccacccgccagu

SEQ ID NO: 1795727 - RNA, 19 nt, Artificial Sequence
  Description of Artificial Sequence: Synthetic oligonucleotide
ggaagcggacuugguugag

SEQ ID NO: 1795728 - RNA, 19 nt, Artificial Sequence
  Description of Artificial Sequence: Synthetic oligonucleotide
gucagggcguccagcuuuc

SEQ ID NO: 1795729 - RNA, 19 nt, Artificial Sequence
  Description of Artificial Sequence: Synthetic oligonucleotide
caacuugcguugaugccuu

SEQ ID NO: 1795730 - RNA, 19 nt, Artificial Sequence
  Description of Artificial Sequence: Synthetic oligonucleotide
caccgggugcaccccgcac

SEQ ID NO: 1795731 - RNA, 19 nt, Artificial Sequence
  Description of Artificial Sequence: Synthetic oligonucleotide
gggccgugcaacagacucc

SEQ ID NO: 1795732 - RNA, 19 nt, Artificial Sequence
  Description of Artificial Sequence: Synthetic oligonucleotide
ccuuguuaaacuccaguuu

SEQ ID NO: 1795733 - RNA, 19 nt, Artificial Sequence
  Description of Artificial Sequence: Synthetic oligonucleotide
ccaccucgggccucgcagc

SEQ ID NO: 1795734 - RNA, 19 nt, Artificial Sequence
  Description of Artificial Sequence: Synthetic oligonucleotide
uucccgccagcccgucgau

SEQ ID NO: 1795735 - RNA, 19 nt, Artificial Sequence
  Description of Artificial Sequence: Synthetic oligonucleotide
gcggacuugguugagcgcu

SEQ ID NO: 1795736 - RNA, 19 nt, Artificial Sequence
  Description of Artificial Sequence: Synthetic oligonucleotide
cucgcccaggaagcucggc

SEQ ID NO: 1795737 - RNA, 19 nt, Artificial Sequence
  Description of Artificial Sequence: Synthetic oligonucleotide
ccugccgccgggucagcgc

SEQ ID NO: 1795738 - RNA, 19 nt, Artificial Sequence
  Description of Artificial Sequence: Synthetic oligonucleotide
gccggguaccacguccccg

SEQ ID NO: 1795739 - RNA, 19 nt, Artificial Sequence
  Description of Artificial Sequence: Synthetic oligonucleotide
agcuuucccgccagcccgu

SEQ ID NO: 1795740 - RNA, 19 nt, Artificial Sequence
  Description of Artificial Sequence: Synthetic oligonucleotide
agccucgcccucgcccagg

SEQ ID NO: 1795741 - RNA, 19 nt, Artificial Sequence
  Description of Artificial Sequence: Synthetic oligonucleotide
ggggcacgagguagagacg

SEQ ID NO: 1795742 - RNA, 19 nt, Artificial Sequence
  Description of Artificial Sequence: Synthetic oligonucleotide
gccgauugucaggaacgug

SEQ ID NO: 1795743 - RNA, 19 nt, Artificial Sequence
  Description of Artificial Sequence: Synthetic oligonucleotide
gacccagcugcaggucaca

SEQ ID NO: 1795744 - RNA, 19 nt, Artificial Sequence
  Description of Artificial Sequence: Synthetic oligonucleotide
cugcgguaggacgcguuga

SEQ ID NO: 1795745 - RNA, 19 nt, Artificial Sequence
  Description of Artificial Sequence: Synthetic oligonucleotide
caggagccgugcagccgac

SEQ ID NO: 1795746 - RNA, 19 nt, Artificial Sequence
  Description of Artificial Sequence: Synthetic oligonucleotide
gggcaccgggugcaccccg

SEQ ID NO: 1795747 - RNA, 19 nt, Artificial Sequence
  Description of Artificial Sequence: Synthetic oligonucleotide
ggugcccgguggcauugac

SEQ ID NO: 1795748 - RNA, 19 nt, Artificial Sequence
  Description of Artificial Sequence: Synthetic oligonucleotide
guccagcuacguggcuucc

SEQ ID NO: 1795749 - RNA, 19 nt, Artificial Sequence
  Description of Artificial Sequence: Synthetic oligonucleotide
cagccguaccuggcggaac

SEQ ID NO: 1795750 - RNA, 19 nt, Artificial Sequence
  Description of Artificial Sequence: Synthetic oligonucleotide
ccgccagucccggagcccg

SEQ ID NO: 1795751 - RNA, 19 nt, Artificial Sequence
  Description of Artificial Sequence: Synthetic oligonucleotide
gcgguaggacgcguugagc

SEQ ID NO: 1795752 - RNA, 19 nt, Artificial Sequence
  Description of Artificial Sequence: Synthetic oligonucleotide
uccugcgagugugcuugua

SEQ ID NO: 1795753 - RNA, 19 nt, Artificial Sequence
  Description of Artificial Sequence: Synthetic oligonucleotide
guggugagccagaggccga

SEQ ID NO: 1795754 - RNA, 19 nt, Artificial Sequence
  Description of Artificial Sequence: Synthetic oligonucleotide
cauugacggccugccucuc

SEQ ID NO: 1795755 - RNA, 19 nt, Artificial Sequence
  Description of Artificial Sequence: Synthetic oligonucleotide
ccgagcgugaggcccagca

SEQ ID NO: 1795756 - RNA, 19 nt, Artificial Sequence
  Description of Artificial Sequence: Synthetic oligonucleotide
cuucgggcagcucgagagu

SEQ ID NO: 1795757 - RNA, 19 nt, Artificial Sequence
  Description of Artificial Sequence: Synthetic oligonucleotide
cacaagcagggccgugcaa

SEQ ID NO: 1795758 - RNA, 19 nt, Artificial Sequence
  Description of Artificial Sequence: Synthetic oligonucleotide
cccggugggaggugcugag

SEQ ID NO: 1795759 - RNA, 19 nt, Artificial Sequence
  Description of Artificial Sequence: Synthetic oligonucleotide
agcacggcgcggggcacga

SEQ ID NO: 1795760 - RNA, 19 nt, Artificial Sequence
  Description of Artificial Sequence: Synthetic oligonucleotide
cuccgaugcugcgguagga

SEQ ID NO: 1795761 - RNA, 19 nt, Artificial Sequence
  Description of Artificial Sequence: Synthetic oligonucleotide
aggccgagcgugaggccca

SEQ ID NO: 1795762 - RNA, 19 nt, Artificial Sequence
  Description of Artificial Sequence: Synthetic oligonucleotide
gcuuggccacgaaccagug

SEQ ID NO: 1795763 - RNA, 19 nt, Artificial Sequence
  Description of Artificial Sequence: Synthetic oligonucleotide
gcguccagcuuucccgcca

SEQ ID NO: 1795764 - RNA, 19 nt, Artificial Sequence
  Description of Artificial Sequence: Synthetic oligonucleotide
cagcgccacccgccagucc

SEQ ID NO: 1795765 - RNA, 19 nt, Artificial Sequence
  Description of Artificial Sequence: Synthetic oligonucleotide
ccgccuuguuaaacuccag

SEQ ID NO: 1795766 - RNA, 19 nt, Artificial Sequence
  Description of Artificial Sequence: Synthetic oligonucleotide
gggucagcgccacccgcca

SEQ ID NO: 1795767 - RNA, 19 nt, Artificial Sequence
  Description of Artificial Sequence: Synthetic oligonucleotide
cgggugcguguucauguag

SEQ ID NO: 1795768 - RNA, 19 nt, Artificial Sequence
  Description of Artificial Sequence: Synthetic oligonucleotide
ggcggaagcggacuugguu

SEQ ID NO: 1795769 - RNA, 19 nt, Artificial Sequence
  Description of Artificial Sequence: Synthetic oligonucleotide
gcgcuuuauucauggggcu

SEQ ID NO: 1795770 - RNA, 19 nt, Artificial Sequence
  Description of Artificial Sequence: Synthetic oligonucleotide
gguagagacgcagcagcau

SEQ ID NO: 1795771 - RNA, 19 nt, Artificial Sequence
  Description of Artificial Sequence: Synthetic oligonucleotide
ccgugcagccgacuccuuc

SEQ ID NO: 1795772 - RNA, 19 nt, Artificial Sequence
  Description of Artificial Sequence: Synthetic oligonucleotide
gguugagcgcuccgaugcu

SEQ ID NO: 1795773 - RNA, 19 nt, Artificial Sequence
  Description of Artificial Sequence: Synthetic oligonucleotide
ucgcagcucgaggcgcuuu

SEQ ID NO: 1795774 - RNA, 19 nt, Artificial Sequence
  Description of Artificial Sequence: Synthetic oligonucleotide
ccccauauggugccgggua

SEQ ID NO: 1795775 - RNA, 19 nt, Artificial Sequence
  Description of Artificial Sequence: Synthetic oligonucleotide
augcugcgguaggacgcgu

SEQ ID NO: 1795776 - RNA, 19 nt, Artificial Sequence
  Description of Artificial Sequence: Synthetic oligonucleotide
cgggccucgcagcucgagg

SEQ ID NO: 1795777 - RNA, 19 nt, Artificial Sequence
  Description of Artificial Sequence: Synthetic oligonucleotide
aggcgccccgggugcgugu

SEQ ID NO: 1795778 - RNA, 19 nt, Artificial Sequence
  Description of Artificial Sequence: Synthetic oligonucleotide
cgcuccgaugcugcgguag

SEQ ID NO: 1795779 - RNA, 19 nt, Artificial Sequence
  Description of Artificial Sequence: Synthetic oligonucleotide
cuccgcaggggcaccgggu

SEQ ID NO: 1795780 - RNA, 19 nt, Artificial Sequence
  Description of Artificial Sequence: Synthetic oligonucleotide
ccucgcccaggaagcucgg

SEQ ID NO: 1795781 - RNA, 19 nt, Artificial Sequence
  Description of Artificial Sequence: Synthetic oligonucleotide
cagucccggagcccguugu

SEQ ID NO: 1795782 - RNA, 19 nt, Artificial Sequence
  Description of Artificial Sequence: Synthetic oligonucleotide
ccuggggugcauugcccga

SEQ ID NO: 1795783 - RNA, 19 nt, Artificial Sequence
  Description of Artificial Sequence: Synthetic oligonucleotide
gcccgguggcauugacggc

SEQ ID NO: 1795784 - RNA, 19 nt, Artificial Sequence
  Description of Artificial Sequence: Synthetic oligonucleotide
ccguaccuggcggaacgug

SEQ ID NO: 1795785 - RNA, 19 nt, Artificial Sequence
  Description of Artificial Sequence: Synthetic oligonucleotide
caggcgccccgggugcgug

SEQ ID NO: 1795786 - RNA, 19 nt, Artificial Sequence
  Description of Artificial Sequence: Synthetic oligonucleotide
cagcucggucagggcgucc

SEQ ID NO: 1795787 - RNA, 19 nt, Artificial Sequence
  Description of Artificial Sequence: Synthetic oligonucleotide
aggugcccgguggcauuga

SEQ ID NO: 1795788 - RNA, 19 nt, Artificial Sequence
  Description of Artificial Sequence: Synthetic oligonucleotide
ccacgaaccaguggcggaa

SEQ ID NO: 1795789 - RNA, 19 nt, Artificial Sequence
  Description of Artificial Sequence: Synthetic oligonucleotide
cgcccggaugcagugcggg

SEQ ID NO: 1795790 - RNA, 19 nt, Artificial Sequence
  Description of Artificial Sequence: Synthetic oligonucleotide
ucccgccagcccgucgauu

SEQ ID NO: 1795791 - RNA, 19 nt, Artificial Sequence
  Description of Artificial Sequence: Synthetic oligonucleotide
cggacuugguugagcgcuc

SEQ ID NO: 1795792 - RNA, 19 nt, Artificial Sequence
  Description of Artificial Sequence: Synthetic oligonucleotide
cguaccuggcggaacgugu

SEQ ID NO: 1795793 - RNA, 19 nt, Artificial Sequence
  Description of Artificial Sequence: Synthetic oligonucleotide
ggaacgugauagggaucaa

SEQ ID NO: 1795794 - RNA, 19 nt, Artificial Sequence
  Description of Artificial Sequence: Synthetic oligonucleotide
ccgcccggaugcagugcgg

SEQ ID NO: 1795795 - RNA, 19 nt, Artificial Sequence
  Description of Artificial Sequence: Synthetic oligonucleotide
ccggguaccacguccccgu

SEQ ID NO: 1795796 - RNA, 19 nt, Artificial Sequence
  Description of Artificial Sequence: Synthetic oligonucleotide
ccgugcaacagacucccau

SEQ ID NO: 1795797 - RNA, 19 nt, Artificial Sequence
  Description of Artificial Sequence: Synthetic oligonucleotide
cgccuuguuaaacuccagu

SEQ ID NO: 1795798 - RNA, 19 nt, Artificial Sequence
  Description of Artificial Sequence: Synthetic oligonucleotide
gcaccgggugcaccccgca

SEQ ID NO: 1795799 - RNA, 19 nt, Artificial Sequence
  Description of Artificial Sequence: Synthetic oligonucleotide
cagcucgaggcgcuuuauu

SEQ ID NO: 1795800 - RNA, 19 nt, Artificial Sequence
  Description of Artificial Sequence: Synthetic oligonucleotide
cgauugucaggaacgugau

SEQ ID NO: 1795801 - RNA, 19 nt, Artificial Sequence
  Description of Artificial Sequence: Synthetic oligonucleotide
ggccagcaacuugcguuga

SEQ ID NO: 1795802 - RNA, 19 nt, Artificial Sequence
  Description of Artificial Sequence: Synthetic oligonucleotide
caguggcggaagcggacuu

SEQ ID NO: 1795803 - RNA, 19 nt, Artificial Sequence
  Description of Artificial Sequence: Synthetic oligonucleotide
cccgccagucccggagccc

SEQ ID NO: 1795804 - RNA, 19 nt, Artificial Sequence
  Description of Artificial Sequence: Synthetic oligonucleotide
ggcggccagcaacuugcgu

SEQ ID NO: 1795805 - RNA, 19 nt, Artificial Sequence
  Description of Artificial Sequence: Synthetic oligonucleotide
gcccucgcccaggaagcuc

SEQ ID NO: 1795806 - RNA, 19 nt, Artificial Sequence
  Description of Artificial Sequence: Synthetic oligonucleotide
ccgggugcguguucaugua

SEQ ID NO: 1795807 - RNA, 19 nt, Artificial Sequence
  Description of Artificial Sequence: Synthetic oligonucleotide
cccggaugcagugcgggcu

SEQ ID NO: 1795808 - RNA, 19 nt, Artificial Sequence
  Description of Artificial Sequence: Synthetic oligonucleotide
gccgacuccuucaucucuu

SEQ ID NO: 1795809 - RNA, 19 nt, Artificial Sequence
  Description of Artificial Sequence: Synthetic oligonucleotide
gcuuucccgccagcccguc

SEQ ID NO: 1795810 - RNA, 19 nt, Artificial Sequence
  Description of Artificial Sequence: Synthetic oligonucleotide
gcggggcacgagguagaga

SEQ ID NO: 1795811 - RNA, 19 nt, Artificial Sequence
  Description of Artificial Sequence: Synthetic oligonucleotide
gcgcggggcacgagguaga

SEQ ID NO: 1795812 - RNA, 19 nt, Artificial Sequence
  Description of Artificial Sequence: Synthetic oligonucleotide
ccccgcccggaugcagugc

SEQ ID NO: 1795813 - RNA, 19 nt, Artificial Sequence
  Description of Artificial Sequence: Synthetic oligonucleotide
ccucgcagcucgaggcgcu

SEQ ID NO: 1795814 - RNA, 19 nt, Artificial Sequence
  Description of Artificial Sequence: Synthetic oligonucleotide
cacaaguggcggggaggau

SEQ ID NO: 1795815 - RNA, 19 nt, Artificial Sequence
  Description of Artificial Sequence: Synthetic oligonucleotide
gcgcuucggcggccucccc

SEQ ID NO: 1795816 - RNA, 19 nt, Artificial Sequence
  Description of Artificial Sequence: Synthetic oligonucleotide
gcguguucauguagagcuu

SEQ ID NO: 1795817 - RNA, 19 nt, Artificial Sequence
  Description of Artificial Sequence: Synthetic oligonucleotide
gccccauauggugccgggu

SEQ ID NO: 1795818 - RNA, 19 nt, Artificial Sequence
  Description of Artificial Sequence: Synthetic oligonucleotide
ccgguggcauugacggccu

SEQ ID NO: 1795819 - RNA, 19 nt, Artificial Sequence
  Description of Artificial Sequence: Synthetic oligonucleotide
ccuuccugcgagugugcuu

SEQ ID NO: 1795820 - RNA, 19 nt, Artificial Sequence
  Description of Artificial Sequence: Synthetic oligonucleotide
cguagccgauugucaggaa

SEQ ID NO: 1795821 - RNA, 19 nt, Artificial Sequence
  Description of Artificial Sequence: Synthetic oligonucleotide
gcagcucgaggcgcuuuau

SEQ ID NO: 1795822 - RNA, 19 nt, Artificial Sequence
  Description of Artificial Sequence: Synthetic oligonucleotide
cgcagcucgaggcgcuuua

SEQ ID NO: 1795823 - RNA, 19 nt, Artificial Sequence
  Description of Artificial Sequence: Synthetic oligonucleotide
gccgugcaacagacuccca

SEQ ID NO: 1795824 - RNA, 19 nt, Artificial Sequence
  Description of Artificial Sequence: Synthetic oligonucleotide
gccgagcgugaggcccagc

SEQ ID NO: 1795825 - RNA, 19 nt, Artificial Sequence
  Description of Artificial Sequence: Synthetic oligonucleotide
gccguaccuggcggaacgu

SEQ ID NO: 1795826 - RNA, 19 nt, Artificial Sequence
  Description of Artificial Sequence: Synthetic oligonucleotide
ccgacuccuucaucucuuu

SEQ ID NO: 1795827 - RNA, 19 nt, Artificial Sequence
  Description of Artificial Sequence: Synthetic oligonucleotide
cgggugcaccccgcacacc

SEQ ID NO: 1795828 - RNA, 19 nt, Artificial Sequence
  Description of Artificial Sequence: Synthetic oligonucleotide
cgccaccugccgccggguc

SEQ ID NO: 1795829 - RNA, 19 nt, Artificial Sequence
  Description of Artificial Sequence: Synthetic oligonucleotide
cucgcagcucgaggcgcuu

SEQ ID NO: 1795830 - RNA, 19 nt, Artificial Sequence
  Description of Artificial Sequence: Synthetic oligonucleotide
gcgccccgggugcguguuc

SEQ ID NO: 1795831 - RNA, 19 nt, Artificial Sequence
  Description of Artificial Sequence: Synthetic oligonucleotide
cgccccgggugcguguuca

SEQ ID NO: 1795832 - RNA, 19 nt, Artificial Sequence
  Description of Artificial Sequence: Synthetic oligonucleotide
gcgcuccgaugcugcggua

SEQ ID NO: 1795833 - RNA, 19 nt, Artificial Sequence
  Description of Artificial Sequence: Synthetic oligonucleotide
gccccgggugcguguucau

SEQ ID NO: 1795834 - RNA, 19 nt, Artificial Sequence
  Description of Artificial Sequence: Synthetic oligonucleotide
ggcgccccgggugcguguu

SEQ ID NO: 1795835 - RNA, 19 nt, Artificial Sequence
  Description of Artificial Sequence: Synthetic oligonucleotide
cguccccguagccgauugu

SEQ ID NO: 1795836 - RNA, 19 nt, Artificial Sequence
  Description of Artificial Sequence: Synthetic oligonucleotide
ccgggccaccacggccaca

SEQ ID NO: 1795837 - RNA, 19 nt, Artificial Sequence
  Description of Artificial Sequence: Synthetic oligonucleotide
gccgugcagccgacuccuu

SEQ ID NO: 1795838 - RNA, 19 nt, Artificial Sequence
  Description of Artificial Sequence: Synthetic oligonucleotide
cgcccucgcccaggaagcu

SEQ ID NO: 1795839 - RNA, 19 nt, Artificial Sequence
  Description of Artificial Sequence: Synthetic oligonucleotide
aaugauagaggauugaagg

SEQ ID NO: 1795840 - RNA, 19 nt, Artificial Sequence
  Description of Artificial Sequence: Synthetic oligonucleotide
aaauucaauauccuguagc

SEQ ID NO: 1795841 - RNA, 19 nt, Artificial Sequence
  Description of Artificial Sequence: Synthetic oligonucleotide
aaacuuauggauuccaggg

SEQ ID NO: 1795842 - RNA, 19 nt, Artificial Sequence
  Description of Artificial Sequence: Synthetic oligonucleotide
aaaaguauaagagagguga

SEQ ID NO: 1795843 - RNA, 19 nt, Artificial Sequence
  Description of Artificial Sequence: Synthetic oligonucleotide
aaccaauguauuuacaagg

SEQ ID NO: 1795844 - RNA, 19 nt, Artificial Sequence
  Description of Artificial Sequence: Synthetic oligonucleotide
aucuuauuugcacaaaggc

SEQ ID NO: 1795845 - RNA, 19 nt, Artificial Sequence
  Description of Artificial Sequence: Synthetic oligonucleotide
aauuacaccaucuucuugu

SEQ ID NO: 1795846 - RNA, 19 nt, Artificial Sequence
  Description of Artificial Sequence: Synthetic oligonucleotide
aaugaaccauaguauaugg

SEQ ID NO: 1795847 - RNA, 19 nt, Artificial Sequence
  Description of Artificial Sequence: Synthetic oligonucleotide
ucuuguaaucaucauauug

SEQ ID NO: 1795848 - RNA, 19 nt, Artificial Sequence
  Description of Artificial Sequence: Synthetic oligonucleotide
auagcaugaucuuauuugc

SEQ ID NO: 1795849 - RNA, 19 nt, Artificial Sequence
  Description of Artificial Sequence: Synthetic oligonucleotide
uauccuguagcgaagauca

SEQ ID NO: 1795850 - RNA, 19 nt, Artificial Sequence
  Description of Artificial Sequence: Synthetic oligonucleotide
caaaagugaagauuuauag

SEQ ID NO: 1795851 - RNA, 19 nt, Artificial Sequence
  Description of Artificial Sequence: Synthetic oligonucleotide
ugaagagcggcuuauaacc

SEQ ID NO: 1795852 - RNA, 19 nt, Artificial Sequence
  Description of Artificial Sequence: Synthetic oligonucleotide
ucaaauacggcucuguccu

SEQ ID NO: 1795853 - RNA, 19 nt, Artificial Sequence
  Description of Artificial Sequence: Synthetic oligonucleotide
ucuuccaucaccacacugg

SEQ ID NO: 1795854 - RNA, 19 nt, Artificial Sequence
  Description of Artificial Sequence: Synthetic oligonucleotide
aaaagugaagauuuauaga

SEQ ID NO: 1795855 - RNA, 19 nt, Artificial Sequence
  Description of Artificial Sequence: Synthetic oligonucleotide
uaaacuuauggauuccagg

SEQ ID NO: 1795856 - RNA, 19 nt, Artificial Sequence
  Description of Artificial Sequence: Synthetic oligonucleotide
uuuuagauaaugugacagg

SEQ ID NO: 1795857 - RNA, 19 nt, Artificial Sequence
  Description of Artificial Sequence: Synthetic oligonucleotide
gauaaugugacagggaggc

SEQ ID NO: 1795858 - RNA, 19 nt, Artificial Sequence
  Description of Artificial Sequence: Synthetic oligonucleotide
cuuugaauacucuuguagc

SEQ ID NO: 1795859 - RNA, 19 nt, Artificial Sequence
  Description of Artificial Sequence: Synthetic oligonucleotide
uaaucaucauauugaaagg

SEQ ID NO: 1795860 - RNA, 19 nt, Artificial Sequence
  Description of Artificial Sequence: Synthetic oligonucleotide
cuaagauagauccuguaag

SEQ ID NO: 1795861 - RNA, 19 nt, Artificial Sequence
  Description of Artificial Sequence: Synthetic oligonucleotide
uagaaaaguauaagagagg

SEQ ID NO: 1795862 - RNA, 19 nt, Artificial Sequence
  Description of Artificial Sequence: Synthetic oligonucleotide
agaccaaccaccacgaugc

SEQ ID NO: 1795863 - RNA, 19 nt, Artificial Sequence
  Description of Artificial Sequence: Synthetic oligonucleotide
ugaucuuauuugcacaaag

SEQ ID NO: 1795864 - RNA, 19 nt, Artificial Sequence
  Description of Artificial Sequence: Synthetic oligonucleotide
auugguaaggggaacaugg

SEQ ID NO: 1795865 - RNA, 19 nt, Artificial Sequence
  Description of Artificial Sequence: Synthetic oligonucleotide
uguccuuuaaacuuaugga

SEQ ID NO: 1795866 - RNA, 19 nt, Artificial Sequence
  Description of Artificial Sequence: Synthetic oligonucleotide
agcaugaucuuauuugcac

SEQ ID NO: 1795867 - RNA, 19 nt, Artificial Sequence
  Description of Artificial Sequence: Synthetic oligonucleotide
aacaauucgaguuuucauu

SEQ ID NO: 1795868 - RNA, 19 nt, Artificial Sequence
  Description of Artificial Sequence: Synthetic oligonucleotide
uaaaugaggguucaggaau

SEQ ID NO: 1795869 - RNA, 19 nt, Artificial Sequence
  Description of Artificial Sequence: Synthetic oligonucleotide
agaugcuucuuccaucacc

SEQ ID NO: 1795870 - RNA, 19 nt, Artificial Sequence
  Description of Artificial Sequence: Synthetic oligonucleotide
uuaaacuuauggauuccag

SEQ ID NO: 1795871 - RNA, 19 nt, Artificial Sequence
  Description of Artificial Sequence: Synthetic oligonucleotide
uaugguuagggaaaacucu

SEQ ID NO: 1795872 - RNA, 19 nt, Artificial Sequence
  Description of Artificial Sequence: Synthetic oligonucleotide
ugagccuaugcacugagca

SEQ ID NO: 1795873 - RNA, 19 nt, Artificial Sequence
  Description of Artificial Sequence: Synthetic oligonucleotide
agaaaaguauaagagaggu

SEQ ID NO: 1795874 - RNA, 19 nt, Artificial Sequence
  Description of Artificial Sequence: Synthetic oligonucleotide
accccuuuuaaugagcucc

SEQ ID NO: 1795875 - RNA, 19 nt, Artificial Sequence
  Description of Artificial Sequence: Synthetic oligonucleotide
acaauucgaguuuucauug

SEQ ID NO: 1795876 - RNA, 19 nt, Artificial Sequence
  Description of Artificial Sequence: Synthetic oligonucleotide
aagaccaaccaccacgaug

SEQ ID NO: 1795877 - RNA, 19 nt, Artificial Sequence
  Description of Artificial Sequence: Synthetic oligonucleotide
accaguuuaagcaaaagug

SEQ ID NO: 1795878 - RNA, 19 nt, Artificial Sequence
  Description of Artificial Sequence: Synthetic oligonucleotide
aaaugauagaggauugaag

SEQ ID NO: 1795879 - RNA, 19 nt, Artificial Sequence
  Description of Artificial Sequence: Synthetic oligonucleotide
agcgaagaucaccacaucg

SEQ ID NO: 1795880 - RNA, 19 nt, Artificial Sequence
  Description of Artificial Sequence: Synthetic oligonucleotide
augaaauugaguuugucuu

SEQ ID NO: 1795881 - RNA, 19 nt, Artificial Sequence
  Description of Artificial Sequence: Synthetic oligonucleotide
ugaaccauaguauaugguu

SEQ ID NO: 1795882 - RNA, 19 nt, Artificial Sequence
  Description of Artificial Sequence: Synthetic oligonucleotide
agugaagauuuauagaaaa

SEQ ID NO: 1795883 - RNA, 19 nt, Artificial Sequence
  Description of Artificial Sequence: Synthetic oligonucleotide
caucauauugaaaggguag

SEQ ID NO: 1795884 - RNA, 19 nt, Artificial Sequence
  Description of Artificial Sequence: Synthetic oligonucleotide
auaguauaugguuagggaa

SEQ ID NO: 1795885 - RNA, 19 nt, Artificial Sequence
  Description of Artificial Sequence: Synthetic oligonucleotide
aauucgaguuuucauuggu

SEQ ID NO: 1795886 - RNA, 19 nt, Artificial Sequence
  Description of Artificial Sequence: Synthetic oligonucleotide
uauaugguuagggaaaacu

SEQ ID NO: 1795887 - RNA, 19 nt, Artificial Sequence
  Description of Artificial Sequence: Synthetic oligonucleotide
aguacaaaccaugacagca

SEQ ID NO: 1795888 - RNA, 19 nt, Artificial Sequence
  Description of Artificial Sequence: Synthetic oligonucleotide
gauugaaggacagaacuug

SEQ ID NO: 1795889 - RNA, 19 nt, Artificial Sequence
  Description of Artificial Sequence: Synthetic oligonucleotide
ugaaauugaguuugucuug

SEQ ID NO: 1795890 - RNA, 19 nt, Artificial Sequence
  Description of Artificial Sequence: Synthetic oligonucleotide
uauugucccaucuucaaaa

SEQ ID NO: 1795891 - RNA, 19 nt, Artificial Sequence
  Description of Artificial Sequence: Synthetic oligonucleotide
guagccaccaccugaagag

SEQ ID NO: 1795892 - RNA, 19 nt, Artificial Sequence
  Description of Artificial Sequence: Synthetic oligonucleotide
aacucauggguucugggga

SEQ ID NO: 1795893 - RNA, 19 nt, Artificial Sequence
  Description of Artificial Sequence: Synthetic oligonucleotide
ucuaugacaacaucccacu

SEQ ID NO: 1795894 - RNA, 19 nt, Artificial Sequence
  Description of Artificial Sequence: Synthetic oligonucleotide
uggguuuugagccuaugca

SEQ ID NO: 1795895 - RNA, 19 nt, Artificial Sequence
  Description of Artificial Sequence: Synthetic oligonucleotide
uaggcgauaauugguaagg

SEQ ID NO: 1795896 - RNA, 19 nt, Artificial Sequence
  Description of Artificial Sequence: Synthetic oligonucleotide
uaguauaugguuagggaaa

SEQ ID NO: 1795897 - RNA, 19 nt, Artificial Sequence
  Description of Artificial Sequence: Synthetic oligonucleotide
uaaugugacagggaggcag

SEQ ID NO: 1795898 - RNA, 19 nt, Artificial Sequence
  Description of Artificial Sequence: Synthetic oligonucleotide
aaauuacaccaucuucuug

SEQ ID NO: 1795899 - RNA, 19 nt, Artificial Sequence
  Description of Artificial Sequence: Synthetic oligonucleotide
ggagguauaguacagaguc

SEQ ID NO: 1795900 - RNA, 19 nt, Artificial Sequence
  Description of Artificial Sequence: Synthetic oligonucleotide
uuucuuuaaucacaccccu

SEQ ID NO: 1795901 - RNA, 19 nt, Artificial Sequence
  Description of Artificial Sequence: Synthetic oligonucleotide
uguagcgaagaucaccaca

SEQ ID NO: 1795902 - RNA, 19 nt, Artificial Sequence
  Description of Artificial Sequence: Synthetic oligonucleotide
aaaaugauagaggauugaa

SEQ ID NO: 1795903 - RNA, 19 nt, Artificial Sequence
  Description of Artificial Sequence: Synthetic oligonucleotide
uauugaaaggguagccacc

SEQ ID NO: 1795904 - RNA, 19 nt, Artificial Sequence
  Description of Artificial Sequence: Synthetic oligonucleotide
agauagauccuguaaggcu

SEQ ID NO: 1795905 - RNA, 19 nt, Artificial Sequence
  Description of Artificial Sequence: Synthetic oligonucleotide
gaaugaaccauaguauaug

SEQ ID NO: 1795906 - RNA, 19 nt, Artificial Sequence
  Description of Artificial Sequence: Synthetic oligonucleotide
agagaaguggaauguuggg

SEQ ID NO: 1795907 - RNA, 19 nt, Artificial Sequence
  Description of Artificial Sequence: Synthetic oligonucleotide
uuauggauuccagggaagg

SEQ ID NO: 1795908 - RNA, 19 nt, Artificial Sequence
  Description of Artificial Sequence: Synthetic oligonucleotide
uuucauugguuuuaugguc

SEQ ID NO: 1795909 - RNA, 19 nt, Artificial Sequence
  Description of Artificial Sequence: Synthetic oligonucleotide
ugcuguucuacugagcucc

SEQ ID NO: 1795910 - RNA, 19 nt, Artificial Sequence
  Description of Artificial Sequence: Synthetic oligonucleotide
ucaauauccuguagcgaag

SEQ ID NO: 1795911 - RNA, 19 nt, Artificial Sequence
  Description of Artificial Sequence: Synthetic oligonucleotide
aacuuauggauuccaggga

SEQ ID NO: 1795912 - RNA, 19 nt, Artificial Sequence
  Description of Artificial Sequence: Synthetic oligonucleotide
ugauagaggauugaaggac

SEQ ID NO: 1795913 - RNA, 19 nt, Artificial Sequence
  Description of Artificial Sequence: Synthetic oligonucleotide
uccuguaaggcugaucagg

SEQ ID NO: 1795914 - RNA, 19 nt, Artificial Sequence
  Description of Artificial Sequence: Synthetic oligonucleotide
uuaggcgauaauugguaag

SEQ ID NO: 1795915 - RNA, 19 nt, Artificial Sequence
  Description of Artificial Sequence: Synthetic oligonucleotide
auaugguuagggaaaacuc

SEQ ID NO: 1795916 - RNA, 19 nt, Artificial Sequence
  Description of Artificial Sequence: Synthetic oligonucleotide
aagacucgcuuguauagca

SEQ ID NO: 1795917 - RNA, 19 nt, Artificial Sequence
  Description of Artificial Sequence: Synthetic oligonucleotide
uuggguuuugagccuaugc

SEQ ID NO: 1795918 - RNA, 19 nt, Artificial Sequence
  Description of Artificial Sequence: Synthetic oligonucleotide
auacucuuguagcccaucg

SEQ ID NO: 1795919 - RNA, 19 nt, Artificial Sequence
  Description of Artificial Sequence: Synthetic oligonucleotide
acucuuguagcccaucgug

SEQ ID NO: 1795920 - RNA, 19 nt, Artificial Sequence
  Description of Artificial Sequence: Synthetic oligonucleotide
accaauguauuuacaaggg

SEQ ID NO: 1795921 - RNA, 19 nt, Artificial Sequence
  Description of Artificial Sequence: Synthetic oligonucleotide
ucaucauauugaaagggua

SEQ ID NO: 1795922 - RNA, 19 nt, Artificial Sequence
  Description of Artificial Sequence: Synthetic oligonucleotide
aguggcuucagccaucagu

SEQ ID NO: 1795923 - RNA, 19 nt, Artificial Sequence
  Description of Artificial Sequence: Synthetic oligonucleotide
ucauauugaaaggguagcc

SEQ ID NO: 1795924 - RNA, 19 nt, Artificial Sequence
  Description of Artificial Sequence: Synthetic oligonucleotide
uucuauugucccaucuuca

SEQ ID NO: 1795925 - RNA, 19 nt, Artificial Sequence
  Description of Artificial Sequence: Synthetic oligonucleotide
aaaguauaagagaggugag

SEQ ID NO: 1795926 - RNA, 19 nt, Artificial Sequence
  Description of Artificial Sequence: Synthetic oligonucleotide
aauguuggguuuugagccu

SEQ ID NO: 1795927 - RNA, 19 nt, Artificial Sequence
  Description of Artificial Sequence: Synthetic oligonucleotide
uguucuacugagcuccacu

SEQ ID NO: 1795928 - RNA, 19 nt, Artificial Sequence
  Description of Artificial Sequence: Synthetic oligonucleotide
guauaagagaggugaguag

SEQ ID NO: 1795929 - RNA, 19 nt, Artificial Sequence
  Description of Artificial Sequence: Synthetic oligonucleotide
cuuauaacccaggugccgg

SEQ ID NO: 1795930 - RNA, 19 nt, Artificial Sequence
  Description of Artificial Sequence: Synthetic oligonucleotide
gaagauuuauagaaaagua

SEQ ID NO: 1795931 - RNA, 19 nt, Artificial Sequence
  Description of Artificial Sequence: Synthetic oligonucleotide
augauagaggauugaagga

SEQ ID NO: 1795932 - RNA, 19 nt, Artificial Sequence
  Description of Artificial Sequence: Synthetic oligonucleotide
agguaaaugaggguucagg

SEQ ID NO: 1795933 - RNA, 19 nt, Artificial Sequence
  Description of Artificial Sequence: Synthetic oligonucleotide
uauuuugcaccaguuuaag

SEQ ID NO: 1795934 - RNA, 19 nt, Artificial Sequence
  Description of Artificial Sequence: Synthetic oligonucleotide
acuuauggauuccagggaa

SEQ ID NO: 1795935 - RNA, 19 nt, Artificial Sequence
  Description of Artificial Sequence: Synthetic oligonucleotide
uuuacaagggugccccaga

SEQ ID NO: 1795936 - RNA, 19 nt, Artificial Sequence
  Description of Artificial Sequence: Synthetic oligonucleotide
aucacaccccuuuuaauga

SEQ ID NO: 1795937 - RNA, 19 nt, Artificial Sequence
  Description of Artificial Sequence: Synthetic oligonucleotide
aaguauaagagaggugagu

SEQ ID NO: 1795938 - RNA, 19 nt, Artificial Sequence
  Description of Artificial Sequence: Synthetic oligonucleotide
cuucuauugucccaucuuc

SEQ ID NO: 1795939 - RNA, 19 nt, Artificial Sequence
  Description of Artificial Sequence: Synthetic oligonucleotide
augaccuguccuuuaaacu

SEQ ID NO: 1795940 - RNA, 19 nt, Artificial Sequence
  Description of Artificial Sequence: Synthetic oligonucleotide
aauacucuuguagcccauc

SEQ ID NO: 1795941 - RNA, 19 nt, Artificial Sequence
  Description of Artificial Sequence: Synthetic oligonucleotide
aguauaagagaggugagua

SEQ ID NO: 1795942 - RNA, 19 nt, Artificial Sequence
  Description of Artificial Sequence: Synthetic oligonucleotide
uagcccaucgugcuuggag

SEQ ID NO: 1795943 - RNA, 19 nt, Artificial Sequence
  Description of Artificial Sequence: Synthetic oligonucleotide
gucucuaugacaacauccc

SEQ ID NO: 1795944 - RNA, 19 nt, Artificial Sequence
  Description of Artificial Sequence: Synthetic oligonucleotide
gacucaggaacaauucgag

SEQ ID NO: 1795945 - RNA, 19 nt, Artificial Sequence
  Description of Artificial Sequence: Synthetic oligonucleotide
caauucgaguuuucauugg

SEQ ID NO: 1795946 - RNA, 19 nt, Artificial Sequence
  Description of Artificial Sequence: Synthetic oligonucleotide
uguaugaccuguccuuuaa

SEQ ID NO: 1795947 - RNA, 19 nt, Artificial Sequence
  Description of Artificial Sequence: Synthetic oligonucleotide
gguucuagugcugagaaac

SEQ ID NO: 1795948 - RNA, 19 nt, Artificial Sequence
  Description of Artificial Sequence: Synthetic oligonucleotide
gugcaacaaaauuacacca

SEQ ID NO: 1795949 - RNA, 19 nt, Artificial Sequence
  Description of Artificial Sequence: Synthetic oligonucleotide
aagagcggcuuauaaccca

SEQ ID NO: 1795950 - RNA, 19 nt, Artificial Sequence
  Description of Artificial Sequence: Synthetic oligonucleotide
cuuauggauuccagggaag

SEQ ID NO: 1795951 - RNA, 19 nt, Artificial Sequence
  Description of Artificial Sequence: Synthetic oligonucleotide
gaaaaguauaagagaggug

SEQ ID NO: 1795952 - RNA, 19 nt, Artificial Sequence
  Description of Artificial Sequence: Synthetic oligonucleotide
gacuccagagguaaaugag

SEQ ID NO: 1795953 - RNA, 19 nt, Artificial Sequence
  Description of Artificial Sequence: Synthetic oligonucleotide
ccaguacaaaccaugacag

SEQ ID NO: 1795954 - RNA, 19 nt, Artificial Sequence
  Description of Artificial Sequence: Synthetic oligonucleotide
cucuuguagcccaucgugc

SEQ ID NO: 1795955 - RNA, 19 nt, Artificial Sequence
  Description of Artificial Sequence: Synthetic oligonucleotide
ggaauugcccaguacaaac

SEQ ID NO: 1795956 - RNA, 19 nt, Artificial Sequence
  Description of Artificial Sequence: Synthetic oligonucleotide
aacuucccaagcuagccuu

SEQ ID NO: 1795957 - RNA, 19 nt, Artificial Sequence
  Description of Artificial Sequence: Synthetic oligonucleotide
cugaaaggcgucuggaauc

SEQ ID NO: 1795958 - RNA, 19 nt, Artificial Sequence
  Description of Artificial Sequence: Synthetic oligonucleotide
ggaagacucgcuuguauag

SEQ ID NO: 1795959 - RNA, 19 nt, Artificial Sequence
  Description of Artificial Sequence: Synthetic oligonucleotide
uaguacagaguccuuugaa

SEQ ID NO: 1795960 - RNA, 19 nt, Artificial Sequence
  Description of Artificial Sequence: Synthetic oligonucleotide
ugaguagaagagguguccc

SEQ ID NO: 1795961 - RNA, 19 nt, Artificial Sequence
  Description of Artificial Sequence: Synthetic oligonucleotide
ugcgcuugcccugaaaggc

SEQ ID NO: 1795962 - RNA, 19 nt, Artificial Sequence
  Description of Artificial Sequence: Synthetic oligonucleotide
gauagaggauugaaggaca

SEQ ID NO: 1795963 - RNA, 19 nt, Artificial Sequence
  Description of Artificial Sequence: Synthetic oligonucleotide
ggcgauaauugguaagggg

SEQ ID NO: 1795964 - RNA, 19 nt, Artificial Sequence
  Description of Artificial Sequence: Synthetic oligonucleotide
gacucgcuuguauagcaug

SEQ ID NO: 1795965 - RNA, 19 nt, Artificial Sequence
  Description of Artificial Sequence: Synthetic oligonucleotide
gguaaaugaggguucagga

SEQ ID NO: 1795966 - RNA, 19 nt, Artificial Sequence
  Description of Artificial Sequence: Synthetic oligonucleotide
gaguagaagaggugucccc

SEQ ID NO: 1795967 - RNA, 19 nt, Artificial Sequence
  Description of Artificial Sequence: Synthetic oligonucleotide
ucuggaauccuguacucuu

SEQ ID NO: 1795968 - RNA, 19 nt, Artificial Sequence
  Description of Artificial Sequence: Synthetic oligonucleotide
gguuagggaaaacucuucc

SEQ ID NO: 1795969 - RNA, 19 nt, Artificial Sequence
  Description of Artificial Sequence: Synthetic oligonucleotide
uccuguagcgaagaucacc

SEQ ID NO: 1795970 - RNA, 19 nt, Artificial Sequence
  Description of Artificial Sequence: Synthetic oligonucleotide
agaggugaguagaagaggu

SEQ ID NO: 1795971 - RNA, 19 nt, Artificial Sequence
  Description of Artificial Sequence: Synthetic oligonucleotide
aaugauggcuaauguuguu

SEQ ID NO: 1795972 - RNA, 19 nt, Artificial Sequence
  Description of Artificial Sequence: Synthetic oligonucleotide
uggagguauaguacagagu

SEQ ID NO: 1795973 - RNA, 19 nt, Artificial Sequence
  Description of Artificial Sequence: Synthetic oligonucleotide
ucacaccccuuuuaaugag

SEQ ID NO: 1795974 - RNA, 19 nt, Artificial Sequence
  Description of Artificial Sequence: Synthetic oligonucleotide
auaguacagaguccuuuga

SEQ ID NO: 1795975 - RNA, 19 nt, Artificial Sequence
  Description of Artificial Sequence: Synthetic oligonucleotide
aaauacggcucuguccugu

SEQ ID NO: 1795976 - RNA, 19 nt, Artificial Sequence
  Description of Artificial Sequence: Synthetic oligonucleotide
cccaagaccaaccaccacg

SEQ ID NO: 1795977 - RNA, 19 nt, Artificial Sequence
  Description of Artificial Sequence: Synthetic oligonucleotide
augcgcuugcccugaaagg

SEQ ID NO: 1795978 - RNA, 19 nt, Artificial Sequence
  Description of Artificial Sequence: Synthetic oligonucleotide
auuaggcgauaauugguaa

SEQ ID NO: 1795979 - RNA, 19 nt, Artificial Sequence
  Description of Artificial Sequence: Synthetic oligonucleotide
cggcuuauaacccaggugc

SEQ ID NO: 1795980 - RNA, 19 nt, Artificial Sequence
  Description of Artificial Sequence: Synthetic oligonucleotide
gaagacucgcuuguauagc

SEQ ID NO: 1795981 - RNA, 19 nt, Artificial Sequence
  Description of Artificial Sequence: Synthetic oligonucleotide
aggugaguagaagaggugu

SEQ ID NO: 1795982 - RNA, 19 nt, Artificial Sequence
  Description of Artificial Sequence: Synthetic oligonucleotide
aggcugaucaggccaauga

SEQ ID NO: 1795983 - RNA, 19 nt, Artificial Sequence
  Description of Artificial Sequence: Synthetic oligonucleotide
gaagagcggcuuauaaccc

SEQ ID NO: 1795984 - RNA, 19 nt, Artificial Sequence
  Description of Artificial Sequence: Synthetic oligonucleotide
cccauuaggcgauaauugg

SEQ ID NO: 1795985 - RNA, 19 nt, Artificial Sequence
  Description of Artificial Sequence: Synthetic oligonucleotide
caugaucuuauuugcacaa

SEQ ID NO: 1795986 - RNA, 19 nt, Artificial Sequence
  Description of Artificial Sequence: Synthetic oligonucleotide
acggcucuguccuguuugc

SEQ ID NO: 1795987 - RNA, 19 nt, Artificial Sequence
  Description of Artificial Sequence: Synthetic oligonucleotide
uugcccucugucucuauga

SEQ ID NO: 1795988 - RNA, 19 nt, Artificial Sequence
  Description of Artificial Sequence: Synthetic oligonucleotide
aguuugucuugacugguuu

SEQ ID NO: 1795989 - RNA, 19 nt, Artificial Sequence
  Description of Artificial Sequence: Synthetic oligonucleotide
ugguuagggaaaacucuuc

SEQ ID NO: 1795990 - RNA, 19 nt, Artificial Sequence
  Description of Artificial Sequence: Synthetic oligonucleotide
ccaagcuagccuuggaucc

SEQ ID NO: 1795991 - RNA, 19 nt, Artificial Sequence
  Description of Artificial Sequence: Synthetic oligonucleotide
ugugccugcuaagauagau

SEQ ID NO: 1795992 - RNA, 19 nt, Artificial Sequence
  Description of Artificial Sequence: Synthetic oligonucleotide
aucaacucauggguucugg

SEQ ID NO: 1795993 - RNA, 19 nt, Artificial Sequence
  Description of Artificial Sequence: Synthetic oligonucleotide
gugaguagaagaggugucc

SEQ ID NO: 1795994 - RNA, 19 nt, Artificial Sequence
  Description of Artificial Sequence: Synthetic oligonucleotide
cagagguaaaugaggguuc

SEQ ID NO: 1795995 - RNA, 19 nt, Artificial Sequence
  Description of Artificial Sequence: Synthetic oligonucleotide
ucgugcuuggagcucugug

SEQ ID NO: 1795996 - RNA, 19 nt, Artificial Sequence
  Description of Artificial Sequence: Synthetic oligonucleotide
gaaccauaguauaugguua

SEQ ID NO: 1795997 - RNA, 19 nt, Artificial Sequence
  Description of Artificial Sequence: Synthetic oligonucleotide
aggguucaggaauugccca

SEQ ID NO: 1795998 - RNA, 19 nt, Artificial Sequence
  Description of Artificial Sequence: Synthetic oligonucleotide
acaaaggcuuuugaguggu

SEQ ID NO: 1795999 - RNA, 19 nt, Artificial Sequence
  Description of Artificial Sequence: Synthetic oligonucleotide
ucgcuuguauagcaugauc

SEQ ID NO: 1796000 - RNA, 19 nt, Artificial Sequence
  Description of Artificial Sequence: Synthetic oligonucleotide
aaggacuccagagguaaau

SEQ ID NO: 1796001 - RNA, 19 nt, Artificial Sequence
  Description of Artificial Sequence: Synthetic oligonucleotide
cauuaggcgauaauuggua

SEQ ID NO: 1796002 - RNA, 19 nt, Artificial Sequence
  Description of Artificial Sequence: Synthetic oligonucleotide
ggguuuugagccuaugcac

SEQ ID NO: 1796003 - RNA, 19 nt, Artificial Sequence
  Description of Artificial Sequence: Synthetic oligonucleotide
caguacaaaccaugacagc

SEQ ID NO: 1796004 - RNA, 19 nt, Artificial Sequence
  Description of Artificial Sequence: Synthetic oligonucleotide
ucuggcuccaucccauuuu

SEQ ID NO: 1796005 - RNA, 19 nt, Artificial Sequence
  Description of Artificial Sequence: Synthetic oligonucleotide
cacaccccuuuuaaugagc

SEQ ID NO: 1796006 - RNA, 19 nt, Artificial Sequence
  Description of Artificial Sequence: Synthetic oligonucleotide
uuaguggcuucagccauca

SEQ ID NO: 1796007 - RNA, 19 nt, Artificial Sequence
  Description of Artificial Sequence: Synthetic oligonucleotide
aguauaugguuagggaaaa

SEQ ID NO: 1796008 - RNA, 19 nt, Artificial Sequence
  Description of Artificial Sequence: Synthetic oligonucleotide
accauaguauaugguuagg

SEQ ID NO: 1796009 - RNA, 19 nt, Artificial Sequence
  Description of Artificial Sequence: Synthetic oligonucleotide
ugggaagacucgcuuguau

SEQ ID NO: 1796010 - RNA, 19 nt, Artificial Sequence
  Description of Artificial Sequence: Synthetic oligonucleotide
uuauaacccaggugccggu

SEQ ID NO: 1796011 - RNA, 19 nt, Artificial Sequence
  Description of Artificial Sequence: Synthetic oligonucleotide
uuacaagggugccccagau

SEQ ID NO: 1796012 - RNA, 19 nt, Artificial Sequence
  Description of Artificial Sequence: Synthetic oligonucleotide
ccauaguauaugguuaggg

SEQ ID NO: 1796013 - RNA, 19 nt, Artificial Sequence
  Description of Artificial Sequence: Synthetic oligonucleotide
uggcuaauguuguucucuc

SEQ ID NO: 1796014 - RNA, 19 nt, Artificial Sequence
  Description of Artificial Sequence: Synthetic oligonucleotide
aaccuggugggaagacucg

SEQ ID NO: 1796015 - RNA, 19 nt, Artificial Sequence
  Description of Artificial Sequence: Synthetic oligonucleotide
gcgauaauugguaagggga

SEQ ID NO: 1796016 - RNA, 19 nt, Artificial Sequence
  Description of Artificial Sequence: Synthetic oligonucleotide
uuuugagccuaugcacuga

SEQ ID NO: 1796017 - RNA, 19 nt, Artificial Sequence
  Description of Artificial Sequence: Synthetic oligonucleotide
uggccagucucggagaagu

SEQ ID NO: 1796018 - RNA, 19 nt, Artificial Sequence
  Description of Artificial Sequence: Synthetic oligonucleotide
cucaggaacaauucgaguu

SEQ ID NO: 1796019 - RNA, 19 nt, Artificial Sequence
  Description of Artificial Sequence: Synthetic oligonucleotide
uucuuuaaucacaccccuu

SEQ ID NO: 1796020 - RNA, 19 nt, Artificial Sequence
  Description of Artificial Sequence: Synthetic oligonucleotide
aggcgauaauugguaaggg

SEQ ID NO: 1796021 - RNA, 19 nt, Artificial Sequence
  Description of Artificial Sequence: Synthetic oligonucleotide
ugcuaagauagauccugua

SEQ ID NO: 1796022 - RNA, 19 nt, Artificial Sequence
  Description of Artificial Sequence: Synthetic oligonucleotide
agcggcuuauaacccaggu

SEQ ID NO: 1796023 - RNA, 19 nt, Artificial Sequence
  Description of Artificial Sequence: Synthetic oligonucleotide
uccacugcgaugucuccuc

SEQ ID NO: 1796024 - RNA, 19 nt, Artificial Sequence
  Description of Artificial Sequence: Synthetic oligonucleotide
cuccaaaccuggugggaag

SEQ ID NO: 1796025 - RNA, 19 nt, Artificial Sequence
  Description of Artificial Sequence: Synthetic oligonucleotide
cuaugacaacaucccacug

SEQ ID NO: 1796026 - RNA, 19 nt, Artificial Sequence
  Description of Artificial Sequence: Synthetic oligonucleotide
agagguaaaugaggguuca

SEQ ID NO: 1796027 - RNA, 19 nt, Artificial Sequence
  Description of Artificial Sequence: Synthetic oligonucleotide
agaacagaaccaauguauu

SEQ ID NO: 1796028 - RNA, 19 nt, Artificial Sequence
  Description of Artificial Sequence: Synthetic oligonucleotide
gaucaggccaaugauggcu

SEQ ID NO: 1796029 - RNA, 19 nt, Artificial Sequence
  Description of Artificial Sequence: Synthetic oligonucleotide
agccuaugcacugagcaau

SEQ ID NO: 1796030 - RNA, 19 nt, Artificial Sequence
  Description of Artificial Sequence: Synthetic oligonucleotide
auuacaccaucuucuugua

SEQ ID NO: 1796031 - RNA, 19 nt, Artificial Sequence
  Description of Artificial Sequence: Synthetic oligonucleotide
cucagaggacucaggaaca

SEQ ID NO: 1796032 - RNA, 19 nt, Artificial Sequence
  Description of Artificial Sequence: Synthetic oligonucleotide
aauacggcucuguccuguu

SEQ ID NO: 1796033 - RNA, 19 nt, Artificial Sequence
  Description of Artificial Sequence: Synthetic oligonucleotide
gaugucuccuccaguguuc

SEQ ID NO: 1796034 - RNA, 19 nt, Artificial Sequence
  Description of Artificial Sequence: Synthetic oligonucleotide
aacaucccacuggccaguc

SEQ ID NO: 1796035 - RNA, 19 nt, Artificial Sequence
  Description of Artificial Sequence: Synthetic oligonucleotide
uguguaugaccuguccuuu

SEQ ID NO: 1796036 - RNA, 19 nt, Artificial Sequence
  Description of Artificial Sequence: Synthetic oligonucleotide
ggguucuggggaaugaacc

SEQ ID NO: 1796037 - RNA, 19 nt, Artificial Sequence
  Description of Artificial Sequence: Synthetic oligonucleotide
agagcggcuuauaacccag

SEQ ID NO: 1796038 - RNA, 19 nt, Artificial Sequence
  Description of Artificial Sequence: Synthetic oligonucleotide
gcuuauaacccaggugccg

SEQ ID NO: 1796039 - RNA, 19 nt, Artificial Sequence
  Description of Artificial Sequence: Synthetic oligonucleotide
agauccuguaaggcugauc

SEQ ID NO: 1796040 - RNA, 19 nt, Artificial Sequence
  Description of Artificial Sequence: Synthetic oligonucleotide
gggaaugaaccauaguaua

SEQ ID NO: 1796041 - RNA, 19 nt, Artificial Sequence
  Description of Artificial Sequence: Synthetic oligonucleotide
uagaggauugaaggacaga

SEQ ID NO: 1796042 - RNA, 19 nt, Artificial Sequence
  Description of Artificial Sequence: Synthetic oligonucleotide
augaaccauaguauauggu

SEQ ID NO: 1796043 - RNA, 19 nt, Artificial Sequence
  Description of Artificial Sequence: Synthetic oligonucleotide
augguuagggaaaacucuu

SEQ ID NO: 1796044 - RNA, 19 nt, Artificial Sequence
  Description of Artificial Sequence: Synthetic oligonucleotide
gagguaaaugaggguucag

SEQ ID NO: 1796045 - RNA, 19 nt, Artificial Sequence
  Description of Artificial Sequence: Synthetic oligonucleotide
caggaauugcccaguacaa

SEQ ID NO: 1796046 - RNA, 19 nt, Artificial Sequence
  Description of Artificial Sequence: Synthetic oligonucleotide
gagccuaugcacugagcaa

SEQ ID NO: 1796047 - RNA, 19 nt, Artificial Sequence
  Description of Artificial Sequence: Synthetic oligonucleotide
uucccaagcuagccuugga

SEQ ID NO: 1796048 - RNA, 19 nt, Artificial Sequence
  Description of Artificial Sequence: Synthetic oligonucleotide
acucgcuuguauagcauga

SEQ ID NO: 1796049 - RNA, 19 nt, Artificial Sequence
  Description of Artificial Sequence: Synthetic oligonucleotide
gaucaacucauggguucug

SEQ ID NO: 1796050 - RNA, 19 nt, Artificial Sequence
  Description of Artificial Sequence: Synthetic oligonucleotide
gcccauuaggcgauaauug

SEQ ID NO: 1796051 - RNA, 19 nt, Artificial Sequence
  Description of Artificial Sequence: Synthetic oligonucleotide
acaccccuuuuaaugagcu

SEQ ID NO: 1796052 - RNA, 19 nt, Artificial Sequence
  Description of Artificial Sequence: Synthetic oligonucleotide
caaucucauccauguagga

SEQ ID NO: 1796053 - RNA, 19 nt, Artificial Sequence
  Description of Artificial Sequence: Synthetic oligonucleotide
auagauccuguaaggcuga

SEQ ID NO: 1796054 - RNA, 19 nt, Artificial Sequence
  Description of Artificial Sequence: Synthetic oligonucleotide
guagcgaagaucaccacau

SEQ ID NO: 1796055 - RNA, 19 nt, Artificial Sequence
  Description of Artificial Sequence: Synthetic oligonucleotide
ggaauccuguacucuuggc

SEQ ID NO: 1796056 - RNA, 19 nt, Artificial Sequence
  Description of Artificial Sequence: Synthetic oligonucleotide
ggacucaggaacaauucga

SEQ ID NO: 1796057 - RNA, 19 nt, Artificial Sequence
  Description of Artificial Sequence: Synthetic oligonucleotide
ggcuaauguuguucucucc

SEQ ID NO: 1796058 - RNA, 19 nt, Artificial Sequence
  Description of Artificial Sequence: Synthetic oligonucleotide
gaguccuuugaauacucuu

SEQ ID NO: 1796059 - RNA, 19 nt, Artificial Sequence
  Description of Artificial Sequence: Synthetic oligonucleotide
ggcuguguaugaccugucc

SEQ ID NO: 1796060 - RNA, 19 nt, Artificial Sequence
  Description of Artificial Sequence: Synthetic oligonucleotide
caauauccuguagcgaaga

SEQ ID NO: 1796061 - RNA, 19 nt, Artificial Sequence
  Description of Artificial Sequence: Synthetic oligonucleotide
aggaauugcccaguacaaa

SEQ ID NO: 1796062 - RNA, 19 nt, Artificial Sequence
  Description of Artificial Sequence: Synthetic oligonucleotide
caaauacggcucuguccug

SEQ ID NO: 1796063 - RNA, 19 nt, Artificial Sequence
  Description of Artificial Sequence: Synthetic oligonucleotide
uguuggguuuugagccuau

SEQ ID NO: 1796064 - RNA, 19 nt, Artificial Sequence
  Description of Artificial Sequence: Synthetic oligonucleotide
guauaugguuagggaaaac

SEQ ID NO: 1796065 - RNA, 19 nt, Artificial Sequence
  Description of Artificial Sequence: Synthetic oligonucleotide
cucugugccugcuaagaua

SEQ ID NO: 1796066 - RNA, 19 nt, Artificial Sequence
  Description of Artificial Sequence: Synthetic oligonucleotide
gcaaaagugaagauuuaua

SEQ ID NO: 1796067 - RNA, 19 nt, Artificial Sequence
  Description of Artificial Sequence: Synthetic oligonucleotide
gcggcuuauaacccaggug

SEQ ID NO: 1796068 - RNA, 19 nt, Artificial Sequence
  Description of Artificial Sequence: Synthetic oligonucleotide
auucgaguuuucauugguu

SEQ ID NO: 1796069 - RNA, 19 nt, Artificial Sequence
  Description of Artificial Sequence: Synthetic oligonucleotide
ugccgguucuagugcugag

SEQ ID NO: 1796070 - RNA, 19 nt, Artificial Sequence
  Description of Artificial Sequence: Synthetic oligonucleotide
cccaagcuagccuuggauc

SEQ ID NO: 1796071 - RNA, 19 nt, Artificial Sequence
  Description of Artificial Sequence: Synthetic oligonucleotide
augaucuuauuugcacaaa

SEQ ID NO: 1796072 - RNA, 19 nt, Artificial Sequence
  Description of Artificial Sequence: Synthetic oligonucleotide
uccuguacucuuggcugug

SEQ ID NO: 1796073 - RNA, 19 nt, Artificial Sequence
  Description of Artificial Sequence: Synthetic oligonucleotide
ggcgucuggaauccuguac

SEQ ID NO: 1796074 - RNA, 19 nt, Artificial Sequence
  Description of Artificial Sequence: Synthetic oligonucleotide
gaaguggaauguuggguuu

SEQ ID NO: 1796075 - RNA, 19 nt, Artificial Sequence
  Description of Artificial Sequence: Synthetic oligonucleotide
gagcggcuuauaacccagg

SEQ ID NO: 1796076 - RNA, 19 nt, Artificial Sequence
  Description of Artificial Sequence: Synthetic oligonucleotide
ucaggccaaugauggcuaa

SEQ ID NO: 1796077 - RNA, 19 nt, Artificial Sequence
  Description of Artificial Sequence: Synthetic oligonucleotide
agaguccuuugaauacucu

SEQ ID NO: 1796078 - RNA, 19 nt, Artificial Sequence
  Description of Artificial Sequence: Synthetic oligonucleotide
uugcccugaaaggcgucug

SEQ ID NO: 1796079 - RNA, 19 nt, Artificial Sequence
  Description of Artificial Sequence: Synthetic oligonucleotide
guaugaccuguccuuuaaa

SEQ ID NO: 1796080 - RNA, 19 nt, Artificial Sequence
  Description of Artificial Sequence: Synthetic oligonucleotide
auaaugugacagggaggca

SEQ ID NO: 1796081 - RNA, 19 nt, Artificial Sequence
  Description of Artificial Sequence: Synthetic oligonucleotide
ggcuuauaacccaggugcc

SEQ ID NO: 1796082 - RNA, 19 nt, Artificial Sequence
  Description of Artificial Sequence: Synthetic oligonucleotide
gugccugcuaagauagauc

SEQ ID NO: 1796083 - RNA, 19 nt, Artificial Sequence
  Description of Artificial Sequence: Synthetic oligonucleotide
uauaacccaggugccgguu

SEQ ID NO: 1796084 - RNA, 19 nt, Artificial Sequence
  Description of Artificial Sequence: Synthetic oligonucleotide
guaaggcugaucaggccaa

SEQ ID NO: 1796085 - RNA, 19 nt, Artificial Sequence
  Description of Artificial Sequence: Synthetic oligonucleotide
gguuuugagccuaugcacu

SEQ ID NO: 1796086 - RNA, 19 nt, Artificial Sequence
  Description of Artificial Sequence: Synthetic oligonucleotide
cuguguaugaccuguccuu

SEQ ID NO: 1796087 - RNA, 19 nt, Artificial Sequence
  Description of Artificial Sequence: Synthetic oligonucleotide
ccaagaccaaccaccacga

SEQ ID NO: 1796088 - RNA, 19 nt, Artificial Sequence
  Description of Artificial Sequence: Synthetic oligonucleotide
acuucccaagcuagccuug

SEQ ID NO: 1796089 - RNA, 19 nt, Artificial Sequence
  Description of Artificial Sequence: Synthetic oligonucleotide
uuucuggcuccaucccauu

SEQ ID NO: 1796090 - RNA, 19 nt, Artificial Sequence
  Description of Artificial Sequence: Synthetic oligonucleotide
caccccuuuuaaugagcuc

SEQ ID NO: 1796091 - RNA, 19 nt, Artificial Sequence
  Description of Artificial Sequence: Synthetic oligonucleotide
auccuguagcgaagaucac

SEQ ID NO: 1796092 - RNA, 19 nt, Artificial Sequence
  Description of Artificial Sequence: Synthetic oligonucleotide
ggaaugaaccauaguauau

SEQ ID NO: 1796093 - RNA, 19 nt, Artificial Sequence
  Description of Artificial Sequence: Synthetic oligonucleotide
guucaggaauugcccagua

SEQ ID NO: 1796094 - RNA, 19 nt, Artificial Sequence
  Description of Artificial Sequence: Synthetic oligonucleotide
uaaggggaacaugguccaa

SEQ ID NO: 1796095 - RNA, 19 nt, Artificial Sequence
  Description of Artificial Sequence: Synthetic oligonucleotide
gcuguguaugaccuguccu

SEQ ID NO: 1796096 - RNA, 19 nt, Artificial Sequence
  Description of Artificial Sequence: Synthetic oligonucleotide
guguaugaccuguccuuua

SEQ ID NO: 1796097 - RNA, 19 nt, Artificial Sequence
  Description of Artificial Sequence: Synthetic oligonucleotide
auguuggguuuugagccua

SEQ ID NO: 1796098 - RNA, 19 nt, Artificial Sequence
  Description of Artificial Sequence: Synthetic oligonucleotide
uggcuucuauugucccauc

SEQ ID NO: 1796099 - RNA, 19 nt, Artificial Sequence
  Description of Artificial Sequence: Synthetic oligonucleotide
caucgugcuuggagcucug

SEQ ID NO: 1796100 - RNA, 19 nt, Artificial Sequence
  Description of Artificial Sequence: Synthetic oligonucleotide
agacucgcuuguauagcau

SEQ ID NO: 1796101 - RNA, 19 nt, Artificial Sequence
  Description of Artificial Sequence: Synthetic oligonucleotide
cuguucuacugagcuccac

SEQ ID NO: 1796102 - RNA, 19 nt, Artificial Sequence
  Description of Artificial Sequence: Synthetic oligonucleotide
ccugaagagcggcuuauaa

SEQ ID NO: 1796103 - RNA, 19 nt, Artificial Sequence
  Description of Artificial Sequence: Synthetic oligonucleotide
aguuucugggguggaggua

SEQ ID NO: 1796104 - RNA, 19 nt, Artificial Sequence
  Description of Artificial Sequence: Synthetic oligonucleotide
gaaggacuccagagguaaa

SEQ ID NO: 1796105 - RNA, 19 nt, Artificial Sequence
  Description of Artificial Sequence: Synthetic oligonucleotide
ccauuaggcgauaauuggu

SEQ ID NO: 1796106 - RNA, 19 nt, Artificial Sequence
  Description of Artificial Sequence: Synthetic oligonucleotide
cucuccaaaccugguggga

SEQ ID NO: 1796107 - RNA, 19 nt, Artificial Sequence
  Description of Artificial Sequence: Synthetic oligonucleotide
aggcgucuggaauccugua

SEQ ID NO: 1796108 - RNA, 19 nt, Artificial Sequence
  Description of Artificial Sequence: Synthetic oligonucleotide
uagauccuguaaggcugau

SEQ ID NO: 1796109 - RNA, 19 nt, Artificial Sequence
  Description of Artificial Sequence: Synthetic oligonucleotide
ccgguucuagugcugagaa

SEQ ID NO: 1796110 - RNA, 19 nt, Artificial Sequence
  Description of Artificial Sequence: Synthetic oligonucleotide
aucgugcuuggagcucugu

SEQ ID NO: 1796111 - RNA, 19 nt, Artificial Sequence
  Description of Artificial Sequence: Synthetic oligonucleotide
cacgaugcgcuugcccuga

SEQ ID NO: 1796112 - RNA, 19 nt, Artificial Sequence
  Description of Artificial Sequence: Synthetic oligonucleotide
gaguuugucuugacugguu

SEQ ID NO: 1796113 - RNA, 19 nt, Artificial Sequence
  Description of Artificial Sequence: Synthetic oligonucleotide
ccaccaccugaagagcggc

SEQ ID NO: 1796114 - RNA, 19 nt, Artificial Sequence
  Description of Artificial Sequence: Synthetic oligonucleotide
ccugaaaggcgucuggaau

SEQ ID NO: 1796115 - RNA, 19 nt, Artificial Sequence
  Description of Artificial Sequence: Synthetic oligonucleotide
ggcccauuaggcgauaauu

SEQ ID NO: 1796116 - RNA, 19 nt, Artificial Sequence
  Description of Artificial Sequence: Synthetic oligonucleotide
caagcuagccuuggauccu

SEQ ID NO: 1796117 - RNA, 19 nt, Artificial Sequence
  Description of Artificial Sequence: Synthetic oligonucleotide
ggagaucaacucauggguu

SEQ ID NO: 1796118 - RNA, 19 nt, Artificial Sequence
  Description of Artificial Sequence: Synthetic oligonucleotide
gccuaugcacugagcaauc

SEQ ID NO: 1796119 - RNA, 19 nt, Artificial Sequence
  Description of Artificial Sequence: Synthetic oligonucleotide
cuggugggaagacucgcuu

SEQ ID NO: 1796120 - RNA, 19 nt, Artificial Sequence
  Description of Artificial Sequence: Synthetic oligonucleotide
agggcccauuaggcgauaa

SEQ ID NO: 1796121 - RNA, 19 nt, Artificial Sequence
  Description of Artificial Sequence: Synthetic oligonucleotide
gaaaggcgucuggaauccu

SEQ ID NO: 1796122 - RNA, 19 nt, Artificial Sequence
  Description of Artificial Sequence: Synthetic oligonucleotide
gagaaacaccugagcugcu

SEQ ID NO: 1796123 - RNA, 19 nt, Artificial Sequence
  Description of Artificial Sequence: Synthetic oligonucleotide
acgaugcgcuugcccugaa

SEQ ID NO: 1796124 - RNA, 19 nt, Artificial Sequence
  Description of Artificial Sequence: Synthetic oligonucleotide
cucgcuuguauagcaugau

SEQ ID NO: 1796125 - RNA, 19 nt, Artificial Sequence
  Description of Artificial Sequence: Synthetic oligonucleotide
guagcccaucgugcuugga

SEQ ID NO: 1796126 - RNA, 19 nt, Artificial Sequence
  Description of Artificial Sequence: Synthetic oligonucleotide
gcuguucuacugagcucca

SEQ ID NO: 1796127 - RNA, 19 nt, Artificial Sequence
  Description of Artificial Sequence: Synthetic oligonucleotide
cgaagaucaccacaucgau

SEQ ID NO: 1796128 - RNA, 19 nt, Artificial Sequence
  Description of Artificial Sequence: Synthetic oligonucleotide
cagaggacucaggaacaau

SEQ ID NO: 1796129 - RNA, 19 nt, Artificial Sequence
  Description of Artificial Sequence: Synthetic oligonucleotide
gguauaguacagaguccuu

SEQ ID NO: 1796130 - RNA, 19 nt, Artificial Sequence
  Description of Artificial Sequence: Synthetic oligonucleotide
caaaggcuuuugagugguu

SEQ ID NO: 1796131 - RNA, 19 nt, Artificial Sequence
  Description of Artificial Sequence: Synthetic oligonucleotide
gcuugcccugaaaggcguc

SEQ ID NO: 1796132 - RNA, 19 nt, Artificial Sequence
  Description of Artificial Sequence: Synthetic oligonucleotide
cucauggguucuggggaau

SEQ ID NO: 1796133 - RNA, 19 nt, Artificial Sequence
  Description of Artificial Sequence: Synthetic oligonucleotide
ggccagucucggagaaguc

SEQ ID NO: 1796134 - RNA, 19 nt, Artificial Sequence
  Description of Artificial Sequence: Synthetic oligonucleotide
caggccaaugauggcuaau

SEQ ID NO: 1796135 - RNA, 19 nt, Artificial Sequence
  Description of Artificial Sequence: Synthetic oligonucleotide
gggcccauuaggcgauaau

SEQ ID NO: 1796136 - RNA, 19 nt, Artificial Sequence
  Description of Artificial Sequence: Synthetic oligonucleotide
cgaugucuccuccaguguu

SEQ ID NO: 1796137 - RNA, 19 nt, Artificial Sequence
  Description of Artificial Sequence: Synthetic oligonucleotide
cgguucuagugcugagaaa

SEQ ID NO: 1796138 - RNA, 19 nt, Artificial Sequence
  Description of Artificial Sequence: Synthetic oligonucleotide
ccagggcccauuaggcgau

SEQ ID NO: 1796139 - RNA, 19 nt, Artificial Sequence
  Description of Artificial Sequence: Synthetic oligonucleotide
cgcuugcccugaaaggcgu

SEQ ID NO: 1796140 - RNA, 19 nt, Artificial Sequence
  Description of Artificial Sequence: Synthetic oligonucleotide
cagggcccauuaggcgaua

SEQ ID NO: 1796141 - RNA, 19 nt, Artificial Sequence
  Description of Artificial Sequence: Synthetic oligonucleotide
uaauauucaaagucgaucg

SEQ ID NO: 1796142 - RNA, 19 nt, Artificial Sequence
  Description of Artificial Sequence: Synthetic oligonucleotide
uuuuccauaaucaggacca

SEQ ID NO: 1796143 - RNA, 19 nt, Artificial Sequence
  Description of Artificial Sequence: Synthetic oligonucleotide
aauauucaaagucgaucgc

SEQ ID NO: 1796144 - RNA, 19 nt, Artificial Sequence
  Description of Artificial Sequence: Synthetic oligonucleotide
aagaagcuuucucugaaac

SEQ ID NO: 1796145 - RNA, 19 nt, Artificial Sequence
  Description of Artificial Sequence: Synthetic oligonucleotide
uuaauuucaucguugaggu

SEQ ID NO: 1796146 - RNA, 19 nt, Artificial Sequence
  Description of Artificial Sequence: Synthetic oligonucleotide
auaauauucaaagucgauc

SEQ ID NO: 1796147 - RNA, 19 nt, Artificial Sequence
  Description of Artificial Sequence: Synthetic oligonucleotide
uuugagaucucuccaauga

SEQ ID NO: 1796148 - RNA, 19 nt, Artificial Sequence
  Description of Artificial Sequence: Synthetic oligonucleotide
aacaugagcaaugaacuuc

SEQ ID NO: 1796149 - RNA, 19 nt, Artificial Sequence
  Description of Artificial Sequence: Synthetic oligonucleotide
ugagcaaugaacuucugcu

SEQ ID NO: 1796150 - RNA, 19 nt, Artificial Sequence
  Description of Artificial Sequence: Synthetic oligonucleotide
uuaccaucaagccagcuca

SEQ ID NO: 1796151 - RNA, 19 nt, Artificial Sequence
  Description of Artificial Sequence: Synthetic oligonucleotide
uccauaaucaggaccaccc

SEQ ID NO: 1796152 - RNA, 19 nt, Artificial Sequence
  Description of Artificial Sequence: Synthetic oligonucleotide
ucaugauccagcaucuuag

SEQ ID NO: 1796153 - RNA, 19 nt, Artificial Sequence
  Description of Artificial Sequence: Synthetic oligonucleotide
aaucuuguuccaaaggcac

SEQ ID NO: 1796154 - RNA, 19 nt, Artificial Sequence
  Description of Artificial Sequence: Synthetic oligonucleotide
auauucaaagucgaucgcc

SEQ ID NO: 1796155 - RNA, 19 nt, Artificial Sequence
  Description of Artificial Sequence: Synthetic oligonucleotide
caaaguacuuguaaccacg

SEQ ID NO: 1796156 - RNA, 19 nt, Artificial Sequence
  Description of Artificial Sequence: Synthetic oligonucleotide
uucggaauuccccuaagcc

SEQ ID NO: 1796157 - RNA, 19 nt, Artificial Sequence
  Description of Artificial Sequence: Synthetic oligonucleotide
aaaguaaaguugcaaacuu

SEQ ID NO: 1796158 - RNA, 19 nt, Artificial Sequence
  Description of Artificial Sequence: Synthetic oligonucleotide
cuugacgaaaucuugccag

SEQ ID NO: 1796159 - RNA, 19 nt, Artificial Sequence
  Description of Artificial Sequence: Synthetic oligonucleotide
ucugacucauccuaguacc

SEQ ID NO: 1796160 - RNA, 19 nt, Artificial Sequence
  Description of Artificial Sequence: Synthetic oligonucleotide
augagcaaugaacuucugc

SEQ ID NO: 1796161 - RNA, 19 nt, Artificial Sequence
  Description of Artificial Sequence: Synthetic oligonucleotide
auccuaguaccccaggagc

SEQ ID NO: 1796162 - RNA, 19 nt, Artificial Sequence
  Description of Artificial Sequence: Synthetic oligonucleotide
ugacuuuucccucuucuag

SEQ ID NO: 1796163 - RNA, 19 nt, Artificial Sequence
  Description of Artificial Sequence: Synthetic oligonucleotide
caacuuuuccauaaucagg

SEQ ID NO: 1796164 - RNA, 19 nt, Artificial Sequence
  Description of Artificial Sequence: Synthetic oligonucleotide
ucucuuagcagcuuguuaa

SEQ ID NO: 1796165 - RNA, 19 nt, Artificial Sequence
  Description of Artificial Sequence: Synthetic oligonucleotide
cuuguuaauuucaucguug

SEQ ID NO: 1796166 - RNA, 19 nt, Artificial Sequence
  Description of Artificial Sequence: Synthetic oligonucleotide
agcuugacgaaaucuugcc

SEQ ID NO: 1796167 - RNA, 19 nt, Artificial Sequence
  Description of Artificial Sequence: Synthetic oligonucleotide
cauaaucuuguuccaaagg

SEQ ID NO: 1796168 - RNA, 19 nt, Artificial Sequence
  Description of Artificial Sequence: Synthetic oligonucleotide
uguaaccacgguuuccugg

SEQ ID NO: 1796169 - RNA, 19 nt, Artificial Sequence
  Description of Artificial Sequence: Synthetic oligonucleotide
uucuagcugagcuugacga

SEQ ID NO: 1796170 - RNA, 19 nt, Artificial Sequence
  Description of Artificial Sequence: Synthetic oligonucleotide
aguaaaguugcaaacuuag

SEQ ID NO: 1796171 - RNA, 19 nt, Artificial Sequence
  Description of Artificial Sequence: Synthetic oligonucleotide
gacuucuuuacccucauga

SEQ ID NO: 1796172 - RNA, 19 nt, Artificial Sequence
  Description of Artificial Sequence: Synthetic oligonucleotide
acccucaugauccagcauc

SEQ ID NO: 1796173 - RNA, 19 nt, Artificial Sequence
  Description of Artificial Sequence: Synthetic oligonucleotide
cauucagaagcaagaaagg

SEQ ID NO: 1796174 - RNA, 19 nt, Artificial Sequence
  Description of Artificial Sequence: Synthetic oligonucleotide
cugaaacaaguuauaaaag

SEQ ID NO: 1796175 - RNA, 19 nt, Artificial Sequence
  Description of Artificial Sequence: Synthetic oligonucleotide
aacucaguacauucagaag

SEQ ID NO: 1796176 - RNA, 19 nt, Artificial Sequence
  Description of Artificial Sequence: Synthetic oligonucleotide
uccagaaaaggagagagac

SEQ ID NO: 1796177 - RNA, 19 nt, Artificial Sequence
  Description of Artificial Sequence: Synthetic oligonucleotide
uucuuucucgaacaguucu

SEQ ID NO: 1796178 - RNA, 19 nt, Artificial Sequence
  Description of Artificial Sequence: Synthetic oligonucleotide
uuugcugcuccaaaguacu

SEQ ID NO: 1796179 - RNA, 19 nt, Artificial Sequence
  Description of Artificial Sequence: Synthetic oligonucleotide
ucgaacaguucucugacac

SEQ ID NO: 1796180 - RNA, 19 nt, Artificial Sequence
  Description of Artificial Sequence: Synthetic oligonucleotide
aguuccuugauccggaccu

SEQ ID NO: 1796181 - RNA, 19 nt, Artificial Sequence
  Description of Artificial Sequence: Synthetic oligonucleotide
uucucugacaccaggcaag

SEQ ID NO: 1796182 - RNA, 19 nt, Artificial Sequence
  Description of Artificial Sequence: Synthetic oligonucleotide
uuuacccucaugauccagc

SEQ ID NO: 1796183 - RNA, 19 nt, Artificial Sequence
  Description of Artificial Sequence: Synthetic oligonucleotide
auucggaauuccccuaagc

SEQ ID NO: 1796184 - RNA, 19 nt, Artificial Sequence
  Description of Artificial Sequence: Synthetic oligonucleotide
ucuuccuccguacaagcgc

SEQ ID NO: 1796185 - RNA, 19 nt, Artificial Sequence
  Description of Artificial Sequence: Synthetic oligonucleotide
ugucuuucugggaggaggg

SEQ ID NO: 1796186 - RNA, 19 nt, Artificial Sequence
  Description of Artificial Sequence: Synthetic oligonucleotide
uaaaagaagcuuucucuga

SEQ ID NO: 1796187 - RNA, 19 nt, Artificial Sequence
  Description of Artificial Sequence: Synthetic oligonucleotide
ucucccagaguccaagaag

SEQ ID NO: 1796188 - RNA, 19 nt, Artificial Sequence
  Description of Artificial Sequence: Synthetic oligonucleotide
agggccuuaccaucaagcc

SEQ ID NO: 1796189 - RNA, 19 nt, Artificial Sequence
  Description of Artificial Sequence: Synthetic oligonucleotide
agauaggagagggagaaag

SEQ ID NO: 1796190 - RNA, 19 nt, Artificial Sequence
  Description of Artificial Sequence: Synthetic oligonucleotide
uuguuaauuucaucguuga

SEQ ID NO: 1796191 - RNA, 19 nt, Artificial Sequence
  Description of Artificial Sequence: Synthetic oligonucleotide
uguuaauuucaucguugag

SEQ ID NO: 1796192 - RNA, 19 nt, Artificial Sequence
  Description of Artificial Sequence: Synthetic oligonucleotide
ugagcuugacgaaaucuug

SEQ ID NO: 1796193 - RNA, 19 nt, Artificial Sequence
  Description of Artificial Sequence: Synthetic oligonucleotide
cuccaaaguacuuguaacc

SEQ ID NO: 1796194 - RNA, 19 nt, Artificial Sequence
  Description of Artificial Sequence: Synthetic oligonucleotide
aaaguacuuguaaccacgg

SEQ ID NO: 1796195 - RNA, 19 nt, Artificial Sequence
  Description of Artificial Sequence: Synthetic oligonucleotide
guaaccacgguuuccuggg

SEQ ID NO: 1796196 - RNA, 19 nt, Artificial Sequence
  Description of Artificial Sequence: Synthetic oligonucleotide
uuaauaaaagaagcuuucu

SEQ ID NO: 1796197 - RNA, 19 nt, Artificial Sequence
  Description of Artificial Sequence: Synthetic oligonucleotide
ucggaauuccccuaagcca

SEQ ID NO: 1796198 - RNA, 19 nt, Artificial Sequence
  Description of Artificial Sequence: Synthetic oligonucleotide
aaggaugagaaaggcacag

SEQ ID NO: 1796199 - RNA, 19 nt, Artificial Sequence
  Description of Artificial Sequence: Synthetic oligonucleotide
agaauuccuguccacaaga

SEQ ID NO: 1796200 - RNA, 19 nt, Artificial Sequence
  Description of Artificial Sequence: Synthetic oligonucleotide
cucgaauucggaauucccc

SEQ ID NO: 1796201 - RNA, 19 nt, Artificial Sequence
  Description of Artificial Sequence: Synthetic oligonucleotide
aguacuuguaaccacgguu

SEQ ID NO: 1796202 - RNA, 19 nt, Artificial Sequence
  Description of Artificial Sequence: Synthetic oligonucleotide
ucgaucgccuucaugagcu

SEQ ID NO: 1796203 - RNA, 19 nt, Artificial Sequence
  Description of Artificial Sequence: Synthetic oligonucleotide
gaugaaggaugagaaaggc

SEQ ID NO: 1796204 - RNA, 19 nt, Artificial Sequence
  Description of Artificial Sequence: Synthetic oligonucleotide
uucauaaucuuguuccaaa

SEQ ID NO: 1796205 - RNA, 19 nt, Artificial Sequence
  Description of Artificial Sequence: Synthetic oligonucleotide
auccggaccucccaguggc

SEQ ID NO: 1796206 - RNA, 19 nt, Artificial Sequence
  Description of Artificial Sequence: Synthetic oligonucleotide
aaucaggaccacccaguuc

SEQ ID NO: 1796207 - RNA, 19 nt, Artificial Sequence
  Description of Artificial Sequence: Synthetic oligonucleotide
uaaccauaauauucaaagu

SEQ ID NO: 1796208 - RNA, 19 nt, Artificial Sequence
  Description of Artificial Sequence: Synthetic oligonucleotide
uccaaaguacuuguaacca

SEQ ID NO: 1796209 - RNA, 19 nt, Artificial Sequence
  Description of Artificial Sequence: Synthetic oligonucleotide
ucgaauucggaauuccccu

SEQ ID NO: 1796210 - RNA, 19 nt, Artificial Sequence
  Description of Artificial Sequence: Synthetic oligonucleotide
uuagaauuccuguccacaa

SEQ ID NO: 1796211 - RNA, 19 nt, Artificial Sequence
  Description of Artificial Sequence: Synthetic oligonucleotide
aguacauucagaagcaaga

SEQ ID NO: 1796212 - RNA, 19 nt, Artificial Sequence
  Description of Artificial Sequence: Synthetic oligonucleotide
uagaauuccuguccacaag

SEQ ID NO: 1796213 - RNA, 19 nt, Artificial Sequence
  Description of Artificial Sequence: Synthetic oligonucleotide
aagcaagaaagggucuucg

SEQ ID NO: 1796214 - RNA, 19 nt, Artificial Sequence
  Description of Artificial Sequence: Synthetic oligonucleotide
aauucggaauuccccuaag

SEQ ID NO: 1796215 - RNA, 19 nt, Artificial Sequence
  Description of Artificial Sequence: Synthetic oligonucleotide
guugcaaacuuagaauucc

SEQ ID NO: 1796216 - RNA, 19 nt, Artificial Sequence
  Description of Artificial Sequence: Synthetic oligonucleotide
cugcuuuccauuuuccuac

SEQ ID NO: 1796217 - RNA, 19 nt, Artificial Sequence
  Description of Artificial Sequence: Synthetic oligonucleotide
aaccacgguuuccugggac

SEQ ID NO: 1796218 - RNA, 19 nt, Artificial Sequence
  Description of Artificial Sequence: Synthetic oligonucleotide
cauaaucaggaccacccag

SEQ ID NO: 1796219 - RNA, 19 nt, Artificial Sequence
  Description of Artificial Sequence: Synthetic oligonucleotide
ugaucugucgucuccauuu

SEQ ID NO: 1796220 - RNA, 19 nt, Artificial Sequence
  Description of Artificial Sequence: Synthetic oligonucleotide
acuuagaauuccuguccac

SEQ ID NO: 1796221 - RNA, 19 nt, Artificial Sequence
  Description of Artificial Sequence: Synthetic oligonucleotide
uccuaguaccccaggagcc

SEQ ID NO: 1796222 - RNA, 19 nt, Artificial Sequence
  Description of Artificial Sequence: Synthetic oligonucleotide
ucucgaauucggaauuccc

SEQ ID NO: 1796223 - RNA, 19 nt, Artificial Sequence
  Description of Artificial Sequence: Synthetic oligonucleotide
ucuuagggccaacuuuucc

SEQ ID NO: 1796224 - RNA, 19 nt, Artificial Sequence
  Description of Artificial Sequence: Synthetic oligonucleotide
cuuuccauuuuccuaccag

SEQ ID NO: 1796225 - RNA, 19 nt, Artificial Sequence
  Description of Artificial Sequence: Synthetic oligonucleotide
agcuaugaggaugguaggc

SEQ ID NO: 1796226 - RNA, 19 nt, Artificial Sequence
  Description of Artificial Sequence: Synthetic oligonucleotide
cuaugaggaugguaggccc

SEQ ID NO: 1796227 - RNA, 19 nt, Artificial Sequence
  Description of Artificial Sequence: Synthetic oligonucleotide
cuguccacaagauaggaga

SEQ ID NO: 1796228 - RNA, 19 nt, Artificial Sequence
  Description of Artificial Sequence: Synthetic oligonucleotide
ugcuccaaaguacuuguaa

SEQ ID NO: 1796229 - RNA, 19 nt, Artificial Sequence
  Description of Artificial Sequence: Synthetic oligonucleotide
uuccuguccacaagauagg

SEQ ID NO: 1796230 - RNA, 19 nt, Artificial Sequence
  Description of Artificial Sequence: Synthetic oligonucleotide
cacaauaacuccaucaucu

SEQ ID NO: 1796231 - RNA, 19 nt, Artificial Sequence
  Description of Artificial Sequence: Synthetic oligonucleotide
gaugagaaaggcacagagc

SEQ ID NO: 1796232 - RNA, 19 nt, Artificial Sequence
  Description of Artificial Sequence: Synthetic oligonucleotide
acgaaaucuugccagggca

SEQ ID NO: 1796233 - RNA, 19 nt, Artificial Sequence
  Description of Artificial Sequence: Synthetic oligonucleotide
ucagacuccuccucgguga

SEQ ID NO: 1796234 - RNA, 19 nt, Artificial Sequence
  Description of Artificial Sequence: Synthetic oligonucleotide
cagguaaccauaauauuca

SEQ ID NO: 1796235 - RNA, 19 nt, Artificial Sequence
  Description of Artificial Sequence: Synthetic oligonucleotide
aaagucgaucgccuucaug

SEQ ID NO: 1796236 - RNA, 19 nt, Artificial Sequence
  Description of Artificial Sequence: Synthetic oligonucleotide
ucuccaaugaucugucguc

SEQ ID NO: 1796237 - RNA, 19 nt, Artificial Sequence
  Description of Artificial Sequence: Synthetic oligonucleotide
ucagcacgugucuuucugg

SEQ ID NO: 1796238 - RNA, 19 nt, Artificial Sequence
  Description of Artificial Sequence: Synthetic oligonucleotide
acuuguaaccacgguuucc

SEQ ID NO: 1796239 - RNA, 19 nt, Artificial Sequence
  Description of Artificial Sequence: Synthetic oligonucleotide
agcacuagccagcccaggg

SEQ ID NO: 1796240 - RNA, 19 nt, Artificial Sequence
  Description of Artificial Sequence: Synthetic oligonucleotide
aaagaagcuuucucugaaa

SEQ ID NO: 1796241 - RNA, 19 nt, Artificial Sequence
  Description of Artificial Sequence: Synthetic oligonucleotide
uccugggacuucuuuaccc

SEQ ID NO: 1796242 - RNA, 19 nt, Artificial Sequence
  Description of Artificial Sequence: Synthetic oligonucleotide
gaggaugguaggcccaggg

SEQ ID NO: 1796243 - RNA, 19 nt, Artificial Sequence
  Description of Artificial Sequence: Synthetic oligonucleotide
cucggugacagcauagaug

SEQ ID NO: 1796244 - RNA, 19 nt, Artificial Sequence
  Description of Artificial Sequence: Synthetic oligonucleotide
aguugcaaacuuagaauuc

SEQ ID NO: 1796245 - RNA, 19 nt, Artificial Sequence
  Description of Artificial Sequence: Synthetic oligonucleotide
caaguuauaaaaguaaagu

SEQ ID NO: 1796246 - RNA, 19 nt, Artificial Sequence
  Description of Artificial Sequence: Synthetic oligonucleotide
ucauccuaguaccccagga

SEQ ID NO: 1796247 - RNA, 19 nt, Artificial Sequence
  Description of Artificial Sequence: Synthetic oligonucleotide
gucacaagcacacccacca

SEQ ID NO: 1796248 - RNA, 19 nt, Artificial Sequence
  Description of Artificial Sequence: Synthetic oligonucleotide
aaaucuugccagggcaguc

SEQ ID NO: 1796249 - RNA, 19 nt, Artificial Sequence
  Description of Artificial Sequence: Synthetic oligonucleotide
uccucgaucuccugcugcg

SEQ ID NO: 1796250 - RNA, 19 nt, Artificial Sequence
  Description of Artificial Sequence: Synthetic oligonucleotide
aauuccuguccacaagaua

SEQ ID NO: 1796251 - RNA, 19 nt, Artificial Sequence
  Description of Artificial Sequence: Synthetic oligonucleotide
gacgaaaucuugccagggc

SEQ ID NO: 1796252 - RNA, 19 nt, Artificial Sequence
  Description of Artificial Sequence: Synthetic oligonucleotide
ugaacuucugcugaccauc

SEQ ID NO: 1796253 - RNA, 19 nt, Artificial Sequence
  Description of Artificial Sequence: Synthetic oligonucleotide
cuuagggccaacuuuucca

SEQ ID NO: 1796254 - RNA, 19 nt, Artificial Sequence
  Description of Artificial Sequence: Synthetic oligonucleotide
ccagguaaccauaauauuc

SEQ ID NO: 1796255 - RNA, 19 nt, Artificial Sequence
  Description of Artificial Sequence: Synthetic oligonucleotide
guugaggucucgaauucgg

SEQ ID NO: 1796256 - RNA, 19 nt, Artificial Sequence
  Description of Artificial Sequence: Synthetic oligonucleotide
uuccuaccaguucagcucu

SEQ ID NO: 1796257 - RNA, 19 nt, Artificial Sequence
  Description of Artificial Sequence: Synthetic oligonucleotide
ucugucgucuccauuucuc

SEQ ID NO: 1796258 - RNA, 19 nt, Artificial Sequence
  Description of Artificial Sequence: Synthetic oligonucleotide
aguucucugacaccaggca

SEQ ID NO: 1796259 - RNA, 19 nt, Artificial Sequence
  Description of Artificial Sequence: Synthetic oligonucleotide
agggucuucguuccuugac

SEQ ID NO: 1796260 - RNA, 19 nt, Artificial Sequence
  Description of Artificial Sequence: Synthetic oligonucleotide
ucugcauuucgggccaugg

SEQ ID NO: 1796261 - RNA, 19 nt, Artificial Sequence
  Description of Artificial Sequence: Synthetic oligonucleotide
ugacgaaaucuugccaggg

SEQ ID NO: 1796262 - RNA, 19 nt, Artificial Sequence
  Description of Artificial Sequence: Synthetic oligonucleotide
gucuuuugcugcuccaaag

SEQ ID NO: 1796263 - RNA, 19 nt, Artificial Sequence
  Description of Artificial Sequence: Synthetic oligonucleotide
cauccuaguaccccaggag

SEQ ID NO: 1796264 - RNA, 19 nt, Artificial Sequence
  Description of Artificial Sequence: Synthetic oligonucleotide
cuuccuccguacaagcgcc

SEQ ID NO: 1796265 - RNA, 19 nt, Artificial Sequence
  Description of Artificial Sequence: Synthetic oligonucleotide
uagcuaugaggaugguagg

SEQ ID NO: 1796266 - RNA, 19 nt, Artificial Sequence
  Description of Artificial Sequence: Synthetic oligonucleotide
auuuuccuaccaguucagc

SEQ ID NO: 1796267 - RNA, 19 nt, Artificial Sequence
  Description of Artificial Sequence: Synthetic oligonucleotide
aaguacuuguaaccacggu

SEQ ID NO: 1796268 - RNA, 19 nt, Artificial Sequence
  Description of Artificial Sequence: Synthetic oligonucleotide
uugcaaacuuagaauuccu

SEQ ID NO: 1796269 - RNA, 19 nt, Artificial Sequence
  Description of Artificial Sequence: Synthetic oligonucleotide
ucuuucucgaacaguucuc

SEQ ID NO: 1796270 - RNA, 19 nt, Artificial Sequence
  Description of Artificial Sequence: Synthetic oligonucleotide
ugucgucuccauuucucag

SEQ ID NO: 1796271 - RNA, 19 nt, Artificial Sequence
  Description of Artificial Sequence: Synthetic oligonucleotide
gugucuuucugggaggagg

SEQ ID NO: 1796272 - RNA, 19 nt, Artificial Sequence
  Description of Artificial Sequence: Synthetic oligonucleotide
cagggccuuaccaucaagc

SEQ ID NO: 1796273 - RNA, 19 nt, Artificial Sequence
  Description of Artificial Sequence: Synthetic oligonucleotide
ugagaaaggcacagagccu

SEQ ID NO: 1796274 - RNA, 19 nt, Artificial Sequence
  Description of Artificial Sequence: Synthetic oligonucleotide
agacagaugaaggaugaga

SEQ ID NO: 1796275 - RNA, 19 nt, Artificial Sequence
  Description of Artificial Sequence: Synthetic oligonucleotide
ucucugaaacaaguuauaa

SEQ ID NO: 1796276 - RNA, 19 nt, Artificial Sequence
  Description of Artificial Sequence: Synthetic oligonucleotide
aggaugguaggcccagggg

SEQ ID NO: 1796277 - RNA, 19 nt, Artificial Sequence
  Description of Artificial Sequence: Synthetic oligonucleotide
uaccaguucagcucugagu

SEQ ID NO: 1796278 - RNA, 19 nt, Artificial Sequence
  Description of Artificial Sequence: Synthetic oligonucleotide
agcacagcgugccuagcuc

SEQ ID NO: 1796279 - RNA, 19 nt, Artificial Sequence
  Description of Artificial Sequence: Synthetic oligonucleotide
ucgucuccauuucucagcu

SEQ ID NO: 1796280 - RNA, 19 nt, Artificial Sequence
  Description of Artificial Sequence: Synthetic oligonucleotide
auccagguaaccauaauau

SEQ ID NO: 1796281 - RNA, 19 nt, Artificial Sequence
  Description of Artificial Sequence: Synthetic oligonucleotide
uucucugaaacaaguuaua

SEQ ID NO: 1796282 - RNA, 19 nt, Artificial Sequence
  Description of Artificial Sequence: Synthetic oligonucleotide
ucgaucuccugcugcgacg

SEQ ID NO: 1796283 - RNA, 19 nt, Artificial Sequence
  Description of Artificial Sequence: Synthetic oligonucleotide
cucaguacauucagaagca

SEQ ID NO: 1796284 - RNA, 19 nt, Artificial Sequence
  Description of Artificial Sequence: Synthetic oligonucleotide
aggguagcuaugaggaugg

SEQ ID NO: 1796285 - RNA, 19 nt, Artificial Sequence
  Description of Artificial Sequence: Synthetic oligonucleotide
ucaugagcucagcacgugu

SEQ ID NO: 1796286 - RNA, 19 nt, Artificial Sequence
  Description of Artificial Sequence: Synthetic oligonucleotide
cauuuuccuaccaguucag

SEQ ID NO: 1796287 - RNA, 19 nt, Artificial Sequence
  Description of Artificial Sequence: Synthetic oligonucleotide
gucgucuccauuucucagc

SEQ ID NO: 1796288 - RNA, 19 nt, Artificial Sequence
  Description of Artificial Sequence: Synthetic oligonucleotide
aaugaucugucgucuccau

SEQ ID NO: 1796289 - RNA, 19 nt, Artificial Sequence
  Description of Artificial Sequence: Synthetic oligonucleotide
cuugauccggaccucccag

SEQ ID NO: 1796290 - RNA, 19 nt, Artificial Sequence
  Description of Artificial Sequence: Synthetic oligonucleotide
uuagggccaacuuuuccau

SEQ ID NO: 1796291 - RNA, 19 nt, Artificial Sequence
  Description of Artificial Sequence: Synthetic oligonucleotide
cagcacgugucuuucuggg

SEQ ID NO: 1796292 - RNA, 19 nt, Artificial Sequence
  Description of Artificial Sequence: Synthetic oligonucleotide
ggcaacucaguacauucag

SEQ ID NO: 1796293 - RNA, 19 nt, Artificial Sequence
  Description of Artificial Sequence: Synthetic oligonucleotide
ugacucauccuaguacccc

SEQ ID NO: 1796294 - RNA, 19 nt, Artificial Sequence
  Description of Artificial Sequence: Synthetic oligonucleotide
ucaucguugaggucucgaa

SEQ ID NO: 1796295 - RNA, 19 nt, Artificial Sequence
  Description of Artificial Sequence: Synthetic oligonucleotide
aggaccacccaguuccuug

SEQ ID NO: 1796296 - RNA, 19 nt, Artificial Sequence
  Description of Artificial Sequence: Synthetic oligonucleotide
uuccccuaagccagcauuc

SEQ ID NO: 1796297 - RNA, 19 nt, Artificial Sequence
  Description of Artificial Sequence: Synthetic oligonucleotide
cucugaaacaaguuauaaa

SEQ ID NO: 1796298 - RNA, 19 nt, Artificial Sequence
  Description of Artificial Sequence: Synthetic oligonucleotide
cugacucauccuaguaccc

SEQ ID NO: 1796299 - RNA, 19 nt, Artificial Sequence
  Description of Artificial Sequence: Synthetic oligonucleotide
agggccaacuuuuccauaa

SEQ ID NO: 1796300 - RNA, 19 nt, Artificial Sequence
  Description of Artificial Sequence: Synthetic oligonucleotide
agccgcuuggcuucuucac

SEQ ID NO: 1796301 - RNA, 19 nt, Artificial Sequence
  Description of Artificial Sequence: Synthetic oligonucleotide
gacucauccuaguacccca

SEQ ID NO: 1796302 - RNA, 19 nt, Artificial Sequence
  Description of Artificial Sequence: Synthetic oligonucleotide
uugaggucucgaauucgga

SEQ ID NO: 1796303 - RNA, 19 nt, Artificial Sequence
  Description of Artificial Sequence: Synthetic oligonucleotide
ucguugaggucucgaauuc

SEQ ID NO: 1796304 - RNA, 19 nt, Artificial Sequence
  Description of Artificial Sequence: Synthetic oligonucleotide
cuuagaauuccuguccaca

SEQ ID NO: 1796305 - RNA, 19 nt, Artificial Sequence
  Description of Artificial Sequence: Synthetic oligonucleotide
acaucuccagaaaaggaga

SEQ ID NO: 1796306 - RNA, 19 nt, Artificial Sequence
  Description of Artificial Sequence: Synthetic oligonucleotide
ucuagcugagcuugacgaa

SEQ ID NO: 1796307 - RNA, 19 nt, Artificial Sequence
  Description of Artificial Sequence: Synthetic oligonucleotide
auuccccuaagccagcauu

SEQ ID NO: 1796308 - RNA, 19 nt, Artificial Sequence
  Description of Artificial Sequence: Synthetic oligonucleotide
cggaacaugagcaaugaac

SEQ ID NO: 1796309 - RNA, 19 nt, Artificial Sequence
  Description of Artificial Sequence: Synthetic oligonucleotide
uacuuguaaccacgguuuc

SEQ ID NO: 1796310 - RNA, 19 nt, Artificial Sequence
  Description of Artificial Sequence: Synthetic oligonucleotide
gaauucggaauuccccuaa

SEQ ID NO: 1796311 - RNA, 19 nt, Artificial Sequence
  Description of Artificial Sequence: Synthetic oligonucleotide
uccagguaaccauaauauu

SEQ ID NO: 1796312 - RNA, 19 nt, Artificial Sequence
  Description of Artificial Sequence: Synthetic oligonucleotide
agcaagaaagggucuucgu

SEQ ID NO: 1796313 - RNA, 19 nt, Artificial Sequence
  Description of Artificial Sequence: Synthetic oligonucleotide
acaauaacuccaucaucuu

SEQ ID NO: 1796314 - RNA, 19 nt, Artificial Sequence
  Description of Artificial Sequence: Synthetic oligonucleotide
caagauaggagagggagaa

SEQ ID NO: 1796315 - RNA, 19 nt, Artificial Sequence
  Description of Artificial Sequence: Synthetic oligonucleotide
agaucucccagaguccaag

SEQ ID NO: 1796316 - RNA, 19 nt, Artificial Sequence
  Description of Artificial Sequence: Synthetic oligonucleotide
cacgugucuuucugggagg

SEQ ID NO: 1796317 - RNA, 19 nt, Artificial Sequence
  Description of Artificial Sequence: Synthetic oligonucleotide
gcuccaaaguacuuguaac

SEQ ID NO: 1796318 - RNA, 19 nt, Artificial Sequence
  Description of Artificial Sequence: Synthetic oligonucleotide
augagcucagcacgugucu

SEQ ID NO: 1796319 - RNA, 19 nt, Artificial Sequence
  Description of Artificial Sequence: Synthetic oligonucleotide
auuucaucguugaggucuc

SEQ ID NO: 1796320 - RNA, 19 nt, Artificial Sequence
  Description of Artificial Sequence: Synthetic oligonucleotide
gcacgugucuuucugggag

SEQ ID NO: 1796321 - RNA, 19 nt, Artificial Sequence
  Description of Artificial Sequence: Synthetic oligonucleotide
uggcauauuucuggagcag

SEQ ID NO: 1796322 - RNA, 19 nt, Artificial Sequence
  Description of Artificial Sequence: Synthetic oligonucleotide
auuucucagcuuugggcaa

SEQ ID NO: 1796323 - RNA, 19 nt, Artificial Sequence
  Description of Artificial Sequence: Synthetic oligonucleotide
gaucucuccaaugaucugu

SEQ ID NO: 1796324 - RNA, 19 nt, Artificial Sequence
  Description of Artificial Sequence: Synthetic oligonucleotide
gucgaucgccuucaugagc

SEQ ID NO: 1796325 - RNA, 19 nt, Artificial Sequence
  Description of Artificial Sequence: Synthetic oligonucleotide
aagucuuuugcugcuccaa

SEQ ID NO: 1796326 - RNA, 19 nt, Artificial Sequence
  Description of Artificial Sequence: Synthetic oligonucleotide
aagggucuucguuccuuga

SEQ ID NO: 1796327 - RNA, 19 nt, Artificial Sequence
  Description of Artificial Sequence: Synthetic oligonucleotide
caccggaacaugagcaaug

SEQ ID NO: 1796328 - RNA, 19 nt, Artificial Sequence
  Description of Artificial Sequence: Synthetic oligonucleotide
aagaagggcucugacucau

SEQ ID NO: 1796329 - RNA, 19 nt, Artificial Sequence
  Description of Artificial Sequence: Synthetic oligonucleotide
uucagcucugaguuucuuu

SEQ ID NO: 1796330 - RNA, 19 nt, Artificial Sequence
  Description of Artificial Sequence: Synthetic oligonucleotide
ucuuuacccucaugaucca

SEQ ID NO: 1796331 - RNA, 19 nt, Artificial Sequence
  Description of Artificial Sequence: Synthetic oligonucleotide
aacaguucucugacaccag

SEQ ID NO: 1796332 - RNA, 19 nt, Artificial Sequence
  Description of Artificial Sequence: Synthetic oligonucleotide
cucauccuaguaccccagg

SEQ ID NO: 1796333 - RNA, 19 nt, Artificial Sequence
  Description of Artificial Sequence: Synthetic oligonucleotide
gaaggaugagaaaggcaca

SEQ ID NO: 1796334 - RNA, 19 nt, Artificial Sequence
  Description of Artificial Sequence: Synthetic oligonucleotide
accacgguuuccugggacu

SEQ ID NO: 1796335 - RNA, 19 nt, Artificial Sequence
  Description of Artificial Sequence: Synthetic oligonucleotide
cuaccaguucagcucugag

SEQ ID NO: 1796336 - RNA, 19 nt, Artificial Sequence
  Description of Artificial Sequence: Synthetic oligonucleotide
uccuguccacaagauagga

SEQ ID NO: 1796337 - RNA, 19 nt, Artificial Sequence
  Description of Artificial Sequence: Synthetic oligonucleotide
agcuuugggcaacucagua

SEQ ID NO: 1796338 - RNA, 19 nt, Artificial Sequence
  Description of Artificial Sequence: Synthetic oligonucleotide
uucaucguugaggucucga

SEQ ID NO: 1796339 - RNA, 19 nt, Artificial Sequence
  Description of Artificial Sequence: Synthetic oligonucleotide
uagcugagcuugacgaaau

SEQ ID NO: 1796340 - RNA, 19 nt, Artificial Sequence
  Description of Artificial Sequence: Synthetic oligonucleotide
ucuucuagcugagcuugac

SEQ ID NO: 1796341 - RNA, 19 nt, Artificial Sequence
  Description of Artificial Sequence: Synthetic oligonucleotide
gcuaugaggaugguaggcc

SEQ ID NO: 1796342 - RNA, 19 nt, Artificial Sequence
  Description of Artificial Sequence: Synthetic oligonucleotide
guaaaguugcaaacuuaga

SEQ ID NO: 1796343 - RNA, 19 nt, Artificial Sequence
  Description of Artificial Sequence: Synthetic oligonucleotide
augaacuucugcugaccau

SEQ ID NO: 1796344 - RNA, 19 nt, Artificial Sequence
  Description of Artificial Sequence: Synthetic oligonucleotide
agccagcucacaucuccag

SEQ ID NO: 1796345 - RNA, 19 nt, Artificial Sequence
  Description of Artificial Sequence: Synthetic oligonucleotide
uuguaaccacgguuuccug

SEQ ID NO: 1796346 - RNA, 19 nt, Artificial Sequence
  Description of Artificial Sequence: Synthetic oligonucleotide
accaggcaagucuuuugcu

SEQ ID NO: 1796347 - RNA, 19 nt, Artificial Sequence
  Description of Artificial Sequence: Synthetic oligonucleotide
cuagcucucccggaccagg

SEQ ID NO: 1796348 - RNA, 19 nt, Artificial Sequence
  Description of Artificial Sequence: Synthetic oligonucleotide
agguaaccauaauauucaa

SEQ ID NO: 1796349 - RNA, 19 nt, Artificial Sequence
  Description of Artificial Sequence: Synthetic oligonucleotide
ugccuagcucucccggacc

SEQ ID NO: 1796350 - RNA, 19 nt, Artificial Sequence
  Description of Artificial Sequence: Synthetic oligonucleotide
gucucgaauucggaauucc

SEQ ID NO: 1796351 - RNA, 19 nt, Artificial Sequence
  Description of Artificial Sequence: Synthetic oligonucleotide
aggucucgaauucggaauu

SEQ ID NO: 1796352 - RNA, 19 nt, Artificial Sequence
  Description of Artificial Sequence: Synthetic oligonucleotide
uuugggcaacucaguacau

SEQ ID NO: 1796353 - RNA, 19 nt, Artificial Sequence
  Description of Artificial Sequence: Synthetic oligonucleotide
ccaaaguacuuguaaccac

SEQ ID NO: 1796354 - RNA, 19 nt, Artificial Sequence
  Description of Artificial Sequence: Synthetic oligonucleotide
uugauccggaccucccagu

SEQ ID NO: 1796355 - RNA, 19 nt, Artificial Sequence
  Description of Artificial Sequence: Synthetic oligonucleotide
gaggucucgaauucggaau

SEQ ID NO: 1796356 - RNA, 19 nt, Artificial Sequence
  Description of Artificial Sequence: Synthetic oligonucleotide
cacccaguuccuugauccg

SEQ ID NO: 1796357 - RNA, 19 nt, Artificial Sequence
  Description of Artificial Sequence: Synthetic oligonucleotide
ccauaauauucaaagucga

SEQ ID NO: 1796358 - RNA, 19 nt, Artificial Sequence
  Description of Artificial Sequence: Synthetic oligonucleotide
acagggccuuaccaucaag

SEQ ID NO: 1796359 - RNA, 19 nt, Artificial Sequence
  Description of Artificial Sequence: Synthetic oligonucleotide
gacggcaccggaacaugag

SEQ ID NO: 1796360 - RNA, 19 nt, Artificial Sequence
  Description of Artificial Sequence: Synthetic oligonucleotide
gcucacaucuccagaaaag

SEQ ID NO: 1796361 - RNA, 19 nt, Artificial Sequence
  Description of Artificial Sequence: Synthetic oligonucleotide
cuucguuccuugacuuuuc

SEQ ID NO: 1796362 - RNA, 19 nt, Artificial Sequence
  Description of Artificial Sequence: Synthetic oligonucleotide
guacauucagaagcaagaa

SEQ ID NO: 1796363 - RNA, 19 nt, Artificial Sequence
  Description of Artificial Sequence: Synthetic oligonucleotide
cuccucggugacagcauag

SEQ ID NO: 1796364 - RNA, 19 nt, Artificial Sequence
  Description of Artificial Sequence: Synthetic oligonucleotide
cucaugauccagcaucuua

SEQ ID NO: 1796365 - RNA, 19 nt, Artificial Sequence
  Description of Artificial Sequence: Synthetic oligonucleotide
uacaagcgccuccucgauc

SEQ ID NO: 1796366 - RNA, 19 nt, Artificial Sequence
  Description of Artificial Sequence: Synthetic oligonucleotide
cccaggguagcuaugagga

SEQ ID NO: 1796367 - RNA, 19 nt, Artificial Sequence
  Description of Artificial Sequence: Synthetic oligonucleotide
cucucccggaccaggcggg

SEQ ID NO: 1796368 - RNA, 19 nt, Artificial Sequence
  Description of Artificial Sequence: Synthetic oligonucleotide
cuucacucugugccugcag

SEQ ID NO: 1796369 - RNA, 19 nt, Artificial Sequence
  Description of Artificial Sequence: Synthetic oligonucleotide
cugaaucugagcaacuuuu

SEQ ID NO: 1796370 - RNA, 19 nt, Artificial Sequence
  Description of Artificial Sequence: Synthetic oligonucleotide
uccucggugacagcauaga

SEQ ID NO: 1796371 - RNA, 19 nt, Artificial Sequence
  Description of Artificial Sequence: Synthetic oligonucleotide
auuucgggccauggugccg

SEQ ID NO: 1796372 - RNA, 19 nt, Artificial Sequence
  Description of Artificial Sequence: Synthetic oligonucleotide
uaccaucaagccagcucac

SEQ ID NO: 1796373 - RNA, 19 nt, Artificial Sequence
  Description of Artificial Sequence: Synthetic oligonucleotide
aaggagagagacagaugaa

SEQ ID NO: 1796374 - RNA, 19 nt, Artificial Sequence
  Description of Artificial Sequence: Synthetic oligonucleotide
cuuuacccucaugauccag

SEQ ID NO: 1796375 - RNA, 19 nt, Artificial Sequence
  Description of Artificial Sequence: Synthetic oligonucleotide
agcacgugucuuucuggga

SEQ ID NO: 1796376 - RNA, 19 nt, Artificial Sequence
  Description of Artificial Sequence: Synthetic oligonucleotide
aucuuagggccaacuuuuc

SEQ ID NO: 1796377 - RNA, 19 nt, Artificial Sequence
  Description of Artificial Sequence: Synthetic oligonucleotide
cuaguaccccaggagccgc

SEQ ID NO: 1796378 - RNA, 19 nt, Artificial Sequence
  Description of Artificial Sequence: Synthetic oligonucleotide
cuuguaaccacgguuuccu

SEQ ID NO: 1796379 - RNA, 19 nt, Artificial Sequence
  Description of Artificial Sequence: Synthetic oligonucleotide
uaaccacgguuuccuggga

SEQ ID NO: 1796380 - RNA, 19 nt, Artificial Sequence
  Description of Artificial Sequence: Synthetic oligonucleotide
uuucaucguugaggucucg

SEQ ID NO: 1796381 - RNA, 19 nt, Artificial Sequence
  Description of Artificial Sequence: Synthetic oligonucleotide
accggaacaugagcaauga

SEQ ID NO: 1796382 - RNA, 19 nt, Artificial Sequence
  Description of Artificial Sequence: Synthetic oligonucleotide
agcacacccaccagaucuc

SEQ ID NO: 1796383 - RNA, 19 nt, Artificial Sequence
  Description of Artificial Sequence: Synthetic oligonucleotide
agccgagccucucucucug

SEQ ID NO: 1796384 - RNA, 19 nt, Artificial Sequence
  Description of Artificial Sequence: Synthetic oligonucleotide
gaguccaagaagggcucug

SEQ ID NO: 1796385 - RNA, 19 nt, Artificial Sequence
  Description of Artificial Sequence: Synthetic oligonucleotide
guacuuguaaccacgguuu

SEQ ID NO: 1796386 - RNA, 19 nt, Artificial Sequence
  Description of Artificial Sequence: Synthetic oligonucleotide
caugagcaaugaacuucug

SEQ ID NO: 1796387 - RNA, 19 nt, Artificial Sequence
  Description of Artificial Sequence: Synthetic oligonucleotide
guccaagaagggcucugac

SEQ ID NO: 1796388 - RNA, 19 nt, Artificial Sequence
  Description of Artificial Sequence: Synthetic oligonucleotide
gaccaggcgggccgacgcg

SEQ ID NO: 1796389 - RNA, 19 nt, Artificial Sequence
  Description of Artificial Sequence: Synthetic oligonucleotide
uugccagccgagccucucu

SEQ ID NO: 1796390 - RNA, 19 nt, Artificial Sequence
  Description of Artificial Sequence: Synthetic oligonucleotide
uccagcaucuuagggccaa

SEQ ID NO: 1796391 - RNA, 19 nt, Artificial Sequence
  Description of Artificial Sequence: Synthetic oligonucleotide
ucccaguggccuuucucuc

SEQ ID NO: 1796392 - RNA, 19 nt, Artificial Sequence
  Description of Artificial Sequence: Synthetic oligonucleotide
aagauaggagagggagaaa

SEQ ID NO: 1796393 - RNA, 19 nt, Artificial Sequence
  Description of Artificial Sequence: Synthetic oligonucleotide
cuccagaaaaggagagaga

SEQ ID NO: 1796394 - RNA, 19 nt, Artificial Sequence
  Description of Artificial Sequence: Synthetic oligonucleotide
acucauccuaguaccccag

SEQ ID NO: 1796395 - RNA, 19 nt, Artificial Sequence
  Description of Artificial Sequence: Synthetic oligonucleotide
caucuucauccagguaacc

SEQ ID NO: 1796396 - RNA, 19 nt, Artificial Sequence
  Description of Artificial Sequence: Synthetic oligonucleotide
cucuccaaugaucugucgu

SEQ ID NO: 1796397 - RNA, 19 nt, Artificial Sequence
  Description of Artificial Sequence: Synthetic oligonucleotide
caagucuuuugcugcucca

SEQ ID NO: 1796398 - RNA, 19 nt, Artificial Sequence
  Description of Artificial Sequence: Synthetic oligonucleotide
uccccuaagccagcauucu

SEQ ID NO: 1796399 - RNA, 19 nt, Artificial Sequence
  Description of Artificial Sequence: Synthetic oligonucleotide
augaucugucgucuccauu

SEQ ID NO: 1796400 - RNA, 19 nt, Artificial Sequence
  Description of Artificial Sequence: Synthetic oligonucleotide
gugccuagcucucccggac

SEQ ID NO: 1796401 - RNA, 19 nt, Artificial Sequence
  Description of Artificial Sequence: Synthetic oligonucleotide
cgaaaucuugccagggcag

SEQ ID NO: 1796402 - RNA, 19 nt, Artificial Sequence
  Description of Artificial Sequence: Synthetic oligonucleotide
gcugcgacggcaccggaac

SEQ ID NO: 1796403 - RNA, 19 nt, Artificial Sequence
  Description of Artificial Sequence: Synthetic oligonucleotide
ggcacaauaacuccaucau

SEQ ID NO: 1796404 - RNA, 19 nt, Artificial Sequence
  Description of Artificial Sequence: Synthetic oligonucleotide
gggguucuuucucgaacag

SEQ ID NO: 1796405 - RNA, 19 nt, Artificial Sequence
  Description of Artificial Sequence: Synthetic oligonucleotide
gaaaucuugccagggcagu

SEQ ID NO: 1796406 - RNA, 19 nt, Artificial Sequence
  Description of Artificial Sequence: Synthetic oligonucleotide
ccguacaagcgccuccucg

SEQ ID NO: 1796407 - RNA, 19 nt, Artificial Sequence
  Description of Artificial Sequence: Synthetic oligonucleotide
cugcugaccaucuuccccu

SEQ ID NO: 1796408 - RNA, 19 nt, Artificial Sequence
  Description of Artificial Sequence: Synthetic oligonucleotide
gaauuccccuaagccagca

SEQ ID NO: 1796409 - RNA, 19 nt, Artificial Sequence
  Description of Artificial Sequence: Synthetic oligonucleotide
uccuaccaguucagcucug

SEQ ID NO: 1796410 - RNA, 19 nt, Artificial Sequence
  Description of Artificial Sequence: Synthetic oligonucleotide
cugagcuugacgaaaucuu

SEQ ID NO: 1796411 - RNA, 19 nt, Artificial Sequence
  Description of Artificial Sequence: Synthetic oligonucleotide
uugggcaacucaguacauu

SEQ ID NO: 1796412 - RNA, 19 nt, Artificial Sequence
  Description of Artificial Sequence: Synthetic oligonucleotide
ucucucuuagcagcuuguu

SEQ ID NO: 1796413 - RNA, 19 nt, Artificial Sequence
  Description of Artificial Sequence: Synthetic oligonucleotide
gguaaccauaauauucaaa

SEQ ID NO: 1796414 - RNA, 19 nt, Artificial Sequence
  Description of Artificial Sequence: Synthetic oligonucleotide
cccaccagaucucccagag

SEQ ID NO: 1796415 - RNA, 19 nt, Artificial Sequence
  Description of Artificial Sequence: Synthetic oligonucleotide
gggccuuaccaucaagcca

SEQ ID NO: 1796416 - RNA, 19 nt, Artificial Sequence
  Description of Artificial Sequence: Synthetic oligonucleotide
cucucuuagcagcuuguua

SEQ ID NO: 1796417 - RNA, 19 nt, Artificial Sequence
  Description of Artificial Sequence: Synthetic oligonucleotide
cuuccccugccuucuccug

SEQ ID NO: 1796418 - RNA, 19 nt, Artificial Sequence
  Description of Artificial Sequence: Synthetic oligonucleotide
cacagcgugccuagcucuc

SEQ ID NO: 1796419 - RNA, 19 nt, Artificial Sequence
  Description of Artificial Sequence: Synthetic oligonucleotide
ccuaguaccccaggagccg

SEQ ID NO: 1796420 - RNA, 19 nt, Artificial Sequence
  Description of Artificial Sequence: Synthetic oligonucleotide
uacccucaugauccagcau

SEQ ID NO: 1796421 - RNA, 19 nt, Artificial Sequence
  Description of Artificial Sequence: Synthetic oligonucleotide
cccuaagccagcauucuga

SEQ ID NO: 1796422 - RNA, 19 nt, Artificial Sequence
  Description of Artificial Sequence: Synthetic oligonucleotide
cucgaacaguucucugaca

SEQ ID NO: 1796423 - RNA, 19 nt, Artificial Sequence
  Description of Artificial Sequence: Synthetic oligonucleotide
ggucucacuggcauauuuc

SEQ ID NO: 1796424 - RNA, 19 nt, Artificial Sequence
  Description of Artificial Sequence: Synthetic oligonucleotide
cuuucucgaacaguucucu

SEQ ID NO: 1796425 - RNA, 19 nt, Artificial Sequence
  Description of Artificial Sequence: Synthetic oligonucleotide
agaguccaagaagggcucu

SEQ ID NO: 1796426 - RNA, 19 nt, Artificial Sequence
  Description of Artificial Sequence: Synthetic oligonucleotide
uagggccaacuuuuccaua

SEQ ID NO: 1796427 - RNA, 19 nt, Artificial Sequence
  Description of Artificial Sequence: Synthetic oligonucleotide
cagacuccuccucggugac

SEQ ID NO: 1796428 - RNA, 19 nt, Artificial Sequence
  Description of Artificial Sequence: Synthetic oligonucleotide
acccaccagaucucccaga

SEQ ID NO: 1796429 - RNA, 19 nt, Artificial Sequence
  Description of Artificial Sequence: Synthetic oligonucleotide
ggaccaggcgggccgacgc

SEQ ID NO: 1796430 - RNA, 19 nt, Artificial Sequence
  Description of Artificial Sequence: Synthetic oligonucleotide
auggugccggcgagggcgc

SEQ ID NO: 1796431 - RNA, 19 nt, Artificial Sequence
  Description of Artificial Sequence: Synthetic oligonucleotide
gaucuccugcugcgacggc

SEQ ID NO: 1796432 - RNA, 19 nt, Artificial Sequence
  Description of Artificial Sequence: Synthetic oligonucleotide
cgaacaguucucugacacc

SEQ ID NO: 1796433 - RNA, 19 nt, Artificial Sequence
  Description of Artificial Sequence: Synthetic oligonucleotide
cccagcacuagccagccca

SEQ ID NO: 1796434 - RNA, 19 nt, Artificial Sequence
  Description of Artificial Sequence: Synthetic oligonucleotide
gaauuccuguccacaagau

SEQ ID NO: 1796435 - RNA, 19 nt, Artificial Sequence
  Description of Artificial Sequence: Synthetic oligonucleotide
gaacuucugcugaccaucu

SEQ ID NO: 1796436 - RNA, 19 nt, Artificial Sequence
  Description of Artificial Sequence: Synthetic oligonucleotide
ccagaaaaggagagagaca

SEQ ID NO: 1796437 - RNA, 19 nt, Artificial Sequence
  Description of Artificial Sequence: Synthetic oligonucleotide
cacuagccagcccagggua

SEQ ID NO: 1796438 - RNA, 19 nt, Artificial Sequence
  Description of Artificial Sequence: Synthetic oligonucleotide
uccguacaagcgccuccuc

SEQ ID NO: 1796439 - RNA, 19 nt, Artificial Sequence
  Description of Artificial Sequence: Synthetic oligonucleotide
guaccccaggagccgcuug

SEQ ID NO: 1796440 - RNA, 19 nt, Artificial Sequence
  Description of Artificial Sequence: Synthetic oligonucleotide
gcgugccuagcucucccgg

SEQ ID NO: 1796441 - RNA, 19 nt, Artificial Sequence
  Description of Artificial Sequence: Synthetic oligonucleotide
uccuccguacaagcgccuc

SEQ ID NO: 1796442 - RNA, 19 nt, Artificial Sequence
  Description of Artificial Sequence: Synthetic oligonucleotide
ggaccacccaguuccuuga

SEQ ID NO: 1796443 - RNA, 19 nt, Artificial Sequence
  Description of Artificial Sequence: Synthetic oligonucleotide
caucguugaggucucgaau

SEQ ID NO: 1796444 - RNA, 19 nt, Artificial Sequence
  Description of Artificial Sequence: Synthetic oligonucleotide
gcaucuuagggccaacuuu

SEQ ID NO: 1796445 - RNA, 19 nt, Artificial Sequence
  Description of Artificial Sequence: Synthetic oligonucleotide
ccgcuuggcuucuucacuc

SEQ ID NO: 1796446 - RNA, 19 nt, Artificial Sequence
  Description of Artificial Sequence: Synthetic oligonucleotide
gcaacucaguacauucaga

SEQ ID NO: 1796447 - RNA, 19 nt, Artificial Sequence
  Description of Artificial Sequence: Synthetic oligonucleotide
cagcacuagccagcccagg

SEQ ID NO: 1796448 - RNA, 19 nt, Artificial Sequence
  Description of Artificial Sequence: Synthetic oligonucleotide
ccuccguacaagcgccucc

SEQ ID NO: 1796449 - RNA, 19 nt, Artificial Sequence
  Description of Artificial Sequence: Synthetic oligonucleotide
ggaauuccccuaagccagc

SEQ ID NO: 1796450 - RNA, 19 nt, Artificial Sequence
  Description of Artificial Sequence: Synthetic oligonucleotide
gggucuucguuccuugacu

SEQ ID NO: 1796451 - RNA, 19 nt, Artificial Sequence
  Description of Artificial Sequence: Synthetic oligonucleotide
gcugagcuugacgaaaucu

SEQ ID NO: 1796452 - RNA, 19 nt, Artificial Sequence
  Description of Artificial Sequence: Synthetic oligonucleotide
ccagcacuagccagcccag

SEQ ID NO: 1796453 - RNA, 19 nt, Artificial Sequence
  Description of Artificial Sequence: Synthetic oligonucleotide
gccgcgccgcagcacagcg

SEQ ID NO: 1796454 - RNA, 19 nt, Artificial Sequence
  Description of Artificial Sequence: Synthetic oligonucleotide
ggcaccggaacaugagcaa

SEQ ID NO: 1796455 - RNA, 19 nt, Artificial Sequence
  Description of Artificial Sequence: Synthetic oligonucleotide
cuugccagccgagccucuc

SEQ ID NO: 1796456 - RNA, 19 nt, Artificial Sequence
  Description of Artificial Sequence: Synthetic oligonucleotide
ggcgagggcgccccggcgc

SEQ ID NO: 1796457 - RNA, 19 nt, Artificial Sequence
  Description of Artificial Sequence: Synthetic oligonucleotide
cguugaggucucgaauucg

SEQ ID NO: 1796458 - RNA, 19 nt, Artificial Sequence
  Description of Artificial Sequence: Synthetic oligonucleotide
cguacaagcgccuccucga

SEQ ID NO: 1796459 - RNA, 19 nt, Artificial Sequence
  Description of Artificial Sequence: Synthetic oligonucleotide
ucucccggaccaggcgggc

SEQ ID NO: 1796460 - RNA, 19 nt, Artificial Sequence
  Description of Artificial Sequence: Synthetic oligonucleotide
cagagccucccagcacuag

SEQ ID NO: 1796461 - RNA, 19 nt, Artificial Sequence
  Description of Artificial Sequence: Synthetic oligonucleotide
gggcucugacucauccuag

SEQ ID NO: 1796462 - RNA, 19 nt, Artificial Sequence
  Description of Artificial Sequence: Synthetic oligonucleotide
ggacagggccuuaccauca

SEQ ID NO: 1796463 - RNA, 19 nt, Artificial Sequence
  Description of Artificial Sequence: Synthetic oligonucleotide
cuccaaugaucugucgucu

SEQ ID NO: 1796464 - RNA, 19 nt, Artificial Sequence
  Description of Artificial Sequence: Synthetic oligonucleotide
ggucucgaauucggaauuc

SEQ ID NO: 1796465 - RNA, 19 nt, Artificial Sequence
  Description of Artificial Sequence: Synthetic oligonucleotide
gacaccaggcaagucuuuu

SEQ ID NO: 1796466 - RNA, 19 nt, Artificial Sequence
  Description of Artificial Sequence: Synthetic oligonucleotide
caucuuccccugccuucuc

SEQ ID NO: 1796467 - RNA, 19 nt, Artificial Sequence
  Description of Artificial Sequence: Synthetic oligonucleotide
gcucugacucauccuagua

SEQ ID NO: 1796468 - RNA, 19 nt, Artificial Sequence
  Description of Artificial Sequence: Synthetic oligonucleotide
gccuagcucucccggacca

SEQ ID NO: 1796469 - RNA, 19 nt, Artificial Sequence
  Description of Artificial Sequence: Synthetic oligonucleotide
ggagggguucuuucucgaa

SEQ ID NO: 1796470 - RNA, 19 nt, Artificial Sequence
  Description of Artificial Sequence: Synthetic oligonucleotide
ggucuucguuccuugacuu

SEQ ID NO: 1796471 - RNA, 19 nt, Artificial Sequence
  Description of Artificial Sequence: Synthetic oligonucleotide
uuucugcauuucgggccau

SEQ ID NO: 1796472 - RNA, 19 nt, Artificial Sequence
  Description of Artificial Sequence: Synthetic oligonucleotide
ccccuaagccagcauucug

SEQ ID NO: 1796473 - RNA, 19 nt, Artificial Sequence
  Description of Artificial Sequence: Synthetic oligonucleotide
guacaagcgccuccucgau

SEQ ID NO: 1796474 - RNA, 19 nt, Artificial Sequence
  Description of Artificial Sequence: Synthetic oligonucleotide
ccagccgagccucucucuc

SEQ ID NO: 1796475 - RNA, 19 nt, Artificial Sequence
  Description of Artificial Sequence: Synthetic oligonucleotide
ccaguuccuugauccggac

SEQ ID NO: 1796476 - RNA, 19 nt, Artificial Sequence
  Description of Artificial Sequence: Synthetic oligonucleotide
cgcagcacagcgugccuag

SEQ ID NO: 1796477 - RNA, 19 nt, Artificial Sequence
  Description of Artificial Sequence: Synthetic oligonucleotide
cagcuuugggcaacucagu

SEQ ID NO: 1796478 - RNA, 19 nt, Artificial Sequence
  Description of Artificial Sequence: Synthetic oligonucleotide
cagcacagcgugccuagcu

SEQ ID NO: 1796479 - RNA, 19 nt, Artificial Sequence
  Description of Artificial Sequence: Synthetic oligonucleotide
caagcgccuccucgaucuc

SEQ ID NO: 1796480 - RNA, 19 nt, Artificial Sequence
  Description of Artificial Sequence: Synthetic oligonucleotide
cagggucucacuggcauau

SEQ ID NO: 1796481 - RNA, 19 nt, Artificial Sequence
  Description of Artificial Sequence: Synthetic oligonucleotide
ggcucugacucauccuagu

SEQ ID NO: 1796482 - RNA, 19 nt, Artificial Sequence
  Description of Artificial Sequence: Synthetic oligonucleotide
gcacagcgugccuagcucu

SEQ ID NO: 1796483 - RNA, 19 nt, Artificial Sequence
  Description of Artificial Sequence: Synthetic oligonucleotide
cugcgacggcaccggaaca

SEQ ID NO: 1796484 - RNA, 19 nt, Artificial Sequence
  Description of Artificial Sequence: Synthetic oligonucleotide
gugccggcgagggcgcccc

SEQ ID NO: 1796485 - RNA, 19 nt, Artificial Sequence
  Description of Artificial Sequence: Synthetic oligonucleotide
ccugggacuucuuuacccu

SEQ ID NO: 1796486 - RNA, 19 nt, Artificial Sequence
  Description of Artificial Sequence: Synthetic oligonucleotide
cuccguacaagcgccuccu

SEQ ID NO: 1796487 - RNA, 19 nt, Artificial Sequence
  Description of Artificial Sequence: Synthetic oligonucleotide
gcacuagccagcccagggu

SEQ ID NO: 1796488 - RNA, 19 nt, Artificial Sequence
  Description of Artificial Sequence: Synthetic oligonucleotide
acagagccucccagcacua

SEQ ID NO: 1796489 - RNA, 19 nt, Artificial Sequence
  Description of Artificial Sequence: Synthetic oligonucleotide
gccgcuuggcuucuucacu

SEQ ID NO: 1796490 - RNA, 19 nt, Artificial Sequence
  Description of Artificial Sequence: Synthetic oligonucleotide
gcgacggcaccggaacaug

SEQ ID NO: 1796491 - RNA, 19 nt, Artificial Sequence
  Description of Artificial Sequence: Synthetic oligonucleotide
gggucucacuggcauauuu

SEQ ID NO: 1796492 - RNA, 19 nt, Artificial Sequence
  Description of Artificial Sequence: Synthetic oligonucleotide
gcgagggcgccccggcgcc

SEQ ID NO: 1796493 - RNA, 19 nt, Artificial Sequence
  Description of Artificial Sequence: Synthetic oligonucleotide
gaccacccaguuccuugau

SEQ ID NO: 1796494 - RNA, 19 nt, Artificial Sequence
  Description of Artificial Sequence: Synthetic oligonucleotide
ggguucuuucucgaacagu

SEQ ID NO: 1796495 - RNA, 19 nt, Artificial Sequence
  Description of Artificial Sequence: Synthetic oligonucleotide
cagccgagccucucucucu

SEQ ID NO: 1796496 - RNA, 19 nt, Artificial Sequence
  Description of Artificial Sequence: Synthetic oligonucleotide
aggcgggccgacgcgggaa

SEQ ID NO: 1796497 - RNA, 19 nt, Artificial Sequence
  Description of Artificial Sequence: Synthetic oligonucleotide
ccuagcucucccggaccag

SEQ ID NO: 1796498 - RNA, 19 nt, Artificial Sequence
  Description of Artificial Sequence: Synthetic oligonucleotide
ggcgggccgacgcgggaac

SEQ ID NO: 1796499 - RNA, 19 nt, Artificial Sequence
  Description of Artificial Sequence: Synthetic oligonucleotide
cgaauucggaauuccccua

SEQ ID NO: 1796500 - RNA, 19 nt, Artificial Sequence
  Description of Artificial Sequence: Synthetic oligonucleotide
gaccucccaguggccuuuc

SEQ ID NO: 1796501 - RNA, 19 nt, Artificial Sequence
  Description of Artificial Sequence: Synthetic oligonucleotide
gccuuaccaucaagccagc

SEQ ID NO: 1796502 - RNA, 19 nt, Artificial Sequence
  Description of Artificial Sequence: Synthetic oligonucleotide
agggucucacuggcauauu

SEQ ID NO: 1796503 - RNA, 19 nt, Artificial Sequence
  Description of Artificial Sequence: Synthetic oligonucleotide
cgacgcgggaacggaaaac

SEQ ID NO: 1796504 - RNA, 19 nt, Artificial Sequence
  Description of Artificial Sequence: Synthetic oligonucleotide
gccgacgcgggaacggaaa

SEQ ID NO: 1796505 - RNA, 19 nt, Artificial Sequence
  Description of Artificial Sequence: Synthetic oligonucleotide
cgugccuagcucucccgga

SEQ ID NO: 1796506 - RNA, 19 nt, Artificial Sequence
  Description of Artificial Sequence: Synthetic oligonucleotide
caguggccuuucucucuua

SEQ ID NO: 1796507 - RNA, 19 nt, Artificial Sequence
  Description of Artificial Sequence: Synthetic oligonucleotide
ccggcgagggcgccccggc

SEQ ID NO: 1796508 - RNA, 19 nt, Artificial Sequence
  Description of Artificial Sequence: Synthetic oligonucleotide
ccagcaucuuagggccaac

SEQ ID NO: 1796509 - RNA, 19 nt, Artificial Sequence
  Description of Artificial Sequence: Synthetic oligonucleotide
ccggaacaugagcaaugaa

SEQ ID NO: 1796510 - RNA, 19 nt, Artificial Sequence
  Description of Artificial Sequence: Synthetic oligonucleotide
gggccaacuuuuccauaau

SEQ ID NO: 1796511 - RNA, 19 nt, Artificial Sequence
  Description of Artificial Sequence: Synthetic oligonucleotide
gcaccggaacaugagcaau

SEQ ID NO: 1796512 - RNA, 19 nt, Artificial Sequence
  Description of Artificial Sequence: Synthetic oligonucleotide
cgacggcaccggaacauga

SEQ ID NO: 1796513 - RNA, 19 nt, Artificial Sequence
  Description of Artificial Sequence: Synthetic oligonucleotide
gccggcgagggcgccccgg

SEQ ID NO: 1796514 - RNA, 19 nt, Artificial Sequence
  Description of Artificial Sequence: Synthetic oligonucleotide
gggccgacgcgggaacgga

SEQ ID NO: 1796515 - RNA, 19 nt, Artificial Sequence
  Description of Artificial Sequence: Synthetic oligonucleotide
ccgacgcgggaacggaaaa

SEQ ID NO: 1796516 - RNA, 19 nt, Artificial Sequence
  Description of Artificial Sequence: Synthetic oligonucleotide
gccagccgagccucucucu

SEQ ID NO: 1796517 - RNA, 19 nt, Artificial Sequence
  Description of Artificial Sequence: Synthetic oligonucleotide
cgaucgccuucaugagcuc

SEQ ID NO: 1796518 - RNA, 19 nt, Artificial Sequence
  Description of Artificial Sequence: Synthetic oligonucleotide
ccgagccucucucucugcu

SEQ ID NO: 1796519 - RNA, 19 nt, Artificial Sequence
  Description of Artificial Sequence: Synthetic oligonucleotide
ccaggguagcuaugaggau

SEQ ID NO: 1796520 - RNA, 19 nt, Artificial Sequence
  Description of Artificial Sequence: Synthetic oligonucleotide
ggccgacgcgggaacggaa

SEQ ID NO: 1796521 - RNA, 19 nt, Artificial Sequence
  Description of Artificial Sequence: Synthetic oligonucleotide
ccaccagaucucccagagu

SEQ ID NO: 1796522 - RNA, 19 nt, Artificial Sequence
  Description of Artificial Sequence: Synthetic oligonucleotide
gccgcagcacagcgugccu

SEQ ID NO: 1796523 - RNA, 19 nt, Artificial Sequence
  Description of Artificial Sequence: Synthetic oligonucleotide
cggcgagggcgccccggcg

SEQ ID NO: 1796524 - RNA, 19 nt, Artificial Sequence
  Description of Artificial Sequence: Synthetic oligonucleotide
gcgccgcgccgcagcacag

SEQ ID NO: 1796525 - RNA, 19 nt, Artificial Sequence
  Description of Artificial Sequence: Synthetic oligonucleotide
ccggaccucccaguggccu

SEQ ID NO: 1796526 - RNA, 19 nt, Artificial Sequence
  Description of Artificial Sequence: Synthetic oligonucleotide
ccgcagcacagcgugccua

SEQ ID NO: 1796527 - RNA, 19 nt, Artificial Sequence
  Description of Artificial Sequence: Synthetic oligonucleotide
ccacgguuuccugggacuu

SEQ ID NO: 1796528 - RNA, 19 nt, Artificial Sequence
  Description of Artificial Sequence: Synthetic oligonucleotide
ccggaccaggcgggccgac

SEQ ID NO: 1796529 - RNA, 19 nt, Artificial Sequence
  Description of Artificial Sequence: Synthetic oligonucleotide
ccucaugauccagcaucuu

SEQ ID NO: 1796530 - RNA, 19 nt, Artificial Sequence
  Description of Artificial Sequence: Synthetic oligonucleotide
ccgcgccgcagcacagcgu

SEQ ID NO: 1796531 - RNA, 19 nt, Artificial Sequence
  Description of Artificial Sequence: Synthetic oligonucleotide
ccccugccuucuccuggcu

SEQ ID NO: 1796532 - RNA, 19 nt, Artificial Sequence
  Description of Artificial Sequence: Synthetic oligonucleotide
cgguuuccugggacuucuu

SEQ ID NO: 1796533 - RNA, 19 nt, Artificial Sequence
  Description of Artificial Sequence: Synthetic oligonucleotide
aucaauuuaaaacagcggc

SEQ ID NO: 1796534 - RNA, 19 nt, Artificial Sequence
  Description of Artificial Sequence: Synthetic oligonucleotide
aaaucaauuuaaaacagcg

SEQ ID NO: 1796535 - RNA, 19 nt, Artificial Sequence
  Description of Artificial Sequence: Synthetic oligonucleotide
aauauuuagucuggaaugc

SEQ ID NO: 1796536 - RNA, 19 nt, Artificial Sequence
  Description of Artificial Sequence: Synthetic oligonucleotide
uaaaguuccauguacauga

SEQ ID NO: 1796537 - RNA, 19 nt, Artificial Sequence
  Description of Artificial Sequence: Synthetic oligonucleotide
uaaauuauuuguucgauca

SEQ ID NO: 1796538 - RNA, 19 nt, Artificial Sequence
  Description of Artificial Sequence: Synthetic oligonucleotide
aucuauuaaaggcucaacc

SEQ ID NO: 1796539 - RNA, 19 nt, Artificial Sequence
  Description of Artificial Sequence: Synthetic oligonucleotide
uaaaauugcaucuggauga

SEQ ID NO: 1796540 - RNA, 19 nt, Artificial Sequence
  Description of Artificial Sequence: Synthetic oligonucleotide
ugcacuaauauauacauac

SEQ ID NO: 1796541 - RNA, 19 nt, Artificial Sequence
  Description of Artificial Sequence: Synthetic oligonucleotide
aaauauguugcacuaauau

SEQ ID NO: 1796542 - RNA, 19 nt, Artificial Sequence
  Description of Artificial Sequence: Synthetic oligonucleotide
aauuauuuguucgaucaac

SEQ ID NO: 1796543 - RNA, 19 nt, Artificial Sequence
  Description of Artificial Sequence: Synthetic oligonucleotide
uguucgaucaacuauauuu

SEQ ID NO: 1796544 - RNA, 19 nt, Artificial Sequence
  Description of Artificial Sequence: Synthetic oligonucleotide
uaagcuauguauaaaguuc

SEQ ID NO: 1796545 - RNA, 19 nt, Artificial Sequence
  Description of Artificial Sequence: Synthetic oligonucleotide
auuucuuuaaauguccugg

SEQ ID NO: 1796546 - RNA, 19 nt, Artificial Sequence
  Description of Artificial Sequence: Synthetic oligonucleotide
ucuauuaaaggcucaacca

SEQ ID NO: 1796547 - RNA, 19 nt, Artificial Sequence
  Description of Artificial Sequence: Synthetic oligonucleotide
aagcuauguauaaaguucc

SEQ ID NO: 1796548 - RNA, 19 nt, Artificial Sequence
  Description of Artificial Sequence: Synthetic oligonucleotide
cauauuucuuuaaaugucc

SEQ ID NO: 1796549 - RNA, 19 nt, Artificial Sequence
  Description of Artificial Sequence: Synthetic oligonucleotide
ugugaucagauccacacug

SEQ ID NO: 1796550 - RNA, 19 nt, Artificial Sequence
  Description of Artificial Sequence: Synthetic oligonucleotide
aaauccgagauacagcaca

SEQ ID NO: 1796551 - RNA, 19 nt, Artificial Sequence
  Description of Artificial Sequence: Synthetic oligonucleotide
auaauauuuagucuggaau

SEQ ID NO: 1796552 - RNA, 19 nt, Artificial Sequence
  Description of Artificial Sequence: Synthetic oligonucleotide
uauauuucgagggagguug

SEQ ID NO: 1796553 - RNA, 19 nt, Artificial Sequence
  Description of Artificial Sequence: Synthetic oligonucleotide
acaucgauaacccgguccc

SEQ ID NO: 1796554 - RNA, 19 nt, Artificial Sequence
  Description of Artificial Sequence: Synthetic oligonucleotide
aaacuugaaguccgaaggg

SEQ ID NO: 1796555 - RNA, 19 nt, Artificial Sequence
  Description of Artificial Sequence: Synthetic oligonucleotide
ucaugguagacaaaucucc

SEQ ID NO: 1796556 - RNA, 19 nt, Artificial Sequence
  Description of Artificial Sequence: Synthetic oligonucleotide
auaaauuauuuguucgauc

SEQ ID NO: 1796557 - RNA, 19 nt, Artificial Sequence
  Description of Artificial Sequence: Synthetic oligonucleotide
agauacagcacauauuucu

SEQ ID NO: 1796558 - RNA, 19 nt, Artificial Sequence
  Description of Artificial Sequence: Synthetic oligonucleotide
uauuaaaggcucaaccagc

SEQ ID NO: 1796559 - RNA, 19 nt, Artificial Sequence
  Description of Artificial Sequence: Synthetic oligonucleotide
aagcuaucgcaucauuagc

SEQ ID NO: 1796560 - RNA, 19 nt, Artificial Sequence
  Description of Artificial Sequence: Synthetic oligonucleotide
acuuagaauugccaaacuc

SEQ ID NO: 1796561 - RNA, 19 nt, Artificial Sequence
  Description of Artificial Sequence: Synthetic oligonucleotide
aaucaauuuaaaacagcgg

SEQ ID NO: 1796562 - RNA, 19 nt, Artificial Sequence
  Description of Artificial Sequence: Synthetic oligonucleotide
uuaaauauguugcacuaau

SEQ ID NO: 1796563 - RNA, 19 nt, Artificial Sequence
  Description of Artificial Sequence: Synthetic oligonucleotide
aauaauauuuagucuggaa

SEQ ID NO: 1796564 - RNA, 19 nt, Artificial Sequence
  Description of Artificial Sequence: Synthetic oligonucleotide
uccaucacucaaaagagga

SEQ ID NO: 1796565 - RNA, 19 nt, Artificial Sequence
  Description of Artificial Sequence: Synthetic oligonucleotide
cuauuaaaggcucaaccag

SEQ ID NO: 1796566 - RNA, 19 nt, Artificial Sequence
  Description of Artificial Sequence: Synthetic oligonucleotide
ucuuuaaauguccugggaa

SEQ ID NO: 1796567 - RNA, 19 nt, Artificial Sequence
  Description of Artificial Sequence: Synthetic oligonucleotide
ucaaacuugaaguccgaag

SEQ ID NO: 1796568 - RNA, 19 nt, Artificial Sequence
  Description of Artificial Sequence: Synthetic oligonucleotide
gaugauuuggacaugugac

SEQ ID NO: 1796569 - RNA, 19 nt, Artificial Sequence
  Description of Artificial Sequence: Synthetic oligonucleotide
uguugcacuaauauauaca

SEQ ID NO: 1796570 - RNA, 19 nt, Artificial Sequence
  Description of Artificial Sequence: Synthetic oligonucleotide
aguugccucagcuuagagc

SEQ ID NO: 1796571 - RNA, 19 nt, Artificial Sequence
  Description of Artificial Sequence: Synthetic oligonucleotide
agccuuucgggcuaugugc

SEQ ID NO: 1796572 - RNA, 19 nt, Artificial Sequence
  Description of Artificial Sequence: Synthetic oligonucleotide
aggacugucugauuguaac

SEQ ID NO: 1796573 - RNA, 19 nt, Artificial Sequence
  Description of Artificial Sequence: Synthetic oligonucleotide
uuuaucauugcugaaaguu

SEQ ID NO: 1796574 - RNA, 19 nt, Artificial Sequence
  Description of Artificial Sequence: Synthetic oligonucleotide
aaaauccccaguugugauc

SEQ ID NO: 1796575 - RNA, 19 nt, Artificial Sequence
  Description of Artificial Sequence: Synthetic oligonucleotide
gauucugagaaucuccaac

SEQ ID NO: 1796576 - RNA, 19 nt, Artificial Sequence
  Description of Artificial Sequence: Synthetic oligonucleotide
auacuuagaauugccaaac

SEQ ID NO: 1796577 - RNA, 19 nt, Artificial Sequence
  Description of Artificial Sequence: Synthetic oligonucleotide
agaaucuccaacucgagau

SEQ ID NO: 1796578 - RNA, 19 nt, Artificial Sequence
  Description of Artificial Sequence: Synthetic oligonucleotide
aucauuaaauauguugcac

SEQ ID NO: 1796579 - RNA, 19 nt, Artificial Sequence
  Description of Artificial Sequence: Synthetic oligonucleotide
gcaauauacagacaugccg

SEQ ID NO: 1796580 - RNA, 19 nt, Artificial Sequence
  Description of Artificial Sequence: Synthetic oligonucleotide
acauaaaauccccaguugu

SEQ ID NO: 1796581 - RNA, 19 nt, Artificial Sequence
  Description of Artificial Sequence: Synthetic oligonucleotide
ucauugcucuaucagaacu

SEQ ID NO: 1796582 - RNA, 19 nt, Artificial Sequence
  Description of Artificial Sequence: Synthetic oligonucleotide
uucgaucaacuauauuucg

SEQ ID NO: 1796583 - RNA, 19 nt, Artificial Sequence
  Description of Artificial Sequence: Synthetic oligonucleotide
aacuacucauuguucuccg

SEQ ID NO: 1796584 - RNA, 19 nt, Artificial Sequence
  Description of Artificial Sequence: Synthetic oligonucleotide
aaaacagcggccaauuucu

SEQ ID NO: 1796585 - RNA, 19 nt, Artificial Sequence
  Description of Artificial Sequence: Synthetic oligonucleotide
agaucccacaucgauaacc

SEQ ID NO: 1796586 - RNA, 19 nt, Artificial Sequence
  Description of Artificial Sequence: Synthetic oligonucleotide
aaucuccaacucgagaugg

SEQ ID NO: 1796587 - RNA, 19 nt, Artificial Sequence
  Description of Artificial Sequence: Synthetic oligonucleotide
uguaagcuauguauaaagu

SEQ ID NO: 1796588 - RNA, 19 nt, Artificial Sequence
  Description of Artificial Sequence: Synthetic oligonucleotide
uuaucauugcugaaaguuc

SEQ ID NO: 1796589 - RNA, 19 nt, Artificial Sequence
  Description of Artificial Sequence: Synthetic oligonucleotide
gaucauaucacccgcucug

SEQ ID NO: 1796590 - RNA, 19 nt, Artificial Sequence
  Description of Artificial Sequence: Synthetic oligonucleotide
ugauacuuagaauugccaa

SEQ ID NO: 1796591 - RNA, 19 nt, Artificial Sequence
  Description of Artificial Sequence: Synthetic oligonucleotide
auguugcacuaauauauac

SEQ ID NO: 1796592 - RNA, 19 nt, Artificial Sequence
  Description of Artificial Sequence: Synthetic oligonucleotide
ucuacuaaaauugcaucug

SEQ ID NO: 1796593 - RNA, 19 nt, Artificial Sequence
  Description of Artificial Sequence: Synthetic oligonucleotide
agacaaaucuccaucacuc

SEQ ID NO: 1796594 - RNA, 19 nt, Artificial Sequence
  Description of Artificial Sequence: Synthetic oligonucleotide
acaacuaggccacauucag

SEQ ID NO: 1796595 - RNA, 19 nt, Artificial Sequence
  Description of Artificial Sequence: Synthetic oligonucleotide
acagcggccaauuucuuuc

SEQ ID NO: 1796596 - RNA, 19 nt, Artificial Sequence
  Description of Artificial Sequence: Synthetic oligonucleotide
ucaucauugcucuaucaga

SEQ ID NO: 1796597 - RNA, 19 nt, Artificial Sequence
  Description of Artificial Sequence: Synthetic oligonucleotide
uagaaauccgagauacagc

SEQ ID NO: 1796598 - RNA, 19 nt, Artificial Sequence
  Description of Artificial Sequence: Synthetic oligonucleotide
uauuuagucuggaaugcgu

SEQ ID NO: 1796599 - RNA, 19 nt, Artificial Sequence
  Description of Artificial Sequence: Synthetic oligonucleotide
guagcuuuaucauugcuga

SEQ ID NO: 1796600 - RNA, 19 nt, Artificial Sequence
  Description of Artificial Sequence: Synthetic oligonucleotide
gacaugugacucuugggag

SEQ ID NO: 1796601 - RNA, 19 nt, Artificial Sequence
  Description of Artificial Sequence: Synthetic oligonucleotide
uuucgagggagguugauuc

SEQ ID NO: 1796602 - RNA, 19 nt, Artificial Sequence
  Description of Artificial Sequence: Synthetic oligonucleotide
caauauacagacaugccga

SEQ ID NO: 1796603 - RNA, 19 nt, Artificial Sequence
  Description of Artificial Sequence: Synthetic oligonucleotide
auucugucagccauggucg

SEQ ID NO: 1796604 - RNA, 19 nt, Artificial Sequence
  Description of Artificial Sequence: Synthetic oligonucleotide
agcaauaucuccaauuucu

SEQ ID NO: 1796605 - RNA, 19 nt, Artificial Sequence
  Description of Artificial Sequence: Synthetic oligonucleotide
aacccgguccccuacaacu

SEQ ID NO: 1796606 - RNA, 19 nt, Artificial Sequence
  Description of Artificial Sequence: Synthetic oligonucleotide
uagacaaaucuccaucacu

SEQ ID NO: 1796607 - RNA, 19 nt, Artificial Sequence
  Description of Artificial Sequence: Synthetic oligonucleotide
agaacuacucauuguucuc

SEQ ID NO: 1796608 - RNA, 19 nt, Artificial Sequence
  Description of Artificial Sequence: Synthetic oligonucleotide
aaugcguaccaucuauuaa

SEQ ID NO: 1796609 - RNA, 19 nt, Artificial Sequence
  Description of Artificial Sequence: Synthetic oligonucleotide
gauacuuagaauugccaaa

SEQ ID NO: 1796610 - RNA, 19 nt, Artificial Sequence
  Description of Artificial Sequence: Synthetic oligonucleotide
aauauacagacaugccgaa

SEQ ID NO: 1796611 - RNA, 19 nt, Artificial Sequence
  Description of Artificial Sequence: Synthetic oligonucleotide
aaauuauuuguucgaucaa

SEQ ID NO: 1796612 - RNA, 19 nt, Artificial Sequence
  Description of Artificial Sequence: Synthetic oligonucleotide
ugcguaccaucuauuaaag

SEQ ID NO: 1796613 - RNA, 19 nt, Artificial Sequence
  Description of Artificial Sequence: Synthetic oligonucleotide
ucgaucaacuauauuucga

SEQ ID NO: 1796614 - RNA, 19 nt, Artificial Sequence
  Description of Artificial Sequence: Synthetic oligonucleotide
gacagaucauaucacccgc

SEQ ID NO: 1796615 - RNA, 19 nt, Artificial Sequence
  Description of Artificial Sequence: Synthetic oligonucleotide
aucagaacuacucauuguu

SEQ ID NO: 1796616 - RNA, 19 nt, Artificial Sequence
  Description of Artificial Sequence: Synthetic oligonucleotide
uccgagauacagcacauau

SEQ ID NO: 1796617 - RNA, 19 nt, Artificial Sequence
  Description of Artificial Sequence: Synthetic oligonucleotide
guacaugagagugugacac

SEQ ID NO: 1796618 - RNA, 19 nt, Artificial Sequence
  Description of Artificial Sequence: Synthetic oligonucleotide
uacaacuaggccacauuca

SEQ ID NO: 1796619 - RNA, 19 nt, Artificial Sequence
  Description of Artificial Sequence: Synthetic oligonucleotide
ucuguaguccucuacuaaa

SEQ ID NO: 1796620 - RNA, 19 nt, Artificial Sequence
  Description of Artificial Sequence: Synthetic oligonucleotide
guugccucagcuuagagcu

SEQ ID NO: 1796621 - RNA, 19 nt, Artificial Sequence
  Description of Artificial Sequence: Synthetic oligonucleotide
aacgccuucuugccuacag

SEQ ID NO: 1796622 - RNA, 19 nt, Artificial Sequence
  Description of Artificial Sequence: Synthetic oligonucleotide
guacccuugccaaucaugg

SEQ ID NO: 1796623 - RNA, 19 nt, Artificial Sequence
  Description of Artificial Sequence: Synthetic oligonucleotide
aucauugcucuaucagaac

SEQ ID NO: 1796624 - RNA, 19 nt, Artificial Sequence
  Description of Artificial Sequence: Synthetic oligonucleotide
uccaacucgagaugggucu

SEQ ID NO: 1796625 - RNA, 19 nt, Artificial Sequence
  Description of Artificial Sequence: Synthetic oligonucleotide
cauaucacccgcucuguag

SEQ ID NO: 1796626 - RNA, 19 nt, Artificial Sequence
  Description of Artificial Sequence: Synthetic oligonucleotide
uuuagucuggaaugcguac

SEQ ID NO: 1796627 - RNA, 19 nt, Artificial Sequence
  Description of Artificial Sequence: Synthetic oligonucleotide
acuuaguugccucagcuua

SEQ ID NO: 1796628 - RNA, 19 nt, Artificial Sequence
  Description of Artificial Sequence: Synthetic oligonucleotide
cuuucuuagaaauccgaga

SEQ ID NO: 1796629 - RNA, 19 nt, Artificial Sequence
  Description of Artificial Sequence: Synthetic oligonucleotide
cuacaacuaggccacauuc

SEQ ID NO: 1796630 - RNA, 19 nt, Artificial Sequence
  Description of Artificial Sequence: Synthetic oligonucleotide
ucagaacuacucauuguuc

SEQ ID NO: 1796631 - RNA, 19 nt, Artificial Sequence
  Description of Artificial Sequence: Synthetic oligonucleotide
uugcaucuggaugauuugg

SEQ ID NO: 1796632 - RNA, 19 nt, Artificial Sequence
  Description of Artificial Sequence: Synthetic oligonucleotide
auaaaguuccauguacaug

SEQ ID NO: 1796633 - RNA, 19 nt, Artificial Sequence
  Description of Artificial Sequence: Synthetic oligonucleotide
ggacagaucauaucacccg

SEQ ID NO: 1796634 - RNA, 19 nt, Artificial Sequence
  Description of Artificial Sequence: Synthetic oligonucleotide
uuagucuggaaugcguacc

SEQ ID NO: 1796635 - RNA, 19 nt, Artificial Sequence
  Description of Artificial Sequence: Synthetic oligonucleotide
uggacaugugacucuuggg

SEQ ID NO: 1796636 - RNA, 19 nt, Artificial Sequence
  Description of Artificial Sequence: Synthetic oligonucleotide
cacaucgauaacccggucc

SEQ ID NO: 1796637 - RNA, 19 nt, Artificial Sequence
  Description of Artificial Sequence: Synthetic oligonucleotide
agacaugccgaagcuaucg

SEQ ID NO: 1796638 - RNA, 19 nt, Artificial Sequence
  Description of Artificial Sequence: Synthetic oligonucleotide
uuauuuguucgaucaacua

SEQ ID NO: 1796639 - RNA, 19 nt, Artificial Sequence
  Description of Artificial Sequence: Synthetic oligonucleotide
aguccucuacuaaaauugc

SEQ ID NO: 1796640 - RNA, 19 nt, Artificial Sequence
  Description of Artificial Sequence: Synthetic oligonucleotide
gguaauuuguccacugggg

SEQ ID NO: 1796641 - RNA, 19 nt, Artificial Sequence
  Description of Artificial Sequence: Synthetic oligonucleotide
uggaaugcguaccaucuau

SEQ ID NO: 1796642 - RNA, 19 nt, Artificial Sequence
  Description of Artificial Sequence: Synthetic oligonucleotide
auucagaucccacaucgau

SEQ ID NO: 1796643 - RNA, 19 nt, Artificial Sequence
  Description of Artificial Sequence: Synthetic oligonucleotide
ugauuuggacaugugacuc

SEQ ID NO: 1796644 - RNA, 19 nt, Artificial Sequence
  Description of Artificial Sequence: Synthetic oligonucleotide
uccccuacaacuaggccac

SEQ ID NO: 1796645 - RNA, 19 nt, Artificial Sequence
  Description of Artificial Sequence: Synthetic oligonucleotide
uaucagaacuacucauugu

SEQ ID NO: 1796646 - RNA, 19 nt, Artificial Sequence
  Description of Artificial Sequence: Synthetic oligonucleotide
uucugauacuuagaauugc

SEQ ID NO: 1796647 - RNA, 19 nt, Artificial Sequence
  Description of Artificial Sequence: Synthetic oligonucleotide
ugaucagauccacacuggu

SEQ ID NO: 1796648 - RNA, 19 nt, Artificial Sequence
  Description of Artificial Sequence: Synthetic oligonucleotide
ccauucagaucccacaucg

SEQ ID NO: 1796649 - RNA, 19 nt, Artificial Sequence
  Description of Artificial Sequence: Synthetic oligonucleotide
ugcugaaaguucuccauuc

SEQ ID NO: 1796650 - RNA, 19 nt, Artificial Sequence
  Description of Artificial Sequence: Synthetic oligonucleotide
gucgacgccauccucgcgg

SEQ ID NO: 1796651 - RNA, 19 nt, Artificial Sequence
  Description of Artificial Sequence: Synthetic oligonucleotide
auaucacccgcucuguagu

SEQ ID NO: 1796652 - RNA, 19 nt, Artificial Sequence
  Description of Artificial Sequence: Synthetic oligonucleotide
ucuugggagagcauccaaa

SEQ ID NO: 1796653 - RNA, 19 nt, Artificial Sequence
  Description of Artificial Sequence: Synthetic oligonucleotide
cugagaaucuccaacucga

SEQ ID NO: 1796654 - RNA, 19 nt, Artificial Sequence
  Description of Artificial Sequence: Synthetic oligonucleotide
uuuguucgaucaacuauau

SEQ ID NO: 1796655 - RNA, 19 nt, Artificial Sequence
  Description of Artificial Sequence: Synthetic oligonucleotide
uccauguacaugagagugu

SEQ ID NO: 1796656 - RNA, 19 nt, Artificial Sequence
  Description of Artificial Sequence: Synthetic oligonucleotide
uaaaauccccaguugugau

SEQ ID NO: 1796657 - RNA, 19 nt, Artificial Sequence
  Description of Artificial Sequence: Synthetic oligonucleotide
guugcacuaauauauacau

SEQ ID NO: 1796658 - RNA, 19 nt, Artificial Sequence
  Description of Artificial Sequence: Synthetic oligonucleotide
uguaguccucuacuaaaau

SEQ ID NO: 1796659 - RNA, 19 nt, Artificial Sequence
  Description of Artificial Sequence: Synthetic oligonucleotide
agaugggucuuuuguagcu

SEQ ID NO: 1796660 - RNA, 19 nt, Artificial Sequence
  Description of Artificial Sequence: Synthetic oligonucleotide
auuuaguaucuuccaaaau

SEQ ID NO: 1796661 - RNA, 19 nt, Artificial Sequence
  Description of Artificial Sequence: Synthetic oligonucleotide
uucagaucccacaucgaua

SEQ ID NO: 1796662 - RNA, 19 nt, Artificial Sequence
  Description of Artificial Sequence: Synthetic oligonucleotide
aaaggcucaaccagcacaa

SEQ ID NO: 1796663 - RNA, 19 nt, Artificial Sequence
  Description of Artificial Sequence: Synthetic oligonucleotide
auguaaauagcugcugcug

SEQ ID NO: 1796664 - RNA, 19 nt, Artificial Sequence
  Description of Artificial Sequence: Synthetic oligonucleotide
gagagugugacacuuaguu

SEQ ID NO: 1796665 - RNA, 19 nt, Artificial Sequence
  Description of Artificial Sequence: Synthetic oligonucleotide
auuuguucgaucaacuaua

SEQ ID NO: 1796666 - RNA, 19 nt, Artificial Sequence
  Description of Artificial Sequence: Synthetic oligonucleotide
uaaauguccugggaacgcc

SEQ ID NO: 1796667 - RNA, 19 nt, Artificial Sequence
  Description of Artificial Sequence: Synthetic oligonucleotide
uacuuagaauugccaaacu

SEQ ID NO: 1796668 - RNA, 19 nt, Artificial Sequence
  Description of Artificial Sequence: Synthetic oligonucleotide
guaacaucagcaacaccag

SEQ ID NO: 1796669 - RNA, 19 nt, Artificial Sequence
  Description of Artificial Sequence: Synthetic oligonucleotide
uucuuagaaauccgagaua

SEQ ID NO: 1796670 - RNA, 19 nt, Artificial Sequence
  Description of Artificial Sequence: Synthetic oligonucleotide
agaucauaucacccgcucu

SEQ ID NO: 1796671 - RNA, 19 nt, Artificial Sequence
  Description of Artificial Sequence: Synthetic oligonucleotide
acuauauuucgagggaggu

SEQ ID NO: 1796672 - RNA, 19 nt, Artificial Sequence
  Description of Artificial Sequence: Synthetic oligonucleotide
cugauuguaacaucagcaa

SEQ ID NO: 1796673 - RNA, 19 nt, Artificial Sequence
  Description of Artificial Sequence: Synthetic oligonucleotide
acagaaugcuaaauaauau

SEQ ID NO: 1796674 - RNA, 19 nt, Artificial Sequence
  Description of Artificial Sequence: Synthetic oligonucleotide
gacaaaucuccaucacuca

SEQ ID NO: 1796675 - RNA, 19 nt, Artificial Sequence
  Description of Artificial Sequence: Synthetic oligonucleotide
uucuccauucagaucccac

SEQ ID NO: 1796676 - RNA, 19 nt, Artificial Sequence
  Description of Artificial Sequence: Synthetic oligonucleotide
ggacaugugacucuuggga

SEQ ID NO: 1796677 - RNA, 19 nt, Artificial Sequence
  Description of Artificial Sequence: Synthetic oligonucleotide
acuaggccacauucaggac

SEQ ID NO: 1796678 - RNA, 19 nt, Artificial Sequence
  Description of Artificial Sequence: Synthetic oligonucleotide
augcuaaauaauauuuagu

SEQ ID NO: 1796679 - RNA, 19 nt, Artificial Sequence
  Description of Artificial Sequence: Synthetic oligonucleotide
aggcucaaccagcacaaug

SEQ ID NO: 1796680 - RNA, 19 nt, Artificial Sequence
  Description of Artificial Sequence: Synthetic oligonucleotide
gagaaucuccaacucgaga

SEQ ID NO: 1796681 - RNA, 19 nt, Artificial Sequence
  Description of Artificial Sequence: Synthetic oligonucleotide
gagagcauccaaacggcug

SEQ ID NO: 1796682 - RNA, 19 nt, Artificial Sequence
  Description of Artificial Sequence: Synthetic oligonucleotide
gccuacaggcaauauacag

SEQ ID NO: 1796683 - RNA, 19 nt, Artificial Sequence
  Description of Artificial Sequence: Synthetic oligonucleotide
uuucgggcuaugugcguag

SEQ ID NO: 1796684 - RNA, 19 nt, Artificial Sequence
  Description of Artificial Sequence: Synthetic oligonucleotide
cugauacuuagaauugcca

SEQ ID NO: 1796685 - RNA, 19 nt, Artificial Sequence
  Description of Artificial Sequence: Synthetic oligonucleotide
ugccgaagcuaucgcauca

SEQ ID NO: 1796686 - RNA, 19 nt, Artificial Sequence
  Description of Artificial Sequence: Synthetic oligonucleotide
auuguucuccgauucugau

SEQ ID NO: 1796687 - RNA, 19 nt, Artificial Sequence
  Description of Artificial Sequence: Synthetic oligonucleotide
gaaugcguaccaucuauua

SEQ ID NO: 1796688 - RNA, 19 nt, Artificial Sequence
  Description of Artificial Sequence: Synthetic oligonucleotide
caacaccagcaauaucucc

SEQ ID NO: 1796689 - RNA, 19 nt, Artificial Sequence
  Description of Artificial Sequence: Synthetic oligonucleotide
agcuaucgcaucauuagcu

SEQ ID NO: 1796690 - RNA, 19 nt, Artificial Sequence
  Description of Artificial Sequence: Synthetic oligonucleotide
gacaugccgaagcuaucgc

SEQ ID NO: 1796691 - RNA, 19 nt, Artificial Sequence
  Description of Artificial Sequence: Synthetic oligonucleotide
auauacagacaugccgaag

SEQ ID NO: 1796692 - RNA, 19 nt, Artificial Sequence
  Description of Artificial Sequence: Synthetic oligonucleotide
caaucaugguagacaaauc

SEQ ID NO: 1796693 - RNA, 19 nt, Artificial Sequence
  Description of Artificial Sequence: Synthetic oligonucleotide
gcuaaauaauauuuagucu

SEQ ID NO: 1796694 - RNA, 19 nt, Artificial Sequence
  Description of Artificial Sequence: Synthetic oligonucleotide
aucacccgcucuguagucc

SEQ ID NO: 1796695 - RNA, 19 nt, Artificial Sequence
  Description of Artificial Sequence: Synthetic oligonucleotide
augccgaagcuaucgcauc

SEQ ID NO: 1796696 - RNA, 19 nt, Artificial Sequence
  Description of Artificial Sequence: Synthetic oligonucleotide
acaugccgaagcuaucgca

SEQ ID NO: 1796697 - RNA, 19 nt, Artificial Sequence
  Description of Artificial Sequence: Synthetic oligonucleotide
cauggucgugauuuccuug

SEQ ID NO: 1796698 - RNA, 19 nt, Artificial Sequence
  Description of Artificial Sequence: Synthetic oligonucleotide
uccccaguugugaucagau

SEQ ID NO: 1796699 - RNA, 19 nt, Artificial Sequence
  Description of Artificial Sequence: Synthetic oligonucleotide
gugaucagauccacacugg

SEQ ID NO: 1796700 - RNA, 19 nt, Artificial Sequence
  Description of Artificial Sequence: Synthetic oligonucleotide
ucuagcuccacagccuuuc

SEQ ID NO: 1796701 - RNA, 19 nt, Artificial Sequence
  Description of Artificial Sequence: Synthetic oligonucleotide
ugccuacaggcaauauaca

SEQ ID NO: 1796702 - RNA, 19 nt, Artificial Sequence
  Description of Artificial Sequence: Synthetic oligonucleotide
uccgaagggaagagaucug

SEQ ID NO: 1796703 - RNA, 19 nt, Artificial Sequence
  Description of Artificial Sequence: Synthetic oligonucleotide
aucccacaucgauaacccg

SEQ ID NO: 1796704 - RNA, 19 nt, Artificial Sequence
  Description of Artificial Sequence: Synthetic oligonucleotide
uacucauuguucuccgauu

SEQ ID NO: 1796705 - RNA, 19 nt, Artificial Sequence
  Description of Artificial Sequence: Synthetic oligonucleotide
ucuccaacucgagaugggu

SEQ ID NO: 1796706 - RNA, 19 nt, Artificial Sequence
  Description of Artificial Sequence: Synthetic oligonucleotide
auccaaacggcuggucgac

SEQ ID NO: 1796707 - RNA, 19 nt, Artificial Sequence
  Description of Artificial Sequence: Synthetic oligonucleotide
acauucaggacagaucaua

SEQ ID NO: 1796708 - RNA, 19 nt, Artificial Sequence
  Description of Artificial Sequence: Synthetic oligonucleotide
ucgagggagguugauucug

SEQ ID NO: 1796709 - RNA, 19 nt, Artificial Sequence
  Description of Artificial Sequence: Synthetic oligonucleotide
uuaguugccucagcuuaga

SEQ ID NO: 1796710 - RNA, 19 nt, Artificial Sequence
  Description of Artificial Sequence: Synthetic oligonucleotide
cagaucauaucacccgcuc

SEQ ID NO: 1796711 - RNA, 19 nt, Artificial Sequence
  Description of Artificial Sequence: Synthetic oligonucleotide
aguucuccauucagauccc

SEQ ID NO: 1796712 - RNA, 19 nt, Artificial Sequence
  Description of Artificial Sequence: Synthetic oligonucleotide
ugcguagcugccaucugua

SEQ ID NO: 1796713 - RNA, 19 nt, Artificial Sequence
  Description of Artificial Sequence: Synthetic oligonucleotide
guaccaucuauuaaaggcu

SEQ ID NO: 1796714 - RNA, 19 nt, Artificial Sequence
  Description of Artificial Sequence: Synthetic oligonucleotide
uucgagggagguugauucu

SEQ ID NO: 1796715 - RNA, 19 nt, Artificial Sequence
  Description of Artificial Sequence: Synthetic oligonucleotide
uaggacugucugauuguaa

SEQ ID NO: 1796716 - RNA, 19 nt, Artificial Sequence
  Description of Artificial Sequence: Synthetic oligonucleotide
cauuguucuccgauucuga

SEQ ID NO: 1796717 - RNA, 19 nt, Artificial Sequence
  Description of Artificial Sequence: Synthetic oligonucleotide
aauccgagauacagcacau

SEQ ID NO: 1796718 - RNA, 19 nt, Artificial Sequence
  Description of Artificial Sequence: Synthetic oligonucleotide
auuacauauuuaguaucuu

SEQ ID NO: 1796719 - RNA, 19 nt, Artificial Sequence
  Description of Artificial Sequence: Synthetic oligonucleotide
cuccaacucgagauggguc

SEQ ID NO: 1796720 - RNA, 19 nt, Artificial Sequence
  Description of Artificial Sequence: Synthetic oligonucleotide
cauccaaacggcuggucga

SEQ ID NO: 1796721 - RNA, 19 nt, Artificial Sequence
  Description of Artificial Sequence: Synthetic oligonucleotide
auuuagucuggaaugcgua

SEQ ID NO: 1796722 - RNA, 19 nt, Artificial Sequence
  Description of Artificial Sequence: Synthetic oligonucleotide
ugugcguagcugccaucug

SEQ ID NO: 1796723 - RNA, 19 nt, Artificial Sequence
  Description of Artificial Sequence: Synthetic oligonucleotide
augugcguagcugccaucu

SEQ ID NO: 1796724 - RNA, 19 nt, Artificial Sequence
  Description of Artificial Sequence: Synthetic oligonucleotide
acuacucauuguucuccga

SEQ ID NO: 1796725 - RNA, 19 nt, Artificial Sequence
  Description of Artificial Sequence: Synthetic oligonucleotide
guagaucagucuguaggac

SEQ ID NO: 1796726 - RNA, 19 nt, Artificial Sequence
  Description of Artificial Sequence: Synthetic oligonucleotide
cauguaaauagcugcugcu

SEQ ID NO: 1796727 - RNA, 19 nt, Artificial Sequence
  Description of Artificial Sequence: Synthetic oligonucleotide
uggucgacgccauccucgc

SEQ ID NO: 1796728 - RNA, 19 nt, Artificial Sequence
  Description of Artificial Sequence: Synthetic oligonucleotide
aauccccaguugugaucag

SEQ ID NO: 1796729 - RNA, 19 nt, Artificial Sequence
  Description of Artificial Sequence: Synthetic oligonucleotide
caaacggcuggucgacgcc

SEQ ID NO: 1796730 - RNA, 19 nt, Artificial Sequence
  Description of Artificial Sequence: Synthetic oligonucleotide
cuagcuccacagccuuucg

SEQ ID NO: 1796731 - RNA, 19 nt, Artificial Sequence
  Description of Artificial Sequence: Synthetic oligonucleotide
ggucgugauuuccuugaag

SEQ ID NO: 1796732 - RNA, 19 nt, Artificial Sequence
  Description of Artificial Sequence: Synthetic oligonucleotide
ccucuacuaaaauugcauc

SEQ ID NO: 1796733 - RNA, 19 nt, Artificial Sequence
  Description of Artificial Sequence: Synthetic oligonucleotide
gagauacagcacauauuuc

SEQ ID NO: 1796734 - RNA, 19 nt, Artificial Sequence
  Description of Artificial Sequence: Synthetic oligonucleotide
cauugcucuaucagaacua

SEQ ID NO: 1796735 - RNA, 19 nt, Artificial Sequence
  Description of Artificial Sequence: Synthetic oligonucleotide
ugggaacgccuucuugccu

SEQ ID NO: 1796736 - RNA, 19 nt, Artificial Sequence
  Description of Artificial Sequence: Synthetic oligonucleotide
cuugccuacaggcaauaua

SEQ ID NO: 1796737 - RNA, 19 nt, Artificial Sequence
  Description of Artificial Sequence: Synthetic oligonucleotide
cagccuuucgggcuaugug

SEQ ID NO: 1796738 - RNA, 19 nt, Artificial Sequence
  Description of Artificial Sequence: Synthetic oligonucleotide
uccaaacggcuggucgacg

SEQ ID NO: 1796739 - RNA, 19 nt, Artificial Sequence
  Description of Artificial Sequence: Synthetic oligonucleotide
cuguaguccucuacuaaaa

SEQ ID NO: 1796740 - RNA, 19 nt, Artificial Sequence
  Description of Artificial Sequence: Synthetic oligonucleotide
cagaaugcuaaauaauauu

SEQ ID NO: 1796741 - RNA, 19 nt, Artificial Sequence
  Description of Artificial Sequence: Synthetic oligonucleotide
uaacccgguccccuacaac

SEQ ID NO: 1796742 - RNA, 19 nt, Artificial Sequence
  Description of Artificial Sequence: Synthetic oligonucleotide
ucucagccgaugccugaga

SEQ ID NO: 1796743 - RNA, 19 nt, Artificial Sequence
  Description of Artificial Sequence: Synthetic oligonucleotide
acucgagaugggucuuuug

SEQ ID NO: 1796744 - RNA, 19 nt, Artificial Sequence
  Description of Artificial Sequence: Synthetic oligonucleotide
gggcuaugugcguagcugc

SEQ ID NO: 1796745 - RNA, 19 nt, Artificial Sequence
  Description of Artificial Sequence: Synthetic oligonucleotide
gcuaucgcaucauuagcuc

SEQ ID NO: 1796746 - RNA, 19 nt, Artificial Sequence
  Description of Artificial Sequence: Synthetic oligonucleotide
ucgggcuaugugcguagcu

SEQ ID NO: 1796747 - RNA, 19 nt, Artificial Sequence
  Description of Artificial Sequence: Synthetic oligonucleotide
aucauaucacccgcucugu

SEQ ID NO: 1796748 - RNA, 19 nt, Artificial Sequence
  Description of Artificial Sequence: Synthetic oligonucleotide
uuguucgaucaacuauauu

SEQ ID NO: 1796749 - RNA, 19 nt, Artificial Sequence
  Description of Artificial Sequence: Synthetic oligonucleotide
gcguaccaucuauuaaagg

SEQ ID NO: 1796750 - RNA, 19 nt, Artificial Sequence
  Description of Artificial Sequence: Synthetic oligonucleotide
uacccuugccaaucauggu

SEQ ID NO: 1796751 - RNA, 19 nt, Artificial Sequence
  Description of Artificial Sequence: Synthetic oligonucleotide
cucgagaugggucuuuugu

SEQ ID NO: 1796752 - RNA, 19 nt, Artificial Sequence
  Description of Artificial Sequence: Synthetic oligonucleotide
auaacccgguccccuacaa

SEQ ID NO: 1796753 - RNA, 19 nt, Artificial Sequence
  Description of Artificial Sequence: Synthetic oligonucleotide
gcaucuggaugauuuggac

SEQ ID NO: 1796754 - RNA, 19 nt, Artificial Sequence
  Description of Artificial Sequence: Synthetic oligonucleotide
uaucacccgcucuguaguc

SEQ ID NO: 1796755 - RNA, 19 nt, Artificial Sequence
  Description of Artificial Sequence: Synthetic oligonucleotide
ucgacgccauccucgcggc

SEQ ID NO: 1796756 - RNA, 19 nt, Artificial Sequence
  Description of Artificial Sequence: Synthetic oligonucleotide
ugauucugucagccauggu

SEQ ID NO: 1796757 - RNA, 19 nt, Artificial Sequence
  Description of Artificial Sequence: Synthetic oligonucleotide
acagaucauaucacccgcu

SEQ ID NO: 1796758 - RNA, 19 nt, Artificial Sequence
  Description of Artificial Sequence: Synthetic oligonucleotide
cagcacaauguaagcuaug

SEQ ID NO: 1796759 - RNA, 19 nt, Artificial Sequence
  Description of Artificial Sequence: Synthetic oligonucleotide
gagggagguugauucuguc

SEQ ID NO: 1796760 - RNA, 19 nt, Artificial Sequence
  Description of Artificial Sequence: Synthetic oligonucleotide
agcuauguauaaaguucca

SEQ ID NO: 1796761 - RNA, 19 nt, Artificial Sequence
  Description of Artificial Sequence: Synthetic oligonucleotide
ggagguugauucugucagc

SEQ ID NO: 1796762 - RNA, 19 nt, Artificial Sequence
  Description of Artificial Sequence: Synthetic oligonucleotide
auuucgagggagguugauu

SEQ ID NO: 1796763 - RNA, 19 nt, Artificial Sequence
  Description of Artificial Sequence: Synthetic oligonucleotide
ccauguacaugagagugug

SEQ ID NO: 1796764 - RNA, 19 nt, Artificial Sequence
  Description of Artificial Sequence: Synthetic oligonucleotide
ugggucuuuuguagcuuua

SEQ ID NO: 1796765 - RNA, 19 nt, Artificial Sequence
  Description of Artificial Sequence: Synthetic oligonucleotide
ccgaggguagaucagucug

SEQ ID NO: 1796766 - RNA, 19 nt, Artificial Sequence
  Description of Artificial Sequence: Synthetic oligonucleotide
gaagagaucuggagcccga

SEQ ID NO: 1796767 - RNA, 19 nt, Artificial Sequence
  Description of Artificial Sequence: Synthetic oligonucleotide
cauucagaucccacaucga

SEQ ID NO: 1796768 - RNA, 19 nt, Artificial Sequence
  Description of Artificial Sequence: Synthetic oligonucleotide
agccgaugccugagaagcc

SEQ ID NO: 1796769 - RNA, 19 nt, Artificial Sequence
  Description of Artificial Sequence: Synthetic oligonucleotide
ccaaacggcuggucgacgc

SEQ ID NO: 1796770 - RNA, 19 nt, Artificial Sequence
  Description of Artificial Sequence: Synthetic oligonucleotide
uaugugcguagcugccauc

SEQ ID NO: 1796771 - RNA, 19 nt, Artificial Sequence
  Description of Artificial Sequence: Synthetic oligonucleotide
ucgauaacccgguccccua

SEQ ID NO: 1796772 - RNA, 19 nt, Artificial Sequence
  Description of Artificial Sequence: Synthetic oligonucleotide
cuaucgcaucauuagcucu

SEQ ID NO: 1796773 - RNA, 19 nt, Artificial Sequence
  Description of Artificial Sequence: Synthetic oligonucleotide
ccgaagggaagagaucugg

SEQ ID NO: 1796774 - RNA, 19 nt, Artificial Sequence
  Description of Artificial Sequence: Synthetic oligonucleotide
caguugugaucagauccac

SEQ ID NO: 1796775 - RNA, 19 nt, Artificial Sequence
  Description of Artificial Sequence: Synthetic oligonucleotide
aacucgagaugggucuuuu

SEQ ID NO: 1796776 - RNA, 19 nt, Artificial Sequence
  Description of Artificial Sequence: Synthetic oligonucleotide
uauuucgagggagguugau

SEQ ID NO: 1796777 - RNA, 19 nt, Artificial Sequence
  Description of Artificial Sequence: Synthetic oligonucleotide
ccgauucugauacuuagaa

SEQ ID NO: 1796778 - RNA, 19 nt, Artificial Sequence
  Description of Artificial Sequence: Synthetic oligonucleotide
cagacaugccgaagcuauc

SEQ ID NO: 1796779 - RNA, 19 nt, Artificial Sequence
  Description of Artificial Sequence: Synthetic oligonucleotide
caugccgaagcuaucgcau

SEQ ID NO: 1796780 - RNA, 19 nt, Artificial Sequence
  Description of Artificial Sequence: Synthetic oligonucleotide
auauuucgagggagguuga

SEQ ID NO: 1796781 - RNA, 19 nt, Artificial Sequence
  Description of Artificial Sequence: Synthetic oligonucleotide
gguccccuacaacuaggcc

SEQ ID NO: 1796782 - RNA, 19 nt, Artificial Sequence
  Description of Artificial Sequence: Synthetic oligonucleotide
gaaccaagucuagcuccac

SEQ ID NO: 1796783 - RNA, 19 nt, Artificial Sequence
  Description of Artificial Sequence: Synthetic oligonucleotide
cuacucauuguucuccgau

SEQ ID NO: 1796784 - RNA, 19 nt, Artificial Sequence
  Description of Artificial Sequence: Synthetic oligonucleotide
ggcucaaccagcacaaugu

SEQ ID NO: 1796785 - RNA, 19 nt, Artificial Sequence
  Description of Artificial Sequence: Synthetic oligonucleotide
augccugagaagccaugua

SEQ ID NO: 1796786 - RNA, 19 nt, Artificial Sequence
  Description of Artificial Sequence: Synthetic oligonucleotide
uucgggcuaugugcguagc

SEQ ID NO: 1796787 - RNA, 19 nt, Artificial Sequence
  Description of Artificial Sequence: Synthetic oligonucleotide
gaggguagaucagucugua

SEQ ID NO: 1796788 - RNA, 19 nt, Artificial Sequence
  Description of Artificial Sequence: Synthetic oligonucleotide
uucuugccuacaggcaaua

SEQ ID NO: 1796789 - RNA, 19 nt, Artificial Sequence
  Description of Artificial Sequence: Synthetic oligonucleotide
agcccgaggguagaucagu

SEQ ID NO: 1796790 - RNA, 19 nt, Artificial Sequence
  Description of Artificial Sequence: Synthetic oligonucleotide
gucaaacuugaaguccgaa

SEQ ID NO: 1796791 - RNA, 19 nt, Artificial Sequence
  Description of Artificial Sequence: Synthetic oligonucleotide
cucgcggcuccgccaacag

SEQ ID NO: 1796792 - RNA, 19 nt, Artificial Sequence
  Description of Artificial Sequence: Synthetic oligonucleotide
ggaaccaagucuagcucca

SEQ ID NO: 1796793 - RNA, 19 nt, Artificial Sequence
  Description of Artificial Sequence: Synthetic oligonucleotide
gaucagauccacacugguu

SEQ ID NO: 1796794 - RNA, 19 nt, Artificial Sequence
  Description of Artificial Sequence: Synthetic oligonucleotide
acggcuggucgacgccauc

SEQ ID NO: 1796795 - RNA, 19 nt, Artificial Sequence
  Description of Artificial Sequence: Synthetic oligonucleotide
ggcuaugugcguagcugcc

SEQ ID NO: 1796796 - RNA, 19 nt, Artificial Sequence
  Description of Artificial Sequence: Synthetic oligonucleotide
ggauucugagaaucuccaa

SEQ ID NO: 1796797 - RNA, 19 nt, Artificial Sequence
  Description of Artificial Sequence: Synthetic oligonucleotide
ccaaucaugguagacaaau

SEQ ID NO: 1796798 - RNA, 19 nt, Artificial Sequence
  Description of Artificial Sequence: Synthetic oligonucleotide
gcuccggccaggaaccaag

SEQ ID NO: 1796799 - RNA, 19 nt, Artificial Sequence
  Description of Artificial Sequence: Synthetic oligonucleotide
gggaacgccuucuugccua

SEQ ID NO: 1796800 - RNA, 19 nt, Artificial Sequence
  Description of Artificial Sequence: Synthetic oligonucleotide
aaacagcggccaauuucuu

SEQ ID NO: 1796801 - RNA, 19 nt, Artificial Sequence
  Description of Artificial Sequence: Synthetic oligonucleotide
aaggcucaaccagcacaau

SEQ ID NO: 1796802 - RNA, 19 nt, Artificial Sequence
  Description of Artificial Sequence: Synthetic oligonucleotide
cucuugggagagcauccaa

SEQ ID NO: 1796803 - RNA, 19 nt, Artificial Sequence
  Description of Artificial Sequence: Synthetic oligonucleotide
cuuucgggcuaugugcgua

SEQ ID NO: 1796804 - RNA, 19 nt, Artificial Sequence
  Description of Artificial Sequence: Synthetic oligonucleotide
cuaugugcguagcugccau

SEQ ID NO: 1796805 - RNA, 19 nt, Artificial Sequence
  Description of Artificial Sequence: Synthetic oligonucleotide
gcacaauguaagcuaugua

SEQ ID NO: 1796806 - RNA, 19 nt, Artificial Sequence
  Description of Artificial Sequence: Synthetic oligonucleotide
agcggccaauuucuuucuu

SEQ ID NO: 1796807 - RNA, 19 nt, Artificial Sequence
  Description of Artificial Sequence: Synthetic oligonucleotide
ccgguccccuacaacuagg

SEQ ID NO: 1796808 - RNA, 19 nt, Artificial Sequence
  Description of Artificial Sequence: Synthetic oligonucleotide
cuggaaugcguaccaucua

SEQ ID NO: 1796809 - RNA, 19 nt, Artificial Sequence
  Description of Artificial Sequence: Synthetic oligonucleotide
uguccgcuucucagccgau

SEQ ID NO: 1796810 - RNA, 19 nt, Artificial Sequence
  Description of Artificial Sequence: Synthetic oligonucleotide
acccgcucuguaguccucu

SEQ ID NO: 1796811 - RNA, 19 nt, Artificial Sequence
  Description of Artificial Sequence: Synthetic oligonucleotide
gaugggucuuuuguagcuu

SEQ ID NO: 1796812 - RNA, 19 nt, Artificial Sequence
  Description of Artificial Sequence: Synthetic oligonucleotide
ggucgacgccauccucgcg

SEQ ID NO: 1796813 - RNA, 19 nt, Artificial Sequence
  Description of Artificial Sequence: Synthetic oligonucleotide
gcuauguauaaaguuccau

SEQ ID NO: 1796814 - RNA, 19 nt, Artificial Sequence
  Description of Artificial Sequence: Synthetic oligonucleotide
gcucaaccagcacaaugua

SEQ ID NO: 1796815 - RNA, 19 nt, Artificial Sequence
  Description of Artificial Sequence: Synthetic oligonucleotide
gcuaugugcguagcugcca

SEQ ID NO: 1796816 - RNA, 19 nt, Artificial Sequence
  Description of Artificial Sequence: Synthetic oligonucleotide
cuauauuucgagggagguu

SEQ ID NO: 1796817 - RNA, 19 nt, Artificial Sequence
  Description of Artificial Sequence: Synthetic oligonucleotide
auccgagauacagcacaua

SEQ ID NO: 1796818 - RNA, 19 nt, Artificial Sequence
  Description of Artificial Sequence: Synthetic oligonucleotide
ccauccucgcggcuccgcc

SEQ ID NO: 1796819 - RNA, 19 nt, Artificial Sequence
  Description of Artificial Sequence: Synthetic oligonucleotide
cgaagcuaucgcaucauua

SEQ ID NO: 1796820 - RNA, 19 nt, Artificial Sequence
  Description of Artificial Sequence: Synthetic oligonucleotide
ccaucuauuaaaggcucaa

SEQ ID NO: 1796821 - RNA, 19 nt, Artificial Sequence
  Description of Artificial Sequence: Synthetic oligonucleotide
cccgguccccuacaacuag

SEQ ID NO: 1796822 - RNA, 19 nt, Artificial Sequence
  Description of Artificial Sequence: Synthetic oligonucleotide
cgguccccuacaacuaggc

SEQ ID NO: 1796823 - RNA, 19 nt, Artificial Sequence
  Description of Artificial Sequence: Synthetic oligonucleotide
ccggccaggaaccaagucu

SEQ ID NO: 1796824 - RNA, 19 nt, Artificial Sequence
  Description of Artificial Sequence: Synthetic oligonucleotide
ccgcuucucagccgaugcc

SEQ ID NO: 1796825 - RNA, 19 nt, Artificial Sequence
  Description of Artificial Sequence: Synthetic oligonucleotide
gaacgccuucuugccuaca

SEQ ID NO: 1796826 - RNA, 19 nt, Artificial Sequence
  Description of Artificial Sequence: Synthetic oligonucleotide
acccgguccccuacaacua

SEQ ID NO: 1796827 - RNA, 19 nt, Artificial Sequence
  Description of Artificial Sequence: Synthetic oligonucleotide
cgauaacccgguccccuac

SEQ ID NO: 1796828 - RNA, 19 nt, Artificial Sequence
  Description of Artificial Sequence: Synthetic oligonucleotide
auggggcuccggccaggaa

SEQ ID NO: 1796829 - RNA, 19 nt, Artificial Sequence
  Description of Artificial Sequence: Synthetic oligonucleotide
ccgcucuguaguccucuac

SEQ ID NO: 1796830 - RNA, 19 nt, Artificial Sequence
  Description of Artificial Sequence: Synthetic oligonucleotide
gccauggucgugauuuccu

SEQ ID NO: 1796831 - RNA, 19 nt, Artificial Sequence
  Description of Artificial Sequence: Synthetic oligonucleotide
ggcaaagguuggagcagaa

SEQ ID NO: 1796832 - RNA, 19 nt, Artificial Sequence
  Description of Artificial Sequence: Synthetic oligonucleotide
cguagcugccaucuguacu

SEQ ID NO: 1796833 - RNA, 19 nt, Artificial Sequence
  Description of Artificial Sequence: Synthetic oligonucleotide
gcccgaggguagaucaguc

SEQ ID NO: 1796834 - RNA, 19 nt, Artificial Sequence
  Description of Artificial Sequence: Synthetic oligonucleotide
cuguacccuugccaaucau

SEQ ID NO: 1796835 - RNA, 19 nt, Artificial Sequence
  Description of Artificial Sequence: Synthetic oligonucleotide
ccuacaacuaggccacauu

SEQ ID NO: 1796836 - RNA, 19 nt, Artificial Sequence
  Description of Artificial Sequence: Synthetic oligonucleotide
ccgagauacagcacauauu

SEQ ID NO: 1796837 - RNA, 19 nt, Artificial Sequence
  Description of Artificial Sequence: Synthetic oligonucleotide
cgauucugauacuuagaau

SEQ ID NO: 1796838 - RNA, 19 nt, Artificial Sequence
  Description of Artificial Sequence: Synthetic oligonucleotide
cgaggguagaucagucugu

SEQ ID NO: 1796839 - RNA, 19 nt, Artificial Sequence
  Description of Artificial Sequence: Synthetic oligonucleotide
gccauccucgcggcuccgc

SEQ ID NO: 1796840 - RNA, 19 nt, Artificial Sequence
  Description of Artificial Sequence: Synthetic oligonucleotide
cccgaggguagaucagucu

SEQ ID NO: 1796841 - RNA, 19 nt, Artificial Sequence
  Description of Artificial Sequence: Synthetic oligonucleotide
caacucgagaugggucuuu

SEQ ID NO: 1796842 - RNA, 19 nt, Artificial Sequence
  Description of Artificial Sequence: Synthetic oligonucleotide
ccauggucgugauuuccuu

SEQ ID NO: 1796843 - RNA, 19 nt, Artificial Sequence
  Description of Artificial Sequence: Synthetic oligonucleotide
gcuuagagcugggguaauu

SEQ ID NO: 1796844 - RNA, 19 nt, Artificial Sequence
  Description of Artificial Sequence: Synthetic oligonucleotide
ggcuccggccaggaaccaa

SEQ ID NO: 1796845 - RNA, 19 nt, Artificial Sequence
  Description of Artificial Sequence: Synthetic oligonucleotide
ccucgcggcuccgccaaca

SEQ ID NO: 1796846 - RNA, 19 nt, Artificial Sequence
  Description of Artificial Sequence: Synthetic oligonucleotide
ccgaugccugagaagccau

SEQ ID NO: 1796847 - RNA, 19 nt, Artificial Sequence
  Description of Artificial Sequence: Synthetic oligonucleotide
ccgaagcuaucgcaucauu

SEQ ID NO: 1796848 - RNA, 19 nt, Artificial Sequence
  Description of Artificial Sequence: Synthetic oligonucleotide
cccgcucuguaguccucua

SEQ ID NO: 1796849 - RNA, 19 nt, Artificial Sequence
  Description of Artificial Sequence: Synthetic oligonucleotide
gggcuccggccaggaacca

SEQ ID NO: 1796850 - RNA, 19 nt, Artificial Sequence
  Description of Artificial Sequence: Synthetic oligonucleotide
ccaacucgagaugggucuu

SEQ ID NO: 1796851 - RNA, 19 nt, Artificial Sequence
  Description of Artificial Sequence: Synthetic oligonucleotide
ccccuacaacuaggccaca

SEQ ID NO: 1796852 - RNA, 19 nt, Artificial Sequence
  Description of Artificial Sequence: Synthetic oligonucleotide
cgacgccauccucgcggcu

SEQ ID NO: 1796853 - RNA, 19 nt, Artificial Sequence
  Description of Artificial Sequence: Synthetic oligonucleotide
cucaauuccaccuugaagc

SEQ ID NO: 1796854 - RNA, 19 nt, Artificial Sequence
  Description of Artificial Sequence: Synthetic oligonucleotide
uuuggugaaauucaguugc

SEQ ID NO: 1796855 - RNA, 19 nt, Artificial Sequence
  Description of Artificial Sequence: Synthetic oligonucleotide
ucuguaugauuucugaacg

SEQ ID NO: 1796856 - RNA, 19 nt, Artificial Sequence
  Description of Artificial Sequence: Synthetic oligonucleotide
auuggaacuaauuuagcgg

SEQ ID NO: 1796857 - RNA, 19 nt, Artificial Sequence
  Description of Artificial Sequence: Synthetic oligonucleotide
auaagcaacagccuccacc

SEQ ID NO: 1796858 - RNA, 19 nt, Artificial Sequence
  Description of Artificial Sequence: Synthetic oligonucleotide
uaauuuagcggccucagcc

SEQ ID NO: 1796859 - RNA, 19 nt, Artificial Sequence
  Description of Artificial Sequence: Synthetic oligonucleotide
cuggauucuaccaucaugg

SEQ ID NO: 1796860 - RNA, 19 nt, Artificial Sequence
  Description of Artificial Sequence: Synthetic oligonucleotide
uaagcaacagccuccaccg

SEQ ID NO: 1796861 - RNA, 19 nt, Artificial Sequence
  Description of Artificial Sequence: Synthetic oligonucleotide
ugcuacauuaucuaggaca

SEQ ID NO: 1796862 - RNA, 19 nt, Artificial Sequence
  Description of Artificial Sequence: Synthetic oligonucleotide
aucuguaugauuucugaac

SEQ ID NO: 1796863 - RNA, 19 nt, Artificial Sequence
  Description of Artificial Sequence: Synthetic oligonucleotide
aaugauguuuccuccaaug

SEQ ID NO: 1796864 - RNA, 19 nt, Artificial Sequence
  Description of Artificial Sequence: Synthetic oligonucleotide
uuaucuaggacaucgcugc

SEQ ID NO: 1796865 - RNA, 19 nt, Artificial Sequence
  Description of Artificial Sequence: Synthetic oligonucleotide
gauucuaccaucauggcug

SEQ ID NO: 1796866 - RNA, 19 nt, Artificial Sequence
  Description of Artificial Sequence: Synthetic oligonucleotide
aagcuggcauguuacagcc

SEQ ID NO: 1796867 - RNA, 19 nt, Artificial Sequence
  Description of Artificial Sequence: Synthetic oligonucleotide
auucccuuaauauuuauga

SEQ ID NO: 1796868 - RNA, 19 nt, Artificial Sequence
  Description of Artificial Sequence: Synthetic oligonucleotide
uguuucugccaccagaaag

SEQ ID NO: 1796869 - RNA, 19 nt, Artificial Sequence
  Description of Artificial Sequence: Synthetic oligonucleotide
auauuuaugaguuccuucu

SEQ ID NO: 1796870 - RNA, 19 nt, Artificial Sequence
  Description of Artificial Sequence: Synthetic oligonucleotide
uagucuguucuguagaggg

SEQ ID NO: 1796871 - RNA, 19 nt, Artificial Sequence
  Description of Artificial Sequence: Synthetic oligonucleotide
aaugguuuuccuggaagcc

SEQ ID NO: 1796872 - RNA, 19 nt, Artificial Sequence
  Description of Artificial Sequence: Synthetic oligonucleotide
acuuaugccacauugcucu

SEQ ID NO: 1796873 - RNA, 19 nt, Artificial Sequence
  Description of Artificial Sequence: Synthetic oligonucleotide
uucauuaggcuauuuagca

SEQ ID NO: 1796874 - RNA, 19 nt, Artificial Sequence
  Description of Artificial Sequence: Synthetic oligonucleotide
uuggaacuaauuuagcggc

SEQ ID NO: 1796875 - RNA, 19 nt, Artificial Sequence
  Description of Artificial Sequence: Synthetic oligonucleotide
uuugcuucaagcugcaucu

SEQ ID NO: 1796876 - RNA, 19 nt, Artificial Sequence
  Description of Artificial Sequence: Synthetic oligonucleotide
aaaugcauuugccuggcug

SEQ ID NO: 1796877 - RNA, 19 nt, Artificial Sequence
  Description of Artificial Sequence: Synthetic oligonucleotide
uacaauaaugguuuuccug

SEQ ID NO: 1796878 - RNA, 19 nt, Artificial Sequence
  Description of Artificial Sequence: Synthetic oligonucleotide
uagguuguggaccaaagcu

SEQ ID NO: 1796879 - RNA, 19 nt, Artificial Sequence
  Description of Artificial Sequence: Synthetic oligonucleotide
accacgaucaaugggaagc

SEQ ID NO: 1796880 - RNA, 19 nt, Artificial Sequence
  Description of Artificial Sequence: Synthetic oligonucleotide
aaugcauuugccuggcuga

SEQ ID NO: 1796881 - RNA, 19 nt, Artificial Sequence
  Description of Artificial Sequence: Synthetic oligonucleotide
ugaugcaugggcaaugaug

SEQ ID NO: 1796882 - RNA, 19 nt, Artificial Sequence
  Description of Artificial Sequence: Synthetic oligonucleotide
aucauuggcacuuaugcca

SEQ ID NO: 1796883 - RNA, 19 nt, Artificial Sequence
  Description of Artificial Sequence: Synthetic oligonucleotide
aacgccuuuggugaaauuc

SEQ ID NO: 1796884 - RNA, 19 nt, Artificial Sequence
  Description of Artificial Sequence: Synthetic oligonucleotide
ugaaauucaguugcagugg

SEQ ID NO: 1796885 - RNA, 19 nt, Artificial Sequence
  Description of Artificial Sequence: Synthetic oligonucleotide
ucaagcugcaucugcauag

SEQ ID NO: 1796886 - RNA, 19 nt, Artificial Sequence
  Description of Artificial Sequence: Synthetic oligonucleotide
uccaccacgaucaauggga

SEQ ID NO: 1796887 - RNA, 19 nt, Artificial Sequence
  Description of Artificial Sequence: Synthetic oligonucleotide
uuuaugaguuccuucuuug

SEQ ID NO: 1796888 - RNA, 19 nt, Artificial Sequence
  Description of Artificial Sequence: Synthetic oligonucleotide
cuucauuaggcuauuuagc

SEQ ID NO: 1796889 - RNA, 19 nt, Artificial Sequence
  Description of Artificial Sequence: Synthetic oligonucleotide
ugaacccucgagcauaugc

SEQ ID NO: 1796890 - RNA, 19 nt, Artificial Sequence
  Description of Artificial Sequence: Synthetic oligonucleotide
aucagcaagucgcagcagc

SEQ ID NO: 1796891 - RNA, 19 nt, Artificial Sequence
  Description of Artificial Sequence: Synthetic oligonucleotide
auagauccagucucaauuc

SEQ ID NO: 1796892 - RNA, 19 nt, Artificial Sequence
  Description of Artificial Sequence: Synthetic oligonucleotide
ugggcuacuaccugguugg

SEQ ID NO: 1796893 - RNA, 19 nt, Artificial Sequence
  Description of Artificial Sequence: Synthetic oligonucleotide
auagguuguggaccaaagc

SEQ ID NO: 1796894 - RNA, 19 nt, Artificial Sequence
  Description of Artificial Sequence: Synthetic oligonucleotide
aucgcugccagacagacca

SEQ ID NO: 1796895 - RNA, 19 nt, Artificial Sequence
  Description of Artificial Sequence: Synthetic oligonucleotide
aauucaguugcagugguga

SEQ ID NO: 1796896 - RNA, 19 nt, Artificial Sequence
  Description of Artificial Sequence: Synthetic oligonucleotide
ugaugauucaguccuuggc

SEQ ID NO: 1796897 - RNA, 19 nt, Artificial Sequence
  Description of Artificial Sequence: Synthetic oligonucleotide
uaaucuguaugauuucuga

SEQ ID NO: 1796898 - RNA, 19 nt, Artificial Sequence
  Description of Artificial Sequence: Synthetic oligonucleotide
uucugaacgccuuugguga

SEQ ID NO: 1796899 - RNA, 19 nt, Artificial Sequence
  Description of Artificial Sequence: Synthetic oligonucleotide
gacagggagagucauagac

SEQ ID NO: 1796900 - RNA, 19 nt, Artificial Sequence
  Description of Artificial Sequence: Synthetic oligonucleotide
uguaugauuucugaacgcc

SEQ ID NO: 1796901 - RNA, 19 nt, Artificial Sequence
  Description of Artificial Sequence: Synthetic oligonucleotide
ucugugauagauccagucu

SEQ ID NO: 1796902 - RNA, 19 nt, Artificial Sequence
  Description of Artificial Sequence: Synthetic oligonucleotide
ugcauaagcaacagccucc

SEQ ID NO: 1796903 - RNA, 19 nt, Artificial Sequence
  Description of Artificial Sequence: Synthetic oligonucleotide
aauuuagcggccucagcca

SEQ ID NO: 1796904 - RNA, 19 nt, Artificial Sequence
  Description of Artificial Sequence: Synthetic oligonucleotide
cagaccauaccucucagcc

SEQ ID NO: 1796905 - RNA, 19 nt, Artificial Sequence
  Description of Artificial Sequence: Synthetic oligonucleotide
ugguuguugaugcaugggc

SEQ ID NO: 1796906 - RNA, 19 nt, Artificial Sequence
  Description of Artificial Sequence: Synthetic oligonucleotide
ucuaggacaucgcugccag

SEQ ID NO: 1796907 - RNA, 19 nt, Artificial Sequence
  Description of Artificial Sequence: Synthetic oligonucleotide
uucuguagagggcaguagc

SEQ ID NO: 1796908 - RNA, 19 nt, Artificial Sequence
  Description of Artificial Sequence: Synthetic oligonucleotide
aacccauuggaacuaauuu

SEQ ID NO: 1796909 - RNA, 19 nt, Artificial Sequence
  Description of Artificial Sequence: Synthetic oligonucleotide
aguucggaauucuccaaac

SEQ ID NO: 1796910 - RNA, 19 nt, Artificial Sequence
  Description of Artificial Sequence: Synthetic oligonucleotide
ugaguagucuguucuguag

SEQ ID NO: 1796911 - RNA, 19 nt, Artificial Sequence
  Description of Artificial Sequence: Synthetic oligonucleotide
uggcacuuaugccacauug

SEQ ID NO: 1796912 - RNA, 19 nt, Artificial Sequence
  Description of Artificial Sequence: Synthetic oligonucleotide
uucccuuaauauuuaugag

SEQ ID NO: 1796913 - RNA, 19 nt, Artificial Sequence
  Description of Artificial Sequence: Synthetic oligonucleotide
ugugauagauccagucuca

SEQ ID NO: 1796914 - RNA, 19 nt, Artificial Sequence
  Description of Artificial Sequence: Synthetic oligonucleotide
gagacagggagagucauag

SEQ ID NO: 1796915 - RNA, 19 nt, Artificial Sequence
  Description of Artificial Sequence: Synthetic oligonucleotide
ugcauaucuggauucuacc

SEQ ID NO: 1796916 - RNA, 19 nt, Artificial Sequence
  Description of Artificial Sequence: Synthetic oligonucleotide
augaguuccuucuuuggug

SEQ ID NO: 1796917 - RNA, 19 nt, Artificial Sequence
  Description of Artificial Sequence: Synthetic oligonucleotide
aacagccuccaccguaugg

SEQ ID NO: 1796918 - RNA, 19 nt, Artificial Sequence
  Description of Artificial Sequence: Synthetic oligonucleotide
ugauaaaggagcuggguuu

SEQ ID NO: 1796919 - RNA, 19 nt, Artificial Sequence
  Description of Artificial Sequence: Synthetic oligonucleotide
uccagucucaauuccaccu

SEQ ID NO: 1796920 - RNA, 19 nt, Artificial Sequence
  Description of Artificial Sequence: Synthetic oligonucleotide
auugcucuaaccgugaaau

SEQ ID NO: 1796921 - RNA, 19 nt, Artificial Sequence
  Description of Artificial Sequence: Synthetic oligonucleotide
cuaccaucauggcugaugc

SEQ ID NO: 1796922 - RNA, 19 nt, Artificial Sequence
  Description of Artificial Sequence: Synthetic oligonucleotide
aauagguuguggaccaaag

SEQ ID NO: 1796923 - RNA, 19 nt, Artificial Sequence
  Description of Artificial Sequence: Synthetic oligonucleotide
ugaaagcucuccucgaccu

SEQ ID NO: 1796924 - RNA, 19 nt, Artificial Sequence
  Description of Artificial Sequence: Synthetic oligonucleotide
aauucccuuaauauuuaug

SEQ ID NO: 1796925 - RNA, 19 nt, Artificial Sequence
  Description of Artificial Sequence: Synthetic oligonucleotide
cucagguacagccugguug

SEQ ID NO: 1796926 - RNA, 19 nt, Artificial Sequence
  Description of Artificial Sequence: Synthetic oligonucleotide
uggugaaacccauuggaac

SEQ ID NO: 1796927 - RNA, 19 nt, Artificial Sequence
  Description of Artificial Sequence: Synthetic oligonucleotide
agccauuacgguccgcagc

SEQ ID NO: 1796928 - RNA, 19 nt, Artificial Sequence
  Description of Artificial Sequence: Synthetic oligonucleotide
acugucuacaauaagcagu

SEQ ID NO: 1796929 - RNA, 19 nt, Artificial Sequence
  Description of Artificial Sequence: Synthetic oligonucleotide
uggugauuaccacugcuac

SEQ ID NO: 1796930 - RNA, 19 nt, Artificial Sequence
  Description of Artificial Sequence: Synthetic oligonucleotide
uugggcuacuaccugguug

SEQ ID NO: 1796931 - RNA, 19 nt, Artificial Sequence
  Description of Artificial Sequence: Synthetic oligonucleotide
uacaauaagcagugcauau

SEQ ID NO: 1796932 - RNA, 19 nt, Artificial Sequence
  Description of Artificial Sequence: Synthetic oligonucleotide
acaauaagcagugcauauc

SEQ ID NO: 1796933 - RNA, 19 nt, Artificial Sequence
  Description of Artificial Sequence: Synthetic oligonucleotide
ucaauuccaccuugaagca

SEQ ID NO: 1796934 - RNA, 19 nt, Artificial Sequence
  Description of Artificial Sequence: Synthetic oligonucleotide
uaggcuauuuagcauuuaa

SEQ ID NO: 1796935 - RNA, 19 nt, Artificial Sequence
  Description of Artificial Sequence: Synthetic oligonucleotide
aauguacauggccuuuccu

SEQ ID NO: 1796936 - RNA, 19 nt, Artificial Sequence
  Description of Artificial Sequence: Synthetic oligonucleotide
gauagauccagucucaauu

SEQ ID NO: 1796937 - RNA, 19 nt, Artificial Sequence
  Description of Artificial Sequence: Synthetic oligonucleotide
ugguggucuguguugaacc

SEQ ID NO: 1796938 - RNA, 19 nt, Artificial Sequence
  Description of Artificial Sequence: Synthetic oligonucleotide
gauuaccacugcuacacca

SEQ ID NO: 1796939 - RNA, 19 nt, Artificial Sequence
  Description of Artificial Sequence: Synthetic oligonucleotide
caucauuggcacuuaugcc

SEQ ID NO: 1796940 - RNA, 19 nt, Artificial Sequence
  Description of Artificial Sequence: Synthetic oligonucleotide
agaaagcugauacaauaau

SEQ ID NO: 1796941 - RNA, 19 nt, Artificial Sequence
  Description of Artificial Sequence: Synthetic oligonucleotide
agacuuugcagauucuggu

SEQ ID NO: 1796942 - RNA, 19 nt, Artificial Sequence
  Description of Artificial Sequence: Synthetic oligonucleotide
ucuaccaucauggcugaug

SEQ ID NO: 1796943 - RNA, 19 nt, Artificial Sequence
  Description of Artificial Sequence: Synthetic oligonucleotide
acagaccauaccucucagc

SEQ ID NO: 1796944 - RNA, 19 nt, Artificial Sequence
  Description of Artificial Sequence: Synthetic oligonucleotide
uagauccagucucaauucc

SEQ ID NO: 1796945 - RNA, 19 nt, Artificial Sequence
  Description of Artificial Sequence: Synthetic oligonucleotide
ucaguugcaguggugaaac

SEQ ID NO: 1796946 - RNA, 19 nt, Artificial Sequence
  Description of Artificial Sequence: Synthetic oligonucleotide
gugauuaccacugcuacac

SEQ ID NO: 1796947 - RNA, 19 nt, Artificial Sequence
  Description of Artificial Sequence: Synthetic oligonucleotide
uauggaaaccagcuucuuc

SEQ ID NO: 1796948 - RNA, 19 nt, Artificial Sequence
  Description of Artificial Sequence: Synthetic oligonucleotide
auuaucuaggacaucgcug

SEQ ID NO: 1796949 - RNA, 19 nt, Artificial Sequence
  Description of Artificial Sequence: Synthetic oligonucleotide
uaucuggauucuaccauca

SEQ ID NO: 1796950 - RNA, 19 nt, Artificial Sequence
  Description of Artificial Sequence: Synthetic oligonucleotide
uuccacugaaguaucugca

SEQ ID NO: 1796951 - RNA, 19 nt, Artificial Sequence
  Description of Artificial Sequence: Synthetic oligonucleotide
cugugauagauccagucuc

SEQ ID NO: 1796952 - RNA, 19 nt, Artificial Sequence
  Description of Artificial Sequence: Synthetic oligonucleotide
uaugauuucugaacgccuu

SEQ ID NO: 1796953 - RNA, 19 nt, Artificial Sequence
  Description of Artificial Sequence: Synthetic oligonucleotide
uggcugaugcuugauaaag

SEQ ID NO: 1796954 - RNA, 19 nt, Artificial Sequence
  Description of Artificial Sequence: Synthetic oligonucleotide
aguaguaaucuguaugauu

SEQ ID NO: 1796955 - RNA, 19 nt, Artificial Sequence
  Description of Artificial Sequence: Synthetic oligonucleotide
gauaaaggagcuggguuug

SEQ ID NO: 1796956 - RNA, 19 nt, Artificial Sequence
  Description of Artificial Sequence: Synthetic oligonucleotide
caaacucaucagcaagucg

SEQ ID NO: 1796957 - RNA, 19 nt, Artificial Sequence
  Description of Artificial Sequence: Synthetic oligonucleotide
aaacaucucugugauagau

SEQ ID NO: 1796958 - RNA, 19 nt, Artificial Sequence
  Description of Artificial Sequence: Synthetic oligonucleotide
cuugaagcaguuugucaag

SEQ ID NO: 1796959 - RNA, 19 nt, Artificial Sequence
  Description of Artificial Sequence: Synthetic oligonucleotide
auccagucucaauuccacc

SEQ ID NO: 1796960 - RNA, 19 nt, Artificial Sequence
  Description of Artificial Sequence: Synthetic oligonucleotide
cugaugcuugauaaaggag

SEQ ID NO: 1796961 - RNA, 19 nt, Artificial Sequence
  Description of Artificial Sequence: Synthetic oligonucleotide
accacugcuacaccaaacu

SEQ ID NO: 1796962 - RNA, 19 nt, Artificial Sequence
  Description of Artificial Sequence: Synthetic oligonucleotide
agcaagucgcagcagcauc

SEQ ID NO: 1796963 - RNA, 19 nt, Artificial Sequence
  Description of Artificial Sequence: Synthetic oligonucleotide
uggccuaaacguacccucg

SEQ ID NO: 1796964 - RNA, 19 nt, Artificial Sequence
  Description of Artificial Sequence: Synthetic oligonucleotide
aagagcccugaagaagccc

SEQ ID NO: 1796965 - RNA, 19 nt, Artificial Sequence
  Description of Artificial Sequence: Synthetic oligonucleotide
uggaacuaauuuagcggcc

SEQ ID NO: 1796966 - RNA, 19 nt, Artificial Sequence
  Description of Artificial Sequence: Synthetic oligonucleotide
cuacaccaaacucaucagc

SEQ ID NO: 1796967 - RNA, 19 nt, Artificial Sequence
  Description of Artificial Sequence: Synthetic oligonucleotide
ugggaagcuggcauguuac

SEQ ID NO: 1796968 - RNA, 19 nt, Artificial Sequence
  Description of Artificial Sequence: Synthetic oligonucleotide
gaugcaugggcaaugaugu

SEQ ID NO: 1796969 - RNA, 19 nt, Artificial Sequence
  Description of Artificial Sequence: Synthetic oligonucleotide
agaaaucuggccaaaugca

SEQ ID NO: 1796970 - RNA, 19 nt, Artificial Sequence
  Description of Artificial Sequence: Synthetic oligonucleotide
ggugucaauguacauggcc

SEQ ID NO: 1796971 - RNA, 19 nt, Artificial Sequence
  Description of Artificial Sequence: Synthetic oligonucleotide
uccaccguauggaaaccag

SEQ ID NO: 1796972 - RNA, 19 nt, Artificial Sequence
  Description of Artificial Sequence: Synthetic oligonucleotide
cuguaugauuucugaacgc

SEQ ID NO: 1796973 - RNA, 19 nt, Artificial Sequence
  Description of Artificial Sequence: Synthetic oligonucleotide
aacuaauuuagcggccuca

SEQ ID NO: 1796974 - RNA, 19 nt, Artificial Sequence
  Description of Artificial Sequence: Synthetic oligonucleotide
aauguaugacagaucugug

SEQ ID NO: 1796975 - RNA, 19 nt, Artificial Sequence
  Description of Artificial Sequence: Synthetic oligonucleotide
uuggugauuaccacugcua

SEQ ID NO: 1796976 - RNA, 19 nt, Artificial Sequence
  Description of Artificial Sequence: Synthetic oligonucleotide
aagcccagagagcaguccu

SEQ ID NO: 1796977 - RNA, 19 nt, Artificial Sequence
  Description of Artificial Sequence: Synthetic oligonucleotide
auuuagcggccucagccag

SEQ ID NO: 1796978 - RNA, 19 nt, Artificial Sequence
  Description of Artificial Sequence: Synthetic oligonucleotide
cccauuggaacuaauuuag

SEQ ID NO: 1796979 - RNA, 19 nt, Artificial Sequence
  Description of Artificial Sequence: Synthetic oligonucleotide
ggcuauuuagcauuuaaaa

SEQ ID NO: 1796980 - RNA, 19 nt, Artificial Sequence
  Description of Artificial Sequence: Synthetic oligonucleotide
uccuacuccaucugcauua

SEQ ID NO: 1796981 - RNA, 19 nt, Artificial Sequence
  Description of Artificial Sequence: Synthetic oligonucleotide
agcucuuuggagccaguag

SEQ ID NO: 1796982 - RNA, 19 nt, Artificial Sequence
  Description of Artificial Sequence: Synthetic oligonucleotide
caccaaacucaucagcaag

SEQ ID NO: 1796983 - RNA, 19 nt, Artificial Sequence
  Description of Artificial Sequence: Synthetic oligonucleotide
acuaauuuagcggccucag

SEQ ID NO: 1796984 - RNA, 19 nt, Artificial Sequence
  Description of Artificial Sequence: Synthetic oligonucleotide
agacagaccauaccucuca

SEQ ID NO: 1796985 - RNA, 19 nt, Artificial Sequence
  Description of Artificial Sequence: Synthetic oligonucleotide
uaaacguacccucgguguc

SEQ ID NO: 1796986 - RNA, 19 nt, Artificial Sequence
  Description of Artificial Sequence: Synthetic oligonucleotide
acauuaucuaggacaucgc

SEQ ID NO: 1796987 - RNA, 19 nt, Artificial Sequence
  Description of Artificial Sequence: Synthetic oligonucleotide
uaggacaucgcugccagac

SEQ ID NO: 1796988 - RNA, 19 nt, Artificial Sequence
  Description of Artificial Sequence: Synthetic oligonucleotide
auguacauggccuuuccuu

SEQ ID NO: 1796989 - RNA, 19 nt, Artificial Sequence
  Description of Artificial Sequence: Synthetic oligonucleotide
cucugugauagauccaguc

SEQ ID NO: 1796990 - RNA, 19 nt, Artificial Sequence
  Description of Artificial Sequence: Synthetic oligonucleotide
acccauuggaacuaauuua

SEQ ID NO: 1796991 - RNA, 19 nt, Artificial Sequence
  Description of Artificial Sequence: Synthetic oligonucleotide
cuccaucugcauuaauggc

SEQ ID NO: 1796992 - RNA, 19 nt, Artificial Sequence
  Description of Artificial Sequence: Synthetic oligonucleotide
gacuuugcagauucugguc

SEQ ID NO: 1796993 - RNA, 19 nt, Artificial Sequence
  Description of Artificial Sequence: Synthetic oligonucleotide
uauuuaugaguuccuucuu

SEQ ID NO: 1796994 - RNA, 19 nt, Artificial Sequence
  Description of Artificial Sequence: Synthetic oligonucleotide
acaucgcugccagacagac

SEQ ID NO: 1796995 - RNA, 19 nt, Artificial Sequence
  Description of Artificial Sequence: Synthetic oligonucleotide
ucuuccacugaaguaucug

SEQ ID NO: 1796996 - RNA, 19 nt, Artificial Sequence
  Description of Artificial Sequence: Synthetic oligonucleotide
guaguaaucuguaugauuu

SEQ ID NO: 1796997 - RNA, 19 nt, Artificial Sequence
  Description of Artificial Sequence: Synthetic oligonucleotide
gccaaaugcauuugccugg

SEQ ID NO: 1796998 - RNA, 19 nt, Artificial Sequence
  Description of Artificial Sequence: Synthetic oligonucleotide
auagccauuacgguccgca

SEQ ID NO: 1796999 - RNA, 19 nt, Artificial Sequence
  Description of Artificial Sequence: Synthetic oligonucleotide
cuaauuuagcggccucagc

SEQ ID NO: 1797000 - RNA, 19 nt, Artificial Sequence
  Description of Artificial Sequence: Synthetic oligonucleotide
aggcccugaugauucaguc

SEQ ID NO: 1797001 - RNA, 19 nt, Artificial Sequence
  Description of Artificial Sequence: Synthetic oligonucleotide
uguugaacccucgagcaua

SEQ ID NO: 1797002 - RNA, 19 nt, Artificial Sequence
  Description of Artificial Sequence: Synthetic oligonucleotide
aaauagguuguggaccaaa

SEQ ID NO: 1797003 - RNA, 19 nt, Artificial Sequence
  Description of Artificial Sequence: Synthetic oligonucleotide
uccucagaaaucuggccaa

SEQ ID NO: 1797004 - RNA, 19 nt, Artificial Sequence
  Description of Artificial Sequence: Synthetic oligonucleotide
uggauucuaccaucauggc

SEQ ID NO: 1797005 - RNA, 19 nt, Artificial Sequence
  Description of Artificial Sequence: Synthetic oligonucleotide
uagcacugucuacaauaag

SEQ ID NO: 1797006 - RNA, 19 nt, Artificial Sequence
  Description of Artificial Sequence: Synthetic oligonucleotide
ugauuaccacugcuacacc

SEQ ID NO: 1797007 - RNA, 19 nt, Artificial Sequence
  Description of Artificial Sequence: Synthetic oligonucleotide
auuacgguccgcagccgcc

SEQ ID NO: 1797008 - RNA, 19 nt, Artificial Sequence
  Description of Artificial Sequence: Synthetic oligonucleotide
augcuacauuaucuaggac

SEQ ID NO: 1797009 - RNA, 19 nt, Artificial Sequence
  Description of Artificial Sequence: Synthetic oligonucleotide
aaaggcccugaugauucag

SEQ ID NO: 1797010 - RNA, 19 nt, Artificial Sequence
  Description of Artificial Sequence: Synthetic oligonucleotide
gcuacuaccugguugguga

SEQ ID NO: 1797011 - RNA, 19 nt, Artificial Sequence
  Description of Artificial Sequence: Synthetic oligonucleotide
gauccagucucaauuccac

SEQ ID NO: 1797012 - RNA, 19 nt, Artificial Sequence
  Description of Artificial Sequence: Synthetic oligonucleotide
ugucuucccaguucggaau

SEQ ID NO: 1797013 - RNA, 19 nt, Artificial Sequence
  Description of Artificial Sequence: Synthetic oligonucleotide
caauaagcagugcauaucu

SEQ ID NO: 1797014 - RNA, 19 nt, Artificial Sequence
  Description of Artificial Sequence: Synthetic oligonucleotide
gugcauaagcaacagccuc

SEQ ID NO: 1797015 - RNA, 19 nt, Artificial Sequence
  Description of Artificial Sequence: Synthetic oligonucleotide
ggccaaaugcauuugccug

SEQ ID NO: 1797016 - RNA, 19 nt, Artificial Sequence
  Description of Artificial Sequence: Synthetic oligonucleotide
aaaaggcccugaugauuca

SEQ ID NO: 1797017 - RNA, 19 nt, Artificial Sequence
  Description of Artificial Sequence: Synthetic oligonucleotide
ugcagauucuggucucccc

SEQ ID NO: 1797018 - RNA, 19 nt, Artificial Sequence
  Description of Artificial Sequence: Synthetic oligonucleotide
guagucuguucuguagagg

SEQ ID NO: 1797019 - RNA, 19 nt, Artificial Sequence
  Description of Artificial Sequence: Synthetic oligonucleotide
agcagugcauaucuggauu

SEQ ID NO: 1797020 - RNA, 19 nt, Artificial Sequence
  Description of Artificial Sequence: Synthetic oligonucleotide
gagagucauagacuuugca

SEQ ID NO: 1797021 - RNA, 19 nt, Artificial Sequence
  Description of Artificial Sequence: Synthetic oligonucleotide
gcaguggugaaacccauug

SEQ ID NO: 1797022 - RNA, 19 nt, Artificial Sequence
  Description of Artificial Sequence: Synthetic oligonucleotide
ugauagauccagucucaau

SEQ ID NO: 1797023 - RNA, 19 nt, Artificial Sequence
  Description of Artificial Sequence: Synthetic oligonucleotide
aaacccauuggaacuaauu

SEQ ID NO: 1797024 - RNA, 19 nt, Artificial Sequence
  Description of Artificial Sequence: Synthetic oligonucleotide
caguggugaaacccauugg

SEQ ID NO: 1797025 - RNA, 19 nt, Artificial Sequence
  Description of Artificial Sequence: Synthetic oligonucleotide
agcggccucagccagaauu

SEQ ID NO: 1797026 - RNA, 19 nt, Artificial Sequence
  Description of Artificial Sequence: Synthetic oligonucleotide
agcugauacaauaaugguu

SEQ ID NO: 1797027 - RNA, 19 nt, Artificial Sequence
  Description of Artificial Sequence: Synthetic oligonucleotide
aaacguacccucgguguca

SEQ ID NO: 1797028 - RNA, 19 nt, Artificial Sequence
  Description of Artificial Sequence: Synthetic oligonucleotide
accgugaaauagguugugg

SEQ ID NO: 1797029 - RNA, 19 nt, Artificial Sequence
  Description of Artificial Sequence: Synthetic oligonucleotide
uuugcagauucuggucucc

SEQ ID NO: 1797030 - RNA, 19 nt, Artificial Sequence
  Description of Artificial Sequence: Synthetic oligonucleotide
guuugucaagcucuuugga

SEQ ID NO: 1797031 - RNA, 19 nt, Artificial Sequence
  Description of Artificial Sequence: Synthetic oligonucleotide
uaccacugcuacaccaaac

SEQ ID NO: 1797032 - RNA, 19 nt, Artificial Sequence
  Description of Artificial Sequence: Synthetic oligonucleotide
ugcaugggcaaugauguuu

SEQ ID NO: 1797033 - RNA, 19 nt, Artificial Sequence
  Description of Artificial Sequence: Synthetic oligonucleotide
guagagggcaguagcacug

SEQ ID NO: 1797034 - RNA, 19 nt, Artificial Sequence
  Description of Artificial Sequence: Synthetic oligonucleotide
gaaauucaguugcaguggu

SEQ ID NO: 1797035 - RNA, 19 nt, Artificial Sequence
  Description of Artificial Sequence: Synthetic oligonucleotide
cacuuaugccacauugcuc

SEQ ID NO: 1797036 - RNA, 19 nt, Artificial Sequence
  Description of Artificial Sequence: Synthetic oligonucleotide
cauuacgguccgcagccgc

SEQ ID NO: 1797037 - RNA, 19 nt, Artificial Sequence
  Description of Artificial Sequence: Synthetic oligonucleotide
uuguggaccaaagcuuucu

SEQ ID NO: 1797038 - RNA, 19 nt, Artificial Sequence
  Description of Artificial Sequence: Synthetic oligonucleotide
gccauuacgguccgcagcc

SEQ ID NO: 1797039 - RNA, 19 nt, Artificial Sequence
  Description of Artificial Sequence: Synthetic oligonucleotide
gaacuaauuuagcggccuc

SEQ ID NO: 1797040 - RNA, 19 nt, Artificial Sequence
  Description of Artificial Sequence: Synthetic oligonucleotide
ggacaucgcugccagacag

SEQ ID NO: 1797041 - RNA, 19 nt, Artificial Sequence
  Description of Artificial Sequence: Synthetic oligonucleotide
cuccaccacgaucaauggg

SEQ ID NO: 1797042 - RNA, 19 nt, Artificial Sequence
  Description of Artificial Sequence: Synthetic oligonucleotide
gcucuaaccgugaaauagg

SEQ ID NO: 1797043 - RNA, 19 nt, Artificial Sequence
  Description of Artificial Sequence: Synthetic oligonucleotide
agggcaguagcacugucua

SEQ ID NO: 1797044 - RNA, 19 nt, Artificial Sequence
  Description of Artificial Sequence: Synthetic oligonucleotide
gaugcuugauaaaggagcu

SEQ ID NO: 1797045 - RNA, 19 nt, Artificial Sequence
  Description of Artificial Sequence: Synthetic oligonucleotide
gaaaccagcuucuucuaau

SEQ ID NO: 1797046 - RNA, 19 nt, Artificial Sequence
  Description of Artificial Sequence: Synthetic oligonucleotide
gaaagcucuccucgaccug

SEQ ID NO: 1797047 - RNA, 19 nt, Artificial Sequence
  Description of Artificial Sequence: Synthetic oligonucleotide
accugaguagucuguucug

SEQ ID NO: 1797048 - RNA, 19 nt, Artificial Sequence
  Description of Artificial Sequence: Synthetic oligonucleotide
cuuccuuuccucagguaca

SEQ ID NO: 1797049 - RNA, 19 nt, Artificial Sequence
  Description of Artificial Sequence: Synthetic oligonucleotide
guugcaguggugaaaccca

SEQ ID NO: 1797050 - RNA, 19 nt, Artificial Sequence
  Description of Artificial Sequence: Synthetic oligonucleotide
uucaguugcaguggugaaa

SEQ ID NO: 1797051 - RNA, 19 nt, Artificial Sequence
  Description of Artificial Sequence: Synthetic oligonucleotide
uuuagcggccucagccaga

SEQ ID NO: 1797052 - RNA, 19 nt, Artificial Sequence
  Description of Artificial Sequence: Synthetic oligonucleotide
cuaaacguacccucggugu

SEQ ID NO: 1797053 - RNA, 19 nt, Artificial Sequence
  Description of Artificial Sequence: Synthetic oligonucleotide
ucuuuggagccaguaguaa

SEQ ID NO: 1797054 - RNA, 19 nt, Artificial Sequence
  Description of Artificial Sequence: Synthetic oligonucleotide
ucuggccuaaacguacccu

SEQ ID NO: 1797055 - RNA, 19 nt, Artificial Sequence
  Description of Artificial Sequence: Synthetic oligonucleotide
cugguuguugaugcauggg

SEQ ID NO: 1797056 - RNA, 19 nt, Artificial Sequence
  Description of Artificial Sequence: Synthetic oligonucleotide
uuacgguccgcagccgccg

SEQ ID NO: 1797057 - RNA, 19 nt, Artificial Sequence
  Description of Artificial Sequence: Synthetic oligonucleotide
auaaaggagcuggguuugg

SEQ ID NO: 1797058 - RNA, 19 nt, Artificial Sequence
  Description of Artificial Sequence: Synthetic oligonucleotide
auucuaccaucauggcuga

SEQ ID NO: 1797059 - RNA, 19 nt, Artificial Sequence
  Description of Artificial Sequence: Synthetic oligonucleotide
caauaaugguuuuccugga

SEQ ID NO: 1797060 - RNA, 19 nt, Artificial Sequence
  Description of Artificial Sequence: Synthetic oligonucleotide
uucugccaccagaaagcug

SEQ ID NO: 1797061 - RNA, 19 nt, Artificial Sequence
  Description of Artificial Sequence: Synthetic oligonucleotide
gcauaucuggauucuacca

SEQ ID NO: 1797062 - RNA, 19 nt, Artificial Sequence
  Description of Artificial Sequence: Synthetic oligonucleotide
gguacagccugguuguuga

SEQ ID NO: 1797063 - RNA, 19 nt, Artificial Sequence
  Description of Artificial Sequence: Synthetic oligonucleotide
cauuaggcuauuuagcauu

SEQ ID NO: 1797064 - RNA, 19 nt, Artificial Sequence
  Description of Artificial Sequence: Synthetic oligonucleotide
agagcccugaagaagccca

SEQ ID NO: 1797065 - RNA, 19 nt, Artificial Sequence
  Description of Artificial Sequence: Synthetic oligonucleotide
uugguggucuguguugaac

SEQ ID NO: 1797066 - RNA, 19 nt, Artificial Sequence
  Description of Artificial Sequence: Synthetic oligonucleotide
gugcauaucuggauucuac

SEQ ID NO: 1797067 - RNA, 19 nt, Artificial Sequence
  Description of Artificial Sequence: Synthetic oligonucleotide
uaaaggagcuggguuuggu

SEQ ID NO: 1797068 - RNA, 19 nt, Artificial Sequence
  Description of Artificial Sequence: Synthetic oligonucleotide
acuaccugguuggugauua

SEQ ID NO: 1797069 - RNA, 19 nt, Artificial Sequence
  Description of Artificial Sequence: Synthetic oligonucleotide
cugccagacagaccauacc

SEQ ID NO: 1797070 - RNA, 19 nt, Artificial Sequence
  Description of Artificial Sequence: Synthetic oligonucleotide
acccucgagcauaugcuac

SEQ ID NO: 1797071 - RNA, 19 nt, Artificial Sequence
  Description of Artificial Sequence: Synthetic oligonucleotide
cuaauucccuuaauauuua

SEQ ID NO: 1797072 - RNA, 19 nt, Artificial Sequence
  Description of Artificial Sequence: Synthetic oligonucleotide
gguagucacaucaggaaga

SEQ ID NO: 1797073 - RNA, 19 nt, Artificial Sequence
  Description of Artificial Sequence: Synthetic oligonucleotide
auucaguugcaguggugaa

SEQ ID NO: 1797074 - RNA, 19 nt, Artificial Sequence
  Description of Artificial Sequence: Synthetic oligonucleotide
agauccagucucaauucca

SEQ ID NO: 1797075 - RNA, 19 nt, Artificial Sequence
  Description of Artificial Sequence: Synthetic oligonucleotide
auuaccacugcuacaccaa

SEQ ID NO: 1797076 - RNA, 19 nt, Artificial Sequence
  Description of Artificial Sequence: Synthetic oligonucleotide
uguuuccuccaauggguuu

SEQ ID NO: 1797077 - RNA, 19 nt, Artificial Sequence
  Description of Artificial Sequence: Synthetic oligonucleotide
ccguauggaaaccagcuuc

SEQ ID NO: 1797078 - RNA, 19 nt, Artificial Sequence
  Description of Artificial Sequence: Synthetic oligonucleotide
uucccaguucggaauucuc

SEQ ID NO: 1797079 - RNA, 19 nt, Artificial Sequence
  Description of Artificial Sequence: Synthetic oligonucleotide
cgugaaauagguuguggac

SEQ ID NO: 1797080 - RNA, 19 nt, Artificial Sequence
  Description of Artificial Sequence: Synthetic oligonucleotide
cauuaucuaggacaucgcu

SEQ ID NO: 1797081 - RNA, 19 nt, Artificial Sequence
  Description of Artificial Sequence: Synthetic oligonucleotide
ggugaaauucaguugcagu

SEQ ID NO: 1797082 - RNA, 19 nt, Artificial Sequence
  Description of Artificial Sequence: Synthetic oligonucleotide
ucacaucauuggcacuuau

SEQ ID NO: 1797083 - RNA, 19 nt, Artificial Sequence
  Description of Artificial Sequence: Synthetic oligonucleotide
gaucaaugggaagcuggca

SEQ ID NO: 1797084 - RNA, 19 nt, Artificial Sequence
  Description of Artificial Sequence: Synthetic oligonucleotide
uggguuugguggucugugu

SEQ ID NO: 1797085 - RNA, 19 nt, Artificial Sequence
  Description of Artificial Sequence: Synthetic oligonucleotide
aucuaggacaucgcugcca

SEQ ID NO: 1797086 - RNA, 19 nt, Artificial Sequence
  Description of Artificial Sequence: Synthetic oligonucleotide
gcauguuacagccaaugua

SEQ ID NO: 1797087 - RNA, 19 nt, Artificial Sequence
  Description of Artificial Sequence: Synthetic oligonucleotide
augggcaaugauguuuccu

SEQ ID NO: 1797088 - RNA, 19 nt, Artificial Sequence
  Description of Artificial Sequence: Synthetic oligonucleotide
auguuacagccaauguaug

SEQ ID NO: 1797089 - RNA, 19 nt, Artificial Sequence
  Description of Artificial Sequence: Synthetic oligonucleotide
uuaugccacauugcucuaa

SEQ ID NO: 1797090 - RNA, 19 nt, Artificial Sequence
  Description of Artificial Sequence: Synthetic oligonucleotide
ggccuaaacguacccucgg

SEQ ID NO: 1797091 - RNA, 19 nt, Artificial Sequence
  Description of Artificial Sequence: Synthetic oligonucleotide
uuagcggccucagccagaa

SEQ ID NO: 1797092 - RNA, 19 nt, Artificial Sequence
  Description of Artificial Sequence: Synthetic oligonucleotide
auuggcacuuaugccacau

SEQ ID NO: 1797093 - RNA, 19 nt, Artificial Sequence
  Description of Artificial Sequence: Synthetic oligonucleotide
ccacauugcucuaaccgug

SEQ ID NO: 1797094 - RNA, 19 nt, Artificial Sequence
  Description of Artificial Sequence: Synthetic oligonucleotide
ccauuggaacuaauuuagc

SEQ ID NO: 1797095 - RNA, 19 nt, Artificial Sequence
  Description of Artificial Sequence: Synthetic oligonucleotide
ggugauuaccacugcuaca

SEQ ID NO: 1797096 - RNA, 19 nt, Artificial Sequence
  Description of Artificial Sequence: Synthetic oligonucleotide
ggcacuuaugccacauugc

SEQ ID NO: 1797097 - RNA, 19 nt, Artificial Sequence
  Description of Artificial Sequence: Synthetic oligonucleotide
cuggguuugguggucugug

SEQ ID NO: 1797098 - RNA, 19 nt, Artificial Sequence
  Description of Artificial Sequence: Synthetic oligonucleotide
aggacaucgcugccagaca

SEQ ID NO: 1797099 - RNA, 19 nt, Artificial Sequence
  Description of Artificial Sequence: Synthetic oligonucleotide
agccaauguaugacagauc

SEQ ID NO: 1797100 - RNA, 19 nt, Artificial Sequence
  Description of Artificial Sequence: Synthetic oligonucleotide
gggaucugcagugaacaug

SEQ ID NO: 1797101 - RNA, 19 nt, Artificial Sequence
  Description of Artificial Sequence: Synthetic oligonucleotide
ccuaaacguacccucggug

SEQ ID NO: 1797102 - RNA, 19 nt, Artificial Sequence
  Description of Artificial Sequence: Synthetic oligonucleotide
gcuagcagccguucuggcc

SEQ ID NO: 1797103 - RNA, 19 nt, Artificial Sequence
  Description of Artificial Sequence: Synthetic oligonucleotide
guucuggccuaaacguacc

SEQ ID NO: 1797104 - RNA, 19 nt, Artificial Sequence
  Description of Artificial Sequence: Synthetic oligonucleotide
gcuugauaaaggagcuggg

SEQ ID NO: 1797105 - RNA, 19 nt, Artificial Sequence
  Description of Artificial Sequence: Synthetic oligonucleotide
cacauugcucuaaccguga

SEQ ID NO: 1797106 - RNA, 19 nt, Artificial Sequence
  Description of Artificial Sequence: Synthetic oligonucleotide
gcagugcauaucuggauuc

SEQ ID NO: 1797107 - RNA, 19 nt, Artificial Sequence
  Description of Artificial Sequence: Synthetic oligonucleotide
guaugacagaucugugucu

SEQ ID NO: 1797108 - RNA, 19 nt, Artificial Sequence
  Description of Artificial Sequence: Synthetic oligonucleotide
gaacccucgagcauaugcu

SEQ ID NO: 1797109 - RNA, 19 nt, Artificial Sequence
  Description of Artificial Sequence: Synthetic oligonucleotide
caccguauggaaaccagcu

SEQ ID NO: 1797110 - RNA, 19 nt, Artificial Sequence
  Description of Artificial Sequence: Synthetic oligonucleotide
auuaggcuauuuagcauuu

SEQ ID NO: 1797111 - RNA, 19 nt, Artificial Sequence
  Description of Artificial Sequence: Synthetic oligonucleotide
caccacgaucaaugggaag

SEQ ID NO: 1797112 - RNA, 19 nt, Artificial Sequence
  Description of Artificial Sequence: Synthetic oligonucleotide
cuucagggagacagggaga

SEQ ID NO: 1797113 - RNA, 19 nt, Artificial Sequence
  Description of Artificial Sequence: Synthetic oligonucleotide
agguacagccugguuguug

SEQ ID NO: 1797114 - RNA, 19 nt, Artificial Sequence
  Description of Artificial Sequence: Synthetic oligonucleotide
uuccuucuuuggugcauaa

SEQ ID NO: 1797115 - RNA, 19 nt, Artificial Sequence
  Description of Artificial Sequence: Synthetic oligonucleotide
ggcccugaugauucagucc

SEQ ID NO: 1797116 - RNA, 19 nt, Artificial Sequence
  Description of Artificial Sequence: Synthetic oligonucleotide
gcaagucgcagcagcaucc

SEQ ID NO: 1797117 - RNA, 19 nt, Artificial Sequence
  Description of Artificial Sequence: Synthetic oligonucleotide
augcuugauaaaggagcug

SEQ ID NO: 1797118 - RNA, 19 nt, Artificial Sequence
  Description of Artificial Sequence: Synthetic oligonucleotide
gcaguccucuucauuaggc

SEQ ID NO: 1797119 - RNA, 19 nt, Artificial Sequence
  Description of Artificial Sequence: Synthetic oligonucleotide
gcugaaagcucuccucgac

SEQ ID NO: 1797120 - RNA, 19 nt, Artificial Sequence
  Description of Artificial Sequence: Synthetic oligonucleotide
aagcucuuuggagccagua

SEQ ID NO: 1797121 - RNA, 19 nt, Artificial Sequence
  Description of Artificial Sequence: Synthetic oligonucleotide
caucgcugccagacagacc

SEQ ID NO: 1797122 - RNA, 19 nt, Artificial Sequence
  Description of Artificial Sequence: Synthetic oligonucleotide
ggauucuaccaucauggcu

SEQ ID NO: 1797123 - RNA, 19 nt, Artificial Sequence
  Description of Artificial Sequence: Synthetic oligonucleotide
gaguuccuucuuuggugca

SEQ ID NO: 1797124 - RNA, 19 nt, Artificial Sequence
  Description of Artificial Sequence: Synthetic oligonucleotide
ccaucauggcugaugcuug

SEQ ID NO: 1797125 - RNA, 19 nt, Artificial Sequence
  Description of Artificial Sequence: Synthetic oligonucleotide
agucucaauuccaccuuga

SEQ ID NO: 1797126 - RNA, 19 nt, Artificial Sequence
  Description of Artificial Sequence: Synthetic oligonucleotide
guaugauuucugaacgccu

SEQ ID NO: 1797127 - RNA, 19 nt, Artificial Sequence
  Description of Artificial Sequence: Synthetic oligonucleotide
uaccaucauggcugaugcu

SEQ ID NO: 1797128 - RNA, 19 nt, Artificial Sequence
  Description of Artificial Sequence: Synthetic oligonucleotide
cuugauaaaggagcugggu

SEQ ID NO: 1797129 - RNA, 19 nt, Artificial Sequence
  Description of Artificial Sequence: Synthetic oligonucleotide
caguugcaguggugaaacc

SEQ ID NO: 1797130 - RNA, 19 nt, Artificial Sequence
  Description of Artificial Sequence: Synthetic oligonucleotide
gucuguguugaacccucga

SEQ ID NO: 1797131 - RNA, 19 nt, Artificial Sequence
  Description of Artificial Sequence: Synthetic oligonucleotide
cguucuggccuaaacguac

SEQ ID NO: 1797132 - RNA, 19 nt, Artificial Sequence
  Description of Artificial Sequence: Synthetic oligonucleotide
cauugcucuaaccgugaaa

SEQ ID NO: 1797133 - RNA, 19 nt, Artificial Sequence
  Description of Artificial Sequence: Synthetic oligonucleotide
agccagaauuuugucugcu

SEQ ID NO: 1797134 - RNA, 19 nt, Artificial Sequence
  Description of Artificial Sequence: Synthetic oligonucleotide
ccaccguauggaaaccagc

SEQ ID NO: 1797135 - RNA, 19 nt, Artificial Sequence
  Description of Artificial Sequence: Synthetic oligonucleotide
ucuucccaguucggaauuc

SEQ ID NO: 1797136 - RNA, 19 nt, Artificial Sequence
  Description of Artificial Sequence: Synthetic oligonucleotide
aaugggaagcuggcauguu

SEQ ID NO: 1797137 - RNA, 19 nt, Artificial Sequence
  Description of Artificial Sequence: Synthetic oligonucleotide
cauaagcaacagccuccac

SEQ ID NO: 1797138 - RNA, 19 nt, Artificial Sequence
  Description of Artificial Sequence: Synthetic oligonucleotide
uuaggcuauuuagcauuua

SEQ ID NO: 1797139 - RNA, 19 nt, Artificial Sequence
  Description of Artificial Sequence: Synthetic oligonucleotide
guacccucggugucaaugu

SEQ ID NO: 1797140 - RNA, 19 nt, Artificial Sequence
  Description of Artificial Sequence: Synthetic oligonucleotide
uacccucggugucaaugua

SEQ ID NO: 1797141 - RNA, 19 nt, Artificial Sequence
  Description of Artificial Sequence: Synthetic oligonucleotide
agagagcaguccucuucau

SEQ ID NO: 1797142 - RNA, 19 nt, Artificial Sequence
  Description of Artificial Sequence: Synthetic oligonucleotide
ccaauguaugacagaucug

SEQ ID NO: 1797143 - RNA, 19 nt, Artificial Sequence
  Description of Artificial Sequence: Synthetic oligonucleotide
cuccaaacaucucugugau

SEQ ID NO: 1797144 - RNA, 19 nt, Artificial Sequence
  Description of Artificial Sequence: Synthetic oligonucleotide
agugcauaucuggauucua

SEQ ID NO: 1797145 - RNA, 19 nt, Artificial Sequence
  Description of Artificial Sequence: Synthetic oligonucleotide
cagccguucuggccuaaac

SEQ ID NO: 1797146 - RNA, 19 nt, Artificial Sequence
  Description of Artificial Sequence: Synthetic oligonucleotide
cccuuaauauuuaugaguu

SEQ ID NO: 1797147 - RNA, 19 nt, Artificial Sequence
  Description of Artificial Sequence: Synthetic oligonucleotide
ucgaccugaguagucuguu

SEQ ID NO: 1797148 - RNA, 19 nt, Artificial Sequence
  Description of Artificial Sequence: Synthetic oligonucleotide
cugaguagucuguucugua

SEQ ID NO: 1797149 - RNA, 19 nt, Artificial Sequence
  Description of Artificial Sequence: Synthetic oligonucleotide
ugcauuugccuggcugaaa

SEQ ID NO: 1797150 - RNA, 19 nt, Artificial Sequence
  Description of Artificial Sequence: Synthetic oligonucleotide
ccgugaaauagguugugga

SEQ ID NO: 1797151 - RNA, 19 nt, Artificial Sequence
  Description of Artificial Sequence: Synthetic oligonucleotide
auguuccgguagucacauc

SEQ ID NO: 1797152 - RNA, 19 nt, Artificial Sequence
  Description of Artificial Sequence: Synthetic oligonucleotide
cacgaucaaugggaagcug

SEQ ID NO: 1797153 - RNA, 19 nt, Artificial Sequence
  Description of Artificial Sequence: Synthetic oligonucleotide
uggaagccauguuccggua

SEQ ID NO: 1797154 - RNA, 19 nt, Artificial Sequence
  Description of Artificial Sequence: Synthetic oligonucleotide
ccaaaugcauuugccuggc

SEQ ID NO: 1797155 - RNA, 19 nt, Artificial Sequence
  Description of Artificial Sequence: Synthetic oligonucleotide
gacaucgcugccagacaga

SEQ ID NO: 1797156 - RNA, 19 nt, Artificial Sequence
  Description of Artificial Sequence: Synthetic oligonucleotide
gugaaacccauuggaacua

SEQ ID NO: 1797157 - RNA, 19 nt, Artificial Sequence
  Description of Artificial Sequence: Synthetic oligonucleotide
cuacauuaucuaggacauc

SEQ ID NO: 1797158 - RNA, 19 nt, Artificial Sequence
  Description of Artificial Sequence: Synthetic oligonucleotide
guuguggaccaaagcuuuc

SEQ ID NO: 1797159 - RNA, 19 nt, Artificial Sequence
  Description of Artificial Sequence: Synthetic oligonucleotide
cccaguucggaauucucca

SEQ ID NO: 1797160 - RNA, 19 nt, Artificial Sequence
  Description of Artificial Sequence: Synthetic oligonucleotide
cuccucgaccugaguaguc

SEQ ID NO: 1797161 - RNA, 19 nt, Artificial Sequence
  Description of Artificial Sequence: Synthetic oligonucleotide
cagccaauguaugacagau

SEQ ID NO: 1797162 - RNA, 19 nt, Artificial Sequence
  Description of Artificial Sequence: Synthetic oligonucleotide
ccugaugauucaguccuug

SEQ ID NO: 1797163 - RNA, 19 nt, Artificial Sequence
  Description of Artificial Sequence: Synthetic oligonucleotide
uuuggcggccgggucugcu

SEQ ID NO: 1797164 - RNA, 19 nt, Artificial Sequence
  Description of Artificial Sequence: Synthetic oligonucleotide
gaaauagguuguggaccaa

SEQ ID NO: 1797165 - RNA, 19 nt, Artificial Sequence
  Description of Artificial Sequence: Synthetic oligonucleotide
auguuuccuccaauggguu

SEQ ID NO: 1797166 - RNA, 19 nt, Artificial Sequence
  Description of Artificial Sequence: Synthetic oligonucleotide
aucauggcugaugcuugau

SEQ ID NO: 1797167 - RNA, 19 nt, Artificial Sequence
  Description of Artificial Sequence: Synthetic oligonucleotide
ggaacuaauuuagcggccu

SEQ ID NO: 1797168 - RNA, 19 nt, Artificial Sequence
  Description of Artificial Sequence: Synthetic oligonucleotide
augcauuugccuggcugaa

SEQ ID NO: 1797169 - RNA, 19 nt, Artificial Sequence
  Description of Artificial Sequence: Synthetic oligonucleotide
guuuccuccaauggguuuu

SEQ ID NO: 1797170 - RNA, 19 nt, Artificial Sequence
  Description of Artificial Sequence: Synthetic oligonucleotide
gucuccccucuuccuuucc

SEQ ID NO: 1797171 - RNA, 19 nt, Artificial Sequence
  Description of Artificial Sequence: Synthetic oligonucleotide
uacgguccgcagccgccgu

SEQ ID NO: 1797172 - RNA, 19 nt, Artificial Sequence
  Description of Artificial Sequence: Synthetic oligonucleotide
ggcauguuacagccaaugu

SEQ ID NO: 1797173 - RNA, 19 nt, Artificial Sequence
  Description of Artificial Sequence: Synthetic oligonucleotide
ccacugcuacaccaaacuc

SEQ ID NO: 1797174 - RNA, 19 nt, Artificial Sequence
  Description of Artificial Sequence: Synthetic oligonucleotide
augcaugggcaaugauguu

SEQ ID NO: 1797175 - RNA, 19 nt, Artificial Sequence
  Description of Artificial Sequence: Synthetic oligonucleotide
caacagccuccaccguaug

SEQ ID NO: 1797176 - RNA, 19 nt, Artificial Sequence
  Description of Artificial Sequence: Synthetic oligonucleotide
cauagacuuugcagauucu

SEQ ID NO: 1797177 - RNA, 19 nt, Artificial Sequence
  Description of Artificial Sequence: Synthetic oligonucleotide
uugaacccucgagcauaug

SEQ ID NO: 1797178 - RNA, 19 nt, Artificial Sequence
  Description of Artificial Sequence: Synthetic oligonucleotide
cauagccauuacgguccgc

SEQ ID NO: 1797179 - RNA, 19 nt, Artificial Sequence
  Description of Artificial Sequence: Synthetic oligonucleotide
uacuaccugguuggugauu

SEQ ID NO: 1797180 - RNA, 19 nt, Artificial Sequence
  Description of Artificial Sequence: Synthetic oligonucleotide
gccgcgcgcuccuuuggcg

SEQ ID NO: 1797181 - RNA, 19 nt, Artificial Sequence
  Description of Artificial Sequence: Synthetic oligonucleotide
ggugcauaagcaacagccu

SEQ ID NO: 1797182 - RNA, 19 nt, Artificial Sequence
  Description of Artificial Sequence: Synthetic oligonucleotide
cuuaugccacauugcucua

SEQ ID NO: 1797183 - RNA, 19 nt, Artificial Sequence
  Description of Artificial Sequence: Synthetic oligonucleotide
cguacccucggugucaaug

SEQ ID NO: 1797184 - RNA, 19 nt, Artificial Sequence
  Description of Artificial Sequence: Synthetic oligonucleotide
gggaagcuggcauguuaca

SEQ ID NO: 1797185 - RNA, 19 nt, Artificial Sequence
  Description of Artificial Sequence: Synthetic oligonucleotide
ccgguagucacaucaggaa

SEQ ID NO: 1797186 - RNA, 19 nt, Artificial Sequence
  Description of Artificial Sequence: Synthetic oligonucleotide
cuccaccguauggaaacca

SEQ ID NO: 1797187 - RNA, 19 nt, Artificial Sequence
  Description of Artificial Sequence: Synthetic oligonucleotide
cauguuccgguagucacau

SEQ ID NO: 1797188 - RNA, 19 nt, Artificial Sequence
  Description of Artificial Sequence: Synthetic oligonucleotide
cucgaccugaguagucugu

SEQ ID NO: 1797189 - RNA, 19 nt, Artificial Sequence
  Description of Artificial Sequence: Synthetic oligonucleotide
gccgggucugcucacgcca

SEQ ID NO: 1797190 - RNA, 19 nt, Artificial Sequence
  Description of Artificial Sequence: Synthetic oligonucleotide
ccuuggcaucuccuacucc

SEQ ID NO: 1797191 - RNA, 19 nt, Artificial Sequence
  Description of Artificial Sequence: Synthetic oligonucleotide
ccgcgcgcuccuuuggcgg

SEQ ID NO: 1797192 - RNA, 19 nt, Artificial Sequence
  Description of Artificial Sequence: Synthetic oligonucleotide
gauucuggucuccccucuu

SEQ ID NO: 1797193 - RNA, 19 nt, Artificial Sequence
  Description of Artificial Sequence: Synthetic oligonucleotide
gggcaguagcacugucuac

SEQ ID NO: 1797194 - RNA, 19 nt, Artificial Sequence
  Description of Artificial Sequence: Synthetic oligonucleotide
cagccuccaccguauggaa

SEQ ID NO: 1797195 - RNA, 19 nt, Artificial Sequence
  Description of Artificial Sequence: Synthetic oligonucleotide
gguuguggaccaaagcuuu

SEQ ID NO: 1797196 - RNA, 19 nt, Artificial Sequence
  Description of Artificial Sequence: Synthetic oligonucleotide
guggucuguguugaacccu

SEQ ID NO: 1797197 - RNA, 19 nt, Artificial Sequence
  Description of Artificial Sequence: Synthetic oligonucleotide
cccucgagcauaugcuaca

SEQ ID NO: 1797198 - RNA, 19 nt, Artificial Sequence
  Description of Artificial Sequence: Synthetic oligonucleotide
guugaacccucgagcauau

SEQ ID NO: 1797199 - RNA, 19 nt, Artificial Sequence
  Description of Artificial Sequence: Synthetic oligonucleotide
gguccgcagccgccguggg

SEQ ID NO: 1797200 - RNA, 19 nt, Artificial Sequence
  Description of Artificial Sequence: Synthetic oligonucleotide
agggagagucauagacuuu

SEQ ID NO: 1797201 - RNA, 19 nt, Artificial Sequence
  Description of Artificial Sequence: Synthetic oligonucleotide
cguauggaaaccagcuucu

SEQ ID NO: 1797202 - RNA, 19 nt, Artificial Sequence
  Description of Artificial Sequence: Synthetic oligonucleotide
cagugcauaucuggauucu

SEQ ID NO: 1797203 - RNA, 19 nt, Artificial Sequence
  Description of Artificial Sequence: Synthetic oligonucleotide
ccaguucggaauucuccaa

SEQ ID NO: 1797204 - RNA, 19 nt, Artificial Sequence
  Description of Artificial Sequence: Synthetic oligonucleotide
cucagaaaucuggccaaau

SEQ ID NO: 1797205 - RNA, 19 nt, Artificial Sequence
  Description of Artificial Sequence: Synthetic oligonucleotide
cuacuaccugguuggugau

SEQ ID NO: 1797206 - RNA, 19 nt, Artificial Sequence
  Description of Artificial Sequence: Synthetic oligonucleotide
gccuaaacguacccucggu

SEQ ID NO: 1797207 - RNA, 19 nt, Artificial Sequence
  Description of Artificial Sequence: Synthetic oligonucleotide
ccuccaccguauggaaacc

SEQ ID NO: 1797208 - RNA, 19 nt, Artificial Sequence
  Description of Artificial Sequence: Synthetic oligonucleotide
ccauuacgguccgcagccg

SEQ ID NO: 1797209 - RNA, 19 nt, Artificial Sequence
  Description of Artificial Sequence: Synthetic oligonucleotide
cuuuggcggccgggucugc

SEQ ID NO: 1797210 - RNA, 19 nt, Artificial Sequence
  Description of Artificial Sequence: Synthetic oligonucleotide
cgaccugaguagucuguuc

SEQ ID NO: 1797211 - RNA, 19 nt, Artificial Sequence
  Description of Artificial Sequence: Synthetic oligonucleotide
caaaugcauuugccuggcu

SEQ ID NO: 1797212 - RNA, 19 nt, Artificial Sequence
  Description of Artificial Sequence: Synthetic oligonucleotide
ccuuuggcggccgggucug

SEQ ID NO: 1797213 - RNA, 19 nt, Artificial Sequence
  Description of Artificial Sequence: Synthetic oligonucleotide
caagucgcagcagcauccu

SEQ ID NO: 1797214 - RNA, 19 nt, Artificial Sequence
  Description of Artificial Sequence: Synthetic oligonucleotide
guauggaaaccagcuucuu

SEQ ID NO: 1797215 - RNA, 19 nt, Artificial Sequence
  Description of Artificial Sequence: Synthetic oligonucleotide
ccgggucugcucacgccac

SEQ ID NO: 1797216 - RNA, 19 nt, Artificial Sequence
  Description of Artificial Sequence: Synthetic oligonucleotide
gaacgccuuuggugaaauu

SEQ ID NO: 1797217 - RNA, 19 nt, Artificial Sequence
  Description of Artificial Sequence: Synthetic oligonucleotide
gcaacagccuccaccguau

SEQ ID NO: 1797218 - RNA, 19 nt, Artificial Sequence
  Description of Artificial Sequence: Synthetic oligonucleotide
caagcucuuuggagccagu

SEQ ID NO: 1797219 - RNA, 19 nt, Artificial Sequence
  Description of Artificial Sequence: Synthetic oligonucleotide
ggagacagggagagucaua

SEQ ID NO: 1797220 - RNA, 19 nt, Artificial Sequence
  Description of Artificial Sequence: Synthetic oligonucleotide
ccguucuggccuaaacgua

SEQ ID NO: 1797221 - RNA, 19 nt, Artificial Sequence
  Description of Artificial Sequence: Synthetic oligonucleotide
guacagccugguuguugau

SEQ ID NO: 1797222 - RNA, 19 nt, Artificial Sequence
  Description of Artificial Sequence: Synthetic oligonucleotide
cucgagcauaugcuacauu

SEQ ID NO: 1797223 - RNA, 19 nt, Artificial Sequence
  Description of Artificial Sequence: Synthetic oligonucleotide
uagcggccucagccagaau

SEQ ID NO: 1797224 - RNA, 19 nt, Artificial Sequence
  Description of Artificial Sequence: Synthetic oligonucleotide
acguacccucggugucaau

SEQ ID NO: 1797225 - RNA, 19 nt, Artificial Sequence
  Description of Artificial Sequence: Synthetic oligonucleotide
gcggccgggucugcucacg

SEQ ID NO: 1797226 - RNA, 19 nt, Artificial Sequence
  Description of Artificial Sequence: Synthetic oligonucleotide
cuugggcuacuaccugguu

SEQ ID NO: 1797227 - RNA, 19 nt, Artificial Sequence
  Description of Artificial Sequence: Synthetic oligonucleotide
cgguccgcagccgccgugg

SEQ ID NO: 1797228 - RNA, 19 nt, Artificial Sequence
  Description of Artificial Sequence: Synthetic oligonucleotide
ccacgaucaaugggaagcu

SEQ ID NO: 1797229 - RNA, 19 nt, Artificial Sequence
  Description of Artificial Sequence: Synthetic oligonucleotide
ccucagaaaucuggccaaa

SEQ ID NO: 1797230 - RNA, 19 nt, Artificial Sequence
  Description of Artificial Sequence: Synthetic oligonucleotide
cugccaccagaaagcugau

SEQ ID NO: 1797231 - RNA, 19 nt, Artificial Sequence
  Description of Artificial Sequence: Synthetic oligonucleotide
gccacugcuagcagccguu

SEQ ID NO: 1797232 - RNA, 19 nt, Artificial Sequence
  Description of Artificial Sequence: Synthetic oligonucleotide
gugggccgcgcgcuccuuu

SEQ ID NO: 1797233 - RNA, 19 nt, Artificial Sequence
  Description of Artificial Sequence: Synthetic oligonucleotide
ccucgagcauaugcuacau

SEQ ID NO: 1797234 - RNA, 19 nt, Artificial Sequence
  Description of Artificial Sequence: Synthetic oligonucleotide
gggcuacuaccugguuggu

SEQ ID NO: 1797235 - RNA, 19 nt, Artificial Sequence
  Description of Artificial Sequence: Synthetic oligonucleotide
cagguacagccugguuguu

SEQ ID NO: 1797236 - RNA, 19 nt, Artificial Sequence
  Description of Artificial Sequence: Synthetic oligonucleotide
ccucagguacagccugguu

SEQ ID NO: 1797237 - RNA, 19 nt, Artificial Sequence
  Description of Artificial Sequence: Synthetic oligonucleotide
ccgugggccgcgcgcuccu

SEQ ID NO: 1797238 - RNA, 19 nt, Artificial Sequence
  Description of Artificial Sequence: Synthetic oligonucleotide
cgugggccgcgcgcuccuu

SEQ ID NO: 1797239 - RNA, 19 nt, Artificial Sequence
  Description of Artificial Sequence: Synthetic oligonucleotide
acaaauauaaauuaauuac

SEQ ID NO: 1797240 - RNA, 19 nt, Artificial Sequence
  Description of Artificial Sequence: Synthetic oligonucleotide
aaaagauucgaaucgaccc

SEQ ID NO: 1797241 - RNA, 19 nt, Artificial Sequence
  Description of Artificial Sequence: Synthetic oligonucleotide
ucuuacuccaucuagaaag

SEQ ID NO: 1797242 - RNA, 19 nt, Artificial Sequence
  Description of Artificial Sequence: Synthetic oligonucleotide
aaguuaaugaauuaguccu

SEQ ID NO: 1797243 - RNA, 19 nt, Artificial Sequence
  Description of Artificial Sequence: Synthetic oligonucleotide
uacuauauaaacaacauua

SEQ ID NO: 1797244 - RNA, 19 nt, Artificial Sequence
  Description of Artificial Sequence: Synthetic oligonucleotide
uaauuaauacuaaaacagg

SEQ ID NO: 1797245 - RNA, 19 nt, Artificial Sequence
  Description of Artificial Sequence: Synthetic oligonucleotide
aaagauucgaaucgacccc

SEQ ID NO: 1797246 - RNA, 19 nt, Artificial Sequence
  Description of Artificial Sequence: Synthetic oligonucleotide
aaaucacuaggacaguggc

SEQ ID NO: 1797247 - RNA, 19 nt, Artificial Sequence
  Description of Artificial Sequence: Synthetic oligonucleotide
auguaggaaaauuuaauac

SEQ ID NO: 1797248 - RNA, 19 nt, Artificial Sequence
  Description of Artificial Sequence: Synthetic oligonucleotide
acuaaaacagguccgaggg

SEQ ID NO: 1797249 - RNA, 19 nt, Artificial Sequence
  Description of Artificial Sequence: Synthetic oligonucleotide
aaagugaguaaaccaaagg

SEQ ID NO: 1797250 - RNA, 19 nt, Artificial Sequence
  Description of Artificial Sequence: Synthetic oligonucleotide
uacaucagaaaucacuagg

SEQ ID NO: 1797251 - RNA, 19 nt, Artificial Sequence
  Description of Artificial Sequence: Synthetic oligonucleotide
aaguccacaaguuacaaga

SEQ ID NO: 1797252 - RNA, 19 nt, Artificial Sequence
  Description of Artificial Sequence: Synthetic oligonucleotide
uaauacauacuauauaaac

SEQ ID NO: 1797253 - RNA, 19 nt, Artificial Sequence
  Description of Artificial Sequence: Synthetic oligonucleotide
uguaggaaaauuuaauaca

SEQ ID NO: 1797254 - RNA, 19 nt, Artificial Sequence
  Description of Artificial Sequence: Synthetic oligonucleotide
ugaauuaguccucaaaugu

SEQ ID NO: 1797255 - RNA, 19 nt, Artificial Sequence
  Description of Artificial Sequence: Synthetic oligonucleotide
uuuguguucccuuugcggg

SEQ ID NO: 1797256 - RNA, 19 nt, Artificial Sequence
  Description of Artificial Sequence: Synthetic oligonucleotide
agugaguaaaccaaaggcc

SEQ ID NO: 1797257 - RNA, 19 nt, Artificial Sequence
  Description of Artificial Sequence: Synthetic oligonucleotide
uuaauauacaagaaucaaa

SEQ ID NO: 1797258 - RNA, 19 nt, Artificial Sequence
  Description of Artificial Sequence: Synthetic oligonucleotide
uagucaacagguuucaaag

SEQ ID NO: 1797259 - RNA, 19 nt, Artificial Sequence
  Description of Artificial Sequence: Synthetic oligonucleotide
gauucagagagccaaauuc

SEQ ID NO: 1797260 - RNA, 19 nt, Artificial Sequence
  Description of Artificial Sequence: Synthetic oligonucleotide
uacuguuuagucaacaggu

SEQ ID NO: 1797261 - RNA, 19 nt, Artificial Sequence
  Description of Artificial Sequence: Synthetic oligonucleotide
aaaagugcagcaguuuuac

SEQ ID NO: 1797262 - RNA, 19 nt, Artificial Sequence
  Description of Artificial Sequence: Synthetic oligonucleotide
uuuacaucagaaaucacua

SEQ ID NO: 1797263 - RNA, 19 nt, Artificial Sequence
  Description of Artificial Sequence: Synthetic oligonucleotide
aguagcagaagcaauggcc

SEQ ID NO: 1797264 - RNA, 19 nt, Artificial Sequence
  Description of Artificial Sequence: Synthetic oligonucleotide
uggguuuuggucuauagga

SEQ ID NO: 1797265 - RNA, 19 nt, Artificial Sequence
  Description of Artificial Sequence: Synthetic oligonucleotide
acaagaaaaccaccugucc

SEQ ID NO: 1797266 - RNA, 19 nt, Artificial Sequence
  Description of Artificial Sequence: Synthetic oligonucleotide
gacuaaagcagccuggacc

SEQ ID NO: 1797267 - RNA, 19 nt, Artificial Sequence
  Description of Artificial Sequence: Synthetic oligonucleotide
auagccuaacaauacuggc

SEQ ID NO: 1797268 - RNA, 19 nt, Artificial Sequence
  Description of Artificial Sequence: Synthetic oligonucleotide
aauacuggcaagcuauacu

SEQ ID NO: 1797269 - RNA, 19 nt, Artificial Sequence
  Description of Artificial Sequence: Synthetic oligonucleotide
aaugacuacacagagucca

SEQ ID NO: 1797270 - RNA, 19 nt, Artificial Sequence
  Description of Artificial Sequence: Synthetic oligonucleotide
aaaggugagcuagaagacc

SEQ ID NO: 1797271 - RNA, 19 nt, Artificial Sequence
  Description of Artificial Sequence: Synthetic oligonucleotide
ugaugcaaacccaucaacc

SEQ ID NO: 1797272 - RNA, 19 nt, Artificial Sequence
  Description of Artificial Sequence: Synthetic oligonucleotide
ucauuauugguacugccca

SEQ ID NO: 1797273 - RNA, 19 nt, Artificial Sequence
  Description of Artificial Sequence: Synthetic oligonucleotide
auugguacugcccacacca

SEQ ID NO: 1797274 - RNA, 19 nt, Artificial Sequence
  Description of Artificial Sequence: Synthetic oligonucleotide
uucacaaauauaaauuaau

SEQ ID NO: 1797275 - RNA, 19 nt, Artificial Sequence
  Description of Artificial Sequence: Synthetic oligonucleotide
uuacaagaaaaccaccugu

SEQ ID NO: 1797276 - RNA, 19 nt, Artificial Sequence
  Description of Artificial Sequence: Synthetic oligonucleotide
ugugugaaccugcaaagcc

SEQ ID NO: 1797277 - RNA, 19 nt, Artificial Sequence
  Description of Artificial Sequence: Synthetic oligonucleotide
aacgagucugaacucuuac

SEQ ID NO: 1797278 - RNA, 19 nt, Artificial Sequence
  Description of Artificial Sequence: Synthetic oligonucleotide
uacuaaaacagguccgagg

SEQ ID NO: 1797279 - RNA, 19 nt, Artificial Sequence
  Description of Artificial Sequence: Synthetic oligonucleotide
caugggaaagucauuauug

SEQ ID NO: 1797280 - RNA, 19 nt, Artificial Sequence
  Description of Artificial Sequence: Synthetic oligonucleotide
uguguauauccaaaacaag

SEQ ID NO: 1797281 - RNA, 19 nt, Artificial Sequence
  Description of Artificial Sequence: Synthetic oligonucleotide
uuccuaagcagcuucagca

SEQ ID NO: 1797282 - RNA, 19 nt, Artificial Sequence
  Description of Artificial Sequence: Synthetic oligonucleotide
ugagcuagaagaccacagg

SEQ ID NO: 1797283 - RNA, 19 nt, Artificial Sequence
  Description of Artificial Sequence: Synthetic oligonucleotide
uauccauauacugagaaaa

SEQ ID NO: 1797284 - RNA, 19 nt, Artificial Sequence
  Description of Artificial Sequence: Synthetic oligonucleotide
aagugcagcaguuuuacaa

SEQ ID NO: 1797285 - RNA, 19 nt, Artificial Sequence
  Description of Artificial Sequence: Synthetic oligonucleotide
auacuggcaagcuauacug

SEQ ID NO: 1797286 - RNA, 19 nt, Artificial Sequence
  Description of Artificial Sequence: Synthetic oligonucleotide
agucauuauugguacugcc

SEQ ID NO: 1797287 - RNA, 19 nt, Artificial Sequence
  Description of Artificial Sequence: Synthetic oligonucleotide
aaauguguuggcuugucaa

SEQ ID NO: 1797288 - RNA, 19 nt, Artificial Sequence
  Description of Artificial Sequence: Synthetic oligonucleotide
ucaacagguuucaaagucc

SEQ ID NO: 1797289 - RNA, 19 nt, Artificial Sequence
  Description of Artificial Sequence: Synthetic oligonucleotide
uuuggauagccuaacaaua

SEQ ID NO: 1797290 - RNA, 19 nt, Artificial Sequence
  Description of Artificial Sequence: Synthetic oligonucleotide
aacauuauuuacaucagaa

SEQ ID NO: 1797291 - RNA, 19 nt, Artificial Sequence
  Description of Artificial Sequence: Synthetic oligonucleotide
acugaaagugaguaaacca

SEQ ID NO: 1797292 - RNA, 19 nt, Artificial Sequence
  Description of Artificial Sequence: Synthetic oligonucleotide
gauagccuaacaauacugg

SEQ ID NO: 1797293 - RNA, 19 nt, Artificial Sequence
  Description of Artificial Sequence: Synthetic oligonucleotide
ugccaugacccaaugaugc

SEQ ID NO: 1797294 - RNA, 19 nt, Artificial Sequence
  Description of Artificial Sequence: Synthetic oligonucleotide
aguugcguaaagugaaccg

SEQ ID NO: 1797295 - RNA, 19 nt, Artificial Sequence
  Description of Artificial Sequence: Synthetic oligonucleotide
uguuuagucaacagguuuc

SEQ ID NO: 1797296 - RNA, 19 nt, Artificial Sequence
  Description of Artificial Sequence: Synthetic oligonucleotide
auaaacaacauuauuuaca

SEQ ID NO: 1797297 - RNA, 19 nt, Artificial Sequence
  Description of Artificial Sequence: Synthetic oligonucleotide
aucagaaaucacuaggaca

SEQ ID NO: 1797298 - RNA, 19 nt, Artificial Sequence
  Description of Artificial Sequence: Synthetic oligonucleotide
gaagcaauggcccaucaca

SEQ ID NO: 1797299 - RNA, 19 nt, Artificial Sequence
  Description of Artificial Sequence: Synthetic oligonucleotide
ucaaggacacaacucaaac

SEQ ID NO: 1797300 - RNA, 19 nt, Artificial Sequence
  Description of Artificial Sequence: Synthetic oligonucleotide
aaaguccacaaguuacaag

SEQ ID NO: 1797301 - RNA, 19 nt, Artificial Sequence
  Description of Artificial Sequence: Synthetic oligonucleotide
caguaagucacuagaagag

SEQ ID NO: 1797302 - RNA, 19 nt, Artificial Sequence
  Description of Artificial Sequence: Synthetic oligonucleotide
aacaauacuggcaagcuau

SEQ ID NO: 1797303 - RNA, 19 nt, Artificial Sequence
  Description of Artificial Sequence: Synthetic oligonucleotide
aaaggccugacccaguuau

SEQ ID NO: 1797304 - RNA, 19 nt, Artificial Sequence
  Description of Artificial Sequence: Synthetic oligonucleotide
gacuacacagaguccaagg

SEQ ID NO: 1797305 - RNA, 19 nt, Artificial Sequence
  Description of Artificial Sequence: Synthetic oligonucleotide
caguuauccauauacugag

SEQ ID NO: 1797306 - RNA, 19 nt, Artificial Sequence
  Description of Artificial Sequence: Synthetic oligonucleotide
ggaaugacuacacagaguc

SEQ ID NO: 1797307 - RNA, 19 nt, Artificial Sequence
  Description of Artificial Sequence: Synthetic oligonucleotide
aaaguuagggaaaguugcg

SEQ ID NO: 1797308 - RNA, 19 nt, Artificial Sequence
  Description of Artificial Sequence: Synthetic oligonucleotide
aaguuacaagaaaaccacc

SEQ ID NO: 1797309 - RNA, 19 nt, Artificial Sequence
  Description of Artificial Sequence: Synthetic oligonucleotide
uuacaauguaggaaaauuu

SEQ ID NO: 1797310 - RNA, 19 nt, Artificial Sequence
  Description of Artificial Sequence: Synthetic oligonucleotide
aauuaguccucaaaugugu

SEQ ID NO: 1797311 - RNA, 19 nt, Artificial Sequence
  Description of Artificial Sequence: Synthetic oligonucleotide
augaugcaaacccaucaac

SEQ ID NO: 1797312 - RNA, 19 nt, Artificial Sequence
  Description of Artificial Sequence: Synthetic oligonucleotide
aaauggguagggcacagau

SEQ ID NO: 1797313 - RNA, 19 nt, Artificial Sequence
  Description of Artificial Sequence: Synthetic oligonucleotide
aggucagaacaccagcagc

SEQ ID NO: 1797314 - RNA, 19 nt, Artificial Sequence
  Description of Artificial Sequence: Synthetic oligonucleotide
ucaaaguccacaaguuaca

SEQ ID NO: 1797315 - RNA, 19 nt, Artificial Sequence
  Description of Artificial Sequence: Synthetic oligonucleotide
agugaaccgaagcagggag

SEQ ID NO: 1797316 - RNA, 19 nt, Artificial Sequence
  Description of Artificial Sequence: Synthetic oligonucleotide
aauacggcagcuucuucca

SEQ ID NO: 1797317 - RNA, 19 nt, Artificial Sequence
  Description of Artificial Sequence: Synthetic oligonucleotide
uuuacaauguaggaaaauu

SEQ ID NO: 1797318 - RNA, 19 nt, Artificial Sequence
  Description of Artificial Sequence: Synthetic oligonucleotide
ccaaauucuguguauaucc

SEQ ID NO: 1797319 - RNA, 19 nt, Artificial Sequence
  Description of Artificial Sequence: Synthetic oligonucleotide
uaaaacagguccgagggga

SEQ ID NO: 1797320 - RNA, 19 nt, Artificial Sequence
  Description of Artificial Sequence: Synthetic oligonucleotide
uagccuaacaauacuggca

SEQ ID NO: 1797321 - RNA, 19 nt, Artificial Sequence
  Description of Artificial Sequence: Synthetic oligonucleotide
caauacggcagcuucuucc

SEQ ID NO: 1797322 - RNA, 19 nt, Artificial Sequence
  Description of Artificial Sequence: Synthetic oligonucleotide
cuuacuccaucuagaaagg

SEQ ID NO: 1797323 - RNA, 19 nt, Artificial Sequence
  Description of Artificial Sequence: Synthetic oligonucleotide
uuggauagccuaacaauac

SEQ ID NO: 1797324 - RNA, 19 nt, Artificial Sequence
  Description of Artificial Sequence: Synthetic oligonucleotide
aaaggcuuuggauagccua

SEQ ID NO: 1797325 - RNA, 19 nt, Artificial Sequence
  Description of Artificial Sequence: Synthetic oligonucleotide
gagaaaagccauucaauga

SEQ ID NO: 1797326 - RNA, 19 nt, Artificial Sequence
  Description of Artificial Sequence: Synthetic oligonucleotide
ugcgccauggcuucuaagc

SEQ ID NO: 1797327 - RNA, 19 nt, Artificial Sequence
  Description of Artificial Sequence: Synthetic oligonucleotide
uuagucaacagguuucaaa

SEQ ID NO: 1797328 - RNA, 19 nt, Artificial Sequence
  Description of Artificial Sequence: Synthetic oligonucleotide
uacaagaaaaccaccuguc

SEQ ID NO: 1797329 - RNA, 19 nt, Artificial Sequence
  Description of Artificial Sequence: Synthetic oligonucleotide
aguaagucacuagaagagg

SEQ ID NO: 1797330 - RNA, 19 nt, Artificial Sequence
  Description of Artificial Sequence: Synthetic oligonucleotide
gaauuaguccucaaaugug

SEQ ID NO: 1797331 - RNA, 19 nt, Artificial Sequence
  Description of Artificial Sequence: Synthetic oligonucleotide
uucaaugaugcaaacccau

SEQ ID NO: 1797332 - RNA, 19 nt, Artificial Sequence
  Description of Artificial Sequence: Synthetic oligonucleotide
uaagucacuagaagaggca

SEQ ID NO: 1797333 - RNA, 19 nt, Artificial Sequence
  Description of Artificial Sequence: Synthetic oligonucleotide
cauauacugagaaaagcca

SEQ ID NO: 1797334 - RNA, 19 nt, Artificial Sequence
  Description of Artificial Sequence: Synthetic oligonucleotide
ccauauacugagaaaagcc

SEQ ID NO: 1797335 - RNA, 19 nt, Artificial Sequence
  Description of Artificial Sequence: Synthetic oligonucleotide
ucuauaggauuucaguguu

SEQ ID NO: 1797336 - RNA, 19 nt, Artificial Sequence
  Description of Artificial Sequence: Synthetic oligonucleotide
uacuccaucuagaaaggcu

SEQ ID NO: 1797337 - RNA, 19 nt, Artificial Sequence
  Description of Artificial Sequence: Synthetic oligonucleotide
ucuaaguagcagaagcaau

SEQ ID NO: 1797338 - RNA, 19 nt, Artificial Sequence
  Description of Artificial Sequence: Synthetic oligonucleotide
gagucugaacucuuacucc

SEQ ID NO: 1797339 - RNA, 19 nt, Artificial Sequence
  Description of Artificial Sequence: Synthetic oligonucleotide
uuucaaaguccacaaguua

SEQ ID NO: 1797340 - RNA, 19 nt, Artificial Sequence
  Description of Artificial Sequence: Synthetic oligonucleotide
gaagcagggagcaaagcgc

SEQ ID NO: 1797341 - RNA, 19 nt, Artificial Sequence
  Description of Artificial Sequence: Synthetic oligonucleotide
aaaguugcguaaagugaac

SEQ ID NO: 1797342 - RNA, 19 nt, Artificial Sequence
  Description of Artificial Sequence: Synthetic oligonucleotide
ucucucuaaggcacagccg

SEQ ID NO: 1797343 - RNA, 19 nt, Artificial Sequence
  Description of Artificial Sequence: Synthetic oligonucleotide
aaauguuuguguucccuuu

SEQ ID NO: 1797344 - RNA, 19 nt, Artificial Sequence
  Description of Artificial Sequence: Synthetic oligonucleotide
uacugaaagugaguaaacc

SEQ ID NO: 1797345 - RNA, 19 nt, Artificial Sequence
  Description of Artificial Sequence: Synthetic oligonucleotide
uuggucuauaggauuucag

SEQ ID NO: 1797346 - RNA, 19 nt, Artificial Sequence
  Description of Artificial Sequence: Synthetic oligonucleotide
aguuacaagaaaaccaccu

SEQ ID NO: 1797347 - RNA, 19 nt, Artificial Sequence
  Description of Artificial Sequence: Synthetic oligonucleotide
uucgaaucgaccccaguaa

SEQ ID NO: 1797348 - RNA, 19 nt, Artificial Sequence
  Description of Artificial Sequence: Synthetic oligonucleotide
ucaaacuugucaugggaaa

SEQ ID NO: 1797349 - RNA, 19 nt, Artificial Sequence
  Description of Artificial Sequence: Synthetic oligonucleotide
agcgcgcucucucuaaggc

SEQ ID NO: 1797350 - RNA, 19 nt, Artificial Sequence
  Description of Artificial Sequence: Synthetic oligonucleotide
caagcuauacugaaaguga

SEQ ID NO: 1797351 - RNA, 19 nt, Artificial Sequence
  Description of Artificial Sequence: Synthetic oligonucleotide
aaagaccaugcucuaagua

SEQ ID NO: 1797352 - RNA, 19 nt, Artificial Sequence
  Description of Artificial Sequence: Synthetic oligonucleotide
ggucuauaggauuucagug

SEQ ID NO: 1797353 - RNA, 19 nt, Artificial Sequence
  Description of Artificial Sequence: Synthetic oligonucleotide
aagcuauacugaaagugag

SEQ ID NO: 1797354 - RNA, 19 nt, Artificial Sequence
  Description of Artificial Sequence: Synthetic oligonucleotide
ucgaaucgaccccaguaag

SEQ ID NO: 1797355 - RNA, 19 nt, Artificial Sequence
  Description of Artificial Sequence: Synthetic oligonucleotide
acacaacucaaacuuguca

SEQ ID NO: 1797356 - RNA, 19 nt, Artificial Sequence
  Description of Artificial Sequence: Synthetic oligonucleotide
agucugaacucuuacucca

SEQ ID NO: 1797357 - RNA, 19 nt, Artificial Sequence
  Description of Artificial Sequence: Synthetic oligonucleotide
acucagaacgagucugaac

SEQ ID NO: 1797358 - RNA, 19 nt, Artificial Sequence
  Description of Artificial Sequence: Synthetic oligonucleotide
agaagcaauggcccaucac

SEQ ID NO: 1797359 - RNA, 19 nt, Artificial Sequence
  Description of Artificial Sequence: Synthetic oligonucleotide
guggguuuuggucuauagg

SEQ ID NO: 1797360 - RNA, 19 nt, Artificial Sequence
  Description of Artificial Sequence: Synthetic oligonucleotide
guagcagaagcaauggccc

SEQ ID NO: 1797361 - RNA, 19 nt, Artificial Sequence
  Description of Artificial Sequence: Synthetic oligonucleotide
agugagaaauguuuguguu

SEQ ID NO: 1797362 - RNA, 19 nt, Artificial Sequence
  Description of Artificial Sequence: Synthetic oligonucleotide
acaagacuuuucaucaaac

SEQ ID NO: 1797363 - RNA, 19 nt, Artificial Sequence
  Description of Artificial Sequence: Synthetic oligonucleotide
ggaaagaccaugcucuaag

SEQ ID NO: 1797364 - RNA, 19 nt, Artificial Sequence
  Description of Artificial Sequence: Synthetic oligonucleotide
ggaaagucauuauugguac

SEQ ID NO: 1797365 - RNA, 19 nt, Artificial Sequence
  Description of Artificial Sequence: Synthetic oligonucleotide
gggaaaguugcguaaagug

SEQ ID NO: 1797366 - RNA, 19 nt, Artificial Sequence
  Description of Artificial Sequence: Synthetic oligonucleotide
acaacucaaacuugucaug

SEQ ID NO: 1797367 - RNA, 19 nt, Artificial Sequence
  Description of Artificial Sequence: Synthetic oligonucleotide
uggauagccuaacaauacu

SEQ ID NO: 1797368 - RNA, 19 nt, Artificial Sequence
  Description of Artificial Sequence: Synthetic oligonucleotide
gcuagaagaccacaggugc

SEQ ID NO: 1797369 - RNA, 19 nt, Artificial Sequence
  Description of Artificial Sequence: Synthetic oligonucleotide
agccuaacaauacuggcaa

SEQ ID NO: 1797370 - RNA, 19 nt, Artificial Sequence
  Description of Artificial Sequence: Synthetic oligonucleotide
uccuaaaagcugcuuuucu

SEQ ID NO: 1797371 - RNA, 19 nt, Artificial Sequence
  Description of Artificial Sequence: Synthetic oligonucleotide
gaaucaaaagugcagcagu

SEQ ID NO: 1797372 - RNA, 19 nt, Artificial Sequence
  Description of Artificial Sequence: Synthetic oligonucleotide
cagagagccaaauucugug

SEQ ID NO: 1797373 - RNA, 19 nt, Artificial Sequence
  Description of Artificial Sequence: Synthetic oligonucleotide
ugcguaaagugaaccgaag

SEQ ID NO: 1797374 - RNA, 19 nt, Artificial Sequence
  Description of Artificial Sequence: Synthetic oligonucleotide
uuugcggggcuuaaggaau

SEQ ID NO: 1797375 - RNA, 19 nt, Artificial Sequence
  Description of Artificial Sequence: Synthetic oligonucleotide
uagggaaaguugcguaaag

SEQ ID NO: 1797376 - RNA, 19 nt, Artificial Sequence
  Description of Artificial Sequence: Synthetic oligonucleotide
aguguugcugugugugaac

SEQ ID NO: 1797377 - RNA, 19 nt, Artificial Sequence
  Description of Artificial Sequence: Synthetic oligonucleotide
aguuaaugaauuaguccuc

SEQ ID NO: 1797378 - RNA, 19 nt, Artificial Sequence
  Description of Artificial Sequence: Synthetic oligonucleotide
cucagaacgagucugaacu

SEQ ID NO: 1797379 - RNA, 19 nt, Artificial Sequence
  Description of Artificial Sequence: Synthetic oligonucleotide
ugggaaagucauuauuggu

SEQ ID NO: 1797380 - RNA, 19 nt, Artificial Sequence
  Description of Artificial Sequence: Synthetic oligonucleotide
caaggaaagaccaugcucu

SEQ ID NO: 1797381 - RNA, 19 nt, Artificial Sequence
  Description of Artificial Sequence: Synthetic oligonucleotide
aagcaauggcccaucacag

SEQ ID NO: 1797382 - RNA, 19 nt, Artificial Sequence
  Description of Artificial Sequence: Synthetic oligonucleotide
ucaaugaugcaaacccauc

SEQ ID NO: 1797383 - RNA, 19 nt, Artificial Sequence
  Description of Artificial Sequence: Synthetic oligonucleotide
gucauuauugguacugccc

SEQ ID NO: 1797384 - RNA, 19 nt, Artificial Sequence
  Description of Artificial Sequence: Synthetic oligonucleotide
uccccaaauggguagggca

SEQ ID NO: 1797385 - RNA, 19 nt, Artificial Sequence
  Description of Artificial Sequence: Synthetic oligonucleotide
agcagcuucagcaauaaaa

SEQ ID NO: 1797386 - RNA, 19 nt, Artificial Sequence
  Description of Artificial Sequence: Synthetic oligonucleotide
ucaugggaaagucauuauu

SEQ ID NO: 1797387 - RNA, 19 nt, Artificial Sequence
  Description of Artificial Sequence: Synthetic oligonucleotide
aagccucauuaggagagcg

SEQ ID NO: 1797388 - RNA, 19 nt, Artificial Sequence
  Description of Artificial Sequence: Synthetic oligonucleotide
ugucaugggaaagucauua

SEQ ID NO: 1797389 - RNA, 19 nt, Artificial Sequence
  Description of Artificial Sequence: Synthetic oligonucleotide
aaucgaccccaguaaguca

SEQ ID NO: 1797390 - RNA, 19 nt, Artificial Sequence
  Description of Artificial Sequence: Synthetic oligonucleotide
uuauugguacugcccacac

SEQ ID NO: 1797391 - RNA, 19 nt, Artificial Sequence
  Description of Artificial Sequence: Synthetic oligonucleotide
auucgaaucgaccccagua

SEQ ID NO: 1797392 - RNA, 19 nt, Artificial Sequence
  Description of Artificial Sequence: Synthetic oligonucleotide
gaaaagccauucaaugaug

SEQ ID NO: 1797393 - RNA, 19 nt, Artificial Sequence
  Description of Artificial Sequence: Synthetic oligonucleotide
aagauucgaaucgacccca

SEQ ID NO: 1797394 - RNA, 19 nt, Artificial Sequence
  Description of Artificial Sequence: Synthetic oligonucleotide
aaguuagggaaaguugcgu

SEQ ID NO: 1797395 - RNA, 19 nt, Artificial Sequence
  Description of Artificial Sequence: Synthetic oligonucleotide
ugaaccgaagcagggagca

SEQ ID NO: 1797396 - RNA, 19 nt, Artificial Sequence
  Description of Artificial Sequence: Synthetic oligonucleotide
agugcagcaguuuuacaau

SEQ ID NO: 1797397 - RNA, 19 nt, Artificial Sequence
  Description of Artificial Sequence: Synthetic oligonucleotide
cuaaaacagguccgagggg

SEQ ID NO: 1797398 - RNA, 19 nt, Artificial Sequence
  Description of Artificial Sequence: Synthetic oligonucleotide
ucucaauacggcagcuucu

SEQ ID NO: 1797399 - RNA, 19 nt, Artificial Sequence
  Description of Artificial Sequence: Synthetic oligonucleotide
acaucagaaaucacuagga

SEQ ID NO: 1797400 - RNA, 19 nt, Artificial Sequence
  Description of Artificial Sequence: Synthetic oligonucleotide
gaggcugcccgaaaguuag

SEQ ID NO: 1797401 - RNA, 19 nt, Artificial Sequence
  Description of Artificial Sequence: Synthetic oligonucleotide
cucucaauacggcagcuuc

SEQ ID NO: 1797402 - RNA, 19 nt, Artificial Sequence
  Description of Artificial Sequence: Synthetic oligonucleotide
caaugaugcaaacccauca

SEQ ID NO: 1797403 - RNA, 19 nt, Artificial Sequence
  Description of Artificial Sequence: Synthetic oligonucleotide
uugcguaaagugaaccgaa

SEQ ID NO: 1797404 - RNA, 19 nt, Artificial Sequence
  Description of Artificial Sequence: Synthetic oligonucleotide
ugaacucuuacuccaucua

SEQ ID NO: 1797405 - RNA, 19 nt, Artificial Sequence
  Description of Artificial Sequence: Synthetic oligonucleotide
cuuccuaagcagcuucagc

SEQ ID NO: 1797406 - RNA, 19 nt, Artificial Sequence
  Description of Artificial Sequence: Synthetic oligonucleotide
gaaucgaccccaguaaguc

SEQ ID NO: 1797407 - RNA, 19 nt, Artificial Sequence
  Description of Artificial Sequence: Synthetic oligonucleotide
uauuuacaucagaaaucac

SEQ ID NO: 1797408 - RNA, 19 nt, Artificial Sequence
  Description of Artificial Sequence: Synthetic oligonucleotide
caaacuugucaugggaaag

SEQ ID NO: 1797409 - RNA, 19 nt, Artificial Sequence
  Description of Artificial Sequence: Synthetic oligonucleotide
accccaguaagucacuaga

SEQ ID NO: 1797410 - RNA, 19 nt, Artificial Sequence
  Description of Artificial Sequence: Synthetic oligonucleotide
uaacaauacuggcaagcua

SEQ ID NO: 1797411 - RNA, 19 nt, Artificial Sequence
  Description of Artificial Sequence: Synthetic oligonucleotide
aguuagggaaaguugcgua

SEQ ID NO: 1797412 - RNA, 19 nt, Artificial Sequence
  Description of Artificial Sequence: Synthetic oligonucleotide
agagagccaaauucugugu

SEQ ID NO: 1797413 - RNA, 19 nt, Artificial Sequence
  Description of Artificial Sequence: Synthetic oligonucleotide
agucaacagguuucaaagu

SEQ ID NO: 1797414 - RNA, 19 nt, Artificial Sequence
  Description of Artificial Sequence: Synthetic oligonucleotide
gaccugggcucucaauacg

SEQ ID NO: 1797415 - RNA, 19 nt, Artificial Sequence
  Description of Artificial Sequence: Synthetic oligonucleotide
guuaaugaauuaguccuca

SEQ ID NO: 1797416 - RNA, 19 nt, Artificial Sequence
  Description of Artificial Sequence: Synthetic oligonucleotide
gacccaaugaugcacucaa

SEQ ID NO: 1797417 - RNA, 19 nt, Artificial Sequence
  Description of Artificial Sequence: Synthetic oligonucleotide
cccaaugaugcacucaagg

SEQ ID NO: 1797418 - RNA, 19 nt, Artificial Sequence
  Description of Artificial Sequence: Synthetic oligonucleotide
aauggguagggcacagaug

SEQ ID NO: 1797419 - RNA, 19 nt, Artificial Sequence
  Description of Artificial Sequence: Synthetic oligonucleotide
uacuggcaagcuauacuga

SEQ ID NO: 1797420 - RNA, 19 nt, Artificial Sequence
  Description of Artificial Sequence: Synthetic oligonucleotide
agaguccaaggaaagacca

SEQ ID NO: 1797421 - RNA, 19 nt, Artificial Sequence
  Description of Artificial Sequence: Synthetic oligonucleotide
uuccaacaaggcacgaaaa

SEQ ID NO: 1797422 - RNA, 19 nt, Artificial Sequence
  Description of Artificial Sequence: Synthetic oligonucleotide
ucucuaaggcacagccgcc

SEQ ID NO: 1797423 - RNA, 19 nt, Artificial Sequence
  Description of Artificial Sequence: Synthetic oligonucleotide
agcuggucaaaggugagcu

SEQ ID NO: 1797424 - RNA, 19 nt, Artificial Sequence
  Description of Artificial Sequence: Synthetic oligonucleotide
agguuucaaaguccacaag

SEQ ID NO: 1797425 - RNA, 19 nt, Artificial Sequence
  Description of Artificial Sequence: Synthetic oligonucleotide
auggacuaaagcagccugg

SEQ ID NO: 1797426 - RNA, 19 nt, Artificial Sequence
  Description of Artificial Sequence: Synthetic oligonucleotide
acgagucugaacucuuacu

SEQ ID NO: 1797427 - RNA, 19 nt, Artificial Sequence
  Description of Artificial Sequence: Synthetic oligonucleotide
ucaguguugcuguguguga

SEQ ID NO: 1797428 - RNA, 19 nt, Artificial Sequence
  Description of Artificial Sequence: Synthetic oligonucleotide
ucauuaggagagcgcacaa

SEQ ID NO: 1797429 - RNA, 19 nt, Artificial Sequence
  Description of Artificial Sequence: Synthetic oligonucleotide
uccuaagcagcuucagcaa

SEQ ID NO: 1797430 - RNA, 19 nt, Artificial Sequence
  Description of Artificial Sequence: Synthetic oligonucleotide
auacuaaaacagguccgag

SEQ ID NO: 1797431 - RNA, 19 nt, Artificial Sequence
  Description of Artificial Sequence: Synthetic oligonucleotide
agagccaaauucuguguau

SEQ ID NO: 1797432 - RNA, 19 nt, Artificial Sequence
  Description of Artificial Sequence: Synthetic oligonucleotide
agucacuagaagaggcagg

SEQ ID NO: 1797433 - RNA, 19 nt, Artificial Sequence
  Description of Artificial Sequence: Synthetic oligonucleotide
cuugucaugggaaagucau

SEQ ID NO: 1797434 - RNA, 19 nt, Artificial Sequence
  Description of Artificial Sequence: Synthetic oligonucleotide
aaacucagaacgagucuga

SEQ ID NO: 1797435 - RNA, 19 nt, Artificial Sequence
  Description of Artificial Sequence: Synthetic oligonucleotide
guugcguaaagugaaccga

SEQ ID NO: 1797436 - RNA, 19 nt, Artificial Sequence
  Description of Artificial Sequence: Synthetic oligonucleotide
caugcucuaaguagcagaa

SEQ ID NO: 1797437 - RNA, 19 nt, Artificial Sequence
  Description of Artificial Sequence: Synthetic oligonucleotide
cuuccaacaaggcacgaaa

SEQ ID NO: 1797438 - RNA, 19 nt, Artificial Sequence
  Description of Artificial Sequence: Synthetic oligonucleotide
ugacuacacagaguccaag

SEQ ID NO: 1797439 - RNA, 19 nt, Artificial Sequence
  Description of Artificial Sequence: Synthetic oligonucleotide
ucagaacgagucugaacuc

SEQ ID NO: 1797440 - RNA, 19 nt, Artificial Sequence
  Description of Artificial Sequence: Synthetic oligonucleotide
cacagcuggucaaagguga

SEQ ID NO: 1797441 - RNA, 19 nt, Artificial Sequence
  Description of Artificial Sequence: Synthetic oligonucleotide
aaccgaagcagggagcaaa

SEQ ID NO: 1797442 - RNA, 19 nt, Artificial Sequence
  Description of Artificial Sequence: Synthetic oligonucleotide
uacggcagcuucuuccaac

SEQ ID NO: 1797443 - RNA, 19 nt, Artificial Sequence
  Description of Artificial Sequence: Synthetic oligonucleotide
uuacuccaucuagaaaggc

SEQ ID NO: 1797444 - RNA, 19 nt, Artificial Sequence
  Description of Artificial Sequence: Synthetic oligonucleotide
augacccaaugaugcacuc

SEQ ID NO: 1797445 - RNA, 19 nt, Artificial Sequence
  Description of Artificial Sequence: Synthetic oligonucleotide
ggauagccuaacaauacug

SEQ ID NO: 1797446 - RNA, 19 nt, Artificial Sequence
  Description of Artificial Sequence: Synthetic oligonucleotide
gagcuagaagaccacaggu

SEQ ID NO: 1797447 - RNA, 19 nt, Artificial Sequence
  Description of Artificial Sequence: Synthetic oligonucleotide
ggaaaguugcguaaaguga

SEQ ID NO: 1797448 - RNA, 19 nt, Artificial Sequence
  Description of Artificial Sequence: Synthetic oligonucleotide
aaggaaagaccaugcucua

SEQ ID NO: 1797449 - RNA, 19 nt, Artificial Sequence
  Description of Artificial Sequence: Synthetic oligonucleotide
uggaggugcgccauggcuu

SEQ ID NO: 1797450 - RNA, 19 nt, Artificial Sequence
  Description of Artificial Sequence: Synthetic oligonucleotide
uccccaagggagauucaga

SEQ ID NO: 1797451 - RNA, 19 nt, Artificial Sequence
  Description of Artificial Sequence: Synthetic oligonucleotide
gugcagcaguuuuacaaug

SEQ ID NO: 1797452 - RNA, 19 nt, Artificial Sequence
  Description of Artificial Sequence: Synthetic oligonucleotide
aggcacagccgccaucuag

SEQ ID NO: 1797453 - RNA, 19 nt, Artificial Sequence
  Description of Artificial Sequence: Synthetic oligonucleotide
ugcccgaaaguuagggaaa

SEQ ID NO: 1797454 - RNA, 19 nt, Artificial Sequence
  Description of Artificial Sequence: Synthetic oligonucleotide
agauucagagagccaaauu

SEQ ID NO: 1797455 - RNA, 19 nt, Artificial Sequence
  Description of Artificial Sequence: Synthetic oligonucleotide
ucacuagaagaggcagggg

SEQ ID NO: 1797456 - RNA, 19 nt, Artificial Sequence
  Description of Artificial Sequence: Synthetic oligonucleotide
gugaguaaaccaaaggccu

SEQ ID NO: 1797457 - RNA, 19 nt, Artificial Sequence
  Description of Artificial Sequence: Synthetic oligonucleotide
aaagcuccuaaaagcugcu

SEQ ID NO: 1797458 - RNA, 19 nt, Artificial Sequence
  Description of Artificial Sequence: Synthetic oligonucleotide
agccaaauucuguguauau

SEQ ID NO: 1797459 - RNA, 19 nt, Artificial Sequence
  Description of Artificial Sequence: Synthetic oligonucleotide
gcguaaagugaaccgaagc

SEQ ID NO: 1797460 - RNA, 19 nt, Artificial Sequence
  Description of Artificial Sequence: Synthetic oligonucleotide
cgaaaguuagggaaaguug

SEQ ID NO: 1797461 - RNA, 19 nt, Artificial Sequence
  Description of Artificial Sequence: Synthetic oligonucleotide
cagguuucaaaguccacaa

SEQ ID NO: 1797462 - RNA, 19 nt, Artificial Sequence
  Description of Artificial Sequence: Synthetic oligonucleotide
agcaaagcgcgcucucucu

SEQ ID NO: 1797463 - RNA, 19 nt, Artificial Sequence
  Description of Artificial Sequence: Synthetic oligonucleotide
cacaacucaaacuugucau

SEQ ID NO: 1797464 - RNA, 19 nt, Artificial Sequence
  Description of Artificial Sequence: Synthetic oligonucleotide
gcaguuuuacaauguagga

SEQ ID NO: 1797465 - RNA, 19 nt, Artificial Sequence
  Description of Artificial Sequence: Synthetic oligonucleotide
auauccaaaacaagacuuu

SEQ ID NO: 1797466 - RNA, 19 nt, Artificial Sequence
  Description of Artificial Sequence: Synthetic oligonucleotide
ugguacugcccacaccauc

SEQ ID NO: 1797467 - RNA, 19 nt, Artificial Sequence
  Description of Artificial Sequence: Synthetic oligonucleotide
cugcccgaaaguuagggaa

SEQ ID NO: 1797468 - RNA, 19 nt, Artificial Sequence
  Description of Artificial Sequence: Synthetic oligonucleotide
gagagccaaauucugugua

SEQ ID NO: 1797469 - RNA, 19 nt, Artificial Sequence
  Description of Artificial Sequence: Synthetic oligonucleotide
accugggcucucaauacgg

SEQ ID NO: 1797470 - RNA, 19 nt, Artificial Sequence
  Description of Artificial Sequence: Synthetic oligonucleotide
agggaaaguugcguaaagu

SEQ ID NO: 1797471 - RNA, 19 nt, Artificial Sequence
  Description of Artificial Sequence: Synthetic oligonucleotide
agccucauuaggagagcgc

SEQ ID NO: 1797472 - RNA, 19 nt, Artificial Sequence
  Description of Artificial Sequence: Synthetic oligonucleotide
ccaguuauccauauacuga

SEQ ID NO: 1797473 - RNA, 19 nt, Artificial Sequence
  Description of Artificial Sequence: Synthetic oligonucleotide
ucaauacggcagcuucuuc

SEQ ID NO: 1797474 - RNA, 19 nt, Artificial Sequence
  Description of Artificial Sequence: Synthetic oligonucleotide
uuuuggucuauaggauuuc

SEQ ID NO: 1797475 - RNA, 19 nt, Artificial Sequence
  Description of Artificial Sequence: Synthetic oligonucleotide
caccaggucagaacaccag

SEQ ID NO: 1797476 - RNA, 19 nt, Artificial Sequence
  Description of Artificial Sequence: Synthetic oligonucleotide
cuauacugaaagugaguaa

SEQ ID NO: 1797477 - RNA, 19 nt, Artificial Sequence
  Description of Artificial Sequence: Synthetic oligonucleotide
caauacuggcaagcuauac

SEQ ID NO: 1797478 - RNA, 19 nt, Artificial Sequence
  Description of Artificial Sequence: Synthetic oligonucleotide
caguuuuacaauguaggaa

SEQ ID NO: 1797479 - RNA, 19 nt, Artificial Sequence
  Description of Artificial Sequence: Synthetic oligonucleotide
uugcggggcuuaaggaaug

SEQ ID NO: 1797480 - RNA, 19 nt, Artificial Sequence
  Description of Artificial Sequence: Synthetic oligonucleotide
ucuaaggcacagccgccau

SEQ ID NO: 1797481 - RNA, 19 nt, Artificial Sequence
  Description of Artificial Sequence: Synthetic oligonucleotide
ccaaggaaagaccaugcuc

SEQ ID NO: 1797482 - RNA, 19 nt, Artificial Sequence
  Description of Artificial Sequence: Synthetic oligonucleotide
cucauuaggagagcgcaca

SEQ ID NO: 1797483 - RNA, 19 nt, Artificial Sequence
  Description of Artificial Sequence: Synthetic oligonucleotide
cccaguaagucacuagaag

SEQ ID NO: 1797484 - RNA, 19 nt, Artificial Sequence
  Description of Artificial Sequence: Synthetic oligonucleotide
caagacuuuucaucaaacu

SEQ ID NO: 1797485 - RNA, 19 nt, Artificial Sequence
  Description of Artificial Sequence: Synthetic oligonucleotide
agacacgguuccugcugac

SEQ ID NO: 1797486 - RNA, 19 nt, Artificial Sequence
  Description of Artificial Sequence: Synthetic oligonucleotide
aggcuuuggauagccuaac

SEQ ID NO: 1797487 - RNA, 19 nt, Artificial Sequence
  Description of Artificial Sequence: Synthetic oligonucleotide
ugacccaaugaugcacuca

SEQ ID NO: 1797488 - RNA, 19 nt, Artificial Sequence
  Description of Artificial Sequence: Synthetic oligonucleotide
gagcaaagcgcgcucucuc

SEQ ID NO: 1797489 - RNA, 19 nt, Artificial Sequence
  Description of Artificial Sequence: Synthetic oligonucleotide
ugaaccugcaaagccugau

SEQ ID NO: 1797490 - RNA, 19 nt, Artificial Sequence
  Description of Artificial Sequence: Synthetic oligonucleotide
agccauucaaugaugcaaa

SEQ ID NO: 1797491 - RNA, 19 nt, Artificial Sequence
  Description of Artificial Sequence: Synthetic oligonucleotide
gaaagaccaugcucuaagu

SEQ ID NO: 1797492 - RNA, 19 nt, Artificial Sequence
  Description of Artificial Sequence: Synthetic oligonucleotide
caaaagugcagcaguuuua

SEQ ID NO: 1797493 - RNA, 19 nt, Artificial Sequence
  Description of Artificial Sequence: Synthetic oligonucleotide
ccucaaauguguuggcuug

SEQ ID NO: 1797494 - RNA, 19 nt, Artificial Sequence
  Description of Artificial Sequence: Synthetic oligonucleotide
gcuauacugaaagugagua

SEQ ID NO: 1797495 - RNA, 19 nt, Artificial Sequence
  Description of Artificial Sequence: Synthetic oligonucleotide
cucaaggacacaacucaaa

SEQ ID NO: 1797496 - RNA, 19 nt, Artificial Sequence
  Description of Artificial Sequence: Synthetic oligonucleotide
acaaguggguuuuggucua

SEQ ID NO: 1797497 - RNA, 19 nt, Artificial Sequence
  Description of Artificial Sequence: Synthetic oligonucleotide
ccccaagggagauucagag

SEQ ID NO: 1797498 - RNA, 19 nt, Artificial Sequence
  Description of Artificial Sequence: Synthetic oligonucleotide
agcuauacugaaagugagu

SEQ ID NO: 1797499 - RNA, 19 nt, Artificial Sequence
  Description of Artificial Sequence: Synthetic oligonucleotide
agcagcacagugagaaaug

SEQ ID NO: 1797500 - RNA, 19 nt, Artificial Sequence
  Description of Artificial Sequence: Synthetic oligonucleotide
cucuaaguagcagaagcaa

SEQ ID NO: 1797501 - RNA, 19 nt, Artificial Sequence
  Description of Artificial Sequence: Synthetic oligonucleotide
gggaaagucauuauuggua

SEQ ID NO: 1797502 - RNA, 19 nt, Artificial Sequence
  Description of Artificial Sequence: Synthetic oligonucleotide
uuuagucaacagguuucaa

SEQ ID NO: 1797503 - RNA, 19 nt, Artificial Sequence
  Description of Artificial Sequence: Synthetic oligonucleotide
aacaacgaccugggcucuc

SEQ ID NO: 1797504 - RNA, 19 nt, Artificial Sequence
  Description of Artificial Sequence: Synthetic oligonucleotide
gaaagucauuauugguacu

SEQ ID NO: 1797505 - RNA, 19 nt, Artificial Sequence
  Description of Artificial Sequence: Synthetic oligonucleotide
auguguuggcuugucaaaa

SEQ ID NO: 1797506 - RNA, 19 nt, Artificial Sequence
  Description of Artificial Sequence: Synthetic oligonucleotide
augccaugacccaaugaug

SEQ ID NO: 1797507 - RNA, 19 nt, Artificial Sequence
  Description of Artificial Sequence: Synthetic oligonucleotide
cacgguuccugcugacaag

SEQ ID NO: 1797508 - RNA, 19 nt, Artificial Sequence
  Description of Artificial Sequence: Synthetic oligonucleotide
acuugucaugggaaaguca

SEQ ID NO: 1797509 - RNA, 19 nt, Artificial Sequence
  Description of Artificial Sequence: Synthetic oligonucleotide
augcacucaaggacacaac

SEQ ID NO: 1797510 - RNA, 19 nt, Artificial Sequence
  Description of Artificial Sequence: Synthetic oligonucleotide
uugucaugggaaagucauu

SEQ ID NO: 1797511 - RNA, 19 nt, Artificial Sequence
  Description of Artificial Sequence: Synthetic oligonucleotide
aaacaacgaccugggcucu

SEQ ID NO: 1797512 - RNA, 19 nt, Artificial Sequence
  Description of Artificial Sequence: Synthetic oligonucleotide
cuccuaaaagcugcuuuuc

SEQ ID NO: 1797513 - RNA, 19 nt, Artificial Sequence
  Description of Artificial Sequence: Synthetic oligonucleotide
aguuauccauauacugaga

SEQ ID NO: 1797514 - RNA, 19 nt, Artificial Sequence
  Description of Artificial Sequence: Synthetic oligonucleotide
cgagucugaacucuuacuc

SEQ ID NO: 1797515 - RNA, 19 nt, Artificial Sequence
  Description of Artificial Sequence: Synthetic oligonucleotide
aaacagguccgaggggaaa

SEQ ID NO: 1797516 - RNA, 19 nt, Artificial Sequence
  Description of Artificial Sequence: Synthetic oligonucleotide
cuaacaauacuggcaagcu

SEQ ID NO: 1797517 - RNA, 19 nt, Artificial Sequence
  Description of Artificial Sequence: Synthetic oligonucleotide
aggugagcuagaagaccac

SEQ ID NO: 1797518 - RNA, 19 nt, Artificial Sequence
  Description of Artificial Sequence: Synthetic oligonucleotide
gugcugggcccagacacgg

SEQ ID NO: 1797519 - RNA, 19 nt, Artificial Sequence
  Description of Artificial Sequence: Synthetic oligonucleotide
auggcucucuucacccaac

SEQ ID NO: 1797520 - RNA, 19 nt, Artificial Sequence
  Description of Artificial Sequence: Synthetic oligonucleotide
gugaaccgaagcagggagc

SEQ ID NO: 1797521 - RNA, 19 nt, Artificial Sequence
  Description of Artificial Sequence: Synthetic oligonucleotide
uaaagcagccuggacccuu

SEQ ID NO: 1797522 - RNA, 19 nt, Artificial Sequence
  Description of Artificial Sequence: Synthetic oligonucleotide
augcucuaaguagcagaag

SEQ ID NO: 1797523 - RNA, 19 nt, Artificial Sequence
  Description of Artificial Sequence: Synthetic oligonucleotide
ggcugcccgaaaguuaggg

SEQ ID NO: 1797524 - RNA, 19 nt, Artificial Sequence
  Description of Artificial Sequence: Synthetic oligonucleotide
gauuucaguguugcugugu

SEQ ID NO: 1797525 - RNA, 19 nt, Artificial Sequence
  Description of Artificial Sequence: Synthetic oligonucleotide
gucagaacaccagcagcac

SEQ ID NO: 1797526 - RNA, 19 nt, Artificial Sequence
  Description of Artificial Sequence: Synthetic oligonucleotide
caugacccaaugaugcacu

SEQ ID NO: 1797527 - RNA, 19 nt, Artificial Sequence
  Description of Artificial Sequence: Synthetic oligonucleotide
uugguacugcccacaccau

SEQ ID NO: 1797528 - RNA, 19 nt, Artificial Sequence
  Description of Artificial Sequence: Synthetic oligonucleotide
agcagaagcaauggcccau

SEQ ID NO: 1797529 - RNA, 19 nt, Artificial Sequence
  Description of Artificial Sequence: Synthetic oligonucleotide
acaccaggucagaacacca

SEQ ID NO: 1797530 - RNA, 19 nt, Artificial Sequence
  Description of Artificial Sequence: Synthetic oligonucleotide
guuuuggucuauaggauuu

SEQ ID NO: 1797531 - RNA, 19 nt, Artificial Sequence
  Description of Artificial Sequence: Synthetic oligonucleotide
ugaugcacucaaggacaca

SEQ ID NO: 1797532 - RNA, 19 nt, Artificial Sequence
  Description of Artificial Sequence: Synthetic oligonucleotide
ggggcuuaaggaaugacua

SEQ ID NO: 1797533 - RNA, 19 nt, Artificial Sequence
  Description of Artificial Sequence: Synthetic oligonucleotide
gagccaaauucuguguaua

SEQ ID NO: 1797534 - RNA, 19 nt, Artificial Sequence
  Description of Artificial Sequence: Synthetic oligonucleotide
aguccacaaguuacaagaa

SEQ ID NO: 1797535 - RNA, 19 nt, Artificial Sequence
  Description of Artificial Sequence: Synthetic oligonucleotide
caaaguccacaaguuacaa

SEQ ID NO: 1797536 - RNA, 19 nt, Artificial Sequence
  Description of Artificial Sequence: Synthetic oligonucleotide
ccaugcucuaaguagcaga

SEQ ID NO: 1797537 - RNA, 19 nt, Artificial Sequence
  Description of Artificial Sequence: Synthetic oligonucleotide
acucaaggacacaacucaa

SEQ ID NO: 1797538 - RNA, 19 nt, Artificial Sequence
  Description of Artificial Sequence: Synthetic oligonucleotide
acaacgaccugggcucuca

SEQ ID NO: 1797539 - RNA, 19 nt, Artificial Sequence
  Description of Artificial Sequence: Synthetic oligonucleotide
gcucuaaguagcagaagca

SEQ ID NO: 1797540 - RNA, 19 nt, Artificial Sequence
  Description of Artificial Sequence: Synthetic oligonucleotide
gauucgaaucgaccccagu

SEQ ID NO: 1797541 - RNA, 19 nt, Artificial Sequence
  Description of Artificial Sequence: Synthetic oligonucleotide
gacacgguuccugcugaca

SEQ ID NO: 1797542 - RNA, 19 nt, Artificial Sequence
  Description of Artificial Sequence: Synthetic oligonucleotide
gugugaaccugcaaagccu

SEQ ID NO: 1797543 - RNA, 19 nt, Artificial Sequence
  Description of Artificial Sequence: Synthetic oligonucleotide
gccucauuaggagagcgca

SEQ ID NO: 1797544 - RNA, 19 nt, Artificial Sequence
  Description of Artificial Sequence: Synthetic oligonucleotide
acaccauccccaagggaga

SEQ ID NO: 1797545 - RNA, 19 nt, Artificial Sequence
  Description of Artificial Sequence: Synthetic oligonucleotide
gccaaauucuguguauauc

SEQ ID NO: 1797546 - RNA, 19 nt, Artificial Sequence
  Description of Artificial Sequence: Synthetic oligonucleotide
gggcucucaauacggcagc

SEQ ID NO: 1797547 - RNA, 19 nt, Artificial Sequence
  Description of Artificial Sequence: Synthetic oligonucleotide
ccagacacgguuccugcug

SEQ ID NO: 1797548 - RNA, 19 nt, Artificial Sequence
  Description of Artificial Sequence: Synthetic oligonucleotide
cugggcccagacacgguuc

SEQ ID NO: 1797549 - RNA, 19 nt, Artificial Sequence
  Description of Artificial Sequence: Synthetic oligonucleotide
agaacgagucugaacucuu

SEQ ID NO: 1797550 - RNA, 19 nt, Artificial Sequence
  Description of Artificial Sequence: Synthetic oligonucleotide
cagacacgguuccugcuga

SEQ ID NO: 1797551 - RNA, 19 nt, Artificial Sequence
  Description of Artificial Sequence: Synthetic oligonucleotide
ggacuaaagcagccuggac

SEQ ID NO: 1797552 - RNA, 19 nt, Artificial Sequence
  Description of Artificial Sequence: Synthetic oligonucleotide
gccauucaaugaugcaaac

SEQ ID NO: 1797553 - RNA, 19 nt, Artificial Sequence
  Description of Artificial Sequence: Synthetic oligonucleotide
caaagcgcgcucucucuaa

SEQ ID NO: 1797554 - RNA, 19 nt, Artificial Sequence
  Description of Artificial Sequence: Synthetic oligonucleotide
gagauucagagagccaaau

SEQ ID NO: 1797555 - RNA, 19 nt, Artificial Sequence
  Description of Artificial Sequence: Synthetic oligonucleotide
cucuaaggcacagccgcca

SEQ ID NO: 1797556 - RNA, 19 nt, Artificial Sequence
  Description of Artificial Sequence: Synthetic oligonucleotide
guccccaaauggguagggc

SEQ ID NO: 1797557 - RNA, 19 nt, Artificial Sequence
  Description of Artificial Sequence: Synthetic oligonucleotide
ugcggggcuuaaggaauga

SEQ ID NO: 1797558 - RNA, 19 nt, Artificial Sequence
  Description of Artificial Sequence: Synthetic oligonucleotide
gccuaacaauacuggcaag

SEQ ID NO: 1797559 - RNA, 19 nt, Artificial Sequence
  Description of Artificial Sequence: Synthetic oligonucleotide
gguuuuggucuauaggauu

SEQ ID NO: 1797560 - RNA, 19 nt, Artificial Sequence
  Description of Artificial Sequence: Synthetic oligonucleotide
ggaggugcgccauggcuuc

SEQ ID NO: 1797561 - RNA, 19 nt, Artificial Sequence
  Description of Artificial Sequence: Synthetic oligonucleotide
gugcgccauggcuucuaag

SEQ ID NO: 1797562 - RNA, 19 nt, Artificial Sequence
  Description of Artificial Sequence: Synthetic oligonucleotide
ccaggucagaacaccagca

SEQ ID NO: 1797563 - RNA, 19 nt, Artificial Sequence
  Description of Artificial Sequence: Synthetic oligonucleotide
agggagcaaagcgcgcucu

SEQ ID NO: 1797564 - RNA, 19 nt, Artificial Sequence
  Description of Artificial Sequence: Synthetic oligonucleotide
augacuacacagaguccaa

SEQ ID NO: 1797565 - RNA, 19 nt, Artificial Sequence
  Description of Artificial Sequence: Synthetic oligonucleotide
ggugcugggcccagacacg

SEQ ID NO: 1797566 - RNA, 19 nt, Artificial Sequence
  Description of Artificial Sequence: Synthetic oligonucleotide
ucacuaggacaguggcauu

SEQ ID NO: 1797567 - RNA, 19 nt, Artificial Sequence
  Description of Artificial Sequence: Synthetic oligonucleotide
auacggcagcuucuuccaa

SEQ ID NO: 1797568 - RNA, 19 nt, Artificial Sequence
  Description of Artificial Sequence: Synthetic oligonucleotide
acaauacuggcaagcuaua

SEQ ID NO: 1797569 - RNA, 19 nt, Artificial Sequence
  Description of Artificial Sequence: Synthetic oligonucleotide
cagggagcaaagcgcgcuc

SEQ ID NO: 1797570 - RNA, 19 nt, Artificial Sequence
  Description of Artificial Sequence: Synthetic oligonucleotide
ccauccccaagggagauuc

SEQ ID NO: 1797571 - RNA, 19 nt, Artificial Sequence
  Description of Artificial Sequence: Synthetic oligonucleotide
cgcgcucucucuaaggcac

SEQ ID NO: 1797572 - RNA, 19 nt, Artificial Sequence
  Description of Artificial Sequence: Synthetic oligonucleotide
ggugagcuagaagaccaca

SEQ ID NO: 1797573 - RNA, 19 nt, Artificial Sequence
  Description of Artificial Sequence: Synthetic oligonucleotide
gaacgagucugaacucuua

SEQ ID NO: 1797574 - RNA, 19 nt, Artificial Sequence
  Description of Artificial Sequence: Synthetic oligonucleotide
ccucauuaggagagcgcac

SEQ ID NO: 1797575 - RNA, 19 nt, Artificial Sequence
  Description of Artificial Sequence: Synthetic oligonucleotide
cauuaggagagcgcacaaa

SEQ ID NO: 1797576 - RNA, 19 nt, Artificial Sequence
  Description of Artificial Sequence: Synthetic oligonucleotide
gccuggacccuuggcaugg

SEQ ID NO: 1797577 - RNA, 19 nt, Artificial Sequence
  Description of Artificial Sequence: Synthetic oligonucleotide
ggcuuuggauagccuaaca

SEQ ID NO: 1797578 - RNA, 19 nt, Artificial Sequence
  Description of Artificial Sequence: Synthetic oligonucleotide
gcccgaaaguuagggaaag

SEQ ID NO: 1797579 - RNA, 19 nt, Artificial Sequence
  Description of Artificial Sequence: Synthetic oligonucleotide
gucaugggaaagucauuau

SEQ ID NO: 1797580 - RNA, 19 nt, Artificial Sequence
  Description of Artificial Sequence: Synthetic oligonucleotide
cagaagcaauggcccauca

SEQ ID NO: 1797581 - RNA, 19 nt, Artificial Sequence
  Description of Artificial Sequence: Synthetic oligonucleotide
gcacagccgccaucuagag

SEQ ID NO: 1797582 - RNA, 19 nt, Artificial Sequence
  Description of Artificial Sequence: Synthetic oligonucleotide
agggagauucagagagcca

SEQ ID NO: 1797583 - RNA, 19 nt, Artificial Sequence
  Description of Artificial Sequence: Synthetic oligonucleotide
cagaacgagucugaacucu

SEQ ID NO: 1797584 - RNA, 19 nt, Artificial Sequence
  Description of Artificial Sequence: Synthetic oligonucleotide
ccaaauggguagggcacag

SEQ ID NO: 1797585 - RNA, 19 nt, Artificial Sequence
  Description of Artificial Sequence: Synthetic oligonucleotide
gcuccuaaaagcugcuuuu

SEQ ID NO: 1797586 - RNA, 19 nt, Artificial Sequence
  Description of Artificial Sequence: Synthetic oligonucleotide
accuguccccaaaugggua

SEQ ID NO: 1797587 - RNA, 19 nt, Artificial Sequence
  Description of Artificial Sequence: Synthetic oligonucleotide
caaauggguagggcacaga

SEQ ID NO: 1797588 - RNA, 19 nt, Artificial Sequence
  Description of Artificial Sequence: Synthetic oligonucleotide
uguucccuuugcggggcuu

SEQ ID NO: 1797589 - RNA, 19 nt, Artificial Sequence
  Description of Artificial Sequence: Synthetic oligonucleotide
gggagcaaagcgcgcucuc

SEQ ID NO: 1797590 - RNA, 19 nt, Artificial Sequence
  Description of Artificial Sequence: Synthetic oligonucleotide
cucaauacggcagcuucuu

SEQ ID NO: 1797591 - RNA, 19 nt, Artificial Sequence
  Description of Artificial Sequence: Synthetic oligonucleotide
gaaccgaagcagggagcaa

SEQ ID NO: 1797592 - RNA, 19 nt, Artificial Sequence
  Description of Artificial Sequence: Synthetic oligonucleotide
cccaagggagauucagaga

SEQ ID NO: 1797593 - RNA, 19 nt, Artificial Sequence
  Description of Artificial Sequence: Synthetic oligonucleotide
cauccccaagggagauuca

SEQ ID NO: 1797594 - RNA, 19 nt, Artificial Sequence
  Description of Artificial Sequence: Synthetic oligonucleotide
gacccuuggcauggcucuc

SEQ ID NO: 1797595 - RNA, 19 nt, Artificial Sequence
  Description of Artificial Sequence: Synthetic oligonucleotide
gcucucucuaaggcacagc

SEQ ID NO: 1797596 - RNA, 19 nt, Artificial Sequence
  Description of Artificial Sequence: Synthetic oligonucleotide
gcaaagcgcgcucucucua

SEQ ID NO: 1797597 - RNA, 19 nt, Artificial Sequence
  Description of Artificial Sequence: Synthetic oligonucleotide
cuccaucuagaaaggcuuu

SEQ ID NO: 1797598 - RNA, 19 nt, Artificial Sequence
  Description of Artificial Sequence: Synthetic oligonucleotide
gcgcgcucucucuaaggca

SEQ ID NO: 1797599 - RNA, 19 nt, Artificial Sequence
  Description of Artificial Sequence: Synthetic oligonucleotide
gcgccauggcuucuaagcu

SEQ ID NO: 1797600 - RNA, 19 nt, Artificial Sequence
  Description of Artificial Sequence: Synthetic oligonucleotide
ccgaagcagggagcaaagc

SEQ ID NO: 1797601 - RNA, 19 nt, Artificial Sequence
  Description of Artificial Sequence: Synthetic oligonucleotide
cagccaugccaugacccaa

SEQ ID NO: 1797602 - RNA, 19 nt, Artificial Sequence
  Description of Artificial Sequence: Synthetic oligonucleotide
cagaaaucacuaggacagu

SEQ ID NO: 1797603 - RNA, 19 nt, Artificial Sequence
  Description of Artificial Sequence: Synthetic oligonucleotide
gucugaacucuuacuccau

SEQ ID NO: 1797604 - RNA, 19 nt, Artificial Sequence
  Description of Artificial Sequence: Synthetic oligonucleotide
ggagcaaagcgcgcucucu

SEQ ID NO: 1797605 - RNA, 19 nt, Artificial Sequence
  Description of Artificial Sequence: Synthetic oligonucleotide
accauccccaagggagauu

SEQ ID NO: 1797606 - RNA, 19 nt, Artificial Sequence
  Description of Artificial Sequence: Synthetic oligonucleotide
ccugacccaguuauccaua

SEQ ID NO: 1797607 - RNA, 19 nt, Artificial Sequence
  Description of Artificial Sequence: Synthetic oligonucleotide
ccgaaaguuagggaaaguu

SEQ ID NO: 1797608 - RNA, 19 nt, Artificial Sequence
  Description of Artificial Sequence: Synthetic oligonucleotide
ggugcgccauggcuucuaa

SEQ ID NO: 1797609 - RNA, 19 nt, Artificial Sequence
  Description of Artificial Sequence: Synthetic oligonucleotide
aggugcgccauggcuucua

SEQ ID NO: 1797610 - RNA, 19 nt, Artificial Sequence
  Description of Artificial Sequence: Synthetic oligonucleotide
cugcugacaaguggguuuu

SEQ ID NO: 1797611 - RNA, 19 nt, Artificial Sequence
  Description of Artificial Sequence: Synthetic oligonucleotide
gcggggcuuaaggaaugac

SEQ ID NO: 1797612 - RNA, 19 nt, Artificial Sequence
  Description of Artificial Sequence: Synthetic oligonucleotide
ccuaagcagcuucagcaau

SEQ ID NO: 1797613 - RNA, 19 nt, Artificial Sequence
  Description of Artificial Sequence: Synthetic oligonucleotide
cccaaauggguagggcaca

SEQ ID NO: 1797614 - RNA, 19 nt, Artificial Sequence
  Description of Artificial Sequence: Synthetic oligonucleotide
cggggcuuaaggaaugacu

SEQ ID NO: 1797615 - RNA, 19 nt, Artificial Sequence
  Description of Artificial Sequence: Synthetic oligonucleotide
cgaaucgaccccaguaagu

SEQ ID NO: 1797616 - RNA, 19 nt, Artificial Sequence
  Description of Artificial Sequence: Synthetic oligonucleotide
cgcucucucuaaggcacag

SEQ ID NO: 1797617 - RNA, 19 nt, Artificial Sequence
  Description of Artificial Sequence: Synthetic oligonucleotide
ggcucucaauacggcagcu

SEQ ID NO: 1797618 - RNA, 19 nt, Artificial Sequence
  Description of Artificial Sequence: Synthetic oligonucleotide
caccauccccaagggagau

SEQ ID NO: 1797619 - RNA, 19 nt, Artificial Sequence
  Description of Artificial Sequence: Synthetic oligonucleotide
gaggugcgccauggcuucu

SEQ ID NO: 1797620 - RNA, 19 nt, Artificial Sequence
  Description of Artificial Sequence: Synthetic oligonucleotide
caaguggguuuuggucuau

SEQ ID NO: 1797621 - RNA, 19 nt, Artificial Sequence
  Description of Artificial Sequence: Synthetic oligonucleotide
gcgcucucucuaaggcaca

SEQ ID NO: 1797622 - RNA, 19 nt, Artificial Sequence
  Description of Artificial Sequence: Synthetic oligonucleotide
gcucucaauacggcagcuu

SEQ ID NO: 1797623 - RNA, 19 nt, Artificial Sequence
  Description of Artificial Sequence: Synthetic oligonucleotide
cccgaaaguuagggaaagu

SEQ ID NO: 1797624 - RNA, 19 nt, Artificial Sequence
  Description of Artificial Sequence: Synthetic oligonucleotide
ccccugaggcugcccgaaa

SEQ ID NO: 1797625 - RNA, 19 nt, Artificial Sequence
  Description of Artificial Sequence: Synthetic oligonucleotide
uucuuuugcauuuauaugg

SEQ ID NO: 1797626 - RNA, 19 nt, Artificial Sequence
  Description of Artificial Sequence: Synthetic oligonucleotide
uaagauaugagauucuggg

SEQ ID NO: 1797627 - RNA, 19 nt, Artificial Sequence
  Description of Artificial Sequence: Synthetic oligonucleotide
aaugaaaggacuuaccaug

SEQ ID NO: 1797628 - RNA, 19 nt, Artificial Sequence
  Description of Artificial Sequence: Synthetic oligonucleotide
ugugauaauuuaaugaaag

SEQ ID NO: 1797629 - RNA, 19 nt, Artificial Sequence
  Description of Artificial Sequence: Synthetic oligonucleotide
uuaagauuugagcagcugg

SEQ ID NO: 1797630 - RNA, 19 nt, Artificial Sequence
  Description of Artificial Sequence: Synthetic oligonucleotide
uauacauuuaguaagguuu

SEQ ID NO: 1797631 - RNA, 19 nt, Artificial Sequence
  Description of Artificial Sequence: Synthetic oligonucleotide
auucuauacauuuaguaag

SEQ ID NO: 1797632 - RNA, 19 nt, Artificial Sequence
  Description of Artificial Sequence: Synthetic oligonucleotide
uuaaugaaaggacuuacca

SEQ ID NO: 1797633 - RNA, 19 nt, Artificial Sequence
  Description of Artificial Sequence: Synthetic oligonucleotide
uuuucuaagguuugaagag

SEQ ID NO: 1797634 - RNA, 19 nt, Artificial Sequence
  Description of Artificial Sequence: Synthetic oligonucleotide
uucuuaaugcuucauagug

SEQ ID NO: 1797635 - RNA, 19 nt, Artificial Sequence
  Description of Artificial Sequence: Synthetic oligonucleotide
gauaauuuaaugaaaggac

SEQ ID NO: 1797636 - RNA, 19 nt, Artificial Sequence
  Description of Artificial Sequence: Synthetic oligonucleotide
aagacuaucgaaugcuggg

SEQ ID NO: 1797637 - RNA, 19 nt, Artificial Sequence
  Description of Artificial Sequence: Synthetic oligonucleotide
ugauaauuuaaugaaagga

SEQ ID NO: 1797638 - RNA, 19 nt, Artificial Sequence
  Description of Artificial Sequence: Synthetic oligonucleotide
ugcuuuuaagauuugagca

SEQ ID NO: 1797639 - RNA, 19 nt, Artificial Sequence
  Description of Artificial Sequence: Synthetic oligonucleotide
ugugaauuucucuugaugu

SEQ ID NO: 1797640 - RNA, 19 nt, Artificial Sequence
  Description of Artificial Sequence: Synthetic oligonucleotide
cuuaaugcuucauaguggg

SEQ ID NO: 1797641 - RNA, 19 nt, Artificial Sequence
  Description of Artificial Sequence: Synthetic oligonucleotide
uucuauacauuuaguaagg

SEQ ID NO: 1797642 - RNA, 19 nt, Artificial Sequence
  Description of Artificial Sequence: Synthetic oligonucleotide
ucuuaaugcuucauagugg

SEQ ID NO: 1797643 - RNA, 19 nt, Artificial Sequence
  Description of Artificial Sequence: Synthetic oligonucleotide
ucuguagugguuucuaccg

SEQ ID NO: 1797644 - RNA, 19 nt, Artificial Sequence
  Description of Artificial Sequence: Synthetic oligonucleotide
uucagaguugauuucgugg

SEQ ID NO: 1797645 - RNA, 19 nt, Artificial Sequence
  Description of Artificial Sequence: Synthetic oligonucleotide
ucacauucuauacauuuag

SEQ ID NO: 1797646 - RNA, 19 nt, Artificial Sequence
  Description of Artificial Sequence: Synthetic oligonucleotide
ugugcuuuuaagauuugag

SEQ ID NO: 1797647 - RNA, 19 nt, Artificial Sequence
  Description of Artificial Sequence: Synthetic oligonucleotide
uguucuaagacuaucgaau

SEQ ID NO: 1797648 - RNA, 19 nt, Artificial Sequence
  Description of Artificial Sequence: Synthetic oligonucleotide
ugugacacuaucucuagag

SEQ ID NO: 1797649 - RNA, 19 nt, Artificial Sequence
  Description of Artificial Sequence: Synthetic oligonucleotide
uaaagugcacaugugaggg

SEQ ID NO: 1797650 - RNA, 19 nt, Artificial Sequence
  Description of Artificial Sequence: Synthetic oligonucleotide
auauuugucacauuccuga

SEQ ID NO: 1797651 - RNA, 19 nt, Artificial Sequence
  Description of Artificial Sequence: Synthetic oligonucleotide
uauuuaugccuucuuaaug

SEQ ID NO: 1797652 - RNA, 19 nt, Artificial Sequence
  Description of Artificial Sequence: Synthetic oligonucleotide
aguccuuacaacuguaagg

SEQ ID NO: 1797653 - RNA, 19 nt, Artificial Sequence
  Description of Artificial Sequence: Synthetic oligonucleotide
ugauguuuuauccccagug

SEQ ID NO: 1797654 - RNA, 19 nt, Artificial Sequence
  Description of Artificial Sequence: Synthetic oligonucleotide
uuuaaugaaaggacuuacc

SEQ ID NO: 1797655 - RNA, 19 nt, Artificial Sequence
  Description of Artificial Sequence: Synthetic oligonucleotide
aagaugugauaauuuaaug

SEQ ID NO: 1797656 - RNA, 19 nt, Artificial Sequence
  Description of Artificial Sequence: Synthetic oligonucleotide
acucucugauguuuuaucc

SEQ ID NO: 1797657 - RNA, 19 nt, Artificial Sequence
  Description of Artificial Sequence: Synthetic oligonucleotide
uuuauuuaugccuucuuaa

SEQ ID NO: 1797658 - RNA, 19 nt, Artificial Sequence
  Description of Artificial Sequence: Synthetic oligonucleotide
ucuugauguguuuucagag

SEQ ID NO: 1797659 - RNA, 19 nt, Artificial Sequence
  Description of Artificial Sequence: Synthetic oligonucleotide
uaagacuaucgaaugcugg

SEQ ID NO: 1797660 - RNA, 19 nt, Artificial Sequence
  Description of Artificial Sequence: Synthetic oligonucleotide
uguguaaaggacuugucac

SEQ ID NO: 1797661 - RNA, 19 nt, Artificial Sequence
  Description of Artificial Sequence: Synthetic oligonucleotide
uaagaguugagaacccggg

SEQ ID NO: 1797662 - RNA, 19 nt, Artificial Sequence
  Description of Artificial Sequence: Synthetic oligonucleotide
aaguaaagugcacauguga

SEQ ID NO: 1797663 - RNA, 19 nt, Artificial Sequence
  Description of Artificial Sequence: Synthetic oligonucleotide
uguucuuugcauuugugac

SEQ ID NO: 1797664 - RNA, 19 nt, Artificial Sequence
  Description of Artificial Sequence: Synthetic oligonucleotide
ucuucuaagaugugagucc

SEQ ID NO: 1797665 - RNA, 19 nt, Artificial Sequence
  Description of Artificial Sequence: Synthetic oligonucleotide
auuuaaugaaaggacuuac

SEQ ID NO: 1797666 - RNA, 19 nt, Artificial Sequence
  Description of Artificial Sequence: Synthetic oligonucleotide
cuucuaagaguugagaacc

SEQ ID NO: 1797667 - RNA, 19 nt, Artificial Sequence
  Description of Artificial Sequence: Synthetic oligonucleotide
guuucuaccgugaugaaag

SEQ ID NO: 1797668 - RNA, 19 nt, Artificial Sequence
  Description of Artificial Sequence: Synthetic oligonucleotide
aacucucugauguuuuauc

SEQ ID NO: 1797669 - RNA, 19 nt, Artificial Sequence
  Description of Artificial Sequence: Synthetic oligonucleotide
uaucucuagagaaugauuu

SEQ ID NO: 1797670 - RNA, 19 nt, Artificial Sequence
  Description of Artificial Sequence: Synthetic oligonucleotide
guugauuucgugguaaagg

SEQ ID NO: 1797671 - RNA, 19 nt, Artificial Sequence
  Description of Artificial Sequence: Synthetic oligonucleotide
ucuaccgugaugaaaguaa

SEQ ID NO: 1797672 - RNA, 19 nt, Artificial Sequence
  Description of Artificial Sequence: Synthetic oligonucleotide
gugauaauuuaaugaaagg

SEQ ID NO: 1797673 - RNA, 19 nt, Artificial Sequence
  Description of Artificial Sequence: Synthetic oligonucleotide
uugauuucgugguaaagga

SEQ ID NO: 1797674 - RNA, 19 nt, Artificial Sequence
  Description of Artificial Sequence: Synthetic oligonucleotide
uguuuuauccccaguguga

SEQ ID NO: 1797675 - RNA, 19 nt, Artificial Sequence
  Description of Artificial Sequence: Synthetic oligonucleotide
cuaagauaugagauucugg

SEQ ID NO: 1797676 - RNA, 19 nt, Artificial Sequence
  Description of Artificial Sequence: Synthetic oligonucleotide
uuuccuguagaauuagcca

SEQ ID NO: 1797677 - RNA, 19 nt, Artificial Sequence
  Description of Artificial Sequence: Synthetic oligonucleotide
ucuucuaagaguugagaac

SEQ ID NO: 1797678 - RNA, 19 nt, Artificial Sequence
  Description of Artificial Sequence: Synthetic oligonucleotide
gaaaguaaagugcacaugu

SEQ ID NO: 1797679 - RNA, 19 nt, Artificial Sequence
  Description of Artificial Sequence: Synthetic oligonucleotide
guaaagugcacaugugagg

SEQ ID NO: 1797680 - RNA, 19 nt, Artificial Sequence
  Description of Artificial Sequence: Synthetic oligonucleotide
uuugaagaguugguaaagg

SEQ ID NO: 1797681 - RNA, 19 nt, Artificial Sequence
  Description of Artificial Sequence: Synthetic oligonucleotide
uaaugcuucauagugggug

SEQ ID NO: 1797682 - RNA, 19 nt, Artificial Sequence
  Description of Artificial Sequence: Synthetic oligonucleotide
ucucugauguuuuaucccc

SEQ ID NO: 1797683 - RNA, 19 nt, Artificial Sequence
  Description of Artificial Sequence: Synthetic oligonucleotide
ucagaguugauuucguggu

SEQ ID NO: 1797684 - RNA, 19 nt, Artificial Sequence
  Description of Artificial Sequence: Synthetic oligonucleotide
cuaagguuugaagaguugg

SEQ ID NO: 1797685 - RNA, 19 nt, Artificial Sequence
  Description of Artificial Sequence: Synthetic oligonucleotide
auucuuuugcauuuauaug

SEQ ID NO: 1797686 - RNA, 19 nt, Artificial Sequence
  Description of Artificial Sequence: Synthetic oligonucleotide
auaauuuaaugaaaggacu

SEQ ID NO: 1797687 - RNA, 19 nt, Artificial Sequence
  Description of Artificial Sequence: Synthetic oligonucleotide
agcagaguccaugaguucc

SEQ ID NO: 1797688 - RNA, 19 nt, Artificial Sequence
  Description of Artificial Sequence: Synthetic oligonucleotide
cuaagaguugagaacccgg

SEQ ID NO: 1797689 - RNA, 19 nt, Artificial Sequence
  Description of Artificial Sequence: Synthetic oligonucleotide
gacccugugauguauuucc

SEQ ID NO: 1797690 - RNA, 19 nt, Artificial Sequence
  Description of Artificial Sequence: Synthetic oligonucleotide
aaugcuucauaguggguga

SEQ ID NO: 1797691 - RNA, 19 nt, Artificial Sequence
  Description of Artificial Sequence: Synthetic oligonucleotide
ucuaagacuaucgaaugcu

SEQ ID NO: 1797692 - RNA, 19 nt, Artificial Sequence
  Description of Artificial Sequence: Synthetic oligonucleotide
agauaugagauucugggua

SEQ ID NO: 1797693 - RNA, 19 nt, Artificial Sequence
  Description of Artificial Sequence: Synthetic oligonucleotide
aauuagccauuucuuguug

SEQ ID NO: 1797694 - RNA, 19 nt, Artificial Sequence
  Description of Artificial Sequence: Synthetic oligonucleotide
aagauaugagauucugggu

SEQ ID NO: 1797695 - RNA, 19 nt, Artificial Sequence
  Description of Artificial Sequence: Synthetic oligonucleotide
uaugccuucuuaaugcuuc

SEQ ID NO: 1797696 - RNA, 19 nt, Artificial Sequence
  Description of Artificial Sequence: Synthetic oligonucleotide
guuuucagaguugauuucg

SEQ ID NO: 1797697 - RNA, 19 nt, Artificial Sequence
  Description of Artificial Sequence: Synthetic oligonucleotide
ugaagaguugguaaaggau

SEQ ID NO: 1797698 - RNA, 19 nt, Artificial Sequence
  Description of Artificial Sequence: Synthetic oligonucleotide
uucuaagacuaucgaaugc

SEQ ID NO: 1797699 - RNA, 19 nt, Artificial Sequence
  Description of Artificial Sequence: Synthetic oligonucleotide
ugugaguccuguguaaagg

SEQ ID NO: 1797700 - RNA, 19 nt, Artificial Sequence
  Description of Artificial Sequence: Synthetic oligonucleotide
ucuaagauaugagauucug

SEQ ID NO: 1797701 - RNA, 19 nt, Artificial Sequence
  Description of Artificial Sequence: Synthetic oligonucleotide
uguguucuaagacuaucga

SEQ ID NO: 1797702 - RNA, 19 nt, Artificial Sequence
  Description of Artificial Sequence: Synthetic oligonucleotide
auguauuuccuguagaauu

SEQ ID NO: 1797703 - RNA, 19 nt, Artificial Sequence
  Description of Artificial Sequence: Synthetic oligonucleotide
gugcuuuuaagauuugagc

SEQ ID NO: 1797704 - RNA, 19 nt, Artificial Sequence
  Description of Artificial Sequence: Synthetic oligonucleotide
uguauuuccuguagaauua

SEQ ID NO: 1797705 - RNA, 19 nt, Artificial Sequence
  Description of Artificial Sequence: Synthetic oligonucleotide
cuuuuaagauuugagcagc

SEQ ID NO: 1797706 - RNA, 19 nt, Artificial Sequence
  Description of Artificial Sequence: Synthetic oligonucleotide
ugcauuugugacacuaucu

SEQ ID NO: 1797707 - RNA, 19 nt, Artificial Sequence
  Description of Artificial Sequence: Synthetic oligonucleotide
ucuggugugcuuuuaagau

SEQ ID NO: 1797708 - RNA, 19 nt, Artificial Sequence
  Description of Artificial Sequence: Synthetic oligonucleotide
aguaaagugcacaugugag

SEQ ID NO: 1797709 - RNA, 19 nt, Artificial Sequence
  Description of Artificial Sequence: Synthetic oligonucleotide
ucgaaugcuggguauagga

SEQ ID NO: 1797710 - RNA, 19 nt, Artificial Sequence
  Description of Artificial Sequence: Synthetic oligonucleotide
acauucuauacauuuagua

SEQ ID NO: 1797711 - RNA, 19 nt, Artificial Sequence
  Description of Artificial Sequence: Synthetic oligonucleotide
uuugugacacuaucucuag

SEQ ID NO: 1797712 - RNA, 19 nt, Artificial Sequence
  Description of Artificial Sequence: Synthetic oligonucleotide
ugacacuaucucuagagaa

SEQ ID NO: 1797713 - RNA, 19 nt, Artificial Sequence
  Description of Artificial Sequence: Synthetic oligonucleotide
uuauuuaugccuucuuaau

SEQ ID NO: 1797714 - RNA, 19 nt, Artificial Sequence
  Description of Artificial Sequence: Synthetic oligonucleotide
uaaugaaaggacuuaccau

SEQ ID NO: 1797715 - RNA, 19 nt, Artificial Sequence
  Description of Artificial Sequence: Synthetic oligonucleotide
aauauuugucacauuccug

SEQ ID NO: 1797716 - RNA, 19 nt, Artificial Sequence
  Description of Artificial Sequence: Synthetic oligonucleotide
gaaaggacuuaccauguuc

SEQ ID NO: 1797717 - RNA, 19 nt, Artificial Sequence
  Description of Artificial Sequence: Synthetic oligonucleotide
gaugaaaguaaagugcaca

SEQ ID NO: 1797718 - RNA, 19 nt, Artificial Sequence
  Description of Artificial Sequence: Synthetic oligonucleotide
cauucuauacauuuaguaa

SEQ ID NO: 1797719 - RNA, 19 nt, Artificial Sequence
  Description of Artificial Sequence: Synthetic oligonucleotide
ucuaagaguugagaacccg

SEQ ID NO: 1797720 - RNA, 19 nt, Artificial Sequence
  Description of Artificial Sequence: Synthetic oligonucleotide
ugagcagaguccaugaguu

SEQ ID NO: 1797721 - RNA, 19 nt, Artificial Sequence
  Description of Artificial Sequence: Synthetic oligonucleotide
auguuuuauccccagugug

SEQ ID NO: 1797722 - RNA, 19 nt, Artificial Sequence
  Description of Artificial Sequence: Synthetic oligonucleotide
guucuaagacuaucgaaug

SEQ ID NO: 1797723 - RNA, 19 nt, Artificial Sequence
  Description of Artificial Sequence: Synthetic oligonucleotide
uguagugguuucuaccgug

SEQ ID NO: 1797724 - RNA, 19 nt, Artificial Sequence
  Description of Artificial Sequence: Synthetic oligonucleotide
ugaauuucucuugaugugu

SEQ ID NO: 1797725 - RNA, 19 nt, Artificial Sequence
  Description of Artificial Sequence: Synthetic oligonucleotide
uucauagugggugaagugu

SEQ ID NO: 1797726 - RNA, 19 nt, Artificial Sequence
  Description of Artificial Sequence: Synthetic oligonucleotide
uaagguuugaagaguuggu

SEQ ID NO: 1797727 - RNA, 19 nt, Artificial Sequence
  Description of Artificial Sequence: Synthetic oligonucleotide
uguucuaagauaugagauu

SEQ ID NO: 1797728 - RNA, 19 nt, Artificial Sequence
  Description of Artificial Sequence: Synthetic oligonucleotide
uuucuggugugcuuuuaag

SEQ ID NO: 1797729 - RNA, 19 nt, Artificial Sequence
  Description of Artificial Sequence: Synthetic oligonucleotide
cugguauaggauuugccac

SEQ ID NO: 1797730 - RNA, 19 nt, Artificial Sequence
  Description of Artificial Sequence: Synthetic oligonucleotide
caugugaggggucaugaag

SEQ ID NO: 1797731 - RNA, 19 nt, Artificial Sequence
  Description of Artificial Sequence: Synthetic oligonucleotide
uucuggugugcuuuuaaga

SEQ ID NO: 1797732 - RNA, 19 nt, Artificial Sequence
  Description of Artificial Sequence: Synthetic oligonucleotide
augaaaguaaagugcacau

SEQ ID NO: 1797733 - RNA, 19 nt, Artificial Sequence
  Description of Artificial Sequence: Synthetic oligonucleotide
auguucuuugcauuuguga

SEQ ID NO: 1797734 - RNA, 19 nt, Artificial Sequence
  Description of Artificial Sequence: Synthetic oligonucleotide
guucuaagauaugagauuc

SEQ ID NO: 1797735 - RNA, 19 nt, Artificial Sequence
  Description of Artificial Sequence: Synthetic oligonucleotide
uccaguguguaauuuucug

SEQ ID NO: 1797736 - RNA, 19 nt, Artificial Sequence
  Description of Artificial Sequence: Synthetic oligonucleotide
uucuuugcauuugugacac

SEQ ID NO: 1797737 - RNA, 19 nt, Artificial Sequence
  Description of Artificial Sequence: Synthetic oligonucleotide
ucugauguuuuauccccag

SEQ ID NO: 1797738 - RNA, 19 nt, Artificial Sequence
  Description of Artificial Sequence: Synthetic oligonucleotide
gcuuuuaagauuugagcag

SEQ ID NO: 1797739 - RNA, 19 nt, Artificial Sequence
  Description of Artificial Sequence: Synthetic oligonucleotide
uuuuaagauuugagcagcu

SEQ ID NO: 1797740 - RNA, 19 nt, Artificial Sequence
  Description of Artificial Sequence: Synthetic oligonucleotide
cucucugauguuuuauccc

SEQ ID NO: 1797741 - RNA, 19 nt, Artificial Sequence
  Description of Artificial Sequence: Synthetic oligonucleotide
ugguauaggauuugccaca

SEQ ID NO: 1797742 - RNA, 19 nt, Artificial Sequence
  Description of Artificial Sequence: Synthetic oligonucleotide
ucugucacggucauugcau

SEQ ID NO: 1797743 - RNA, 19 nt, Artificial Sequence
  Description of Artificial Sequence: Synthetic oligonucleotide
uggugugcuuuuaagauuu

SEQ ID NO: 1797744 - RNA, 19 nt, Artificial Sequence
  Description of Artificial Sequence: Synthetic oligonucleotide
ucuaagguuugaagaguug

SEQ ID NO: 1797745 - RNA, 19 nt, Artificial Sequence
  Description of Artificial Sequence: Synthetic oligonucleotide
uuuaugccuucuuaaugcu

SEQ ID NO: 1797746 - RNA, 19 nt, Artificial Sequence
  Description of Artificial Sequence: Synthetic oligonucleotide
uccagugugaauuucucuu

SEQ ID NO: 1797747 - RNA, 19 nt, Artificial Sequence
  Description of Artificial Sequence: Synthetic oligonucleotide
auguguucuaagacuaucg

SEQ ID NO: 1797748 - RNA, 19 nt, Artificial Sequence
  Description of Artificial Sequence: Synthetic oligonucleotide
ucauagugggugaaguguc

SEQ ID NO: 1797749 - RNA, 19 nt, Artificial Sequence
  Description of Artificial Sequence: Synthetic oligonucleotide
ucucuugauguguuuucag

SEQ ID NO: 1797750 - RNA, 19 nt, Artificial Sequence
  Description of Artificial Sequence: Synthetic oligonucleotide
augugaggggucaugaagg

SEQ ID NO: 1797751 - RNA, 19 nt, Artificial Sequence
  Description of Artificial Sequence: Synthetic oligonucleotide
cuuuacaacuguaaggucu

SEQ ID NO: 1797752 - RNA, 19 nt, Artificial Sequence
  Description of Artificial Sequence: Synthetic oligonucleotide
aagaguugagaacccgggu

SEQ ID NO: 1797753 - RNA, 19 nt, Artificial Sequence
  Description of Artificial Sequence: Synthetic oligonucleotide
uucuaagaguugagaaccc

SEQ ID NO: 1797754 - RNA, 19 nt, Artificial Sequence
  Description of Artificial Sequence: Synthetic oligonucleotide
ugaaaguaaagugcacaug

SEQ ID NO: 1797755 - RNA, 19 nt, Artificial Sequence
  Description of Artificial Sequence: Synthetic oligonucleotide
uuuucagaguugauuucgu

SEQ ID NO: 1797756 - RNA, 19 nt, Artificial Sequence
  Description of Artificial Sequence: Synthetic oligonucleotide
gugaauuucucuugaugug

SEQ ID NO: 1797757 - RNA, 19 nt, Artificial Sequence
  Description of Artificial Sequence: Synthetic oligonucleotide
aaaguaaagugcacaugug

SEQ ID NO: 1797758 - RNA, 19 nt, Artificial Sequence
  Description of Artificial Sequence: Synthetic oligonucleotide
gauaugagauucuggguaa

SEQ ID NO: 1797759 - RNA, 19 nt, Artificial Sequence
  Description of Artificial Sequence: Synthetic oligonucleotide
uauguacucucugaugucu

SEQ ID NO: 1797760 - RNA, 19 nt, Artificial Sequence
  Description of Artificial Sequence: Synthetic oligonucleotide
cgugaugaaaguaaagugc

SEQ ID NO: 1797761 - RNA, 19 nt, Artificial Sequence
  Description of Artificial Sequence: Synthetic oligonucleotide
ccuucuuaaugcuucauag

SEQ ID NO: 1797762 - RNA, 19 nt, Artificial Sequence
  Description of Artificial Sequence: Synthetic oligonucleotide
accgugaugaaaguaaagu

SEQ ID NO: 1797763 - RNA, 19 nt, Artificial Sequence
  Description of Artificial Sequence: Synthetic oligonucleotide
agucuguagugguuucuac

SEQ ID NO: 1797764 - RNA, 19 nt, Artificial Sequence
  Description of Artificial Sequence: Synthetic oligonucleotide
uuuaagauuugagcagcug

SEQ ID NO: 1797765 - RNA, 19 nt, Artificial Sequence
  Description of Artificial Sequence: Synthetic oligonucleotide
uuucagaguugauuucgug

SEQ ID NO: 1797766 - RNA, 19 nt, Artificial Sequence
  Description of Artificial Sequence: Synthetic oligonucleotide
gugguuucuaccgugauga

SEQ ID NO: 1797767 - RNA, 19 nt, Artificial Sequence
  Description of Artificial Sequence: Synthetic oligonucleotide
cuaagacuaucgaaugcug

SEQ ID NO: 1797768 - RNA, 19 nt, Artificial Sequence
  Description of Artificial Sequence: Synthetic oligonucleotide
gaaucuuucugaugucuuc

SEQ ID NO: 1797769 - RNA, 19 nt, Artificial Sequence
  Description of Artificial Sequence: Synthetic oligonucleotide
uucuaagguuugaagaguu

SEQ ID NO: 1797770 - RNA, 19 nt, Artificial Sequence
  Description of Artificial Sequence: Synthetic oligonucleotide
gugucugucacggucauug

SEQ ID NO: 1797771 - RNA, 19 nt, Artificial Sequence
  Description of Artificial Sequence: Synthetic oligonucleotide
uuucuaagguuugaagagu

SEQ ID NO: 1797772 - RNA, 19 nt, Artificial Sequence
  Description of Artificial Sequence: Synthetic oligonucleotide
ugccacaguccuuacaacu

SEQ ID NO: 1797773 - RNA, 19 nt, Artificial Sequence
  Description of Artificial Sequence: Synthetic oligonucleotide
ggugaagugucugucacgg

SEQ ID NO: 1797774 - RNA, 19 nt, Artificial Sequence
  Description of Artificial Sequence: Synthetic oligonucleotide
gugugaaucuuucugaugu

SEQ ID NO: 1797775 - RNA, 19 nt, Artificial Sequence
  Description of Artificial Sequence: Synthetic oligonucleotide
guuugaagaguugguaaag

SEQ ID NO: 1797776 - RNA, 19 nt, Artificial Sequence
  Description of Artificial Sequence: Synthetic oligonucleotide
uuuucuggugugcuuuuaa

SEQ ID NO: 1797777 - RNA, 19 nt, Artificial Sequence
  Description of Artificial Sequence: Synthetic oligonucleotide
cauucuuuugcauuuauau

SEQ ID NO: 1797778 - RNA, 19 nt, Artificial Sequence
  Description of Artificial Sequence: Synthetic oligonucleotide
uugcauuugugacacuauc

SEQ ID NO: 1797779 - RNA, 19 nt, Artificial Sequence
  Description of Artificial Sequence: Synthetic oligonucleotide
uaccgugaugaaaguaaag

SEQ ID NO: 1797780 - RNA, 19 nt, Artificial Sequence
  Description of Artificial Sequence: Synthetic oligonucleotide
agugugaaucuuucugaug

SEQ ID NO: 1797781 - RNA, 19 nt, Artificial Sequence
  Description of Artificial Sequence: Synthetic oligonucleotide
uuccugacauuuguaaggc

SEQ ID NO: 1797782 - RNA, 19 nt, Artificial Sequence
  Description of Artificial Sequence: Synthetic oligonucleotide
agguuugaagaguugguaa

SEQ ID NO: 1797783 - RNA, 19 nt, Artificial Sequence
  Description of Artificial Sequence: Synthetic oligonucleotide
ugucacauucuuuugcauu

SEQ ID NO: 1797784 - RNA, 19 nt, Artificial Sequence
  Description of Artificial Sequence: Synthetic oligonucleotide
uucuaagauaugagauucu

SEQ ID NO: 1797785 - RNA, 19 nt, Artificial Sequence
  Description of Artificial Sequence: Synthetic oligonucleotide
gugaugaaaguaaagugca

SEQ ID NO: 1797786 - RNA, 19 nt, Artificial Sequence
  Description of Artificial Sequence: Synthetic oligonucleotide
ugaguccuguguaaaggac

SEQ ID NO: 1797787 - RNA, 19 nt, Artificial Sequence
  Description of Artificial Sequence: Synthetic oligonucleotide
uuugcauuugugacacuau

SEQ ID NO: 1797788 - RNA, 19 nt, Artificial Sequence
  Description of Artificial Sequence: Synthetic oligonucleotide
aagugcacaugugaggggu

SEQ ID NO: 1797789 - RNA, 19 nt, Artificial Sequence
  Description of Artificial Sequence: Synthetic oligonucleotide
ucugagcagaguccaugag

SEQ ID NO: 1797790 - RNA, 19 nt, Artificial Sequence
  Description of Artificial Sequence: Synthetic oligonucleotide
uuuccagugugaauuucuc

SEQ ID NO: 1797791 - RNA, 19 nt, Artificial Sequence
  Description of Artificial Sequence: Synthetic oligonucleotide
agugguuucuaccgugaug

SEQ ID NO: 1797792 - RNA, 19 nt, Artificial Sequence
  Description of Artificial Sequence: Synthetic oligonucleotide
uaucgaaugcuggguauag

SEQ ID NO: 1797793 - RNA, 19 nt, Artificial Sequence
  Description of Artificial Sequence: Synthetic oligonucleotide
ugggugaagugucugucac

SEQ ID NO: 1797794 - RNA, 19 nt, Artificial Sequence
  Description of Artificial Sequence: Synthetic oligonucleotide
acggucauugcauuuguaa

SEQ ID NO: 1797795 - RNA, 19 nt, Artificial Sequence
  Description of Artificial Sequence: Synthetic oligonucleotide
ugaaucuuucugaugucuu

SEQ ID NO: 1797796 - RNA, 19 nt, Artificial Sequence
  Description of Artificial Sequence: Synthetic oligonucleotide
acacuaucucuagagaaug

SEQ ID NO: 1797797 - RNA, 19 nt, Artificial Sequence
  Description of Artificial Sequence: Synthetic oligonucleotide
cuugucacauucuuuugca

SEQ ID NO: 1797798 - RNA, 19 nt, Artificial Sequence
  Description of Artificial Sequence: Synthetic oligonucleotide
agaguugagaacccgggua

SEQ ID NO: 1797799 - RNA, 19 nt, Artificial Sequence
  Description of Artificial Sequence: Synthetic oligonucleotide
cuucauagugggugaagug

SEQ ID NO: 1797800 - RNA, 19 nt, Artificial Sequence
  Description of Artificial Sequence: Synthetic oligonucleotide
acccggguaaaauauuugu

SEQ ID NO: 1797801 - RNA, 19 nt, Artificial Sequence
  Description of Artificial Sequence: Synthetic oligonucleotide
ugagcagcugguauaggau

SEQ ID NO: 1797802 - RNA, 19 nt, Artificial Sequence
  Description of Artificial Sequence: Synthetic oligonucleotide
ugagaacccggguaaaaua

SEQ ID NO: 1797803 - RNA, 19 nt, Artificial Sequence
  Description of Artificial Sequence: Synthetic oligonucleotide
ucuauacauuuaguaaggu

SEQ ID NO: 1797804 - RNA, 19 nt, Artificial Sequence
  Description of Artificial Sequence: Synthetic oligonucleotide
gucuucuaagaguugagaa

SEQ ID NO: 1797805 - RNA, 19 nt, Artificial Sequence
  Description of Artificial Sequence: Synthetic oligonucleotide
aaugcuggguauaggauuu

SEQ ID NO: 1797806 - RNA, 19 nt, Artificial Sequence
  Description of Artificial Sequence: Synthetic oligonucleotide
ugauuucgugguaaaggau

SEQ ID NO: 1797807 - RNA, 19 nt, Artificial Sequence
  Description of Artificial Sequence: Synthetic oligonucleotide
gauguuuuauccccagugu

SEQ ID NO: 1797808 - RNA, 19 nt, Artificial Sequence
  Description of Artificial Sequence: Synthetic oligonucleotide
caguccuuacaacuguaag

SEQ ID NO: 1797809 - RNA, 19 nt, Artificial Sequence
  Description of Artificial Sequence: Synthetic oligonucleotide
augugaguccuguguaaag

SEQ ID NO: 1797810 - RNA, 19 nt, Artificial Sequence
  Description of Artificial Sequence: Synthetic oligonucleotide
aauuucucuugauguguuu

SEQ ID NO: 1797811 - RNA, 19 nt, Artificial Sequence
  Description of Artificial Sequence: Synthetic oligonucleotide
gauguguucuaagacuauc

SEQ ID NO: 1797812 - RNA, 19 nt, Artificial Sequence
  Description of Artificial Sequence: Synthetic oligonucleotide
ugugaggggucaugaagga

SEQ ID NO: 1797813 - RNA, 19 nt, Artificial Sequence
  Description of Artificial Sequence: Synthetic oligonucleotide
aauuuucuggugugcuuuu

SEQ ID NO: 1797814 - RNA, 19 nt, Artificial Sequence
  Description of Artificial Sequence: Synthetic oligonucleotide
aagguuugaagaguuggua

SEQ ID NO: 1797815 - RNA, 19 nt, Artificial Sequence
  Description of Artificial Sequence: Synthetic oligonucleotide
agugggugaagugucuguc

SEQ ID NO: 1797816 - RNA, 19 nt, Artificial Sequence
  Description of Artificial Sequence: Synthetic oligonucleotide
cuguguaaaggacuuguca

SEQ ID NO: 1797817 - RNA, 19 nt, Artificial Sequence
  Description of Artificial Sequence: Synthetic oligonucleotide
ucuuuacaacuguaagguc

SEQ ID NO: 1797818 - RNA, 19 nt, Artificial Sequence
  Description of Artificial Sequence: Synthetic oligonucleotide
agcugguauaggauuugcc

SEQ ID NO: 1797819 - RNA, 19 nt, Artificial Sequence
  Description of Artificial Sequence: Synthetic oligonucleotide
cauguucuuugcauuugug

SEQ ID NO: 1797820 - RNA, 19 nt, Artificial Sequence
  Description of Artificial Sequence: Synthetic oligonucleotide
aguugauuucgugguaaag

SEQ ID NO: 1797821 - RNA, 19 nt, Artificial Sequence
  Description of Artificial Sequence: Synthetic oligonucleotide
gcugguauaggauuugcca

SEQ ID NO: 1797822 - RNA, 19 nt, Artificial Sequence
  Description of Artificial Sequence: Synthetic oligonucleotide
auuugugacacuaucucua

SEQ ID NO: 1797823 - RNA, 19 nt, Artificial Sequence
  Description of Artificial Sequence: Synthetic oligonucleotide
uucucuugauguguuuuca

SEQ ID NO: 1797824 - RNA, 19 nt, Artificial Sequence
  Description of Artificial Sequence: Synthetic oligonucleotide
uuaccauguucuuugcauu

SEQ ID NO: 1797825 - RNA, 19 nt, Artificial Sequence
  Description of Artificial Sequence: Synthetic oligonucleotide
uuaaugcuucauagugggu

SEQ ID NO: 1797826 - RNA, 19 nt, Artificial Sequence
  Description of Artificial Sequence: Synthetic oligonucleotide
acuaucgaaugcuggguau

SEQ ID NO: 1797827 - RNA, 19 nt, Artificial Sequence
  Description of Artificial Sequence: Synthetic oligonucleotide
uuccagugugaauuucucu

SEQ ID NO: 1797828 - RNA, 19 nt, Artificial Sequence
  Description of Artificial Sequence: Synthetic oligonucleotide
guauuuccuguagaauuag

SEQ ID NO: 1797829 - RNA, 19 nt, Artificial Sequence
  Description of Artificial Sequence: Synthetic oligonucleotide
aagaguugguaaaggauuu

SEQ ID NO: 1797830 - RNA, 19 nt, Artificial Sequence
  Description of Artificial Sequence: Synthetic oligonucleotide
ucccguauguacucucuga

SEQ ID NO: 1797831 - RNA, 19 nt, Artificial Sequence
  Description of Artificial Sequence: Synthetic oligonucleotide
acuaucucuagagaaugau

SEQ ID NO: 1797832 - RNA, 19 nt, Artificial Sequence
  Description of Artificial Sequence: Synthetic oligonucleotide
uuauccccagugugaaucu

SEQ ID NO: 1797833 - RNA, 19 nt, Artificial Sequence
  Description of Artificial Sequence: Synthetic oligonucleotide
ugugaaucuuucugauguc

SEQ ID NO: 1797834 - RNA, 19 nt, Artificial Sequence
  Description of Artificial Sequence: Synthetic oligonucleotide
gcauuugugacacuaucuc

SEQ ID NO: 1797835 - RNA, 19 nt, Artificial Sequence
  Description of Artificial Sequence: Synthetic oligonucleotide
cucuugauguguuuucaga

SEQ ID NO: 1797836 - RNA, 19 nt, Artificial Sequence
  Description of Artificial Sequence: Synthetic oligonucleotide
uguacucucugaugucuuc

SEQ ID NO: 1797837 - RNA, 19 nt, Artificial Sequence
  Description of Artificial Sequence: Synthetic oligonucleotide
gaagugucugucacgguca

SEQ ID NO: 1797838 - RNA, 19 nt, Artificial Sequence
  Description of Artificial Sequence: Synthetic oligonucleotide
acuuaccauguucuuugca

SEQ ID NO: 1797839 - RNA, 19 nt, Artificial Sequence
  Description of Artificial Sequence: Synthetic oligonucleotide
cuaagaugugaguccugug

SEQ ID NO: 1797840 - RNA, 19 nt, Artificial Sequence
  Description of Artificial Sequence: Synthetic oligonucleotide
gucaacagacccugugaug

SEQ ID NO: 1797841 - RNA, 19 nt, Artificial Sequence
  Description of Artificial Sequence: Synthetic oligonucleotide
auaggauuugucacauucu

SEQ ID NO: 1797842 - RNA, 19 nt, Artificial Sequence
  Description of Artificial Sequence: Synthetic oligonucleotide
uugugacacuaucucuaga

SEQ ID NO: 1797843 - RNA, 19 nt, Artificial Sequence
  Description of Artificial Sequence: Synthetic oligonucleotide
ucacggucauugcauuugu

SEQ ID NO: 1797844 - RNA, 19 nt, Artificial Sequence
  Description of Artificial Sequence: Synthetic oligonucleotide
uauggagucuguagugguu

SEQ ID NO: 1797845 - RNA, 19 nt, Artificial Sequence
  Description of Artificial Sequence: Synthetic oligonucleotide
aacccggguaaaauauuug

SEQ ID NO: 1797846 - RNA, 19 nt, Artificial Sequence
  Description of Artificial Sequence: Synthetic oligonucleotide
uuaugccuucuuaaugcuu

SEQ ID NO: 1797847 - RNA, 19 nt, Artificial Sequence
  Description of Artificial Sequence: Synthetic oligonucleotide
uucuccaguguguaauuuu

SEQ ID NO: 1797848 - RNA, 19 nt, Artificial Sequence
  Description of Artificial Sequence: Synthetic oligonucleotide
uugucacauucuuuacaac

SEQ ID NO: 1797849 - RNA, 19 nt, Artificial Sequence
  Description of Artificial Sequence: Synthetic oligonucleotide
guguucuaagacuaucgaa

SEQ ID NO: 1797850 - RNA, 19 nt, Artificial Sequence
  Description of Artificial Sequence: Synthetic oligonucleotide
uugagaacccggguaaaau

SEQ ID NO: 1797851 - RNA, 19 nt, Artificial Sequence
  Description of Artificial Sequence: Synthetic oligonucleotide
agaguugauuucgugguaa

SEQ ID NO: 1797852 - RNA, 19 nt, Artificial Sequence
  Description of Artificial Sequence: Synthetic oligonucleotide
cuuaccauguucuuugcau

SEQ ID NO: 1797853 - RNA, 19 nt, Artificial Sequence
  Description of Artificial Sequence: Synthetic oligonucleotide
guguuuucagaguugauuu

SEQ ID NO: 1797854 - RNA, 19 nt, Artificial Sequence
  Description of Artificial Sequence: Synthetic oligonucleotide
ugauguguucuaagacuau

SEQ ID NO: 1797855 - RNA, 19 nt, Artificial Sequence
  Description of Artificial Sequence: Synthetic oligonucleotide
uaccauguucuuugcauuu

SEQ ID NO: 1797856 - RNA, 19 nt, Artificial Sequence
  Description of Artificial Sequence: Synthetic oligonucleotide
agugugaauuucucuugau

SEQ ID NO: 1797857 - RNA, 19 nt, Artificial Sequence
  Description of Artificial Sequence: Synthetic oligonucleotide
augaaaggacuuaccaugu

SEQ ID NO: 1797858 - RNA, 19 nt, Artificial Sequence
  Description of Artificial Sequence: Synthetic oligonucleotide
gugauguauuuccuguaga

SEQ ID NO: 1797859 - RNA, 19 nt, Artificial Sequence
  Description of Artificial Sequence: Synthetic oligonucleotide
ccgugaugaaaguaaagug

SEQ ID NO: 1797860 - RNA, 19 nt, Artificial Sequence
  Description of Artificial Sequence: Synthetic oligonucleotide
auuucucuugauguguuuu

SEQ ID NO: 1797861 - RNA, 19 nt, Artificial Sequence
  Description of Artificial Sequence: Synthetic oligonucleotide
uuucuaccgugaugaaagu

SEQ ID NO: 1797862 - RNA, 19 nt, Artificial Sequence
  Description of Artificial Sequence: Synthetic oligonucleotide
gucacggucauugcauuug

SEQ ID NO: 1797863 - RNA, 19 nt, Artificial Sequence
  Description of Artificial Sequence: Synthetic oligonucleotide
auacauuuaguaagguuuu

SEQ ID NO: 1797864 - RNA, 19 nt, Artificial Sequence
  Description of Artificial Sequence: Synthetic oligonucleotide
ugcuucauagugggugaag

SEQ ID NO: 1797865 - RNA, 19 nt, Artificial Sequence
  Description of Artificial Sequence: Synthetic oligonucleotide
gauuucgugguaaaggauu

SEQ ID NO: 1797866 - RNA, 19 nt, Artificial Sequence
  Description of Artificial Sequence: Synthetic oligonucleotide
ugaaaggacuuaccauguu

SEQ ID NO: 1797867 - RNA, 19 nt, Artificial Sequence
  Description of Artificial Sequence: Synthetic oligonucleotide
gaaugcuggguauaggauu

SEQ ID NO: 1797868 - RNA, 19 nt, Artificial Sequence
  Description of Artificial Sequence: Synthetic oligonucleotide
uagugggugaagugucugu

SEQ ID NO: 1797869 - RNA, 19 nt, Artificial Sequence
  Description of Artificial Sequence: Synthetic oligonucleotide
augugauaauuuaaugaaa

SEQ ID NO: 1797870 - RNA, 19 nt, Artificial Sequence
  Description of Artificial Sequence: Synthetic oligonucleotide
gugacacuaucucuagaga

SEQ ID NO: 1797871 - RNA, 19 nt, Artificial Sequence
  Description of Artificial Sequence: Synthetic oligonucleotide
agacuaucgaaugcugggu

SEQ ID NO: 1797872 - RNA, 19 nt, Artificial Sequence
  Description of Artificial Sequence: Synthetic oligonucleotide
caguguguaauuuucuggu

SEQ ID NO: 1797873 - RNA, 19 nt, Artificial Sequence
  Description of Artificial Sequence: Synthetic oligonucleotide
guauguacucucugauguc

SEQ ID NO: 1797874 - RNA, 19 nt, Artificial Sequence
  Description of Artificial Sequence: Synthetic oligonucleotide
agacccugugauguauuuc

SEQ ID NO: 1797875 - RNA, 19 nt, Artificial Sequence
  Description of Artificial Sequence: Synthetic oligonucleotide
gacuaucgaaugcugggua

SEQ ID NO: 1797876 - RNA, 19 nt, Artificial Sequence
  Description of Artificial Sequence: Synthetic oligonucleotide
auagugggugaagugucug

SEQ ID NO: 1797877 - RNA, 19 nt, Artificial Sequence
  Description of Artificial Sequence: Synthetic oligonucleotide
aucgaaugcuggguauagg

SEQ ID NO: 1797878 - RNA, 19 nt, Artificial Sequence
  Description of Artificial Sequence: Synthetic oligonucleotide
uugucacauucuuuugcau

SEQ ID NO: 1797879 - RNA, 19 nt, Artificial Sequence
  Description of Artificial Sequence: Synthetic oligonucleotide
agaguugguaaaggauuug

SEQ ID NO: 1797880 - RNA, 19 nt, Artificial Sequence
  Description of Artificial Sequence: Synthetic oligonucleotide
ggguaaaauauuugucaca

SEQ ID NO: 1797881 - RNA, 19 nt, Artificial Sequence
  Description of Artificial Sequence: Synthetic oligonucleotide
ccggguaaaauauuuguca

SEQ ID NO: 1797882 - RNA, 19 nt, Artificial Sequence
  Description of Artificial Sequence: Synthetic oligonucleotide
ugucugucacggucauugc

SEQ ID NO: 1797883 - RNA, 19 nt, Artificial Sequence
  Description of Artificial Sequence: Synthetic oligonucleotide
cuugauguguuuucagagu

SEQ ID NO: 1797884 - RNA, 19 nt, Artificial Sequence
  Description of Artificial Sequence: Synthetic oligonucleotide
guuuuauccccagugugaa

SEQ ID NO: 1797885 - RNA, 19 nt, Artificial Sequence
  Description of Artificial Sequence: Synthetic oligonucleotide
aagugucugucacggucau

SEQ ID NO: 1797886 - RNA, 19 nt, Artificial Sequence
  Description of Artificial Sequence: Synthetic oligonucleotide
cuuugcauuugugacacua

SEQ ID NO: 1797887 - RNA, 19 nt, Artificial Sequence
  Description of Artificial Sequence: Synthetic oligonucleotide
cauuugugacacuaucucu

SEQ ID NO: 1797888 - RNA, 19 nt, Artificial Sequence
  Description of Artificial Sequence: Synthetic oligonucleotide
cuuuccagugugaauuucu

SEQ ID NO: 1797889 - RNA, 19 nt, Artificial Sequence
  Description of Artificial Sequence: Synthetic oligonucleotide
guguucuaagauaugagau

SEQ ID NO: 1797890 - RNA, 19 nt, Artificial Sequence
  Description of Artificial Sequence: Synthetic oligonucleotide
cuucuuaaugcuucauagu

SEQ ID NO: 1797891 - RNA, 19 nt, Artificial Sequence
  Description of Artificial Sequence: Synthetic oligonucleotide
uagugguuucuaccgugau

SEQ ID NO: 1797892 - RNA, 19 nt, Artificial Sequence
  Description of Artificial Sequence: Synthetic oligonucleotide
gaguugauuucgugguaaa

SEQ ID NO: 1797893 - RNA, 19 nt, Artificial Sequence
  Description of Artificial Sequence: Synthetic oligonucleotide
auuucgugguaaaggauuu

SEQ ID NO: 1797894 - RNA, 19 nt, Artificial Sequence
  Description of Artificial Sequence: Synthetic oligonucleotide
cuauacauuuaguaagguu

SEQ ID NO: 1797895 - RNA, 19 nt, Artificial Sequence
  Description of Artificial Sequence: Synthetic oligonucleotide
uucuaccgugaugaaagua

SEQ ID NO: 1797896 - RNA, 19 nt, Artificial Sequence
  Description of Artificial Sequence: Synthetic oligonucleotide
cagugugaauuucucuuga

SEQ ID NO: 1797897 - RNA, 19 nt, Artificial Sequence
  Description of Artificial Sequence: Synthetic oligonucleotide
gacacuaucucuagagaau

SEQ ID NO: 1797898 - RNA, 19 nt, Artificial Sequence
  Description of Artificial Sequence: Synthetic oligonucleotide
gggugaagugucugucacg

SEQ ID NO: 1797899 - RNA, 19 nt, Artificial Sequence
  Description of Artificial Sequence: Synthetic oligonucleotide
cuaccgugaugaaaguaaa

SEQ ID NO: 1797900 - RNA, 19 nt, Artificial Sequence
  Description of Artificial Sequence: Synthetic oligonucleotide
ccagugugaauuucucuug

SEQ ID NO: 1797901 - RNA, 19 nt, Artificial Sequence
  Description of Artificial Sequence: Synthetic oligonucleotide
uggagucuguagugguuuc

SEQ ID NO: 1797902 - RNA, 19 nt, Artificial Sequence
  Description of Artificial Sequence: Synthetic oligonucleotide
acaugugaggggucaugaa

SEQ ID NO: 1797903 - RNA, 19 nt, Artificial Sequence
  Description of Artificial Sequence: Synthetic oligonucleotide
cacuaucucuagagaauga

SEQ ID NO: 1797904 - RNA, 19 nt, Artificial Sequence
  Description of Artificial Sequence: Synthetic oligonucleotide
gagauucuggguaaaggau

SEQ ID NO: 1797905 - RNA, 19 nt, Artificial Sequence
  Description of Artificial Sequence: Synthetic oligonucleotide
cggguaaaauauuugucac

SEQ ID NO: 1797906 - RNA, 19 nt, Artificial Sequence
  Description of Artificial Sequence: Synthetic oligonucleotide
ugucacggucauugcauuu

SEQ ID NO: 1797907 - RNA, 19 nt, Artificial Sequence
  Description of Artificial Sequence: Synthetic oligonucleotide
ugcuggguauaggauuugu

SEQ ID NO: 1797908 - RNA, 19 nt, Artificial Sequence
  Description of Artificial Sequence: Synthetic oligonucleotide
gugggugaagugucuguca

SEQ ID NO: 1797909 - RNA, 19 nt, Artificial Sequence
  Description of Artificial Sequence: Synthetic oligonucleotide
cggucauugcauuuguaag

SEQ ID NO: 1797910 - RNA, 19 nt, Artificial Sequence
  Description of Artificial Sequence: Synthetic oligonucleotide
uuucuccaguguguaauuu

SEQ ID NO: 1797911 - RNA, 19 nt, Artificial Sequence
  Description of Artificial Sequence: Synthetic oligonucleotide
cucugauguuuuaucccca

SEQ ID NO: 1797912 - RNA, 19 nt, Artificial Sequence
  Description of Artificial Sequence: Synthetic oligonucleotide
gagaacccggguaaaauau

SEQ ID NO: 1797913 - RNA, 19 nt, Artificial Sequence
  Description of Artificial Sequence: Synthetic oligonucleotide
auggagucuguagugguuu

SEQ ID NO: 1797914 - RNA, 19 nt, Artificial Sequence
  Description of Artificial Sequence: Synthetic oligonucleotide
aguccuguguaaaggacuu

SEQ ID NO: 1797915 - RNA, 19 nt, Artificial Sequence
  Description of Artificial Sequence: Synthetic oligonucleotide
gaguccuguguaaaggacu

SEQ ID NO: 1797916 - RNA, 19 nt, Artificial Sequence
  Description of Artificial Sequence: Synthetic oligonucleotide
guagugguuucuaccguga

SEQ ID NO: 1797917 - RNA, 19 nt, Artificial Sequence
  Description of Artificial Sequence: Synthetic oligonucleotide
gucacauucuauacauuua

SEQ ID NO: 1797918 - RNA, 19 nt, Artificial Sequence
  Description of Artificial Sequence: Synthetic oligonucleotide
agugcacaugugagggguc

SEQ ID NO: 1797919 - RNA, 19 nt, Artificial Sequence
  Description of Artificial Sequence: Synthetic oligonucleotide
ggacuugucacauucuuuu

SEQ ID NO: 1797920 - RNA, 19 nt, Artificial Sequence
  Description of Artificial Sequence: Synthetic oligonucleotide
gagcagaguccaugaguuc

SEQ ID NO: 1797921 - RNA, 19 nt, Artificial Sequence
  Description of Artificial Sequence: Synthetic oligonucleotide
cagcugguauaggauuugc

SEQ ID NO: 1797922 - RNA, 19 nt, Artificial Sequence
  Description of Artificial Sequence: Synthetic oligonucleotide
ucacauucuuuugcauuua

SEQ ID NO: 1797923 - RNA, 19 nt, Artificial Sequence
  Description of Artificial Sequence: Synthetic oligonucleotide
cugagcagaguccaugagu

SEQ ID NO: 1797924 - RNA, 19 nt, Artificial Sequence
  Description of Artificial Sequence: Synthetic oligonucleotide
cacaugugaggggucauga

SEQ ID NO: 1797925 - RNA, 19 nt, Artificial Sequence
  Description of Artificial Sequence: Synthetic oligonucleotide
gugaaucuuucugaugucu

SEQ ID NO: 1797926 - RNA, 19 nt, Artificial Sequence
  Description of Artificial Sequence: Synthetic oligonucleotide
cacauucuauacauuuagu

SEQ ID NO: 1797927 - RNA, 19 nt, Artificial Sequence
  Description of Artificial Sequence: Synthetic oligonucleotide
cccggguaaaauauuuguc

SEQ ID NO: 1797928 - RNA, 19 nt, Artificial Sequence
  Description of Artificial Sequence: Synthetic oligonucleotide
gugugcuuuuaagauuuga

SEQ ID NO: 1797929 - RNA, 19 nt, Artificial Sequence
  Description of Artificial Sequence: Synthetic oligonucleotide
acauucuuuugcauuuaua

SEQ ID NO: 1797930 - RNA, 19 nt, Artificial Sequence
  Description of Artificial Sequence: Synthetic oligonucleotide
gccacaguccuuacaacug

SEQ ID NO: 1797931 - RNA, 19 nt, Artificial Sequence
  Description of Artificial Sequence: Synthetic oligonucleotide
auaugagauucuggguaaa

SEQ ID NO: 1797932 - RNA, 19 nt, Artificial Sequence
  Description of Artificial Sequence: Synthetic oligonucleotide
acaguccuuacaacuguaa

SEQ ID NO: 1797933 - RNA, 19 nt, Artificial Sequence
  Description of Artificial Sequence: Synthetic oligonucleotide
cuaucucuagagaaugauu

SEQ ID NO: 1797934 - RNA, 19 nt, Artificial Sequence
  Description of Artificial Sequence: Synthetic oligonucleotide
guaauuuucuggugugcuu

SEQ ID NO: 1797935 - RNA, 19 nt, Artificial Sequence
  Description of Artificial Sequence: Synthetic oligonucleotide
guugagaacccggguaaaa

SEQ ID NO: 1797936 - RNA, 19 nt, Artificial Sequence
  Description of Artificial Sequence: Synthetic oligonucleotide
gagucuguagugguuucua

SEQ ID NO: 1797937 - RNA, 19 nt, Artificial Sequence
  Description of Artificial Sequence: Synthetic oligonucleotide
ugguuucuaccgugaugaa

SEQ ID NO: 1797938 - RNA, 19 nt, Artificial Sequence
  Description of Artificial Sequence: Synthetic oligonucleotide
cugugauguauuuccugua

SEQ ID NO: 1797939 - RNA, 19 nt, Artificial Sequence
  Description of Artificial Sequence: Synthetic oligonucleotide
ccguauguacucucugaug

SEQ ID NO: 1797940 - RNA, 19 nt, Artificial Sequence
  Description of Artificial Sequence: Synthetic oligonucleotide
aguugagaacccggguaaa

SEQ ID NO: 1797941 - RNA, 19 nt, Artificial Sequence
  Description of Artificial Sequence: Synthetic oligonucleotide
gaauuucucuugauguguu

SEQ ID NO: 1797942 - RNA, 19 nt, Artificial Sequence
  Description of Artificial Sequence: Synthetic oligonucleotide
cauagugggugaagugucu

SEQ ID NO: 1797943 - RNA, 19 nt, Artificial Sequence
  Description of Artificial Sequence: Synthetic oligonucleotide
gugaggggucaugaaggac

SEQ ID NO: 1797944 - RNA, 19 nt, Artificial Sequence
  Description of Artificial Sequence: Synthetic oligonucleotide
agaacccggguaaaauauu

SEQ ID NO: 1797945 - RNA, 19 nt, Artificial Sequence
  Description of Artificial Sequence: Synthetic oligonucleotide
gguuucuaccgugaugaaa

SEQ ID NO: 1797946 - RNA, 19 nt, Artificial Sequence
  Description of Artificial Sequence: Synthetic oligonucleotide
auuuucuggugugcuuuua

SEQ ID NO: 1797947 - RNA, 19 nt, Artificial Sequence
  Description of Artificial Sequence: Synthetic oligonucleotide
ugccuucuuaaugcuucau

SEQ ID NO: 1797948 - RNA, 19 nt, Artificial Sequence
  Description of Artificial Sequence: Synthetic oligonucleotide
gugcacaugugagggguca

SEQ ID NO: 1797949 - RNA, 19 nt, Artificial Sequence
  Description of Artificial Sequence: Synthetic oligonucleotide
ccugugauguauuuccugu

SEQ ID NO: 1797950 - RNA, 19 nt, Artificial Sequence
  Description of Artificial Sequence: Synthetic oligonucleotide
cuaucgaaugcuggguaua

SEQ ID NO: 1797951 - RNA, 19 nt, Artificial Sequence
  Description of Artificial Sequence: Synthetic oligonucleotide
cacaguccuuacaacugua

SEQ ID NO: 1797952 - RNA, 19 nt, Artificial Sequence
  Description of Artificial Sequence: Synthetic oligonucleotide
ugcacaugugaggggucau

SEQ ID NO: 1797953 - RNA, 19 nt, Artificial Sequence
  Description of Artificial Sequence: Synthetic oligonucleotide
guacucucugaugucuucu

SEQ ID NO: 1797954 - RNA, 19 nt, Artificial Sequence
  Description of Artificial Sequence: Synthetic oligonucleotide
gccuucuuaaugcuucaua

SEQ ID NO: 1797955 - RNA, 19 nt, Artificial Sequence
  Description of Artificial Sequence: Synthetic oligonucleotide
guccuguguaaaggacuug

SEQ ID NO: 1797956 - RNA, 19 nt, Artificial Sequence
  Description of Artificial Sequence: Synthetic oligonucleotide
auguacucucugaugucuu

SEQ ID NO: 1797957 - RNA, 19 nt, Artificial Sequence
  Description of Artificial Sequence: Synthetic oligonucleotide
augcuggguauaggauuug

SEQ ID NO: 1797958 - RNA, 19 nt, Artificial Sequence
  Description of Artificial Sequence: Synthetic oligonucleotide
cuuuugcauuuauaugguu

SEQ ID NO: 1797959 - RNA, 19 nt, Artificial Sequence
  Description of Artificial Sequence: Synthetic oligonucleotide
uauccccagugugaaucuu

SEQ ID NO: 1797960 - RNA, 19 nt, Artificial Sequence
  Description of Artificial Sequence: Synthetic oligonucleotide
gcagcugguauaggauuug

SEQ ID NO: 1797961 - RNA, 19 nt, Artificial Sequence
  Description of Artificial Sequence: Synthetic oligonucleotide
cagaguugauuucguggua

SEQ ID NO: 1797962 - RNA, 19 nt, Artificial Sequence
  Description of Artificial Sequence: Synthetic oligonucleotide
gcuucauagugggugaagu

SEQ ID NO: 1797963 - RNA, 19 nt, Artificial Sequence
  Description of Artificial Sequence: Synthetic oligonucleotide
cugauguuuuauccccagu

SEQ ID NO: 1797964 - RNA, 19 nt, Artificial Sequence
  Description of Artificial Sequence: Synthetic oligonucleotide
cacauucuuuugcauuuau

SEQ ID NO: 1797965 - RNA, 19 nt, Artificial Sequence
  Description of Artificial Sequence: Synthetic oligonucleotide
augcuucauagugggugaa

SEQ ID NO: 1797966 - RNA, 19 nt, Artificial Sequence
  Description of Artificial Sequence: Synthetic oligonucleotide
cuguagugguuucuaccgu

SEQ ID NO: 1797967 - RNA, 19 nt, Artificial Sequence
  Description of Artificial Sequence: Synthetic oligonucleotide
acagacccugugauguauu

SEQ ID NO: 1797968 - RNA, 19 nt, Artificial Sequence
  Description of Artificial Sequence: Synthetic oligonucleotide
gcacaugugaggggucaug

SEQ ID NO: 1797969 - RNA, 19 nt, Artificial Sequence
  Description of Artificial Sequence: Synthetic oligonucleotide
ggugugcuuuuaagauuug

SEQ ID NO: 1797970 - RNA, 19 nt, Artificial Sequence
  Description of Artificial Sequence: Synthetic oligonucleotide
guauaggauuugccacagu

SEQ ID NO: 1797971 - RNA, 19 nt, Artificial Sequence
  Description of Artificial Sequence: Synthetic oligonucleotide
cagaguccaugaguuccca

SEQ ID NO: 1797972 - RNA, 19 nt, Artificial Sequence
  Description of Artificial Sequence: Synthetic oligonucleotide
cacggucauugcauuugua

SEQ ID NO: 1797973 - RNA, 19 nt, Artificial Sequence
  Description of Artificial Sequence: Synthetic oligonucleotide
gugaagugucugucacggu

SEQ ID NO: 1797974 - RNA, 19 nt, Artificial Sequence
  Description of Artificial Sequence: Synthetic oligonucleotide
agugucugucacggucauu

SEQ ID NO: 1797975 - RNA, 19 nt, Artificial Sequence
  Description of Artificial Sequence: Synthetic oligonucleotide
cagacccugugauguauuu

SEQ ID NO: 1797976 - RNA, 19 nt, Artificial Sequence
  Description of Artificial Sequence: Synthetic oligonucleotide
ccauguucuuugcauuugu

SEQ ID NO: 1797977 - RNA, 19 nt, Artificial Sequence
  Description of Artificial Sequence: Synthetic oligonucleotide
cugucacggucauugcauu

SEQ ID NO: 1797978 - RNA, 19 nt, Artificial Sequence
  Description of Artificial Sequence: Synthetic oligonucleotide
ggagucuguagugguuucu

SEQ ID NO: 1797979 - RNA, 19 nt, Artificial Sequence
  Description of Artificial Sequence: Synthetic oligonucleotide
ccacaguccuuacaacugu

SEQ ID NO: 1797980 - RNA, 19 nt, Artificial Sequence
  Description of Artificial Sequence: Synthetic oligonucleotide
cccguauguacucucugau

SEQ ID NO: 1797981 - RNA, 19 nt, Artificial Sequence
  Description of Artificial Sequence: Synthetic oligonucleotide
cgaaugcuggguauaggau

SEQ ID NO: 1797982 - RNA, 19 nt, Artificial Sequence
  Description of Artificial Sequence: Synthetic oligonucleotide
uucuuuauccccauggcgg

SEQ ID NO: 1797983 - RNA, 19 nt, Artificial Sequence
  Description of Artificial Sequence: Synthetic oligonucleotide
auccuuauucuuuaucccc

SEQ ID NO: 1797984 - RNA, 19 nt, Artificial Sequence
  Description of Artificial Sequence: Synthetic oligonucleotide
ucauccauccccauccacg

SEQ ID NO: 1797985 - RNA, 19 nt, Artificial Sequence
  Description of Artificial Sequence: Synthetic oligonucleotide
gaagaaguccguguaagcg

SEQ ID NO: 1797986 - RNA, 19 nt, Artificial Sequence
  Description of Artificial Sequence: Synthetic oligonucleotide
auucuuuauccccauggcg

SEQ ID NO: 1797987 - RNA, 19 nt, Artificial Sequence
  Description of Artificial Sequence: Synthetic oligonucleotide
aguaccuucucagagcccc

SEQ ID NO: 1797988 - RNA, 19 nt, Artificial Sequence
  Description of Artificial Sequence: Synthetic oligonucleotide
caucucaugagaagcaucc

SEQ ID NO: 1797989 - RNA, 19 nt, Artificial Sequence
  Description of Artificial Sequence: Synthetic oligonucleotide
ugcucauccauccccaucc

SEQ ID NO: 1797990 - RNA, 19 nt, Artificial Sequence
  Description of Artificial Sequence: Synthetic oligonucleotide
cuuaccgugagccugcccc

SEQ ID NO: 1797991 - RNA, 19 nt, Artificial Sequence
  Description of Artificial Sequence: Synthetic oligonucleotide
aagaaguccguguaagcgu

SEQ ID NO: 1797992 - RNA, 19 nt, Artificial Sequence
  Description of Artificial Sequence: Synthetic oligonucleotide
cacaguucccaucacacgg

SEQ ID NO: 1797993 - RNA, 19 nt, Artificial Sequence
  Description of Artificial Sequence: Synthetic oligonucleotide
ugcauggcgguucagggcc

SEQ ID NO: 1797994 - RNA, 19 nt, Artificial Sequence
  Description of Artificial Sequence: Synthetic oligonucleotide
auggccagggcacaucacc

SEQ ID NO: 1797995 - RNA, 19 nt, Artificial Sequence
  Description of Artificial Sequence: Synthetic oligonucleotide
caucacacggcccagcucc

SEQ ID NO: 1797996 - RNA, 19 nt, Artificial Sequence
  Description of Artificial Sequence: Synthetic oligonucleotide
ucaaaccucccgaugaccu

SEQ ID NO: 1797997 - RNA, 19 nt, Artificial Sequence
  Description of Artificial Sequence: Synthetic oligonucleotide
caaguaccuucucagagcc

SEQ ID NO: 1797998 - RNA, 19 nt, Artificial Sequence
  Description of Artificial Sequence: Synthetic oligonucleotide
cucaaguaccuucucagag

SEQ ID NO: 1797999 - RNA, 19 nt, Artificial Sequence
  Description of Artificial Sequence: Synthetic oligonucleotide
ucggaaaagccgcugcucc

SEQ ID NO: 1798000 - RNA, 19 nt, Artificial Sequence
  Description of Artificial Sequence: Synthetic oligonucleotide
cauccuuauucuuuauccc

SEQ ID NO: 1798001 - RNA, 19 nt, Artificial Sequence
  Description of Artificial Sequence: Synthetic oligonucleotide
acaaguagcgccggaagcg

SEQ ID NO: 1798002 - RNA, 19 nt, Artificial Sequence
  Description of Artificial Sequence: Synthetic oligonucleotide
ucggaaucucugcaggaag

SEQ ID NO: 1798003 - RNA, 19 nt, Artificial Sequence
  Description of Artificial Sequence: Synthetic oligonucleotide
uccauccccauccacgacc

SEQ ID NO: 1798004 - RNA, 19 nt, Artificial Sequence
  Description of Artificial Sequence: Synthetic oligonucleotide
ugcuggacucucaaguacc

SEQ ID NO: 1798005 - RNA, 19 nt, Artificial Sequence
  Description of Artificial Sequence: Synthetic oligonucleotide
cacagguucuugcucaucc

SEQ ID NO: 1798006 - RNA, 19 nt, Artificial Sequence
  Description of Artificial Sequence: Synthetic oligonucleotide
gacaaguagcgccggaagc

SEQ ID NO: 1798007 - RNA, 19 nt, Artificial Sequence
  Description of Artificial Sequence: Synthetic oligonucleotide
uggacucucaaguaccuuc

SEQ ID NO: 1798008 - RNA, 19 nt, Artificial Sequence
  Description of Artificial Sequence: Synthetic oligonucleotide
ucacuugagggcuucugca

SEQ ID NO: 1798009 - RNA, 19 nt, Artificial Sequence
  Description of Artificial Sequence: Synthetic oligonucleotide
cuuggcgacauccccacag

SEQ ID NO: 1798010 - RNA, 19 nt, Artificial Sequence
  Description of Artificial Sequence: Synthetic oligonucleotide
agacaaguagcgccggaag

SEQ ID NO: 1798011 - RNA, 19 nt, Artificial Sequence
  Description of Artificial Sequence: Synthetic oligonucleotide
uuuauccccauggcggagg

SEQ ID NO: 1798012 - RNA, 19 nt, Artificial Sequence
  Description of Artificial Sequence: Synthetic oligonucleotide
aaucucugcaggaagcggu

SEQ ID NO: 1798013 - RNA, 19 nt, Artificial Sequence
  Description of Artificial Sequence: Synthetic oligonucleotide
ucuuuauccccauggcgga

SEQ ID NO: 1798014 - RNA, 19 nt, Artificial Sequence
  Description of Artificial Sequence: Synthetic oligonucleotide
cugagaaggacucggguuc

SEQ ID NO: 1798015 - RNA, 19 nt, Artificial Sequence
  Description of Artificial Sequence: Synthetic oligonucleotide
accugcuggacucucaagu

SEQ ID NO: 1798016 - RNA, 19 nt, Artificial Sequence
  Description of Artificial Sequence: Synthetic oligonucleotide
ucucaaucuggcuucggaa

SEQ ID NO: 1798017 - RNA, 19 nt, Artificial Sequence
  Description of Artificial Sequence: Synthetic oligonucleotide
ugcucauccccuaggguca

SEQ ID NO: 1798018 - RNA, 19 nt, Artificial Sequence
  Description of Artificial Sequence: Synthetic oligonucleotide
guagcuaagcugcugcuca

SEQ ID NO: 1798019 - RNA, 19 nt, Artificial Sequence
  Description of Artificial Sequence: Synthetic oligonucleotide
gaaggacucggguuccugc

SEQ ID NO: 1798020 - RNA, 19 nt, Artificial Sequence
  Description of Artificial Sequence: Synthetic oligonucleotide
uuauccccauggcggaggg

SEQ ID NO: 1798021 - RNA, 19 nt, Artificial Sequence
  Description of Artificial Sequence: Synthetic oligonucleotide
ucucaaguaccuucucaga

SEQ ID NO: 1798022 - RNA, 19 nt, Artificial Sequence
  Description of Artificial Sequence: Synthetic oligonucleotide
ccugcagacaaguagcgcc

SEQ ID NO: 1798023 - RNA, 19 nt, Artificial Sequence
  Description of Artificial Sequence: Synthetic oligonucleotide
acucucaaguaccuucuca

SEQ ID NO: 1798024 - RNA, 19 nt, Artificial Sequence
  Description of Artificial Sequence: Synthetic oligonucleotide
ccauccacgaccuuccgcg

SEQ ID NO: 1798025 - RNA, 19 nt, Artificial Sequence
  Description of Artificial Sequence: Synthetic oligonucleotide
auggcggaggggcagcgac

SEQ ID NO: 1798026 - RNA, 19 nt, Artificial Sequence
  Description of Artificial Sequence: Synthetic oligonucleotide
cuggcuucggaaucucugc

SEQ ID NO: 1798027 - RNA, 19 nt, Artificial Sequence
  Description of Artificial Sequence: Synthetic oligonucleotide
agcgccgugucuccggugg

SEQ ID NO: 1798028 - RNA, 19 nt, Artificial Sequence
  Description of Artificial Sequence: Synthetic oligonucleotide
aguagcuaagcugcugcuc

SEQ ID NO: 1798029 - RNA, 19 nt, Artificial Sequence
  Description of Artificial Sequence: Synthetic oligonucleotide
gucacuugagggcuucugc

SEQ ID NO: 1798030 - RNA, 19 nt, Artificial Sequence
  Description of Artificial Sequence: Synthetic oligonucleotide
acaguucccaucacacggc

SEQ ID NO: 1798031 - RNA, 19 nt, Artificial Sequence
  Description of Artificial Sequence: Synthetic oligonucleotide
cucccaucuguccuuggcg

SEQ ID NO: 1798032 - RNA, 19 nt, Artificial Sequence
  Description of Artificial Sequence: Synthetic oligonucleotide
uccaacucgcccugcagcu

SEQ ID NO: 1798033 - RNA, 19 nt, Artificial Sequence
  Description of Artificial Sequence: Synthetic oligonucleotide
agcgucggggcccuggcgg

SEQ ID NO: 1798034 - RNA, 19 nt, Artificial Sequence
  Description of Artificial Sequence: Synthetic oligonucleotide
cugggcgugcucucgagcc

SEQ ID NO: 1798035 - RNA, 19 nt, Artificial Sequence
  Description of Artificial Sequence: Synthetic oligonucleotide
ucccaucuguccuuggcga

SEQ ID NO: 1798036 - RNA, 19 nt, Artificial Sequence
  Description of Artificial Sequence: Synthetic oligonucleotide
aaguccguguaagcgucgg

SEQ ID NO: 1798037 - RNA, 19 nt, Artificial Sequence
  Description of Artificial Sequence: Synthetic oligonucleotide
ucagggugccaucggaccu

SEQ ID NO: 1798038 - RNA, 19 nt, Artificial Sequence
  Description of Artificial Sequence: Synthetic oligonucleotide
gguucagggccugagaaag

SEQ ID NO: 1798039 - RNA, 19 nt, Artificial Sequence
  Description of Artificial Sequence: Synthetic oligonucleotide
uccguguaagcgucggggc

SEQ ID NO: 1798040 - RNA, 19 nt, Artificial Sequence
  Description of Artificial Sequence: Synthetic oligonucleotide
cuugagcccuccuggcucg

SEQ ID NO: 1798041 - RNA, 19 nt, Artificial Sequence
  Description of Artificial Sequence: Synthetic oligonucleotide
gaccuccugccacucaucc

SEQ ID NO: 1798042 - RNA, 19 nt, Artificial Sequence
  Description of Artificial Sequence: Synthetic oligonucleotide
uucaaaccucccgaugacc

SEQ ID NO: 1798043 - RNA, 19 nt, Artificial Sequence
  Description of Artificial Sequence: Synthetic oligonucleotide
guccguguaagcgucgggg

SEQ ID NO: 1798044 - RNA, 19 nt, Artificial Sequence
  Description of Artificial Sequence: Synthetic oligonucleotide
aaucuggcuucggaaucuc

SEQ ID NO: 1798045 - RNA, 19 nt, Artificial Sequence
  Description of Artificial Sequence: Synthetic oligonucleotide
ugagaagcauccucuucaa

SEQ ID NO: 1798046 - RNA, 19 nt, Artificial Sequence
  Description of Artificial Sequence: Synthetic oligonucleotide
gagccaggcggucugacca

SEQ ID NO: 1798047 - RNA, 19 nt, Artificial Sequence
  Description of Artificial Sequence: Synthetic oligonucleotide
agcgacucagcaguggcag

SEQ ID NO: 1798048 - RNA, 19 nt, Artificial Sequence
  Description of Artificial Sequence: Synthetic oligonucleotide
gcuucggaaucucugcagg

SEQ ID NO: 1798049 - RNA, 19 nt, Artificial Sequence
  Description of Artificial Sequence: Synthetic oligonucleotide
uuccgcgucucccaucugu

SEQ ID NO: 1798050 - RNA, 19 nt, Artificial Sequence
  Description of Artificial Sequence: Synthetic oligonucleotide
aaguagcgccggaagcggc

SEQ ID NO: 1798051 - RNA, 19 nt, Artificial Sequence
  Description of Artificial Sequence: Synthetic oligonucleotide
caggucucaaucuggcuuc

SEQ ID NO: 1798052 - RNA, 19 nt, Artificial Sequence
  Description of Artificial Sequence: Synthetic oligonucleotide
gggcacaucaccaaagcgc

SEQ ID NO: 1798053 - RNA, 19 nt, Artificial Sequence
  Description of Artificial Sequence: Synthetic oligonucleotide
gguuccugcaucucaugag

SEQ ID NO: 1798054 - RNA, 19 nt, Artificial Sequence
  Description of Artificial Sequence: Synthetic oligonucleotide
cucccaggucucaaucugg

SEQ ID NO: 1798055 - RNA, 19 nt, Artificial Sequence
  Description of Artificial Sequence: Synthetic oligonucleotide
uccacgaccuuccgcgucu

SEQ ID NO: 1798056 - RNA, 19 nt, Artificial Sequence
  Description of Artificial Sequence: Synthetic oligonucleotide
cucucggaaaagccgcugc

SEQ ID NO: 1798057 - RNA, 19 nt, Artificial Sequence
  Description of Artificial Sequence: Synthetic oligonucleotide
uggcuucggaaucucugca

SEQ ID NO: 1798058 - RNA, 19 nt, Artificial Sequence
  Description of Artificial Sequence: Synthetic oligonucleotide
uggguguucugcccugggc

SEQ ID NO: 1798059 - RNA, 19 nt, Artificial Sequence
  Description of Artificial Sequence: Synthetic oligonucleotide
cccuugagccucuugagcc

SEQ ID NO: 1798060 - RNA, 19 nt, Artificial Sequence
  Description of Artificial Sequence: Synthetic oligonucleotide
ccuagggucacuugagggc

SEQ ID NO: 1798061 - RNA, 19 nt, Artificial Sequence
  Description of Artificial Sequence: Synthetic oligonucleotide
uggcucggcucucacgcag

SEQ ID NO: 1798062 - RNA, 19 nt, Artificial Sequence
  Description of Artificial Sequence: Synthetic oligonucleotide
uuccugcaucucaugagaa

SEQ ID NO: 1798063 - RNA, 19 nt, Artificial Sequence
  Description of Artificial Sequence: Synthetic oligonucleotide
ugagaaggacucggguucc

SEQ ID NO: 1798064 - RNA, 19 nt, Artificial Sequence
  Description of Artificial Sequence: Synthetic oligonucleotide
ucucgagccaggcggucug

SEQ ID NO: 1798065 - RNA, 19 nt, Artificial Sequence
  Description of Artificial Sequence: Synthetic oligonucleotide
cucaugagaagcauccucu

SEQ ID NO: 1798066 - RNA, 19 nt, Artificial Sequence
  Description of Artificial Sequence: Synthetic oligonucleotide
caucggaccugcuggacuc

SEQ ID NO: 1798067 - RNA, 19 nt, Artificial Sequence
  Description of Artificial Sequence: Synthetic oligonucleotide
ugucccucgguccccuuga

SEQ ID NO: 1798068 - RNA, 19 nt, Artificial Sequence
  Description of Artificial Sequence: Synthetic oligonucleotide
ucugggcgugcucucgagc

SEQ ID NO: 1798069 - RNA, 19 nt, Artificial Sequence
  Description of Artificial Sequence: Synthetic oligonucleotide
acuuaccgugagccugccc

SEQ ID NO: 1798070 - RNA, 19 nt, Artificial Sequence
  Description of Artificial Sequence: Synthetic oligonucleotide
cugcuggacucucaaguac

SEQ ID NO: 1798071 - RNA, 19 nt, Artificial Sequence
  Description of Artificial Sequence: Synthetic oligonucleotide
uaagcgucggggcccuggc

SEQ ID NO: 1798072 - RNA, 19 nt, Artificial Sequence
  Description of Artificial Sequence: Synthetic oligonucleotide
accaggcugagaaggacuc

SEQ ID NO: 1798073 - RNA, 19 nt, Artificial Sequence
  Description of Artificial Sequence: Synthetic oligonucleotide
ggucugaccaggcugagaa

SEQ ID NO: 1798074 - RNA, 19 nt, Artificial Sequence
  Description of Artificial Sequence: Synthetic oligonucleotide
uucggaaucucugcaggaa

SEQ ID NO: 1798075 - RNA, 19 nt, Artificial Sequence
  Description of Artificial Sequence: Synthetic oligonucleotide
uccucucugcgcaguagcu

SEQ ID NO: 1798076 - RNA, 19 nt, Artificial Sequence
  Description of Artificial Sequence: Synthetic oligonucleotide
acgcaguuccuccuccuug

SEQ ID NO: 1798077 - RNA, 19 nt, Artificial Sequence
  Description of Artificial Sequence: Synthetic oligonucleotide
aggcggucugaccaggcug

SEQ ID NO: 1798078 - RNA, 19 nt, Artificial Sequence
  Description of Artificial Sequence: Synthetic oligonucleotide
cugcauggcgguucagggc

SEQ ID NO: 1798079 - RNA, 19 nt, Artificial Sequence
  Description of Artificial Sequence: Synthetic oligonucleotide
uccuuggcgacauccccac

SEQ ID NO: 1798080 - RNA, 19 nt, Artificial Sequence
  Description of Artificial Sequence: Synthetic oligonucleotide
ucucugcgcaguagcuaag

SEQ ID NO: 1798081 - RNA, 19 nt, Artificial Sequence
  Description of Artificial Sequence: Synthetic oligonucleotide
cccucgguccccuugagcc

SEQ ID NO: 1798082 - RNA, 19 nt, Artificial Sequence
  Description of Artificial Sequence: Synthetic oligonucleotide
auccacgaccuuccgcguc

SEQ ID NO: 1798083 - RNA, 19 nt, Artificial Sequence
  Description of Artificial Sequence: Synthetic oligonucleotide
aguccguguaagcgucggg

SEQ ID NO: 1798084 - RNA, 19 nt, Artificial Sequence
  Description of Artificial Sequence: Synthetic oligonucleotide
ugcagacaaguagcgccgg

SEQ ID NO: 1798085 - RNA, 19 nt, Artificial Sequence
  Description of Artificial Sequence: Synthetic oligonucleotide
gucucaaucuggcuucgga

SEQ ID NO: 1798086 - RNA, 19 nt, Artificial Sequence
  Description of Artificial Sequence: Synthetic oligonucleotide
aaucugcccgggagucucc

SEQ ID NO: 1798087 - RNA, 19 nt, Artificial Sequence
  Description of Artificial Sequence: Synthetic oligonucleotide
uuaccgugagccugcccca

SEQ ID NO: 1798088 - RNA, 19 nt, Artificial Sequence
  Description of Artificial Sequence: Synthetic oligonucleotide
uauccucucugcgcaguag

SEQ ID NO: 1798089 - RNA, 19 nt, Artificial Sequence
  Description of Artificial Sequence: Synthetic oligonucleotide
ucggguuccugcaucucau

SEQ ID NO: 1798090 - RNA, 19 nt, Artificial Sequence
  Description of Artificial Sequence: Synthetic oligonucleotide
aagcgucggggcccuggcg

SEQ ID NO: 1798091 - RNA, 19 nt, Artificial Sequence
  Description of Artificial Sequence: Synthetic oligonucleotide
aagcggucagggugccauc

SEQ ID NO: 1798092 - RNA, 19 nt, Artificial Sequence
  Description of Artificial Sequence: Synthetic oligonucleotide
gaaucugcccgggagucuc

SEQ ID NO: 1798093 - RNA, 19 nt, Artificial Sequence
  Description of Artificial Sequence: Synthetic oligonucleotide
ugccccuuccugccccucg

SEQ ID NO: 1798094 - RNA, 19 nt, Artificial Sequence
  Description of Artificial Sequence: Synthetic oligonucleotide
cauccauccccauccacga

SEQ ID NO: 1798095 - RNA, 19 nt, Artificial Sequence
  Description of Artificial Sequence: Synthetic oligonucleotide
ucggcgggaugucucugcc

SEQ ID NO: 1798096 - RNA, 19 nt, Artificial Sequence
  Description of Artificial Sequence: Synthetic oligonucleotide
gaaguccguguaagcgucg

SEQ ID NO: 1798097 - RNA, 19 nt, Artificial Sequence
  Description of Artificial Sequence: Synthetic oligonucleotide
cugccacucauccuccaac

SEQ ID NO: 1798098 - RNA, 19 nt, Artificial Sequence
  Description of Artificial Sequence: Synthetic oligonucleotide
auccauccccauccacgac

SEQ ID NO: 1798099 - RNA, 19 nt, Artificial Sequence
  Description of Artificial Sequence: Synthetic oligonucleotide
agcggucagggugccaucg

SEQ ID NO: 1798100 - RNA, 19 nt, Artificial Sequence
  Description of Artificial Sequence: Synthetic oligonucleotide
uggcgacauccccacaggu

SEQ ID NO: 1798101 - RNA, 19 nt, Artificial Sequence
  Description of Artificial Sequence: Synthetic oligonucleotide
ugggcucgcaccagccgcc

SEQ ID NO: 1798102 - RNA, 19 nt, Artificial Sequence
  Description of Artificial Sequence: Synthetic oligonucleotide
ugggaggcucugucccucg

SEQ ID NO: 1798103 - RNA, 19 nt, Artificial Sequence
  Description of Artificial Sequence: Synthetic oligonucleotide
cucucugcgcaguagcuaa

SEQ ID NO: 1798104 - RNA, 19 nt, Artificial Sequence
  Description of Artificial Sequence: Synthetic oligonucleotide
gguguucugcccugggccc

SEQ ID NO: 1798105 - RNA, 19 nt, Artificial Sequence
  Description of Artificial Sequence: Synthetic oligonucleotide
guaagcgucggggcccugg

SEQ ID NO: 1798106 - RNA, 19 nt, Artificial Sequence
  Description of Artificial Sequence: Synthetic oligonucleotide
caaagcgccagaggcugcc

SEQ ID NO: 1798107 - RNA, 19 nt, Artificial Sequence
  Description of Artificial Sequence: Synthetic oligonucleotide
gucgcuggaggagagccug

SEQ ID NO: 1798108 - RNA, 19 nt, Artificial Sequence
  Description of Artificial Sequence: Synthetic oligonucleotide
ggcuucggaaucucugcag

SEQ ID NO: 1798109 - RNA, 19 nt, Artificial Sequence
  Description of Artificial Sequence: Synthetic oligonucleotide
uccgcgucucccaucuguc

SEQ ID NO: 1798110 - RNA, 19 nt, Artificial Sequence
  Description of Artificial Sequence: Synthetic oligonucleotide
caaaccucccgaugaccuc

SEQ ID NO: 1798111 - RNA, 19 nt, Artificial Sequence
  Description of Artificial Sequence: Synthetic oligonucleotide
gguggcggguccugggugg

SEQ ID NO: 1798112 - RNA, 19 nt, Artificial Sequence
  Description of Artificial Sequence: Synthetic oligonucleotide
caacucgcccugcagcuuc

SEQ ID NO: 1798113 - RNA, 19 nt, Artificial Sequence
  Description of Artificial Sequence: Synthetic oligonucleotide
ugcucucgagccaggcggu

SEQ ID NO: 1798114 - RNA, 19 nt, Artificial Sequence
  Description of Artificial Sequence: Synthetic oligonucleotide
ggagcccucagcccuuggg

SEQ ID NO: 1798115 - RNA, 19 nt, Artificial Sequence
  Description of Artificial Sequence: Synthetic oligonucleotide
cucauccauccccauccac

SEQ ID NO: 1798116 - RNA, 19 nt, Artificial Sequence
  Description of Artificial Sequence: Synthetic oligonucleotide
cagaaucugcccgggaguc

SEQ ID NO: 1798117 - RNA, 19 nt, Artificial Sequence
  Description of Artificial Sequence: Synthetic oligonucleotide
gcagcgacucagcaguggc

SEQ ID NO: 1798118 - RNA, 19 nt, Artificial Sequence
  Description of Artificial Sequence: Synthetic oligonucleotide
gacucucaaguaccuucuc

SEQ ID NO: 1798119 - RNA, 19 nt, Artificial Sequence
  Description of Artificial Sequence: Synthetic oligonucleotide
cuuuauccccauggcggag

SEQ ID NO: 1798120 - RNA, 19 nt, Artificial Sequence
  Description of Artificial Sequence: Synthetic oligonucleotide
ugccaucggaccugcugga

SEQ ID NO: 1798121 - RNA, 19 nt, Artificial Sequence
  Description of Artificial Sequence: Synthetic oligonucleotide
ggaugucucugccuccagc

SEQ ID NO: 1798122 - RNA, 19 nt, Artificial Sequence
  Description of Artificial Sequence: Synthetic oligonucleotide
ugggcgugcucucgagcca

SEQ ID NO: 1798123 - RNA, 19 nt, Artificial Sequence
  Description of Artificial Sequence: Synthetic oligonucleotide
guggguguucugcccuggg

SEQ ID NO: 1798124 - RNA, 19 nt, Artificial Sequence
  Description of Artificial Sequence: Synthetic oligonucleotide
acuauccucucugcgcagu

SEQ ID NO: 1798125 - RNA, 19 nt, Artificial Sequence
  Description of Artificial Sequence: Synthetic oligonucleotide
gaugaccuccugccacuca

SEQ ID NO: 1798126 - RNA, 19 nt, Artificial Sequence
  Description of Artificial Sequence: Synthetic oligonucleotide
ugagccucuugagcccucc

SEQ ID NO: 1798127 - RNA, 19 nt, Artificial Sequence
  Description of Artificial Sequence: Synthetic oligonucleotide
aggggaggcggcugcccgg

SEQ ID NO: 1798128 - RNA, 19 nt, Artificial Sequence
  Description of Artificial Sequence: Synthetic oligonucleotide
gucggcgggaugucucugc

SEQ ID NO: 1798129 - RNA, 19 nt, Artificial Sequence
  Description of Artificial Sequence: Synthetic oligonucleotide
cucggaaaagccgcugcuc

SEQ ID NO: 1798130 - RNA, 19 nt, Artificial Sequence
  Description of Artificial Sequence: Synthetic oligonucleotide
cucaaucuggcuucggaau

SEQ ID NO: 1798131 - RNA, 19 nt, Artificial Sequence
  Description of Artificial Sequence: Synthetic oligonucleotide
ggcucugucccucgguccc

SEQ ID NO: 1798132 - RNA, 19 nt, Artificial Sequence
  Description of Artificial Sequence: Synthetic oligonucleotide
aggucucaaucuggcuucg

SEQ ID NO: 1798133 - RNA, 19 nt, Artificial Sequence
  Description of Artificial Sequence: Synthetic oligonucleotide
cucggguuccugcaucuca

SEQ ID NO: 1798134 - RNA, 19 nt, Artificial Sequence
  Description of Artificial Sequence: Synthetic oligonucleotide
ggcgggaugucucugccuc

SEQ ID NO: 1798135 - RNA, 19 nt, Artificial Sequence
  Description of Artificial Sequence: Synthetic oligonucleotide
aucucaugagaagcauccu

SEQ ID NO: 1798136 - RNA, 19 nt, Artificial Sequence
  Description of Artificial Sequence: Synthetic oligonucleotide
ggguccccagcccagaauc

SEQ ID NO: 1798137 - RNA, 19 nt, Artificial Sequence
  Description of Artificial Sequence: Synthetic oligonucleotide
aucacacggcccagcuccc

SEQ ID NO: 1798138 - RNA, 19 nt, Artificial Sequence
  Description of Artificial Sequence: Synthetic oligonucleotide
accuuccgcgucucccauc

SEQ ID NO: 1798139 - RNA, 19 nt, Artificial Sequence
  Description of Artificial Sequence: Synthetic oligonucleotide
cacacggcccagcucccag

SEQ ID NO: 1798140 - RNA, 19 nt, Artificial Sequence
  Description of Artificial Sequence: Synthetic oligonucleotide
cugcucauccauccccauc

SEQ ID NO: 1798141 - RNA, 19 nt, Artificial Sequence
  Description of Artificial Sequence: Synthetic oligonucleotide
uccucgugcugccgccagc

SEQ ID NO: 1798142 - RNA, 19 nt, Artificial Sequence
  Description of Artificial Sequence: Synthetic oligonucleotide
ccacuuaccgugagccugc

SEQ ID NO: 1798143 - RNA, 19 nt, Artificial Sequence
  Description of Artificial Sequence: Synthetic oligonucleotide
cugccgccagcugugacug

SEQ ID NO: 1798144 - RNA, 19 nt, Artificial Sequence
  Description of Artificial Sequence: Synthetic oligonucleotide
cauccccuagggucacuug

SEQ ID NO: 1798145 - RNA, 19 nt, Artificial Sequence
  Description of Artificial Sequence: Synthetic oligonucleotide
cugccgccacuccugcucc

SEQ ID NO: 1798146 - RNA, 19 nt, Artificial Sequence
  Description of Artificial Sequence: Synthetic oligonucleotide
ggguuccugcaucucauga

SEQ ID NO: 1798147 - RNA, 19 nt, Artificial Sequence
  Description of Artificial Sequence: Synthetic oligonucleotide
uggcccgugcucgcucucg

SEQ ID NO: 1798148 - RNA, 19 nt, Artificial Sequence
  Description of Artificial Sequence: Synthetic oligonucleotide
gaagcggucagggugccau

SEQ ID NO: 1798149 - RNA, 19 nt, Artificial Sequence
  Description of Artificial Sequence: Synthetic oligonucleotide
agcccagaaucugcccggg

SEQ ID NO: 1798150 - RNA, 19 nt, Artificial Sequence
  Description of Artificial Sequence: Synthetic oligonucleotide
gacucggguuccugcaucu

SEQ ID NO: 1798151 - RNA, 19 nt, Artificial Sequence
  Description of Artificial Sequence: Synthetic oligonucleotide
cuagggucacuugagggcu

SEQ ID NO: 1798152 - RNA, 19 nt, Artificial Sequence
  Description of Artificial Sequence: Synthetic oligonucleotide
cccacuuaccgugagccug

SEQ ID NO: 1798153 - RNA, 19 nt, Artificial Sequence
  Description of Artificial Sequence: Synthetic oligonucleotide
ccgcccugcagacaaguag

SEQ ID NO: 1798154 - RNA, 19 nt, Artificial Sequence
  Description of Artificial Sequence: Synthetic oligonucleotide
cugucccucgguccccuug

SEQ ID NO: 1798155 - RNA, 19 nt, Artificial Sequence
  Description of Artificial Sequence: Synthetic oligonucleotide
acucggguuccugcaucuc

SEQ ID NO: 1798156 - RNA, 19 nt, Artificial Sequence
  Description of Artificial Sequence: Synthetic oligonucleotide
guccuuggcgacaucccca

SEQ ID NO: 1798157 - RNA, 19 nt, Artificial Sequence
  Description of Artificial Sequence: Synthetic oligonucleotide
cccgaugaccuccugccac

SEQ ID NO: 1798158 - RNA, 19 nt, Artificial Sequence
  Description of Artificial Sequence: Synthetic oligonucleotide
cccauccuuauucuuuauc

SEQ ID NO: 1798159 - RNA, 19 nt, Artificial Sequence
  Description of Artificial Sequence: Synthetic oligonucleotide
agcagcgugcagcgccgug

SEQ ID NO: 1798160 - RNA, 19 nt, Artificial Sequence
  Description of Artificial Sequence: Synthetic oligonucleotide
gcaccagccgcccugcaga

SEQ ID NO: 1798161 - RNA, 19 nt, Artificial Sequence
  Description of Artificial Sequence: Synthetic oligonucleotide
ugccccucguggguguucu

SEQ ID NO: 1798162 - RNA, 19 nt, Artificial Sequence
  Description of Artificial Sequence: Synthetic oligonucleotide
gucgaggccugggugucgc

SEQ ID NO: 1798163 - RNA, 19 nt, Artificial Sequence
  Description of Artificial Sequence: Synthetic oligonucleotide
aucuguccuuggcgacauc

SEQ ID NO: 1798164 - RNA, 19 nt, Artificial Sequence
  Description of Artificial Sequence: Synthetic oligonucleotide
cuccuuggcccgugcucgc

SEQ ID NO: 1798165 - RNA, 19 nt, Artificial Sequence
  Description of Artificial Sequence: Synthetic oligonucleotide
ggcagcgacucagcagugg

SEQ ID NO: 1798166 - RNA, 19 nt, Artificial Sequence
  Description of Artificial Sequence: Synthetic oligonucleotide
gcauggccagggcacauca

SEQ ID NO: 1798167 - RNA, 19 nt, Artificial Sequence
  Description of Artificial Sequence: Synthetic oligonucleotide
agcgccggaagcggcgcuc

SEQ ID NO: 1798168 - RNA, 19 nt, Artificial Sequence
  Description of Artificial Sequence: Synthetic oligonucleotide
gaagcggcgcucccggcgu

SEQ ID NO: 1798169 - RNA, 19 nt, Artificial Sequence
  Description of Artificial Sequence: Synthetic oligonucleotide
cagacaaguagcgccggaa

SEQ ID NO: 1798170 - RNA, 19 nt, Artificial Sequence
  Description of Artificial Sequence: Synthetic oligonucleotide
guagcgccggaagcggcgc

SEQ ID NO: 1798171 - RNA, 19 nt, Artificial Sequence
  Description of Artificial Sequence: Synthetic oligonucleotide
ccucccgaugaccuccugc

SEQ ID NO: 1798172 - RNA, 19 nt, Artificial Sequence
  Description of Artificial Sequence: Synthetic oligonucleotide
gcgguucagggccugagaa

SEQ ID NO: 1798173 - RNA, 19 nt, Artificial Sequence
  Description of Artificial Sequence: Synthetic oligonucleotide
ccccacuauccucucugcg

SEQ ID NO: 1798174 - RNA, 19 nt, Artificial Sequence
  Description of Artificial Sequence: Synthetic oligonucleotide
cuugcucauccccuagggu

SEQ ID NO: 1798175 - RNA, 19 nt, Artificial Sequence
  Description of Artificial Sequence: Synthetic oligonucleotide
accgugagccugccccacu

SEQ ID NO: 1798176 - RNA, 19 nt, Artificial Sequence
  Description of Artificial Sequence: Synthetic oligonucleotide
gcaucucaugagaagcauc

SEQ ID NO: 1798177 - RNA, 19 nt, Artificial Sequence
  Description of Artificial Sequence: Synthetic oligonucleotide
caccagccgcccugcagac

SEQ ID NO: 1798178 - RNA, 19 nt, Artificial Sequence
  Description of Artificial Sequence: Synthetic oligonucleotide
cagcgacucagcaguggca

SEQ ID NO: 1798179 - RNA, 19 nt, Artificial Sequence
  Description of Artificial Sequence: Synthetic oligonucleotide
gcccugcagacaaguagcg

SEQ ID NO: 1798180 - RNA, 19 nt, Artificial Sequence
  Description of Artificial Sequence: Synthetic oligonucleotide
gcgacucagcaguggcagg

SEQ ID NO: 1798181 - RNA, 19 nt, Artificial Sequence
  Description of Artificial Sequence: Synthetic oligonucleotide
ggucagggugccaucggac

SEQ ID NO: 1798182 - RNA, 19 nt, Artificial Sequence
  Description of Artificial Sequence: Synthetic oligonucleotide
cccucguggguguucugcc

SEQ ID NO: 1798183 - RNA, 19 nt, Artificial Sequence
  Description of Artificial Sequence: Synthetic oligonucleotide
ggacucggguuccugcauc

SEQ ID NO: 1798184 - RNA, 19 nt, Artificial Sequence
  Description of Artificial Sequence: Synthetic oligonucleotide
caccaaagcgccagaggcu

SEQ ID NO: 1798185 - RNA, 19 nt, Artificial Sequence
  Description of Artificial Sequence: Synthetic oligonucleotide
cacgucgaggccugggugu

SEQ ID NO: 1798186 - RNA, 19 nt, Artificial Sequence
  Description of Artificial Sequence: Synthetic oligonucleotide
ccccuagggucacuugagg

SEQ ID NO: 1798187 - RNA, 19 nt, Artificial Sequence
  Description of Artificial Sequence: Synthetic oligonucleotide
ggccugggaggcucugucc

SEQ ID NO: 1798188 - RNA, 19 nt, Artificial Sequence
  Description of Artificial Sequence: Synthetic oligonucleotide
cccgaggcgcagcagcagg

SEQ ID NO: 1798189 - RNA, 19 nt, Artificial Sequence
  Description of Artificial Sequence: Synthetic oligonucleotide
cugcccgggagucucccca

SEQ ID NO: 1798190 - RNA, 19 nt, Artificial Sequence
  Description of Artificial Sequence: Synthetic oligonucleotide
cagcgugcagcgccguguc

SEQ ID NO: 1798191 - RNA, 19 nt, Artificial Sequence
  Description of Artificial Sequence: Synthetic oligonucleotide
gcuucugcauggcgguuca

SEQ ID NO: 1798192 - RNA, 19 nt, Artificial Sequence
  Description of Artificial Sequence: Synthetic oligonucleotide
cguguaagcgucggggccc

SEQ ID NO: 1798193 - RNA, 19 nt, Artificial Sequence
  Description of Artificial Sequence: Synthetic oligonucleotide
gaggagagccugggcucgc

SEQ ID NO: 1798194 - RNA, 19 nt, Artificial Sequence
  Description of Artificial Sequence: Synthetic oligonucleotide
ucgagccaggcggucugac

SEQ ID NO: 1798195 - RNA, 19 nt, Artificial Sequence
  Description of Artificial Sequence: Synthetic oligonucleotide
gccgccgccguuucugggc

SEQ ID NO: 1798196 - RNA, 19 nt, Artificial Sequence
  Description of Artificial Sequence: Synthetic oligonucleotide
cacgaccuuccgcgucucc

SEQ ID NO: 1798197 - RNA, 19 nt, Artificial Sequence
  Description of Artificial Sequence: Synthetic oligonucleotide
ccucguggguguucugccc

SEQ ID NO: 1798198 - RNA, 19 nt, Artificial Sequence
  Description of Artificial Sequence: Synthetic oligonucleotide
uaccgugagccugccccac

SEQ ID NO: 1798199 - RNA, 19 nt, Artificial Sequence
  Description of Artificial Sequence: Synthetic oligonucleotide
gcucgcaccagccgcccug

SEQ ID NO: 1798200 - RNA, 19 nt, Artificial Sequence
  Description of Artificial Sequence: Synthetic oligonucleotide
cccauccacgaccuuccgc

SEQ ID NO: 1798201 - RNA, 19 nt, Artificial Sequence
  Description of Artificial Sequence: Synthetic oligonucleotide
agccgcccugcagacaagu

SEQ ID NO: 1798202 - RNA, 19 nt, Artificial Sequence
  Description of Artificial Sequence: Synthetic oligonucleotide
gucccucgguccccuugag

SEQ ID NO: 1798203 - RNA, 19 nt, Artificial Sequence
  Description of Artificial Sequence: Synthetic oligonucleotide
ugagcccuccuggcucggc

SEQ ID NO: 1798204 - RNA, 19 nt, Artificial Sequence
  Description of Artificial Sequence: Synthetic oligonucleotide
cacuugagggcuucugcau

SEQ ID NO: 1798205 - RNA, 19 nt, Artificial Sequence
  Description of Artificial Sequence: Synthetic oligonucleotide
ggucucaaucuggcuucgg

SEQ ID NO: 1798206 - RNA, 19 nt, Artificial Sequence
  Description of Artificial Sequence: Synthetic oligonucleotide
gcggucagggugccaucgg

SEQ ID NO: 1798207 - RNA, 19 nt, Artificial Sequence
  Description of Artificial Sequence: Synthetic oligonucleotide
agcgugcagcgccgugucu

SEQ ID NO: 1798208 - RNA, 19 nt, Artificial Sequence
  Description of Artificial Sequence: Synthetic oligonucleotide
cuauccucucugcgcagua

SEQ ID NO: 1798209 - RNA, 19 nt, Artificial Sequence
  Description of Artificial Sequence: Synthetic oligonucleotide
uagcgccggaagcggcgcu

SEQ ID NO: 1798210 - RNA, 19 nt, Artificial Sequence
  Description of Artificial Sequence: Synthetic oligonucleotide
cucguggguguucugcccu

SEQ ID NO: 1798211 - RNA, 19 nt, Artificial Sequence
  Description of Artificial Sequence: Synthetic oligonucleotide
ucggggcccuggcgggcag

SEQ ID NO: 1798212 - RNA, 19 nt, Artificial Sequence
  Description of Artificial Sequence: Synthetic oligonucleotide
ggcggucugaccaggcuga

SEQ ID NO: 1798213 - RNA, 19 nt, Artificial Sequence
  Description of Artificial Sequence: Synthetic oligonucleotide
ggcccgugcucgcucucgg

SEQ ID NO: 1798214 - RNA, 19 nt, Artificial Sequence
  Description of Artificial Sequence: Synthetic oligonucleotide
cacuuaccgugagccugcc

SEQ ID NO: 1798215 - RNA, 19 nt, Artificial Sequence
  Description of Artificial Sequence: Synthetic oligonucleotide
caguagcuaagcugcugcu

SEQ ID NO: 1798216 - RNA, 19 nt, Artificial Sequence
  Description of Artificial Sequence: Synthetic oligonucleotide
cccaucuguccuuggcgac

SEQ ID NO: 1798217 - RNA, 19 nt, Artificial Sequence
  Description of Artificial Sequence: Synthetic oligonucleotide
uuggcccgugcucgcucuc

SEQ ID NO: 1798218 - RNA, 19 nt, Artificial Sequence
  Description of Artificial Sequence: Synthetic oligonucleotide
ccgaggcgcagcagcaggc

SEQ ID NO: 1798219 - RNA, 19 nt, Artificial Sequence
  Description of Artificial Sequence: Synthetic oligonucleotide
gccgugucuccgguggcgg

SEQ ID NO: 1798220 - RNA, 19 nt, Artificial Sequence
  Description of Artificial Sequence: Synthetic oligonucleotide
cucgugcugccgccagcug

SEQ ID NO: 1798221 - RNA, 19 nt, Artificial Sequence
  Description of Artificial Sequence: Synthetic oligonucleotide
gccccacuauccucucugc

SEQ ID NO: 1798222 - RNA, 19 nt, Artificial Sequence
  Description of Artificial Sequence: Synthetic oligonucleotide
gcgcaggcccugugcaggg

SEQ ID NO: 1798223 - RNA, 19 nt, Artificial Sequence
  Description of Artificial Sequence: Synthetic oligonucleotide
ucccggcguugccggcggg

SEQ ID NO: 1798224 - RNA, 19 nt, Artificial Sequence
  Description of Artificial Sequence: Synthetic oligonucleotide
aucggaccugcuggacucu

SEQ ID NO: 1798225 - RNA, 19 nt, Artificial Sequence
  Description of Artificial Sequence: Synthetic oligonucleotide
ggggcaucguggcgggcgc

SEQ ID NO: 1798226 - RNA, 19 nt, Artificial Sequence
  Description of Artificial Sequence: Synthetic oligonucleotide
ccaaagcgccagaggcugc

SEQ ID NO: 1798227 - RNA, 19 nt, Artificial Sequence
  Description of Artificial Sequence: Synthetic oligonucleotide
ggagagccugggcucgcac

SEQ ID NO: 1798228 - RNA, 19 nt, Artificial Sequence
  Description of Artificial Sequence: Synthetic oligonucleotide
cucggcucucacgcaguuc

SEQ ID NO: 1798229 - RNA, 19 nt, Artificial Sequence
  Description of Artificial Sequence: Synthetic oligonucleotide
ggcccugugcaggggaggc

SEQ ID NO: 1798230 - RNA, 19 nt, Artificial Sequence
  Description of Artificial Sequence: Synthetic oligonucleotide
cuucugcauggcgguucag

SEQ ID NO: 1798231 - RNA, 19 nt, Artificial Sequence
  Description of Artificial Sequence: Synthetic oligonucleotide
ucgaggccugggugucgcu

SEQ ID NO: 1798232 - RNA, 19 nt, Artificial Sequence
  Description of Artificial Sequence: Synthetic oligonucleotide
ggacucucaaguaccuucu

SEQ ID NO: 1798233 - RNA, 19 nt, Artificial Sequence
  Description of Artificial Sequence: Synthetic oligonucleotide
ccaggcugagaaggacucg

SEQ ID NO: 1798234 - RNA, 19 nt, Artificial Sequence
  Description of Artificial Sequence: Synthetic oligonucleotide
ggcaucguggcgggcgcag

SEQ ID NO: 1798235 - RNA, 19 nt, Artificial Sequence
  Description of Artificial Sequence: Synthetic oligonucleotide
gcagacaaguagcgccgga

SEQ ID NO: 1798236 - RNA, 19 nt, Artificial Sequence
  Description of Artificial Sequence: Synthetic oligonucleotide
gcgcucccggcguugccgg

SEQ ID NO: 1798237 - RNA, 19 nt, Artificial Sequence
  Description of Artificial Sequence: Synthetic oligonucleotide
gcgggaugucucugccucc

SEQ ID NO: 1798238 - RNA, 19 nt, Artificial Sequence
  Description of Artificial Sequence: Synthetic oligonucleotide
accucccgaugaccuccug

SEQ ID NO: 1798239 - RNA, 19 nt, Artificial Sequence
  Description of Artificial Sequence: Synthetic oligonucleotide
ccugcuggacucucaagua

SEQ ID NO: 1798240 - RNA, 19 nt, Artificial Sequence
  Description of Artificial Sequence: Synthetic oligonucleotide
guugccggcgggaggcgga

SEQ ID NO: 1798241 - RNA, 19 nt, Artificial Sequence
  Description of Artificial Sequence: Synthetic oligonucleotide
ggaggggcagcgacucagc

SEQ ID NO: 1798242 - RNA, 19 nt, Artificial Sequence
  Description of Artificial Sequence: Synthetic oligonucleotide
ucgcaccagccgcccugca

SEQ ID NO: 1798243 - RNA, 19 nt, Artificial Sequence
  Description of Artificial Sequence: Synthetic oligonucleotide
aggagagccugggcucgca

SEQ ID NO: 1798244 - RNA, 19 nt, Artificial Sequence
  Description of Artificial Sequence: Synthetic oligonucleotide
cuggcucggcucucacgca

SEQ ID NO: 1798245 - RNA, 19 nt, Artificial Sequence
  Description of Artificial Sequence: Synthetic oligonucleotide
ccgcgucucccaucugucc

SEQ ID NO: 1798246 - RNA, 19 nt, Artificial Sequence
  Description of Artificial Sequence: Synthetic oligonucleotide
cccugcagacaaguagcgc

SEQ ID NO: 1798247 - RNA, 19 nt, Artificial Sequence
  Description of Artificial Sequence: Synthetic oligonucleotide
gcccuggcgggcagcagcg

SEQ ID NO: 1798248 - RNA, 19 nt, Artificial Sequence
  Description of Artificial Sequence: Synthetic oligonucleotide
gucagccccgaggcgcagc

SEQ ID NO: 1798249 - RNA, 19 nt, Artificial Sequence
  Description of Artificial Sequence: Synthetic oligonucleotide
uguaagcgucggggcccug

SEQ ID NO: 1798250 - RNA, 19 nt, Artificial Sequence
  Description of Artificial Sequence: Synthetic oligonucleotide
ggcggaggggcagcgacuc

SEQ ID NO: 1798251 - RNA, 19 nt, Artificial Sequence
  Description of Artificial Sequence: Synthetic oligonucleotide
cuuccgcgucucccaucug

SEQ ID NO: 1798252 - RNA, 19 nt, Artificial Sequence
  Description of Artificial Sequence: Synthetic oligonucleotide
gcgugcagcgccgugucuc

SEQ ID NO: 1798253 - RNA, 19 nt, Artificial Sequence
  Description of Artificial Sequence: Synthetic oligonucleotide
gugucuccgguggcggguc

SEQ ID NO: 1798254 - RNA, 19 nt, Artificial Sequence
  Description of Artificial Sequence: Synthetic oligonucleotide
gcucauccauccccaucca

SEQ ID NO: 1798255 - RNA, 19 nt, Artificial Sequence
  Description of Artificial Sequence: Synthetic oligonucleotide
cgagccaggcggucugacc

SEQ ID NO: 1798256 - RNA, 19 nt, Artificial Sequence
  Description of Artificial Sequence: Synthetic oligonucleotide
cuggagcccucagcccuug

SEQ ID NO: 1798257 - RNA, 19 nt, Artificial Sequence
  Description of Artificial Sequence: Synthetic oligonucleotide
aagcggcgcucccggcguu

SEQ ID NO: 1798258 - RNA, 19 nt, Artificial Sequence
  Description of Artificial Sequence: Synthetic oligonucleotide
ccgccgccguuucugggcg

SEQ ID NO: 1798259 - RNA, 19 nt, Artificial Sequence
  Description of Artificial Sequence: Synthetic oligonucleotide
ccucuucagcagaauccca

SEQ ID NO: 1798260 - RNA, 19 nt, Artificial Sequence
  Description of Artificial Sequence: Synthetic oligonucleotide
uggcggguccugggugggc

SEQ ID NO: 1798261 - RNA, 19 nt, Artificial Sequence
  Description of Artificial Sequence: Synthetic oligonucleotide
guggcaggaagaaguccgu

SEQ ID NO: 1798262 - RNA, 19 nt, Artificial Sequence
  Description of Artificial Sequence: Synthetic oligonucleotide
gagaaggacucggguuccu

SEQ ID NO: 1798263 - RNA, 19 nt, Artificial Sequence
  Description of Artificial Sequence: Synthetic oligonucleotide
cagcgccgugucuccggug

SEQ ID NO: 1798264 - RNA, 19 nt, Artificial Sequence
  Description of Artificial Sequence: Synthetic oligonucleotide
ccgugucuccgguggcggg

SEQ ID NO: 1798265 - RNA, 19 nt, Artificial Sequence
  Description of Artificial Sequence: Synthetic oligonucleotide
gaccuuccgcgucucccau

SEQ ID NO: 1798266 - RNA, 19 nt, Artificial Sequence
  Description of Artificial Sequence: Synthetic oligonucleotide
gagucuccccauccuuauu

SEQ ID NO: 1798267 - RNA, 19 nt, Artificial Sequence
  Description of Artificial Sequence: Synthetic oligonucleotide
cauccacgaccuuccgcgu

SEQ ID NO: 1798268 - RNA, 19 nt, Artificial Sequence
  Description of Artificial Sequence: Synthetic oligonucleotide
caucuguccuuggcgacau

SEQ ID NO: 1798269 - RNA, 19 nt, Artificial Sequence
  Description of Artificial Sequence: Synthetic oligonucleotide
ggcauggccagggcacauc

SEQ ID NO: 1798270 - RNA, 19 nt, Artificial Sequence
  Description of Artificial Sequence: Synthetic oligonucleotide
ggggucggcgggaugucuc

SEQ ID NO: 1798271 - RNA, 19 nt, Artificial Sequence
  Description of Artificial Sequence: Synthetic oligonucleotide
guggcgggcgcaggcccug

SEQ ID NO: 1798272 - RNA, 19 nt, Artificial Sequence
  Description of Artificial Sequence: Synthetic oligonucleotide
ccuuccgcgucucccaucu

SEQ ID NO: 1798273 - RNA, 19 nt, Artificial Sequence
  Description of Artificial Sequence: Synthetic oligonucleotide
caggcggucugaccaggcu

SEQ ID NO: 1798274 - RNA, 19 nt, Artificial Sequence
  Description of Artificial Sequence: Synthetic oligonucleotide
gcuggacucucaaguaccu

SEQ ID NO: 1798275 - RNA, 19 nt, Artificial Sequence
  Description of Artificial Sequence: Synthetic oligonucleotide
ggcgugcucucgagccagg

SEQ ID NO: 1798276 - RNA, 19 nt, Artificial Sequence
  Description of Artificial Sequence: Synthetic oligonucleotide
ggucggcgggaugucucug

SEQ ID NO: 1798277 - RNA, 19 nt, Artificial Sequence
  Description of Artificial Sequence: Synthetic oligonucleotide
cgcaguagcuaagcugcug

SEQ ID NO: 1798278 - RNA, 19 nt, Artificial Sequence
  Description of Artificial Sequence: Synthetic oligonucleotide
ccuuauucuuuauccccau

SEQ ID NO: 1798279 - RNA, 19 nt, Artificial Sequence
  Description of Artificial Sequence: Synthetic oligonucleotide
cauggcggaggggcagcga

SEQ ID NO: 1798280 - RNA, 19 nt, Artificial Sequence
  Description of Artificial Sequence: Synthetic oligonucleotide
gccaucggaccugcuggac

SEQ ID NO: 1798281 - RNA, 19 nt, Artificial Sequence
  Description of Artificial Sequence: Synthetic oligonucleotide
cguuucugggcgugcucuc

SEQ ID NO: 1798282 - RNA, 19 nt, Artificial Sequence
  Description of Artificial Sequence: Synthetic oligonucleotide
gcgugcucucgagccaggc

SEQ ID NO: 1798283 - RNA, 19 nt, Artificial Sequence
  Description of Artificial Sequence: Synthetic oligonucleotide
gccgccguuucugggcgug

SEQ ID NO: 1798284 - RNA, 19 nt, Artificial Sequence
  Description of Artificial Sequence: Synthetic oligonucleotide
ggcguccacgucgaggccu

SEQ ID NO: 1798285 - RNA, 19 nt, Artificial Sequence
  Description of Artificial Sequence: Synthetic oligonucleotide
guguaagcgucggggcccu

SEQ ID NO: 1798286 - RNA, 19 nt, Artificial Sequence
  Description of Artificial Sequence: Synthetic oligonucleotide
gggccugagaaagggcugu

SEQ ID NO: 1798287 - RNA, 19 nt, Artificial Sequence
  Description of Artificial Sequence: Synthetic oligonucleotide
cucgagccaggcggucuga

SEQ ID NO: 1798288 - RNA, 19 nt, Artificial Sequence
  Description of Artificial Sequence: Synthetic oligonucleotide
ccaucggaccugcuggacu

SEQ ID NO: 1798289 - RNA, 19 nt, Artificial Sequence
  Description of Artificial Sequence: Synthetic oligonucleotide
cgaccuuccgcgucuccca

SEQ ID NO: 1798290 - RNA, 19 nt, Artificial Sequence
  Description of Artificial Sequence: Synthetic oligonucleotide
gcccagaaucugcccggga

SEQ ID NO: 1798291 - RNA, 19 nt, Artificial Sequence
  Description of Artificial Sequence: Synthetic oligonucleotide
cgugcucgcucucggaaaa

SEQ ID NO: 1798292 - RNA, 19 nt, Artificial Sequence
  Description of Artificial Sequence: Synthetic oligonucleotide
gggucggcgggaugucucu

SEQ ID NO: 1798293 - RNA, 19 nt, Artificial Sequence
  Description of Artificial Sequence: Synthetic oligonucleotide
ggcgacauccccacagguu

SEQ ID NO: 1798294 - RNA, 19 nt, Artificial Sequence
  Description of Artificial Sequence: Synthetic oligonucleotide
ccggcguugccggcgggag

SEQ ID NO: 1798295 - RNA, 19 nt, Artificial Sequence
  Description of Artificial Sequence: Synthetic oligonucleotide
gcggucugaccaggcugag

SEQ ID NO: 1798296 - RNA, 19 nt, Artificial Sequence
  Description of Artificial Sequence: Synthetic oligonucleotide
gcagcgugcagcgccgugu

SEQ ID NO: 1798297 - RNA, 19 nt, Artificial Sequence
  Description of Artificial Sequence: Synthetic oligonucleotide
gcgccggaagcggcgcucc

SEQ ID NO: 1798298 - RNA, 19 nt, Artificial Sequence
  Description of Artificial Sequence: Synthetic oligonucleotide
uggcgggcgcaggcccugu

SEQ ID NO: 1798299 - RNA, 19 nt, Artificial Sequence
  Description of Artificial Sequence: Synthetic oligonucleotide
ggcgggcgcaggcccugug

SEQ ID NO: 1798300 - RNA, 19 nt, Artificial Sequence
  Description of Artificial Sequence: Synthetic oligonucleotide
cgccgugucuccgguggcg

SEQ ID NO: 1798301 - RNA, 19 nt, Artificial Sequence
  Description of Artificial Sequence: Synthetic oligonucleotide
cccaucacacggcccagcu

SEQ ID NO: 1798302 - RNA, 19 nt, Artificial Sequence
  Description of Artificial Sequence: Synthetic oligonucleotide
gugcugccgccagcuguga

SEQ ID NO: 1798303 - RNA, 19 nt, Artificial Sequence
  Description of Artificial Sequence: Synthetic oligonucleotide
cguugccggcgggaggcgg

SEQ ID NO: 1798304 - RNA, 19 nt, Artificial Sequence
  Description of Artificial Sequence: Synthetic oligonucleotide
gcguugccggcgggaggcg

SEQ ID NO: 1798305 - RNA, 19 nt, Artificial Sequence
  Description of Artificial Sequence: Synthetic oligonucleotide
ccccuuccugccccucgug

SEQ ID NO: 1798306 - RNA, 19 nt, Artificial Sequence
  Description of Artificial Sequence: Synthetic oligonucleotide
cggucagggugccaucgga

SEQ ID NO: 1798307 - RNA, 19 nt, Artificial Sequence
  Description of Artificial Sequence: Synthetic oligonucleotide
ccguuucugggcgugcucu

SEQ ID NO: 1798308 - RNA, 19 nt, Artificial Sequence
  Description of Artificial Sequence: Synthetic oligonucleotide
gcugcccggcguccacguc

SEQ ID NO: 1798309 - RNA, 19 nt, Artificial Sequence
  Description of Artificial Sequence: Synthetic oligonucleotide
cgucgaggccugggugucg

SEQ ID NO: 1798310 - RNA, 19 nt, Artificial Sequence
  Description of Artificial Sequence: Synthetic oligonucleotide
gcgucucccaucuguccuu

SEQ ID NO: 1798311 - RNA, 19 nt, Artificial Sequence
  Description of Artificial Sequence: Synthetic oligonucleotide
gcggaggggcagcgacuca

SEQ ID NO: 1798312 - RNA, 19 nt, Artificial Sequence
  Description of Artificial Sequence: Synthetic oligonucleotide
ccgugagccugccccacua

SEQ ID NO: 1798313 - RNA, 19 nt, Artificial Sequence
  Description of Artificial Sequence: Synthetic oligonucleotide
cgggcgcaggcccugugca

SEQ ID NO: 1798314 - RNA, 19 nt, Artificial Sequence
  Description of Artificial Sequence: Synthetic oligonucleotide
ccgccguuucugggcgugc

SEQ ID NO: 1798315 - RNA, 19 nt, Artificial Sequence
  Description of Artificial Sequence: Synthetic oligonucleotide
ccucgugcugccgccagcu

SEQ ID NO: 1798316 - RNA, 19 nt, Artificial Sequence
  Description of Artificial Sequence: Synthetic oligonucleotide
ggcucggcucucacgcagu

SEQ ID NO: 1798317 - RNA, 19 nt, Artificial Sequence
  Description of Artificial Sequence: Synthetic oligonucleotide
ccuccuggcucggcucuca

SEQ ID NO: 1798318 - RNA, 19 nt, Artificial Sequence
  Description of Artificial Sequence: Synthetic oligonucleotide
ccgggagucuccccauccu

SEQ ID NO: 1798319 - RNA, 19 nt, Artificial Sequence
  Description of Artificial Sequence: Synthetic oligonucleotide
ccccacuuaccgugagccu

SEQ ID NO: 1798320 - RNA, 19 nt, Artificial Sequence
  Description of Artificial Sequence: Synthetic oligonucleotide
gcucggcucucacgcaguu

SEQ ID NO: 1798321 - RNA, 19 nt, Artificial Sequence
  Description of Artificial Sequence: Synthetic oligonucleotide
cucauccccuagggucacu

SEQ ID NO: 1798322 - RNA, 19 nt, Artificial Sequence
  Description of Artificial Sequence: Synthetic oligonucleotide
gccgcccugcagacaagua

SEQ ID NO: 1798323 - RNA, 19 nt, Artificial Sequence
  Description of Artificial Sequence: Synthetic oligonucleotide
cgccagaggcugccccuuc

SEQ ID NO: 1798324 - RNA, 19 nt, Artificial Sequence
  Description of Artificial Sequence: Synthetic oligonucleotide
gcauggcgguucagggccu

SEQ ID NO: 1798325 - RNA, 19 nt, Artificial Sequence
  Description of Artificial Sequence: Synthetic oligonucleotide
ccccauccuuauucuuuau

SEQ ID NO: 1798326 - RNA, 19 nt, Artificial Sequence
  Description of Artificial Sequence: Synthetic oligonucleotide
cccggcguugccggcggga

SEQ ID NO: 1798327 - RNA, 19 nt, Artificial Sequence
  Description of Artificial Sequence: Synthetic oligonucleotide
cguccacgucgaggccugg

SEQ ID NO: 1798328 - RNA, 19 nt, Artificial Sequence
  Description of Artificial Sequence: Synthetic oligonucleotide
cggcgcucccggcguugcc

SEQ ID NO: 1798329 - RNA, 19 nt, Artificial Sequence
  Description of Artificial Sequence: Synthetic oligonucleotide
cagcagcgugcagcgccgu

SEQ ID NO: 1798330 - RNA, 19 nt, Artificial Sequence
  Description of Artificial Sequence: Synthetic oligonucleotide
cgugucuccgguggcgggu

SEQ ID NO: 1798331 - RNA, 19 nt, Artificial Sequence
  Description of Artificial Sequence: Synthetic oligonucleotide
gccgccacuccugcuccuu

SEQ ID NO: 1798332 - RNA, 19 nt, Artificial Sequence
  Description of Artificial Sequence: Synthetic oligonucleotide
ccaacucgcccugcagcuu

SEQ ID NO: 1798333 - RNA, 19 nt, Artificial Sequence
  Description of Artificial Sequence: Synthetic oligonucleotide
cccuggcgggcagcagcgu

SEQ ID NO: 1798334 - RNA, 19 nt, Artificial Sequence
  Description of Artificial Sequence: Synthetic oligonucleotide
ccugccccucguggguguu

SEQ ID NO: 1798335 - RNA, 19 nt, Artificial Sequence
  Description of Artificial Sequence: Synthetic oligonucleotide
cgccgccguuucugggcgu

SEQ ID NO: 1798336 - RNA, 19 nt, Artificial Sequence
  Description of Artificial Sequence: Synthetic oligonucleotide
aaaguuaucaauuauauau

SEQ ID NO: 1798337 - RNA, 19 nt, Artificial Sequence
  Description of Artificial Sequence: Synthetic oligonucleotide
auagcuaacacuuauaagg

SEQ ID NO: 1798338 - RNA, 19 nt, Artificial Sequence
  Description of Artificial Sequence: Synthetic oligonucleotide
aaagguucuauacacacac

SEQ ID NO: 1798339 - RNA, 19 nt, Artificial Sequence
  Description of Artificial Sequence: Synthetic oligonucleotide
aauuaauacaauuucuuug

SEQ ID NO: 1798340 - RNA, 19 nt, Artificial Sequence
  Description of Artificial Sequence: Synthetic oligonucleotide
uugaauuacaaccacaggc

SEQ ID NO: 1798341 - RNA, 19 nt, Artificial Sequence
  Description of Artificial Sequence: Synthetic oligonucleotide
acugauaaaaugcaucucc

SEQ ID NO: 1798342 - RNA, 19 nt, Artificial Sequence
  Description of Artificial Sequence: Synthetic oligonucleotide
cauagaauaccuuauaugc

SEQ ID NO: 1798343 - RNA, 19 nt, Artificial Sequence
  Description of Artificial Sequence: Synthetic oligonucleotide
auuauaagcaugcaacacc

SEQ ID NO: 1798344 - RNA, 19 nt, Artificial Sequence
  Description of Artificial Sequence: Synthetic oligonucleotide
ugguauuugaauuacaacc

SEQ ID NO: 1798345 - RNA, 19 nt, Artificial Sequence
  Description of Artificial Sequence: Synthetic oligonucleotide
acuuauaaggccuagaacu

SEQ ID NO: 1798346 - RNA, 19 nt, Artificial Sequence
  Description of Artificial Sequence: Synthetic oligonucleotide
uacacuuacaguuaauggg

SEQ ID NO: 1798347 - RNA, 19 nt, Artificial Sequence
  Description of Artificial Sequence: Synthetic oligonucleotide
ugaaguaauguuuuggaag

SEQ ID NO: 1798348 - RNA, 19 nt, Artificial Sequence
  Description of Artificial Sequence: Synthetic oligonucleotide
auaagcaugucauauacag

SEQ ID NO: 1798349 - RNA, 19 nt, Artificial Sequence
  Description of Artificial Sequence: Synthetic oligonucleotide
uguagcauacaaaagaggu

SEQ ID NO: 1798350 - RNA, 19 nt, Artificial Sequence
  Description of Artificial Sequence: Synthetic oligonucleotide
aagcaugucauauacaggu

SEQ ID NO: 1798351 - RNA, 19 nt, Artificial Sequence
  Description of Artificial Sequence: Synthetic oligonucleotide
aauucugguguguauaaag

SEQ ID NO: 1798352 - RNA, 19 nt, Artificial Sequence
  Description of Artificial Sequence: Synthetic oligonucleotide
aauguuuuggaagccauac

SEQ ID NO: 1798353 - RNA, 19 nt, Artificial Sequence
  Description of Artificial Sequence: Synthetic oligonucleotide
cucaguauguccaaaauag

SEQ ID NO: 1798354 - RNA, 19 nt, Artificial Sequence
  Description of Artificial Sequence: Synthetic oligonucleotide
uagauuuacaagcacacug

SEQ ID NO: 1798355 - RNA, 19 nt, Artificial Sequence
  Description of Artificial Sequence: Synthetic oligonucleotide
auuaauacaauuucuuuga

SEQ ID NO: 1798356 - RNA, 19 nt, Artificial Sequence
  Description of Artificial Sequence: Synthetic oligonucleotide
ucuuugaggaaccaguaag

SEQ ID NO: 1798357 - RNA, 19 nt, Artificial Sequence
  Description of Artificial Sequence: Synthetic oligonucleotide
agccauacaaaacuaagac

SEQ ID NO: 1798358 - RNA, 19 nt, Artificial Sequence
  Description of Artificial Sequence: Synthetic oligonucleotide
aguaccugcaucuugacug

SEQ ID NO: 1798359 - RNA, 19 nt, Artificial Sequence
  Description of Artificial Sequence: Synthetic oligonucleotide
aaggauguagcauacaaaa

SEQ ID NO: 1798360 - RNA, 19 nt, Artificial Sequence
  Description of Artificial Sequence: Synthetic oligonucleotide
uauacacacacacacacac

SEQ ID NO: 1798361 - RNA, 19 nt, Artificial Sequence
  Description of Artificial Sequence: Synthetic oligonucleotide
aguuaaugggcucuacugc

SEQ ID NO: 1798362 - RNA, 19 nt, Artificial Sequence
  Description of Artificial Sequence: Synthetic oligonucleotide
aaacuagccacauuucaag

SEQ ID NO: 1798363 - RNA, 19 nt, Artificial Sequence
  Description of Artificial Sequence: Synthetic oligonucleotide
uuacacuuacaguuaaugg

SEQ ID NO: 1798364 - RNA, 19 nt, Artificial Sequence
  Description of Artificial Sequence: Synthetic oligonucleotide
uuucauacuaacuucaaau

SEQ ID NO: 1798365 - RNA, 19 nt, Artificial Sequence
  Description of Artificial Sequence: Synthetic oligonucleotide
uauagauuuacaagcacac

SEQ ID NO: 1798366 - RNA, 19 nt, Artificial Sequence
  Description of Artificial Sequence: Synthetic oligonucleotide
cuuacuuuuauaaggaguc

SEQ ID NO: 1798367 - RNA, 19 nt, Artificial Sequence
  Description of Artificial Sequence: Synthetic oligonucleotide
acauguaaucaauauaaag

SEQ ID NO: 1798368 - RNA, 19 nt, Artificial Sequence
  Description of Artificial Sequence: Synthetic oligonucleotide
ucuauacacacacacacac

SEQ ID NO: 1798369 - RNA, 19 nt, Artificial Sequence
  Description of Artificial Sequence: Synthetic oligonucleotide
aaaacuaagacaaacugau

SEQ ID NO: 1798370 - RNA, 19 nt, Artificial Sequence
  Description of Artificial Sequence: Synthetic oligonucleotide
uacaaaagagguuauguga

SEQ ID NO: 1798371 - RNA, 19 nt, Artificial Sequence
  Description of Artificial Sequence: Synthetic oligonucleotide
ucaaaaguguuccaugggc

SEQ ID NO: 1798372 - RNA, 19 nt, Artificial Sequence
  Description of Artificial Sequence: Synthetic oligonucleotide
aaucaauauaaaguuauca

SEQ ID NO: 1798373 - RNA, 19 nt, Artificial Sequence
  Description of Artificial Sequence: Synthetic oligonucleotide
aaauaguaauuucaacaug

SEQ ID NO: 1798374 - RNA, 19 nt, Artificial Sequence
  Description of Artificial Sequence: Synthetic oligonucleotide
agaaauuucaauccaauua

SEQ ID NO: 1798375 - RNA, 19 nt, Artificial Sequence
  Description of Artificial Sequence: Synthetic oligonucleotide
auugaaacuagccacauuu

SEQ ID NO: 1798376 - RNA, 19 nt, Artificial Sequence
  Description of Artificial Sequence: Synthetic oligonucleotide
cucaauugaaacuagccac

SEQ ID NO: 1798377 - RNA, 19 nt, Artificial Sequence
  Description of Artificial Sequence: Synthetic oligonucleotide
auguauuccacacuucaac

SEQ ID NO: 1798378 - RNA, 19 nt, Artificial Sequence
  Description of Artificial Sequence: Synthetic oligonucleotide
uauuuaacucaguaugucc

SEQ ID NO: 1798379 - RNA, 19 nt, Artificial Sequence
  Description of Artificial Sequence: Synthetic oligonucleotide
uguuuuggaagccauacaa

SEQ ID NO: 1798380 - RNA, 19 nt, Artificial Sequence
  Description of Artificial Sequence: Synthetic oligonucleotide
aagcuagcugcacaguggc

SEQ ID NO: 1798381 - RNA, 19 nt, Artificial Sequence
  Description of Artificial Sequence: Synthetic oligonucleotide
uugccuuaaacucucaugu

SEQ ID NO: 1798382 - RNA, 19 nt, Artificial Sequence
  Description of Artificial Sequence: Synthetic oligonucleotide
acuaacuucaaauucuggu

SEQ ID NO: 1798383 - RNA, 19 nt, Artificial Sequence
  Description of Artificial Sequence: Synthetic oligonucleotide
agucaaaaguguuccaugg

SEQ ID NO: 1798384 - RNA, 19 nt, Artificial Sequence
  Description of Artificial Sequence: Synthetic oligonucleotide
aagucauacacuuacuuuu

SEQ ID NO: 1798385 - RNA, 19 nt, Artificial Sequence
  Description of Artificial Sequence: Synthetic oligonucleotide
aaaugcaucucccucacau

SEQ ID NO: 1798386 - RNA, 19 nt, Artificial Sequence
  Description of Artificial Sequence: Synthetic oligonucleotide
acugcuguccuaucuauac

SEQ ID NO: 1798387 - RNA, 19 nt, Artificial Sequence
  Description of Artificial Sequence: Synthetic oligonucleotide
uaucaauuauauauuuuac

SEQ ID NO: 1798388 - RNA, 19 nt, Artificial Sequence
  Description of Artificial Sequence: Synthetic oligonucleotide
aucaauuauauauuuuaca

SEQ ID NO: 1798389 - RNA, 19 nt, Artificial Sequence
  Description of Artificial Sequence: Synthetic oligonucleotide
uagaauaccuuauaugcac

SEQ ID NO: 1798390 - RNA, 19 nt, Artificial Sequence
  Description of Artificial Sequence: Synthetic oligonucleotide
uccaauuaauacaauuucu

SEQ ID NO: 1798391 - RNA, 19 nt, Artificial Sequence
  Description of Artificial Sequence: Synthetic oligonucleotide
ucauacuaacuucaaauuc

SEQ ID NO: 1798392 - RNA, 19 nt, Artificial Sequence
  Description of Artificial Sequence: Synthetic oligonucleotide
ugaggaaccaguaagucau

SEQ ID NO: 1798393 - RNA, 19 nt, Artificial Sequence
  Description of Artificial Sequence: Synthetic oligonucleotide
aucuauacaucauagaaua

SEQ ID NO: 1798394 - RNA, 19 nt, Artificial Sequence
  Description of Artificial Sequence: Synthetic oligonucleotide
uagaacuaccccaagcugc

SEQ ID NO: 1798395 - RNA, 19 nt, Artificial Sequence
  Description of Artificial Sequence: Synthetic oligonucleotide
gauguagcauacaaaagag

SEQ ID NO: 1798396 - RNA, 19 nt, Artificial Sequence
  Description of Artificial Sequence: Synthetic oligonucleotide
cuaacuucaaauucuggug

SEQ ID NO: 1798397 - RNA, 19 nt, Artificial Sequence
  Description of Artificial Sequence: Synthetic oligonucleotide
guucuauacacacacacac

SEQ ID NO: 1798398 - RNA, 19 nt, Artificial Sequence
  Description of Artificial Sequence: Synthetic oligonucleotide
acacuuacaguuaaugggc

SEQ ID NO: 1798399 - RNA, 19 nt, Artificial Sequence
  Description of Artificial Sequence: Synthetic oligonucleotide
ugacuauggaucuagagua

SEQ ID NO: 1798400 - RNA, 19 nt, Artificial Sequence
  Description of Artificial Sequence: Synthetic oligonucleotide
aauccuaagaaagcaauga

SEQ ID NO: 1798401 - RNA, 19 nt, Artificial Sequence
  Description of Artificial Sequence: Synthetic oligonucleotide
uccuaucuauacaucauag

SEQ ID NO: 1798402 - RNA, 19 nt, Artificial Sequence
  Description of Artificial Sequence: Synthetic oligonucleotide
uuuacacuuacaguuaaug

SEQ ID NO: 1798403 - RNA, 19 nt, Artificial Sequence
  Description of Artificial Sequence: Synthetic oligonucleotide
uuuuauaaggagucggggu

SEQ ID NO: 1798404 - RNA, 19 nt, Artificial Sequence
  Description of Artificial Sequence: Synthetic oligonucleotide
ugaaacuagccacauuuca

SEQ ID NO: 1798405 - RNA, 19 nt, Artificial Sequence
  Description of Artificial Sequence: Synthetic oligonucleotide
uacacacacacacacacac

SEQ ID NO: 1798406 - RNA, 19 nt, Artificial Sequence
  Description of Artificial Sequence: Synthetic oligonucleotide
aguaauuucaacauguaau

SEQ ID NO: 1798407 - RNA, 19 nt, Artificial Sequence
  Description of Artificial Sequence: Synthetic oligonucleotide
uaagcuagcugcacagugg

SEQ ID NO: 1798408 - RNA, 19 nt, Artificial Sequence
  Description of Artificial Sequence: Synthetic oligonucleotide
uguuauuuacacuuacagu

SEQ ID NO: 1798409 - RNA, 19 nt, Artificial Sequence
  Description of Artificial Sequence: Synthetic oligonucleotide
uaacuucaaauucuggugu

SEQ ID NO: 1798410 - RNA, 19 nt, Artificial Sequence
  Description of Artificial Sequence: Synthetic oligonucleotide
acauguuauuuacacuuac

SEQ ID NO: 1798411 - RNA, 19 nt, Artificial Sequence
  Description of Artificial Sequence: Synthetic oligonucleotide
uacaauuucuuugaggaac

SEQ ID NO: 1798412 - RNA, 19 nt, Artificial Sequence
  Description of Artificial Sequence: Synthetic oligonucleotide
uacuuuuauaaggagucgg

SEQ ID NO: 1798413 - RNA, 19 nt, Artificial Sequence
  Description of Artificial Sequence: Synthetic oligonucleotide
uuaauacaauuucuuugag

SEQ ID NO: 1798414 - RNA, 19 nt, Artificial Sequence
  Description of Artificial Sequence: Synthetic oligonucleotide
accaguaagucauagauuu

SEQ ID NO: 1798415 - RNA, 19 nt, Artificial Sequence
  Description of Artificial Sequence: Synthetic oligonucleotide
aucucaauugaaacuagcc

SEQ ID NO: 1798416 - RNA, 19 nt, Artificial Sequence
  Description of Artificial Sequence: Synthetic oligonucleotide
caacauguaaucaauauaa

SEQ ID NO: 1798417 - RNA, 19 nt, Artificial Sequence
  Description of Artificial Sequence: Synthetic oligonucleotide
uguguauaaagcauaucuc

SEQ ID NO: 1798418 - RNA, 19 nt, Artificial Sequence
  Description of Artificial Sequence: Synthetic oligonucleotide
cauguaaucaauauaaagu

SEQ ID NO: 1798419 - RNA, 19 nt, Artificial Sequence
  Description of Artificial Sequence: Synthetic oligonucleotide
uaucuauacaucauagaau

SEQ ID NO: 1798420 - RNA, 19 nt, Artificial Sequence
  Description of Artificial Sequence: Synthetic oligonucleotide
uaagcaugucauauacagg

SEQ ID NO: 1798421 - RNA, 19 nt, Artificial Sequence
  Description of Artificial Sequence: Synthetic oligonucleotide
uuuugaauagcaguguggu

SEQ ID NO: 1798422 - RNA, 19 nt, Artificial Sequence
  Description of Artificial Sequence: Synthetic oligonucleotide
aaaaugccagucaaaagug

SEQ ID NO: 1798423 - RNA, 19 nt, Artificial Sequence
  Description of Artificial Sequence: Synthetic oligonucleotide
agcuaacacuuauaaggcc

SEQ ID NO: 1798424 - RNA, 19 nt, Artificial Sequence
  Description of Artificial Sequence: Synthetic oligonucleotide
uuuauaaggagucgggguu

SEQ ID NO: 1798425 - RNA, 19 nt, Artificial Sequence
  Description of Artificial Sequence: Synthetic oligonucleotide
cagagaggcacugagaagg

SEQ ID NO: 1798426 - RNA, 19 nt, Artificial Sequence
  Description of Artificial Sequence: Synthetic oligonucleotide
ucaacauguaaucaauaua

SEQ ID NO: 1798427 - RNA, 19 nt, Artificial Sequence
  Description of Artificial Sequence: Synthetic oligonucleotide
ugugacuauggaucuagag

SEQ ID NO: 1798428 - RNA, 19 nt, Artificial Sequence
  Description of Artificial Sequence: Synthetic oligonucleotide
uguaaucaauauaaaguua

SEQ ID NO: 1798429 - RNA, 19 nt, Artificial Sequence
  Description of Artificial Sequence: Synthetic oligonucleotide
uggaauuauaagcaugcaa

SEQ ID NO: 1798430 - RNA, 19 nt, Artificial Sequence
  Description of Artificial Sequence: Synthetic oligonucleotide
cuucuaauccuaagaaagc

SEQ ID NO: 1798431 - RNA, 19 nt, Artificial Sequence
  Description of Artificial Sequence: Synthetic oligonucleotide
uucaacauguaaucaauau

SEQ ID NO: 1798432 - RNA, 19 nt, Artificial Sequence
  Description of Artificial Sequence: Synthetic oligonucleotide
uuagaacuaccccaagcug

SEQ ID NO: 1798433 - RNA, 19 nt, Artificial Sequence
  Description of Artificial Sequence: Synthetic oligonucleotide
cuaucuauacaucauagaa

SEQ ID NO: 1798434 - RNA, 19 nt, Artificial Sequence
  Description of Artificial Sequence: Synthetic oligonucleotide
guguauaaagcauaucuca

SEQ ID NO: 1798435 - RNA, 19 nt, Artificial Sequence
  Description of Artificial Sequence: Synthetic oligonucleotide
acuagcuauagauuuacaa

SEQ ID NO: 1798436 - RNA, 19 nt, Artificial Sequence
  Description of Artificial Sequence: Synthetic oligonucleotide
ggaauuauaagcaugcaac

SEQ ID NO: 1798437 - RNA, 19 nt, Artificial Sequence
  Description of Artificial Sequence: Synthetic oligonucleotide
acccagcuaauucuguugc

SEQ ID NO: 1798438 - RNA, 19 nt, Artificial Sequence
  Description of Artificial Sequence: Synthetic oligonucleotide
uaugugacuauggaucuag

SEQ ID NO: 1798439 - RNA, 19 nt, Artificial Sequence
  Description of Artificial Sequence: Synthetic oligonucleotide
cugauaaaaugcaucuccc

SEQ ID NO: 1798440 - RNA, 19 nt, Artificial Sequence
  Description of Artificial Sequence: Synthetic oligonucleotide
gaagccauacaaaacuaag

SEQ ID NO: 1798441 - RNA, 19 nt, Artificial Sequence
  Description of Artificial Sequence: Synthetic oligonucleotide
uuccagauuggacagcaug

SEQ ID NO: 1798442 - RNA, 19 nt, Artificial Sequence
  Description of Artificial Sequence: Synthetic oligonucleotide
uagaguaccugcaucuuga

SEQ ID NO: 1798443 - RNA, 19 nt, Artificial Sequence
  Description of Artificial Sequence: Synthetic oligonucleotide
uccaugggcaacaacuagc

SEQ ID NO: 1798444 - RNA, 19 nt, Artificial Sequence
  Description of Artificial Sequence: Synthetic oligonucleotide
uaucucaauugaaacuagc

SEQ ID NO: 1798445 - RNA, 19 nt, Artificial Sequence
  Description of Artificial Sequence: Synthetic oligonucleotide
ugagaaauuucaauccaau

SEQ ID NO: 1798446 - RNA, 19 nt, Artificial Sequence
  Description of Artificial Sequence: Synthetic oligonucleotide
cauuucaagugcucaaaag

SEQ ID NO: 1798447 - RNA, 19 nt, Artificial Sequence
  Description of Artificial Sequence: Synthetic oligonucleotide
cuauagauuuacaagcaca

SEQ ID NO: 1798448 - RNA, 19 nt, Artificial Sequence
  Description of Artificial Sequence: Synthetic oligonucleotide
uaugauccagauuuaaauu

SEQ ID NO: 1798449 - RNA, 19 nt, Artificial Sequence
  Description of Artificial Sequence: Synthetic oligonucleotide
acuauggaucuagaguacc

SEQ ID NO: 1798450 - RNA, 19 nt, Artificial Sequence
  Description of Artificial Sequence: Synthetic oligonucleotide
agaaggauguagcauacaa

SEQ ID NO: 1798451 - RNA, 19 nt, Artificial Sequence
  Description of Artificial Sequence: Synthetic oligonucleotide
uugaggaaccaguaaguca

SEQ ID NO: 1798452 - RNA, 19 nt, Artificial Sequence
  Description of Artificial Sequence: Synthetic oligonucleotide
aacugauaaaaugcaucuc

SEQ ID NO: 1798453 - RNA, 19 nt, Artificial Sequence
  Description of Artificial Sequence: Synthetic oligonucleotide
aucuagaguaccugcaucu

SEQ ID NO: 1798454 - RNA, 19 nt, Artificial Sequence
  Description of Artificial Sequence: Synthetic oligonucleotide
cuuuuauaaggagucgggg

SEQ ID NO: 1798455 - RNA, 19 nt, Artificial Sequence
  Description of Artificial Sequence: Synthetic oligonucleotide
guguguauaaagcauaucu

SEQ ID NO: 1798456 - RNA, 19 nt, Artificial Sequence
  Description of Artificial Sequence: Synthetic oligonucleotide
ugauaaaaugcaucucccu

SEQ ID NO: 1798457 - RNA, 19 nt, Artificial Sequence
  Description of Artificial Sequence: Synthetic oligonucleotide
uucauacuaacuucaaauu

SEQ ID NO: 1798458 - RNA, 19 nt, Artificial Sequence
  Description of Artificial Sequence: Synthetic oligonucleotide
ggauguagcauacaaaaga

SEQ ID NO: 1798459 - RNA, 19 nt, Artificial Sequence
  Description of Artificial Sequence: Synthetic oligonucleotide
uagcauacaaaagagguua

SEQ ID NO: 1798460 - RNA, 19 nt, Artificial Sequence
  Description of Artificial Sequence: Synthetic oligonucleotide
agauuggacagcauggguc

SEQ ID NO: 1798461 - RNA, 19 nt, Artificial Sequence
  Description of Artificial Sequence: Synthetic oligonucleotide
uugaugcccagcacuaaag

SEQ ID NO: 1798462 - RNA, 19 nt, Artificial Sequence
  Description of Artificial Sequence: Synthetic oligonucleotide
accccaagcugcaagagcc

SEQ ID NO: 1798463 - RNA, 19 nt, Artificial Sequence
  Description of Artificial Sequence: Synthetic oligonucleotide
acuagccacauuucaagug

SEQ ID NO: 1798464 - RNA, 19 nt, Artificial Sequence
  Description of Artificial Sequence: Synthetic oligonucleotide
acuuuuauaaggagucggg

SEQ ID NO: 1798465 - RNA, 19 nt, Artificial Sequence
  Description of Artificial Sequence: Synthetic oligonucleotide
uagcagugugguaagcuag

SEQ ID NO: 1798466 - RNA, 19 nt, Artificial Sequence
  Description of Artificial Sequence: Synthetic oligonucleotide
guugccuuaaacucucaug

SEQ ID NO: 1798467 - RNA, 19 nt, Artificial Sequence
  Description of Artificial Sequence: Synthetic oligonucleotide
aacuagccacauuucaagu

SEQ ID NO: 1798468 - RNA, 19 nt, Artificial Sequence
  Description of Artificial Sequence: Synthetic oligonucleotide
auuuaacucaguaugucca

SEQ ID NO: 1798469 - RNA, 19 nt, Artificial Sequence
  Description of Artificial Sequence: Synthetic oligonucleotide
cacacacacacacacacac

SEQ ID NO: 1798470 - RNA, 19 nt, Artificial Sequence
  Description of Artificial Sequence: Synthetic oligonucleotide
uucuauacacacacacaca

SEQ ID NO: 1798471 - RNA, 19 nt, Artificial Sequence
  Description of Artificial Sequence: Synthetic oligonucleotide
cacacacacacacacacug

SEQ ID NO: 1798472 - RNA, 19 nt, Artificial Sequence
  Description of Artificial Sequence: Synthetic oligonucleotide
ugguaagcuagcugcacag

SEQ ID NO: 1798473 - RNA, 19 nt, Artificial Sequence
  Description of Artificial Sequence: Synthetic oligonucleotide
cacacacacacacacuggg

SEQ ID NO: 1798474 - RNA, 19 nt, Artificial Sequence
  Description of Artificial Sequence: Synthetic oligonucleotide
uguuugaaguaauguuuug

SEQ ID NO: 1798475 - RNA, 19 nt, Artificial Sequence
  Description of Artificial Sequence: Synthetic oligonucleotide
uuauuuaacucaguauguc

SEQ ID NO: 1798476 - RNA, 19 nt, Artificial Sequence
  Description of Artificial Sequence: Synthetic oligonucleotide
gucaaaaguguuccauggg

SEQ ID NO: 1798477 - RNA, 19 nt, Artificial Sequence
  Description of Artificial Sequence: Synthetic oligonucleotide
ucuauacaucauagaauac

SEQ ID NO: 1798478 - RNA, 19 nt, Artificial Sequence
  Description of Artificial Sequence: Synthetic oligonucleotide
aacucaguauguccaaaau

SEQ ID NO: 1798479 - RNA, 19 nt, Artificial Sequence
  Description of Artificial Sequence: Synthetic oligonucleotide
aaagagguuaugugacuau

SEQ ID NO: 1798480 - RNA, 19 nt, Artificial Sequence
  Description of Artificial Sequence: Synthetic oligonucleotide
ucuguugccuuaaacucuc

SEQ ID NO: 1798481 - RNA, 19 nt, Artificial Sequence
  Description of Artificial Sequence: Synthetic oligonucleotide
gguuaugugacuauggauc

SEQ ID NO: 1798482 - RNA, 19 nt, Artificial Sequence
  Description of Artificial Sequence: Synthetic oligonucleotide
guaagcuagcugcacagug

SEQ ID NO: 1798483 - RNA, 19 nt, Artificial Sequence
  Description of Artificial Sequence: Synthetic oligonucleotide
uuaggguguggaucagugg

SEQ ID NO: 1798484 - RNA, 19 nt, Artificial Sequence
  Description of Artificial Sequence: Synthetic oligonucleotide
ugagaaggauguagcauac

SEQ ID NO: 1798485 - RNA, 19 nt, Artificial Sequence
  Description of Artificial Sequence: Synthetic oligonucleotide
ucaguauguccaaaauagu

SEQ ID NO: 1798486 - RNA, 19 nt, Artificial Sequence
  Description of Artificial Sequence: Synthetic oligonucleotide
gacaaacugauaaaaugca

SEQ ID NO: 1798487 - RNA, 19 nt, Artificial Sequence
  Description of Artificial Sequence: Synthetic oligonucleotide
acaggcagaugauguauuc

SEQ ID NO: 1798488 - RNA, 19 nt, Artificial Sequence
  Description of Artificial Sequence: Synthetic oligonucleotide
uuaaugggcucuacugcug

SEQ ID NO: 1798489 - RNA, 19 nt, Artificial Sequence
  Description of Artificial Sequence: Synthetic oligonucleotide
uuccaugggcaacaacuag

SEQ ID NO: 1798490 - RNA, 19 nt, Artificial Sequence
  Description of Artificial Sequence: Synthetic oligonucleotide
gacugguuagaacuacccc

SEQ ID NO: 1798491 - RNA, 19 nt, Artificial Sequence
  Description of Artificial Sequence: Synthetic oligonucleotide
acuuacuuuuauaaggagu

SEQ ID NO: 1798492 - RNA, 19 nt, Artificial Sequence
  Description of Artificial Sequence: Synthetic oligonucleotide
uugacugguuagaacuacc

SEQ ID NO: 1798493 - RNA, 19 nt, Artificial Sequence
  Description of Artificial Sequence: Synthetic oligonucleotide
auggaguaaauauuaugau

SEQ ID NO: 1798494 - RNA, 19 nt, Artificial Sequence
  Description of Artificial Sequence: Synthetic oligonucleotide
aguauguccaaaauaguaa

SEQ ID NO: 1798495 - RNA, 19 nt, Artificial Sequence
  Description of Artificial Sequence: Synthetic oligonucleotide
aagagguuaugugacuaug

SEQ ID NO: 1798496 - RNA, 19 nt, Artificial Sequence
  Description of Artificial Sequence: Synthetic oligonucleotide
gaacucacaaggcccuagg

SEQ ID NO: 1798497 - RNA, 19 nt, Artificial Sequence
  Description of Artificial Sequence: Synthetic oligonucleotide
cuaagaaagcaaugagcug

SEQ ID NO: 1798498 - RNA, 19 nt, Artificial Sequence
  Description of Artificial Sequence: Synthetic oligonucleotide
uuuaacucaguauguccaa

SEQ ID NO: 1798499 - RNA, 19 nt, Artificial Sequence
  Description of Artificial Sequence: Synthetic oligonucleotide
aagccauacaaaacuaaga

SEQ ID NO: 1798500 - RNA, 19 nt, Artificial Sequence
  Description of Artificial Sequence: Synthetic oligonucleotide
uaaggccuagaacucacaa

SEQ ID NO: 1798501 - RNA, 19 nt, Artificial Sequence
  Description of Artificial Sequence: Synthetic oligonucleotide
guuagaacuaccccaagcu

SEQ ID NO: 1798502 - RNA, 19 nt, Artificial Sequence
  Description of Artificial Sequence: Synthetic oligonucleotide
agagguuaugugacuaugg

SEQ ID NO: 1798503 - RNA, 19 nt, Artificial Sequence
  Description of Artificial Sequence: Synthetic oligonucleotide
uauggaucuagaguaccug

SEQ ID NO: 1798504 - RNA, 19 nt, Artificial Sequence
  Description of Artificial Sequence: Synthetic oligonucleotide
aagcacacuguacauguua

SEQ ID NO: 1798505 - RNA, 19 nt, Artificial Sequence
  Description of Artificial Sequence: Synthetic oligonucleotide
ucaaauucugguguguaua

SEQ ID NO: 1798506 - RNA, 19 nt, Artificial Sequence
  Description of Artificial Sequence: Synthetic oligonucleotide
ucuacugcuguccuaucua

SEQ ID NO: 1798507 - RNA, 19 nt, Artificial Sequence
  Description of Artificial Sequence: Synthetic oligonucleotide
cuuauaugcacauaagcau

SEQ ID NO: 1798508 - RNA, 19 nt, Artificial Sequence
  Description of Artificial Sequence: Synthetic oligonucleotide
ccuagaacucacaaggccc

SEQ ID NO: 1798509 - RNA, 19 nt, Artificial Sequence
  Description of Artificial Sequence: Synthetic oligonucleotide
gagguuaugugacuaugga

SEQ ID NO: 1798510 - RNA, 19 nt, Artificial Sequence
  Description of Artificial Sequence: Synthetic oligonucleotide
uggaucagugguagagucc

SEQ ID NO: 1798511 - RNA, 19 nt, Artificial Sequence
  Description of Artificial Sequence: Synthetic oligonucleotide
aaugggcucuacugcuguc

SEQ ID NO: 1798512 - RNA, 19 nt, Artificial Sequence
  Description of Artificial Sequence: Synthetic oligonucleotide
uguccuaucuauacaucau

SEQ ID NO: 1798513 - RNA, 19 nt, Artificial Sequence
  Description of Artificial Sequence: Synthetic oligonucleotide
agauuuacaagcacacugu

SEQ ID NO: 1798514 - RNA, 19 nt, Artificial Sequence
  Description of Artificial Sequence: Synthetic oligonucleotide
ucaaaaggcagaguccagu

SEQ ID NO: 1798515 - RNA, 19 nt, Artificial Sequence
  Description of Artificial Sequence: Synthetic oligonucleotide
uauguccaaaauaguaauu

SEQ ID NO: 1798516 - RNA, 19 nt, Artificial Sequence
  Description of Artificial Sequence: Synthetic oligonucleotide
uugaaacuagccacauuuc

SEQ ID NO: 1798517 - RNA, 19 nt, Artificial Sequence
  Description of Artificial Sequence: Synthetic oligonucleotide
uuugaggaaccaguaaguc

SEQ ID NO: 1798518 - RNA, 19 nt, Artificial Sequence
  Description of Artificial Sequence: Synthetic oligonucleotide
uaacucaguauguccaaaa

SEQ ID NO: 1798519 - RNA, 19 nt, Artificial Sequence
  Description of Artificial Sequence: Synthetic oligonucleotide
agaggcacuggguucuauc

SEQ ID NO: 1798520 - RNA, 19 nt, Artificial Sequence
  Description of Artificial Sequence: Synthetic oligonucleotide
uucuuugaggaaccaguaa

SEQ ID NO: 1798521 - RNA, 19 nt, Artificial Sequence
  Description of Artificial Sequence: Synthetic oligonucleotide
auagaauaccuuauaugca

SEQ ID NO: 1798522 - RNA, 19 nt, Artificial Sequence
  Description of Artificial Sequence: Synthetic oligonucleotide
aguaauguuuuggaagcca

SEQ ID NO: 1798523 - RNA, 19 nt, Artificial Sequence
  Description of Artificial Sequence: Synthetic oligonucleotide
aacucacaaggcccuaggu

SEQ ID NO: 1798524 - RNA, 19 nt, Artificial Sequence
  Description of Artificial Sequence: Synthetic oligonucleotide
uugccuagcacuggagagg

SEQ ID NO: 1798525 - RNA, 19 nt, Artificial Sequence
  Description of Artificial Sequence: Synthetic oligonucleotide
cacuuauaaggccuagaac

SEQ ID NO: 1798526 - RNA, 19 nt, Artificial Sequence
  Description of Artificial Sequence: Synthetic oligonucleotide
cacuuacuuuuauaaggag

SEQ ID NO: 1798527 - RNA, 19 nt, Artificial Sequence
  Description of Artificial Sequence: Synthetic oligonucleotide
gacagcaugggucuucuaa

SEQ ID NO: 1798528 - RNA, 19 nt, Artificial Sequence
  Description of Artificial Sequence: Synthetic oligonucleotide
aaauuucaauccaauuaau

SEQ ID NO: 1798529 - RNA, 19 nt, Artificial Sequence
  Description of Artificial Sequence: Synthetic oligonucleotide
auguagcauacaaaagagg

SEQ ID NO: 1798530 - RNA, 19 nt, Artificial Sequence
  Description of Artificial Sequence: Synthetic oligonucleotide
cagucaaaaguguuccaug

SEQ ID NO: 1798531 - RNA, 19 nt, Artificial Sequence
  Description of Artificial Sequence: Synthetic oligonucleotide
uuuuccuacagagccuggc

SEQ ID NO: 1798532 - RNA, 19 nt, Artificial Sequence
  Description of Artificial Sequence: Synthetic oligonucleotide
uggguucuaucccuggcac

SEQ ID NO: 1798533 - RNA, 19 nt, Artificial Sequence
  Description of Artificial Sequence: Synthetic oligonucleotide
uaaugggcucuacugcugu

SEQ ID NO: 1798534 - RNA, 19 nt, Artificial Sequence
  Description of Artificial Sequence: Synthetic oligonucleotide
uacauguuauuuacacuua

SEQ ID NO: 1798535 - RNA, 19 nt, Artificial Sequence
  Description of Artificial Sequence: Synthetic oligonucleotide
aauugaaacuagccacauu

SEQ ID NO: 1798536 - RNA, 19 nt, Artificial Sequence
  Description of Artificial Sequence: Synthetic oligonucleotide
agaguaccugcaucuugac

SEQ ID NO: 1798537 - RNA, 19 nt, Artificial Sequence
  Description of Artificial Sequence: Synthetic oligonucleotide
gugacuauggaucuagagu

SEQ ID NO: 1798538 - RNA, 19 nt, Artificial Sequence
  Description of Artificial Sequence: Synthetic oligonucleotide
gcuggaauuauaagcaugc

SEQ ID NO: 1798539 - RNA, 19 nt, Artificial Sequence
  Description of Artificial Sequence: Synthetic oligonucleotide
cuagaguaccugcaucuug

SEQ ID NO: 1798540 - RNA, 19 nt, Artificial Sequence
  Description of Artificial Sequence: Synthetic oligonucleotide
gaaacuagccacauuucaa

SEQ ID NO: 1798541 - RNA, 19 nt, Artificial Sequence
  Description of Artificial Sequence: Synthetic oligonucleotide
agguuaugugacuauggau

SEQ ID NO: 1798542 - RNA, 19 nt, Artificial Sequence
  Description of Artificial Sequence: Synthetic oligonucleotide
aacacuuauaaggccuaga

SEQ ID NO: 1798543 - RNA, 19 nt, Artificial Sequence
  Description of Artificial Sequence: Synthetic oligonucleotide
cuguccuaucuauacauca

SEQ ID NO: 1798544 - RNA, 19 nt, Artificial Sequence
  Description of Artificial Sequence: Synthetic oligonucleotide
uauaaggagucgggguuag

SEQ ID NO: 1798545 - RNA, 19 nt, Artificial Sequence
  Description of Artificial Sequence: Synthetic oligonucleotide
uggaagccauacaaaacua

SEQ ID NO: 1798546 - RNA, 19 nt, Artificial Sequence
  Description of Artificial Sequence: Synthetic oligonucleotide
caguauguccaaaauagua

SEQ ID NO: 1798547 - RNA, 19 nt, Artificial Sequence
  Description of Artificial Sequence: Synthetic oligonucleotide
ugggucuucuaauccuaag

SEQ ID NO: 1798548 - RNA, 19 nt, Artificial Sequence
  Description of Artificial Sequence: Synthetic oligonucleotide
uuaaacucucauguuugaa

SEQ ID NO: 1798549 - RNA, 19 nt, Artificial Sequence
  Description of Artificial Sequence: Synthetic oligonucleotide
gaugcccagcacuaaagaa

SEQ ID NO: 1798550 - RNA, 19 nt, Artificial Sequence
  Description of Artificial Sequence: Synthetic oligonucleotide
agcagugugguaagcuagc

SEQ ID NO: 1798551 - RNA, 19 nt, Artificial Sequence
  Description of Artificial Sequence: Synthetic oligonucleotide
guuaggguguggaucagug

SEQ ID NO: 1798552 - RNA, 19 nt, Artificial Sequence
  Description of Artificial Sequence: Synthetic oligonucleotide
aaaugccagucaaaagugu

SEQ ID NO: 1798553 - RNA, 19 nt, Artificial Sequence
  Description of Artificial Sequence: Synthetic oligonucleotide
ccuuaaacucucauguuug

SEQ ID NO: 1798554 - RNA, 19 nt, Artificial Sequence
  Description of Artificial Sequence: Synthetic oligonucleotide
aggcccuagguuugaugcc

SEQ ID NO: 1798555 - RNA, 19 nt, Artificial Sequence
  Description of Artificial Sequence: Synthetic oligonucleotide
uaauguuuuggaagccaua

SEQ ID NO: 1798556 - RNA, 19 nt, Artificial Sequence
  Description of Artificial Sequence: Synthetic oligonucleotide
auagcagugugguaagcua

SEQ ID NO: 1798557 - RNA, 19 nt, Artificial Sequence
  Description of Artificial Sequence: Synthetic oligonucleotide
agcuauagauuuacaagca

SEQ ID NO: 1798558 - RNA, 19 nt, Artificial Sequence
  Description of Artificial Sequence: Synthetic oligonucleotide
gcaacaacuagcuauagau

SEQ ID NO: 1798559 - RNA, 19 nt, Artificial Sequence
  Description of Artificial Sequence: Synthetic oligonucleotide
cugagaaggauguagcaua

SEQ ID NO: 1798560 - RNA, 19 nt, Artificial Sequence
  Description of Artificial Sequence: Synthetic oligonucleotide
ucuaucccuggcacuguca

SEQ ID NO: 1798561 - RNA, 19 nt, Artificial Sequence
  Description of Artificial Sequence: Synthetic oligonucleotide
guuaugugacuauggaucu

SEQ ID NO: 1798562 - RNA, 19 nt, Artificial Sequence
  Description of Artificial Sequence: Synthetic oligonucleotide
ccaaaauaguaauuucaac

SEQ ID NO: 1798563 - RNA, 19 nt, Artificial Sequence
  Description of Artificial Sequence: Synthetic oligonucleotide
gauuuacaagcacacugua

SEQ ID NO: 1798564 - RNA, 19 nt, Artificial Sequence
  Description of Artificial Sequence: Synthetic oligonucleotide
guuaaugggcucuacugcu

SEQ ID NO: 1798565 - RNA, 19 nt, Artificial Sequence
  Description of Artificial Sequence: Synthetic oligonucleotide
ucaauccaauuaauacaau

SEQ ID NO: 1798566 - RNA, 19 nt, Artificial Sequence
  Description of Artificial Sequence: Synthetic oligonucleotide
uuugaauagcaguguggua

SEQ ID NO: 1798567 - RNA, 19 nt, Artificial Sequence
  Description of Artificial Sequence: Synthetic oligonucleotide
aguaagucauagauuuugu

SEQ ID NO: 1798568 - RNA, 19 nt, Artificial Sequence
  Description of Artificial Sequence: Synthetic oligonucleotide
auagauuuacaagcacacu

SEQ ID NO: 1798569 - RNA, 19 nt, Artificial Sequence
  Description of Artificial Sequence: Synthetic oligonucleotide
ugguuagaacuaccccaag

SEQ ID NO: 1798570 - RNA, 19 nt, Artificial Sequence
  Description of Artificial Sequence: Synthetic oligonucleotide
guggaucagugguagaguc

SEQ ID NO: 1798571 - RNA, 19 nt, Artificial Sequence
  Description of Artificial Sequence: Synthetic oligonucleotide
aggauguagcauacaaaag

SEQ ID NO: 1798572 - RNA, 19 nt, Artificial Sequence
  Description of Artificial Sequence: Synthetic oligonucleotide
ucccucacaugguauuuga

SEQ ID NO: 1798573 - RNA, 19 nt, Artificial Sequence
  Description of Artificial Sequence: Synthetic oligonucleotide
ggcacugagaaggauguag

SEQ ID NO: 1798574 - RNA, 19 nt, Artificial Sequence
  Description of Artificial Sequence: Synthetic oligonucleotide
acucucauguuugaaguaa

SEQ ID NO: 1798575 - RNA, 19 nt, Artificial Sequence
  Description of Artificial Sequence: Synthetic oligonucleotide
cuuaaacucucauguuuga

SEQ ID NO: 1798576 - RNA, 19 nt, Artificial Sequence
  Description of Artificial Sequence: Synthetic oligonucleotide
uguggaucagugguagagu

SEQ ID NO: 1798577 - RNA, 19 nt, Artificial Sequence
  Description of Artificial Sequence: Synthetic oligonucleotide
cuagcugcacaguggcccc

SEQ ID NO: 1798578 - RNA, 19 nt, Artificial Sequence
  Description of Artificial Sequence: Synthetic oligonucleotide
uacccucuggaagucauac

SEQ ID NO: 1798579 - RNA, 19 nt, Artificial Sequence
  Description of Artificial Sequence: Synthetic oligonucleotide
ugcacauaagcaugucaua

SEQ ID NO: 1798580 - RNA, 19 nt, Artificial Sequence
  Description of Artificial Sequence: Synthetic oligonucleotide
caagcugcaagagcccagg

SEQ ID NO: 1798581 - RNA, 19 nt, Artificial Sequence
  Description of Artificial Sequence: Synthetic oligonucleotide
guauguccaaaauaguaau

SEQ ID NO: 1798582 - RNA, 19 nt, Artificial Sequence
  Description of Artificial Sequence: Synthetic oligonucleotide
uuaacucaguauguccaaa

SEQ ID NO: 1798583 - RNA, 19 nt, Artificial Sequence
  Description of Artificial Sequence: Synthetic oligonucleotide
aggaaccaguaagucauag

SEQ ID NO: 1798584 - RNA, 19 nt, Artificial Sequence
  Description of Artificial Sequence: Synthetic oligonucleotide
cugagaaauuucaauccaa

SEQ ID NO: 1798585 - RNA, 19 nt, Artificial Sequence
  Description of Artificial Sequence: Synthetic oligonucleotide
cuaauccuaagaaagcaau

SEQ ID NO: 1798586 - RNA, 19 nt, Artificial Sequence
  Description of Artificial Sequence: Synthetic oligonucleotide
uuauaaggagucgggguua

SEQ ID NO: 1798587 - RNA, 19 nt, Artificial Sequence
  Description of Artificial Sequence: Synthetic oligonucleotide
cauaagcaugucauauaca

SEQ ID NO: 1798588 - RNA, 19 nt, Artificial Sequence
  Description of Artificial Sequence: Synthetic oligonucleotide
cucaaaaggcagaguccag

SEQ ID NO: 1798589 - RNA, 19 nt, Artificial Sequence
  Description of Artificial Sequence: Synthetic oligonucleotide
cuauacacacacacacaca

SEQ ID NO: 1798590 - RNA, 19 nt, Artificial Sequence
  Description of Artificial Sequence: Synthetic oligonucleotide
cugcaucuugacugguuag

SEQ ID NO: 1798591 - RNA, 19 nt, Artificial Sequence
  Description of Artificial Sequence: Synthetic oligonucleotide
ugugguaagcuagcugcac

SEQ ID NO: 1798592 - RNA, 19 nt, Artificial Sequence
  Description of Artificial Sequence: Synthetic oligonucleotide
ggguucuacccucuggaag

SEQ ID NO: 1798593 - RNA, 19 nt, Artificial Sequence
  Description of Artificial Sequence: Synthetic oligonucleotide
gcauagcuaacacuuauaa

SEQ ID NO: 1798594 - RNA, 19 nt, Artificial Sequence
  Description of Artificial Sequence: Synthetic oligonucleotide
agaauaccuuauaugcaca

SEQ ID NO: 1798595 - RNA, 19 nt, Artificial Sequence
  Description of Artificial Sequence: Synthetic oligonucleotide
gccauacaaaacuaagaca

SEQ ID NO: 1798596 - RNA, 19 nt, Artificial Sequence
  Description of Artificial Sequence: Synthetic oligonucleotide
gguucuaucccuggcacug

SEQ ID NO: 1798597 - RNA, 19 nt, Artificial Sequence
  Description of Artificial Sequence: Synthetic oligonucleotide
cucggguucuacccucugg

SEQ ID NO: 1798598 - RNA, 19 nt, Artificial Sequence
  Description of Artificial Sequence: Synthetic oligonucleotide
caagagcccaggcuggcac

SEQ ID NO: 1798599 - RNA, 19 nt, Artificial Sequence
  Description of Artificial Sequence: Synthetic oligonucleotide
acacacacacacacacugg

SEQ ID NO: 1798600 - RNA, 19 nt, Artificial Sequence
  Description of Artificial Sequence: Synthetic oligonucleotide
cccucuggaagucauacac

SEQ ID NO: 1798601 - RNA, 19 nt, Artificial Sequence
  Description of Artificial Sequence: Synthetic oligonucleotide
acacacacacacacugggg

SEQ ID NO: 1798602 - RNA, 19 nt, Artificial Sequence
  Description of Artificial Sequence: Synthetic oligonucleotide
aucccuggcacugucaaaa

SEQ ID NO: 1798603 - RNA, 19 nt, Artificial Sequence
  Description of Artificial Sequence: Synthetic oligonucleotide
gauguauuccacacuucaa

SEQ ID NO: 1798604 - RNA, 19 nt, Artificial Sequence
  Description of Artificial Sequence: Synthetic oligonucleotide
gcuagcugcacaguggccc

SEQ ID NO: 1798605 - RNA, 19 nt, Artificial Sequence
  Description of Artificial Sequence: Synthetic oligonucleotide
cuuugaggaaccaguaagu

SEQ ID NO: 1798606 - RNA, 19 nt, Artificial Sequence
  Description of Artificial Sequence: Synthetic oligonucleotide
cugguuagaacuaccccaa

SEQ ID NO: 1798607 - RNA, 19 nt, Artificial Sequence
  Description of Artificial Sequence: Synthetic oligonucleotide
ugggcucuacugcuguccu

SEQ ID NO: 1798608 - RNA, 19 nt, Artificial Sequence
  Description of Artificial Sequence: Synthetic oligonucleotide
gggucuucuaauccuaaga

SEQ ID NO: 1798609 - RNA, 19 nt, Artificial Sequence
  Description of Artificial Sequence: Synthetic oligonucleotide
uucuaucccuggcacuguc

SEQ ID NO: 1798610 - RNA, 19 nt, Artificial Sequence
  Description of Artificial Sequence: Synthetic oligonucleotide
aaacuaagacaaacugaua

SEQ ID NO: 1798611 - RNA, 19 nt, Artificial Sequence
  Description of Artificial Sequence: Synthetic oligonucleotide
aggcagaguccagugguuc

SEQ ID NO: 1798612 - RNA, 19 nt, Artificial Sequence
  Description of Artificial Sequence: Synthetic oligonucleotide
caagugcucaaaaggcaga

SEQ ID NO: 1798613 - RNA, 19 nt, Artificial Sequence
  Description of Artificial Sequence: Synthetic oligonucleotide
caucauagaauaccuuaua

SEQ ID NO: 1798614 - RNA, 19 nt, Artificial Sequence
  Description of Artificial Sequence: Synthetic oligonucleotide
aagguucuauacacacaca

SEQ ID NO: 1798615 - RNA, 19 nt, Artificial Sequence
  Description of Artificial Sequence: Synthetic oligonucleotide
aguccuugccuagcacugg

SEQ ID NO: 1798616 - RNA, 19 nt, Artificial Sequence
  Description of Artificial Sequence: Synthetic oligonucleotide
guccuaucuauacaucaua

SEQ ID NO: 1798617 - RNA, 19 nt, Artificial Sequence
  Description of Artificial Sequence: Synthetic oligonucleotide
cucauguuugaaguaaugu

SEQ ID NO: 1798618 - RNA, 19 nt, Artificial Sequence
  Description of Artificial Sequence: Synthetic oligonucleotide
ugccuuaaacucucauguu

SEQ ID NO: 1798619 - RNA, 19 nt, Artificial Sequence
  Description of Artificial Sequence: Synthetic oligonucleotide
uacugcuguccuaucuaua

SEQ ID NO: 1798620 - RNA, 19 nt, Artificial Sequence
  Description of Artificial Sequence: Synthetic oligonucleotide
agcacacuguacauguuau

SEQ ID NO: 1798621 - RNA, 19 nt, Artificial Sequence
  Description of Artificial Sequence: Synthetic oligonucleotide
acaacuagcuauagauuua

SEQ ID NO: 1798622 - RNA, 19 nt, Artificial Sequence
  Description of Artificial Sequence: Synthetic oligonucleotide
ugcugaggcugagaaauuu

SEQ ID NO: 1798623 - RNA, 19 nt, Artificial Sequence
  Description of Artificial Sequence: Synthetic oligonucleotide
cuggguucuaucccuggca

SEQ ID NO: 1798624 - RNA, 19 nt, Artificial Sequence
  Description of Artificial Sequence: Synthetic oligonucleotide
ggaaccaguaagucauaga

SEQ ID NO: 1798625 - RNA, 19 nt, Artificial Sequence
  Description of Artificial Sequence: Synthetic oligonucleotide
ucucggguucuacccucug

SEQ ID NO: 1798626 - RNA, 19 nt, Artificial Sequence
  Description of Artificial Sequence: Synthetic oligonucleotide
cuauggaucuagaguaccu

SEQ ID NO: 1798627 - RNA, 19 nt, Artificial Sequence
  Description of Artificial Sequence: Synthetic oligonucleotide
gcuaacacuuauaaggccu

SEQ ID NO: 1798628 - RNA, 19 nt, Artificial Sequence
  Description of Artificial Sequence: Synthetic oligonucleotide
auacacacacacacacaca

SEQ ID NO: 1798629 - RNA, 19 nt, Artificial Sequence
  Description of Artificial Sequence: Synthetic oligonucleotide
agcuagcugcacaguggcc

SEQ ID NO: 1798630 - RNA, 19 nt, Artificial Sequence
  Description of Artificial Sequence: Synthetic oligonucleotide
cuaucccuggcacugucaa

SEQ ID NO: 1798631 - RNA, 19 nt, Artificial Sequence
  Description of Artificial Sequence: Synthetic oligonucleotide
uuaugugacuauggaucua

SEQ ID NO: 1798632 - RNA, 19 nt, Artificial Sequence
  Description of Artificial Sequence: Synthetic oligonucleotide
ugcaagagcccaggcuggc

SEQ ID NO: 1798633 - RNA, 19 nt, Artificial Sequence
  Description of Artificial Sequence: Synthetic oligonucleotide
ggcaacaacuagcuauaga

SEQ ID NO: 1798634 - RNA, 19 nt, Artificial Sequence
  Description of Artificial Sequence: Synthetic oligonucleotide
caugggucuucuaauccua

SEQ ID NO: 1798635 - RNA, 19 nt, Artificial Sequence
  Description of Artificial Sequence: Synthetic oligonucleotide
auaaggagucgggguuagg

SEQ ID NO: 1798636 - RNA, 19 nt, Artificial Sequence
  Description of Artificial Sequence: Synthetic oligonucleotide
ccuaucuauacaucauaga

SEQ ID NO: 1798637 - RNA, 19 nt, Artificial Sequence
  Description of Artificial Sequence: Synthetic oligonucleotide
uaucccuggcacugucaaa

SEQ ID NO: 1798638 - RNA, 19 nt, Artificial Sequence
  Description of Artificial Sequence: Synthetic oligonucleotide
auacaucauagaauaccuu

SEQ ID NO: 1798639 - RNA, 19 nt, Artificial Sequence
  Description of Artificial Sequence: Synthetic oligonucleotide
uucuacccucuggaaguca

SEQ ID NO: 1798640 - RNA, 19 nt, Artificial Sequence
  Description of Artificial Sequence: Synthetic oligonucleotide
agcauacaaaagagguuau

SEQ ID NO: 1798641 - RNA, 19 nt, Artificial Sequence
  Description of Artificial Sequence: Synthetic oligonucleotide
guaauguuuuggaagccau

SEQ ID NO: 1798642 - RNA, 19 nt, Artificial Sequence
  Description of Artificial Sequence: Synthetic oligonucleotide
gaguaccugcaucuugacu

SEQ ID NO: 1798643 - RNA, 19 nt, Artificial Sequence
  Description of Artificial Sequence: Synthetic oligonucleotide
gagaaggauguagcauaca

SEQ ID NO: 1798644 - RNA, 19 nt, Artificial Sequence
  Description of Artificial Sequence: Synthetic oligonucleotide
ugguuccagauuggacagc

SEQ ID NO: 1798645 - RNA, 19 nt, Artificial Sequence
  Description of Artificial Sequence: Synthetic oligonucleotide
ggcccuagguuugaugccc

SEQ ID NO: 1798646 - RNA, 19 nt, Artificial Sequence
  Description of Artificial Sequence: Synthetic oligonucleotide
acacacacacacacacaca

SEQ ID NO: 1798647 - RNA, 19 nt, Artificial Sequence
  Description of Artificial Sequence: Synthetic oligonucleotide
acacacacacacacacacu

SEQ ID NO: 1798648 - RNA, 19 nt, Artificial Sequence
  Description of Artificial Sequence: Synthetic oligonucleotide
ucgggguuaggguguggau

SEQ ID NO: 1798649 - RNA, 19 nt, Artificial Sequence
  Description of Artificial Sequence: Synthetic oligonucleotide
cugcuguccuaucuauaca

SEQ ID NO: 1798650 - RNA, 19 nt, Artificial Sequence
  Description of Artificial Sequence: Synthetic oligonucleotide
ggaucagugguagaguccu

SEQ ID NO: 1798651 - RNA, 19 nt, Artificial Sequence
  Description of Artificial Sequence: Synthetic oligonucleotide
caugucauauacaggucuu

SEQ ID NO: 1798652 - RNA, 19 nt, Artificial Sequence
  Description of Artificial Sequence: Synthetic oligonucleotide
cacuuacaguuaaugggcu

SEQ ID NO: 1798653 - RNA, 19 nt, Artificial Sequence
  Description of Artificial Sequence: Synthetic oligonucleotide
cuaauucuguugccuuaaa

SEQ ID NO: 1798654 - RNA, 19 nt, Artificial Sequence
  Description of Artificial Sequence: Synthetic oligonucleotide
caacaacuagcuauagauu

SEQ ID NO: 1798655 - RNA, 19 nt, Artificial Sequence
  Description of Artificial Sequence: Synthetic oligonucleotide
guagcauacaaaagagguu

SEQ ID NO: 1798656 - RNA, 19 nt, Artificial Sequence
  Description of Artificial Sequence: Synthetic oligonucleotide
gcaagcaauggaguaaaua

SEQ ID NO: 1798657 - RNA, 19 nt, Artificial Sequence
  Description of Artificial Sequence: Synthetic oligonucleotide
ggccuagaacucacaaggc

SEQ ID NO: 1798658 - RNA, 19 nt, Artificial Sequence
  Description of Artificial Sequence: Synthetic oligonucleotide
ccaagcugcaagagcccag

SEQ ID NO: 1798659 - RNA, 19 nt, Artificial Sequence
  Description of Artificial Sequence: Synthetic oligonucleotide
gucauacacuuacuuuuau

SEQ ID NO: 1798660 - RNA, 19 nt, Artificial Sequence
  Description of Artificial Sequence: Synthetic oligonucleotide
gguuugaugcccagcacua

SEQ ID NO: 1798661 - RNA, 19 nt, Artificial Sequence
  Description of Artificial Sequence: Synthetic oligonucleotide
gcuaauucuguugccuuaa

SEQ ID NO: 1798662 - RNA, 19 nt, Artificial Sequence
  Description of Artificial Sequence: Synthetic oligonucleotide
gccuuaaacucucauguuu

SEQ ID NO: 1798663 - RNA, 19 nt, Artificial Sequence
  Description of Artificial Sequence: Synthetic oligonucleotide
caaggcucucggguucuac

SEQ ID NO: 1798664 - RNA, 19 nt, Artificial Sequence
  Description of Artificial Sequence: Synthetic oligonucleotide
cagauuggacagcaugggu

SEQ ID NO: 1798665 - RNA, 19 nt, Artificial Sequence
  Description of Artificial Sequence: Synthetic oligonucleotide
cucucauguuugaaguaau

SEQ ID NO: 1798666 - RNA, 19 nt, Artificial Sequence
  Description of Artificial Sequence: Synthetic oligonucleotide
gcacauaagcaugucauau

SEQ ID NO: 1798667 - RNA, 19 nt, Artificial Sequence
  Description of Artificial Sequence: Synthetic oligonucleotide
uagaacucacaaggcccua

SEQ ID NO: 1798668 - RNA, 19 nt, Artificial Sequence
  Description of Artificial Sequence: Synthetic oligonucleotide
gcaugggucuucuaauccu

SEQ ID NO: 1798669 - RNA, 19 nt, Artificial Sequence
  Description of Artificial Sequence: Synthetic oligonucleotide
ggcacuggguucuaucccu

SEQ ID NO: 1798670 - RNA, 19 nt, Artificial Sequence
  Description of Artificial Sequence: Synthetic oligonucleotide
augugacuauggaucuaga

SEQ ID NO: 1798671 - RNA, 19 nt, Artificial Sequence
  Description of Artificial Sequence: Synthetic oligonucleotide
cuacugcuguccuaucuau

SEQ ID NO: 1798672 - RNA, 19 nt, Artificial Sequence
  Description of Artificial Sequence: Synthetic oligonucleotide
uaccugcaucuugacuggu

SEQ ID NO: 1798673 - RNA, 19 nt, Artificial Sequence
  Description of Artificial Sequence: Synthetic oligonucleotide
ccucacaugguauuugaau

SEQ ID NO: 1798674 - RNA, 19 nt, Artificial Sequence
  Description of Artificial Sequence: Synthetic oligonucleotide
gguguggaucagugguaga

SEQ ID NO: 1798675 - RNA, 19 nt, Artificial Sequence
  Description of Artificial Sequence: Synthetic oligonucleotide
gggcauagcuaacacuuau

SEQ ID NO: 1798676 - RNA, 19 nt, Artificial Sequence
  Description of Artificial Sequence: Synthetic oligonucleotide
gccagucaaaaguguucca

SEQ ID NO: 1798677 - RNA, 19 nt, Artificial Sequence
  Description of Artificial Sequence: Synthetic oligonucleotide
cuguugccuuaaacucuca

SEQ ID NO: 1798678 - RNA, 19 nt, Artificial Sequence
  Description of Artificial Sequence: Synthetic oligonucleotide
ggcauagcuaacacuuaua

SEQ ID NO: 1798679 - RNA, 19 nt, Artificial Sequence
  Description of Artificial Sequence: Synthetic oligonucleotide
caugggcaacaacuagcua

SEQ ID NO: 1798680 - RNA, 19 nt, Artificial Sequence
  Description of Artificial Sequence: Synthetic oligonucleotide
agcaagcaauggaguaaau

SEQ ID NO: 1798681 - RNA, 19 nt, Artificial Sequence
  Description of Artificial Sequence: Synthetic oligonucleotide
gcagaguccagugguucca

SEQ ID NO: 1798682 - RNA, 19 nt, Artificial Sequence
  Description of Artificial Sequence: Synthetic oligonucleotide
cacuggagaggcacugggu

SEQ ID NO: 1798683 - RNA, 19 nt, Artificial Sequence
  Description of Artificial Sequence: Synthetic oligonucleotide
gaggaaccaguaagucaua

SEQ ID NO: 1798684 - RNA, 19 nt, Artificial Sequence
  Description of Artificial Sequence: Synthetic oligonucleotide
cuacccucuggaagucaua

SEQ ID NO: 1798685 - RNA, 19 nt, Artificial Sequence
  Description of Artificial Sequence: Synthetic oligonucleotide
cacaaggcccuagguuuga

SEQ ID NO: 1798686 - RNA, 19 nt, Artificial Sequence
  Description of Artificial Sequence: Synthetic oligonucleotide
gaacuaccccaagcugcaa

SEQ ID NO: 1798687 - RNA, 19 nt, Artificial Sequence
  Description of Artificial Sequence: Synthetic oligonucleotide
cccuagguuugaugcccag

SEQ ID NO: 1798688 - RNA, 19 nt, Artificial Sequence
  Description of Artificial Sequence: Synthetic oligonucleotide
gcaauggaguaaauauuau

SEQ ID NO: 1798689 - RNA, 19 nt, Artificial Sequence
  Description of Artificial Sequence: Synthetic oligonucleotide
aggcuggcacugaacuuuu

SEQ ID NO: 1798690 - RNA, 19 nt, Artificial Sequence
  Description of Artificial Sequence: Synthetic oligonucleotide
agccucugcuggaauuaua

SEQ ID NO: 1798691 - RNA, 19 nt, Artificial Sequence
  Description of Artificial Sequence: Synthetic oligonucleotide
cucucggguucuacccucu

SEQ ID NO: 1798692 - RNA, 19 nt, Artificial Sequence
  Description of Artificial Sequence: Synthetic oligonucleotide
ccucuggaagucauacacu

SEQ ID NO: 1798693 - RNA, 19 nt, Artificial Sequence
  Description of Artificial Sequence: Synthetic oligonucleotide
ggguucuaucccuggcacu

SEQ ID NO: 1798694 - RNA, 19 nt, Artificial Sequence
  Description of Artificial Sequence: Synthetic oligonucleotide
gcucuacugcuguccuauc

SEQ ID NO: 1798695 - RNA, 19 nt, Artificial Sequence
  Description of Artificial Sequence: Synthetic oligonucleotide
ccagucaaaaguguuccau

SEQ ID NO: 1798696 - RNA, 19 nt, Artificial Sequence
  Description of Artificial Sequence: Synthetic oligonucleotide
ggcucucggguucuacccu

SEQ ID NO: 1798697 - RNA, 19 nt, Artificial Sequence
  Description of Artificial Sequence: Synthetic oligonucleotide
caagcacacuguacauguu

SEQ ID NO: 1798698 - RNA, 19 nt, Artificial Sequence
  Description of Artificial Sequence: Synthetic oligonucleotide
aggcacugagaaggaugua

SEQ ID NO: 1798699 - RNA, 19 nt, Artificial Sequence
  Description of Artificial Sequence: Synthetic oligonucleotide
gcaagagcccaggcuggca

SEQ ID NO: 1798700 - RNA, 19 nt, Artificial Sequence
  Description of Artificial Sequence: Synthetic oligonucleotide
gcccuagguuugaugccca

SEQ ID NO: 1798701 - RNA, 19 nt, Artificial Sequence
  Description of Artificial Sequence: Synthetic oligonucleotide
ccaguaagucauagauuuu

SEQ ID NO: 1798702 - RNA, 19 nt, Artificial Sequence
  Description of Artificial Sequence: Synthetic oligonucleotide
gggcucuacugcuguccua

SEQ ID NO: 1798703 - RNA, 19 nt, Artificial Sequence
  Description of Artificial Sequence: Synthetic oligonucleotide
agaaagcgaacauagcccg

SEQ ID NO: 1798704 - RNA, 19 nt, Artificial Sequence
  Description of Artificial Sequence: Synthetic oligonucleotide
aacauagcccgugacaggg

SEQ ID NO: 1798705 - RNA, 19 nt, Artificial Sequence
  Description of Artificial Sequence: Synthetic oligonucleotide
uuugacagucacuacgaag

SEQ ID NO: 1798706 - RNA, 19 nt, Artificial Sequence
  Description of Artificial Sequence: Synthetic oligonucleotide
acaucgaagguggaaaagc

SEQ ID NO: 1798707 - RNA, 19 nt, Artificial Sequence
  Description of Artificial Sequence: Synthetic oligonucleotide
uguuugacagucacuacga

SEQ ID NO: 1798708 - RNA, 19 nt, Artificial Sequence
  Description of Artificial Sequence: Synthetic oligonucleotide
uccuuuuguugcgagaucg

SEQ ID NO: 1798709 - RNA, 19 nt, Artificial Sequence
  Description of Artificial Sequence: Synthetic oligonucleotide
cuguuugacagucacuacg

SEQ ID NO: 1798710 - RNA, 19 nt, Artificial Sequence
  Description of Artificial Sequence: Synthetic oligonucleotide
cagaaagcgaacauagccc

SEQ ID NO: 1798711 - RNA, 19 nt, Artificial Sequence
  Description of Artificial Sequence: Synthetic oligonucleotide
gacauggccuuucugggcg

SEQ ID NO: 1798712 - RNA, 19 nt, Artificial Sequence
  Description of Artificial Sequence: Synthetic oligonucleotide
ugugcagaccuuauaggcc

SEQ ID NO: 1798713 - RNA, 19 nt, Artificial Sequence
  Description of Artificial Sequence: Synthetic oligonucleotide
guucagaaagcgaacauag

SEQ ID NO: 1798714 - RNA, 19 nt, Artificial Sequence
  Description of Artificial Sequence: Synthetic oligonucleotide
uuagggagaaucuucuuuc

SEQ ID NO: 1798715 - RNA, 19 nt, Artificial Sequence
  Description of Artificial Sequence: Synthetic oligonucleotide
ucuagaagccuguuuguca

SEQ ID NO: 1798716 - RNA, 19 nt, Artificial Sequence
  Description of Artificial Sequence: Synthetic oligonucleotide
uucaggagcguguucauga

SEQ ID NO: 1798717 - RNA, 19 nt, Artificial Sequence
  Description of Artificial Sequence: Synthetic oligonucleotide
uuuguugcgagaucggguc

SEQ ID NO: 1798718 - RNA, 19 nt, Artificial Sequence
  Description of Artificial Sequence: Synthetic oligonucleotide
ucuuggaucuucucugugc

SEQ ID NO: 1798719 - RNA, 19 nt, Artificial Sequence
  Description of Artificial Sequence: Synthetic oligonucleotide
uugacacgcgcaaucagcc

SEQ ID NO: 1798720 - RNA, 19 nt, Artificial Sequence
  Description of Artificial Sequence: Synthetic oligonucleotide
accgcugcuucucugacgg

SEQ ID NO: 1798721 - RNA, 19 nt, Artificial Sequence
  Description of Artificial Sequence: Synthetic oligonucleotide
ucaucucccguucuagaag

SEQ ID NO: 1798722 - RNA, 19 nt, Artificial Sequence
  Description of Artificial Sequence: Synthetic oligonucleotide
cuugacacgcgcaaucagc

SEQ ID NO: 1798723 - RNA, 19 nt, Artificial Sequence
  Description of Artificial Sequence: Synthetic oligonucleotide
uuuuguugcgagaucgggu

SEQ ID NO: 1798724 - RNA, 19 nt, Artificial Sequence
  Description of Artificial Sequence: Synthetic oligonucleotide
uucaugagcccagagccgg

SEQ ID NO: 1798725 - RNA, 19 nt, Artificial Sequence
  Description of Artificial Sequence: Synthetic oligonucleotide
cuagaagccuguuugucac

SEQ ID NO: 1798726 - RNA, 19 nt, Artificial Sequence
  Description of Artificial Sequence: Synthetic oligonucleotide
ucgaagguggaaaagccau

SEQ ID NO: 1798727 - RNA, 19 nt, Artificial Sequence
  Description of Artificial Sequence: Synthetic oligonucleotide
uucagaaagcgaacauagc

SEQ ID NO: 1798728 - RNA, 19 nt, Artificial Sequence
  Description of Artificial Sequence: Synthetic oligonucleotide
caucucccguucuagaagc

SEQ ID NO: 1798729 - RNA, 19 nt, Artificial Sequence
  Description of Artificial Sequence: Synthetic oligonucleotide
gaccuuauaggccuccgac

SEQ ID NO: 1798730 - RNA, 19 nt, Artificial Sequence
  Description of Artificial Sequence: Synthetic oligonucleotide
acuacgaaggccccgugcu

SEQ ID NO: 1798731 - RNA, 19 nt, Artificial Sequence
  Description of Artificial Sequence: Synthetic oligonucleotide
ucuucuugccuuugggcca

SEQ ID NO: 1798732 - RNA, 19 nt, Artificial Sequence
  Description of Artificial Sequence: Synthetic oligonucleotide
gauccugcccgccaccccg

SEQ ID NO: 1798733 - RNA, 19 nt, Artificial Sequence
  Description of Artificial Sequence: Synthetic oligonucleotide
uugccuuugggccagccuc

SEQ ID NO: 1798734 - RNA, 19 nt, Artificial Sequence
  Description of Artificial Sequence: Synthetic oligonucleotide
uccuguuugacagucacua

SEQ ID NO: 1798735 - RNA, 19 nt, Artificial Sequence
  Description of Artificial Sequence: Synthetic oligonucleotide
cuuuuguugcgagaucggg

SEQ ID NO: 1798736 - RNA, 19 nt, Artificial Sequence
  Description of Artificial Sequence: Synthetic oligonucleotide
agaguaggcgucucuccgg

SEQ ID NO: 1798737 - RNA, 19 nt, Artificial Sequence
  Description of Artificial Sequence: Synthetic oligonucleotide
agggagaaucuucuuucuc

SEQ ID NO: 1798738 - RNA, 19 nt, Artificial Sequence
  Description of Artificial Sequence: Synthetic oligonucleotide
cuucagugaagauggggac

SEQ ID NO: 1798739 - RNA, 19 nt, Artificial Sequence
  Description of Artificial Sequence: Synthetic oligonucleotide
uccgacugcugauaugccc

SEQ ID NO: 1798740 - RNA, 19 nt, Artificial Sequence
  Description of Artificial Sequence: Synthetic oligonucleotide
uugugcccauucaggagcg

SEQ ID NO: 1798741 - RNA, 19 nt, Artificial Sequence
  Description of Artificial Sequence: Synthetic oligonucleotide
ugacagucacuacgaaggc

SEQ ID NO: 1798742 - RNA, 19 nt, Artificial Sequence
  Description of Artificial Sequence: Synthetic oligonucleotide
uuucucucccacacgggga

SEQ ID NO: 1798743 - RNA, 19 nt, Artificial Sequence
  Description of Artificial Sequence: Synthetic oligonucleotide
uguugcgagaucggguccg

SEQ ID NO: 1798744 - RNA, 19 nt, Artificial Sequence
  Description of Artificial Sequence: Synthetic oligonucleotide
aauuugcucccgacgcucg

SEQ ID NO: 1798745 - RNA, 19 nt, Artificial Sequence
  Description of Artificial Sequence: Synthetic oligonucleotide
agccgcgccauguagaagu

SEQ ID NO: 1798746 - RNA, 19 nt, Artificial Sequence
  Description of Artificial Sequence: Synthetic oligonucleotide
uggugaucuccggaaaggg

SEQ ID NO: 1798747 - RNA, 19 nt, Artificial Sequence
  Description of Artificial Sequence: Synthetic oligonucleotide
caaguacugcuguuucucc

SEQ ID NO: 1798748 - RNA, 19 nt, Artificial Sequence
  Description of Artificial Sequence: Synthetic oligonucleotide
ugcgagaucggguccggag

SEQ ID NO: 1798749 - RNA, 19 nt, Artificial Sequence
  Description of Artificial Sequence: Synthetic oligonucleotide
agcgaacauagcccgugac

SEQ ID NO: 1798750 - RNA, 19 nt, Artificial Sequence
  Description of Artificial Sequence: Synthetic oligonucleotide
gagauccuuuuguugcgag

SEQ ID NO: 1798751 - RNA, 19 nt, Artificial Sequence
  Description of Artificial Sequence: Synthetic oligonucleotide
uucagugaagauggggaca

SEQ ID NO: 1798752 - RNA, 19 nt, Artificial Sequence
  Description of Artificial Sequence: Synthetic oligonucleotide
cauacucugcguguggcgc

SEQ ID NO: 1798753 - RNA, 19 nt, Artificial Sequence
  Description of Artificial Sequence: Synthetic oligonucleotide
gccuguuugucacaggugc

SEQ ID NO: 1798754 - RNA, 19 nt, Artificial Sequence
  Description of Artificial Sequence: Synthetic oligonucleotide
cuugccuccugcaggcgcg

SEQ ID NO: 1798755 - RNA, 19 nt, Artificial Sequence
  Description of Artificial Sequence: Synthetic oligonucleotide
gacaucgaagguggaaaag

SEQ ID NO: 1798756 - RNA, 19 nt, Artificial Sequence
  Description of Artificial Sequence: Synthetic oligonucleotide
gacgcucguucagaaagcg

SEQ ID NO: 1798757 - RNA, 19 nt, Artificial Sequence
  Description of Artificial Sequence: Synthetic oligonucleotide
uuauaggccuccgacugcu

SEQ ID NO: 1798758 - RNA, 19 nt, Artificial Sequence
  Description of Artificial Sequence: Synthetic oligonucleotide
gacacgcgcaaucagccuc

SEQ ID NO: 1798759 - RNA, 19 nt, Artificial Sequence
  Description of Artificial Sequence: Synthetic oligonucleotide
accuuauaggccuccgacu

SEQ ID NO: 1798760 - RNA, 19 nt, Artificial Sequence
  Description of Artificial Sequence: Synthetic oligonucleotide
cuuauaggccuccgacugc

SEQ ID NO: 1798761 - RNA, 19 nt, Artificial Sequence
  Description of Artificial Sequence: Synthetic oligonucleotide
cauagcccgugacaggggc

SEQ ID NO: 1798762 - RNA, 19 nt, Artificial Sequence
  Description of Artificial Sequence: Synthetic oligonucleotide
aucuuggugaucuccggaa

SEQ ID NO: 1798763 - RNA, 19 nt, Artificial Sequence
  Description of Artificial Sequence: Synthetic oligonucleotide
ugccccgagauccuuuugu

SEQ ID NO: 1798764 - RNA, 19 nt, Artificial Sequence
  Description of Artificial Sequence: Synthetic oligonucleotide
cccgagauccuuuuguugc

SEQ ID NO: 1798765 - RNA, 19 nt, Artificial Sequence
  Description of Artificial Sequence: Synthetic oligonucleotide
ucguucagaaagcgaacau

SEQ ID NO: 1798766 - RNA, 19 nt, Artificial Sequence
  Description of Artificial Sequence: Synthetic oligonucleotide
gaugggaaccccaggccag

SEQ ID NO: 1798767 - RNA, 19 nt, Artificial Sequence
  Description of Artificial Sequence: Synthetic oligonucleotide
gaagccuguuugucacagg

SEQ ID NO: 1798768 - RNA, 19 nt, Artificial Sequence
  Description of Artificial Sequence: Synthetic oligonucleotide
gcgugcuuuguuuuggucc

SEQ ID NO: 1798769 - RNA, 19 nt, Artificial Sequence
  Description of Artificial Sequence: Synthetic oligonucleotide
uuguugcgagaucgggucc

SEQ ID NO: 1798770 - RNA, 19 nt, Artificial Sequence
  Description of Artificial Sequence: Synthetic oligonucleotide
auccuuuuguugcgagauc

SEQ ID NO: 1798771 - RNA, 19 nt, Artificial Sequence
  Description of Artificial Sequence: Synthetic oligonucleotide
ugcccauucaggagcgugu

SEQ ID NO: 1798772 - RNA, 19 nt, Artificial Sequence
  Description of Artificial Sequence: Synthetic oligonucleotide
ucccacacggggacccucg

SEQ ID NO: 1798773 - RNA, 19 nt, Artificial Sequence
  Description of Artificial Sequence: Synthetic oligonucleotide
cucgcugcgcuccuguuug

SEQ ID NO: 1798774 - RNA, 19 nt, Artificial Sequence
  Description of Artificial Sequence: Synthetic oligonucleotide
agauccuuuuguugcgaga

SEQ ID NO: 1798775 - RNA, 19 nt, Artificial Sequence
  Description of Artificial Sequence: Synthetic oligonucleotide
uucuagaagccuguuuguc

SEQ ID NO: 1798776 - RNA, 19 nt, Artificial Sequence
  Description of Artificial Sequence: Synthetic oligonucleotide
gaauuugcucccgacgcuc

SEQ ID NO: 1798777 - RNA, 19 nt, Artificial Sequence
  Description of Artificial Sequence: Synthetic oligonucleotide
uccagcgucccgagaguag

SEQ ID NO: 1798778 - RNA, 19 nt, Artificial Sequence
  Description of Artificial Sequence: Synthetic oligonucleotide
ucugacggcugcagcuugc

SEQ ID NO: 1798779 - RNA, 19 nt, Artificial Sequence
  Description of Artificial Sequence: Synthetic oligonucleotide
ccuuauaggccuccgacug

SEQ ID NO: 1798780 - RNA, 19 nt, Artificial Sequence
  Description of Artificial Sequence: Synthetic oligonucleotide
uaccgcugcuucucugacg

SEQ ID NO: 1798781 - RNA, 19 nt, Artificial Sequence
  Description of Artificial Sequence: Synthetic oligonucleotide
cucauacucugcguguggc

SEQ ID NO: 1798782 - RNA, 19 nt, Artificial Sequence
  Description of Artificial Sequence: Synthetic oligonucleotide
agugcgaauuugcucccga

SEQ ID NO: 1798783 - RNA, 19 nt, Artificial Sequence
  Description of Artificial Sequence: Synthetic oligonucleotide
auaggccuccgacugcuga

SEQ ID NO: 1798784 - RNA, 19 nt, Artificial Sequence
  Description of Artificial Sequence: Synthetic oligonucleotide
ugcucgcuggccacccgcg

SEQ ID NO: 1798785 - RNA, 19 nt, Artificial Sequence
  Description of Artificial Sequence: Synthetic oligonucleotide
uccuugacacgcgcaauca

SEQ ID NO: 1798786 - RNA, 19 nt, Artificial Sequence
  Description of Artificial Sequence: Synthetic oligonucleotide
cuuucugggcgggaccugg

SEQ ID NO: 1798787 - RNA, 19 nt, Artificial Sequence
  Description of Artificial Sequence: Synthetic oligonucleotide
caggccagugccccggacg

SEQ ID NO: 1798788 - RNA, 19 nt, Artificial Sequence
  Description of Artificial Sequence: Synthetic oligonucleotide
auaugcccacagcuccuuc

SEQ ID NO: 1798789 - RNA, 19 nt, Artificial Sequence
  Description of Artificial Sequence: Synthetic oligonucleotide
guuugucacaggugcucgc

SEQ ID NO: 1798790 - RNA, 19 nt, Artificial Sequence
  Description of Artificial Sequence: Synthetic oligonucleotide
aaggccccgugcuggcccg

SEQ ID NO: 1798791 - RNA, 19 nt, Artificial Sequence
  Description of Artificial Sequence: Synthetic oligonucleotide
agggauccugcccgccacc

SEQ ID NO: 1798792 - RNA, 19 nt, Artificial Sequence
  Description of Artificial Sequence: Synthetic oligonucleotide
ccgacgcucguucagaaag

SEQ ID NO: 1798793 - RNA, 19 nt, Artificial Sequence
  Description of Artificial Sequence: Synthetic oligonucleotide
cagcuugcuccacucggcg

SEQ ID NO: 1798794 - RNA, 19 nt, Artificial Sequence
  Description of Artificial Sequence: Synthetic oligonucleotide
gcguucugcuccucgaagg

SEQ ID NO: 1798795 - RNA, 19 nt, Artificial Sequence
  Description of Artificial Sequence: Synthetic oligonucleotide
cacuacgaaggccccgugc

SEQ ID NO: 1798796 - RNA, 19 nt, Artificial Sequence
  Description of Artificial Sequence: Synthetic oligonucleotide
ucucaugcugcgcgggguc

SEQ ID NO: 1798797 - RNA, 19 nt, Artificial Sequence
  Description of Artificial Sequence: Synthetic oligonucleotide
agaccuuauaggccuccga

SEQ ID NO: 1798798 - RNA, 19 nt, Artificial Sequence
  Description of Artificial Sequence: Synthetic oligonucleotide
ucccguucuagaagccugu

SEQ ID NO: 1798799 - RNA, 19 nt, Artificial Sequence
  Description of Artificial Sequence: Synthetic oligonucleotide
agaucggguccggaggccg

SEQ ID NO: 1798800 - RNA, 19 nt, Artificial Sequence
  Description of Artificial Sequence: Synthetic oligonucleotide
cucgcgugcuuuguuuugg

SEQ ID NO: 1798801 - RNA, 19 nt, Artificial Sequence
  Description of Artificial Sequence: Synthetic oligonucleotide
ggaaggcggaucccgaggc

SEQ ID NO: 1798802 - RNA, 19 nt, Artificial Sequence
  Description of Artificial Sequence: Synthetic oligonucleotide
gauccuuuuguugcgagau

SEQ ID NO: 1798803 - RNA, 19 nt, Artificial Sequence
  Description of Artificial Sequence: Synthetic oligonucleotide
ucucugugcagaccuuaua

SEQ ID NO: 1798804 - RNA, 19 nt, Artificial Sequence
  Description of Artificial Sequence: Synthetic oligonucleotide
ugccuuugggccagccucu

SEQ ID NO: 1798805 - RNA, 19 nt, Artificial Sequence
  Description of Artificial Sequence: Synthetic oligonucleotide
agccucucuucuucaccgg

SEQ ID NO: 1798806 - RNA, 19 nt, Artificial Sequence
  Description of Artificial Sequence: Synthetic oligonucleotide
uaggcgucucuccggugcc

SEQ ID NO: 1798807 - RNA, 19 nt, Artificial Sequence
  Description of Artificial Sequence: Synthetic oligonucleotide
gaaggcggaucccgaggcc

SEQ ID NO: 1798808 - RNA, 19 nt, Artificial Sequence
  Description of Artificial Sequence: Synthetic oligonucleotide
gaggccgggagguccucgg

SEQ ID NO: 1798809 - RNA, 19 nt, Artificial Sequence
  Description of Artificial Sequence: Synthetic oligonucleotide
cucgauggccccgugcagc

SEQ ID NO: 1798810 - RNA, 19 nt, Artificial Sequence
  Description of Artificial Sequence: Synthetic oligonucleotide
agucacuacgaaggccccg

SEQ ID NO: 1798811 - RNA, 19 nt, Artificial Sequence
  Description of Artificial Sequence: Synthetic oligonucleotide
auacucugcguguggcgcu

SEQ ID NO: 1798812 - RNA, 19 nt, Artificial Sequence
  Description of Artificial Sequence: Synthetic oligonucleotide
guggcgagugcgaauuugc

SEQ ID NO: 1798813 - RNA, 19 nt, Artificial Sequence
  Description of Artificial Sequence: Synthetic oligonucleotide
gcgagaucggguccggagg

SEQ ID NO: 1798814 - RNA, 19 nt, Artificial Sequence
  Description of Artificial Sequence: Synthetic oligonucleotide
gugcagaccuuauaggccu

SEQ ID NO: 1798815 - RNA, 19 nt, Artificial Sequence
  Description of Artificial Sequence: Synthetic oligonucleotide
agcucauacucugcgugug

SEQ ID NO: 1798816 - RNA, 19 nt, Artificial Sequence
  Description of Artificial Sequence: Synthetic oligonucleotide
ugacacgcgcaaucagccu

SEQ ID NO: 1798817 - RNA, 19 nt, Artificial Sequence
  Description of Artificial Sequence: Synthetic oligonucleotide
cugggcgggaccuggaaca

SEQ ID NO: 1798818 - RNA, 19 nt, Artificial Sequence
  Description of Artificial Sequence: Synthetic oligonucleotide
agcgucccgagaguaggcg

SEQ ID NO: 1798819 - RNA, 19 nt, Artificial Sequence
  Description of Artificial Sequence: Synthetic oligonucleotide
gaucuccggaaagggcagg

SEQ ID NO: 1798820 - RNA, 19 nt, Artificial Sequence
  Description of Artificial Sequence: Synthetic oligonucleotide
cgaacauagcccgugacag

SEQ ID NO: 1798821 - RNA, 19 nt, Artificial Sequence
  Description of Artificial Sequence: Synthetic oligonucleotide
uggggaaggcggaucccga

SEQ ID NO: 1798822 - RNA, 19 nt, Artificial Sequence
  Description of Artificial Sequence: Synthetic oligonucleotide
cucguucagaaagcgaaca

SEQ ID NO: 1798823 - RNA, 19 nt, Artificial Sequence
  Description of Artificial Sequence: Synthetic oligonucleotide
agccucucaugcugcgcgg

SEQ ID NO: 1798824 - RNA, 19 nt, Artificial Sequence
  Description of Artificial Sequence: Synthetic oligonucleotide
gggaaggcggaucccgagg

SEQ ID NO: 1798825 - RNA, 19 nt, Artificial Sequence
  Description of Artificial Sequence: Synthetic oligonucleotide
cuugggcccauuagggaga

SEQ ID NO: 1798826 - RNA, 19 nt, Artificial Sequence
  Description of Artificial Sequence: Synthetic oligonucleotide
ucaugagcccagagccgga

SEQ ID NO: 1798827 - RNA, 19 nt, Artificial Sequence
  Description of Artificial Sequence: Synthetic oligonucleotide
ucuccggugccgggcaccg

SEQ ID NO: 1798828 - RNA, 19 nt, Artificial Sequence
  Description of Artificial Sequence: Synthetic oligonucleotide
agagccggaguccuccuuu

SEQ ID NO: 1798829 - RNA, 19 nt, Artificial Sequence
  Description of Artificial Sequence: Synthetic oligonucleotide
cuucuugccuuugggccag

SEQ ID NO: 1798830 - RNA, 19 nt, Artificial Sequence
  Description of Artificial Sequence: Synthetic oligonucleotide
ccuuuuguugcgagaucgg

SEQ ID NO: 1798831 - RNA, 19 nt, Artificial Sequence
  Description of Artificial Sequence: Synthetic oligonucleotide
uugcucccgacgcucguuc

SEQ ID NO: 1798832 - RNA, 19 nt, Artificial Sequence
  Description of Artificial Sequence: Synthetic oligonucleotide
gagugcgaauuugcucccg

SEQ ID NO: 1798833 - RNA, 19 nt, Artificial Sequence
  Description of Artificial Sequence: Synthetic oligonucleotide
gagcguguucaugagccca

SEQ ID NO: 1798834 - RNA, 19 nt, Artificial Sequence
  Description of Artificial Sequence: Synthetic oligonucleotide
gcucauacucugcgugugg

SEQ ID NO: 1798835 - RNA, 19 nt, Artificial Sequence
  Description of Artificial Sequence: Synthetic oligonucleotide
ucacuacgaaggccccgug

SEQ ID NO: 1798836 - RNA, 19 nt, Artificial Sequence
  Description of Artificial Sequence: Synthetic oligonucleotide
ggugaucuccggaaagggc

SEQ ID NO: 1798837 - RNA, 19 nt, Artificial Sequence
  Description of Artificial Sequence: Synthetic oligonucleotide
agcguguucaugagcccag

SEQ ID NO: 1798838 - RNA, 19 nt, Artificial Sequence
  Description of Artificial Sequence: Synthetic oligonucleotide
ucgcgcgcgcagcucauac

SEQ ID NO: 1798839 - RNA, 19 nt, Artificial Sequence
  Description of Artificial Sequence: Synthetic oligonucleotide
aggaucuccuugacacgcg

SEQ ID NO: 1798840 - RNA, 19 nt, Artificial Sequence
  Description of Artificial Sequence: Synthetic oligonucleotide
cagaccuuauaggccuccg

SEQ ID NO: 1798841 - RNA, 19 nt, Artificial Sequence
  Description of Artificial Sequence: Synthetic oligonucleotide
aguccagcgucccgagagu

SEQ ID NO: 1798842 - RNA, 19 nt, Artificial Sequence
  Description of Artificial Sequence: Synthetic oligonucleotide
ggaucuccuugacacgcgc

SEQ ID NO: 1798843 - RNA, 19 nt, Artificial Sequence
  Description of Artificial Sequence: Synthetic oligonucleotide
cuccgacugcugauaugcc

SEQ ID NO: 1798844 - RNA, 19 nt, Artificial Sequence
  Description of Artificial Sequence: Synthetic oligonucleotide
agguccggguggcgagugc

SEQ ID NO: 1798845 - RNA, 19 nt, Artificial Sequence
  Description of Artificial Sequence: Synthetic oligonucleotide
gcggggucgcgcucgaugg

SEQ ID NO: 1798846 - RNA, 19 nt, Artificial Sequence
  Description of Artificial Sequence: Synthetic oligonucleotide
guucuagaagccuguuugu

SEQ ID NO: 1798847 - RNA, 19 nt, Artificial Sequence
  Description of Artificial Sequence: Synthetic oligonucleotide
cuacgaaggccccgugcug

SEQ ID NO: 1798848 - RNA, 19 nt, Artificial Sequence
  Description of Artificial Sequence: Synthetic oligonucleotide
cgcaaucagccucucaugc

SEQ ID NO: 1798849 - RNA, 19 nt, Artificial Sequence
  Description of Artificial Sequence: Synthetic oligonucleotide
uaggccuccgacugcugau

SEQ ID NO: 1798850 - RNA, 19 nt, Artificial Sequence
  Description of Artificial Sequence: Synthetic oligonucleotide
guggcgcugcagcaccgcg

SEQ ID NO: 1798851 - RNA, 19 nt, Artificial Sequence
  Description of Artificial Sequence: Synthetic oligonucleotide
guuugacagucacuacgaa

SEQ ID NO: 1798852 - RNA, 19 nt, Artificial Sequence
  Description of Artificial Sequence: Synthetic oligonucleotide
ggcgggaccuggaacagag

SEQ ID NO: 1798853 - RNA, 19 nt, Artificial Sequence
  Description of Artificial Sequence: Synthetic oligonucleotide
accgcguucugcuccucga

SEQ ID NO: 1798854 - RNA, 19 nt, Artificial Sequence
  Description of Artificial Sequence: Synthetic oligonucleotide
gcgcagcucauacucugcg

SEQ ID NO: 1798855 - RNA, 19 nt, Artificial Sequence
  Description of Artificial Sequence: Synthetic oligonucleotide
gcugauaugcccacagcuc

SEQ ID NO: 1798856 - RNA, 19 nt, Artificial Sequence
  Description of Artificial Sequence: Synthetic oligonucleotide
agacgcucgcgcgcgcagc

SEQ ID NO: 1798857 - RNA, 19 nt, Artificial Sequence
  Description of Artificial Sequence: Synthetic oligonucleotide
aguaggcgucucuccggug

SEQ ID NO: 1798858 - RNA, 19 nt, Artificial Sequence
  Description of Artificial Sequence: Synthetic oligonucleotide
ccgagauccuuuuguugcg

SEQ ID NO: 1798859 - RNA, 19 nt, Artificial Sequence
  Description of Artificial Sequence: Synthetic oligonucleotide
caugagcccagagccggag

SEQ ID NO: 1798860 - RNA, 19 nt, Artificial Sequence
  Description of Artificial Sequence: Synthetic oligonucleotide
gcgaacauagcccgugaca

SEQ ID NO: 1798861 - RNA, 19 nt, Artificial Sequence
  Description of Artificial Sequence: Synthetic oligonucleotide
acggggacccucgcugcgc

SEQ ID NO: 1798862 - RNA, 19 nt, Artificial Sequence
  Description of Artificial Sequence: Synthetic oligonucleotide
ucgcgugcuuuguuuuggu

SEQ ID NO: 1798863 - RNA, 19 nt, Artificial Sequence
  Description of Artificial Sequence: Synthetic oligonucleotide
gcaacucugccucgcgugc

SEQ ID NO: 1798864 - RNA, 19 nt, Artificial Sequence
  Description of Artificial Sequence: Synthetic oligonucleotide
ucugccucgcgugcuuugu

SEQ ID NO: 1798865 - RNA, 19 nt, Artificial Sequence
  Description of Artificial Sequence: Synthetic oligonucleotide
gaggccggcagaggucagg

SEQ ID NO: 1798866 - RNA, 19 nt, Artificial Sequence
  Description of Artificial Sequence: Synthetic oligonucleotide
cuccagacgcucgcgcgcg

SEQ ID NO: 1798867 - RNA, 19 nt, Artificial Sequence
  Description of Artificial Sequence: Synthetic oligonucleotide
gugcagccgcgccauguag

SEQ ID NO: 1798868 - RNA, 19 nt, Artificial Sequence
  Description of Artificial Sequence: Synthetic oligonucleotide
uacucugcguguggcgcug

SEQ ID NO: 1798869 - RNA, 19 nt, Artificial Sequence
  Description of Artificial Sequence: Synthetic oligonucleotide
cucugacggcugcagcuug

SEQ ID NO: 1798870 - RNA, 19 nt, Artificial Sequence
  Description of Artificial Sequence: Synthetic oligonucleotide
ugccucgcgugcuuuguuu

SEQ ID NO: 1798871 - RNA, 19 nt, Artificial Sequence
  Description of Artificial Sequence: Synthetic oligonucleotide
gugcccauucaggagcgug

SEQ ID NO: 1798872 - RNA, 19 nt, Artificial Sequence
  Description of Artificial Sequence: Synthetic oligonucleotide
gugggacauggccuuucug

SEQ ID NO: 1798873 - RNA, 19 nt, Artificial Sequence
  Description of Artificial Sequence: Synthetic oligonucleotide
agggucaucucccguucua

SEQ ID NO: 1798874 - RNA, 19 nt, Artificial Sequence
  Description of Artificial Sequence: Synthetic oligonucleotide
ucccgaggccgggaggucc

SEQ ID NO: 1798875 - RNA, 19 nt, Artificial Sequence
  Description of Artificial Sequence: Synthetic oligonucleotide
ucucugacggcugcagcuu

SEQ ID NO: 1798876 - RNA, 19 nt, Artificial Sequence
  Description of Artificial Sequence: Synthetic oligonucleotide
ugggcgggaccuggaacag

SEQ ID NO: 1798877 - RNA, 19 nt, Artificial Sequence
  Description of Artificial Sequence: Synthetic oligonucleotide
augagcccagagccggagu

SEQ ID NO: 1798878 - RNA, 19 nt, Artificial Sequence
  Description of Artificial Sequence: Synthetic oligonucleotide
gugcucgcuggccacccgc

SEQ ID NO: 1798879 - RNA, 19 nt, Artificial Sequence
  Description of Artificial Sequence: Synthetic oligonucleotide
cagcgucccgagaguaggc

SEQ ID NO: 1798880 - RNA, 19 nt, Artificial Sequence
  Description of Artificial Sequence: Synthetic oligonucleotide
cagggauccugcccgccac

SEQ ID NO: 1798881 - RNA, 19 nt, Artificial Sequence
  Description of Artificial Sequence: Synthetic oligonucleotide
uguggcgcugcagcaccgc

SEQ ID NO: 1798882 - RNA, 19 nt, Artificial Sequence
  Description of Artificial Sequence: Synthetic oligonucleotide
aucuccggaaagggcaggu

SEQ ID NO: 1798883 - RNA, 19 nt, Artificial Sequence
  Description of Artificial Sequence: Synthetic oligonucleotide
gagaucggguccggaggcc

SEQ ID NO: 1798884 - RNA, 19 nt, Artificial Sequence
  Description of Artificial Sequence: Synthetic oligonucleotide
agccuguuugucacaggug

SEQ ID NO: 1798885 - RNA, 19 nt, Artificial Sequence
  Description of Artificial Sequence: Synthetic oligonucleotide
gggacaucgaagguggaaa

SEQ ID NO: 1798886 - RNA, 19 nt, Artificial Sequence
  Description of Artificial Sequence: Synthetic oligonucleotide
gaguaggcgucucuccggu

SEQ ID NO: 1798887 - RNA, 19 nt, Artificial Sequence
  Description of Artificial Sequence: Synthetic oligonucleotide
ucccgacgcucguucagaa

SEQ ID NO: 1798888 - RNA, 19 nt, Artificial Sequence
  Description of Artificial Sequence: Synthetic oligonucleotide
aggccgggagguccucggg

SEQ ID NO: 1798889 - RNA, 19 nt, Artificial Sequence
  Description of Artificial Sequence: Synthetic oligonucleotide
ucgggcaggcugccccgag

SEQ ID NO: 1798890 - RNA, 19 nt, Artificial Sequence
  Description of Artificial Sequence: Synthetic oligonucleotide
gguccggguggcgagugcg

SEQ ID NO: 1798891 - RNA, 19 nt, Artificial Sequence
  Description of Artificial Sequence: Synthetic oligonucleotide
cacggggacccucgcugcg

SEQ ID NO: 1798892 - RNA, 19 nt, Artificial Sequence
  Description of Artificial Sequence: Synthetic oligonucleotide
uggccuuucugggcgggac

SEQ ID NO: 1798893 - RNA, 19 nt, Artificial Sequence
  Description of Artificial Sequence: Synthetic oligonucleotide
gguggcgagugcgaauuug

SEQ ID NO: 1798894 - RNA, 19 nt, Artificial Sequence
  Description of Artificial Sequence: Synthetic oligonucleotide
uggggacaucgaaggugga

SEQ ID NO: 1798895 - RNA, 19 nt, Artificial Sequence
  Description of Artificial Sequence: Synthetic oligonucleotide
ccgacugcugauaugccca

SEQ ID NO: 1798896 - RNA, 19 nt, Artificial Sequence
  Description of Artificial Sequence: Synthetic oligonucleotide
gggucaucucccguucuag

SEQ ID NO: 1798897 - RNA, 19 nt, Artificial Sequence
  Description of Artificial Sequence: Synthetic oligonucleotide
ccuugacacgcgcaaucag

SEQ ID NO: 1798898 - RNA, 19 nt, Artificial Sequence
  Description of Artificial Sequence: Synthetic oligonucleotide
ccgaugggaaccccaggcc

SEQ ID NO: 1798899 - RNA, 19 nt, Artificial Sequence
  Description of Artificial Sequence: Synthetic oligonucleotide
ggaucccgaggccgggagg

SEQ ID NO: 1798900 - RNA, 19 nt, Artificial Sequence
  Description of Artificial Sequence: Synthetic oligonucleotide
ugccccggacgcccgggug

SEQ ID NO: 1798901 - RNA, 19 nt, Artificial Sequence
  Description of Artificial Sequence: Synthetic oligonucleotide
uuugcucccgacgcucguu

SEQ ID NO: 1798902 - RNA, 19 nt, Artificial Sequence
  Description of Artificial Sequence: Synthetic oligonucleotide
accccgaugggaaccccag

SEQ ID NO: 1798903 - RNA, 19 nt, Artificial Sequence
  Description of Artificial Sequence: Synthetic oligonucleotide
gaucggguccggaggccgc

SEQ ID NO: 1798904 - RNA, 19 nt, Artificial Sequence
  Description of Artificial Sequence: Synthetic oligonucleotide
acacgcgcaaucagccucu

SEQ ID NO: 1798905 - RNA, 19 nt, Artificial Sequence
  Description of Artificial Sequence: Synthetic oligonucleotide
gcgcaaucagccucucaug

SEQ ID NO: 1798906 - RNA, 19 nt, Artificial Sequence
  Description of Artificial Sequence: Synthetic oligonucleotide
acucugcguguggcgcugc

SEQ ID NO: 1798907 - RNA, 19 nt, Artificial Sequence
  Description of Artificial Sequence: Synthetic oligonucleotide
cgagaguaggcgucucucc

SEQ ID NO: 1798908 - RNA, 19 nt, Artificial Sequence
  Description of Artificial Sequence: Synthetic oligonucleotide
caugcugcgcggggucgcg

SEQ ID NO: 1798909 - RNA, 19 nt, Artificial Sequence
  Description of Artificial Sequence: Synthetic oligonucleotide
cagaggccggcagagguca

SEQ ID NO: 1798910 - RNA, 19 nt, Artificial Sequence
  Description of Artificial Sequence: Synthetic oligonucleotide
gcuccagacgcucgcgcgc

SEQ ID NO: 1798911 - RNA, 19 nt, Artificial Sequence
  Description of Artificial Sequence: Synthetic oligonucleotide
agugccccggacgcccggg

SEQ ID NO: 1798912 - RNA, 19 nt, Artificial Sequence
  Description of Artificial Sequence: Synthetic oligonucleotide
gggaaccccaggccagugc

SEQ ID NO: 1798913 - RNA, 19 nt, Artificial Sequence
  Description of Artificial Sequence: Synthetic oligonucleotide
cagacgcucgcgcgcgcag

SEQ ID NO: 1798914 - RNA, 19 nt, Artificial Sequence
  Description of Artificial Sequence: Synthetic oligonucleotide
agcgccagcgugcgccgcu

SEQ ID NO: 1798915 - RNA, 19 nt, Artificial Sequence
  Description of Artificial Sequence: Synthetic oligonucleotide
gaaagcgaacauagcccgu

SEQ ID NO: 1798916 - RNA, 19 nt, Artificial Sequence
  Description of Artificial Sequence: Synthetic oligonucleotide
uugggcccauuagggagaa

SEQ ID NO: 1798917 - RNA, 19 nt, Artificial Sequence
  Description of Artificial Sequence: Synthetic oligonucleotide
cgagaucggguccggaggc

SEQ ID NO: 1798918 - RNA, 19 nt, Artificial Sequence
  Description of Artificial Sequence: Synthetic oligonucleotide
gucacuacgaaggccccgu

SEQ ID NO: 1798919 - RNA, 19 nt, Artificial Sequence
  Description of Artificial Sequence: Synthetic oligonucleotide
augggaaccccaggccagu

SEQ ID NO: 1798920 - RNA, 19 nt, Artificial Sequence
  Description of Artificial Sequence: Synthetic oligonucleotide
gcgcgcgcagcucauacuc

SEQ ID NO: 1798921 - RNA, 19 nt, Artificial Sequence
  Description of Artificial Sequence: Synthetic oligonucleotide
gcgcgcagcucauacucug

SEQ ID NO: 1798922 - RNA, 19 nt, Artificial Sequence
  Description of Artificial Sequence: Synthetic oligonucleotide
ggccuuucugggcgggacc

SEQ ID NO: 1798923 - RNA, 19 nt, Artificial Sequence
  Description of Artificial Sequence: Synthetic oligonucleotide
ccccgagauccuuuuguug

SEQ ID NO: 1798924 - RNA, 19 nt, Artificial Sequence
  Description of Artificial Sequence: Synthetic oligonucleotide
gccgcaacucugccucgcg

SEQ ID NO: 1798925 - RNA, 19 nt, Artificial Sequence
  Description of Artificial Sequence: Synthetic oligonucleotide
cucuccggugccgggcacc

SEQ ID NO: 1798926 - RNA, 19 nt, Artificial Sequence
  Description of Artificial Sequence: Synthetic oligonucleotide
augcugcgcggggucgcgc

SEQ ID NO: 1798927 - RNA, 19 nt, Artificial Sequence
  Description of Artificial Sequence: Synthetic oligonucleotide
gucgcgcucgauggccccg

SEQ ID NO: 1798928 - RNA, 19 nt, Artificial Sequence
  Description of Artificial Sequence: Synthetic oligonucleotide
uccggguggcgagugcgaa

SEQ ID NO: 1798929 - RNA, 19 nt, Artificial Sequence
  Description of Artificial Sequence: Synthetic oligonucleotide
ugggcggguggggaggguc

SEQ ID NO: 1798930 - RNA, 19 nt, Artificial Sequence
  Description of Artificial Sequence: Synthetic oligonucleotide
aggcgucucuccggugccg

SEQ ID NO: 1798931 - RNA, 19 nt, Artificial Sequence
  Description of Artificial Sequence: Synthetic oligonucleotide
gucagggauccugcccgcc

SEQ ID NO: 1798932 - RNA, 19 nt, Artificial Sequence
  Description of Artificial Sequence: Synthetic oligonucleotide
aucuuccgcaggcgccgca

SEQ ID NO: 1798933 - RNA, 19 nt, Artificial Sequence
  Description of Artificial Sequence: Synthetic oligonucleotide
ccucucaugcugcgcgggg

SEQ ID NO: 1798934 - RNA, 19 nt, Artificial Sequence
  Description of Artificial Sequence: Synthetic oligonucleotide
gccccggacgcccgggugg

SEQ ID NO: 1798935 - RNA, 19 nt, Artificial Sequence
  Description of Artificial Sequence: Synthetic oligonucleotide
cuuugggccagccucucuu

SEQ ID NO: 1798936 - RNA, 19 nt, Artificial Sequence
  Description of Artificial Sequence: Synthetic oligonucleotide
ggccgggagguccucgggc

SEQ ID NO: 1798937 - RNA, 19 nt, Artificial Sequence
  Description of Artificial Sequence: Synthetic oligonucleotide
cugcgcggggucgcgcucg

SEQ ID NO: 1798938 - RNA, 19 nt, Artificial Sequence
  Description of Artificial Sequence: Synthetic oligonucleotide
acgcgcaaucagccucuca

SEQ ID NO: 1798939 - RNA, 19 nt, Artificial Sequence
  Description of Artificial Sequence: Synthetic oligonucleotide
acgcucguucagaaagcga

SEQ ID NO: 1798940 - RNA, 19 nt, Artificial Sequence
  Description of Artificial Sequence: Synthetic oligonucleotide
gcucguucagaaagcgaac

SEQ ID NO: 1798941 - RNA, 19 nt, Artificial Sequence
  Description of Artificial Sequence: Synthetic oligonucleotide
cgcaacucugccucgcgug

SEQ ID NO: 1798942 - RNA, 19 nt, Artificial Sequence
  Description of Artificial Sequence: Synthetic oligonucleotide
ggacccuuucucucccaca

SEQ ID NO: 1798943 - RNA, 19 nt, Artificial Sequence
  Description of Artificial Sequence: Synthetic oligonucleotide
gcagaccuuauaggccucc

SEQ ID NO: 1798944 - RNA, 19 nt, Artificial Sequence
  Description of Artificial Sequence: Synthetic oligonucleotide
ccacucggcgcccagcauc

SEQ ID NO: 1798945 - RNA, 19 nt, Artificial Sequence
  Description of Artificial Sequence: Synthetic oligonucleotide
ggcgucucuccggugccgg

SEQ ID NO: 1798946 - RNA, 19 nt, Artificial Sequence
  Description of Artificial Sequence: Synthetic oligonucleotide
caggugcucgcuggccacc

SEQ ID NO: 1798947 - RNA, 19 nt, Artificial Sequence
  Description of Artificial Sequence: Synthetic oligonucleotide
uugcgagaucggguccgga

SEQ ID NO: 1798948 - RNA, 19 nt, Artificial Sequence
  Description of Artificial Sequence: Synthetic oligonucleotide
caccccgaugggaacccca

SEQ ID NO: 1798949 - RNA, 19 nt, Artificial Sequence
  Description of Artificial Sequence: Synthetic oligonucleotide
ucgcugcgcuccuguuuga

SEQ ID NO: 1798950 - RNA, 19 nt, Artificial Sequence
  Description of Artificial Sequence: Synthetic oligonucleotide
cguguucaugagcccagag

SEQ ID NO: 1798951 - RNA, 19 nt, Artificial Sequence
  Description of Artificial Sequence: Synthetic oligonucleotide
gcucgauggccccgugcag

SEQ ID NO: 1798952 - RNA, 19 nt, Artificial Sequence
  Description of Artificial Sequence: Synthetic oligonucleotide
cgacgcucguucagaaagc

SEQ ID NO: 1798953 - RNA, 19 nt, Artificial Sequence
  Description of Artificial Sequence: Synthetic oligonucleotide
cugccccgagauccuuuug

SEQ ID NO: 1798954 - RNA, 19 nt, Artificial Sequence
  Description of Artificial Sequence: Synthetic oligonucleotide
cauuagggagaaucuucuu

SEQ ID NO: 1798955 - RNA, 19 nt, Artificial Sequence
  Description of Artificial Sequence: Synthetic oligonucleotide
ccggcagaggucagggauc

SEQ ID NO: 1798956 - RNA, 19 nt, Artificial Sequence
  Description of Artificial Sequence: Synthetic oligonucleotide
acgcccggguggggaaggc

SEQ ID NO: 1798957 - RNA, 19 nt, Artificial Sequence
  Description of Artificial Sequence: Synthetic oligonucleotide
ccucgcgugcuuuguuuug

SEQ ID NO: 1798958 - RNA, 19 nt, Artificial Sequence
  Description of Artificial Sequence: Synthetic oligonucleotide
gccucucaugcugcgcggg

SEQ ID NO: 1798959 - RNA, 19 nt, Artificial Sequence
  Description of Artificial Sequence: Synthetic oligonucleotide
aucccgaggccgggagguc

SEQ ID NO: 1798960 - RNA, 19 nt, Artificial Sequence
  Description of Artificial Sequence: Synthetic oligonucleotide
guccggaggccgcgccccg

SEQ ID NO: 1798961 - RNA, 19 nt, Artificial Sequence
  Description of Artificial Sequence: Synthetic oligonucleotide
agggcagguccggguggcg

SEQ ID NO: 1798962 - RNA, 19 nt, Artificial Sequence
  Description of Artificial Sequence: Synthetic oligonucleotide
cgcgccauguagaagucca

SEQ ID NO: 1798963 - RNA, 19 nt, Artificial Sequence
  Description of Artificial Sequence: Synthetic oligonucleotide
ugcgcggggucgcgcucga

SEQ ID NO: 1798964 - RNA, 19 nt, Artificial Sequence
  Description of Artificial Sequence: Synthetic oligonucleotide
cacucggcgcccagcaucu

SEQ ID NO: 1798965 - RNA, 19 nt, Artificial Sequence
  Description of Artificial Sequence: Synthetic oligonucleotide
cgagugcgaauuugcuccc

SEQ ID NO: 1798966 - RNA, 19 nt, Artificial Sequence
  Description of Artificial Sequence: Synthetic oligonucleotide
gacgcucgcgcgcgcagcu

SEQ ID NO: 1798967 - RNA, 19 nt, Artificial Sequence
  Description of Artificial Sequence: Synthetic oligonucleotide
gcagccgcgccauguagaa

SEQ ID NO: 1798968 - RNA, 19 nt, Artificial Sequence
  Description of Artificial Sequence: Synthetic oligonucleotide
ggucgcgcucgauggcccc

SEQ ID NO: 1798969 - RNA, 19 nt, Artificial Sequence
  Description of Artificial Sequence: Synthetic oligonucleotide
cagugccccggacgcccgg

SEQ ID NO: 1798970 - RNA, 19 nt, Artificial Sequence
  Description of Artificial Sequence: Synthetic oligonucleotide
cucccgacgcucguucaga

SEQ ID NO: 1798971 - RNA, 19 nt, Artificial Sequence
  Description of Artificial Sequence: Synthetic oligonucleotide
cagguccggguggcgagug

SEQ ID NO: 1798972 - RNA, 19 nt, Artificial Sequence
  Description of Artificial Sequence: Synthetic oligonucleotide
gguggggaaggcggauccc

SEQ ID NO: 1798973 - RNA, 19 nt, Artificial Sequence
  Description of Artificial Sequence: Synthetic oligonucleotide
ccggaaagggcagguccgg

SEQ ID NO: 1798974 - RNA, 19 nt, Artificial Sequence
  Description of Artificial Sequence: Synthetic oligonucleotide
ccgagaguaggcgucucuc

SEQ ID NO: 1798975 - RNA, 19 nt, Artificial Sequence
  Description of Artificial Sequence: Synthetic oligonucleotide
cgcguucugcuccucgaag

SEQ ID NO: 1798976 - RNA, 19 nt, Artificial Sequence
  Description of Artificial Sequence: Synthetic oligonucleotide
ggcgaagcuggaggugagc

SEQ ID NO: 1798977 - RNA, 19 nt, Artificial Sequence
  Description of Artificial Sequence: Synthetic oligonucleotide
gccuccgacugcugauaug

SEQ ID NO: 1798978 - RNA, 19 nt, Artificial Sequence
  Description of Artificial Sequence: Synthetic oligonucleotide
ggggacaucgaagguggaa

SEQ ID NO: 1798979 - RNA, 19 nt, Artificial Sequence
  Description of Artificial Sequence: Synthetic oligonucleotide
gccggcagaggucagggau

SEQ ID NO: 1798980 - RNA, 19 nt, Artificial Sequence
  Description of Artificial Sequence: Synthetic oligonucleotide
ucccgagaguaggcgucuc

SEQ ID NO: 1798981 - RNA, 19 nt, Artificial Sequence
  Description of Artificial Sequence: Synthetic oligonucleotide
cagccgcgccauguagaag

SEQ ID NO: 1798982 - RNA, 19 nt, Artificial Sequence
  Description of Artificial Sequence: Synthetic oligonucleotide
aggccuccgacugcugaua

SEQ ID NO: 1798983 - RNA, 19 nt, Artificial Sequence
  Description of Artificial Sequence: Synthetic oligonucleotide
uccugcccgccaccccgau

SEQ ID NO: 1798984 - RNA, 19 nt, Artificial Sequence
  Description of Artificial Sequence: Synthetic oligonucleotide
guccagcgucccgagagua

SEQ ID NO: 1798985 - RNA, 19 nt, Artificial Sequence
  Description of Artificial Sequence: Synthetic oligonucleotide
gcgccauguagaaguccag

SEQ ID NO: 1798986 - RNA, 19 nt, Artificial Sequence
  Description of Artificial Sequence: Synthetic oligonucleotide
gccaccccgaugggaaccc

SEQ ID NO: 1798987 - RNA, 19 nt, Artificial Sequence
  Description of Artificial Sequence: Synthetic oligonucleotide
cacccgcgccaggaucucc

SEQ ID NO: 1798988 - RNA, 19 nt, Artificial Sequence
  Description of Artificial Sequence: Synthetic oligonucleotide
ggccacccgcgccaggauc

SEQ ID NO: 1798989 - RNA, 19 nt, Artificial Sequence
  Description of Artificial Sequence: Synthetic oligonucleotide
gcucgcuggccacccgcgc

SEQ ID NO: 1798990 - RNA, 19 nt, Artificial Sequence
  Description of Artificial Sequence: Synthetic oligonucleotide
ggcggaucccgaggccggg

SEQ ID NO: 1798991 - RNA, 19 nt, Artificial Sequence
  Description of Artificial Sequence: Synthetic oligonucleotide
ggccccgugcagccgcgcc

SEQ ID NO: 1798992 - RNA, 19 nt, Artificial Sequence
  Description of Artificial Sequence: Synthetic oligonucleotide
gggucgcgcucgauggccc

SEQ ID NO: 1798993 - RNA, 19 nt, Artificial Sequence
  Description of Artificial Sequence: Synthetic oligonucleotide
cccgccaccccgaugggaa

SEQ ID NO: 1798994 - RNA, 19 nt, Artificial Sequence
  Description of Artificial Sequence: Synthetic oligonucleotide
gagccggaguccuccuuuu

SEQ ID NO: 1798995 - RNA, 19 nt, Artificial Sequence
  Description of Artificial Sequence: Synthetic oligonucleotide
cgcucgauggccccgugca

SEQ ID NO: 1798996 - RNA, 19 nt, Artificial Sequence
  Description of Artificial Sequence: Synthetic oligonucleotide
gcgggaccuggaacagagg

SEQ ID NO: 1798997 - RNA, 19 nt, Artificial Sequence
  Description of Artificial Sequence: Synthetic oligonucleotide
gcgccgcaacucugccucg

SEQ ID NO: 1798998 - RNA, 19 nt, Artificial Sequence
  Description of Artificial Sequence: Synthetic oligonucleotide
gcgccaggaucuccuugac

SEQ ID NO: 1798999 - RNA, 19 nt, Artificial Sequence
  Description of Artificial Sequence: Synthetic oligonucleotide
guccggguggcgagugcga

SEQ ID NO: 1799000 - RNA, 19 nt, Artificial Sequence
  Description of Artificial Sequence: Synthetic oligonucleotide
cugcagcgccagcgugcgc

SEQ ID NO: 1799001 - RNA, 19 nt, Artificial Sequence
  Description of Artificial Sequence: Synthetic oligonucleotide
gucccgagaguaggcgucu

SEQ ID NO: 1799002 - RNA, 19 nt, Artificial Sequence
  Description of Artificial Sequence: Synthetic oligonucleotide
cgcgcaaucagccucucau

SEQ ID NO: 1799003 - RNA, 19 nt, Artificial Sequence
  Description of Artificial Sequence: Synthetic oligonucleotide
ggacgcccggguggggaag

SEQ ID NO: 1799004 - RNA, 19 nt, Artificial Sequence
  Description of Artificial Sequence: Synthetic oligonucleotide
cccacacggggacccucgc

SEQ ID NO: 1799005 - RNA, 19 nt, Artificial Sequence
  Description of Artificial Sequence: Synthetic oligonucleotide
cacgcgcaaucagccucuc

SEQ ID NO: 1799006 - RNA, 19 nt, Artificial Sequence
  Description of Artificial Sequence: Synthetic oligonucleotide
cuccggugccgggcaccgg

SEQ ID NO: 1799007 - RNA, 19 nt, Artificial Sequence
  Description of Artificial Sequence: Synthetic oligonucleotide
ccgcgccauguagaagucc

SEQ ID NO: 1799008 - RNA, 19 nt, Artificial Sequence
  Description of Artificial Sequence: Synthetic oligonucleotide
cgugcgccgcuccuccagc

SEQ ID NO: 1799009 - RNA, 19 nt, Artificial Sequence
  Description of Artificial Sequence: Synthetic oligonucleotide
caacucugccucgcgugcu

SEQ ID NO: 1799010 - RNA, 19 nt, Artificial Sequence
  Description of Artificial Sequence: Synthetic oligonucleotide
cgucucuccggugccgggc

SEQ ID NO: 1799011 - RNA, 19 nt, Artificial Sequence
  Description of Artificial Sequence: Synthetic oligonucleotide
gggccgugggacauggccu

SEQ ID NO: 1799012 - RNA, 19 nt, Artificial Sequence
  Description of Artificial Sequence: Synthetic oligonucleotide
cccgugcuggcccgggguc

SEQ ID NO: 1799013 - RNA, 19 nt, Artificial Sequence
  Description of Artificial Sequence: Synthetic oligonucleotide
ccgcgccaggaucuccuug

SEQ ID NO: 1799014 - RNA, 19 nt, Artificial Sequence
  Description of Artificial Sequence: Synthetic oligonucleotide
cgggcaccggcagcgaggc

SEQ ID NO: 1799015 - RNA, 19 nt, Artificial Sequence
  Description of Artificial Sequence: Synthetic oligonucleotide
gcccgugacaggggccuug

SEQ ID NO: 1799016 - RNA, 19 nt, Artificial Sequence
  Description of Artificial Sequence: Synthetic oligonucleotide
ccuuucugggcgggaccug

SEQ ID NO: 1799017 - RNA, 19 nt, Artificial Sequence
  Description of Artificial Sequence: Synthetic oligonucleotide
cagcgccagcgugcgccgc

SEQ ID NO: 1799018 - RNA, 19 nt, Artificial Sequence
  Description of Artificial Sequence: Synthetic oligonucleotide
gugcuggcccggggucuug

SEQ ID NO: 1799019 - RNA, 19 nt, Artificial Sequence
  Description of Artificial Sequence: Synthetic oligonucleotide
gccacccgcgccaggaucu

SEQ ID NO: 1799020 - RNA, 19 nt, Artificial Sequence
  Description of Artificial Sequence: Synthetic oligonucleotide
gggcaccggcagcgaggcg

SEQ ID NO: 1799021 - RNA, 19 nt, Artificial Sequence
  Description of Artificial Sequence: Synthetic oligonucleotide
ugggcccauuagggagaau

SEQ ID NO: 1799022 - RNA, 19 nt, Artificial Sequence
  Description of Artificial Sequence: Synthetic oligonucleotide
gggcggguggggaggguca

SEQ ID NO: 1799023 - RNA, 19 nt, Artificial Sequence
  Description of Artificial Sequence: Synthetic oligonucleotide
caggcgcggcggccccgcc

SEQ ID NO: 1799024 - RNA, 19 nt, Artificial Sequence
  Description of Artificial Sequence: Synthetic oligonucleotide
cgagauccuuuuguugcga

SEQ ID NO: 1799025 - RNA, 19 nt, Artificial Sequence
  Description of Artificial Sequence: Synthetic oligonucleotide
ccagcgugcgccgcuccuc

SEQ ID NO: 1799026 - RNA, 19 nt, Artificial Sequence
  Description of Artificial Sequence: Synthetic oligonucleotide
ggccgugggacauggccuu

SEQ ID NO: 1799027 - RNA, 19 nt, Artificial Sequence
  Description of Artificial Sequence: Synthetic oligonucleotide
cgccaccccgaugggaacc

SEQ ID NO: 1799028 - RNA, 19 nt, Artificial Sequence
  Description of Artificial Sequence: Synthetic oligonucleotide
cgaauuugcucccgacgcu

SEQ ID NO: 1799029 - RNA, 19 nt, Artificial Sequence
  Description of Artificial Sequence: Synthetic oligonucleotide
ccaggccagugccccggac

SEQ ID NO: 1799030 - RNA, 19 nt, Artificial Sequence
  Description of Artificial Sequence: Synthetic oligonucleotide
cgcaggcgccgcaacucug

SEQ ID NO: 1799031 - RNA, 19 nt, Artificial Sequence
  Description of Artificial Sequence: Synthetic oligonucleotide
ccccggacgcccggguggg

SEQ ID NO: 1799032 - RNA, 19 nt, Artificial Sequence
  Description of Artificial Sequence: Synthetic oligonucleotide
ccgccaccccgaugggaac

SEQ ID NO: 1799033 - RNA, 19 nt, Artificial Sequence
  Description of Artificial Sequence: Synthetic oligonucleotide
ggccuccgacugcugauau

SEQ ID NO: 1799034 - RNA, 19 nt, Artificial Sequence
  Description of Artificial Sequence: Synthetic oligonucleotide
gcugcgcggggucgcgcuc

SEQ ID NO: 1799035 - RNA, 19 nt, Artificial Sequence
  Description of Artificial Sequence: Synthetic oligonucleotide
gccgcgccauguagaaguc

SEQ ID NO: 1799036 - RNA, 19 nt, Artificial Sequence
  Description of Artificial Sequence: Synthetic oligonucleotide
cccggggucuugccuccug

SEQ ID NO: 1799037 - RNA, 19 nt, Artificial Sequence
  Description of Artificial Sequence: Synthetic oligonucleotide
caccggcagcgaggcgaag

SEQ ID NO: 1799038 - RNA, 19 nt, Artificial Sequence
  Description of Artificial Sequence: Synthetic oligonucleotide
cgaggccgggagguccucg

SEQ ID NO: 1799039 - RNA, 19 nt, Artificial Sequence
  Description of Artificial Sequence: Synthetic oligonucleotide
cccgacgcucguucagaaa

SEQ ID NO: 1799040 - RNA, 19 nt, Artificial Sequence
  Description of Artificial Sequence: Synthetic oligonucleotide
gggcgggaccuggaacaga

SEQ ID NO: 1799041 - RNA, 19 nt, Artificial Sequence
  Description of Artificial Sequence: Synthetic oligonucleotide
ccaccccgaugggaacccc

SEQ ID NO: 1799042 - RNA, 19 nt, Artificial Sequence
  Description of Artificial Sequence: Synthetic oligonucleotide
cgcugcgcuccuguuugac

SEQ ID NO: 1799043 - RNA, 19 nt, Artificial Sequence
  Description of Artificial Sequence: Synthetic oligonucleotide
ccgcguucugcuccucgaa

SEQ ID NO: 1799044 - RNA, 19 nt, Artificial Sequence
  Description of Artificial Sequence: Synthetic oligonucleotide
gcaccggcagcgaggcgaa

SEQ ID NO: 1799045 - RNA, 19 nt, Artificial Sequence
  Description of Artificial Sequence: Synthetic oligonucleotide
cgccgcaacucugccucgc

SEQ ID NO: 1799046 - RNA, 19 nt, Artificial Sequence
  Description of Artificial Sequence: Synthetic oligonucleotide
cagagccggaguccuccuu

SEQ ID NO: 1799047 - RNA, 19 nt, Artificial Sequence
  Description of Artificial Sequence: Synthetic oligonucleotide
cugccucgcgugcuuuguu

SEQ ID NO: 1799048 - RNA, 19 nt, Artificial Sequence
  Description of Artificial Sequence: Synthetic oligonucleotide
cgcucgcgcgcgcagcuca

SEQ ID NO: 1799049 - RNA, 19 nt, Artificial Sequence
  Description of Artificial Sequence: Synthetic oligonucleotide
ccagacgcucgcgcgcgca

SEQ ID NO: 1799050 - RNA, 19 nt, Artificial Sequence
  Description of Artificial Sequence: Synthetic oligonucleotide
cccgagaguaggcgucucu

SEQ ID NO: 1799051 - RNA, 19 nt, Artificial Sequence
  Description of Artificial Sequence: Synthetic oligonucleotide
cgcagcucauacucugcgu

SEQ ID NO: 1799052 - RNA, 19 nt, Artificial Sequence
  Description of Artificial Sequence: Synthetic oligonucleotide
ggacccucgcugcgcuccu

SEQ ID NO: 1799053 - RNA, 19 nt, Artificial Sequence
  Description of Artificial Sequence: Synthetic oligonucleotide
gcccauucaggagcguguu

SEQ ID NO: 1799054 - RNA, 19 nt, Artificial Sequence
  Description of Artificial Sequence: Synthetic oligonucleotide
gcccgccaccccgauggga

SEQ ID NO: 1799055 - RNA, 19 nt, Artificial Sequence
  Description of Artificial Sequence: Synthetic oligonucleotide
ccggacgcccgggugggga

SEQ ID NO: 1799056 - RNA, 19 nt, Artificial Sequence
  Description of Artificial Sequence: Synthetic oligonucleotide
cucgcgcgcgcagcucaua

SEQ ID NO: 1799057 - RNA, 19 nt, Artificial Sequence
  Description of Artificial Sequence: Synthetic oligonucleotide
ccgcgcaggccccgacauc

SEQ ID NO: 1799058 - RNA, 19 nt, Artificial Sequence
  Description of Artificial Sequence: Synthetic oligonucleotide
ccgcaacucugccucgcgu

SEQ ID NO: 1799059 - RNA, 19 nt, Artificial Sequence
  Description of Artificial Sequence: Synthetic oligonucleotide
cgugggacauggccuuucu

SEQ ID NO: 1799060 - RNA, 19 nt, Artificial Sequence
  Description of Artificial Sequence: Synthetic oligonucleotide
ccacacggggacccucgcu

SEQ ID NO: 1799061 - RNA, 19 nt, Artificial Sequence
  Description of Artificial Sequence: Synthetic oligonucleotide
cggcagcgaggcgaagcug

SEQ ID NO: 1799062 - RNA, 19 nt, Artificial Sequence
  Description of Artificial Sequence: Synthetic oligonucleotide
ccucgcugcgcuccuguuu

SEQ ID NO: 1799063 - RNA, 19 nt, Artificial Sequence
  Description of Artificial Sequence: Synthetic oligonucleotide
gcagguccggguggcgagu

SEQ ID NO: 1799064 - RNA, 19 nt, Artificial Sequence
  Description of Artificial Sequence: Synthetic oligonucleotide
gccccgcgcaggccccgac

SEQ ID NO: 1799065 - RNA, 19 nt, Artificial Sequence
  Description of Artificial Sequence: Synthetic oligonucleotide
ccccgcgcaggccccgaca

SEQ ID NO: 1799066 - RNA, 19 nt, Artificial Sequence
  Description of Artificial Sequence: Synthetic oligonucleotide
ggguggcgagugcgaauuu

SEQ ID NO: 1799067 - RNA, 19 nt, Artificial Sequence
  Description of Artificial Sequence: Synthetic oligonucleotide
ccacccgcgccaggaucuc

SEQ ID NO: 1799068 - RNA, 19 nt, Artificial Sequence
  Description of Artificial Sequence: Synthetic oligonucleotide
cccgaggccgggagguccu

SEQ ID NO: 1799069 - RNA, 19 nt, Artificial Sequence
  Description of Artificial Sequence: Synthetic oligonucleotide
cggaggccgcgccccgcgc

SEQ ID NO: 1799070 - RNA, 19 nt, Artificial Sequence
  Description of Artificial Sequence: Synthetic oligonucleotide
cccgcgcaggccccgacau

SEQ ID NO: 1799071 - RNA, 19 nt, Artificial Sequence
  Description of Artificial Sequence: Synthetic oligonucleotide
cccgugcagccgcgccaug

SEQ ID NO: 1799072 - RNA, 19 nt, Artificial Sequence
  Description of Artificial Sequence: Synthetic oligonucleotide
cccggacgcccgggugggg

SEQ ID NO: 1799073 - RNA, 19 nt, Artificial Sequence
  Description of Artificial Sequence: Synthetic oligonucleotide
ccgugcagccgcgccaugu

SEQ ID NO: 1799074 - RNA, 19 nt, Artificial Sequence
  Description of Artificial Sequence: Synthetic oligonucleotide
ccccgugcuggcccggggu

SEQ ID NO: 1799075 - RNA, 19 nt, Artificial Sequence
  Description of Artificial Sequence: Synthetic oligonucleotide
ggcggguggggagggucau

SEQ ID NO: 1799076 - RNA, 19 nt, Artificial Sequence
  Description of Artificial Sequence: Synthetic oligonucleotide
ccgaggccgggagguccuc

SEQ ID NO: 1799077 - RNA, 19 nt, Artificial Sequence
  Description of Artificial Sequence: Synthetic oligonucleotide
gcggccccgccuggcuguc

SEQ ID NO: 1799078 - RNA, 19 nt, Artificial Sequence
  Description of Artificial Sequence: Synthetic oligonucleotide
ccgugcuggcccggggucu

SEQ ID NO: 1799079 - RNA, 19 nt, Artificial Sequence
  Description of Artificial Sequence: Synthetic oligonucleotide
gcucgcgcgcgcagcucau

SEQ ID NO: 1799080 - RNA, 19 nt, Artificial Sequence
  Description of Artificial Sequence: Synthetic oligonucleotide
gccgugggacauggccuuu

SEQ ID NO: 1799081 - RNA, 19 nt, Artificial Sequence
  Description of Artificial Sequence: Synthetic oligonucleotide
ccggguggggaaggcggau

SEQ ID NO: 1799082 - RNA, 19 nt, Artificial Sequence
  Description of Artificial Sequence: Synthetic oligonucleotide
cgccccgcgcaggccccga

SEQ ID NO: 1799083 - RNA, 19 nt, Artificial Sequence
  Description of Artificial Sequence: Synthetic oligonucleotide
gcgcggggucgcgcucgau

SEQ ID NO: 1799084 - RNA, 19 nt, Artificial Sequence
  Description of Artificial Sequence: Synthetic oligonucleotide
aaugcauagacacaggugc

SEQ ID NO: 1799085 - RNA, 19 nt, Artificial Sequence
  Description of Artificial Sequence: Synthetic oligonucleotide
uaugagauuaauuaaaacu

SEQ ID NO: 1799086 - RNA, 19 nt, Artificial Sequence
  Description of Artificial Sequence: Synthetic oligonucleotide
ugguuuacagaauucaugg

SEQ ID NO: 1799087 - RNA, 19 nt, Artificial Sequence
  Description of Artificial Sequence: Synthetic oligonucleotide
uacacuaacaaagaguggg

SEQ ID NO: 1799088 - RNA, 19 nt, Artificial Sequence
  Description of Artificial Sequence: Synthetic oligonucleotide
uuuacuuauagcauuuaug

SEQ ID NO: 1799089 - RNA, 19 nt, Artificial Sequence
  Description of Artificial Sequence: Synthetic oligonucleotide
ugaggucacaccuauaggg

SEQ ID NO: 1799090 - RNA, 19 nt, Artificial Sequence
  Description of Artificial Sequence: Synthetic oligonucleotide
uguaauuguuuaaaguuug

SEQ ID NO: 1799091 - RNA, 19 nt, Artificial Sequence
  Description of Artificial Sequence: Synthetic oligonucleotide
aaggauaccacuguaugcg

SEQ ID NO: 1799092 - RNA, 19 nt, Artificial Sequence
  Description of Artificial Sequence: Synthetic oligonucleotide
ugaaauuuauucugucugg

SEQ ID NO: 1799093 - RNA, 19 nt, Artificial Sequence
  Description of Artificial Sequence: Synthetic oligonucleotide
ucugaggucacaccuauag

SEQ ID NO: 1799094 - RNA, 19 nt, Artificial Sequence
  Description of Artificial Sequence: Synthetic oligonucleotide
aucaguaugagauuaauua

SEQ ID NO: 1799095 - RNA, 19 nt, Artificial Sequence
  Description of Artificial Sequence: Synthetic oligonucleotide
acugugagggauuccaugc

SEQ ID NO: 1799096 - RNA, 19 nt, Artificial Sequence
  Description of Artificial Sequence: Synthetic oligonucleotide
aaagaagccaugucuccac

SEQ ID NO: 1799097 - RNA, 19 nt, Artificial Sequence
  Description of Artificial Sequence: Synthetic oligonucleotide
ucugugaaaagacacuuga

SEQ ID NO: 1799098 - RNA, 19 nt, Artificial Sequence
  Description of Artificial Sequence: Synthetic oligonucleotide
uguacguugacuccacuag

SEQ ID NO: 1799099 - RNA, 19 nt, Artificial Sequence
  Description of Artificial Sequence: Synthetic oligonucleotide
cuuuaaguagccagcaucc

SEQ ID NO: 1799100 - RNA, 19 nt, Artificial Sequence
  Description of Artificial Sequence: Synthetic oligonucleotide
aguuuguuuaacuauuugu

SEQ ID NO: 1799101 - RNA, 19 nt, Artificial Sequence
  Description of Artificial Sequence: Synthetic oligonucleotide
uuaaaguuuguuuaacuau

SEQ ID NO: 1799102 - RNA, 19 nt, Artificial Sequence
  Description of Artificial Sequence: Synthetic oligonucleotide
cauacuuguacguugacuc

SEQ ID NO: 1799103 - RNA, 19 nt, Artificial Sequence
  Description of Artificial Sequence: Synthetic oligonucleotide
uauagcauuuaugcaaugg

SEQ ID NO: 1799104 - RNA, 19 nt, Artificial Sequence
  Description of Artificial Sequence: Synthetic oligonucleotide
uaacuauuuguuuaaauuu

SEQ ID NO: 1799105 - RNA, 19 nt, Artificial Sequence
  Description of Artificial Sequence: Synthetic oligonucleotide
gaacggguuauucagcccg

SEQ ID NO: 1799106 - RNA, 19 nt, Artificial Sequence
  Description of Artificial Sequence: Synthetic oligonucleotide
ucuacaguuguccaggguc

SEQ ID NO: 1799107 - RNA, 19 nt, Artificial Sequence
  Description of Artificial Sequence: Synthetic oligonucleotide
gauuaauuaaaacuuugaa

SEQ ID NO: 1799108 - RNA, 19 nt, Artificial Sequence
  Description of Artificial Sequence: Synthetic oligonucleotide
aguuguaauuguuuaaagu

SEQ ID NO: 1799109 - RNA, 19 nt, Artificial Sequence
  Description of Artificial Sequence: Synthetic oligonucleotide
aacucauacuuguacguug

SEQ ID NO: 1799110 - RNA, 19 nt, Artificial Sequence
  Description of Artificial Sequence: Synthetic oligonucleotide
ugucaaugcauagacacag

SEQ ID NO: 1799111 - RNA, 19 nt, Artificial Sequence
  Description of Artificial Sequence: Synthetic oligonucleotide
ugugauuagcucaucugcc

SEQ ID NO: 1799112 - RNA, 19 nt, Artificial Sequence
  Description of Artificial Sequence: Synthetic oligonucleotide
aggaacggguuauucagcc

SEQ ID NO: 1799113 - RNA, 19 nt, Artificial Sequence
  Description of Artificial Sequence: Synthetic oligonucleotide
ugauuucccauucaugcca

SEQ ID NO: 1799114 - RNA, 19 nt, Artificial Sequence
  Description of Artificial Sequence: Synthetic oligonucleotide
ggugauuucccauucaugc

SEQ ID NO: 1799115 - RNA, 19 nt, Artificial Sequence
  Description of Artificial Sequence: Synthetic oligonucleotide
agucgguugaucuuuccac

SEQ ID NO: 1799116 - RNA, 19 nt, Artificial Sequence
  Description of Artificial Sequence: Synthetic oligonucleotide
aagggcagaacucauacuu

SEQ ID NO: 1799117 - RNA, 19 nt, Artificial Sequence
  Description of Artificial Sequence: Synthetic oligonucleotide
uggauacacuaacaaagag

SEQ ID NO: 1799118 - RNA, 19 nt, Artificial Sequence
  Description of Artificial Sequence: Synthetic oligonucleotide
auuuauucugucugggucu

SEQ ID NO: 1799119 - RNA, 19 nt, Artificial Sequence
  Description of Artificial Sequence: Synthetic oligonucleotide
ugaucuuuccacaggugag

SEQ ID NO: 1799120 - RNA, 19 nt, Artificial Sequence
  Description of Artificial Sequence: Synthetic oligonucleotide
auacuuguacguugacucc

SEQ ID NO: 1799121 - RNA, 19 nt, Artificial Sequence
  Description of Artificial Sequence: Synthetic oligonucleotide
auagcauuuaugcaauggu

SEQ ID NO: 1799122 - RNA, 19 nt, Artificial Sequence
  Description of Artificial Sequence: Synthetic oligonucleotide
aauguguuggguucuucca

SEQ ID NO: 1799123 - RNA, 19 nt, Artificial Sequence
  Description of Artificial Sequence: Synthetic oligonucleotide
cagaacucauacuuguacg

SEQ ID NO: 1799124 - RNA, 19 nt, Artificial Sequence
  Description of Artificial Sequence: Synthetic oligonucleotide
uuggauacacuaacaaaga

SEQ ID NO: 1799125 - RNA, 19 nt, Artificial Sequence
  Description of Artificial Sequence: Synthetic oligonucleotide
uuuaugcaaugguuuacag

SEQ ID NO: 1799126 - RNA, 19 nt, Artificial Sequence
  Description of Artificial Sequence: Synthetic oligonucleotide
uuguaauuguuuaaaguuu

SEQ ID NO: 1799127 - RNA, 19 nt, Artificial Sequence
  Description of Artificial Sequence: Synthetic oligonucleotide
uaguuguaauuguuuaaag

SEQ ID NO: 1799128 - RNA, 19 nt, Artificial Sequence
  Description of Artificial Sequence: Synthetic oligonucleotide
gaucauaggauguucccac

SEQ ID NO: 1799129 - RNA, 19 nt, Artificial Sequence
  Description of Artificial Sequence: Synthetic oligonucleotide
uuuuacuuauagcauuuau

SEQ ID NO: 1799130 - RNA, 19 nt, Artificial Sequence
  Description of Artificial Sequence: Synthetic oligonucleotide
uugaagguauuguugguga

SEQ ID NO: 1799131 - RNA, 19 nt, Artificial Sequence
  Description of Artificial Sequence: Synthetic oligonucleotide
gaauguguuggguucuucc

SEQ ID NO: 1799132 - RNA, 19 nt, Artificial Sequence
  Description of Artificial Sequence: Synthetic oligonucleotide
ugagauuaauuaaaacuuu

SEQ ID NO: 1799133 - RNA, 19 nt, Artificial Sequence
  Description of Artificial Sequence: Synthetic oligonucleotide
uuauucagcccgaaugugu

SEQ ID NO: 1799134 - RNA, 19 nt, Artificial Sequence
  Description of Artificial Sequence: Synthetic oligonucleotide
ugugccuuucuacaguugu

SEQ ID NO: 1799135 - RNA, 19 nt, Artificial Sequence
  Description of Artificial Sequence: Synthetic oligonucleotide
uuaugcaaugguuuacaga

SEQ ID NO: 1799136 - RNA, 19 nt, Artificial Sequence
  Description of Artificial Sequence: Synthetic oligonucleotide
ucaaaugucaaugcauaga

SEQ ID NO: 1799137 - RNA, 19 nt, Artificial Sequence
  Description of Artificial Sequence: Synthetic oligonucleotide
ugccuggccuaaaagaugc

SEQ ID NO: 1799138 - RNA, 19 nt, Artificial Sequence
  Description of Artificial Sequence: Synthetic oligonucleotide
auaggauguucccacguag

SEQ ID NO: 1799139 - RNA, 19 nt, Artificial Sequence
  Description of Artificial Sequence: Synthetic oligonucleotide
gugugauuagcucaucugc

SEQ ID NO: 1799140 - RNA, 19 nt, Artificial Sequence
  Description of Artificial Sequence: Synthetic oligonucleotide
augagauuaauuaaaacuu

SEQ ID NO: 1799141 - RNA, 19 nt, Artificial Sequence
  Description of Artificial Sequence: Synthetic oligonucleotide
agcaacuucccauagcccu

SEQ ID NO: 1799142 - RNA, 19 nt, Artificial Sequence
  Description of Artificial Sequence: Synthetic oligonucleotide
agugugauuagcucaucug

SEQ ID NO: 1799143 - RNA, 19 nt, Artificial Sequence
  Description of Artificial Sequence: Synthetic oligonucleotide
ucucuuaggcugaaggcga

SEQ ID NO: 1799144 - RNA, 19 nt, Artificial Sequence
  Description of Artificial Sequence: Synthetic oligonucleotide
agaacucauacuuguacgu

SEQ ID NO: 1799145 - RNA, 19 nt, Artificial Sequence
  Description of Artificial Sequence: Synthetic oligonucleotide
agcagcaucaggaagccgg

SEQ ID NO: 1799146 - RNA, 19 nt, Artificial Sequence
  Description of Artificial Sequence: Synthetic oligonucleotide
ucacguuguggaaagggca

SEQ ID NO: 1799147 - RNA, 19 nt, Artificial Sequence
  Description of Artificial Sequence: Synthetic oligonucleotide
caaggauaccacuguaugc

SEQ ID NO: 1799148 - RNA, 19 nt, Artificial Sequence
  Description of Artificial Sequence: Synthetic oligonucleotide
auguguuggguucuuccac

SEQ ID NO: 1799149 - RNA, 19 nt, Artificial Sequence
  Description of Artificial Sequence: Synthetic oligonucleotide
uuaaguagccagcauccuc

SEQ ID NO: 1799150 - RNA, 19 nt, Artificial Sequence
  Description of Artificial Sequence: Synthetic oligonucleotide
guaugagauuaauuaaaac

SEQ ID NO: 1799151 - RNA, 19 nt, Artificial Sequence
  Description of Artificial Sequence: Synthetic oligonucleotide
cucucuuaggcugaaggcg

SEQ ID NO: 1799152 - RNA, 19 nt, Artificial Sequence
  Description of Artificial Sequence: Synthetic oligonucleotide
cuaacaaagaguggggaug

SEQ ID NO: 1799153 - RNA, 19 nt, Artificial Sequence
  Description of Artificial Sequence: Synthetic oligonucleotide
uuuaucaguaugagauuaa

SEQ ID NO: 1799154 - RNA, 19 nt, Artificial Sequence
  Description of Artificial Sequence: Synthetic oligonucleotide
aacuauuuguuuaaauuuu

SEQ ID NO: 1799155 - RNA, 19 nt, Artificial Sequence
  Description of Artificial Sequence: Synthetic oligonucleotide
acuguaugcguuccagcgg

SEQ ID NO: 1799156 - RNA, 19 nt, Artificial Sequence
  Description of Artificial Sequence: Synthetic oligonucleotide
uguguuggguucuuccacc

SEQ ID NO: 1799157 - RNA, 19 nt, Artificial Sequence
  Description of Artificial Sequence: Synthetic oligonucleotide
uauuguuggugauuuccca

SEQ ID NO: 1799158 - RNA, 19 nt, Artificial Sequence
  Description of Artificial Sequence: Synthetic oligonucleotide
acagaauucauggaguuau

SEQ ID NO: 1799159 - RNA, 19 nt, Artificial Sequence
  Description of Artificial Sequence: Synthetic oligonucleotide
uguuuaaaguuuguuuaac

SEQ ID NO: 1799160 - RNA, 19 nt, Artificial Sequence
  Description of Artificial Sequence: Synthetic oligonucleotide
cuuugaaauuuauucuguc

SEQ ID NO: 1799161 - RNA, 19 nt, Artificial Sequence
  Description of Artificial Sequence: Synthetic oligonucleotide
uucagcccgaauguguugg

SEQ ID NO: 1799162 - RNA, 19 nt, Artificial Sequence
  Description of Artificial Sequence: Synthetic oligonucleotide
ugcacucugugaaaagaca

SEQ ID NO: 1799163 - RNA, 19 nt, Artificial Sequence
  Description of Artificial Sequence: Synthetic oligonucleotide
uggaucauaggauguuccc

SEQ ID NO: 1799164 - RNA, 19 nt, Artificial Sequence
  Description of Artificial Sequence: Synthetic oligonucleotide
aggauguucccacguaguc

SEQ ID NO: 1799165 - RNA, 19 nt, Artificial Sequence
  Description of Artificial Sequence: Synthetic oligonucleotide
aaugugccuuucuacaguu

SEQ ID NO: 1799166 - RNA, 19 nt, Artificial Sequence
  Description of Artificial Sequence: Synthetic oligonucleotide
aacugcucugaggucacac

SEQ ID NO: 1799167 - RNA, 19 nt, Artificial Sequence
  Description of Artificial Sequence: Synthetic oligonucleotide
caaugcauagacacaggug

SEQ ID NO: 1799168 - RNA, 19 nt, Artificial Sequence
  Description of Artificial Sequence: Synthetic oligonucleotide
cuggaucauaggauguucc

SEQ ID NO: 1799169 - RNA, 19 nt, Artificial Sequence
  Description of Artificial Sequence: Synthetic oligonucleotide
gacuggucagucuuuguac

SEQ ID NO: 1799170 - RNA, 19 nt, Artificial Sequence
  Description of Artificial Sequence: Synthetic oligonucleotide
guuggguucuuccaccacc

SEQ ID NO: 1799171 - RNA, 19 nt, Artificial Sequence
  Description of Artificial Sequence: Synthetic oligonucleotide
gcuuggcucagacacaugg

SEQ ID NO: 1799172 - RNA, 19 nt, Artificial Sequence
  Description of Artificial Sequence: Synthetic oligonucleotide
acuaacaaagaguggggau

SEQ ID NO: 1799173 - RNA, 19 nt, Artificial Sequence
  Description of Artificial Sequence: Synthetic oligonucleotide
guagccagcauccucaaaa

SEQ ID NO: 1799174 - RNA, 19 nt, Artificial Sequence
  Description of Artificial Sequence: Synthetic oligonucleotide
aaugguuuacagaauucau

SEQ ID NO: 1799175 - RNA, 19 nt, Artificial Sequence
  Description of Artificial Sequence: Synthetic oligonucleotide
auuuaugcaaugguuuaca

SEQ ID NO: 1799176 - RNA, 19 nt, Artificial Sequence
  Description of Artificial Sequence: Synthetic oligonucleotide
ugccuuucuacaguugucc

SEQ ID NO: 1799177 - RNA, 19 nt, Artificial Sequence
  Description of Artificial Sequence: Synthetic oligonucleotide
guuuugugcacucugugaa

SEQ ID NO: 1799178 - RNA, 19 nt, Artificial Sequence
  Description of Artificial Sequence: Synthetic oligonucleotide
uagcauuuaugcaaugguu

SEQ ID NO: 1799179 - RNA, 19 nt, Artificial Sequence
  Description of Artificial Sequence: Synthetic oligonucleotide
ucgguugaucuuuccacag

SEQ ID NO: 1799180 - RNA, 19 nt, Artificial Sequence
  Description of Artificial Sequence: Synthetic oligonucleotide
ugugcacucugugaaaaga

SEQ ID NO: 1799181 - RNA, 19 nt, Artificial Sequence
  Description of Artificial Sequence: Synthetic oligonucleotide
gguauuguuggugauuucc

SEQ ID NO: 1799182 - RNA, 19 nt, Artificial Sequence
  Description of Artificial Sequence: Synthetic oligonucleotide
gacugugagggauuccaug

SEQ ID NO: 1799183 - RNA, 19 nt, Artificial Sequence
  Description of Artificial Sequence: Synthetic oligonucleotide
aguaugagauuaauuaaaa

SEQ ID NO: 1799184 - RNA, 19 nt, Artificial Sequence
  Description of Artificial Sequence: Synthetic oligonucleotide
guaguccugggucaccccg

SEQ ID NO: 1799185 - RNA, 19 nt, Artificial Sequence
  Description of Artificial Sequence: Synthetic oligonucleotide
ucauacuuguacguugacu

SEQ ID NO: 1799186 - RNA, 19 nt, Artificial Sequence
  Description of Artificial Sequence: Synthetic oligonucleotide
gugauuucccauucaugcc

SEQ ID NO: 1799187 - RNA, 19 nt, Artificial Sequence
  Description of Artificial Sequence: Synthetic oligonucleotide
auuguuggugauuucccau

SEQ ID NO: 1799188 - RNA, 19 nt, Artificial Sequence
  Description of Artificial Sequence: Synthetic oligonucleotide
acaggugagcuccaccuug

SEQ ID NO: 1799189 - RNA, 19 nt, Artificial Sequence
  Description of Artificial Sequence: Synthetic oligonucleotide
cauagacacaggugcuugg

SEQ ID NO: 1799190 - RNA, 19 nt, Artificial Sequence
  Description of Artificial Sequence: Synthetic oligonucleotide
uauucagcccgaauguguu

SEQ ID NO: 1799191 - RNA, 19 nt, Artificial Sequence
  Description of Artificial Sequence: Synthetic oligonucleotide
aucuucccggcacaugccg

SEQ ID NO: 1799192 - RNA, 19 nt, Artificial Sequence
  Description of Artificial Sequence: Synthetic oligonucleotide
cugaaugugccuuucuaca

SEQ ID NO: 1799193 - RNA, 19 nt, Artificial Sequence
  Description of Artificial Sequence: Synthetic oligonucleotide
gauguucccacguaguccu

SEQ ID NO: 1799194 - RNA, 19 nt, Artificial Sequence
  Description of Artificial Sequence: Synthetic oligonucleotide
uguuggugauuucccauuc

SEQ ID NO: 1799195 - RNA, 19 nt, Artificial Sequence
  Description of Artificial Sequence: Synthetic oligonucleotide
caguaugagauuaauuaaa

SEQ ID NO: 1799196 - RNA, 19 nt, Artificial Sequence
  Description of Artificial Sequence: Synthetic oligonucleotide
uccuggggccuuuaaguag

SEQ ID NO: 1799197 - RNA, 19 nt, Artificial Sequence
  Description of Artificial Sequence: Synthetic oligonucleotide
cacguuguggaaagggcag

SEQ ID NO: 1799198 - RNA, 19 nt, Artificial Sequence
  Description of Artificial Sequence: Synthetic oligonucleotide
cuaggcugaagcacuugcc

SEQ ID NO: 1799199 - RNA, 19 nt, Artificial Sequence
  Description of Artificial Sequence: Synthetic oligonucleotide
uaggcugaaggcgauuugc

SEQ ID NO: 1799200 - RNA, 19 nt, Artificial Sequence
  Description of Artificial Sequence: Synthetic oligonucleotide
ugcagugugauuagcucau

SEQ ID NO: 1799201 - RNA, 19 nt, Artificial Sequence
  Description of Artificial Sequence: Synthetic oligonucleotide
aagcacuugccagcaaguc

SEQ ID NO: 1799202 - RNA, 19 nt, Artificial Sequence
  Description of Artificial Sequence: Synthetic oligonucleotide
ucuucccggcacaugccgg

SEQ ID NO: 1799203 - RNA, 19 nt, Artificial Sequence
  Description of Artificial Sequence: Synthetic oligonucleotide
uaggauguucccacguagu

SEQ ID NO: 1799204 - RNA, 19 nt, Artificial Sequence
  Description of Artificial Sequence: Synthetic oligonucleotide
uuggguucuuccaccaccu

SEQ ID NO: 1799205 - RNA, 19 nt, Artificial Sequence
  Description of Artificial Sequence: Synthetic oligonucleotide
agcacuugccagcaagucu

SEQ ID NO: 1799206 - RNA, 19 nt, Artificial Sequence
  Description of Artificial Sequence: Synthetic oligonucleotide
uuauagcauuuaugcaaug

SEQ ID NO: 1799207 - RNA, 19 nt, Artificial Sequence
  Description of Artificial Sequence: Synthetic oligonucleotide
uaauuguuuaaaguuuguu

SEQ ID NO: 1799208 - RNA, 19 nt, Artificial Sequence
  Description of Artificial Sequence: Synthetic oligonucleotide
gaagccaugucuccaccac

SEQ ID NO: 1799209 - RNA, 19 nt, Artificial Sequence
  Description of Artificial Sequence: Synthetic oligonucleotide
gcaggaacggguuauucag

SEQ ID NO: 1799210 - RNA, 19 nt, Artificial Sequence
  Description of Artificial Sequence: Synthetic oligonucleotide
guauuguuggugauuuccc

SEQ ID NO: 1799211 - RNA, 19 nt, Artificial Sequence
  Description of Artificial Sequence: Synthetic oligonucleotide
acuuugaaauuuauucugu

SEQ ID NO: 1799212 - RNA, 19 nt, Artificial Sequence
  Description of Artificial Sequence: Synthetic oligonucleotide
ugggucaccccgcaacugc

SEQ ID NO: 1799213 - RNA, 19 nt, Artificial Sequence
  Description of Artificial Sequence: Synthetic oligonucleotide
uacuuguacguugacucca

SEQ ID NO: 1799214 - RNA, 19 nt, Artificial Sequence
  Description of Artificial Sequence: Synthetic oligonucleotide
uuaucaguaugagauuaau

SEQ ID NO: 1799215 - RNA, 19 nt, Artificial Sequence
  Description of Artificial Sequence: Synthetic oligonucleotide
auaccacuguaugcguucc

SEQ ID NO: 1799216 - RNA, 19 nt, Artificial Sequence
  Description of Artificial Sequence: Synthetic oligonucleotide
cauuuaugcaaugguuuac

SEQ ID NO: 1799217 - RNA, 19 nt, Artificial Sequence
  Description of Artificial Sequence: Synthetic oligonucleotide
aggugcucagagugggugg

SEQ ID NO: 1799218 - RNA, 19 nt, Artificial Sequence
  Description of Artificial Sequence: Synthetic oligonucleotide
gauuccaugcugguccagc

SEQ ID NO: 1799219 - RNA, 19 nt, Artificial Sequence
  Description of Artificial Sequence: Synthetic oligonucleotide
uuuugugcacucugugaaa

SEQ ID NO: 1799220 - RNA, 19 nt, Artificial Sequence
  Description of Artificial Sequence: Synthetic oligonucleotide
uugugcacucugugaaaag

SEQ ID NO: 1799221 - RNA, 19 nt, Artificial Sequence
  Description of Artificial Sequence: Synthetic oligonucleotide
uuguacguugacuccacua

SEQ ID NO: 1799222 - RNA, 19 nt, Artificial Sequence
  Description of Artificial Sequence: Synthetic oligonucleotide
uccugggucaccccgcaac

SEQ ID NO: 1799223 - RNA, 19 nt, Artificial Sequence
  Description of Artificial Sequence: Synthetic oligonucleotide
uuuguaccuccugggacag

SEQ ID NO: 1799224 - RNA, 19 nt, Artificial Sequence
  Description of Artificial Sequence: Synthetic oligonucleotide
caaugguuuacagaauuca

SEQ ID NO: 1799225 - RNA, 19 nt, Artificial Sequence
  Description of Artificial Sequence: Synthetic oligonucleotide
aaagacacuugaggcugag

SEQ ID NO: 1799226 - RNA, 19 nt, Artificial Sequence
  Description of Artificial Sequence: Synthetic oligonucleotide
ggucucaagccccaggccc

SEQ ID NO: 1799227 - RNA, 19 nt, Artificial Sequence
  Description of Artificial Sequence: Synthetic oligonucleotide
aagagaugcaggggccccg

SEQ ID NO: 1799228 - RNA, 19 nt, Artificial Sequence
  Description of Artificial Sequence: Synthetic oligonucleotide
gacacaggugcuuggcuca

SEQ ID NO: 1799229 - RNA, 19 nt, Artificial Sequence
  Description of Artificial Sequence: Synthetic oligonucleotide
gcagaacucauacuuguac

SEQ ID NO: 1799230 - RNA, 19 nt, Artificial Sequence
  Description of Artificial Sequence: Synthetic oligonucleotide
uuuaaguagccagcauccu

SEQ ID NO: 1799231 - RNA, 19 nt, Artificial Sequence
  Description of Artificial Sequence: Synthetic oligonucleotide
ugccaaaagaagccauguc

SEQ ID NO: 1799232 - RNA, 19 nt, Artificial Sequence
  Description of Artificial Sequence: Synthetic oligonucleotide
auacacuaacaaagagugg

SEQ ID NO: 1799233 - RNA, 19 nt, Artificial Sequence
  Description of Artificial Sequence: Synthetic oligonucleotide
agacuggucagucuuugua

SEQ ID NO: 1799234 - RNA, 19 nt, Artificial Sequence
  Description of Artificial Sequence: Synthetic oligonucleotide
cacaccuauagggagccgc

SEQ ID NO: 1799235 - RNA, 19 nt, Artificial Sequence
  Description of Artificial Sequence: Synthetic oligonucleotide
ccuaaaagaugccaaaaga

SEQ ID NO: 1799236 - RNA, 19 nt, Artificial Sequence
  Description of Artificial Sequence: Synthetic oligonucleotide
accuauagggagccgcuga

SEQ ID NO: 1799237 - RNA, 19 nt, Artificial Sequence
  Description of Artificial Sequence: Synthetic oligonucleotide
acaugggccagucgguuga

SEQ ID NO: 1799238 - RNA, 19 nt, Artificial Sequence
  Description of Artificial Sequence: Synthetic oligonucleotide
auuccaugcugguccagca

SEQ ID NO: 1799239 - RNA, 19 nt, Artificial Sequence
  Description of Artificial Sequence: Synthetic oligonucleotide
cucagcaacuucccauagc

SEQ ID NO: 1799240 - RNA, 19 nt, Artificial Sequence
  Description of Artificial Sequence: Synthetic oligonucleotide
uuuauucugucugggucuc

SEQ ID NO: 1799241 - RNA, 19 nt, Artificial Sequence
  Description of Artificial Sequence: Synthetic oligonucleotide
uucuacaguuguccagggu

SEQ ID NO: 1799242 - RNA, 19 nt, Artificial Sequence
  Description of Artificial Sequence: Synthetic oligonucleotide
ggcacaacaaagguuggcc

SEQ ID NO: 1799243 - RNA, 19 nt, Artificial Sequence
  Description of Artificial Sequence: Synthetic oligonucleotide
uggccuaaaagaugccaaa

SEQ ID NO: 1799244 - RNA, 19 nt, Artificial Sequence
  Description of Artificial Sequence: Synthetic oligonucleotide
ugaagguauuguuggugau

SEQ ID NO: 1799245 - RNA, 19 nt, Artificial Sequence
  Description of Artificial Sequence: Synthetic oligonucleotide
ugccuuugaagguauuguu

SEQ ID NO: 1799246 - RNA, 19 nt, Artificial Sequence
  Description of Artificial Sequence: Synthetic oligonucleotide
caguuuugugcacucugug

SEQ ID NO: 1799247 - RNA, 19 nt, Artificial Sequence
  Description of Artificial Sequence: Synthetic oligonucleotide
gucacguuguggaaagggc

SEQ ID NO: 1799248 - RNA, 19 nt, Artificial Sequence
  Description of Artificial Sequence: Synthetic oligonucleotide
ggaugaguuucuccugggg

SEQ ID NO: 1799249 - RNA, 19 nt, Artificial Sequence
  Description of Artificial Sequence: Synthetic oligonucleotide
acuuguacguugacuccac

SEQ ID NO: 1799250 - RNA, 19 nt, Artificial Sequence
  Description of Artificial Sequence: Synthetic oligonucleotide
accacuguaugcguuccag

SEQ ID NO: 1799251 - RNA, 19 nt, Artificial Sequence
  Description of Artificial Sequence: Synthetic oligonucleotide
ggucacguuguggaaaggg

SEQ ID NO: 1799252 - RNA, 19 nt, Artificial Sequence
  Description of Artificial Sequence: Synthetic oligonucleotide
gaaggcgauuugccugggg

SEQ ID NO: 1799253 - RNA, 19 nt, Artificial Sequence
  Description of Artificial Sequence: Synthetic oligonucleotide
agaauucauggaguuauuu

SEQ ID NO: 1799254 - RNA, 19 nt, Artificial Sequence
  Description of Artificial Sequence: Synthetic oligonucleotide
ucagcccgaauguguuggg

SEQ ID NO: 1799255 - RNA, 19 nt, Artificial Sequence
  Description of Artificial Sequence: Synthetic oligonucleotide
caggaacggguuauucagc

SEQ ID NO: 1799256 - RNA, 19 nt, Artificial Sequence
  Description of Artificial Sequence: Synthetic oligonucleotide
gaagagaugcaggggcccc

SEQ ID NO: 1799257 - RNA, 19 nt, Artificial Sequence
  Description of Artificial Sequence: Synthetic oligonucleotide
augccaaaagaagccaugu

SEQ ID NO: 1799258 - RNA, 19 nt, Artificial Sequence
  Description of Artificial Sequence: Synthetic oligonucleotide
ugccagcaagucugaagag

SEQ ID NO: 1799259 - RNA, 19 nt, Artificial Sequence
  Description of Artificial Sequence: Synthetic oligonucleotide
agguauuguuggugauuuc

SEQ ID NO: 1799260 - RNA, 19 nt, Artificial Sequence
  Description of Artificial Sequence: Synthetic oligonucleotide
gucaaugcauagacacagg

SEQ ID NO: 1799261 - RNA, 19 nt, Artificial Sequence
  Description of Artificial Sequence: Synthetic oligonucleotide
gucacaccuauagggagcc

SEQ ID NO: 1799262 - RNA, 19 nt, Artificial Sequence
  Description of Artificial Sequence: Synthetic oligonucleotide
ugaggcugaggauguuucu

SEQ ID NO: 1799263 - RNA, 19 nt, Artificial Sequence
  Description of Artificial Sequence: Synthetic oligonucleotide
cuguaugcguuccagcgga

SEQ ID NO: 1799264 - RNA, 19 nt, Artificial Sequence
  Description of Artificial Sequence: Synthetic oligonucleotide
ccaaggauaccacuguaug

SEQ ID NO: 1799265 - RNA, 19 nt, Artificial Sequence
  Description of Artificial Sequence: Synthetic oligonucleotide
uggguggucucugugggcu

SEQ ID NO: 1799266 - RNA, 19 nt, Artificial Sequence
  Description of Artificial Sequence: Synthetic oligonucleotide
cugacccaggugcucagag

SEQ ID NO: 1799267 - RNA, 19 nt, Artificial Sequence
  Description of Artificial Sequence: Synthetic oligonucleotide
gggucucaaaugucaaugc

SEQ ID NO: 1799268 - RNA, 19 nt, Artificial Sequence
  Description of Artificial Sequence: Synthetic oligonucleotide
gguuggauacacuaacaaa

SEQ ID NO: 1799269 - RNA, 19 nt, Artificial Sequence
  Description of Artificial Sequence: Synthetic oligonucleotide
gucgguugaucuuuccaca

SEQ ID NO: 1799270 - RNA, 19 nt, Artificial Sequence
  Description of Artificial Sequence: Synthetic oligonucleotide
acucauacuuguacguuga

SEQ ID NO: 1799271 - RNA, 19 nt, Artificial Sequence
  Description of Artificial Sequence: Synthetic oligonucleotide
auucagcccgaauguguug

SEQ ID NO: 1799272 - RNA, 19 nt, Artificial Sequence
  Description of Artificial Sequence: Synthetic oligonucleotide
ggggucucaaaugucaaug

SEQ ID NO: 1799273 - RNA, 19 nt, Artificial Sequence
  Description of Artificial Sequence: Synthetic oligonucleotide
uguuggguucuuccaccac

SEQ ID NO: 1799274 - RNA, 19 nt, Artificial Sequence
  Description of Artificial Sequence: Synthetic oligonucleotide
gaaugugccuuucuacagu

SEQ ID NO: 1799275 - RNA, 19 nt, Artificial Sequence
  Description of Artificial Sequence: Synthetic oligonucleotide
aggauaccacuguaugcgu

SEQ ID NO: 1799276 - RNA, 19 nt, Artificial Sequence
  Description of Artificial Sequence: Synthetic oligonucleotide
gccaaaagaagccaugucu

SEQ ID NO: 1799277 - RNA, 19 nt, Artificial Sequence
  Description of Artificial Sequence: Synthetic oligonucleotide
cucuggcaggguuggauac

SEQ ID NO: 1799278 - RNA, 19 nt, Artificial Sequence
  Description of Artificial Sequence: Synthetic oligonucleotide
cugccuggccuaaaagaug

SEQ ID NO: 1799279 - RNA, 19 nt, Artificial Sequence
  Description of Artificial Sequence: Synthetic oligonucleotide
cuucccggcacaugccggc

SEQ ID NO: 1799280 - RNA, 19 nt, Artificial Sequence
  Description of Artificial Sequence: Synthetic oligonucleotide
uaguccugggucaccccgc

SEQ ID NO: 1799281 - RNA, 19 nt, Artificial Sequence
  Description of Artificial Sequence: Synthetic oligonucleotide
cagcaacuucccauagccc

SEQ ID NO: 1799282 - RNA, 19 nt, Artificial Sequence
  Description of Artificial Sequence: Synthetic oligonucleotide
gaagccggccacccgcacc

SEQ ID NO: 1799283 - RNA, 19 nt, Artificial Sequence
  Description of Artificial Sequence: Synthetic oligonucleotide
acaggcgaaggcucucucu

SEQ ID NO: 1799284 - RNA, 19 nt, Artificial Sequence
  Description of Artificial Sequence: Synthetic oligonucleotide
uacagaauucauggaguua

SEQ ID NO: 1799285 - RNA, 19 nt, Artificial Sequence
  Description of Artificial Sequence: Synthetic oligonucleotide
ugggcugacugugagggau

SEQ ID NO: 1799286 - RNA, 19 nt, Artificial Sequence
  Description of Artificial Sequence: Synthetic oligonucleotide
caucuucccggcacaugcc

SEQ ID NO: 1799287 - RNA, 19 nt, Artificial Sequence
  Description of Artificial Sequence: Synthetic oligonucleotide
cugacugugagggauucca

SEQ ID NO: 1799288 - RNA, 19 nt, Artificial Sequence
  Description of Artificial Sequence: Synthetic oligonucleotide
cuauagggagccgcugacc

SEQ ID NO: 1799289 - RNA, 19 nt, Artificial Sequence
  Description of Artificial Sequence: Synthetic oligonucleotide
ggauguucccacguagucc

SEQ ID NO: 1799290 - RNA, 19 nt, Artificial Sequence
  Description of Artificial Sequence: Synthetic oligonucleotide
cagcaggucacuguguguc

SEQ ID NO: 1799291 - RNA, 19 nt, Artificial Sequence
  Description of Artificial Sequence: Synthetic oligonucleotide
cuggccuaaaagaugccaa

SEQ ID NO: 1799292 - RNA, 19 nt, Artificial Sequence
  Description of Artificial Sequence: Synthetic oligonucleotide
gguuauucagcccgaaugu

SEQ ID NO: 1799293 - RNA, 19 nt, Artificial Sequence
  Description of Artificial Sequence: Synthetic oligonucleotide
aagccccaggcccugggaa

SEQ ID NO: 1799294 - RNA, 19 nt, Artificial Sequence
  Description of Artificial Sequence: Synthetic oligonucleotide
ggucucaaaugucaaugca

SEQ ID NO: 1799295 - RNA, 19 nt, Artificial Sequence
  Description of Artificial Sequence: Synthetic oligonucleotide
caaagguuggccagcaggu

SEQ ID NO: 1799296 - RNA, 19 nt, Artificial Sequence
  Description of Artificial Sequence: Synthetic oligonucleotide
gucccagcgcugcuguagg

SEQ ID NO: 1799297 - RNA, 19 nt, Artificial Sequence
  Description of Artificial Sequence: Synthetic oligonucleotide
ugccaaggauaccacugua

SEQ ID NO: 1799298 - RNA, 19 nt, Artificial Sequence
  Description of Artificial Sequence: Synthetic oligonucleotide
ggcgaaggcucucucuuag

SEQ ID NO: 1799299 - RNA, 19 nt, Artificial Sequence
  Description of Artificial Sequence: Synthetic oligonucleotide
ugcucugaggucacaccua

SEQ ID NO: 1799300 - RNA, 19 nt, Artificial Sequence
  Description of Artificial Sequence: Synthetic oligonucleotide
gguuuacagaauucaugga

SEQ ID NO: 1799301 - RNA, 19 nt, Artificial Sequence
  Description of Artificial Sequence: Synthetic oligonucleotide
ugacugugagggauuccau

SEQ ID NO: 1799302 - RNA, 19 nt, Artificial Sequence
  Description of Artificial Sequence: Synthetic oligonucleotide
agcccugcagugugauuag

SEQ ID NO: 1799303 - RNA, 19 nt, Artificial Sequence
  Description of Artificial Sequence: Synthetic oligonucleotide
cauucaugccagaugccaa

SEQ ID NO: 1799304 - RNA, 19 nt, Artificial Sequence
  Description of Artificial Sequence: Synthetic oligonucleotide
uucaucuucccggcacaug

SEQ ID NO: 1799305 - RNA, 19 nt, Artificial Sequence
  Description of Artificial Sequence: Synthetic oligonucleotide
gguccagcagacuggucag

SEQ ID NO: 1799306 - RNA, 19 nt, Artificial Sequence
  Description of Artificial Sequence: Synthetic oligonucleotide
cucauacuuguacguugac

SEQ ID NO: 1799307 - RNA, 19 nt, Artificial Sequence
  Description of Artificial Sequence: Synthetic oligonucleotide
acccugccuggccuaaaag

SEQ ID NO: 1799308 - RNA, 19 nt, Artificial Sequence
  Description of Artificial Sequence: Synthetic oligonucleotide
guaugcguuccagcggaag

SEQ ID NO: 1799309 - RNA, 19 nt, Artificial Sequence
  Description of Artificial Sequence: Synthetic oligonucleotide
ucuggcaggguuggauaca

SEQ ID NO: 1799310 - RNA, 19 nt, Artificial Sequence
  Description of Artificial Sequence: Synthetic oligonucleotide
auagggagccgcugaccca

SEQ ID NO: 1799311 - RNA, 19 nt, Artificial Sequence
  Description of Artificial Sequence: Synthetic oligonucleotide
uuuccacaggugagcucca

SEQ ID NO: 1799312 - RNA, 19 nt, Artificial Sequence
  Description of Artificial Sequence: Synthetic oligonucleotide
ugcauagacacaggugcuu

SEQ ID NO: 1799313 - RNA, 19 nt, Artificial Sequence
  Description of Artificial Sequence: Synthetic oligonucleotide
agcccgaauguguuggguu

SEQ ID NO: 1799314 - RNA, 19 nt, Artificial Sequence
  Description of Artificial Sequence: Synthetic oligonucleotide
uaccacuguaugcguucca

SEQ ID NO: 1799315 - RNA, 19 nt, Artificial Sequence
  Description of Artificial Sequence: Synthetic oligonucleotide
uggcaggaguccccaucag

SEQ ID NO: 1799316 - RNA, 19 nt, Artificial Sequence
  Description of Artificial Sequence: Synthetic oligonucleotide
gcauuuaugcaaugguuua

SEQ ID NO: 1799317 - RNA, 19 nt, Artificial Sequence
  Description of Artificial Sequence: Synthetic oligonucleotide
cagacacaugggccagucg

SEQ ID NO: 1799318 - RNA, 19 nt, Artificial Sequence
  Description of Artificial Sequence: Synthetic oligonucleotide
ggcaggaacggguuauuca

SEQ ID NO: 1799319 - RNA, 19 nt, Artificial Sequence
  Description of Artificial Sequence: Synthetic oligonucleotide
guuuaacuauuuguuuaaa

SEQ ID NO: 1799320 - RNA, 19 nt, Artificial Sequence
  Description of Artificial Sequence: Synthetic oligonucleotide
aaagcacccucagcaacuu

SEQ ID NO: 1799321 - RNA, 19 nt, Artificial Sequence
  Description of Artificial Sequence: Synthetic oligonucleotide
ggguuggauacacuaacaa

SEQ ID NO: 1799322 - RNA, 19 nt, Artificial Sequence
  Description of Artificial Sequence: Synthetic oligonucleotide
ucccagcgcugcuguaggg

SEQ ID NO: 1799323 - RNA, 19 nt, Artificial Sequence
  Description of Artificial Sequence: Synthetic oligonucleotide
aggguuggauacacuaaca

SEQ ID NO: 1799324 - RNA, 19 nt, Artificial Sequence
  Description of Artificial Sequence: Synthetic oligonucleotide
ggaacggguuauucagccc

SEQ ID NO: 1799325 - RNA, 19 nt, Artificial Sequence
  Description of Artificial Sequence: Synthetic oligonucleotide
ugaaggcgauuugccuggg

SEQ ID NO: 1799326 - RNA, 19 nt, Artificial Sequence
  Description of Artificial Sequence: Synthetic oligonucleotide
acccgcaccgccaucgcuc

SEQ ID NO: 1799327 - RNA, 19 nt, Artificial Sequence
  Description of Artificial Sequence: Synthetic oligonucleotide
cuggcaggguuggauacac

SEQ ID NO: 1799328 - RNA, 19 nt, Artificial Sequence
  Description of Artificial Sequence: Synthetic oligonucleotide
ggucacaccuauagggagc

SEQ ID NO: 1799329 - RNA, 19 nt, Artificial Sequence
  Description of Artificial Sequence: Synthetic oligonucleotide
aacggguuauucagcccga

SEQ ID NO: 1799330 - RNA, 19 nt, Artificial Sequence
  Description of Artificial Sequence: Synthetic oligonucleotide
ucugcucaugcugggucac

SEQ ID NO: 1799331 - RNA, 19 nt, Artificial Sequence
  Description of Artificial Sequence: Synthetic oligonucleotide
uccagcggaaggucugcuc

SEQ ID NO: 1799332 - RNA, 19 nt, Artificial Sequence
  Description of Artificial Sequence: Synthetic oligonucleotide
uguaugcguuccagcggaa

SEQ ID NO: 1799333 - RNA, 19 nt, Artificial Sequence
  Description of Artificial Sequence: Synthetic oligonucleotide
ggaucauaggauguuccca

SEQ ID NO: 1799334 - RNA, 19 nt, Artificial Sequence
  Description of Artificial Sequence: Synthetic oligonucleotide
uggccaccuggaucauagg

SEQ ID NO: 1799335 - RNA, 19 nt, Artificial Sequence
  Description of Artificial Sequence: Synthetic oligonucleotide
cagucgguugaucuuucca

SEQ ID NO: 1799336 - RNA, 19 nt, Artificial Sequence
  Description of Artificial Sequence: Synthetic oligonucleotide
cacaugccggcacgggccc

SEQ ID NO: 1799337 - RNA, 19 nt, Artificial Sequence
  Description of Artificial Sequence: Synthetic oligonucleotide
augcauagacacaggugcu

SEQ ID NO: 1799338 - RNA, 19 nt, Artificial Sequence
  Description of Artificial Sequence: Synthetic oligonucleotide
ccagaugccaaggauacca

SEQ ID NO: 1799339 - RNA, 19 nt, Artificial Sequence
  Description of Artificial Sequence: Synthetic oligonucleotide
ucaccccgcaacugcucug

SEQ ID NO: 1799340 - RNA, 19 nt, Artificial Sequence
  Description of Artificial Sequence: Synthetic oligonucleotide
cauaggauguucccacgua

SEQ ID NO: 1799341 - RNA, 19 nt, Artificial Sequence
  Description of Artificial Sequence: Synthetic oligonucleotide
augccagaugccaaggaua

SEQ ID NO: 1799342 - RNA, 19 nt, Artificial Sequence
  Description of Artificial Sequence: Synthetic oligonucleotide
gcauagacacaggugcuug

SEQ ID NO: 1799343 - RNA, 19 nt, Artificial Sequence
  Description of Artificial Sequence: Synthetic oligonucleotide
cgaaggcucucucuuaggc

SEQ ID NO: 1799344 - RNA, 19 nt, Artificial Sequence
  Description of Artificial Sequence: Synthetic oligonucleotide
cacucugugaaaagacacu

SEQ ID NO: 1799345 - RNA, 19 nt, Artificial Sequence
  Description of Artificial Sequence: Synthetic oligonucleotide
acaccuauagggagccgcu

SEQ ID NO: 1799346 - RNA, 19 nt, Artificial Sequence
  Description of Artificial Sequence: Synthetic oligonucleotide
ggccaccuggaucauagga

SEQ ID NO: 1799347 - RNA, 19 nt, Artificial Sequence
  Description of Artificial Sequence: Synthetic oligonucleotide
ucacaccuauagggagccg

SEQ ID NO: 1799348 - RNA, 19 nt, Artificial Sequence
  Description of Artificial Sequence: Synthetic oligonucleotide
gucauccacaugccuuuga

SEQ ID NO: 1799349 - RNA, 19 nt, Artificial Sequence
  Description of Artificial Sequence: Synthetic oligonucleotide
gggacagcucugaaugugc

SEQ ID NO: 1799350 - RNA, 19 nt, Artificial Sequence
  Description of Artificial Sequence: Synthetic oligonucleotide
caucaggaagccggccacc

SEQ ID NO: 1799351 - RNA, 19 nt, Artificial Sequence
  Description of Artificial Sequence: Synthetic oligonucleotide
uagggccucuggcaggguu

SEQ ID NO: 1799352 - RNA, 19 nt, Artificial Sequence
  Description of Artificial Sequence: Synthetic oligonucleotide
guuccagcggaaggucugc

SEQ ID NO: 1799353 - RNA, 19 nt, Artificial Sequence
  Description of Artificial Sequence: Synthetic oligonucleotide
gggugggaugaguuucucc

SEQ ID NO: 1799354 - RNA, 19 nt, Artificial Sequence
  Description of Artificial Sequence: Synthetic oligonucleotide
gcaaugguuuacagaauuc

SEQ ID NO: 1799355 - RNA, 19 nt, Artificial Sequence
  Description of Artificial Sequence: Synthetic oligonucleotide
ccagcgcugcuguagggcc

SEQ ID NO: 1799356 - RNA, 19 nt, Artificial Sequence
  Description of Artificial Sequence: Synthetic oligonucleotide
gggccuuuaaguagccagc

SEQ ID NO: 1799357 - RNA, 19 nt, Artificial Sequence
  Description of Artificial Sequence: Synthetic oligonucleotide
gaagguauuguuggugauu

SEQ ID NO: 1799358 - RNA, 19 nt, Artificial Sequence
  Description of Artificial Sequence: Synthetic oligonucleotide
aguagccagcauccucaaa

SEQ ID NO: 1799359 - RNA, 19 nt, Artificial Sequence
  Description of Artificial Sequence: Synthetic oligonucleotide
agucauccacaugccuuug

SEQ ID NO: 1799360 - RNA, 19 nt, Artificial Sequence
  Description of Artificial Sequence: Synthetic oligonucleotide
acguuguggaaagggcaga

SEQ ID NO: 1799361 - RNA, 19 nt, Artificial Sequence
  Description of Artificial Sequence: Synthetic oligonucleotide
gcgaaggcucucucuuagg

SEQ ID NO: 1799362 - RNA, 19 nt, Artificial Sequence
  Description of Artificial Sequence: Synthetic oligonucleotide
ccuauagggagccgcugac

SEQ ID NO: 1799363 - RNA, 19 nt, Artificial Sequence
  Description of Artificial Sequence: Synthetic oligonucleotide
ggugagcuccaccuugcuc

SEQ ID NO: 1799364 - RNA, 19 nt, Artificial Sequence
  Description of Artificial Sequence: Synthetic oligonucleotide
caugccagaugccaaggau

SEQ ID NO: 1799365 - RNA, 19 nt, Artificial Sequence
  Description of Artificial Sequence: Synthetic oligonucleotide
gaacucauacuuguacguu

SEQ ID NO: 1799366 - RNA, 19 nt, Artificial Sequence
  Description of Artificial Sequence: Synthetic oligonucleotide
uggcaggguuggauacacu

SEQ ID NO: 1799367 - RNA, 19 nt, Artificial Sequence
  Description of Artificial Sequence: Synthetic oligonucleotide
gcaacuucccauagcccug

SEQ ID NO: 1799368 - RNA, 19 nt, Artificial Sequence
  Description of Artificial Sequence: Synthetic oligonucleotide
acacaggcgaaggcucucu

SEQ ID NO: 1799369 - RNA, 19 nt, Artificial Sequence
  Description of Artificial Sequence: Synthetic oligonucleotide
agagaugcaggggccccga

SEQ ID NO: 1799370 - RNA, 19 nt, Artificial Sequence
  Description of Artificial Sequence: Synthetic oligonucleotide
gcccgaauguguuggguuc

SEQ ID NO: 1799371 - RNA, 19 nt, Artificial Sequence
  Description of Artificial Sequence: Synthetic oligonucleotide
gggucucaagccccaggcc

SEQ ID NO: 1799372 - RNA, 19 nt, Artificial Sequence
  Description of Artificial Sequence: Synthetic oligonucleotide
ucuuaggcugaaggcgauu

SEQ ID NO: 1799373 - RNA, 19 nt, Artificial Sequence
  Description of Artificial Sequence: Synthetic oligonucleotide
gacacaggcgaaggcucuc

SEQ ID NO: 1799374 - RNA, 19 nt, Artificial Sequence
  Description of Artificial Sequence: Synthetic oligonucleotide
gggcagaacucauacuugu

SEQ ID NO: 1799375 - RNA, 19 nt, Artificial Sequence
  Description of Artificial Sequence: Synthetic oligonucleotide
gccacccgcaccgccaucg

SEQ ID NO: 1799376 - RNA, 19 nt, Artificial Sequence
  Description of Artificial Sequence: Synthetic oligonucleotide
augugccuuucuacaguug

SEQ ID NO: 1799377 - RNA, 19 nt, Artificial Sequence
  Description of Artificial Sequence: Synthetic oligonucleotide
gccuuucuacaguugucca

SEQ ID NO: 1799378 - RNA, 19 nt, Artificial Sequence
  Description of Artificial Sequence: Synthetic oligonucleotide
cugcucaugcugggucacg

SEQ ID NO: 1799379 - RNA, 19 nt, Artificial Sequence
  Description of Artificial Sequence: Synthetic oligonucleotide
cacuaggcugaagcacuug

SEQ ID NO: 1799380 - RNA, 19 nt, Artificial Sequence
  Description of Artificial Sequence: Synthetic oligonucleotide
cacguaguccugggucacc

SEQ ID NO: 1799381 - RNA, 19 nt, Artificial Sequence
  Description of Artificial Sequence: Synthetic oligonucleotide
ccgacacaggcgaaggcuc

SEQ ID NO: 1799382 - RNA, 19 nt, Artificial Sequence
  Description of Artificial Sequence: Synthetic oligonucleotide
uuccagcggaaggucugcu

SEQ ID NO: 1799383 - RNA, 19 nt, Artificial Sequence
  Description of Artificial Sequence: Synthetic oligonucleotide
cacaggcgaaggcucucuc

SEQ ID NO: 1799384 - RNA, 19 nt, Artificial Sequence
  Description of Artificial Sequence: Synthetic oligonucleotide
gccggcacgggcccgcgcg

SEQ ID NO: 1799385 - RNA, 19 nt, Artificial Sequence
  Description of Artificial Sequence: Synthetic oligonucleotide
gggcacaacaaagguuggc

SEQ ID NO: 1799386 - RNA, 19 nt, Artificial Sequence
  Description of Artificial Sequence: Synthetic oligonucleotide
caccuauagggagccgcug

SEQ ID NO: 1799387 - RNA, 19 nt, Artificial Sequence
  Description of Artificial Sequence: Synthetic oligonucleotide
gagaugcaggggccccgac

SEQ ID NO: 1799388 - RNA, 19 nt, Artificial Sequence
  Description of Artificial Sequence: Synthetic oligonucleotide
ggccuuuaaguagccagca

SEQ ID NO: 1799389 - RNA, 19 nt, Artificial Sequence
  Description of Artificial Sequence: Synthetic oligonucleotide
cccauucaugccagaugcc

SEQ ID NO: 1799390 - RNA, 19 nt, Artificial Sequence
  Description of Artificial Sequence: Synthetic oligonucleotide
cgguugaucuuuccacagg

SEQ ID NO: 1799391 - RNA, 19 nt, Artificial Sequence
  Description of Artificial Sequence: Synthetic oligonucleotide
caugccggcacgggcccgc

SEQ ID NO: 1799392 - RNA, 19 nt, Artificial Sequence
  Description of Artificial Sequence: Synthetic oligonucleotide
cucugugggcugacuguga

SEQ ID NO: 1799393 - RNA, 19 nt, Artificial Sequence
  Description of Artificial Sequence: Synthetic oligonucleotide
ccucagcaacuucccauag

SEQ ID NO: 1799394 - RNA, 19 nt, Artificial Sequence
  Description of Artificial Sequence: Synthetic oligonucleotide
cccugccuggccuaaaaga

SEQ ID NO: 1799395 - RNA, 19 nt, Artificial Sequence
  Description of Artificial Sequence: Synthetic oligonucleotide
cccgcaacugcucugaggu

SEQ ID NO: 1799396 - RNA, 19 nt, Artificial Sequence
  Description of Artificial Sequence: Synthetic oligonucleotide
uucccggcacaugccggca

SEQ ID NO: 1799397 - RNA, 19 nt, Artificial Sequence
  Description of Artificial Sequence: Synthetic oligonucleotide
uugacuccacuaggcugaa

SEQ ID NO: 1799398 - RNA, 19 nt, Artificial Sequence
  Description of Artificial Sequence: Synthetic oligonucleotide
ccagucgguugaucuuucc

SEQ ID NO: 1799399 - RNA, 19 nt, Artificial Sequence
  Description of Artificial Sequence: Synthetic oligonucleotide
gcucagacacaugggccag

SEQ ID NO: 1799400 - RNA, 19 nt, Artificial Sequence
  Description of Artificial Sequence: Synthetic oligonucleotide
ugggugggaugaguuucuc

SEQ ID NO: 1799401 - RNA, 19 nt, Artificial Sequence
  Description of Artificial Sequence: Synthetic oligonucleotide
accccgcaacugcucugag

SEQ ID NO: 1799402 - RNA, 19 nt, Artificial Sequence
  Description of Artificial Sequence: Synthetic oligonucleotide
caccuggaucauaggaugu

SEQ ID NO: 1799403 - RNA, 19 nt, Artificial Sequence
  Description of Artificial Sequence: Synthetic oligonucleotide
gcaagucugaagagaugca

SEQ ID NO: 1799404 - RNA, 19 nt, Artificial Sequence
  Description of Artificial Sequence: Synthetic oligonucleotide
cacaccaguuuugugcacu

SEQ ID NO: 1799405 - RNA, 19 nt, Artificial Sequence
  Description of Artificial Sequence: Synthetic oligonucleotide
ccccgcaacugcucugagg

SEQ ID NO: 1799406 - RNA, 19 nt, Artificial Sequence
  Description of Artificial Sequence: Synthetic oligonucleotide
ggucacugugugucaggga

SEQ ID NO: 1799407 - RNA, 19 nt, Artificial Sequence
  Description of Artificial Sequence: Synthetic oligonucleotide
augcaggggccccgacaca

SEQ ID NO: 1799408 - RNA, 19 nt, Artificial Sequence
  Description of Artificial Sequence: Synthetic oligonucleotide
gcgauuugccuggggcagg

SEQ ID NO: 1799409 - RNA, 19 nt, Artificial Sequence
  Description of Artificial Sequence: Synthetic oligonucleotide
gccccgacacaggcgaagg

SEQ ID NO: 1799410 - RNA, 19 nt, Artificial Sequence
  Description of Artificial Sequence: Synthetic oligonucleotide
acaugccggcacgggcccg

SEQ ID NO: 1799411 - RNA, 19 nt, Artificial Sequence
  Description of Artificial Sequence: Synthetic oligonucleotide
gcaggguuggauacacuaa

SEQ ID NO: 1799412 - RNA, 19 nt, Artificial Sequence
  Description of Artificial Sequence: Synthetic oligonucleotide
cacccucagcaacuuccca

SEQ ID NO: 1799413 - RNA, 19 nt, Artificial Sequence
  Description of Artificial Sequence: Synthetic oligonucleotide
cccggcacaugccggcacg

SEQ ID NO: 1799414 - RNA, 19 nt, Artificial Sequence
  Description of Artificial Sequence: Synthetic oligonucleotide
cuuguacguugacuccacu

SEQ ID NO: 1799415 - RNA, 19 nt, Artificial Sequence
  Description of Artificial Sequence: Synthetic oligonucleotide
acggguuauucagcccgaa

SEQ ID NO: 1799416 - RNA, 19 nt, Artificial Sequence
  Description of Artificial Sequence: Synthetic oligonucleotide
caccccgcaacugcucuga

SEQ ID NO: 1799417 - RNA, 19 nt, Artificial Sequence
  Description of Artificial Sequence: Synthetic oligonucleotide
ggcaggaguccccaucagu

SEQ ID NO: 1799418 - RNA, 19 nt, Artificial Sequence
  Description of Artificial Sequence: Synthetic oligonucleotide
cgcaacugcucugagguca

SEQ ID NO: 1799419 - RNA, 19 nt, Artificial Sequence
  Description of Artificial Sequence: Synthetic oligonucleotide
gggucacguuguggaaagg

SEQ ID NO: 1799420 - RNA, 19 nt, Artificial Sequence
  Description of Artificial Sequence: Synthetic oligonucleotide
aguuucuccuggggccuuu

SEQ ID NO: 1799421 - RNA, 19 nt, Artificial Sequence
  Description of Artificial Sequence: Synthetic oligonucleotide
ugccggcacgggcccgcgc

SEQ ID NO: 1799422 - RNA, 19 nt, Artificial Sequence
  Description of Artificial Sequence: Synthetic oligonucleotide
ggccccgacacaggcgaag

SEQ ID NO: 1799423 - RNA, 19 nt, Artificial Sequence
  Description of Artificial Sequence: Synthetic oligonucleotide
cagacuggucagucuuugu

SEQ ID NO: 1799424 - RNA, 19 nt, Artificial Sequence
  Description of Artificial Sequence: Synthetic oligonucleotide
ggcacgggcccgcgcgccg

SEQ ID NO: 1799425 - RNA, 19 nt, Artificial Sequence
  Description of Artificial Sequence: Synthetic oligonucleotide
gcucugaggucacaccuau

SEQ ID NO: 1799426 - RNA, 19 nt, Artificial Sequence
  Description of Artificial Sequence: Synthetic oligonucleotide
ccgggaguggcaggagucc

SEQ ID NO: 1799427 - RNA, 19 nt, Artificial Sequence
  Description of Artificial Sequence: Synthetic oligonucleotide
auguucccacguaguccug

SEQ ID NO: 1799428 - RNA, 19 nt, Artificial Sequence
  Description of Artificial Sequence: Synthetic oligonucleotide
cagaauucauggaguuauu

SEQ ID NO: 1799429 - RNA, 19 nt, Artificial Sequence
  Description of Artificial Sequence: Synthetic oligonucleotide
ggcagaacucauacuugua

SEQ ID NO: 1799430 - RNA, 19 nt, Artificial Sequence
  Description of Artificial Sequence: Synthetic oligonucleotide
cucugaggucacaccuaua

SEQ ID NO: 1799431 - RNA, 19 nt, Artificial Sequence
  Description of Artificial Sequence: Synthetic oligonucleotide
gccagaugccaaggauacc

SEQ ID NO: 1799432 - RNA, 19 nt, Artificial Sequence
  Description of Artificial Sequence: Synthetic oligonucleotide
cguaguccugggucacccc

SEQ ID NO: 1799433 - RNA, 19 nt, Artificial Sequence
  Description of Artificial Sequence: Synthetic oligonucleotide
gccaccuggaucauaggau

SEQ ID NO: 1799434 - RNA, 19 nt, Artificial Sequence
  Description of Artificial Sequence: Synthetic oligonucleotide
cucuuaggcugaaggcgau

SEQ ID NO: 1799435 - RNA, 19 nt, Artificial Sequence
  Description of Artificial Sequence: Synthetic oligonucleotide
agccgcugacccaggugcu

SEQ ID NO: 1799436 - RNA, 19 nt, Artificial Sequence
  Description of Artificial Sequence: Synthetic oligonucleotide
cuggucccagcgcugcugu

SEQ ID NO: 1799437 - RNA, 19 nt, Artificial Sequence
  Description of Artificial Sequence: Synthetic oligonucleotide
guaccuccugggacagcuc

SEQ ID NO: 1799438 - RNA, 19 nt, Artificial Sequence
  Description of Artificial Sequence: Synthetic oligonucleotide
gccccaggcccugggaacc

SEQ ID NO: 1799439 - RNA, 19 nt, Artificial Sequence
  Description of Artificial Sequence: Synthetic oligonucleotide
gcucugaaugugccuuucu

SEQ ID NO: 1799440 - RNA, 19 nt, Artificial Sequence
  Description of Artificial Sequence: Synthetic oligonucleotide
ccccgacacaggcgaaggc

SEQ ID NO: 1799441 - RNA, 19 nt, Artificial Sequence
  Description of Artificial Sequence: Synthetic oligonucleotide
cuccgggaguggcaggagu

SEQ ID NO: 1799442 - RNA, 19 nt, Artificial Sequence
  Description of Artificial Sequence: Synthetic oligonucleotide
ccacguaguccugggucac

SEQ ID NO: 1799443 - RNA, 19 nt, Artificial Sequence
  Description of Artificial Sequence: Synthetic oligonucleotide
gccuggccuaaaagaugcc

SEQ ID NO: 1799444 - RNA, 19 nt, Artificial Sequence
  Description of Artificial Sequence: Synthetic oligonucleotide
cuuggccaccuggaucaua

SEQ ID NO: 1799445 - RNA, 19 nt, Artificial Sequence
  Description of Artificial Sequence: Synthetic oligonucleotide
gccagucgguugaucuuuc

SEQ ID NO: 1799446 - RNA, 19 nt, Artificial Sequence
  Description of Artificial Sequence: Synthetic oligonucleotide
gcuccgggaguggcaggag

SEQ ID NO: 1799447 - RNA, 19 nt, Artificial Sequence
  Description of Artificial Sequence: Synthetic oligonucleotide
cgaauguguuggguucuuc

SEQ ID NO: 1799448 - RNA, 19 nt, Artificial Sequence
  Description of Artificial Sequence: Synthetic oligonucleotide
cccgacacaggcgaaggcu

SEQ ID NO: 1799449 - RNA, 19 nt, Artificial Sequence
  Description of Artificial Sequence: Synthetic oligonucleotide
ccacccgcaccgccaucgc

SEQ ID NO: 1799450 - RNA, 19 nt, Artificial Sequence
  Description of Artificial Sequence: Synthetic oligonucleotide
cagcccgaauguguugggu

SEQ ID NO: 1799451 - RNA, 19 nt, Artificial Sequence
  Description of Artificial Sequence: Synthetic oligonucleotide
cucagacacaugggccagu

SEQ ID NO: 1799452 - RNA, 19 nt, Artificial Sequence
  Description of Artificial Sequence: Synthetic oligonucleotide
gcugacccaggugcucaga

SEQ ID NO: 1799453 - RNA, 19 nt, Artificial Sequence
  Description of Artificial Sequence: Synthetic oligonucleotide
gccgcugacccaggugcuc

SEQ ID NO: 1799454 - RNA, 19 nt, Artificial Sequence
  Description of Artificial Sequence: Synthetic oligonucleotide
gggucaccccgcaacugcu

SEQ ID NO: 1799455 - RNA, 19 nt, Artificial Sequence
  Description of Artificial Sequence: Synthetic oligonucleotide
ccagcaggucacugugugu

SEQ ID NO: 1799456 - RNA, 19 nt, Artificial Sequence
  Description of Artificial Sequence: Synthetic oligonucleotide
ccgcugacccaggugcuca

SEQ ID NO: 1799457 - RNA, 19 nt, Artificial Sequence
  Description of Artificial Sequence: Synthetic oligonucleotide
gccugcuccgggaguggca

SEQ ID NO: 1799458 - RNA, 19 nt, Artificial Sequence
  Description of Artificial Sequence: Synthetic oligonucleotide
ccggcacgggcccgcgcgc

SEQ ID NO: 1799459 - RNA, 19 nt, Artificial Sequence
  Description of Artificial Sequence: Synthetic oligonucleotide
cgauuugccuggggcagga

SEQ ID NO: 1799460 - RNA, 19 nt, Artificial Sequence
  Description of Artificial Sequence: Synthetic oligonucleotide
gcacgggcccgcgcgccgc

SEQ ID NO: 1799461 - RNA, 19 nt, Artificial Sequence
  Description of Artificial Sequence: Synthetic oligonucleotide
cccgaauguguuggguucu

SEQ ID NO: 1799462 - RNA, 19 nt, Artificial Sequence
  Description of Artificial Sequence: Synthetic oligonucleotide
gggacccugccuggccuaa

SEQ ID NO: 1799463 - RNA, 19 nt, Artificial Sequence
  Description of Artificial Sequence: Synthetic oligonucleotide
ccccaucagucauccacau

SEQ ID NO: 1799464 - RNA, 19 nt, Artificial Sequence
  Description of Artificial Sequence: Synthetic oligonucleotide
ccacuaggcugaagcacuu

SEQ ID NO: 1799465 - RNA, 19 nt, Artificial Sequence
  Description of Artificial Sequence: Synthetic oligonucleotide
ggacccugccuggccuaaa

SEQ ID NO: 1799466 - RNA, 19 nt, Artificial Sequence
  Description of Artificial Sequence: Synthetic oligonucleotide
guagggccucuggcagggu

SEQ ID NO: 1799467 - RNA, 19 nt, Artificial Sequence
  Description of Artificial Sequence: Synthetic oligonucleotide
gggcugacugugagggauu

SEQ ID NO: 1799468 - RNA, 19 nt, Artificial Sequence
  Description of Artificial Sequence: Synthetic oligonucleotide
ggccucuggcaggguugga

SEQ ID NO: 1799469 - RNA, 19 nt, Artificial Sequence
  Description of Artificial Sequence: Synthetic oligonucleotide
gggccccgacacaggcgaa

SEQ ID NO: 1799470 - RNA, 19 nt, Artificial Sequence
  Description of Artificial Sequence: Synthetic oligonucleotide
ccgaauguguuggguucuu

SEQ ID NO: 1799471 - RNA, 19 nt, Artificial Sequence
  Description of Artificial Sequence: Synthetic oligonucleotide
aaagaaaucugaaaagagg

SEQ ID NO: 1799472 - RNA, 19 nt, Artificial Sequence
  Description of Artificial Sequence: Synthetic oligonucleotide
guuucuaagaaacagcugc

SEQ ID NO: 1799473 - RNA, 19 nt, Artificial Sequence
  Description of Artificial Sequence: Synthetic oligonucleotide
ucugauaaucccuucaucc

SEQ ID NO: 1799474 - RNA, 19 nt, Artificial Sequence
  Description of Artificial Sequence: Synthetic oligonucleotide
ucuucauugaucacaagcc

SEQ ID NO: 1799475 - RNA, 19 nt, Artificial Sequence
  Description of Artificial Sequence: Synthetic oligonucleotide
gaaacaccgagacagaaag

SEQ ID NO: 1799476 - RNA, 19 nt, Artificial Sequence
  Description of Artificial Sequence: Synthetic oligonucleotide
gauaucagcauccaagaug

SEQ ID NO: 1799477 - RNA, 19 nt, Artificial Sequence
  Description of Artificial Sequence: Synthetic oligonucleotide
uacuagguaauuauaaaca

SEQ ID NO: 1799478 - RNA, 19 nt, Artificial Sequence
  Description of Artificial Sequence: Synthetic oligonucleotide
guuguuaaaaggcaccugg

SEQ ID NO: 1799479 - RNA, 19 nt, Artificial Sequence
  Description of Artificial Sequence: Synthetic oligonucleotide
caagauguuucuaagaaac

SEQ ID NO: 1799480 - RNA, 19 nt, Artificial Sequence
  Description of Artificial Sequence: Synthetic oligonucleotide
aaaucacagacccaaagaa

SEQ ID NO: 1799481 - RNA, 19 nt, Artificial Sequence
  Description of Artificial Sequence: Synthetic oligonucleotide
aagaaaucugaaaagagga

SEQ ID NO: 1799482 - RNA, 19 nt, Artificial Sequence
  Description of Artificial Sequence: Synthetic oligonucleotide
uuacuagguaauuauaaac

SEQ ID NO: 1799483 - RNA, 19 nt, Artificial Sequence
  Description of Artificial Sequence: Synthetic oligonucleotide
auacugauuguuccgaagg

SEQ ID NO: 1799484 - RNA, 19 nt, Artificial Sequence
  Description of Artificial Sequence: Synthetic oligonucleotide
gaaaugacgauguuggguc

SEQ ID NO: 1799485 - RNA, 19 nt, Artificial Sequence
  Description of Artificial Sequence: Synthetic oligonucleotide
uauaaacagagcauucuga

SEQ ID NO: 1799486 - RNA, 19 nt, Artificial Sequence
  Description of Artificial Sequence: Synthetic oligonucleotide
agugauaucagcauccaag

SEQ ID NO: 1799487 - RNA, 19 nt, Artificial Sequence
  Description of Artificial Sequence: Synthetic oligonucleotide
auugaucacaagccaaaac

SEQ ID NO: 1799488 - RNA, 19 nt, Artificial Sequence
  Description of Artificial Sequence: Synthetic oligonucleotide
aaucaagaccaaucgaggu

SEQ ID NO: 1799489 - RNA, 19 nt, Artificial Sequence
  Description of Artificial Sequence: Synthetic oligonucleotide
uuaaaaggcaccuggugca

SEQ ID NO: 1799490 - RNA, 19 nt, Artificial Sequence
  Description of Artificial Sequence: Synthetic oligonucleotide
uccauauacugauuguucc

SEQ ID NO: 1799491 - RNA, 19 nt, Artificial Sequence
  Description of Artificial Sequence: Synthetic oligonucleotide
aauguaccaggcgacaggg

SEQ ID NO: 1799492 - RNA, 19 nt, Artificial Sequence
  Description of Artificial Sequence: Synthetic oligonucleotide
uguuaaaaggcaccuggug

SEQ ID NO: 1799493 - RNA, 19 nt, Artificial Sequence
  Description of Artificial Sequence: Synthetic oligonucleotide
aauuacuagguaauuauaa

SEQ ID NO: 1799494 - RNA, 19 nt, Artificial Sequence
  Description of Artificial Sequence: Synthetic oligonucleotide
ugaucacaagccaaaaccu

SEQ ID NO: 1799495 - RNA, 19 nt, Artificial Sequence
  Description of Artificial Sequence: Synthetic oligonucleotide
agauguuucuaagaaacag

SEQ ID NO: 1799496 - RNA, 19 nt, Artificial Sequence
  Description of Artificial Sequence: Synthetic oligonucleotide
agaaagaaaucugaaaaga

SEQ ID NO: 1799497 - RNA, 19 nt, Artificial Sequence
  Description of Artificial Sequence: Synthetic oligonucleotide
uacugauuguuccgaaggg

SEQ ID NO: 1799498 - RNA, 19 nt, Artificial Sequence
  Description of Artificial Sequence: Synthetic oligonucleotide
gauguuucuaagaaacagc

SEQ ID NO: 1799499 - RNA, 19 nt, Artificial Sequence
  Description of Artificial Sequence: Synthetic oligonucleotide
uuucccguccaugauaccg

SEQ ID NO: 1799500 - RNA, 19 nt, Artificial Sequence
  Description of Artificial Sequence: Synthetic oligonucleotide
aaaugacgauguugggucg

SEQ ID NO: 1799501 - RNA, 19 nt, Artificial Sequence
  Description of Artificial Sequence: Synthetic oligonucleotide
guuccgaagggucacacag

SEQ ID NO: 1799502 - RNA, 19 nt, Artificial Sequence
  Description of Artificial Sequence: Synthetic oligonucleotide
uauacugauuguuccgaag

SEQ ID NO: 1799503 - RNA, 19 nt, Artificial Sequence
  Description of Artificial Sequence: Synthetic oligonucleotide
gggaaaucaagaccaaucg

SEQ ID NO: 1799504 - RNA, 19 nt, Artificial Sequence
  Description of Artificial Sequence: Synthetic oligonucleotide
auaucagcauccaagaugu

SEQ ID NO: 1799505 - RNA, 19 nt, Artificial Sequence
  Description of Artificial Sequence: Synthetic oligonucleotide
aaucacagacccaaagaag

SEQ ID NO: 1799506 - RNA, 19 nt, Artificial Sequence
  Description of Artificial Sequence: Synthetic oligonucleotide
auuacuagguaauuauaaa

SEQ ID NO: 1799507 - RNA, 19 nt, Artificial Sequence
  Description of Artificial Sequence: Synthetic oligonucleotide
ugcaaaacuggauuccucu

SEQ ID NO: 1799508 - RNA, 19 nt, Artificial Sequence
  Description of Artificial Sequence: Synthetic oligonucleotide
aacaccgagacagaaagaa

SEQ ID NO: 1799509 - RNA, 19 nt, Artificial Sequence
  Description of Artificial Sequence: Synthetic oligonucleotide
gaaucgagaccucaucagc

SEQ ID NO: 1799510 - RNA, 19 nt, Artificial Sequence
  Description of Artificial Sequence: Synthetic oligonucleotide
gauaccgguguccggaucc

SEQ ID NO: 1799511 - RNA, 19 nt, Artificial Sequence
  Description of Artificial Sequence: Synthetic oligonucleotide
uccguuauccacugagcgg

SEQ ID NO: 1799512 - RNA, 19 nt, Artificial Sequence
  Description of Artificial Sequence: Synthetic oligonucleotide
ucuuucccguccaugauac

SEQ ID NO: 1799513 - RNA, 19 nt, Artificial Sequence
  Description of Artificial Sequence: Synthetic oligonucleotide
uucauugaucacaagccaa

SEQ ID NO: 1799514 - RNA, 19 nt, Artificial Sequence
  Description of Artificial Sequence: Synthetic oligonucleotide
caugcaguucccauuacug

SEQ ID NO: 1799515 - RNA, 19 nt, Artificial Sequence
  Description of Artificial Sequence: Synthetic oligonucleotide
ugaaaugacgauguugggu

SEQ ID NO: 1799516 - RNA, 19 nt, Artificial Sequence
  Description of Artificial Sequence: Synthetic oligonucleotide
agcuugcaaaacuggauuc

SEQ ID NO: 1799517 - RNA, 19 nt, Artificial Sequence
  Description of Artificial Sequence: Synthetic oligonucleotide
ugaacuuuccagaguaaaa

SEQ ID NO: 1799518 - RNA, 19 nt, Artificial Sequence
  Description of Artificial Sequence: Synthetic oligonucleotide
caaggaacuugacagaguc

SEQ ID NO: 1799519 - RNA, 19 nt, Artificial Sequence
  Description of Artificial Sequence: Synthetic oligonucleotide
ucuauccuggaguugagau

SEQ ID NO: 1799520 - RNA, 19 nt, Artificial Sequence
  Description of Artificial Sequence: Synthetic oligonucleotide
uccgaagggucacacaggc

SEQ ID NO: 1799521 - RNA, 19 nt, Artificial Sequence
  Description of Artificial Sequence: Synthetic oligonucleotide
ucauugaucacaagccaaa

SEQ ID NO: 1799522 - RNA, 19 nt, Artificial Sequence
  Description of Artificial Sequence: Synthetic oligonucleotide
ugcuuugugugcuggaccc

SEQ ID NO: 1799523 - RNA, 19 nt, Artificial Sequence
  Description of Artificial Sequence: Synthetic oligonucleotide
agggaaaucaagaccaauc

SEQ ID NO: 1799524 - RNA, 19 nt, Artificial Sequence
  Description of Artificial Sequence: Synthetic oligonucleotide
uggacuaguggguuugugc

SEQ ID NO: 1799525 - RNA, 19 nt, Artificial Sequence
  Description of Artificial Sequence: Synthetic oligonucleotide
uuccauauacugauuguuc

SEQ ID NO: 1799526 - RNA, 19 nt, Artificial Sequence
  Description of Artificial Sequence: Synthetic oligonucleotide
guccguuauccacugagcg

SEQ ID NO: 1799527 - RNA, 19 nt, Artificial Sequence
  Description of Artificial Sequence: Synthetic oligonucleotide
uaagcuugcaaaacuggau

SEQ ID NO: 1799528 - RNA, 19 nt, Artificial Sequence
  Description of Artificial Sequence: Synthetic oligonucleotide
ugggucggaaguuagucgc

SEQ ID NO: 1799529 - RNA, 19 nt, Artificial Sequence
  Description of Artificial Sequence: Synthetic oligonucleotide
augcaguucccauuacugg

SEQ ID NO: 1799530 - RNA, 19 nt, Artificial Sequence
  Description of Artificial Sequence: Synthetic oligonucleotide
aacuuuccagaguaaaaua

SEQ ID NO: 1799531 - RNA, 19 nt, Artificial Sequence
  Description of Artificial Sequence: Synthetic oligonucleotide
cagaguaaaauacugucca

SEQ ID NO: 1799532 - RNA, 19 nt, Artificial Sequence
  Description of Artificial Sequence: Synthetic oligonucleotide
aaccauuuccagugauauc

SEQ ID NO: 1799533 - RNA, 19 nt, Artificial Sequence
  Description of Artificial Sequence: Synthetic oligonucleotide
uccaugauaccgguguccg

SEQ ID NO: 1799534 - RNA, 19 nt, Artificial Sequence
  Description of Artificial Sequence: Synthetic oligonucleotide
ucgagaccucaucagcugg

SEQ ID NO: 1799535 - RNA, 19 nt, Artificial Sequence
  Description of Artificial Sequence: Synthetic oligonucleotide
aaaggaccaagaaugggcu

SEQ ID NO: 1799536 - RNA, 19 nt, Artificial Sequence
  Description of Artificial Sequence: Synthetic oligonucleotide
aaugacgauguugggucgg

SEQ ID NO: 1799537 - RNA, 19 nt, Artificial Sequence
  Description of Artificial Sequence: Synthetic oligonucleotide
uagcuuuccauauacugau

SEQ ID NO: 1799538 - RNA, 19 nt, Artificial Sequence
  Description of Artificial Sequence: Synthetic oligonucleotide
ugucccugaacuuuccaga

SEQ ID NO: 1799539 - RNA, 19 nt, Artificial Sequence
  Description of Artificial Sequence: Synthetic oligonucleotide
gucagggaaaucaagacca

SEQ ID NO: 1799540 - RNA, 19 nt, Artificial Sequence
  Description of Artificial Sequence: Synthetic oligonucleotide
auccgaguaggccaccugg

SEQ ID NO: 1799541 - RNA, 19 nt, Artificial Sequence
  Description of Artificial Sequence: Synthetic oligonucleotide
agagcugcgccaccguccc

SEQ ID NO: 1799542 - RNA, 19 nt, Artificial Sequence
  Description of Artificial Sequence: Synthetic oligonucleotide
ucgaaauguaccaggcgac

SEQ ID NO: 1799543 - RNA, 19 nt, Artificial Sequence
  Description of Artificial Sequence: Synthetic oligonucleotide
ucaagaccaaucgagguuc

SEQ ID NO: 1799544 - RNA, 19 nt, Artificial Sequence
  Description of Artificial Sequence: Synthetic oligonucleotide
cuugcauccgaguaggcca

SEQ ID NO: 1799545 - RNA, 19 nt, Artificial Sequence
  Description of Artificial Sequence: Synthetic oligonucleotide
gacgauguugggucggaag

SEQ ID NO: 1799546 - RNA, 19 nt, Artificial Sequence
  Description of Artificial Sequence: Synthetic oligonucleotide
accguuguuaaaaggcacc

SEQ ID NO: 1799547 - RNA, 19 nt, Artificial Sequence
  Description of Artificial Sequence: Synthetic oligonucleotide
agaaaggaccaagaauggg

SEQ ID NO: 1799548 - RNA, 19 nt, Artificial Sequence
  Description of Artificial Sequence: Synthetic oligonucleotide
uuguuaaaaggcaccuggu

SEQ ID NO: 1799549 - RNA, 19 nt, Artificial Sequence
  Description of Artificial Sequence: Synthetic oligonucleotide
aaucgagaccucaucagcu

SEQ ID NO: 1799550 - RNA, 19 nt, Artificial Sequence
  Description of Artificial Sequence: Synthetic oligonucleotide
aagguacacagggucuccc

SEQ ID NO: 1799551 - RNA, 19 nt, Artificial Sequence
  Description of Artificial Sequence: Synthetic oligonucleotide
gaccucaucagcugggaac

SEQ ID NO: 1799552 - RNA, 19 nt, Artificial Sequence
  Description of Artificial Sequence: Synthetic oligonucleotide
cugauuguuccgaaggguc

SEQ ID NO: 1799553 - RNA, 19 nt, Artificial Sequence
  Description of Artificial Sequence: Synthetic oligonucleotide
cucgaaauguaccaggcga

SEQ ID NO: 1799554 - RNA, 19 nt, Artificial Sequence
  Description of Artificial Sequence: Synthetic oligonucleotide
caaucgagguuccugccgg

SEQ ID NO: 1799555 - RNA, 19 nt, Artificial Sequence
  Description of Artificial Sequence: Synthetic oligonucleotide
gaaauguaccaggcgacag

SEQ ID NO: 1799556 - RNA, 19 nt, Artificial Sequence
  Description of Artificial Sequence: Synthetic oligonucleotide
aucugaaaagaggaaaacu

SEQ ID NO: 1799557 - RNA, 19 nt, Artificial Sequence
  Description of Artificial Sequence: Synthetic oligonucleotide
guuucagugccacuucccc

SEQ ID NO: 1799558 - RNA, 19 nt, Artificial Sequence
  Description of Artificial Sequence: Synthetic oligonucleotide
gauccaccguuguuaaaag

SEQ ID NO: 1799559 - RNA, 19 nt, Artificial Sequence
  Description of Artificial Sequence: Synthetic oligonucleotide
agaucuuccaaggaugccu

SEQ ID NO: 1799560 - RNA, 19 nt, Artificial Sequence
  Description of Artificial Sequence: Synthetic oligonucleotide
uuccccaaugaggagcucg

SEQ ID NO: 1799561 - RNA, 19 nt, Artificial Sequence
  Description of Artificial Sequence: Synthetic oligonucleotide
auucugauaaucccuucau

SEQ ID NO: 1799562 - RNA, 19 nt, Artificial Sequence
  Description of Artificial Sequence: Synthetic oligonucleotide
accucaucagcugggaacg

SEQ ID NO: 1799563 - RNA, 19 nt, Artificial Sequence
  Description of Artificial Sequence: Synthetic oligonucleotide
agaccgugcacucugcacu

SEQ ID NO: 1799564 - RNA, 19 nt, Artificial Sequence
  Description of Artificial Sequence: Synthetic oligonucleotide
uuccgaagggucacacagg

SEQ ID NO: 1799565 - RNA, 19 nt, Artificial Sequence
  Description of Artificial Sequence: Synthetic oligonucleotide
uucuaagaaacagcugcug

SEQ ID NO: 1799566 - RNA, 19 nt, Artificial Sequence
  Description of Artificial Sequence: Synthetic oligonucleotide
uggugcaagccaucacucg

SEQ ID NO: 1799567 - RNA, 19 nt, Artificial Sequence
  Description of Artificial Sequence: Synthetic oligonucleotide
aggaaaacuuggaaaucac

SEQ ID NO: 1799568 - RNA, 19 nt, Artificial Sequence
  Description of Artificial Sequence: Synthetic oligonucleotide
cagcgaaugcagaaaguag

SEQ ID NO: 1799569 - RNA, 19 nt, Artificial Sequence
  Description of Artificial Sequence: Synthetic oligonucleotide
aaauuacuagguaauuaua

SEQ ID NO: 1799570 - RNA, 19 nt, Artificial Sequence
  Description of Artificial Sequence: Synthetic oligonucleotide
agaagguacacagggucuc

SEQ ID NO: 1799571 - RNA, 19 nt, Artificial Sequence
  Description of Artificial Sequence: Synthetic oligonucleotide
aaucgagguuccugccggg

SEQ ID NO: 1799572 - RNA, 19 nt, Artificial Sequence
  Description of Artificial Sequence: Synthetic oligonucleotide
cuaagcuugcaaaacugga

SEQ ID NO: 1799573 - RNA, 19 nt, Artificial Sequence
  Description of Artificial Sequence: Synthetic oligonucleotide
uuuccauauacugauuguu

SEQ ID NO: 1799574 - RNA, 19 nt, Artificial Sequence
  Description of Artificial Sequence: Synthetic oligonucleotide
agaaacagcugcuggucca

SEQ ID NO: 1799575 - RNA, 19 nt, Artificial Sequence
  Description of Artificial Sequence: Synthetic oligonucleotide
uccagaacaugcaguuccc

SEQ ID NO: 1799576 - RNA, 19 nt, Artificial Sequence
  Description of Artificial Sequence: Synthetic oligonucleotide
caggaaguccguuauccac

SEQ ID NO: 1799577 - RNA, 19 nt, Artificial Sequence
  Description of Artificial Sequence: Synthetic oligonucleotide
aagagggguagcuuuccau

SEQ ID NO: 1799578 - RNA, 19 nt, Artificial Sequence
  Description of Artificial Sequence: Synthetic oligonucleotide
ucguuucagugccacuucc

SEQ ID NO: 1799579 - RNA, 19 nt, Artificial Sequence
  Description of Artificial Sequence: Synthetic oligonucleotide
guaggcagcacugaggguc

SEQ ID NO: 1799580 - RNA, 19 nt, Artificial Sequence
  Description of Artificial Sequence: Synthetic oligonucleotide
auccaccguuguuaaaagg

SEQ ID NO: 1799581 - RNA, 19 nt, Artificial Sequence
  Description of Artificial Sequence: Synthetic oligonucleotide
uggggcucgaaauguacca

SEQ ID NO: 1799582 - RNA, 19 nt, Artificial Sequence
  Description of Artificial Sequence: Synthetic oligonucleotide
agcgaaugcagaaaguaga

SEQ ID NO: 1799583 - RNA, 19 nt, Artificial Sequence
  Description of Artificial Sequence: Synthetic oligonucleotide
aucaagaccaaucgagguu

SEQ ID NO: 1799584 - RNA, 19 nt, Artificial Sequence
  Description of Artificial Sequence: Synthetic oligonucleotide
ccagaguaaaauacugucc

SEQ ID NO: 1799585 - RNA, 19 nt, Artificial Sequence
  Description of Artificial Sequence: Synthetic oligonucleotide
ugauaucagcauccaagau

SEQ ID NO: 1799586 - RNA, 19 nt, Artificial Sequence
  Description of Artificial Sequence: Synthetic oligonucleotide
guagcuuuccauauacuga

SEQ ID NO: 1799587 - RNA, 19 nt, Artificial Sequence
  Description of Artificial Sequence: Synthetic oligonucleotide
ggucagggaaaucaagacc

SEQ ID NO: 1799588 - RNA, 19 nt, Artificial Sequence
  Description of Artificial Sequence: Synthetic oligonucleotide
aguuagucgcuuucacucu

SEQ ID NO: 1799589 - RNA, 19 nt, Artificial Sequence
  Description of Artificial Sequence: Synthetic oligonucleotide
agaggcgaagaaccauuuc

SEQ ID NO: 1799590 - RNA, 19 nt, Artificial Sequence
  Description of Artificial Sequence: Synthetic oligonucleotide
gauaaucccuucauccuuc

SEQ ID NO: 1799591 - RNA, 19 nt, Artificial Sequence
  Description of Artificial Sequence: Synthetic oligonucleotide
caagccaucacucguuuca

SEQ ID NO: 1799592 - RNA, 19 nt, Artificial Sequence
  Description of Artificial Sequence: Synthetic oligonucleotide
acagagcauucugauaauc

SEQ ID NO: 1799593 - RNA, 19 nt, Artificial Sequence
  Description of Artificial Sequence: Synthetic oligonucleotide
aguccguuauccacugagc

SEQ ID NO: 1799594 - RNA, 19 nt, Artificial Sequence
  Description of Artificial Sequence: Synthetic oligonucleotide
ucccauuacuggcucagaa

SEQ ID NO: 1799595 - RNA, 19 nt, Artificial Sequence
  Description of Artificial Sequence: Synthetic oligonucleotide
aucgagaccucaucagcug

SEQ ID NO: 1799596 - RNA, 19 nt, Artificial Sequence
  Description of Artificial Sequence: Synthetic oligonucleotide
uggugguugggcccgaauc

SEQ ID NO: 1799597 - RNA, 19 nt, Artificial Sequence
  Description of Artificial Sequence: Synthetic oligonucleotide
gaauccucugcaugagcac

SEQ ID NO: 1799598 - RNA, 19 nt, Artificial Sequence
  Description of Artificial Sequence: Synthetic oligonucleotide
agcagguccuuuguguagg

SEQ ID NO: 1799599 - RNA, 19 nt, Artificial Sequence
  Description of Artificial Sequence: Synthetic oligonucleotide
aucacaagccaaaaccugu

SEQ ID NO: 1799600 - RNA, 19 nt, Artificial Sequence
  Description of Artificial Sequence: Synthetic oligonucleotide
ccauauacugauuguuccg

SEQ ID NO: 1799601 - RNA, 19 nt, Artificial Sequence
  Description of Artificial Sequence: Synthetic oligonucleotide
aggaccaagaaugggcuug

SEQ ID NO: 1799602 - RNA, 19 nt, Artificial Sequence
  Description of Artificial Sequence: Synthetic oligonucleotide
ucggaaguuagucgcuuuc

SEQ ID NO: 1799603 - RNA, 19 nt, Artificial Sequence
  Description of Artificial Sequence: Synthetic oligonucleotide
cuauccuggaguugagauc

SEQ ID NO: 1799604 - RNA, 19 nt, Artificial Sequence
  Description of Artificial Sequence: Synthetic oligonucleotide
accgagacagaaagaaauc

SEQ ID NO: 1799605 - RNA, 19 nt, Artificial Sequence
  Description of Artificial Sequence: Synthetic oligonucleotide
uccugcuaagcuugcaaaa

SEQ ID NO: 1799606 - RNA, 19 nt, Artificial Sequence
  Description of Artificial Sequence: Synthetic oligonucleotide
uuagucgcuuucacucucu

SEQ ID NO: 1799607 - RNA, 19 nt, Artificial Sequence
  Description of Artificial Sequence: Synthetic oligonucleotide
gacuaguggguuugugcug

SEQ ID NO: 1799608 - RNA, 19 nt, Artificial Sequence
  Description of Artificial Sequence: Synthetic oligonucleotide
ugguccagaacaugcaguu

SEQ ID NO: 1799609 - RNA, 19 nt, Artificial Sequence
  Description of Artificial Sequence: Synthetic oligonucleotide
uugcaaaacuggauuccuc

SEQ ID NO: 1799610 - RNA, 19 nt, Artificial Sequence
  Description of Artificial Sequence: Synthetic oligonucleotide
acugauuguuccgaagggu

SEQ ID NO: 1799611 - RNA, 19 nt, Artificial Sequence
  Description of Artificial Sequence: Synthetic oligonucleotide
gaaguuagucgcuuucacu

SEQ ID NO: 1799612 - RNA, 19 nt, Artificial Sequence
  Description of Artificial Sequence: Synthetic oligonucleotide
gauuguuccgaagggucac

SEQ ID NO: 1799613 - RNA, 19 nt, Artificial Sequence
  Description of Artificial Sequence: Synthetic oligonucleotide
auauacugauuguuccgaa

SEQ ID NO: 1799614 - RNA, 19 nt, Artificial Sequence
  Description of Artificial Sequence: Synthetic oligonucleotide
ucugcuuugugugcuggac

SEQ ID NO: 1799615 - RNA, 19 nt, Artificial Sequence
  Description of Artificial Sequence: Synthetic oligonucleotide
caccguuguuaaaaggcac

SEQ ID NO: 1799616 - RNA, 19 nt, Artificial Sequence
  Description of Artificial Sequence: Synthetic oligonucleotide
acugcacccugaaaugacg

SEQ ID NO: 1799617 - RNA, 19 nt, Artificial Sequence
  Description of Artificial Sequence: Synthetic oligonucleotide
gcugggaacgccuggggcg

SEQ ID NO: 1799618 - RNA, 19 nt, Artificial Sequence
  Description of Artificial Sequence: Synthetic oligonucleotide
agagggguagcuuuccaua

SEQ ID NO: 1799619 - RNA, 19 nt, Artificial Sequence
  Description of Artificial Sequence: Synthetic oligonucleotide
ucucuauccuggaguugag

SEQ ID NO: 1799620 - RNA, 19 nt, Artificial Sequence
  Description of Artificial Sequence: Synthetic oligonucleotide
cauauacugauuguuccga

SEQ ID NO: 1799621 - RNA, 19 nt, Artificial Sequence
  Description of Artificial Sequence: Synthetic oligonucleotide
gaacuuuccagaguaaaau

SEQ ID NO: 1799622 - RNA, 19 nt, Artificial Sequence
  Description of Artificial Sequence: Synthetic oligonucleotide
acgcgugcgacgccaggcc

SEQ ID NO: 1799623 - RNA, 19 nt, Artificial Sequence
  Description of Artificial Sequence: Synthetic oligonucleotide
aguccugcuaagcuugcaa

SEQ ID NO: 1799624 - RNA, 19 nt, Artificial Sequence
  Description of Artificial Sequence: Synthetic oligonucleotide
ugcacucugcacuggacua

SEQ ID NO: 1799625 - RNA, 19 nt, Artificial Sequence
  Description of Artificial Sequence: Synthetic oligonucleotide
ggaaaucaagaccaaucga

SEQ ID NO: 1799626 - RNA, 19 nt, Artificial Sequence
  Description of Artificial Sequence: Synthetic oligonucleotide
ugguugggcccgaaucgag

SEQ ID NO: 1799627 - RNA, 19 nt, Artificial Sequence
  Description of Artificial Sequence: Synthetic oligonucleotide
auuacuggcucagaaggua

SEQ ID NO: 1799628 - RNA, 19 nt, Artificial Sequence
  Description of Artificial Sequence: Synthetic oligonucleotide
agaaugggcuugcauccga

SEQ ID NO: 1799629 - RNA, 19 nt, Artificial Sequence
  Description of Artificial Sequence: Synthetic oligonucleotide
cuuugugugcuggacccag

SEQ ID NO: 1799630 - RNA, 19 nt, Artificial Sequence
  Description of Artificial Sequence: Synthetic oligonucleotide
ugacagaguccugcuaagc

SEQ ID NO: 1799631 - RNA, 19 nt, Artificial Sequence
  Description of Artificial Sequence: Synthetic oligonucleotide
caugauaccgguguccgga

SEQ ID NO: 1799632 - RNA, 19 nt, Artificial Sequence
  Description of Artificial Sequence: Synthetic oligonucleotide
uccggauccaccguuguua

SEQ ID NO: 1799633 - RNA, 19 nt, Artificial Sequence
  Description of Artificial Sequence: Synthetic oligonucleotide
ugcaugagcacugcacccu

SEQ ID NO: 1799634 - RNA, 19 nt, Artificial Sequence
  Description of Artificial Sequence: Synthetic oligonucleotide
ugggcccgaaucgagaccu

SEQ ID NO: 1799635 - RNA, 19 nt, Artificial Sequence
  Description of Artificial Sequence: Synthetic oligonucleotide
uguuccgaagggucacaca

SEQ ID NO: 1799636 - RNA, 19 nt, Artificial Sequence
  Description of Artificial Sequence: Synthetic oligonucleotide
caagaauccucugcaugag

SEQ ID NO: 1799637 - RNA, 19 nt, Artificial Sequence
  Description of Artificial Sequence: Synthetic oligonucleotide
aggcgguaacuccucagug

SEQ ID NO: 1799638 - RNA, 19 nt, Artificial Sequence
  Description of Artificial Sequence: Synthetic oligonucleotide
gugugcuggacccaggaaa

SEQ ID NO: 1799639 - RNA, 19 nt, Artificial Sequence
  Description of Artificial Sequence: Synthetic oligonucleotide
guugggucggaaguuaguc

SEQ ID NO: 1799640 - RNA, 19 nt, Artificial Sequence
  Description of Artificial Sequence: Synthetic oligonucleotide
guuagucgcuuucacucuc

SEQ ID NO: 1799641 - RNA, 19 nt, Artificial Sequence
  Description of Artificial Sequence: Synthetic oligonucleotide
uccgaguaggccaccuggu

SEQ ID NO: 1799642 - RNA, 19 nt, Artificial Sequence
  Description of Artificial Sequence: Synthetic oligonucleotide
accuccagaccgugcacuc

SEQ ID NO: 1799643 - RNA, 19 nt, Artificial Sequence
  Description of Artificial Sequence: Synthetic oligonucleotide
agggucagggaaaucaaga

SEQ ID NO: 1799644 - RNA, 19 nt, Artificial Sequence
  Description of Artificial Sequence: Synthetic oligonucleotide
uugcauccgaguaggccac

SEQ ID NO: 1799645 - RNA, 19 nt, Artificial Sequence
  Description of Artificial Sequence: Synthetic oligonucleotide
cuggugcaagccaucacuc

SEQ ID NO: 1799646 - RNA, 19 nt, Artificial Sequence
  Description of Artificial Sequence: Synthetic oligonucleotide
uccccaaugaggagcucgu

SEQ ID NO: 1799647 - RNA, 19 nt, Artificial Sequence
  Description of Artificial Sequence: Synthetic oligonucleotide
uggguuugugcuggugggg

SEQ ID NO: 1799648 - RNA, 19 nt, Artificial Sequence
  Description of Artificial Sequence: Synthetic oligonucleotide
gaagguacacagggucucc

SEQ ID NO: 1799649 - RNA, 19 nt, Artificial Sequence
  Description of Artificial Sequence: Synthetic oligonucleotide
aggaaguccguuauccacu

SEQ ID NO: 1799650 - RNA, 19 nt, Artificial Sequence
  Description of Artificial Sequence: Synthetic oligonucleotide
gggguagcuuuccauauac

SEQ ID NO: 1799651 - RNA, 19 nt, Artificial Sequence
  Description of Artificial Sequence: Synthetic oligonucleotide
gaaugggcuugcauccgag

SEQ ID NO: 1799652 - RNA, 19 nt, Artificial Sequence
  Description of Artificial Sequence: Synthetic oligonucleotide
aucgagguuccugccgggc

SEQ ID NO: 1799653 - RNA, 19 nt, Artificial Sequence
  Description of Artificial Sequence: Synthetic oligonucleotide
caagaccaaucgagguucc

SEQ ID NO: 1799654 - RNA, 19 nt, Artificial Sequence
  Description of Artificial Sequence: Synthetic oligonucleotide
gaccgugcacucugcacug

SEQ ID NO: 1799655 - RNA, 19 nt, Artificial Sequence
  Description of Artificial Sequence: Synthetic oligonucleotide
gggcucgaaauguaccagg

SEQ ID NO: 1799656 - RNA, 19 nt, Artificial Sequence
  Description of Artificial Sequence: Synthetic oligonucleotide
cuuugacugucccugaacu

SEQ ID NO: 1799657 - RNA, 19 nt, Artificial Sequence
  Description of Artificial Sequence: Synthetic oligonucleotide
augggcuugcauccgagua

SEQ ID NO: 1799658 - RNA, 19 nt, Artificial Sequence
  Description of Artificial Sequence: Synthetic oligonucleotide
ggaaguuagucgcuuucac

SEQ ID NO: 1799659 - RNA, 19 nt, Artificial Sequence
  Description of Artificial Sequence: Synthetic oligonucleotide
uugggcccgaaucgagacc

SEQ ID NO: 1799660 - RNA, 19 nt, Artificial Sequence
  Description of Artificial Sequence: Synthetic oligonucleotide
gcucgaaauguaccaggcg

SEQ ID NO: 1799661 - RNA, 19 nt, Artificial Sequence
  Description of Artificial Sequence: Synthetic oligonucleotide
aaggaccaagaaugggcuu

SEQ ID NO: 1799662 - RNA, 19 nt, Artificial Sequence
  Description of Artificial Sequence: Synthetic oligonucleotide
ccguuauccacugagcggc

SEQ ID NO: 1799663 - RNA, 19 nt, Artificial Sequence
  Description of Artificial Sequence: Synthetic oligonucleotide
ccuggaguugagaucuucc

SEQ ID NO: 1799664 - RNA, 19 nt, Artificial Sequence
  Description of Artificial Sequence: Synthetic oligonucleotide
gagcucguuccaagaaucc

SEQ ID NO: 1799665 - RNA, 19 nt, Artificial Sequence
  Description of Artificial Sequence: Synthetic oligonucleotide
uguccggauccaccguugu

SEQ ID NO: 1799666 - RNA, 19 nt, Artificial Sequence
  Description of Artificial Sequence: Synthetic oligonucleotide
cagcagguccuuuguguag

SEQ ID NO: 1799667 - RNA, 19 nt, Artificial Sequence
  Description of Artificial Sequence: Synthetic oligonucleotide
caccgagacagaaagaaau

SEQ ID NO: 1799668 - RNA, 19 nt, Artificial Sequence
  Description of Artificial Sequence: Synthetic oligonucleotide
cagaccgugcacucugcac

SEQ ID NO: 1799669 - RNA, 19 nt, Artificial Sequence
  Description of Artificial Sequence: Synthetic oligonucleotide
ggccagcgaaugcagaaag

SEQ ID NO: 1799670 - RNA, 19 nt, Artificial Sequence
  Description of Artificial Sequence: Synthetic oligonucleotide
ucacucguuucagugccac

SEQ ID NO: 1799671 - RNA, 19 nt, Artificial Sequence
  Description of Artificial Sequence: Synthetic oligonucleotide
guggccgcagcgcagcccc

SEQ ID NO: 1799672 - RNA, 19 nt, Artificial Sequence
  Description of Artificial Sequence: Synthetic oligonucleotide
ugcaagccaucacucguuu

SEQ ID NO: 1799673 - RNA, 19 nt, Artificial Sequence
  Description of Artificial Sequence: Synthetic oligonucleotide
aguucccauuacuggcuca

SEQ ID NO: 1799674 - RNA, 19 nt, Artificial Sequence
  Description of Artificial Sequence: Synthetic oligonucleotide
uccagaccgugcacucugc

SEQ ID NO: 1799675 - RNA, 19 nt, Artificial Sequence
  Description of Artificial Sequence: Synthetic oligonucleotide
ugcacccugaaaugacgau

SEQ ID NO: 1799676 - RNA, 19 nt, Artificial Sequence
  Description of Artificial Sequence: Synthetic oligonucleotide
gaggagcucguuccaagaa

SEQ ID NO: 1799677 - RNA, 19 nt, Artificial Sequence
  Description of Artificial Sequence: Synthetic oligonucleotide
caggcgacagggcugcuuc

SEQ ID NO: 1799678 - RNA, 19 nt, Artificial Sequence
  Description of Artificial Sequence: Synthetic oligonucleotide
gaacgcgugcgacgccagg

SEQ ID NO: 1799679 - RNA, 19 nt, Artificial Sequence
  Description of Artificial Sequence: Synthetic oligonucleotide
cucguuucagugccacuuc

SEQ ID NO: 1799680 - RNA, 19 nt, Artificial Sequence
  Description of Artificial Sequence: Synthetic oligonucleotide
agcucguuccaagaauccu

SEQ ID NO: 1799681 - RNA, 19 nt, Artificial Sequence
  Description of Artificial Sequence: Synthetic oligonucleotide
gaguaggccaccugguggu

SEQ ID NO: 1799682 - RNA, 19 nt, Artificial Sequence
  Description of Artificial Sequence: Synthetic oligonucleotide
cguuccaagaauccucugc

SEQ ID NO: 1799683 - RNA, 19 nt, Artificial Sequence
  Description of Artificial Sequence: Synthetic oligonucleotide
cucccacuuugacuguccc

SEQ ID NO: 1799684 - RNA, 19 nt, Artificial Sequence
  Description of Artificial Sequence: Synthetic oligonucleotide
ggaaaacuuggaaaucaca

SEQ ID NO: 1799685 - RNA, 19 nt, Artificial Sequence
  Description of Artificial Sequence: Synthetic oligonucleotide
ccaaucgagguuccugccg

SEQ ID NO: 1799686 - RNA, 19 nt, Artificial Sequence
  Description of Artificial Sequence: Synthetic oligonucleotide
uuguuccgaagggucacac

SEQ ID NO: 1799687 - RNA, 19 nt, Artificial Sequence
  Description of Artificial Sequence: Synthetic oligonucleotide
ggauccaccguuguuaaaa

SEQ ID NO: 1799688 - RNA, 19 nt, Artificial Sequence
  Description of Artificial Sequence: Synthetic oligonucleotide
aagaccaaucgagguuccu

SEQ ID NO: 1799689 - RNA, 19 nt, Artificial Sequence
  Description of Artificial Sequence: Synthetic oligonucleotide
guggggcucgaaauguacc

SEQ ID NO: 1799690 - RNA, 19 nt, Artificial Sequence
  Description of Artificial Sequence: Synthetic oligonucleotide
ugauaccgguguccggauc

SEQ ID NO: 1799691 - RNA, 19 nt, Artificial Sequence
  Description of Artificial Sequence: Synthetic oligonucleotide
ugcacuggacuaguggguu

SEQ ID NO: 1799692 - RNA, 19 nt, Artificial Sequence
  Description of Artificial Sequence: Synthetic oligonucleotide
cugaacuuuccagaguaaa

SEQ ID NO: 1799693 - RNA, 19 nt, Artificial Sequence
  Description of Artificial Sequence: Synthetic oligonucleotide
gugccacuuccccaaugag

SEQ ID NO: 1799694 - RNA, 19 nt, Artificial Sequence
  Description of Artificial Sequence: Synthetic oligonucleotide
aagaggcgaagaaccauuu

SEQ ID NO: 1799695 - RNA, 19 nt, Artificial Sequence
  Description of Artificial Sequence: Synthetic oligonucleotide
cacuggacuaguggguuug

SEQ ID NO: 1799696 - RNA, 19 nt, Artificial Sequence
  Description of Artificial Sequence: Synthetic oligonucleotide
cccacuuugacugucccug

SEQ ID NO: 1799697 - RNA, 19 nt, Artificial Sequence
  Description of Artificial Sequence: Synthetic oligonucleotide
ucguuccaagaauccucug

SEQ ID NO: 1799698 - RNA, 19 nt, Artificial Sequence
  Description of Artificial Sequence: Synthetic oligonucleotide
cacccugaaaugacgaugu

SEQ ID NO: 1799699 - RNA, 19 nt, Artificial Sequence
  Description of Artificial Sequence: Synthetic oligonucleotide
guccugcuaagcuugcaaa

SEQ ID NO: 1799700 - RNA, 19 nt, Artificial Sequence
  Description of Artificial Sequence: Synthetic oligonucleotide
uggacccaggaaacaccga

SEQ ID NO: 1799701 - RNA, 19 nt, Artificial Sequence
  Description of Artificial Sequence: Synthetic oligonucleotide
auguugggucggaaguuag

SEQ ID NO: 1799702 - RNA, 19 nt, Artificial Sequence
  Description of Artificial Sequence: Synthetic oligonucleotide
ggacuaguggguuugugcu

SEQ ID NO: 1799703 - RNA, 19 nt, Artificial Sequence
  Description of Artificial Sequence: Synthetic oligonucleotide
cugcacccugaaaugacga

SEQ ID NO: 1799704 - RNA, 19 nt, Artificial Sequence
  Description of Artificial Sequence: Synthetic oligonucleotide
cgaaucgagaccucaucag

SEQ ID NO: 1799705 - RNA, 19 nt, Artificial Sequence
  Description of Artificial Sequence: Synthetic oligonucleotide
cagggucucccacuuugac

SEQ ID NO: 1799706 - RNA, 19 nt, Artificial Sequence
  Description of Artificial Sequence: Synthetic oligonucleotide
guuugugcuggugggguga

SEQ ID NO: 1799707 - RNA, 19 nt, Artificial Sequence
  Description of Artificial Sequence: Synthetic oligonucleotide
cgaguaggccaccuggugg

SEQ ID NO: 1799708 - RNA, 19 nt, Artificial Sequence
  Description of Artificial Sequence: Synthetic oligonucleotide
ggagcucguuccaagaauc

SEQ ID NO: 1799709 - RNA, 19 nt, Artificial Sequence
  Description of Artificial Sequence: Synthetic oligonucleotide
gcuugcauccgaguaggcc

SEQ ID NO: 1799710 - RNA, 19 nt, Artificial Sequence
  Description of Artificial Sequence: Synthetic oligonucleotide
cugggaacgccuggggcgc

SEQ ID NO: 1799711 - RNA, 19 nt, Artificial Sequence
  Description of Artificial Sequence: Synthetic oligonucleotide
cugucacgcagguggccgc

SEQ ID NO: 1799712 - RNA, 19 nt, Artificial Sequence
  Description of Artificial Sequence: Synthetic oligonucleotide
guaccaggcgacagggcug

SEQ ID NO: 1799713 - RNA, 19 nt, Artificial Sequence
  Description of Artificial Sequence: Synthetic oligonucleotide
aacgccuggggcgcaugug

SEQ ID NO: 1799714 - RNA, 19 nt, Artificial Sequence
  Description of Artificial Sequence: Synthetic oligonucleotide
ccugcuaagcuugcaaaac

SEQ ID NO: 1799715 - RNA, 19 nt, Artificial Sequence
  Description of Artificial Sequence: Synthetic oligonucleotide
uccuuuguguaggcagcac

SEQ ID NO: 1799716 - RNA, 19 nt, Artificial Sequence
  Description of Artificial Sequence: Synthetic oligonucleotide
guuauccacugagcggcug

SEQ ID NO: 1799717 - RNA, 19 nt, Artificial Sequence
  Description of Artificial Sequence: Synthetic oligonucleotide
gcacccugaaaugacgaug

SEQ ID NO: 1799718 - RNA, 19 nt, Artificial Sequence
  Description of Artificial Sequence: Synthetic oligonucleotide
augauaccgguguccggau

SEQ ID NO: 1799719 - RNA, 19 nt, Artificial Sequence
  Description of Artificial Sequence: Synthetic oligonucleotide
agaccucaucagcugggaa

SEQ ID NO: 1799720 - RNA, 19 nt, Artificial Sequence
  Description of Artificial Sequence: Synthetic oligonucleotide
auuguuccgaagggucaca

SEQ ID NO: 1799721 - RNA, 19 nt, Artificial Sequence
  Description of Artificial Sequence: Synthetic oligonucleotide
cugcuaagcuugcaaaacu

SEQ ID NO: 1799722 - RNA, 19 nt, Artificial Sequence
  Description of Artificial Sequence: Synthetic oligonucleotide
cauccgaguaggccaccug

SEQ ID NO: 1799723 - RNA, 19 nt, Artificial Sequence
  Description of Artificial Sequence: Synthetic oligonucleotide
ccgguguccggauccaccg

SEQ ID NO: 1799724 - RNA, 19 nt, Artificial Sequence
  Description of Artificial Sequence: Synthetic oligonucleotide
caguucccauuacuggcuc

SEQ ID NO: 1799725 - RNA, 19 nt, Artificial Sequence
  Description of Artificial Sequence: Synthetic oligonucleotide
cagaagguacacagggucu

SEQ ID NO: 1799726 - RNA, 19 nt, Artificial Sequence
  Description of Artificial Sequence: Synthetic oligonucleotide
agggguagcuuuccauaua

SEQ ID NO: 1799727 - RNA, 19 nt, Artificial Sequence
  Description of Artificial Sequence: Synthetic oligonucleotide
cccugaaaugacgauguug

SEQ ID NO: 1799728 - RNA, 19 nt, Artificial Sequence
  Description of Artificial Sequence: Synthetic oligonucleotide
cucuuucccguccaugaua

SEQ ID NO: 1799729 - RNA, 19 nt, Artificial Sequence
  Description of Artificial Sequence: Synthetic oligonucleotide
cuugcaaaacuggauuccu

SEQ ID NO: 1799730 - RNA, 19 nt, Artificial Sequence
  Description of Artificial Sequence: Synthetic oligonucleotide
cccaucuucauugaucaca

SEQ ID NO: 1799731 - RNA, 19 nt, Artificial Sequence
  Description of Artificial Sequence: Synthetic oligonucleotide
ggugcaagccaucacucgu

SEQ ID NO: 1799732 - RNA, 19 nt, Artificial Sequence
  Description of Artificial Sequence: Synthetic oligonucleotide
ccugucacgcagguggccg

SEQ ID NO: 1799733 - RNA, 19 nt, Artificial Sequence
  Description of Artificial Sequence: Synthetic oligonucleotide
ugucacgcagguggccgca

SEQ ID NO: 1799734 - RNA, 19 nt, Artificial Sequence
  Description of Artificial Sequence: Synthetic oligonucleotide
augacgauguugggucgga

SEQ ID NO: 1799735 - RNA, 19 nt, Artificial Sequence
  Description of Artificial Sequence: Synthetic oligonucleotide
acaccgagacagaaagaaa

SEQ ID NO: 1799736 - RNA, 19 nt, Artificial Sequence
  Description of Artificial Sequence: Synthetic oligonucleotide
cuggacuaguggguuugug

SEQ ID NO: 1799737 - RNA, 19 nt, Artificial Sequence
  Description of Artificial Sequence: Synthetic oligonucleotide
gcaugagcacugcacccug

SEQ ID NO: 1799738 - RNA, 19 nt, Artificial Sequence
  Description of Artificial Sequence: Synthetic oligonucleotide
gccgggaacgcgugcgacg

SEQ ID NO: 1799739 - RNA, 19 nt, Artificial Sequence
  Description of Artificial Sequence: Synthetic oligonucleotide
ccgaaucgagaccucauca

SEQ ID NO: 1799740 - RNA, 19 nt, Artificial Sequence
  Description of Artificial Sequence: Synthetic oligonucleotide
ggaccaagaaugggcuugc

SEQ ID NO: 1799741 - RNA, 19 nt, Artificial Sequence
  Description of Artificial Sequence: Synthetic oligonucleotide
cagaacaugcaguucccau

SEQ ID NO: 1799742 - RNA, 19 nt, Artificial Sequence
  Description of Artificial Sequence: Synthetic oligonucleotide
caaaaccugucacgcaggu

SEQ ID NO: 1799743 - RNA, 19 nt, Artificial Sequence
  Description of Artificial Sequence: Synthetic oligonucleotide
ggggcucgaaauguaccag

SEQ ID NO: 1799744 - RNA, 19 nt, Artificial Sequence
  Description of Artificial Sequence: Synthetic oligonucleotide
guguccggauccaccguug

SEQ ID NO: 1799745 - RNA, 19 nt, Artificial Sequence
  Description of Artificial Sequence: Synthetic oligonucleotide
cccugaacuuuccagagua

SEQ ID NO: 1799746 - RNA, 19 nt, Artificial Sequence
  Description of Artificial Sequence: Synthetic oligonucleotide
accgugcacucugcacugg

SEQ ID NO: 1799747 - RNA, 19 nt, Artificial Sequence
  Description of Artificial Sequence: Synthetic oligonucleotide
ugacgauguugggucggaa

SEQ ID NO: 1799748 - RNA, 19 nt, Artificial Sequence
  Description of Artificial Sequence: Synthetic oligonucleotide
ccaugauaccgguguccgg

SEQ ID NO: 1799749 - RNA, 19 nt, Artificial Sequence
  Description of Artificial Sequence: Synthetic oligonucleotide
gcgaaugcagaaaguagaa

SEQ ID NO: 1799750 - RNA, 19 nt, Artificial Sequence
  Description of Artificial Sequence: Synthetic oligonucleotide
ggcgguaacuccucagugu

SEQ ID NO: 1799751 - RNA, 19 nt, Artificial Sequence
  Description of Artificial Sequence: Synthetic oligonucleotide
cagugauaucagcauccaa

SEQ ID NO: 1799752 - RNA, 19 nt, Artificial Sequence
  Description of Artificial Sequence: Synthetic oligonucleotide
acuggacuaguggguuugu

SEQ ID NO: 1799753 - RNA, 19 nt, Artificial Sequence
  Description of Artificial Sequence: Synthetic oligonucleotide
cucuauccuggaguugaga

SEQ ID NO: 1799754 - RNA, 19 nt, Artificial Sequence
  Description of Artificial Sequence: Synthetic oligonucleotide
auaccgguguccggaucca

SEQ ID NO: 1799755 - RNA, 19 nt, Artificial Sequence
  Description of Artificial Sequence: Synthetic oligonucleotide
gcacucugcacuggacuag

SEQ ID NO: 1799756 - RNA, 19 nt, Artificial Sequence
  Description of Artificial Sequence: Synthetic oligonucleotide
ccgaagggucacacaggcg

SEQ ID NO: 1799757 - RNA, 19 nt, Artificial Sequence
  Description of Artificial Sequence: Synthetic oligonucleotide
caggcgguaacuccucagu

SEQ ID NO: 1799758 - RNA, 19 nt, Artificial Sequence
  Description of Artificial Sequence: Synthetic oligonucleotide
aucacucguuucagugcca

SEQ ID NO: 1799759 - RNA, 19 nt, Artificial Sequence
  Description of Artificial Sequence: Synthetic oligonucleotide
ccagcgaaugcagaaagua

SEQ ID NO: 1799760 - RNA, 19 nt, Artificial Sequence
  Description of Artificial Sequence: Synthetic oligonucleotide
ccgaguaggccaccuggug

SEQ ID NO: 1799761 - RNA, 19 nt, Artificial Sequence
  Description of Artificial Sequence: Synthetic oligonucleotide
cugagggucaaggugucau

SEQ ID NO: 1799762 - RNA, 19 nt, Artificial Sequence
  Description of Artificial Sequence: Synthetic oligonucleotide
ccgggaacgcgugcgacgc

SEQ ID NO: 1799763 - RNA, 19 nt, Artificial Sequence
  Description of Artificial Sequence: Synthetic oligonucleotide
ucacagggucagggaaauc

SEQ ID NO: 1799764 - RNA, 19 nt, Artificial Sequence
  Description of Artificial Sequence: Synthetic oligonucleotide
uaccgguguccggauccac

SEQ ID NO: 1799765 - RNA, 19 nt, Artificial Sequence
  Description of Artificial Sequence: Synthetic oligonucleotide
gguugggcccgaaucgaga

SEQ ID NO: 1799766 - RNA, 19 nt, Artificial Sequence
  Description of Artificial Sequence: Synthetic oligonucleotide
gaacgccuggggcgcaugu

SEQ ID NO: 1799767 - RNA, 19 nt, Artificial Sequence
  Description of Artificial Sequence: Synthetic oligonucleotide
cccaaagaagaggcgaaga

SEQ ID NO: 1799768 - RNA, 19 nt, Artificial Sequence
  Description of Artificial Sequence: Synthetic oligonucleotide
agcuuuccauauacugauu

SEQ ID NO: 1799769 - RNA, 19 nt, Artificial Sequence
  Description of Artificial Sequence: Synthetic oligonucleotide
cguuguuaaaaggcaccug

SEQ ID NO: 1799770 - RNA, 19 nt, Artificial Sequence
  Description of Artificial Sequence: Synthetic oligonucleotide
ccguccaugauaccggugu

SEQ ID NO: 1799771 - RNA, 19 nt, Artificial Sequence
  Description of Artificial Sequence: Synthetic oligonucleotide
agguuccugccgggcagug

SEQ ID NO: 1799772 - RNA, 19 nt, Artificial Sequence
  Description of Artificial Sequence: Synthetic oligonucleotide
ccuuuguguaggcagcacu

SEQ ID NO: 1799773 - RNA, 19 nt, Artificial Sequence
  Description of Artificial Sequence: Synthetic oligonucleotide
gcgguaacuccucaguguu

SEQ ID NO: 1799774 - RNA, 19 nt, Artificial Sequence
  Description of Artificial Sequence: Synthetic oligonucleotide
uggggcgcauguggggcuc

SEQ ID NO: 1799775 - RNA, 19 nt, Artificial Sequence
  Description of Artificial Sequence: Synthetic oligonucleotide
gcgacagggcugcuucuuc

SEQ ID NO: 1799776 - RNA, 19 nt, Artificial Sequence
  Description of Artificial Sequence: Synthetic oligonucleotide
cagcacugagggucaaggu

SEQ ID NO: 1799777 - RNA, 19 nt, Artificial Sequence
  Description of Artificial Sequence: Synthetic oligonucleotide
ggaacgcgugcgacgccag

SEQ ID NO: 1799778 - RNA, 19 nt, Artificial Sequence
  Description of Artificial Sequence: Synthetic oligonucleotide
cgugcacucugcacuggac

SEQ ID NO: 1799779 - RNA, 19 nt, Artificial Sequence
  Description of Artificial Sequence: Synthetic oligonucleotide
gcaguucccauuacuggcu

SEQ ID NO: 1799780 - RNA, 19 nt, Artificial Sequence
  Description of Artificial Sequence: Synthetic oligonucleotide
gcgcauguggggcucgaaa

SEQ ID NO: 1799781 - RNA, 19 nt, Artificial Sequence
  Description of Artificial Sequence: Synthetic oligonucleotide
ccugaacuuuccagaguaa

SEQ ID NO: 1799782 - RNA, 19 nt, Artificial Sequence
  Description of Artificial Sequence: Synthetic oligonucleotide
ccagugauaucagcaucca

SEQ ID NO: 1799783 - RNA, 19 nt, Artificial Sequence
  Description of Artificial Sequence: Synthetic oligonucleotide
ugggaacgccuggggcgca

SEQ ID NO: 1799784 - RNA, 19 nt, Artificial Sequence
  Description of Artificial Sequence: Synthetic oligonucleotide
cugcgccaccguccccacc

SEQ ID NO: 1799785 - RNA, 19 nt, Artificial Sequence
  Description of Artificial Sequence: Synthetic oligonucleotide
gguggccgcagcgcagccc

SEQ ID NO: 1799786 - RNA, 19 nt, Artificial Sequence
  Description of Artificial Sequence: Synthetic oligonucleotide
ggcccgaaucgagaccuca

SEQ ID NO: 1799787 - RNA, 19 nt, Artificial Sequence
  Description of Artificial Sequence: Synthetic oligonucleotide
cgaaauguaccaggcgaca

SEQ ID NO: 1799788 - RNA, 19 nt, Artificial Sequence
  Description of Artificial Sequence: Synthetic oligonucleotide
cuuccccaaugaggagcuc

SEQ ID NO: 1799789 - RNA, 19 nt, Artificial Sequence
  Description of Artificial Sequence: Synthetic oligonucleotide
cacucguuucagugccacu

SEQ ID NO: 1799790 - RNA, 19 nt, Artificial Sequence
  Description of Artificial Sequence: Synthetic oligonucleotide
ccggauccaccguuguuaa

SEQ ID NO: 1799791 - RNA, 19 nt, Artificial Sequence
  Description of Artificial Sequence: Synthetic oligonucleotide
ccagaacaugcaguuccca

SEQ ID NO: 1799792 - RNA, 19 nt, Artificial Sequence
  Description of Artificial Sequence: Synthetic oligonucleotide
ggaacgccuggggcgcaug

SEQ ID NO: 1799793 - RNA, 19 nt, Artificial Sequence
  Description of Artificial Sequence: Synthetic oligonucleotide
ccguuguuaaaaggcaccu

SEQ ID NO: 1799794 - RNA, 19 nt, Artificial Sequence
  Description of Artificial Sequence: Synthetic oligonucleotide
cgugcgacgccaggccacg

SEQ ID NO: 1799795 - RNA, 19 nt, Artificial Sequence
  Description of Artificial Sequence: Synthetic oligonucleotide
ccagaccgugcacucugca

SEQ ID NO: 1799796 - RNA, 19 nt, Artificial Sequence
  Description of Artificial Sequence: Synthetic oligonucleotide
ggggcgcauguggggcucg

SEQ ID NO: 1799797 - RNA, 19 nt, Artificial Sequence
  Description of Artificial Sequence: Synthetic oligonucleotide
gcucuuucccguccaugau

SEQ ID NO: 1799798 - RNA, 19 nt, Artificial Sequence
  Description of Artificial Sequence: Synthetic oligonucleotide
ggguagcuuuccauauacu

SEQ ID NO: 1799799 - RNA, 19 nt, Artificial Sequence
  Description of Artificial Sequence: Synthetic oligonucleotide
guccggauccaccguuguu

SEQ ID NO: 1799800 - RNA, 19 nt, Artificial Sequence
  Description of Artificial Sequence: Synthetic oligonucleotide
ccauguucccaucuucauu

SEQ ID NO: 1799801 - RNA, 19 nt, Artificial Sequence
  Description of Artificial Sequence: Synthetic oligonucleotide
ccgugcacucugcacugga

SEQ ID NO: 1799802 - RNA, 19 nt, Artificial Sequence
  Description of Artificial Sequence: Synthetic oligonucleotide
gcugcgccaccguccccac

SEQ ID NO: 1799803 - RNA, 19 nt, Artificial Sequence
  Description of Artificial Sequence: Synthetic oligonucleotide
gccagcgaaugcagaaagu

SEQ ID NO: 1799804 - RNA, 19 nt, Artificial Sequence
  Description of Artificial Sequence: Synthetic oligonucleotide
cgcauguggggcucgaaau

SEQ ID NO: 1799805 - RNA, 19 nt, Artificial Sequence
  Description of Artificial Sequence: Synthetic oligonucleotide
ggucggaaguuagucgcuu

SEQ ID NO: 1799806 - RNA, 19 nt, Artificial Sequence
  Description of Artificial Sequence: Synthetic oligonucleotide
accaggcgacagggcugcu

SEQ ID NO: 1799807 - RNA, 19 nt, Artificial Sequence
  Description of Artificial Sequence: Synthetic oligonucleotide
cgggaacgcgugcgacgcc

SEQ ID NO: 1799808 - RNA, 19 nt, Artificial Sequence
  Description of Artificial Sequence: Synthetic oligonucleotide
ggcgacagggcugcuucuu

SEQ ID NO: 1799809 - RNA, 19 nt, Artificial Sequence
  Description of Artificial Sequence: Synthetic oligonucleotide
ggcgcauguggggcucgaa

SEQ ID NO: 1799810 - RNA, 19 nt, Artificial Sequence
  Description of Artificial Sequence: Synthetic oligonucleotide
gcccgaaucgagaccucau

SEQ ID NO: 1799811 - RNA, 19 nt, Artificial Sequence
  Description of Artificial Sequence: Synthetic oligonucleotide
gggcccgaaucgagaccuc

SEQ ID NO: 1799812 - RNA, 19 nt, Artificial Sequence
  Description of Artificial Sequence: Synthetic oligonucleotide
cguuauccacugagcggcu

SEQ ID NO: 1799813 - RNA, 19 nt, Artificial Sequence
  Description of Artificial Sequence: Synthetic oligonucleotide
cggauccaccguuguuaaa

SEQ ID NO: 1799814 - RNA, 19 nt, Artificial Sequence
  Description of Artificial Sequence: Synthetic oligonucleotide
cgguaacuccucaguguuu

SEQ ID NO: 1799815 - RNA, 19 nt, Artificial Sequence
  Description of Artificial Sequence: Synthetic oligonucleotide
gggaacgccuggggcgcau

SEQ ID NO: 1799816 - RNA, 19 nt, Artificial Sequence
  Description of Artificial Sequence: Synthetic oligonucleotide
ccaggcgacagggcugcuu

SEQ ID NO: 1799817 - RNA, 19 nt, Artificial Sequence
  Description of Artificial Sequence: Synthetic oligonucleotide
cgguguccggauccaccgu

SEQ ID NO: 1799818 - RNA, 19 nt, Artificial Sequence
  Description of Artificial Sequence: Synthetic oligonucleotide
ccccaaugaggagcucguu

SEQ ID NO: 1799819 - RNA, 19 nt, Artificial Sequence
  Description of Artificial Sequence: Synthetic oligonucleotide
aaucuugggacccaccucg

SEQ ID NO: 1799820 - RNA, 19 nt, Artificial Sequence
  Description of Artificial Sequence: Synthetic oligonucleotide
aaagaccagcccuaggagc

SEQ ID NO: 1799821 - RNA, 19 nt, Artificial Sequence
  Description of Artificial Sequence: Synthetic oligonucleotide
agagucggaacccagaauc

SEQ ID NO: 1799822 - RNA, 19 nt, Artificial Sequence
  Description of Artificial Sequence: Synthetic oligonucleotide
aaaagaccagcccuaggag

SEQ ID NO: 1799823 - RNA, 19 nt, Artificial Sequence
  Description of Artificial Sequence: Synthetic oligonucleotide
agagauggcgucaaggacc

SEQ ID NO: 1799824 - RNA, 19 nt, Artificial Sequence
  Description of Artificial Sequence: Synthetic oligonucleotide
aacccagaaucuugggacc

SEQ ID NO: 1799825 - RNA, 19 nt, Artificial Sequence
  Description of Artificial Sequence: Synthetic oligonucleotide
gcgucaaggaccuagaggg

SEQ ID NO: 1799826 - RNA, 19 nt, Artificial Sequence
  Description of Artificial Sequence: Synthetic oligonucleotide
gaacccagaaucuugggac

SEQ ID NO: 1799827 - RNA, 19 nt, Artificial Sequence
  Description of Artificial Sequence: Synthetic oligonucleotide
uuauugagugaccucugag

SEQ ID NO: 1799828 - RNA, 19 nt, Artificial Sequence
  Description of Artificial Sequence: Synthetic oligonucleotide
uauugagugaccucugaga

SEQ ID NO: 1799829 - RNA, 19 nt, Artificial Sequence
  Description of Artificial Sequence: Synthetic oligonucleotide
cuaggagcaggagagaugg

SEQ ID NO: 1799830 - RNA, 19 nt, Artificial Sequence
  Description of Artificial Sequence: Synthetic oligonucleotide
cuaagaaggagcaucccac

SEQ ID NO: 1799831 - RNA, 19 nt, Artificial Sequence
  Description of Artificial Sequence: Synthetic oligonucleotide
aggacuaagaaggagcauc

SEQ ID NO: 1799832 - RNA, 19 nt, Artificial Sequence
  Description of Artificial Sequence: Synthetic oligonucleotide
cuccgcuccacaaacaugc

SEQ ID NO: 1799833 - RNA, 19 nt, Artificial Sequence
  Description of Artificial Sequence: Synthetic oligonucleotide
auugagugaccucugagaa

SEQ ID NO: 1799834 - RNA, 19 nt, Artificial Sequence
  Description of Artificial Sequence: Synthetic oligonucleotide
ucggaacccagaaucuugg

SEQ ID NO: 1799835 - RNA, 19 nt, Artificial Sequence
  Description of Artificial Sequence: Synthetic oligonucleotide
acuaagaaggagcauccca

SEQ ID NO: 1799836 - RNA, 19 nt, Artificial Sequence
  Description of Artificial Sequence: Synthetic oligonucleotide
agaaucuugggacccaccu

SEQ ID NO: 1799837 - RNA, 19 nt, Artificial Sequence
  Description of Artificial Sequence: Synthetic oligonucleotide
aagaaggagcaucccaccu

SEQ ID NO: 1799838 - RNA, 19 nt, Artificial Sequence
  Description of Artificial Sequence: Synthetic oligonucleotide
gaaggagcaucccaccuug

SEQ ID NO: 1799839 - RNA, 19 nt, Artificial Sequence
  Description of Artificial Sequence: Synthetic oligonucleotide
uaagaaggagcaucccacc

SEQ ID NO: 1799840 - RNA, 19 nt, Artificial Sequence
  Description of Artificial Sequence: Synthetic oligonucleotide
gauggcgucaaggaccuag

SEQ ID NO: 1799841 - RNA, 19 nt, Artificial Sequence
  Description of Artificial Sequence: Synthetic oligonucleotide
uagucugugggcugggcag

SEQ ID NO: 1799842 - RNA, 19 nt, Artificial Sequence
  Description of Artificial Sequence: Synthetic oligonucleotide
aggucuccgcuccacaaac

SEQ ID NO: 1799843 - RNA, 19 nt, Artificial Sequence
  Description of Artificial Sequence: Synthetic oligonucleotide
aggagcaggagagauggcg

SEQ ID NO: 1799844 - RNA, 19 nt, Artificial Sequence
  Description of Artificial Sequence: Synthetic oligonucleotide
cuugggacccaccucgugc

SEQ ID NO: 1799845 - RNA, 19 nt, Artificial Sequence
  Description of Artificial Sequence: Synthetic oligonucleotide
agguuuauugagugaccuc

SEQ ID NO: 1799846 - RNA, 19 nt, Artificial Sequence
  Description of Artificial Sequence: Synthetic oligonucleotide
aagaccagcccuaggagca

SEQ ID NO: 1799847 - RNA, 19 nt, Artificial Sequence
  Description of Artificial Sequence: Synthetic oligonucleotide
cugggcaggaccagagucg

SEQ ID NO: 1799848 - RNA, 19 nt, Artificial Sequence
  Description of Artificial Sequence: Synthetic oligonucleotide
aggaccagagucggaaccc

SEQ ID NO: 1799849 - RNA, 19 nt, Artificial Sequence
  Description of Artificial Sequence: Synthetic oligonucleotide
aggagagauggcgucaagg

SEQ ID NO: 1799850 - RNA, 19 nt, Artificial Sequence
  Description of Artificial Sequence: Synthetic oligonucleotide
gagagauggcgucaaggac

SEQ ID NO: 1799851 - RNA, 19 nt, Artificial Sequence
  Description of Artificial Sequence: Synthetic oligonucleotide
agcaucccaccuuggaguc

SEQ ID NO: 1799852 - RNA, 19 nt, Artificial Sequence
  Description of Artificial Sequence: Synthetic oligonucleotide
aacccagcaggucuccgcu

SEQ ID NO: 1799853 - RNA, 19 nt, Artificial Sequence
  Description of Artificial Sequence: Synthetic oligonucleotide
cuuguagucugugggcugg

SEQ ID NO: 1799854 - RNA, 19 nt, Artificial Sequence
  Description of Artificial Sequence: Synthetic oligonucleotide
uugggacccaccucgugcc

SEQ ID NO: 1799855 - RNA, 19 nt, Artificial Sequence
  Description of Artificial Sequence: Synthetic oligonucleotide
ggcgucaaggaccuagagg

SEQ ID NO: 1799856 - RNA, 19 nt, Artificial Sequence
  Description of Artificial Sequence: Synthetic oligonucleotide
ccagguggaacccagcagg

SEQ ID NO: 1799857 - RNA, 19 nt, Artificial Sequence
  Description of Artificial Sequence: Synthetic oligonucleotide
agcccuaggagcaggagag

SEQ ID NO: 1799858 - RNA, 19 nt, Artificial Sequence
  Description of Artificial Sequence: Synthetic oligonucleotide
acccagaaucuugggaccc

SEQ ID NO: 1799859 - RNA, 19 nt, Artificial Sequence
  Description of Artificial Sequence: Synthetic oligonucleotide
ugggccaggaacccacagc

SEQ ID NO: 1799860 - RNA, 19 nt, Artificial Sequence
  Description of Artificial Sequence: Synthetic oligonucleotide
ucuccgcuccacaaacaug

SEQ ID NO: 1799861 - RNA, 19 nt, Artificial Sequence
  Description of Artificial Sequence: Synthetic oligonucleotide
gaacccagcaggucuccgc

SEQ ID NO: 1799862 - RNA, 19 nt, Artificial Sequence
  Description of Artificial Sequence: Synthetic oligonucleotide
caggaccagagucggaacc

SEQ ID NO: 1799863 - RNA, 19 nt, Artificial Sequence
  Description of Artificial Sequence: Synthetic oligonucleotide
ugggcaggaccagagucgg

SEQ ID NO: 1799864 - RNA, 19 nt, Artificial Sequence
  Description of Artificial Sequence: Synthetic oligonucleotide
gaaucuugggacccaccuc

SEQ ID NO: 1799865 - RNA, 19 nt, Artificial Sequence
  Description of Artificial Sequence: Synthetic oligonucleotide
acaggacuaagaaggagca

SEQ ID NO: 1799866 - RNA, 19 nt, Artificial Sequence
  Description of Artificial Sequence: Synthetic oligonucleotide
gggccaggaacccacagcc

SEQ ID NO: 1799867 - RNA, 19 nt, Artificial Sequence
  Description of Artificial Sequence: Synthetic oligonucleotide
ggagagauggcgucaagga

SEQ ID NO: 1799868 - RNA, 19 nt, Artificial Sequence
  Description of Artificial Sequence: Synthetic oligonucleotide
uugagugaccucugagaaa

SEQ ID NO: 1799869 - RNA, 19 nt, Artificial Sequence
  Description of Artificial Sequence: Synthetic oligonucleotide
agaaggagcaucccaccuu

SEQ ID NO: 1799870 - RNA, 19 nt, Artificial Sequence
  Description of Artificial Sequence: Synthetic oligonucleotide
uccugggccaggaacccac

SEQ ID NO: 1799871 - RNA, 19 nt, Artificial Sequence
  Description of Artificial Sequence: Synthetic oligonucleotide
uggcgucaaggaccuagag

SEQ ID NO: 1799872 - RNA, 19 nt, Artificial Sequence
  Description of Artificial Sequence: Synthetic oligonucleotide
guuuauugagugaccucug

SEQ ID NO: 1799873 - RNA, 19 nt, Artificial Sequence
  Description of Artificial Sequence: Synthetic oligonucleotide
ucuugggacccaccucgug

SEQ ID NO: 1799874 - RNA, 19 nt, Artificial Sequence
  Description of Artificial Sequence: Synthetic oligonucleotide
gagcaucccaccuuggagu

SEQ ID NO: 1799875 - RNA, 19 nt, Artificial Sequence
  Description of Artificial Sequence: Synthetic oligonucleotide
ggacuaagaaggagcaucc

SEQ ID NO: 1799876 - RNA, 19 nt, Artificial Sequence
  Description of Artificial Sequence: Synthetic oligonucleotide
gacuaagaaggagcauccc

SEQ ID NO: 1799877 - RNA, 19 nt, Artificial Sequence
  Description of Artificial Sequence: Synthetic oligonucleotide
cugcccgggacacaggcug

SEQ ID NO: 1799878 - RNA, 19 nt, Artificial Sequence
  Description of Artificial Sequence: Synthetic oligonucleotide
agccccagaagcagcaggg

SEQ ID NO: 1799879 - RNA, 19 nt, Artificial Sequence
  Description of Artificial Sequence: Synthetic oligonucleotide
aggagcaucccaccuugga

SEQ ID NO: 1799880 - RNA, 19 nt, Artificial Sequence
  Description of Artificial Sequence: Synthetic oligonucleotide
gucggaacccagaaucuug

SEQ ID NO: 1799881 - RNA, 19 nt, Artificial Sequence
  Description of Artificial Sequence: Synthetic oligonucleotide
gguuuauugagugaccucu

SEQ ID NO: 1799882 - RNA, 19 nt, Artificial Sequence
  Description of Artificial Sequence: Synthetic oligonucleotide
acccagguggaacccagca

SEQ ID NO: 1799883 - RNA, 19 nt, Artificial Sequence
  Description of Artificial Sequence: Synthetic oligonucleotide
cagaaucuugggacccacc

SEQ ID NO: 1799884 - RNA, 19 nt, Artificial Sequence
  Description of Artificial Sequence: Synthetic oligonucleotide
gacaccagccccagaagca

SEQ ID NO: 1799885 - RNA, 19 nt, Artificial Sequence
  Description of Artificial Sequence: Synthetic oligonucleotide
ggaacccagaaucuuggga

SEQ ID NO: 1799886 - RNA, 19 nt, Artificial Sequence
  Description of Artificial Sequence: Synthetic oligonucleotide
ggggcacaggacuaagaag

SEQ ID NO: 1799887 - RNA, 19 nt, Artificial Sequence
  Description of Artificial Sequence: Synthetic oligonucleotide
ugcccgggacacaggcugg

SEQ ID NO: 1799888 - RNA, 19 nt, Artificial Sequence
  Description of Artificial Sequence: Synthetic oligonucleotide
ggaguccugggccaggaac

SEQ ID NO: 1799889 - RNA, 19 nt, Artificial Sequence
  Description of Artificial Sequence: Synthetic oligonucleotide
agucugugggcugggcagg

SEQ ID NO: 1799890 - RNA, 19 nt, Artificial Sequence
  Description of Artificial Sequence: Synthetic oligonucleotide
aaggagcaucccaccuugg

SEQ ID NO: 1799891 - RNA, 19 nt, Artificial Sequence
  Description of Artificial Sequence: Synthetic oligonucleotide
uuguagucugugggcuggg

SEQ ID NO: 1799892 - RNA, 19 nt, Artificial Sequence
  Description of Artificial Sequence: Synthetic oligonucleotide
caccucgugccccacccag

SEQ ID NO: 1799893 - RNA, 19 nt, Artificial Sequence
  Description of Artificial Sequence: Synthetic oligonucleotide
gguggaacccagcaggucu

SEQ ID NO: 1799894 - RNA, 19 nt, Artificial Sequence
  Description of Artificial Sequence: Synthetic oligonucleotide
ucccaccuuggaguccugg

SEQ ID NO: 1799895 - RNA, 19 nt, Artificial Sequence
  Description of Artificial Sequence: Synthetic oligonucleotide
uaggagcaggagagauggc

SEQ ID NO: 1799896 - RNA, 19 nt, Artificial Sequence
  Description of Artificial Sequence: Synthetic oligonucleotide
gaccagagucggaacccag

SEQ ID NO: 1799897 - RNA, 19 nt, Artificial Sequence
  Description of Artificial Sequence: Synthetic oligonucleotide
acccaccucgugccccacc

SEQ ID NO: 1799898 - RNA, 19 nt, Artificial Sequence
  Description of Artificial Sequence: Synthetic oligonucleotide
agguggaacccagcagguc

SEQ ID NO: 1799899 - RNA, 19 nt, Artificial Sequence
  Description of Artificial Sequence: Synthetic oligonucleotide
agcaggucuccgcuccaca

SEQ ID NO: 1799900 - RNA, 19 nt, Artificial Sequence
  Description of Artificial Sequence: Synthetic oligonucleotide
gaccagcccuaggagcagg

SEQ ID NO: 1799901 - RNA, 19 nt, Artificial Sequence
  Description of Artificial Sequence: Synthetic oligonucleotide
caccagccccagaagcagc

SEQ ID NO: 1799902 - RNA, 19 nt, Artificial Sequence
  Description of Artificial Sequence: Synthetic oligonucleotide
cuuggaguccugggccagg

SEQ ID NO: 1799903 - RNA, 19 nt, Artificial Sequence
  Description of Artificial Sequence: Synthetic oligonucleotide
acccagcaggucuccgcuc

SEQ ID NO: 1799904 - RNA, 19 nt, Artificial Sequence
  Description of Artificial Sequence: Synthetic oligonucleotide
ugggacccaccucgugccc

SEQ ID NO: 1799905 - RNA, 19 nt, Artificial Sequence
  Description of Artificial Sequence: Synthetic oligonucleotide
ccuaggagcaggagagaug

SEQ ID NO: 1799906 - RNA, 19 nt, Artificial Sequence
  Description of Artificial Sequence: Synthetic oligonucleotide
gagauggcgucaaggaccu

SEQ ID NO: 1799907 - RNA, 19 nt, Artificial Sequence
  Description of Artificial Sequence: Synthetic oligonucleotide
ugccccacccagguggaac

SEQ ID NO: 1799908 - RNA, 19 nt, Artificial Sequence
  Description of Artificial Sequence: Synthetic oligonucleotide
agucggaacccagaaucuu

SEQ ID NO: 1799909 - RNA, 19 nt, Artificial Sequence
  Description of Artificial Sequence: Synthetic oligonucleotide
ggcugcccgggacacaggc

SEQ ID NO: 1799910 - RNA, 19 nt, Artificial Sequence
  Description of Artificial Sequence: Synthetic oligonucleotide
cacccagguggaacccagc

SEQ ID NO: 1799911 - RNA, 19 nt, Artificial Sequence
  Description of Artificial Sequence: Synthetic oligonucleotide
caggagagauggcgucaag

SEQ ID NO: 1799912 - RNA, 19 nt, Artificial Sequence
  Description of Artificial Sequence: Synthetic oligonucleotide
agaccagcccuaggagcag

SEQ ID NO: 1799913 - RNA, 19 nt, Artificial Sequence
  Description of Artificial Sequence: Synthetic oligonucleotide
gagucggaacccagaaucu

SEQ ID NO: 1799914 - RNA, 19 nt, Artificial Sequence
  Description of Artificial Sequence: Synthetic oligonucleotide
uggaguccugggccaggaa

SEQ ID NO: 1799915 - RNA, 19 nt, Artificial Sequence
  Description of Artificial Sequence: Synthetic oligonucleotide
cccagcaggucuccgcucc

SEQ ID NO: 1799916 - RNA, 19 nt, Artificial Sequence
  Description of Artificial Sequence: Synthetic oligonucleotide
auggcgucaaggaccuaga

SEQ ID NO: 1799917 - RNA, 19 nt, Artificial Sequence
  Description of Artificial Sequence: Synthetic oligonucleotide
gucuccgcuccacaaacau

SEQ ID NO: 1799918 - RNA, 19 nt, Artificial Sequence
  Description of Artificial Sequence: Synthetic oligonucleotide
guggaacccagcaggucuc

SEQ ID NO: 1799919 - RNA, 19 nt, Artificial Sequence
  Description of Artificial Sequence: Synthetic oligonucleotide
accucgugccccacccagg

SEQ ID NO: 1799920 - RNA, 19 nt, Artificial Sequence
  Description of Artificial Sequence: Synthetic oligonucleotide
ggcaggaccagagucggaa

SEQ ID NO: 1799921 - RNA, 19 nt, Artificial Sequence
  Description of Artificial Sequence: Synthetic oligonucleotide
cccagguggaacccagcag

SEQ ID NO: 1799922 - RNA, 19 nt, Artificial Sequence
  Description of Artificial Sequence: Synthetic oligonucleotide
gccccacccagguggaacc

SEQ ID NO: 1799923 - RNA, 19 nt, Artificial Sequence
  Description of Artificial Sequence: Synthetic oligonucleotide
cccaccucgugccccaccc

SEQ ID NO: 1799924 - RNA, 19 nt, Artificial Sequence
  Description of Artificial Sequence: Synthetic oligonucleotide
ggaacccagcaggucuccg

SEQ ID NO: 1799925 - RNA, 19 nt, Artificial Sequence
  Description of Artificial Sequence: Synthetic oligonucleotide
cgucaaggaccuagagggg

SEQ ID NO: 1799926 - RNA, 19 nt, Artificial Sequence
  Description of Artificial Sequence: Synthetic oligonucleotide
ucugugggcugggcaggac

SEQ ID NO: 1799927 - RNA, 19 nt, Artificial Sequence
  Description of Artificial Sequence: Synthetic oligonucleotide
gcaggaccagagucggaac

SEQ ID NO: 1799928 - RNA, 19 nt, Artificial Sequence
  Description of Artificial Sequence: Synthetic oligonucleotide
ccacccagguggaacccag

SEQ ID NO: 1799929 - RNA, 19 nt, Artificial Sequence
  Description of Artificial Sequence: Synthetic oligonucleotide
caggucuccgcuccacaaa

SEQ ID NO: 1799930 - RNA, 19 nt, Artificial Sequence
  Description of Artificial Sequence: Synthetic oligonucleotide
cucgugccccacccaggug

SEQ ID NO: 1799931 - RNA, 19 nt, Artificial Sequence
  Description of Artificial Sequence: Synthetic oligonucleotide
caucccaccuuggaguccu

SEQ ID NO: 1799932 - RNA, 19 nt, Artificial Sequence
  Description of Artificial Sequence: Synthetic oligonucleotide
aucuugggacccaccucgu

SEQ ID NO: 1799933 - RNA, 19 nt, Artificial Sequence
  Description of Artificial Sequence: Synthetic oligonucleotide
gcaggucuccgcuccacaa

SEQ ID NO: 1799934 - RNA, 19 nt, Artificial Sequence
  Description of Artificial Sequence: Synthetic oligonucleotide
ccagagucggaacccagaa

SEQ ID NO: 1799935 - RNA, 19 nt, Artificial Sequence
  Description of Artificial Sequence: Synthetic oligonucleotide
cagguggaacccagcaggu

SEQ ID NO: 1799936 - RNA, 19 nt, Artificial Sequence
  Description of Artificial Sequence: Synthetic oligonucleotide
cggaacccagaaucuuggg

SEQ ID NO: 1799937 - RNA, 19 nt, Artificial Sequence
  Description of Artificial Sequence: Synthetic oligonucleotide
ccagaaucuugggacccac

SEQ ID NO: 1799938 - RNA, 19 nt, Artificial Sequence
  Description of Artificial Sequence: Synthetic oligonucleotide
gggcugggcaggaccagag

SEQ ID NO: 1799939 - RNA, 19 nt, Artificial Sequence
  Description of Artificial Sequence: Synthetic oligonucleotide
cagcaggucuccgcuccac

SEQ ID NO: 1799940 - RNA, 19 nt, Artificial Sequence
  Description of Artificial Sequence: Synthetic oligonucleotide
ggaccagagucggaaccca

SEQ ID NO: 1799941 - RNA, 19 nt, Artificial Sequence
  Description of Artificial Sequence: Synthetic oligonucleotide
ggacccaccucgugcccca

SEQ ID NO: 1799942 - RNA, 19 nt, Artificial Sequence
  Description of Artificial Sequence: Synthetic oligonucleotide
gucugugggcugggcagga

SEQ ID NO: 1799943 - RNA, 19 nt, Artificial Sequence
  Description of Artificial Sequence: Synthetic oligonucleotide
cagagucggaacccagaau

SEQ ID NO: 1799944 - RNA, 19 nt, Artificial Sequence
  Description of Artificial Sequence: Synthetic oligonucleotide
ccuuggaguccugggccag

SEQ ID NO: 1799945 - RNA, 19 nt, Artificial Sequence
  Description of Artificial Sequence: Synthetic oligonucleotide
gcaucccaccuuggagucc

SEQ ID NO: 1799946 - RNA, 19 nt, Artificial Sequence
  Description of Artificial Sequence: Synthetic oligonucleotide
ggucuccgcuccacaaaca

SEQ ID NO: 1799947 - RNA, 19 nt, Artificial Sequence
  Description of Artificial Sequence: Synthetic oligonucleotide
gcccgggacacaggcuggg

SEQ ID NO: 1799948 - RNA, 19 nt, Artificial Sequence
  Description of Artificial Sequence: Synthetic oligonucleotide
ggacacaggcuggggaucu

SEQ ID NO: 1799949 - RNA, 19 nt, Artificial Sequence
  Description of Artificial Sequence: Synthetic oligonucleotide
ccgggacacaggcugggga

SEQ ID NO: 1799950 - RNA, 19 nt, Artificial Sequence
  Description of Artificial Sequence: Synthetic oligonucleotide
gacccaccucgugccccac

SEQ ID NO: 1799951 - RNA, 19 nt, Artificial Sequence
  Description of Artificial Sequence: Synthetic oligonucleotide
caggacuaagaaggagcau

SEQ ID NO: 1799952 - RNA, 19 nt, Artificial Sequence
  Description of Artificial Sequence: Synthetic oligonucleotide
cccgggacacaggcugggg

SEQ ID NO: 1799953 - RNA, 19 nt, Artificial Sequence
  Description of Artificial Sequence: Synthetic oligonucleotide
cccagaaucuugggaccca

SEQ ID NO: 1799954 - RNA, 19 nt, Artificial Sequence
  Description of Artificial Sequence: Synthetic oligonucleotide
ggcugggcaggaccagagu

SEQ ID NO: 1799955 - RNA, 19 nt, Artificial Sequence
  Description of Artificial Sequence: Synthetic oligonucleotide
aucccaccuuggaguccug

SEQ ID NO: 1799956 - RNA, 19 nt, Artificial Sequence
  Description of Artificial Sequence: Synthetic oligonucleotide
ccccacccagguggaaccc

SEQ ID NO: 1799957 - RNA, 19 nt, Artificial Sequence
  Description of Artificial Sequence: Synthetic oligonucleotide
gggcugcccgggacacagg

SEQ ID NO: 1799958 - RNA, 19 nt, Artificial Sequence
  Description of Artificial Sequence: Synthetic oligonucleotide
ccucgugccccacccaggu

SEQ ID NO: 1799959 - RNA, 19 nt, Artificial Sequence
  Description of Artificial Sequence: Synthetic oligonucleotide
gcccuaggagcaggagaga

SEQ ID NO: 1799960 - RNA, 19 nt, Artificial Sequence
  Description of Artificial Sequence: Synthetic oligonucleotide
ccagcaggucuccgcucca

SEQ ID NO: 1799961 - RNA, 19 nt, Artificial Sequence
  Description of Artificial Sequence: Synthetic oligonucleotide
cccuaggagcaggagagau

SEQ ID NO: 1799962 - RNA, 19 nt, Artificial Sequence
  Description of Artificial Sequence: Synthetic oligonucleotide
gacacaggcuggggaucuu

SEQ ID NO: 1799963 - RNA, 19 nt, Artificial Sequence
  Description of Artificial Sequence: Synthetic oligonucleotide
agauggcgucaaggaccua

SEQ ID NO: 1799964 - RNA, 19 nt, Artificial Sequence
  Description of Artificial Sequence: Synthetic oligonucleotide
gccugacaccagccccaga

SEQ ID NO: 1799965 - RNA, 19 nt, Artificial Sequence
  Description of Artificial Sequence: Synthetic oligonucleotide
cccacccagguggaaccca

SEQ ID NO: 1799966 - RNA, 19 nt, Artificial Sequence
  Description of Artificial Sequence: Synthetic oligonucleotide
cgggacacaggcuggggau

SEQ ID NO: 1799967 - RNA, 19 nt, Artificial Sequence
  Description of Artificial Sequence: Synthetic oligonucleotide
ccaccucgugccccaccca

SEQ ID NO: 1799968 - RNA, 19 nt, Artificial Sequence
  Description of Artificial Sequence: Synthetic oligonucleotide
gggcaggaccagagucgga

SEQ ID NO: 1799969 - RNA, 19 nt, Artificial Sequence
  Description of Artificial Sequence: Synthetic oligonucleotide
gcugcccgggacacaggcu

SEQ ID NO: 1799970 - RNA, 19 nt, Artificial Sequence
  Description of Artificial Sequence: Synthetic oligonucleotide
gugccccacccagguggaa

SEQ ID NO: 1799971 - RNA, 19 nt, Artificial Sequence
  Description of Artificial Sequence: Synthetic oligonucleotide
ccgggcugcccgggacaca

SEQ ID NO: 1799972 - RNA, 19 nt, Artificial Sequence
  Description of Artificial Sequence: Synthetic oligonucleotide
aauacaauaaaacagcagc

SEQ ID NO: 1799973 - RNA, 19 nt, Artificial Sequence
  Description of Artificial Sequence: Synthetic oligonucleotide
aaaaguauauaaaaugucc

SEQ ID NO: 1799974 - RNA, 19 nt, Artificial Sequence
  Description of Artificial Sequence: Synthetic oligonucleotide
uuuguaagaacuaaauugg

SEQ ID NO: 1799975 - RNA, 19 nt, Artificial Sequence
  Description of Artificial Sequence: Synthetic oligonucleotide
aagguauuaaguuuacagc

SEQ ID NO: 1799976 - RNA, 19 nt, Artificial Sequence
  Description of Artificial Sequence: Synthetic oligonucleotide
ugaaaagaaggaaagaucc

SEQ ID NO: 1799977 - RNA, 19 nt, Artificial Sequence
  Description of Artificial Sequence: Synthetic oligonucleotide
agcacaaugaaguaguuac

SEQ ID NO: 1799978 - RNA, 19 nt, Artificial Sequence
  Description of Artificial Sequence: Synthetic oligonucleotide
uaagguauuaaguuuacag

SEQ ID NO: 1799979 - RNA, 19 nt, Artificial Sequence
  Description of Artificial Sequence: Synthetic oligonucleotide
uuaaaaguauaccacaaca

SEQ ID NO: 1799980 - RNA, 19 nt, Artificial Sequence
  Description of Artificial Sequence: Synthetic oligonucleotide
uuuaccaguauuaucuacg

SEQ ID NO: 1799981 - RNA, 19 nt, Artificial Sequence
  Description of Artificial Sequence: Synthetic oligonucleotide
aacauuuaaccaaacaugg

SEQ ID NO: 1799982 - RNA, 19 nt, Artificial Sequence
  Description of Artificial Sequence: Synthetic oligonucleotide
aaacuaaagaugcaaguug

SEQ ID NO: 1799983 - RNA, 19 nt, Artificial Sequence
  Description of Artificial Sequence: Synthetic oligonucleotide
acugcuaacaagcuauugc

SEQ ID NO: 1799984 - RNA, 19 nt, Artificial Sequence
  Description of Artificial Sequence: Synthetic oligonucleotide
uugaaauuaguuaacuuug

SEQ ID NO: 1799985 - RNA, 19 nt, Artificial Sequence
  Description of Artificial Sequence: Synthetic oligonucleotide
ucaaguuaagaauagguga

SEQ ID NO: 1799986 - RNA, 19 nt, Artificial Sequence
  Description of Artificial Sequence: Synthetic oligonucleotide
auuauaacugcuuugauua

SEQ ID NO: 1799987 - RNA, 19 nt, Artificial Sequence
  Description of Artificial Sequence: Synthetic oligonucleotide
uaaauuaacaaaaucuuua

SEQ ID NO: 1799988 - RNA, 19 nt, Artificial Sequence
  Description of Artificial Sequence: Synthetic oligonucleotide
aacuaaagaugcaaguugc

SEQ ID NO: 1799989 - RNA, 19 nt, Artificial Sequence
  Description of Artificial Sequence: Synthetic oligonucleotide
uaagaacuaaauugggugg

SEQ ID NO: 1799990 - RNA, 19 nt, Artificial Sequence
  Description of Artificial Sequence: Synthetic oligonucleotide
auuacuacaagucccacug

SEQ ID NO: 1799991 - RNA, 19 nt, Artificial Sequence
  Description of Artificial Sequence: Synthetic oligonucleotide
aaacccauaacacaggaau

SEQ ID NO: 1799992 - RNA, 19 nt, Artificial Sequence
  Description of Artificial Sequence: Synthetic oligonucleotide
uaaagaugcaaguugcuag

SEQ ID NO: 1799993 - RNA, 19 nt, Artificial Sequence
  Description of Artificial Sequence: Synthetic oligonucleotide
uauuggaagaacuugagau

SEQ ID NO: 1799994 - RNA, 19 nt, Artificial Sequence
  Description of Artificial Sequence: Synthetic oligonucleotide
uguuaggacagucacugcg

SEQ ID NO: 1799995 - RNA, 19 nt, Artificial Sequence
  Description of Artificial Sequence: Synthetic oligonucleotide
aagacaagaaacccauaac

SEQ ID NO: 1799996 - RNA, 19 nt, Artificial Sequence
  Description of Artificial Sequence: Synthetic oligonucleotide
uucuuaagcaucuugaaaa

SEQ ID NO: 1799997 - RNA, 19 nt, Artificial Sequence
  Description of Artificial Sequence: Synthetic oligonucleotide
ugaagaguuuguaagaacu

SEQ ID NO: 1799998 - RNA, 19 nt, Artificial Sequence
  Description of Artificial Sequence: Synthetic oligonucleotide
uuaagcaucuugaaaagac

SEQ ID NO: 1799999 - RNA, 19 nt, Artificial Sequence
  Description of Artificial Sequence: Synthetic oligonucleotide
guaagaacuaaauugggug

SEQ ID NO: 1800000 - RNA, 19 nt, Artificial Sequence
  Description of Artificial Sequence: Synthetic oligonucleotide
uucaaguuaagaauaggug

SEQ ID NO: 1800001 - RNA, 19 nt, Artificial Sequence
  Description of Artificial Sequence: Synthetic oligonucleotide
aauugggugguuuucaagu

SEQ ID NO: 1800002 - RNA, 19 nt, Artificial Sequence
  Description of Artificial Sequence: Synthetic oligonucleotide
ugaugcuuaaucugaaggg

SEQ ID NO: 1800003 - RNA, 19 nt, Artificial Sequence
  Description of Artificial Sequence: Synthetic oligonucleotide
cuugguuucacauugaaga

SEQ ID NO: 1800004 - RNA, 19 nt, Artificial Sequence
  Description of Artificial Sequence: Synthetic oligonucleotide
uuauauuggaagaacuuga

SEQ ID NO: 1800005 - RNA, 19 nt, Artificial Sequence
  Description of Artificial Sequence: Synthetic oligonucleotide
acauugaagaguuuguaag

SEQ ID NO: 1800006 - RNA, 19 nt, Artificial Sequence
  Description of Artificial Sequence: Synthetic oligonucleotide
ucuucuagacuucuuaagc

SEQ ID NO: 1800007 - RNA, 19 nt, Artificial Sequence
  Description of Artificial Sequence: Synthetic oligonucleotide
aacuuuggcgucugaauac

SEQ ID NO: 1800008 - RNA, 19 nt, Artificial Sequence
  Description of Artificial Sequence: Synthetic oligonucleotide
aaggaaagaucccuguuag

SEQ ID NO: 1800009 - RNA, 19 nt, Artificial Sequence
  Description of Artificial Sequence: Synthetic oligonucleotide
uaaguuuacagcuugcuaa

SEQ ID NO: 1800010 - RNA, 19 nt, Artificial Sequence
  Description of Artificial Sequence: Synthetic oligonucleotide
aaguauauaaaaugucccu

SEQ ID NO: 1800011 - RNA, 19 nt, Artificial Sequence
  Description of Artificial Sequence: Synthetic oligonucleotide
uaauuauguaacuugauuu

SEQ ID NO: 1800012 - RNA, 19 nt, Artificial Sequence
  Description of Artificial Sequence: Synthetic oligonucleotide
cuuuucauaagguauuaag

SEQ ID NO: 1800013 - RNA, 19 nt, Artificial Sequence
  Description of Artificial Sequence: Synthetic oligonucleotide
uaagaauaggugaaugcag

SEQ ID NO: 1800014 - RNA, 19 nt, Artificial Sequence
  Description of Artificial Sequence: Synthetic oligonucleotide
agacguguuuauuucaccc

SEQ ID NO: 1800015 - RNA, 19 nt, Artificial Sequence
  Description of Artificial Sequence: Synthetic oligonucleotide
gaaacugcaauucaguaga

SEQ ID NO: 1800016 - RNA, 19 nt, Artificial Sequence
  Description of Artificial Sequence: Synthetic oligonucleotide
aauuauguaacuugauuua

SEQ ID NO: 1800017 - RNA, 19 nt, Artificial Sequence
  Description of Artificial Sequence: Synthetic oligonucleotide
cuuugauuacauuucuugg

SEQ ID NO: 1800018 - RNA, 19 nt, Artificial Sequence
  Description of Artificial Sequence: Synthetic oligonucleotide
aaaucauuuaucaaaugcu

SEQ ID NO: 1800019 - RNA, 19 nt, Artificial Sequence
  Description of Artificial Sequence: Synthetic oligonucleotide
uucagaagaaacaauguau

SEQ ID NO: 1800020 - RNA, 19 nt, Artificial Sequence
  Description of Artificial Sequence: Synthetic oligonucleotide
ugagauuauacucucucca

SEQ ID NO: 1800021 - RNA, 19 nt, Artificial Sequence
  Description of Artificial Sequence: Synthetic oligonucleotide
agguauuaaguuuacagcu

SEQ ID NO: 1800022 - RNA, 19 nt, Artificial Sequence
  Description of Artificial Sequence: Synthetic oligonucleotide
aagaccugcaaaucuggac

SEQ ID NO: 1800023 - RNA, 19 nt, Artificial Sequence
  Description of Artificial Sequence: Synthetic oligonucleotide
aaugcaaagcacaaugaag

SEQ ID NO: 1800024 - RNA, 19 nt, Artificial Sequence
  Description of Artificial Sequence: Synthetic oligonucleotide
agacaagaaacccauaaca

SEQ ID NO: 1800025 - RNA, 19 nt, Artificial Sequence
  Description of Artificial Sequence: Synthetic oligonucleotide
aaagaucccuguuaggaca

SEQ ID NO: 1800026 - RNA, 19 nt, Artificial Sequence
  Description of Artificial Sequence: Synthetic oligonucleotide
aguucugugguuccugacc

SEQ ID NO: 1800027 - RNA, 19 nt, Artificial Sequence
  Description of Artificial Sequence: Synthetic oligonucleotide
uuaagaauaggugaaugca

SEQ ID NO: 1800028 - RNA, 19 nt, Artificial Sequence
  Description of Artificial Sequence: Synthetic oligonucleotide
cucaaauuacuacaagucc

SEQ ID NO: 1800029 - RNA, 19 nt, Artificial Sequence
  Description of Artificial Sequence: Synthetic oligonucleotide
aacuaaaauguaauuaugu

SEQ ID NO: 1800030 - RNA, 19 nt, Artificial Sequence
  Description of Artificial Sequence: Synthetic oligonucleotide
uguaacuugauuuacucuu

SEQ ID NO: 1800031 - RNA, 19 nt, Artificial Sequence
  Description of Artificial Sequence: Synthetic oligonucleotide
agaaacugcaauucaguag

SEQ ID NO: 1800032 - RNA, 19 nt, Artificial Sequence
  Description of Artificial Sequence: Synthetic oligonucleotide
uguaagaacuaaauugggu

SEQ ID NO: 1800033 - RNA, 19 nt, Artificial Sequence
  Description of Artificial Sequence: Synthetic oligonucleotide
uauuucacccuuuucauaa

SEQ ID NO: 1800034 - RNA, 19 nt, Artificial Sequence
  Description of Artificial Sequence: Synthetic oligonucleotide
uuguaagaacuaaauuggg

SEQ ID NO: 1800035 - RNA, 19 nt, Artificial Sequence
  Description of Artificial Sequence: Synthetic oligonucleotide
aaaagaaggaaagaucccu

SEQ ID NO: 1800036 - RNA, 19 nt, Artificial Sequence
  Description of Artificial Sequence: Synthetic oligonucleotide
uuucauaagguauuaaguu

SEQ ID NO: 1800037 - RNA, 19 nt, Artificial Sequence
  Description of Artificial Sequence: Synthetic oligonucleotide
gaauuuaaaaguauaccac

SEQ ID NO: 1800038 - RNA, 19 nt, Artificial Sequence
  Description of Artificial Sequence: Synthetic oligonucleotide
aguuuggugaguucugugg

SEQ ID NO: 1800039 - RNA, 19 nt, Artificial Sequence
  Description of Artificial Sequence: Synthetic oligonucleotide
cauaauuuugcuuaauaca

SEQ ID NO: 1800040 - RNA, 19 nt, Artificial Sequence
  Description of Artificial Sequence: Synthetic oligonucleotide
guuaagaauaggugaaugc

SEQ ID NO: 1800041 - RNA, 19 nt, Artificial Sequence
  Description of Artificial Sequence: Synthetic oligonucleotide
uaaaaguauaccacaacau

SEQ ID NO: 1800042 - RNA, 19 nt, Artificial Sequence
  Description of Artificial Sequence: Synthetic oligonucleotide
cuuauaugcaaguuuggug

SEQ ID NO: 1800043 - RNA, 19 nt, Artificial Sequence
  Description of Artificial Sequence: Synthetic oligonucleotide
aguauauaaaaugucccuc

SEQ ID NO: 1800044 - RNA, 19 nt, Artificial Sequence
  Description of Artificial Sequence: Synthetic oligonucleotide
ucccuuauaugcaaguuug

SEQ ID NO: 1800045 - RNA, 19 nt, Artificial Sequence
  Description of Artificial Sequence: Synthetic oligonucleotide
gaaucugaugcuuaaucug

SEQ ID NO: 1800046 - RNA, 19 nt, Artificial Sequence
  Description of Artificial Sequence: Synthetic oligonucleotide
aacaugggaaaacugccug

SEQ ID NO: 1800047 - RNA, 19 nt, Artificial Sequence
  Description of Artificial Sequence: Synthetic oligonucleotide
auuaguuaacuuuggcguc

SEQ ID NO: 1800048 - RNA, 19 nt, Artificial Sequence
  Description of Artificial Sequence: Synthetic oligonucleotide
uuuuggggaauauuuauuc

SEQ ID NO: 1800049 - RNA, 19 nt, Artificial Sequence
  Description of Artificial Sequence: Synthetic oligonucleotide
cugcuaacaagcuauugcg

SEQ ID NO: 1800050 - RNA, 19 nt, Artificial Sequence
  Description of Artificial Sequence: Synthetic oligonucleotide
ucauaagguauuaaguuua

SEQ ID NO: 1800051 - RNA, 19 nt, Artificial Sequence
  Description of Artificial Sequence: Synthetic oligonucleotide
uugcauagcugcaggaugg

SEQ ID NO: 1800052 - RNA, 19 nt, Artificial Sequence
  Description of Artificial Sequence: Synthetic oligonucleotide
caaugaaguaguuacauga

SEQ ID NO: 1800053 - RNA, 19 nt, Artificial Sequence
  Description of Artificial Sequence: Synthetic oligonucleotide
auuauguaacuugauuuac

SEQ ID NO: 1800054 - RNA, 19 nt, Artificial Sequence
  Description of Artificial Sequence: Synthetic oligonucleotide
caaacaugggaaaacugcc

SEQ ID NO: 1800055 - RNA, 19 nt, Artificial Sequence
  Description of Artificial Sequence: Synthetic oligonucleotide
ucuacaaagacugaauuua

SEQ ID NO: 1800056 - RNA, 19 nt, Artificial Sequence
  Description of Artificial Sequence: Synthetic oligonucleotide
aauuacuacaagucccacu

SEQ ID NO: 1800057 - RNA, 19 nt, Artificial Sequence
  Description of Artificial Sequence: Synthetic oligonucleotide
uaacuuccagacuaucugg

SEQ ID NO: 1800058 - RNA, 19 nt, Artificial Sequence
  Description of Artificial Sequence: Synthetic oligonucleotide
cuugcuaaacauuuaacca

SEQ ID NO: 1800059 - RNA, 19 nt, Artificial Sequence
  Description of Artificial Sequence: Synthetic oligonucleotide
uuuuauauuggaagaacuu

SEQ ID NO: 1800060 - RNA, 19 nt, Artificial Sequence
  Description of Artificial Sequence: Synthetic oligonucleotide
auuaacuaaaauguaauua

SEQ ID NO: 1800061 - RNA, 19 nt, Artificial Sequence
  Description of Artificial Sequence: Synthetic oligonucleotide
aaauugggugguuuucaag

SEQ ID NO: 1800062 - RNA, 19 nt, Artificial Sequence
  Description of Artificial Sequence: Synthetic oligonucleotide
uuucagaagaaacaaugua

SEQ ID NO: 1800063 - RNA, 19 nt, Artificial Sequence
  Description of Artificial Sequence: Synthetic oligonucleotide
uuucacccuuuucauaagg

SEQ ID NO: 1800064 - RNA, 19 nt, Artificial Sequence
  Description of Artificial Sequence: Synthetic oligonucleotide
auacaaaauguuuaccagu

SEQ ID NO: 1800065 - RNA, 19 nt, Artificial Sequence
  Description of Artificial Sequence: Synthetic oligonucleotide
ucagaagaaacaauguauu

SEQ ID NO: 1800066 - RNA, 19 nt, Artificial Sequence
  Description of Artificial Sequence: Synthetic oligonucleotide
agagacagaucuuccaauc

SEQ ID NO: 1800067 - RNA, 19 nt, Artificial Sequence
  Description of Artificial Sequence: Synthetic oligonucleotide
agagacauuauguugggaa

SEQ ID NO: 1800068 - RNA, 19 nt, Artificial Sequence
  Description of Artificial Sequence: Synthetic oligonucleotide
uuuucaaguuaagaauagg

SEQ ID NO: 1800069 - RNA, 19 nt, Artificial Sequence
  Description of Artificial Sequence: Synthetic oligonucleotide
uauacucucuccauucaca

SEQ ID NO: 1800070 - RNA, 19 nt, Artificial Sequence
  Description of Artificial Sequence: Synthetic oligonucleotide
uuuauuucacccuuuucau

SEQ ID NO: 1800071 - RNA, 19 nt, Artificial Sequence
  Description of Artificial Sequence: Synthetic oligonucleotide
cuaacuuccagacuaucug

SEQ ID NO: 1800072 - RNA, 19 nt, Artificial Sequence
  Description of Artificial Sequence: Synthetic oligonucleotide
uuauguaacuugauuuacu

SEQ ID NO: 1800073 - RNA, 19 nt, Artificial Sequence
  Description of Artificial Sequence: Synthetic oligonucleotide
acagaacucagauccuggc

SEQ ID NO: 1800074 - RNA, 19 nt, Artificial Sequence
  Description of Artificial Sequence: Synthetic oligonucleotide
aaaguaaaucaacuuugaa

SEQ ID NO: 1800075 - RNA, 19 nt, Artificial Sequence
  Description of Artificial Sequence: Synthetic oligonucleotide
aaaguauaccacaacauuu

SEQ ID NO: 1800076 - RNA, 19 nt, Artificial Sequence
  Description of Artificial Sequence: Synthetic oligonucleotide
guauuaaguuuacagcuug

SEQ ID NO: 1800077 - RNA, 19 nt, Artificial Sequence
  Description of Artificial Sequence: Synthetic oligonucleotide
ucuggcaucccaauuaaau

SEQ ID NO: 1800078 - RNA, 19 nt, Artificial Sequence
  Description of Artificial Sequence: Synthetic oligonucleotide
caaaugcuaacuuccagac

SEQ ID NO: 1800079 - RNA, 19 nt, Artificial Sequence
  Description of Artificial Sequence: Synthetic oligonucleotide
aguaguuacaugaaaagaa

SEQ ID NO: 1800080 - RNA, 19 nt, Artificial Sequence
  Description of Artificial Sequence: Synthetic oligonucleotide
guauuaucuacgcagugac

SEQ ID NO: 1800081 - RNA, 19 nt, Artificial Sequence
  Description of Artificial Sequence: Synthetic oligonucleotide
aaucuucuagacuucuuaa

SEQ ID NO: 1800082 - RNA, 19 nt, Artificial Sequence
  Description of Artificial Sequence: Synthetic oligonucleotide
aguauaccacaacauuuuc

SEQ ID NO: 1800083 - RNA, 19 nt, Artificial Sequence
  Description of Artificial Sequence: Synthetic oligonucleotide
acuaguacaggaugugcag

SEQ ID NO: 1800084 - RNA, 19 nt, Artificial Sequence
  Description of Artificial Sequence: Synthetic oligonucleotide
auucaguagacaguucuac

SEQ ID NO: 1800085 - RNA, 19 nt, Artificial Sequence
  Description of Artificial Sequence: Synthetic oligonucleotide
uuaccaguauuaucuacgc

SEQ ID NO: 1800086 - RNA, 19 nt, Artificial Sequence
  Description of Artificial Sequence: Synthetic oligonucleotide
aagaaggaaagaucccugu

SEQ ID NO: 1800087 - RNA, 19 nt, Artificial Sequence
  Description of Artificial Sequence: Synthetic oligonucleotide
aaacaauguauuucagaaa

SEQ ID NO: 1800088 - RNA, 19 nt, Artificial Sequence
  Description of Artificial Sequence: Synthetic oligonucleotide
acuacugagugucacagaa

SEQ ID NO: 1800089 - RNA, 19 nt, Artificial Sequence
  Description of Artificial Sequence: Synthetic oligonucleotide
ugaauacaaaauguuuacc

SEQ ID NO: 1800090 - RNA, 19 nt, Artificial Sequence
  Description of Artificial Sequence: Synthetic oligonucleotide
cuugagauuauacucucuc

SEQ ID NO: 1800091 - RNA, 19 nt, Artificial Sequence
  Description of Artificial Sequence: Synthetic oligonucleotide
uuucuacaaagacugaauu

SEQ ID NO: 1800092 - RNA, 19 nt, Artificial Sequence
  Description of Artificial Sequence: Synthetic oligonucleotide
agaauaggugaaugcagag

SEQ ID NO: 1800093 - RNA, 19 nt, Artificial Sequence
  Description of Artificial Sequence: Synthetic oligonucleotide
gcuugcuaaacauuuaacc

SEQ ID NO: 1800094 - RNA, 19 nt, Artificial Sequence
  Description of Artificial Sequence: Synthetic oligonucleotide
uacuacaagucccacugca

SEQ ID NO: 1800095 - RNA, 19 nt, Artificial Sequence
  Description of Artificial Sequence: Synthetic oligonucleotide
guauauaaaaugucccuca

SEQ ID NO: 1800096 - RNA, 19 nt, Artificial Sequence
  Description of Artificial Sequence: Synthetic oligonucleotide
uggggaauauuuauucaca

SEQ ID NO: 1800097 - RNA, 19 nt, Artificial Sequence
  Description of Artificial Sequence: Synthetic oligonucleotide
ucuuuauauuugcuuaaaa

SEQ ID NO: 1800098 - RNA, 19 nt, Artificial Sequence
  Description of Artificial Sequence: Synthetic oligonucleotide
aaauguaauuauguaacuu

SEQ ID NO: 1800099 - RNA, 19 nt, Artificial Sequence
  Description of Artificial Sequence: Synthetic oligonucleotide
aagccugcaguuuucauuu

SEQ ID NO: 1800100 - RNA, 19 nt, Artificial Sequence
  Description of Artificial Sequence: Synthetic oligonucleotide
uuaauacaguucuuucuac

SEQ ID NO: 1800101 - RNA, 19 nt, Artificial Sequence
  Description of Artificial Sequence: Synthetic oligonucleotide
aaauuacuacaagucccac

SEQ ID NO: 1800102 - RNA, 19 nt, Artificial Sequence
  Description of Artificial Sequence: Synthetic oligonucleotide
uauaugcaaguuuggugag

SEQ ID NO: 1800103 - RNA, 19 nt, Artificial Sequence
  Description of Artificial Sequence: Synthetic oligonucleotide
uuuaaccaaacaugggaaa

SEQ ID NO: 1800104 - RNA, 19 nt, Artificial Sequence
  Description of Artificial Sequence: Synthetic oligonucleotide
aucuucuagacuucuuaag

SEQ ID NO: 1800105 - RNA, 19 nt, Artificial Sequence
  Description of Artificial Sequence: Synthetic oligonucleotide
uuaaguuuacagcuugcua

SEQ ID NO: 1800106 - RNA, 19 nt, Artificial Sequence
  Description of Artificial Sequence: Synthetic oligonucleotide
ugcaaguugcuagaaaucu

SEQ ID NO: 1800107 - RNA, 19 nt, Artificial Sequence
  Description of Artificial Sequence: Synthetic oligonucleotide
aguuacaugaaaagaagga

SEQ ID NO: 1800108 - RNA, 19 nt, Artificial Sequence
  Description of Artificial Sequence: Synthetic oligonucleotide
uguaauuauguaacuugau

SEQ ID NO: 1800109 - RNA, 19 nt, Artificial Sequence
  Description of Artificial Sequence: Synthetic oligonucleotide
caacuuugaaauuaguuaa

SEQ ID NO: 1800110 - RNA, 19 nt, Artificial Sequence
  Description of Artificial Sequence: Synthetic oligonucleotide
auacucucuccauucacag

SEQ ID NO: 1800111 - RNA, 19 nt, Artificial Sequence
  Description of Artificial Sequence: Synthetic oligonucleotide
aagaauaggugaaugcaga

SEQ ID NO: 1800112 - RNA, 19 nt, Artificial Sequence
  Description of Artificial Sequence: Synthetic oligonucleotide
augcaaagcacaaugaagu

SEQ ID NO: 1800113 - RNA, 19 nt, Artificial Sequence
  Description of Artificial Sequence: Synthetic oligonucleotide
cuaucuggaaaacuaaaga

SEQ ID NO: 1800114 - RNA, 19 nt, Artificial Sequence
  Description of Artificial Sequence: Synthetic oligonucleotide
gaaagaucccuguuaggac

SEQ ID NO: 1800115 - RNA, 19 nt, Artificial Sequence
  Description of Artificial Sequence: Synthetic oligonucleotide
uuaucuacgcagugacuag

SEQ ID NO: 1800116 - RNA, 19 nt, Artificial Sequence
  Description of Artificial Sequence: Synthetic oligonucleotide
uuauacucucuccauucac

SEQ ID NO: 1800117 - RNA, 19 nt, Artificial Sequence
  Description of Artificial Sequence: Synthetic oligonucleotide
aucuggaaaacuaaagaug

SEQ ID NO: 1800118 - RNA, 19 nt, Artificial Sequence
  Description of Artificial Sequence: Synthetic oligonucleotide
cauuauguugggaaaauaa

SEQ ID NO: 1800119 - RNA, 19 nt, Artificial Sequence
  Description of Artificial Sequence: Synthetic oligonucleotide
uaacuuuggcgucugaaua

SEQ ID NO: 1800120 - RNA, 19 nt, Artificial Sequence
  Description of Artificial Sequence: Synthetic oligonucleotide
aaguugcuagaaaucuggc

SEQ ID NO: 1800121 - RNA, 19 nt, Artificial Sequence
  Description of Artificial Sequence: Synthetic oligonucleotide
acuaucuggaaaacuaaag

SEQ ID NO: 1800122 - RNA, 19 nt, Artificial Sequence
  Description of Artificial Sequence: Synthetic oligonucleotide
gcuuugauuacauuucuug

SEQ ID NO: 1800123 - RNA, 19 nt, Artificial Sequence
  Description of Artificial Sequence: Synthetic oligonucleotide
acaaugaaguaguuacaug

SEQ ID NO: 1800124 - RNA, 19 nt, Artificial Sequence
  Description of Artificial Sequence: Synthetic oligonucleotide
aguucuuucuacaaagacu

SEQ ID NO: 1800125 - RNA, 19 nt, Artificial Sequence
  Description of Artificial Sequence: Synthetic oligonucleotide
aguuuguaagaacuaaauu

SEQ ID NO: 1800126 - RNA, 19 nt, Artificial Sequence
  Description of Artificial Sequence: Synthetic oligonucleotide
ugcuaacaagcuauugcgc

SEQ ID NO: 1800127 - RNA, 19 nt, Artificial Sequence
  Description of Artificial Sequence: Synthetic oligonucleotide
ucaaaguugcauagcugca

SEQ ID NO: 1800128 - RNA, 19 nt, Artificial Sequence
  Description of Artificial Sequence: Synthetic oligonucleotide
aguuaagaauaggugaaug

SEQ ID NO: 1800129 - RNA, 19 nt, Artificial Sequence
  Description of Artificial Sequence: Synthetic oligonucleotide
acaugggaaaacugccugg

SEQ ID NO: 1800130 - RNA, 19 nt, Artificial Sequence
  Description of Artificial Sequence: Synthetic oligonucleotide
acuaaauugggugguuuuc

SEQ ID NO: 1800131 - RNA, 19 nt, Artificial Sequence
  Description of Artificial Sequence: Synthetic oligonucleotide
aagaacuaaauuggguggu

SEQ ID NO: 1800132 - RNA, 19 nt, Artificial Sequence
  Description of Artificial Sequence: Synthetic oligonucleotide
auauuggaagaacuugaga

SEQ ID NO: 1800133 - RNA, 19 nt, Artificial Sequence
  Description of Artificial Sequence: Synthetic oligonucleotide
auuaucuacgcagugacua

SEQ ID NO: 1800134 - RNA, 19 nt, Artificial Sequence
  Description of Artificial Sequence: Synthetic oligonucleotide
aacuaaauugggugguuuu

SEQ ID NO: 1800135 - RNA, 19 nt, Artificial Sequence
  Description of Artificial Sequence: Synthetic oligonucleotide
uauugcgcaguuuuauuuc

SEQ ID NO: 1800136 - RNA, 19 nt, Artificial Sequence
  Description of Artificial Sequence: Synthetic oligonucleotide
gaagaacuugagauuauac

SEQ ID NO: 1800137 - RNA, 19 nt, Artificial Sequence
  Description of Artificial Sequence: Synthetic oligonucleotide
guugcauagcugcaggaug

SEQ ID NO: 1800138 - RNA, 19 nt, Artificial Sequence
  Description of Artificial Sequence: Synthetic oligonucleotide
uaguacaggaugugcagca

SEQ ID NO: 1800139 - RNA, 19 nt, Artificial Sequence
  Description of Artificial Sequence: Synthetic oligonucleotide
uucaguagacaguucuaca

SEQ ID NO: 1800140 - RNA, 19 nt, Artificial Sequence
  Description of Artificial Sequence: Synthetic oligonucleotide
agcucuacagaacuuaaua

SEQ ID NO: 1800141 - RNA, 19 nt, Artificial Sequence
  Description of Artificial Sequence: Synthetic oligonucleotide
gaugcaaguugcuagaaau

SEQ ID NO: 1800142 - RNA, 19 nt, Artificial Sequence
  Description of Artificial Sequence: Synthetic oligonucleotide
aaucuggcaucccaauuaa

SEQ ID NO: 1800143 - RNA, 19 nt, Artificial Sequence
  Description of Artificial Sequence: Synthetic oligonucleotide
aguagacaguucuacauuu

SEQ ID NO: 1800144 - RNA, 19 nt, Artificial Sequence
  Description of Artificial Sequence: Synthetic oligonucleotide
ugcaauucaguagacaguu

SEQ ID NO: 1800145 - RNA, 19 nt, Artificial Sequence
  Description of Artificial Sequence: Synthetic oligonucleotide
acaguucuacauuuaauua

SEQ ID NO: 1800146 - RNA, 19 nt, Artificial Sequence
  Description of Artificial Sequence: Synthetic oligonucleotide
agcacgaagaccugcaaau

SEQ ID NO: 1800147 - RNA, 19 nt, Artificial Sequence
  Description of Artificial Sequence: Synthetic oligonucleotide
aucuuccaaucuucuagac

SEQ ID NO: 1800148 - RNA, 19 nt, Artificial Sequence
  Description of Artificial Sequence: Synthetic oligonucleotide
cuuaauacaguucuuucua

SEQ ID NO: 1800149 - RNA, 19 nt, Artificial Sequence
  Description of Artificial Sequence: Synthetic oligonucleotide
ugcuuaauacaguucuuuc

SEQ ID NO: 1800150 - RNA, 19 nt, Artificial Sequence
  Description of Artificial Sequence: Synthetic oligonucleotide
caaauuacuacaaguccca

SEQ ID NO: 1800151 - RNA, 19 nt, Artificial Sequence
  Description of Artificial Sequence: Synthetic oligonucleotide
caaguuaagaauaggugaa

SEQ ID NO: 1800152 - RNA, 19 nt, Artificial Sequence
  Description of Artificial Sequence: Synthetic oligonucleotide
uuuacucuuuggauggcau

SEQ ID NO: 1800153 - RNA, 19 nt, Artificial Sequence
  Description of Artificial Sequence: Synthetic oligonucleotide
gacuuuucaaaguugcaua

SEQ ID NO: 1800154 - RNA, 19 nt, Artificial Sequence
  Description of Artificial Sequence: Synthetic oligonucleotide
aaugaaguaguuacaugaa

SEQ ID NO: 1800155 - RNA, 19 nt, Artificial Sequence
  Description of Artificial Sequence: Synthetic oligonucleotide
auuauacucucuccauuca

SEQ ID NO: 1800156 - RNA, 19 nt, Artificial Sequence
  Description of Artificial Sequence: Synthetic oligonucleotide
auuggaagaacuugagauu

SEQ ID NO: 1800157 - RNA, 19 nt, Artificial Sequence
  Description of Artificial Sequence: Synthetic oligonucleotide
guuaggacagucacugcgg

SEQ ID NO: 1800158 - RNA, 19 nt, Artificial Sequence
  Description of Artificial Sequence: Synthetic oligonucleotide
auuaaguuuacagcuugcu

SEQ ID NO: 1800159 - RNA, 19 nt, Artificial Sequence
  Description of Artificial Sequence: Synthetic oligonucleotide
acugcagacguguuuauuu

SEQ ID NO: 1800160 - RNA, 19 nt, Artificial Sequence
  Description of Artificial Sequence: Synthetic oligonucleotide
cuucuagacuucuuaagca

SEQ ID NO: 1800161 - RNA, 19 nt, Artificial Sequence
  Description of Artificial Sequence: Synthetic oligonucleotide
aaguauaccacaacauuuu

SEQ ID NO: 1800162 - RNA, 19 nt, Artificial Sequence
  Description of Artificial Sequence: Synthetic oligonucleotide
cauaagguauuaaguuuac

SEQ ID NO: 1800163 - RNA, 19 nt, Artificial Sequence
  Description of Artificial Sequence: Synthetic oligonucleotide
auaacacaggaaucugaug

SEQ ID NO: 1800164 - RNA, 19 nt, Artificial Sequence
  Description of Artificial Sequence: Synthetic oligonucleotide
uguuuauuucacccuuuuc

SEQ ID NO: 1800165 - RNA, 19 nt, Artificial Sequence
  Description of Artificial Sequence: Synthetic oligonucleotide
uuaguuaacuuuggcgucu

SEQ ID NO: 1800166 - RNA, 19 nt, Artificial Sequence
  Description of Artificial Sequence: Synthetic oligonucleotide
uaggugaaugcagagacau

SEQ ID NO: 1800167 - RNA, 19 nt, Artificial Sequence
  Description of Artificial Sequence: Synthetic oligonucleotide
acauuuaaccaaacauggg

SEQ ID NO: 1800168 - RNA, 19 nt, Artificial Sequence
  Description of Artificial Sequence: Synthetic oligonucleotide
gaaggaaagaucccuguua

SEQ ID NO: 1800169 - RNA, 19 nt, Artificial Sequence
  Description of Artificial Sequence: Synthetic oligonucleotide
guugcuagaaaucuggcau

SEQ ID NO: 1800170 - RNA, 19 nt, Artificial Sequence
  Description of Artificial Sequence: Synthetic oligonucleotide
cauugaagaguuuguaaga

SEQ ID NO: 1800171 - RNA, 19 nt, Artificial Sequence
  Description of Artificial Sequence: Synthetic oligonucleotide
ucccuguuaggacagucac

SEQ ID NO: 1800172 - RNA, 19 nt, Artificial Sequence
  Description of Artificial Sequence: Synthetic oligonucleotide
auuauguugggaaaauaaa

SEQ ID NO: 1800173 - RNA, 19 nt, Artificial Sequence
  Description of Artificial Sequence: Synthetic oligonucleotide
ucccucaaauuacuacaag

SEQ ID NO: 1800174 - RNA, 19 nt, Artificial Sequence
  Description of Artificial Sequence: Synthetic oligonucleotide
auuuaaccaaacaugggaa

SEQ ID NO: 1800175 - RNA, 19 nt, Artificial Sequence
  Description of Artificial Sequence: Synthetic oligonucleotide
uauuaucuacgcagugacu

SEQ ID NO: 1800176 - RNA, 19 nt, Artificial Sequence
  Description of Artificial Sequence: Synthetic oligonucleotide
aaacaugggaaaacugccu

SEQ ID NO: 1800177 - RNA, 19 nt, Artificial Sequence
  Description of Artificial Sequence: Synthetic oligonucleotide
auugcgcaguuuuauuuca

SEQ ID NO: 1800178 - RNA, 19 nt, Artificial Sequence
  Description of Artificial Sequence: Synthetic oligonucleotide
uuauaacugcuuugauuac

SEQ ID NO: 1800179 - RNA, 19 nt, Artificial Sequence
  Description of Artificial Sequence: Synthetic oligonucleotide
ugguuccugaccaucucug

SEQ ID NO: 1800180 - RNA, 19 nt, Artificial Sequence
  Description of Artificial Sequence: Synthetic oligonucleotide
acuucuuaagcaucuugaa

SEQ ID NO: 1800181 - RNA, 19 nt, Artificial Sequence
  Description of Artificial Sequence: Synthetic oligonucleotide
uuuggcgucugaauacaaa

SEQ ID NO: 1800182 - RNA, 19 nt, Artificial Sequence
  Description of Artificial Sequence: Synthetic oligonucleotide
uaaauugggugguuuucaa

SEQ ID NO: 1800183 - RNA, 19 nt, Artificial Sequence
  Description of Artificial Sequence: Synthetic oligonucleotide
ggcgucugaauacaaaaug

SEQ ID NO: 1800184 - RNA, 19 nt, Artificial Sequence
  Description of Artificial Sequence: Synthetic oligonucleotide
ccucaaauuacuacaaguc

SEQ ID NO: 1800185 - RNA, 19 nt, Artificial Sequence
  Description of Artificial Sequence: Synthetic oligonucleotide
uggacuuuucaaaguugca

SEQ ID NO: 1800186 - RNA, 19 nt, Artificial Sequence
  Description of Artificial Sequence: Synthetic oligonucleotide
aggaaagaucccuguuagg

SEQ ID NO: 1800187 - RNA, 19 nt, Artificial Sequence
  Description of Artificial Sequence: Synthetic oligonucleotide
ucccaauuaaauucugauu

SEQ ID NO: 1800188 - RNA, 19 nt, Artificial Sequence
  Description of Artificial Sequence: Synthetic oligonucleotide
ugcagacguguuuauuuca

SEQ ID NO: 1800189 - RNA, 19 nt, Artificial Sequence
  Description of Artificial Sequence: Synthetic oligonucleotide
ugacuaguacaggaugugc

SEQ ID NO: 1800190 - RNA, 19 nt, Artificial Sequence
  Description of Artificial Sequence: Synthetic oligonucleotide
caaagcacaaugaaguagu

SEQ ID NO: 1800191 - RNA, 19 nt, Artificial Sequence
  Description of Artificial Sequence: Synthetic oligonucleotide
uacaggaugugcagcauuu

SEQ ID NO: 1800192 - RNA, 19 nt, Artificial Sequence
  Description of Artificial Sequence: Synthetic oligonucleotide
uuauuucacccuuuucaua

SEQ ID NO: 1800193 - RNA, 19 nt, Artificial Sequence
  Description of Artificial Sequence: Synthetic oligonucleotide
auauuauaacugcuuugau

SEQ ID NO: 1800194 - RNA, 19 nt, Artificial Sequence
  Description of Artificial Sequence: Synthetic oligonucleotide
cuuccaaucuucuagacuu

SEQ ID NO: 1800195 - RNA, 19 nt, Artificial Sequence
  Description of Artificial Sequence: Synthetic oligonucleotide
cagacuaucuggaaaacua

SEQ ID NO: 1800196 - RNA, 19 nt, Artificial Sequence
  Description of Artificial Sequence: Synthetic oligonucleotide
ucuacgcagugacuaguac

SEQ ID NO: 1800197 - RNA, 19 nt, Artificial Sequence
  Description of Artificial Sequence: Synthetic oligonucleotide
auuucacccuuuucauaag

SEQ ID NO: 1800198 - RNA, 19 nt, Artificial Sequence
  Description of Artificial Sequence: Synthetic oligonucleotide
uuacuacaagucccacugc

SEQ ID NO: 1800199 - RNA, 19 nt, Artificial Sequence
  Description of Artificial Sequence: Synthetic oligonucleotide
aaacugcaauucaguagac

SEQ ID NO: 1800200 - RNA, 19 nt, Artificial Sequence
  Description of Artificial Sequence: Synthetic oligonucleotide
acagaauauuauaacugcu

SEQ ID NO: 1800201 - RNA, 19 nt, Artificial Sequence
  Description of Artificial Sequence: Synthetic oligonucleotide
agauuauacucucuccauu

SEQ ID NO: 1800202 - RNA, 19 nt, Artificial Sequence
  Description of Artificial Sequence: Synthetic oligonucleotide
aucaacuuugaaauuaguu

SEQ ID NO: 1800203 - RNA, 19 nt, Artificial Sequence
  Description of Artificial Sequence: Synthetic oligonucleotide
ugcgcaguuuuauuucaga

SEQ ID NO: 1800204 - RNA, 19 nt, Artificial Sequence
  Description of Artificial Sequence: Synthetic oligonucleotide
aggauggucacugcuaaca

SEQ ID NO: 1800205 - RNA, 19 nt, Artificial Sequence
  Description of Artificial Sequence: Synthetic oligonucleotide
aagaucccuguuaggacag

SEQ ID NO: 1800206 - RNA, 19 nt, Artificial Sequence
  Description of Artificial Sequence: Synthetic oligonucleotide
gacuaguacaggaugugca

SEQ ID NO: 1800207 - RNA, 19 nt, Artificial Sequence
  Description of Artificial Sequence: Synthetic oligonucleotide
gaauaggugaaugcagaga

SEQ ID NO: 1800208 - RNA, 19 nt, Artificial Sequence
  Description of Artificial Sequence: Synthetic oligonucleotide
ugguuucacauugaagagu

SEQ ID NO: 1800209 - RNA, 19 nt, Artificial Sequence
  Description of Artificial Sequence: Synthetic oligonucleotide
uuucuugguuucacauuga

SEQ ID NO: 1800210 - RNA, 19 nt, Artificial Sequence
  Description of Artificial Sequence: Synthetic oligonucleotide
cugagugucacagaacuca

SEQ ID NO: 1800211 - RNA, 19 nt, Artificial Sequence
  Description of Artificial Sequence: Synthetic oligonucleotide
aguuuacagcuugcuaaac

SEQ ID NO: 1800212 - RNA, 19 nt, Artificial Sequence
  Description of Artificial Sequence: Synthetic oligonucleotide
agugacuaguacaggaugu

SEQ ID NO: 1800213 - RNA, 19 nt, Artificial Sequence
  Description of Artificial Sequence: Synthetic oligonucleotide
uaccaguauuaucuacgca

SEQ ID NO: 1800214 - RNA, 19 nt, Artificial Sequence
  Description of Artificial Sequence: Synthetic oligonucleotide
ggaaagaucccuguuagga

SEQ ID NO: 1800215 - RNA, 19 nt, Artificial Sequence
  Description of Artificial Sequence: Synthetic oligonucleotide
uugcgcaguuuuauuucag

SEQ ID NO: 1800216 - RNA, 19 nt, Artificial Sequence
  Description of Artificial Sequence: Synthetic oligonucleotide
aaguuaagaauaggugaau

SEQ ID NO: 1800217 - RNA, 19 nt, Artificial Sequence
  Description of Artificial Sequence: Synthetic oligonucleotide
uaugcaaguuuggugaguu

SEQ ID NO: 1800218 - RNA, 19 nt, Artificial Sequence
  Description of Artificial Sequence: Synthetic oligonucleotide
aacugcaauucaguagaca

SEQ ID NO: 1800219 - RNA, 19 nt, Artificial Sequence
  Description of Artificial Sequence: Synthetic oligonucleotide
cagugacuaguacaggaug

SEQ ID NO: 1800220 - RNA, 19 nt, Artificial Sequence
  Description of Artificial Sequence: Synthetic oligonucleotide
aaucaacuuugaaauuagu

SEQ ID NO: 1800221 - RNA, 19 nt, Artificial Sequence
  Description of Artificial Sequence: Synthetic oligonucleotide
uugcuagaaaucuggcauc

SEQ ID NO: 1800222 - RNA, 19 nt, Artificial Sequence
  Description of Artificial Sequence: Synthetic oligonucleotide
ucacugcggccccagcacg

SEQ ID NO: 1800223 - RNA, 19 nt, Artificial Sequence
  Description of Artificial Sequence: Synthetic oligonucleotide
ugcaaagcacaaugaagua

SEQ ID NO: 1800224 - RNA, 19 nt, Artificial Sequence
  Description of Artificial Sequence: Synthetic oligonucleotide
gcuaacaagcuauugcgca

SEQ ID NO: 1800225 - RNA, 19 nt, Artificial Sequence
  Description of Artificial Sequence: Synthetic oligonucleotide
uggacuacugagugucaca

SEQ ID NO: 1800226 - RNA, 19 nt, Artificial Sequence
  Description of Artificial Sequence: Synthetic oligonucleotide
aacuuccagacuaucugga

SEQ ID NO: 1800227 - RNA, 19 nt, Artificial Sequence
  Description of Artificial Sequence: Synthetic oligonucleotide
cucuggacuacugaguguc

SEQ ID NO: 1800228 - RNA, 19 nt, Artificial Sequence
  Description of Artificial Sequence: Synthetic oligonucleotide
cagacguguuuauuucacc

SEQ ID NO: 1800229 - RNA, 19 nt, Artificial Sequence
  Description of Artificial Sequence: Synthetic oligonucleotide
augcaaguugcuagaaauc

SEQ ID NO: 1800230 - RNA, 19 nt, Artificial Sequence
  Description of Artificial Sequence: Synthetic oligonucleotide
acaaaauguuuaccaguau

SEQ ID NO: 1800231 - RNA, 19 nt, Artificial Sequence
  Description of Artificial Sequence: Synthetic oligonucleotide
cuacgcagugacuaguaca

SEQ ID NO: 1800232 - RNA, 19 nt, Artificial Sequence
  Description of Artificial Sequence: Synthetic oligonucleotide
gaugcuuaaucugaagggu

SEQ ID NO: 1800233 - RNA, 19 nt, Artificial Sequence
  Description of Artificial Sequence: Synthetic oligonucleotide
uaacaagcuauugcgcagu

SEQ ID NO: 1800234 - RNA, 19 nt, Artificial Sequence
  Description of Artificial Sequence: Synthetic oligonucleotide
cuugauuuacucuuuggau

SEQ ID NO: 1800235 - RNA, 19 nt, Artificial Sequence
  Description of Artificial Sequence: Synthetic oligonucleotide
uugggugguuuucaaguua

SEQ ID NO: 1800236 - RNA, 19 nt, Artificial Sequence
  Description of Artificial Sequence: Synthetic oligonucleotide
uccugaccaucucuggacu

SEQ ID NO: 1800237 - RNA, 19 nt, Artificial Sequence
  Description of Artificial Sequence: Synthetic oligonucleotide
gcaaagcacaaugaaguag

SEQ ID NO: 1800238 - RNA, 19 nt, Artificial Sequence
  Description of Artificial Sequence: Synthetic oligonucleotide
uggcgucugaauacaaaau

SEQ ID NO: 1800239 - RNA, 19 nt, Artificial Sequence
  Description of Artificial Sequence: Synthetic oligonucleotide
guauaccacaacauuuuca

SEQ ID NO: 1800240 - RNA, 19 nt, Artificial Sequence
  Description of Artificial Sequence: Synthetic oligonucleotide
aauucaguagacaguucua

SEQ ID NO: 1800241 - RNA, 19 nt, Artificial Sequence
  Description of Artificial Sequence: Synthetic oligonucleotide
agaaggaaagaucccuguu

SEQ ID NO: 1800242 - RNA, 19 nt, Artificial Sequence
  Description of Artificial Sequence: Synthetic oligonucleotide
accaucucuggacuacuga

SEQ ID NO: 1800243 - RNA, 19 nt, Artificial Sequence
  Description of Artificial Sequence: Synthetic oligonucleotide
augcuuaaucugaagggug

SEQ ID NO: 1800244 - RNA, 19 nt, Artificial Sequence
  Description of Artificial Sequence: Synthetic oligonucleotide
ccuguuaggacagucacug

SEQ ID NO: 1800245 - RNA, 19 nt, Artificial Sequence
  Description of Artificial Sequence: Synthetic oligonucleotide
acuacaagucccacugcag

SEQ ID NO: 1800246 - RNA, 19 nt, Artificial Sequence
  Description of Artificial Sequence: Synthetic oligonucleotide
caguauuaucuacgcagug

SEQ ID NO: 1800247 - RNA, 19 nt, Artificial Sequence
  Description of Artificial Sequence: Synthetic oligonucleotide
ugcggccccagcacgaaga

SEQ ID NO: 1800248 - RNA, 19 nt, Artificial Sequence
  Description of Artificial Sequence: Synthetic oligonucleotide
agaguuuguaagaacuaaa

SEQ ID NO: 1800249 - RNA, 19 nt, Artificial Sequence
  Description of Artificial Sequence: Synthetic oligonucleotide
auuuacucuuuggauggca

SEQ ID NO: 1800250 - RNA, 19 nt, Artificial Sequence
  Description of Artificial Sequence: Synthetic oligonucleotide
agaugcaaguugcuagaaa

SEQ ID NO: 1800251 - RNA, 19 nt, Artificial Sequence
  Description of Artificial Sequence: Synthetic oligonucleotide
acguguuuauuucacccuu

SEQ ID NO: 1800252 - RNA, 19 nt, Artificial Sequence
  Description of Artificial Sequence: Synthetic oligonucleotide
cuacugagugucacagaac

SEQ ID NO: 1800253 - RNA, 19 nt, Artificial Sequence
  Description of Artificial Sequence: Synthetic oligonucleotide
cugcagacguguuuauuuc

SEQ ID NO: 1800254 - RNA, 19 nt, Artificial Sequence
  Description of Artificial Sequence: Synthetic oligonucleotide
uaucuacgcagugacuagu

SEQ ID NO: 1800255 - RNA, 19 nt, Artificial Sequence
  Description of Artificial Sequence: Synthetic oligonucleotide
ugcuuugauuacauuucuu

SEQ ID NO: 1800256 - RNA, 19 nt, Artificial Sequence
  Description of Artificial Sequence: Synthetic oligonucleotide
uaggacagucacugcggcc

SEQ ID NO: 1800257 - RNA, 19 nt, Artificial Sequence
  Description of Artificial Sequence: Synthetic oligonucleotide
augcaaguuuggugaguuc

SEQ ID NO: 1800258 - RNA, 19 nt, Artificial Sequence
  Description of Artificial Sequence: Synthetic oligonucleotide
uggugaguucugugguucc

SEQ ID NO: 1800259 - RNA, 19 nt, Artificial Sequence
  Description of Artificial Sequence: Synthetic oligonucleotide
uggaagaacuugagauuau

SEQ ID NO: 1800260 - RNA, 19 nt, Artificial Sequence
  Description of Artificial Sequence: Synthetic oligonucleotide
ucuggacuacugaguguca

SEQ ID NO: 1800261 - RNA, 19 nt, Artificial Sequence
  Description of Artificial Sequence: Synthetic oligonucleotide
cauuuaucaaaugcuaacu

SEQ ID NO: 1800262 - RNA, 19 nt, Artificial Sequence
  Description of Artificial Sequence: Synthetic oligonucleotide
agucccacugcagacgugu

SEQ ID NO: 1800263 - RNA, 19 nt, Artificial Sequence
  Description of Artificial Sequence: Synthetic oligonucleotide
accaaacaugggaaaacug

SEQ ID NO: 1800264 - RNA, 19 nt, Artificial Sequence
  Description of Artificial Sequence: Synthetic oligonucleotide
gagauuauacucucuccau

SEQ ID NO: 1800265 - RNA, 19 nt, Artificial Sequence
  Description of Artificial Sequence: Synthetic oligonucleotide
gacuaucuggaaaacuaaa

SEQ ID NO: 1800266 - RNA, 19 nt, Artificial Sequence
  Description of Artificial Sequence: Synthetic oligonucleotide
gauuuacucuuuggauggc

SEQ ID NO: 1800267 - RNA, 19 nt, Artificial Sequence
  Description of Artificial Sequence: Synthetic oligonucleotide
ucucuggacuacugagugu

SEQ ID NO: 1800268 - RNA, 19 nt, Artificial Sequence
  Description of Artificial Sequence: Synthetic oligonucleotide
aacaagcuauugcgcaguu

SEQ ID NO: 1800269 - RNA, 19 nt, Artificial Sequence
  Description of Artificial Sequence: Synthetic oligonucleotide
gacguguuuauuucacccu

SEQ ID NO: 1800270 - RNA, 19 nt, Artificial Sequence
  Description of Artificial Sequence: Synthetic oligonucleotide
cauaacacaggaaucugau

SEQ ID NO: 1800271 - RNA, 19 nt, Artificial Sequence
  Description of Artificial Sequence: Synthetic oligonucleotide
guuccugaccaucucugga

SEQ ID NO: 1800272 - RNA, 19 nt, Artificial Sequence
  Description of Artificial Sequence: Synthetic oligonucleotide
aguugcauagcugcaggau

SEQ ID NO: 1800273 - RNA, 19 nt, Artificial Sequence
  Description of Artificial Sequence: Synthetic oligonucleotide
agacugaauuuaaaaguau

SEQ ID NO: 1800274 - RNA, 19 nt, Artificial Sequence
  Description of Artificial Sequence: Synthetic oligonucleotide
guuaacuuuggcgucugaa

SEQ ID NO: 1800275 - RNA, 19 nt, Artificial Sequence
  Description of Artificial Sequence: Synthetic oligonucleotide
aucuuuauauuugcuuaaa

SEQ ID NO: 1800276 - RNA, 19 nt, Artificial Sequence
  Description of Artificial Sequence: Synthetic oligonucleotide
ucugugguuccugaccauc

SEQ ID NO: 1800277 - RNA, 19 nt, Artificial Sequence
  Description of Artificial Sequence: Synthetic oligonucleotide
gcucuacagaacuuaauaa

SEQ ID NO: 1800278 - RNA, 19 nt, Artificial Sequence
  Description of Artificial Sequence: Synthetic oligonucleotide
cuggaaaacuaaagaugca

SEQ ID NO: 1800279 - RNA, 19 nt, Artificial Sequence
  Description of Artificial Sequence: Synthetic oligonucleotide
aacucagauccuggcugag

SEQ ID NO: 1800280 - RNA, 19 nt, Artificial Sequence
  Description of Artificial Sequence: Synthetic oligonucleotide
aaugucccucaaauuacua

SEQ ID NO: 1800281 - RNA, 19 nt, Artificial Sequence
  Description of Artificial Sequence: Synthetic oligonucleotide
caagcuauugcgcaguuuu

SEQ ID NO: 1800282 - RNA, 19 nt, Artificial Sequence
  Description of Artificial Sequence: Synthetic oligonucleotide
agcuauugcgcaguuuuau

SEQ ID NO: 1800283 - RNA, 19 nt, Artificial Sequence
  Description of Artificial Sequence: Synthetic oligonucleotide
cuaaagaugcaaguugcua

SEQ ID NO: 1800284 - RNA, 19 nt, Artificial Sequence
  Description of Artificial Sequence: Synthetic oligonucleotide
cagaauauuauaacugcuu

SEQ ID NO: 1800285 - RNA, 19 nt, Artificial Sequence
  Description of Artificial Sequence: Synthetic oligonucleotide
gucacugcggccccagcac

SEQ ID NO: 1800286 - RNA, 19 nt, Artificial Sequence
  Description of Artificial Sequence: Synthetic oligonucleotide
uaguuaacuuuggcgucug

SEQ ID NO: 1800287 - RNA, 19 nt, Artificial Sequence
  Description of Artificial Sequence: Synthetic oligonucleotide
gcuuaauacaguucuuucu

SEQ ID NO: 1800288 - RNA, 19 nt, Artificial Sequence
  Description of Artificial Sequence: Synthetic oligonucleotide
cuguuaggacagucacugc

SEQ ID NO: 1800289 - RNA, 19 nt, Artificial Sequence
  Description of Artificial Sequence: Synthetic oligonucleotide
ggugguuuucaaguuaaga

SEQ ID NO: 1800290 - RNA, 19 nt, Artificial Sequence
  Description of Artificial Sequence: Synthetic oligonucleotide
uccagacuaucuggaaaac

SEQ ID NO: 1800291 - RNA, 19 nt, Artificial Sequence
  Description of Artificial Sequence: Synthetic oligonucleotide
cccaauuaaauucugauuu

SEQ ID NO: 1800292 - RNA, 19 nt, Artificial Sequence
  Description of Artificial Sequence: Synthetic oligonucleotide
ugucccuuauaugcaaguu

SEQ ID NO: 1800293 - RNA, 19 nt, Artificial Sequence
  Description of Artificial Sequence: Synthetic oligonucleotide
auaugcaaguuuggugagu

SEQ ID NO: 1800294 - RNA, 19 nt, Artificial Sequence
  Description of Artificial Sequence: Synthetic oligonucleotide
aaucccugugugucccuua

SEQ ID NO: 1800295 - RNA, 19 nt, Artificial Sequence
  Description of Artificial Sequence: Synthetic oligonucleotide
aaagcacaaugaaguaguu

SEQ ID NO: 1800296 - RNA, 19 nt, Artificial Sequence
  Description of Artificial Sequence: Synthetic oligonucleotide
cuggacuacugagugucac

SEQ ID NO: 1800297 - RNA, 19 nt, Artificial Sequence
  Description of Artificial Sequence: Synthetic oligonucleotide
caugggaaaacugccugga

SEQ ID NO: 1800298 - RNA, 19 nt, Artificial Sequence
  Description of Artificial Sequence: Synthetic oligonucleotide
acauuauguugggaaaaua

SEQ ID NO: 1800299 - RNA, 19 nt, Artificial Sequence
  Description of Artificial Sequence: Synthetic oligonucleotide
cuauugcgcaguuuuauuu

SEQ ID NO: 1800300 - RNA, 19 nt, Artificial Sequence
  Description of Artificial Sequence: Synthetic oligonucleotide
auaggugaaugcagagaca

SEQ ID NO: 1800301 - RNA, 19 nt, Artificial Sequence
  Description of Artificial Sequence: Synthetic oligonucleotide
cacccuuuucauaagguau

SEQ ID NO: 1800302 - RNA, 19 nt, Artificial Sequence
  Description of Artificial Sequence: Synthetic oligonucleotide
cccuuauaugcaaguuugg

SEQ ID NO: 1800303 - RNA, 19 nt, Artificial Sequence
  Description of Artificial Sequence: Synthetic oligonucleotide
ucacugcuaacaagcuauu

SEQ ID NO: 1800304 - RNA, 19 nt, Artificial Sequence
  Description of Artificial Sequence: Synthetic oligonucleotide
caguaacaacacauuaaua

SEQ ID NO: 1800305 - RNA, 19 nt, Artificial Sequence
  Description of Artificial Sequence: Synthetic oligonucleotide
cacugcuaacaagcuauug

SEQ ID NO: 1800306 - RNA, 19 nt, Artificial Sequence
  Description of Artificial Sequence: Synthetic oligonucleotide
ugaccaucucuggacuacu

SEQ ID NO: 1800307 - RNA, 19 nt, Artificial Sequence
  Description of Artificial Sequence: Synthetic oligonucleotide
cacgaagaccugcaaaucu

SEQ ID NO: 1800308 - RNA, 19 nt, Artificial Sequence
  Description of Artificial Sequence: Synthetic oligonucleotide
aguuaacuuuggcgucuga

SEQ ID NO: 1800309 - RNA, 19 nt, Artificial Sequence
  Description of Artificial Sequence: Synthetic oligonucleotide
gcaaguugcuagaaaucug

SEQ ID NO: 1800310 - RNA, 19 nt, Artificial Sequence
  Description of Artificial Sequence: Synthetic oligonucleotide
gacauuauguugggaaaau

SEQ ID NO: 1800311 - RNA, 19 nt, Artificial Sequence
  Description of Artificial Sequence: Synthetic oligonucleotide
gaccaucucuggacuacug

SEQ ID NO: 1800312 - RNA, 19 nt, Artificial Sequence
  Description of Artificial Sequence: Synthetic oligonucleotide
aucccuguuaggacaguca

SEQ ID NO: 1800313 - RNA, 19 nt, Artificial Sequence
  Description of Artificial Sequence: Synthetic oligonucleotide
ugcuaacuuccagacuauc

SEQ ID NO: 1800314 - RNA, 19 nt, Artificial Sequence
  Description of Artificial Sequence: Synthetic oligonucleotide
aucccugugugucccuuau

SEQ ID NO: 1800315 - RNA, 19 nt, Artificial Sequence
  Description of Artificial Sequence: Synthetic oligonucleotide
ucccacugcagacguguuu

SEQ ID NO: 1800316 - RNA, 19 nt, Artificial Sequence
  Description of Artificial Sequence: Synthetic oligonucleotide
ugcauagcugcaggauggu

SEQ ID NO: 1800317 - RNA, 19 nt, Artificial Sequence
  Description of Artificial Sequence: Synthetic oligonucleotide
caggauggucacugcuaac

SEQ ID NO: 1800318 - RNA, 19 nt, Artificial Sequence
  Description of Artificial Sequence: Synthetic oligonucleotide
acgcagugacuaguacagg

SEQ ID NO: 1800319 - RNA, 19 nt, Artificial Sequence
  Description of Artificial Sequence: Synthetic oligonucleotide
agcaagccugcaguuuuca

SEQ ID NO: 1800320 - RNA, 19 nt, Artificial Sequence
  Description of Artificial Sequence: Synthetic oligonucleotide
aucugaugcuuaaucugaa

SEQ ID NO: 1800321 - RNA, 19 nt, Artificial Sequence
  Description of Artificial Sequence: Synthetic oligonucleotide
ccauaacacaggaaucuga

SEQ ID NO: 1800322 - RNA, 19 nt, Artificial Sequence
  Description of Artificial Sequence: Synthetic oligonucleotide
gcagacguguuuauuucac

SEQ ID NO: 1800323 - RNA, 19 nt, Artificial Sequence
  Description of Artificial Sequence: Synthetic oligonucleotide
uucugugguuccugaccau

SEQ ID NO: 1800324 - RNA, 19 nt, Artificial Sequence
  Description of Artificial Sequence: Synthetic oligonucleotide
gucccuuauaugcaaguuu

SEQ ID NO: 1800325 - RNA, 19 nt, Artificial Sequence
  Description of Artificial Sequence: Synthetic oligonucleotide
aagcuauugcgcaguuuua

SEQ ID NO: 1800326 - RNA, 19 nt, Artificial Sequence
  Description of Artificial Sequence: Synthetic oligonucleotide
cuggcaucccaauuaaauu

SEQ ID NO: 1800327 - RNA, 19 nt, Artificial Sequence
  Description of Artificial Sequence: Synthetic oligonucleotide
gguuucacauugaagaguu

SEQ ID NO: 1800328 - RNA, 19 nt, Artificial Sequence
  Description of Artificial Sequence: Synthetic oligonucleotide
caagccugcaguuuucauu

SEQ ID NO: 1800329 - RNA, 19 nt, Artificial Sequence
  Description of Artificial Sequence: Synthetic oligonucleotide
gcgcaguuuuauuucagaa

SEQ ID NO: 1800330 - RNA, 19 nt, Artificial Sequence
  Description of Artificial Sequence: Synthetic oligonucleotide
cauuucuugguuucacauu

SEQ ID NO: 1800331 - RNA, 19 nt, Artificial Sequence
  Description of Artificial Sequence: Synthetic oligonucleotide
cugcuuugauuacauuucu

SEQ ID NO: 1800332 - RNA, 19 nt, Artificial Sequence
  Description of Artificial Sequence: Synthetic oligonucleotide
ggauggucacugcuaacaa

SEQ ID NO: 1800333 - RNA, 19 nt, Artificial Sequence
  Description of Artificial Sequence: Synthetic oligonucleotide
ccugugugucccuuauaug

SEQ ID NO: 1800334 - RNA, 19 nt, Artificial Sequence
  Description of Artificial Sequence: Synthetic oligonucleotide
gaacuaaauugggugguuu

SEQ ID NO: 1800335 - RNA, 19 nt, Artificial Sequence
  Description of Artificial Sequence: Synthetic oligonucleotide
cuuuggcgucugaauacaa

SEQ ID NO: 1800336 - RNA, 19 nt, Artificial Sequence
  Description of Artificial Sequence: Synthetic oligonucleotide
ggggaauauuuauucacau

SEQ ID NO: 1800337 - RNA, 19 nt, Artificial Sequence
  Description of Artificial Sequence: Synthetic oligonucleotide
guagacaguucuacauuua

SEQ ID NO: 1800338 - RNA, 19 nt, Artificial Sequence
  Description of Artificial Sequence: Synthetic oligonucleotide
gugucccuuauaugcaagu

SEQ ID NO: 1800339 - RNA, 19 nt, Artificial Sequence
  Description of Artificial Sequence: Synthetic oligonucleotide
acagcuugcuaaacauuua

SEQ ID NO: 1800340 - RNA, 19 nt, Artificial Sequence
  Description of Artificial Sequence: Synthetic oligonucleotide
gugguuccugaccaucucu

SEQ ID NO: 1800341 - RNA, 19 nt, Artificial Sequence
  Description of Artificial Sequence: Synthetic oligonucleotide
ggacuuuucaaaguugcau

SEQ ID NO: 1800342 - RNA, 19 nt, Artificial Sequence
  Description of Artificial Sequence: Synthetic oligonucleotide
aucuacgcagugacuagua

SEQ ID NO: 1800343 - RNA, 19 nt, Artificial Sequence
  Description of Artificial Sequence: Synthetic oligonucleotide
gcgucugaauacaaaaugu

SEQ ID NO: 1800344 - RNA, 19 nt, Artificial Sequence
  Description of Artificial Sequence: Synthetic oligonucleotide
gcuaacuuccagacuaucu

SEQ ID NO: 1800345 - RNA, 19 nt, Artificial Sequence
  Description of Artificial Sequence: Synthetic oligonucleotide
cagagacagaucuuccaau

SEQ ID NO: 1800346 - RNA, 19 nt, Artificial Sequence
  Description of Artificial Sequence: Synthetic oligonucleotide
gcuagaaaucuggcauccc

SEQ ID NO: 1800347 - RNA, 19 nt, Artificial Sequence
  Description of Artificial Sequence: Synthetic oligonucleotide
ggcaucccaauuaaauucu

SEQ ID NO: 1800348 - RNA, 19 nt, Artificial Sequence
  Description of Artificial Sequence: Synthetic oligonucleotide
ucccugugugucccuuaua

SEQ ID NO: 1800349 - RNA, 19 nt, Artificial Sequence
  Description of Artificial Sequence: Synthetic oligonucleotide
gguauuaaguuuacagcuu

SEQ ID NO: 1800350 - RNA, 19 nt, Artificial Sequence
  Description of Artificial Sequence: Synthetic oligonucleotide
augcuaacuuccagacuau

SEQ ID NO: 1800351 - RNA, 19 nt, Artificial Sequence
  Description of Artificial Sequence: Synthetic oligonucleotide
cagagacauuauguuggga

SEQ ID NO: 1800352 - RNA, 19 nt, Artificial Sequence
  Description of Artificial Sequence: Synthetic oligonucleotide
gugaaugcagagacauuau

SEQ ID NO: 1800353 - RNA, 19 nt, Artificial Sequence
  Description of Artificial Sequence: Synthetic oligonucleotide
cacugcggccccagcacga

SEQ ID NO: 1800354 - RNA, 19 nt, Artificial Sequence
  Description of Artificial Sequence: Synthetic oligonucleotide
ccuuauaugcaaguuuggu

SEQ ID NO: 1800355 - RNA, 19 nt, Artificial Sequence
  Description of Artificial Sequence: Synthetic oligonucleotide
agaucccuguuaggacagu

SEQ ID NO: 1800356 - RNA, 19 nt, Artificial Sequence
  Description of Artificial Sequence: Synthetic oligonucleotide
gcacgaagaccugcaaauc

SEQ ID NO: 1800357 - RNA, 19 nt, Artificial Sequence
  Description of Artificial Sequence: Synthetic oligonucleotide
gcuauugcgcaguuuuauu

SEQ ID NO: 1800358 - RNA, 19 nt, Artificial Sequence
  Description of Artificial Sequence: Synthetic oligonucleotide
aggugaaugcagagacauu

SEQ ID NO: 1800359 - RNA, 19 nt, Artificial Sequence
  Description of Artificial Sequence: Synthetic oligonucleotide
gcagcucuacagaacuuaa

SEQ ID NO: 1800360 - RNA, 19 nt, Artificial Sequence
  Description of Artificial Sequence: Synthetic oligonucleotide
cagcucuacagaacuuaau

SEQ ID NO: 1800361 - RNA, 19 nt, Artificial Sequence
  Description of Artificial Sequence: Synthetic oligonucleotide
cccugugugucccuuauau

SEQ ID NO: 1800362 - RNA, 19 nt, Artificial Sequence
  Description of Artificial Sequence: Synthetic oligonucleotide
gcagugacuaguacaggau

SEQ ID NO: 1800363 - RNA, 19 nt, Artificial Sequence
  Description of Artificial Sequence: Synthetic oligonucleotide
cgucugaauacaaaauguu

SEQ ID NO: 1800364 - RNA, 19 nt, Artificial Sequence
  Description of Artificial Sequence: Synthetic oligonucleotide
ccagacuaucuggaaaacu

SEQ ID NO: 1800365 - RNA, 19 nt, Artificial Sequence
  Description of Artificial Sequence: Synthetic oligonucleotide
gcaagccugcaguuuucau

SEQ ID NO: 1800366 - RNA, 19 nt, Artificial Sequence
  Description of Artificial Sequence: Synthetic oligonucleotide
cccuguuaggacagucacu

SEQ ID NO: 1800367 - RNA, 19 nt, Artificial Sequence
  Description of Artificial Sequence: Synthetic oligonucleotide
cacugcagacguguuuauu

SEQ ID NO: 1800368 - RNA, 19 nt, Artificial Sequence
  Description of Artificial Sequence: Synthetic oligonucleotide
cguguuuauuucacccuuu

SEQ ID NO: 1800369 - RNA, 19 nt, Artificial Sequence
  Description of Artificial Sequence: Synthetic oligonucleotide
cggccccagcacgaagacc

SEQ ID NO: 1800370 - RNA, 19 nt, Artificial Sequence
  Description of Artificial Sequence: Synthetic oligonucleotide
ccacugcagacguguuuau

SEQ ID NO: 1800371 - RNA, 19 nt, Artificial Sequence
  Description of Artificial Sequence: Synthetic oligonucleotide
auuuuaucuagacagaaac

SEQ ID NO: 1800372 - RNA, 19 nt, Artificial Sequence
  Description of Artificial Sequence: Synthetic oligonucleotide
acuacuuugaucuugaugu

SEQ ID NO: 1800373 - RNA, 19 nt, Artificial Sequence
  Description of Artificial Sequence: Synthetic oligonucleotide
uuaggcauuauuaaaauac

SEQ ID NO: 1800374 - RNA, 19 nt, Artificial Sequence
  Description of Artificial Sequence: Synthetic oligonucleotide
uauacaaugaguaaggauu

SEQ ID NO: 1800375 - RNA, 19 nt, Artificial Sequence
  Description of Artificial Sequence: Synthetic oligonucleotide
ggcaauuuuaucuagacag

SEQ ID NO: 1800376 - RNA, 19 nt, Artificial Sequence
  Description of Artificial Sequence: Synthetic oligonucleotide
aaaauuauaugggcagucc

SEQ ID NO: 1800377 - RNA, 19 nt, Artificial Sequence
  Description of Artificial Sequence: Synthetic oligonucleotide
aaacaugcaggcccuaagc

SEQ ID NO: 1800378 - RNA, 19 nt, Artificial Sequence
  Description of Artificial Sequence: Synthetic oligonucleotide
aaggcaauuuuaucuagac

SEQ ID NO: 1800379 - RNA, 19 nt, Artificial Sequence
  Description of Artificial Sequence: Synthetic oligonucleotide
aacgguaucuacuaaggug

SEQ ID NO: 1800380 - RNA, 19 nt, Artificial Sequence
  Description of Artificial Sequence: Synthetic oligonucleotide
gacagggacaaauaaaacc

SEQ ID NO: 1800381 - RNA, 19 nt, Artificial Sequence
  Description of Artificial Sequence: Synthetic oligonucleotide
gacagaaaccuucaaacag

SEQ ID NO: 1800382 - RNA, 19 nt, Artificial Sequence
  Description of Artificial Sequence: Synthetic oligonucleotide
uuuaucuagacagaaaccu

SEQ ID NO: 1800383 - RNA, 19 nt, Artificial Sequence
  Description of Artificial Sequence: Synthetic oligonucleotide
auuagaauauaauggagga

SEQ ID NO: 1800384 - RNA, 19 nt, Artificial Sequence
  Description of Artificial Sequence: Synthetic oligonucleotide
auugauuccaccugaagug

SEQ ID NO: 1800385 - RNA, 19 nt, Artificial Sequence
  Description of Artificial Sequence: Synthetic oligonucleotide
agugauuuaacauuagaau

SEQ ID NO: 1800386 - RNA, 19 nt, Artificial Sequence
  Description of Artificial Sequence: Synthetic oligonucleotide
uauccuauccaccuguuug

SEQ ID NO: 1800387 - RNA, 19 nt, Artificial Sequence
  Description of Artificial Sequence: Synthetic oligonucleotide
ggagaauucaucuaguacc

SEQ ID NO: 1800388 - RNA, 19 nt, Artificial Sequence
  Description of Artificial Sequence: Synthetic oligonucleotide
guagacauggcaaagauac

SEQ ID NO: 1800389 - RNA, 19 nt, Artificial Sequence
  Description of Artificial Sequence: Synthetic oligonucleotide
cucgcuuuuguaaaggacg

SEQ ID NO: 1800390 - RNA, 19 nt, Artificial Sequence
  Description of Artificial Sequence: Synthetic oligonucleotide
ucagaguaaaccaacucug

SEQ ID NO: 1800391 - RNA, 19 nt, Artificial Sequence
  Description of Artificial Sequence: Synthetic oligonucleotide
aaggauauucgcugucagc

SEQ ID NO: 1800392 - RNA, 19 nt, Artificial Sequence
  Description of Artificial Sequence: Synthetic oligonucleotide
uuuuaucuagacagaaacc

SEQ ID NO: 1800393 - RNA, 19 nt, Artificial Sequence
  Description of Artificial Sequence: Synthetic oligonucleotide
aauuauaugggcaguccac

SEQ ID NO: 1800394 - RNA, 19 nt, Artificial Sequence
  Description of Artificial Sequence: Synthetic oligonucleotide
aauuaggcauuauuaaaau

SEQ ID NO: 1800395 - RNA, 19 nt, Artificial Sequence
  Description of Artificial Sequence: Synthetic oligonucleotide
augacuuguucaaacaugc

SEQ ID NO: 1800396 - RNA, 19 nt, Artificial Sequence
  Description of Artificial Sequence: Synthetic oligonucleotide
uacucuuguuccuugacag

SEQ ID NO: 1800397 - RNA, 19 nt, Artificial Sequence
  Description of Artificial Sequence: Synthetic oligonucleotide
uacacuuuugccaagugau

SEQ ID NO: 1800398 - RNA, 19 nt, Artificial Sequence
  Description of Artificial Sequence: Synthetic oligonucleotide
ucuggaaggauauucgcug

SEQ ID NO: 1800399 - RNA, 19 nt, Artificial Sequence
  Description of Artificial Sequence: Synthetic oligonucleotide
aucagaguaaaccaacucu

SEQ ID NO: 1800400 - RNA, 19 nt, Artificial Sequence
  Description of Artificial Sequence: Synthetic oligonucleotide
gaagacacgucguacgcgg

SEQ ID NO: 1800401 - RNA, 19 nt, Artificial Sequence
  Description of Artificial Sequence: Synthetic oligonucleotide
caaugaguaaggauuuugg

SEQ ID NO: 1800402 - RNA, 19 nt, Artificial Sequence
  Description of Artificial Sequence: Synthetic oligonucleotide
agaaauuaggcauuauuaa

SEQ ID NO: 1800403 - RNA, 19 nt, Artificial Sequence
  Description of Artificial Sequence: Synthetic oligonucleotide
aaauuaggcauuauuaaaa

SEQ ID NO: 1800404 - RNA, 19 nt, Artificial Sequence
  Description of Artificial Sequence: Synthetic oligonucleotide
gaagccacaguagacaucc

SEQ ID NO: 1800405 - RNA, 19 nt, Artificial Sequence
  Description of Artificial Sequence: Synthetic oligonucleotide
agugauacccuguaggaca

SEQ ID NO: 1800406 - RNA, 19 nt, Artificial Sequence
  Description of Artificial Sequence: Synthetic oligonucleotide
aacagaacagagaaauuag

SEQ ID NO: 1800407 - RNA, 19 nt, Artificial Sequence
  Description of Artificial Sequence: Synthetic oligonucleotide
uaucuagacagaaaccuuc

SEQ ID NO: 1800408 - RNA, 19 nt, Artificial Sequence
  Description of Artificial Sequence: Synthetic oligonucleotide
aaugacuuguucaaacaug

SEQ ID NO: 1800409 - RNA, 19 nt, Artificial Sequence
  Description of Artificial Sequence: Synthetic oligonucleotide
cuuguucaaacaugcaggc

SEQ ID NO: 1800410 - RNA, 19 nt, Artificial Sequence
  Description of Artificial Sequence: Synthetic oligonucleotide
uguacucgauuguagcagg

SEQ ID NO: 1800411 - RNA, 19 nt, Artificial Sequence
  Description of Artificial Sequence: Synthetic oligonucleotide
acucuggaaggauauucgc

SEQ ID NO: 1800412 - RNA, 19 nt, Artificial Sequence
  Description of Artificial Sequence: Synthetic oligonucleotide
aagugauuuaacauuagaa

SEQ ID NO: 1800413 - RNA, 19 nt, Artificial Sequence
  Description of Artificial Sequence: Synthetic oligonucleotide
uauaugggcaguccacucc

SEQ ID NO: 1800414 - RNA, 19 nt, Artificial Sequence
  Description of Artificial Sequence: Synthetic oligonucleotide
cagcuuugagagaugaugg

SEQ ID NO: 1800415 - RNA, 19 nt, Artificial Sequence
  Description of Artificial Sequence: Synthetic oligonucleotide
agacauggcaaagauacuc

SEQ ID NO: 1800416 - RNA, 19 nt, Artificial Sequence
  Description of Artificial Sequence: Synthetic oligonucleotide
ugcaagucaagguaagugu

SEQ ID NO: 1800417 - RNA, 19 nt, Artificial Sequence
  Description of Artificial Sequence: Synthetic oligonucleotide
uggagaauucaucuaguac

SEQ ID NO: 1800418 - RNA, 19 nt, Artificial Sequence
  Description of Artificial Sequence: Synthetic oligonucleotide
ucguacgcggcuuugagca

SEQ ID NO: 1800419 - RNA, 19 nt, Artificial Sequence
  Description of Artificial Sequence: Synthetic oligonucleotide
aggaagacacgucguacgc

SEQ ID NO: 1800420 - RNA, 19 nt, Artificial Sequence
  Description of Artificial Sequence: Synthetic oligonucleotide
ugacuuguaaaggucauga

SEQ ID NO: 1800421 - RNA, 19 nt, Artificial Sequence
  Description of Artificial Sequence: Synthetic oligonucleotide
acuuguaaaggucaugaau

SEQ ID NO: 1800422 - RNA, 19 nt, Artificial Sequence
  Description of Artificial Sequence: Synthetic oligonucleotide
agcaguugccaagacagcc

SEQ ID NO: 1800423 - RNA, 19 nt, Artificial Sequence
  Description of Artificial Sequence: Synthetic oligonucleotide
uuagaauauaauggaggag

SEQ ID NO: 1800424 - RNA, 19 nt, Artificial Sequence
  Description of Artificial Sequence: Synthetic oligonucleotide
aacaugcaggcccuaagca

SEQ ID NO: 1800425 - RNA, 19 nt, Artificial Sequence
  Description of Artificial Sequence: Synthetic oligonucleotide
aauacacuuuugccaagug

SEQ ID NO: 1800426 - RNA, 19 nt, Artificial Sequence
  Description of Artificial Sequence: Synthetic oligonucleotide
agcaggaaaauuauauggg

SEQ ID NO: 1800427 - RNA, 19 nt, Artificial Sequence
  Description of Artificial Sequence: Synthetic oligonucleotide
auauacaaugaguaaggau

SEQ ID NO: 1800428 - RNA, 19 nt, Artificial Sequence
  Description of Artificial Sequence: Synthetic oligonucleotide
uguguacucgauuguagca

SEQ ID NO: 1800429 - RNA, 19 nt, Artificial Sequence
  Description of Artificial Sequence: Synthetic oligonucleotide
ugaucguuccacaaucagu

SEQ ID NO: 1800430 - RNA, 19 nt, Artificial Sequence
  Description of Artificial Sequence: Synthetic oligonucleotide
aauucaucuaguaccuucu

SEQ ID NO: 1800431 - RNA, 19 nt, Artificial Sequence
  Description of Artificial Sequence: Synthetic oligonucleotide
agagaaauuaggcauuauu

SEQ ID NO: 1800432 - RNA, 19 nt, Artificial Sequence
  Description of Artificial Sequence: Synthetic oligonucleotide
agaauauaauggaggaggg

SEQ ID NO: 1800433 - RNA, 19 nt, Artificial Sequence
  Description of Artificial Sequence: Synthetic oligonucleotide
agcuucauggcgccgcacc

SEQ ID NO: 1800434 - RNA, 19 nt, Artificial Sequence
  Description of Artificial Sequence: Synthetic oligonucleotide
uuggcuagcaauacccaga

SEQ ID NO: 1800435 - RNA, 19 nt, Artificial Sequence
  Description of Artificial Sequence: Synthetic oligonucleotide
ucguuccacaaucaguuga

SEQ ID NO: 1800436 - RNA, 19 nt, Artificial Sequence
  Description of Artificial Sequence: Synthetic oligonucleotide
uuuggagaauucaucuagu

SEQ ID NO: 1800437 - RNA, 19 nt, Artificial Sequence
  Description of Artificial Sequence: Synthetic oligonucleotide
gagaaauuaggcauuauua

SEQ ID NO: 1800438 - RNA, 19 nt, Artificial Sequence
  Description of Artificial Sequence: Synthetic oligonucleotide
aggauauucgcugucagca

SEQ ID NO: 1800439 - RNA, 19 nt, Artificial Sequence
  Description of Artificial Sequence: Synthetic oligonucleotide
ucgcuuuuguaaaggacgc

SEQ ID NO: 1800440 - RNA, 19 nt, Artificial Sequence
  Description of Artificial Sequence: Synthetic oligonucleotide
agaacgguaucuacuaagg

SEQ ID NO: 1800441 - RNA, 19 nt, Artificial Sequence
  Description of Artificial Sequence: Synthetic oligonucleotide
gaaggauauucgcugucag

SEQ ID NO: 1800442 - RNA, 19 nt, Artificial Sequence
  Description of Artificial Sequence: Synthetic oligonucleotide
aacucugguucaaaaugac

SEQ ID NO: 1800443 - RNA, 19 nt, Artificial Sequence
  Description of Artificial Sequence: Synthetic oligonucleotide
cagaguaaaccaacucugg

SEQ ID NO: 1800444 - RNA, 19 nt, Artificial Sequence
  Description of Artificial Sequence: Synthetic oligonucleotide
accugcaagacugucacuc

SEQ ID NO: 1800445 - RNA, 19 nt, Artificial Sequence
  Description of Artificial Sequence: Synthetic oligonucleotide
guaaaggacgcugaggcug

SEQ ID NO: 1800446 - RNA, 19 nt, Artificial Sequence
  Description of Artificial Sequence: Synthetic oligonucleotide
ugggcaguccacuccaggg

SEQ ID NO: 1800447 - RNA, 19 nt, Artificial Sequence
  Description of Artificial Sequence: Synthetic oligonucleotide
aggcauuauuaaaauacac

SEQ ID NO: 1800448 - RNA, 19 nt, Artificial Sequence
  Description of Artificial Sequence: Synthetic oligonucleotide
cagaacgguaucuacuaag

SEQ ID NO: 1800449 - RNA, 19 nt, Artificial Sequence
  Description of Artificial Sequence: Synthetic oligonucleotide
aaauacacuuuugccaagu

SEQ ID NO: 1800450 - RNA, 19 nt, Artificial Sequence
  Description of Artificial Sequence: Synthetic oligonucleotide
aagguaagugugccuccac

SEQ ID NO: 1800451 - RNA, 19 nt, Artificial Sequence
  Description of Artificial Sequence: Synthetic oligonucleotide
agaguaaaccaacucuggu

SEQ ID NO: 1800452 - RNA, 19 nt, Artificial Sequence
  Description of Artificial Sequence: Synthetic oligonucleotide
ugcagggcgagugauaccc

SEQ ID NO: 1800453 - RNA, 19 nt, Artificial Sequence
  Description of Artificial Sequence: Synthetic oligonucleotide
cucaauccauugcagggcg

SEQ ID NO: 1800454 - RNA, 19 nt, Artificial Sequence
  Description of Artificial Sequence: Synthetic oligonucleotide
cuauaugggcacucugagg

SEQ ID NO: 1800455 - RNA, 19 nt, Artificial Sequence
  Description of Artificial Sequence: Synthetic oligonucleotide
ugcugaucguuccacaauc

SEQ ID NO: 1800456 - RNA, 19 nt, Artificial Sequence
  Description of Artificial Sequence: Synthetic oligonucleotide
uagcaauacccagagaaac

SEQ ID NO: 1800457 - RNA, 19 nt, Artificial Sequence
  Description of Artificial Sequence: Synthetic oligonucleotide
aauuuuaucuagacagaaa

SEQ ID NO: 1800458 - RNA, 19 nt, Artificial Sequence
  Description of Artificial Sequence: Synthetic oligonucleotide
acucgauuguagcagguga

SEQ ID NO: 1800459 - RNA, 19 nt, Artificial Sequence
  Description of Artificial Sequence: Synthetic oligonucleotide
acgguaucuacuaagguga

SEQ ID NO: 1800460 - RNA, 19 nt, Artificial Sequence
  Description of Artificial Sequence: Synthetic oligonucleotide
acuccggacguagacaugg

SEQ ID NO: 1800461 - RNA, 19 nt, Artificial Sequence
  Description of Artificial Sequence: Synthetic oligonucleotide
uggccagucuauccuaucc

SEQ ID NO: 1800462 - RNA, 19 nt, Artificial Sequence
  Description of Artificial Sequence: Synthetic oligonucleotide
uuaucuagacagaaaccuu

SEQ ID NO: 1800463 - RNA, 19 nt, Artificial Sequence
  Description of Artificial Sequence: Synthetic oligonucleotide
acaaugaguaaggauuuug

SEQ ID NO: 1800464 - RNA, 19 nt, Artificial Sequence
  Description of Artificial Sequence: Synthetic oligonucleotide
ugccaagugauuuaacauu

SEQ ID NO: 1800465 - RNA, 19 nt, Artificial Sequence
  Description of Artificial Sequence: Synthetic oligonucleotide
agaugauggcauccacuac

SEQ ID NO: 1800466 - RNA, 19 nt, Artificial Sequence
  Description of Artificial Sequence: Synthetic oligonucleotide
uaguaccuucuccagcaag

SEQ ID NO: 1800467 - RNA, 19 nt, Artificial Sequence
  Description of Artificial Sequence: Synthetic oligonucleotide
cuauccaccuguuuggaga

SEQ ID NO: 1800468 - RNA, 19 nt, Artificial Sequence
  Description of Artificial Sequence: Synthetic oligonucleotide
ugacugcaagucaagguaa

SEQ ID NO: 1800469 - RNA, 19 nt, Artificial Sequence
  Description of Artificial Sequence: Synthetic oligonucleotide
aaaggcaauuuuaucuaga

SEQ ID NO: 1800470 - RNA, 19 nt, Artificial Sequence
  Description of Artificial Sequence: Synthetic oligonucleotide
uacccuguaggacagucau

SEQ ID NO: 1800471 - RNA, 19 nt, Artificial Sequence
  Description of Artificial Sequence: Synthetic oligonucleotide
uguccaccuccacacaccc

SEQ ID NO: 1800472 - RNA, 19 nt, Artificial Sequence
  Description of Artificial Sequence: Synthetic oligonucleotide
cacuacuuugaucuugaug

SEQ ID NO: 1800473 - RNA, 19 nt, Artificial Sequence
  Description of Artificial Sequence: Synthetic oligonucleotide
auuauaugggcaguccacu

SEQ ID NO: 1800474 - RNA, 19 nt, Artificial Sequence
  Description of Artificial Sequence: Synthetic oligonucleotide
auaugggcaguccacucca

SEQ ID NO: 1800475 - RNA, 19 nt, Artificial Sequence
  Description of Artificial Sequence: Synthetic oligonucleotide
gcgagugauacccuguagg

SEQ ID NO: 1800476 - RNA, 19 nt, Artificial Sequence
  Description of Artificial Sequence: Synthetic oligonucleotide
uggcaacucaauccauugc

SEQ ID NO: 1800477 - RNA, 19 nt, Artificial Sequence
  Description of Artificial Sequence: Synthetic oligonucleotide
uaaaggacgcugaggcugu

SEQ ID NO: 1800478 - RNA, 19 nt, Artificial Sequence
  Description of Artificial Sequence: Synthetic oligonucleotide
uuauaugggcaguccacuc

SEQ ID NO: 1800479 - RNA, 19 nt, Artificial Sequence
  Description of Artificial Sequence: Synthetic oligonucleotide
uuugagagaugauggcauc

SEQ ID NO: 1800480 - RNA, 19 nt, Artificial Sequence
  Description of Artificial Sequence: Synthetic oligonucleotide
ugucacuccggacguagac

SEQ ID NO: 1800481 - RNA, 19 nt, Artificial Sequence
  Description of Artificial Sequence: Synthetic oligonucleotide
acaaucaguugacuuguaa

SEQ ID NO: 1800482 - RNA, 19 nt, Artificial Sequence
  Description of Artificial Sequence: Synthetic oligonucleotide
caaagucugacugcaaguc

SEQ ID NO: 1800483 - RNA, 19 nt, Artificial Sequence
  Description of Artificial Sequence: Synthetic oligonucleotide
cuuuuguaaaggacgcuga

SEQ ID NO: 1800484 - RNA, 19 nt, Artificial Sequence
  Description of Artificial Sequence: Synthetic oligonucleotide
caaacaugcaggcccuaag

SEQ ID NO: 1800485 - RNA, 19 nt, Artificial Sequence
  Description of Artificial Sequence: Synthetic oligonucleotide
ucuagacagaaaccuucaa

SEQ ID NO: 1800486 - RNA, 19 nt, Artificial Sequence
  Description of Artificial Sequence: Synthetic oligonucleotide
cugaucguuccacaaucag

SEQ ID NO: 1800487 - RNA, 19 nt, Artificial Sequence
  Description of Artificial Sequence: Synthetic oligonucleotide
cuggaccucuggaagaaac

SEQ ID NO: 1800488 - RNA, 19 nt, Artificial Sequence
  Description of Artificial Sequence: Synthetic oligonucleotide
ucacuccggacguagacau

SEQ ID NO: 1800489 - RNA, 19 nt, Artificial Sequence
  Description of Artificial Sequence: Synthetic oligonucleotide
cugcaagacugucacuccg

SEQ ID NO: 1800490 - RNA, 19 nt, Artificial Sequence
  Description of Artificial Sequence: Synthetic oligonucleotide
cugcaagucaagguaagug

SEQ ID NO: 1800491 - RNA, 19 nt, Artificial Sequence
  Description of Artificial Sequence: Synthetic oligonucleotide
cuagacagaaaccuucaaa

SEQ ID NO: 1800492 - RNA, 19 nt, Artificial Sequence
  Description of Artificial Sequence: Synthetic oligonucleotide
ugacccucccaacaucaga

SEQ ID NO: 1800493 - RNA, 19 nt, Artificial Sequence
  Description of Artificial Sequence: Synthetic oligonucleotide
auucgcugucagcaaugac

SEQ ID NO: 1800494 - RNA, 19 nt, Artificial Sequence
  Description of Artificial Sequence: Synthetic oligonucleotide
caguugacuuguaaagguc

SEQ ID NO: 1800495 - RNA, 19 nt, Artificial Sequence
  Description of Artificial Sequence: Synthetic oligonucleotide
acguagacauggcaaagau

SEQ ID NO: 1800496 - RNA, 19 nt, Artificial Sequence
  Description of Artificial Sequence: Synthetic oligonucleotide
uauccaccuguuuggagaa

SEQ ID NO: 1800497 - RNA, 19 nt, Artificial Sequence
  Description of Artificial Sequence: Synthetic oligonucleotide
agucaugugugggcaaagg

SEQ ID NO: 1800498 - RNA, 19 nt, Artificial Sequence
  Description of Artificial Sequence: Synthetic oligonucleotide
gucaagguaagugugccuc

SEQ ID NO: 1800499 - RNA, 19 nt, Artificial Sequence
  Description of Artificial Sequence: Synthetic oligonucleotide
ggcaacucaauccauugca

SEQ ID NO: 1800500 - RNA, 19 nt, Artificial Sequence
  Description of Artificial Sequence: Synthetic oligonucleotide
ucagaacgguaucuacuaa

SEQ ID NO: 1800501 - RNA, 19 nt, Artificial Sequence
  Description of Artificial Sequence: Synthetic oligonucleotide
gacgcugaggcuguacagc

SEQ ID NO: 1800502 - RNA, 19 nt, Artificial Sequence
  Description of Artificial Sequence: Synthetic oligonucleotide
agauacucuuguuccuuga

SEQ ID NO: 1800503 - RNA, 19 nt, Artificial Sequence
  Description of Artificial Sequence: Synthetic oligonucleotide
agguaagugugccuccaca

SEQ ID NO: 1800504 - RNA, 19 nt, Artificial Sequence
  Description of Artificial Sequence: Synthetic oligonucleotide
ucccuauaugggcacucug

SEQ ID NO: 1800505 - RNA, 19 nt, Artificial Sequence
  Description of Artificial Sequence: Synthetic oligonucleotide
gguaagugugccuccacac

SEQ ID NO: 1800506 - RNA, 19 nt, Artificial Sequence
  Description of Artificial Sequence: Synthetic oligonucleotide
cugacugcaagucaaggua

SEQ ID NO: 1800507 - RNA, 19 nt, Artificial Sequence
  Description of Artificial Sequence: Synthetic oligonucleotide
acugucacuccggacguag

SEQ ID NO: 1800508 - RNA, 19 nt, Artificial Sequence
  Description of Artificial Sequence: Synthetic oligonucleotide
uccggacguagacauggca

SEQ ID NO: 1800509 - RNA, 19 nt, Artificial Sequence
  Description of Artificial Sequence: Synthetic oligonucleotide
gauacccuguaggacaguc

SEQ ID NO: 1800510 - RNA, 19 nt, Artificial Sequence
  Description of Artificial Sequence: Synthetic oligonucleotide
gcuuuuguaaaggacgcug

SEQ ID NO: 1800511 - RNA, 19 nt, Artificial Sequence
  Description of Artificial Sequence: Synthetic oligonucleotide
agucuauccuauccaccug

SEQ ID NO: 1800512 - RNA, 19 nt, Artificial Sequence
  Description of Artificial Sequence: Synthetic oligonucleotide
cuaagcaguugccaagaca

SEQ ID NO: 1800513 - RNA, 19 nt, Artificial Sequence
  Description of Artificial Sequence: Synthetic oligonucleotide
uagacauggcaaagauacu

SEQ ID NO: 1800514 - RNA, 19 nt, Artificial Sequence
  Description of Artificial Sequence: Synthetic oligonucleotide
caaugaccacaccugcaag

SEQ ID NO: 1800515 - RNA, 19 nt, Artificial Sequence
  Description of Artificial Sequence: Synthetic oligonucleotide
ugauccuacuggccagucu

SEQ ID NO: 1800516 - RNA, 19 nt, Artificial Sequence
  Description of Artificial Sequence: Synthetic oligonucleotide
uauucgcugucagcaauga

SEQ ID NO: 1800517 - RNA, 19 nt, Artificial Sequence
  Description of Artificial Sequence: Synthetic oligonucleotide
uucauggcgccgcaccuuc

SEQ ID NO: 1800518 - RNA, 19 nt, Artificial Sequence
  Description of Artificial Sequence: Synthetic oligonucleotide
uacucgauuguagcaggug

SEQ ID NO: 1800519 - RNA, 19 nt, Artificial Sequence
  Description of Artificial Sequence: Synthetic oligonucleotide
caauccauugcagggcgag

SEQ ID NO: 1800520 - RNA, 19 nt, Artificial Sequence
  Description of Artificial Sequence: Synthetic oligonucleotide
uugcugaucguuccacaau

SEQ ID NO: 1800521 - RNA, 19 nt, Artificial Sequence
  Description of Artificial Sequence: Synthetic oligonucleotide
agcaauacccagagaaaca

SEQ ID NO: 1800522 - RNA, 19 nt, Artificial Sequence
  Description of Artificial Sequence: Synthetic oligonucleotide
cuagcaauacccagagaaa

SEQ ID NO: 1800523 - RNA, 19 nt, Artificial Sequence
  Description of Artificial Sequence: Synthetic oligonucleotide
agacugucacuccggacgu

SEQ ID NO: 1800524 - RNA, 19 nt, Artificial Sequence
  Description of Artificial Sequence: Synthetic oligonucleotide
ggaaacacauggcaacuca

SEQ ID NO: 1800525 - RNA, 19 nt, Artificial Sequence
  Description of Artificial Sequence: Synthetic oligonucleotide
auacaaugaguaaggauuu

SEQ ID NO: 1800526 - RNA, 19 nt, Artificial Sequence
  Description of Artificial Sequence: Synthetic oligonucleotide
gauuguagcaggugauccu

SEQ ID NO: 1800527 - RNA, 19 nt, Artificial Sequence
  Description of Artificial Sequence: Synthetic oligonucleotide
uuugagcagcaccgcuuug

SEQ ID NO: 1800528 - RNA, 19 nt, Artificial Sequence
  Description of Artificial Sequence: Synthetic oligonucleotide
gccaagacagccuuguaga

SEQ ID NO: 1800529 - RNA, 19 nt, Artificial Sequence
  Description of Artificial Sequence: Synthetic oligonucleotide
cuacuuugaucuugauguc

SEQ ID NO: 1800530 - RNA, 19 nt, Artificial Sequence
  Description of Artificial Sequence: Synthetic oligonucleotide
agucaagguaagugugccu

SEQ ID NO: 1800531 - RNA, 19 nt, Artificial Sequence
  Description of Artificial Sequence: Synthetic oligonucleotide
ucaauccauugcagggcga

SEQ ID NO: 1800532 - RNA, 19 nt, Artificial Sequence
  Description of Artificial Sequence: Synthetic oligonucleotide
aucguuccacaaucaguug

SEQ ID NO: 1800533 - RNA, 19 nt, Artificial Sequence
  Description of Artificial Sequence: Synthetic oligonucleotide
ccuauaugggcacucugag

SEQ ID NO: 1800534 - RNA, 19 nt, Artificial Sequence
  Description of Artificial Sequence: Synthetic oligonucleotide
acucuuguuccuugacaga

SEQ ID NO: 1800535 - RNA, 19 nt, Artificial Sequence
  Description of Artificial Sequence: Synthetic oligonucleotide
ccagcuuugagagaugaug

SEQ ID NO: 1800536 - RNA, 19 nt, Artificial Sequence
  Description of Artificial Sequence: Synthetic oligonucleotide
guaaaccaacucugguuca

SEQ ID NO: 1800537 - RNA, 19 nt, Artificial Sequence
  Description of Artificial Sequence: Synthetic oligonucleotide
caggcuauugauuccaccu

SEQ ID NO: 1800538 - RNA, 19 nt, Artificial Sequence
  Description of Artificial Sequence: Synthetic oligonucleotide
ucaaacaugcaggcccuaa

SEQ ID NO: 1800539 - RNA, 19 nt, Artificial Sequence
  Description of Artificial Sequence: Synthetic oligonucleotide
aucuagacagaaaccuuca

SEQ ID NO: 1800540 - RNA, 19 nt, Artificial Sequence
  Description of Artificial Sequence: Synthetic oligonucleotide
ccuacuggccagucuaucc

SEQ ID NO: 1800541 - RNA, 19 nt, Artificial Sequence
  Description of Artificial Sequence: Synthetic oligonucleotide
gucguacgcggcuuugagc

SEQ ID NO: 1800542 - RNA, 19 nt, Artificial Sequence
  Description of Artificial Sequence: Synthetic oligonucleotide
gacuuguaaaggucaugaa

SEQ ID NO: 1800543 - RNA, 19 nt, Artificial Sequence
  Description of Artificial Sequence: Synthetic oligonucleotide
ucgauuguagcaggugauc

SEQ ID NO: 1800544 - RNA, 19 nt, Artificial Sequence
  Description of Artificial Sequence: Synthetic oligonucleotide
cauggcgccgcaccuucgg

SEQ ID NO: 1800545 - RNA, 19 nt, Artificial Sequence
  Description of Artificial Sequence: Synthetic oligonucleotide
ucuauccuauccaccuguu

SEQ ID NO: 1800546 - RNA, 19 nt, Artificial Sequence
  Description of Artificial Sequence: Synthetic oligonucleotide
agacacgucguacgcggcu

SEQ ID NO: 1800547 - RNA, 19 nt, Artificial Sequence
  Description of Artificial Sequence: Synthetic oligonucleotide
auaugggcacucugagggu

SEQ ID NO: 1800548 - RNA, 19 nt, Artificial Sequence
  Description of Artificial Sequence: Synthetic oligonucleotide
ucauggcgccgcaccuucg

SEQ ID NO: 1800549 - RNA, 19 nt, Artificial Sequence
  Description of Artificial Sequence: Synthetic oligonucleotide
gacgggaaacacauggcaa

SEQ ID NO: 1800550 - RNA, 19 nt, Artificial Sequence
  Description of Artificial Sequence: Synthetic oligonucleotide
cagucuauccuauccaccu

SEQ ID NO: 1800551 - RNA, 19 nt, Artificial Sequence
  Description of Artificial Sequence: Synthetic oligonucleotide
acccuccagagcaagaaga

SEQ ID NO: 1800552 - RNA, 19 nt, Artificial Sequence
  Description of Artificial Sequence: Synthetic oligonucleotide
gaacgguaucuacuaaggu

SEQ ID NO: 1800553 - RNA, 19 nt, Artificial Sequence
  Description of Artificial Sequence: Synthetic oligonucleotide
cacaccugcaagacuguca

SEQ ID NO: 1800554 - RNA, 19 nt, Artificial Sequence
  Description of Artificial Sequence: Synthetic oligonucleotide
acucugguucaaaaugacu

SEQ ID NO: 1800555 - RNA, 19 nt, Artificial Sequence
  Description of Artificial Sequence: Synthetic oligonucleotide
gacauggcaaagauacucu

SEQ ID NO: 1800556 - RNA, 19 nt, Artificial Sequence
  Description of Artificial Sequence: Synthetic oligonucleotide
uccaggcuauugauuccac

SEQ ID NO: 1800557 - RNA, 19 nt, Artificial Sequence
  Description of Artificial Sequence: Synthetic oligonucleotide
ggaagacacgucguacgcg

SEQ ID NO: 1800558 - RNA, 19 nt, Artificial Sequence
  Description of Artificial Sequence: Synthetic oligonucleotide
agccugagcccuuuggcua

SEQ ID NO: 1800559 - RNA, 19 nt, Artificial Sequence
  Description of Artificial Sequence: Synthetic oligonucleotide
uacgcggcuuugagcagca

SEQ ID NO: 1800560 - RNA, 19 nt, Artificial Sequence
  Description of Artificial Sequence: Synthetic oligonucleotide
uccaccuguuuggagaauu

SEQ ID NO: 1800561 - RNA, 19 nt, Artificial Sequence
  Description of Artificial Sequence: Synthetic oligonucleotide
gcaacucaauccauugcag

SEQ ID NO: 1800562 - RNA, 19 nt, Artificial Sequence
  Description of Artificial Sequence: Synthetic oligonucleotide
ccagucuauccuauccacc

SEQ ID NO: 1800563 - RNA, 19 nt, Artificial Sequence
  Description of Artificial Sequence: Synthetic oligonucleotide
cacaaauguccaccuccac

SEQ ID NO: 1800564 - RNA, 19 nt, Artificial Sequence
  Description of Artificial Sequence: Synthetic oligonucleotide
aaggccacucuggaaggau

SEQ ID NO: 1800565 - RNA, 19 nt, Artificial Sequence
  Description of Artificial Sequence: Synthetic oligonucleotide
gcuguguacucgauuguag

SEQ ID NO: 1800566 - RNA, 19 nt, Artificial Sequence
  Description of Artificial Sequence: Synthetic oligonucleotide
gucuauccuauccaccugu

SEQ ID NO: 1800567 - RNA, 19 nt, Artificial Sequence
  Description of Artificial Sequence: Synthetic oligonucleotide
auggcgccgcaccuucggg

SEQ ID NO: 1800568 - RNA, 19 nt, Artificial Sequence
  Description of Artificial Sequence: Synthetic oligonucleotide
agacccgcucacgggagcg

SEQ ID NO: 1800569 - RNA, 19 nt, Artificial Sequence
  Description of Artificial Sequence: Synthetic oligonucleotide
ucccacaaauguccaccuc

SEQ ID NO: 1800570 - RNA, 19 nt, Artificial Sequence
  Description of Artificial Sequence: Synthetic oligonucleotide
uggcgccgcaccuucgggc

SEQ ID NO: 1800571 - RNA, 19 nt, Artificial Sequence
  Description of Artificial Sequence: Synthetic oligonucleotide
guaagugugccuccacacu

SEQ ID NO: 1800572 - RNA, 19 nt, Artificial Sequence
  Description of Artificial Sequence: Synthetic oligonucleotide
cuggaugggugcuguccag

SEQ ID NO: 1800573 - RNA, 19 nt, Artificial Sequence
  Description of Artificial Sequence: Synthetic oligonucleotide
gcuuugagagaugauggca

SEQ ID NO: 1800574 - RNA, 19 nt, Artificial Sequence
  Description of Artificial Sequence: Synthetic oligonucleotide
cagggcgagugauacccug

SEQ ID NO: 1800575 - RNA, 19 nt, Artificial Sequence
  Description of Artificial Sequence: Synthetic oligonucleotide
cucuggaaggauauucgcu

SEQ ID NO: 1800576 - RNA, 19 nt, Artificial Sequence
  Description of Artificial Sequence: Synthetic oligonucleotide
guuaucucuuucccacaaa

SEQ ID NO: 1800577 - RNA, 19 nt, Artificial Sequence
  Description of Artificial Sequence: Synthetic oligonucleotide
caaagauacucuuguuccu

SEQ ID NO: 1800578 - RNA, 19 nt, Artificial Sequence
  Description of Artificial Sequence: Synthetic oligonucleotide
gguagcucaacaggcucag

SEQ ID NO: 1800579 - RNA, 19 nt, Artificial Sequence
  Description of Artificial Sequence: Synthetic oligonucleotide
uacaaugaguaaggauuuu

SEQ ID NO: 1800580 - RNA, 19 nt, Artificial Sequence
  Description of Artificial Sequence: Synthetic oligonucleotide
guacgcggcuuugagcagc

SEQ ID NO: 1800581 - RNA, 19 nt, Artificial Sequence
  Description of Artificial Sequence: Synthetic oligonucleotide
ugugugggcaaagguuauc

SEQ ID NO: 1800582 - RNA, 19 nt, Artificial Sequence
  Description of Artificial Sequence: Synthetic oligonucleotide
gguaucuacuaaggugacc

SEQ ID NO: 1800583 - RNA, 19 nt, Artificial Sequence
  Description of Artificial Sequence: Synthetic oligonucleotide
ggacgcugaggcuguacag

SEQ ID NO: 1800584 - RNA, 19 nt, Artificial Sequence
  Description of Artificial Sequence: Synthetic oligonucleotide
gcaauuuuaucuagacaga

SEQ ID NO: 1800585 - RNA, 19 nt, Artificial Sequence
  Description of Artificial Sequence: Synthetic oligonucleotide
uugcagggcgagugauacc

SEQ ID NO: 1800586 - RNA, 19 nt, Artificial Sequence
  Description of Artificial Sequence: Synthetic oligonucleotide
ggacguagacauggcaaag

SEQ ID NO: 1800587 - RNA, 19 nt, Artificial Sequence
  Description of Artificial Sequence: Synthetic oligonucleotide
agcccuuuggcuagcaaua

SEQ ID NO: 1800588 - RNA, 19 nt, Artificial Sequence
  Description of Artificial Sequence: Synthetic oligonucleotide
cgauuguagcaggugaucc

SEQ ID NO: 1800589 - RNA, 19 nt, Artificial Sequence
  Description of Artificial Sequence: Synthetic oligonucleotide
cguuccacaaucaguugac

SEQ ID NO: 1800590 - RNA, 19 nt, Artificial Sequence
  Description of Artificial Sequence: Synthetic oligonucleotide
ggcgagugauacccuguag

SEQ ID NO: 1800591 - RNA, 19 nt, Artificial Sequence
  Description of Artificial Sequence: Synthetic oligonucleotide
ccaggcuauugauuccacc

SEQ ID NO: 1800592 - RNA, 19 nt, Artificial Sequence
  Description of Artificial Sequence: Synthetic oligonucleotide
gucacuccggacguagaca

SEQ ID NO: 1800593 - RNA, 19 nt, Artificial Sequence
  Description of Artificial Sequence: Synthetic oligonucleotide
cuccggacguagacauggc

SEQ ID NO: 1800594 - RNA, 19 nt, Artificial Sequence
  Description of Artificial Sequence: Synthetic oligonucleotide
cugaaggaagacacgucgu

SEQ ID NO: 1800595 - RNA, 19 nt, Artificial Sequence
  Description of Artificial Sequence: Synthetic oligonucleotide
aggagggacgggaaacaca

SEQ ID NO: 1800596 - RNA, 19 nt, Artificial Sequence
  Description of Artificial Sequence: Synthetic oligonucleotide
ccuauccaccuguuuggag

SEQ ID NO: 1800597 - RNA, 19 nt, Artificial Sequence
  Description of Artificial Sequence: Synthetic oligonucleotide
ucccaacaucagaacggua

SEQ ID NO: 1800598 - RNA, 19 nt, Artificial Sequence
  Description of Artificial Sequence: Synthetic oligonucleotide
augggcacucugaggguag

SEQ ID NO: 1800599 - RNA, 19 nt, Artificial Sequence
  Description of Artificial Sequence: Synthetic oligonucleotide
uccuacuggccagucuauc

SEQ ID NO: 1800600 - RNA, 19 nt, Artificial Sequence
  Description of Artificial Sequence: Synthetic oligonucleotide
guagcucaacaggcucagg

SEQ ID NO: 1800601 - RNA, 19 nt, Artificial Sequence
  Description of Artificial Sequence: Synthetic oligonucleotide
cccuauaugggcacucuga

SEQ ID NO: 1800602 - RNA, 19 nt, Artificial Sequence
  Description of Artificial Sequence: Synthetic oligonucleotide
gggcucgcuuuuguaaagg

SEQ ID NO: 1800603 - RNA, 19 nt, Artificial Sequence
  Description of Artificial Sequence: Synthetic oligonucleotide
ucgggccgacggcuggacc

SEQ ID NO: 1800604 - RNA, 19 nt, Artificial Sequence
  Description of Artificial Sequence: Synthetic oligonucleotide
ggauauucgcugucagcaa

SEQ ID NO: 1800605 - RNA, 19 nt, Artificial Sequence
  Description of Artificial Sequence: Synthetic oligonucleotide
acccgcucacgggagcgcg

SEQ ID NO: 1800606 - RNA, 19 nt, Artificial Sequence
  Description of Artificial Sequence: Synthetic oligonucleotide
cgcaccuucgggccgacgg

SEQ ID NO: 1800607 - RNA, 19 nt, Artificial Sequence
  Description of Artificial Sequence: Synthetic oligonucleotide
ggcucgcuuuuguaaagga

SEQ ID NO: 1800608 - RNA, 19 nt, Artificial Sequence
  Description of Artificial Sequence: Synthetic oligonucleotide
ggcgccgcaccuucgggcc

SEQ ID NO: 1800609 - RNA, 19 nt, Artificial Sequence
  Description of Artificial Sequence: Synthetic oligonucleotide
gcucgcuuuuguaaaggac

SEQ ID NO: 1800610 - RNA, 19 nt, Artificial Sequence
  Description of Artificial Sequence: Synthetic oligonucleotide
uucugccccugaagaugga

SEQ ID NO: 1800611 - RNA, 19 nt, Artificial Sequence
  Description of Artificial Sequence: Synthetic oligonucleotide
cucgauuguagcaggugau

SEQ ID NO: 1800612 - RNA, 19 nt, Artificial Sequence
  Description of Artificial Sequence: Synthetic oligonucleotide
aguugccaagacagccuug

SEQ ID NO: 1800613 - RNA, 19 nt, Artificial Sequence
  Description of Artificial Sequence: Synthetic oligonucleotide
cccuuuggcuagcaauacc

SEQ ID NO: 1800614 - RNA, 19 nt, Artificial Sequence
  Description of Artificial Sequence: Synthetic oligonucleotide
ggacagucaugugugggca

SEQ ID NO: 1800615 - RNA, 19 nt, Artificial Sequence
  Description of Artificial Sequence: Synthetic oligonucleotide
gaggguagcucaacaggcu

SEQ ID NO: 1800616 - RNA, 19 nt, Artificial Sequence
  Description of Artificial Sequence: Synthetic oligonucleotide
cccaacaucagaacgguau

SEQ ID NO: 1800617 - RNA, 19 nt, Artificial Sequence
  Description of Artificial Sequence: Synthetic oligonucleotide
gcugacccucccaacauca

SEQ ID NO: 1800618 - RNA, 19 nt, Artificial Sequence
  Description of Artificial Sequence: Synthetic oligonucleotide
agcaccgcuuugggcucgc

SEQ ID NO: 1800619 - RNA, 19 nt, Artificial Sequence
  Description of Artificial Sequence: Synthetic oligonucleotide
cgagugauacccuguagga

SEQ ID NO: 1800620 - RNA, 19 nt, Artificial Sequence
  Description of Artificial Sequence: Synthetic oligonucleotide
ugcaggcccuaagcaguug

SEQ ID NO: 1800621 - RNA, 19 nt, Artificial Sequence
  Description of Artificial Sequence: Synthetic oligonucleotide
cacucugaggguagcucaa

SEQ ID NO: 1800622 - RNA, 19 nt, Artificial Sequence
  Description of Artificial Sequence: Synthetic oligonucleotide
guugacuuguaaaggucau

SEQ ID NO: 1800623 - RNA, 19 nt, Artificial Sequence
  Description of Artificial Sequence: Synthetic oligonucleotide
gcaggugauccuacuggcc

SEQ ID NO: 1800624 - RNA, 19 nt, Artificial Sequence
  Description of Artificial Sequence: Synthetic oligonucleotide
cacuccggacguagacaug

SEQ ID NO: 1800625 - RNA, 19 nt, Artificial Sequence
  Description of Artificial Sequence: Synthetic oligonucleotide
cauugcagggcgagugaua

SEQ ID NO: 1800626 - RNA, 19 nt, Artificial Sequence
  Description of Artificial Sequence: Synthetic oligonucleotide
ccacacuggacagcugagg

SEQ ID NO: 1800627 - RNA, 19 nt, Artificial Sequence
  Description of Artificial Sequence: Synthetic oligonucleotide
gggaaacacauggcaacuc

SEQ ID NO: 1800628 - RNA, 19 nt, Artificial Sequence
  Description of Artificial Sequence: Synthetic oligonucleotide
augugugggcaaagguuau

SEQ ID NO: 1800629 - RNA, 19 nt, Artificial Sequence
  Description of Artificial Sequence: Synthetic oligonucleotide
ccuaagcaguugccaagac

SEQ ID NO: 1800630 - RNA, 19 nt, Artificial Sequence
  Description of Artificial Sequence: Synthetic oligonucleotide
ccggacguagacauggcaa

SEQ ID NO: 1800631 - RNA, 19 nt, Artificial Sequence
  Description of Artificial Sequence: Synthetic oligonucleotide
gcagggaccaucagaguaa

SEQ ID NO: 1800632 - RNA, 19 nt, Artificial Sequence
  Description of Artificial Sequence: Synthetic oligonucleotide
ggguagcucaacaggcuca

SEQ ID NO: 1800633 - RNA, 19 nt, Artificial Sequence
  Description of Artificial Sequence: Synthetic oligonucleotide
gcaccuucgggccgacggc

SEQ ID NO: 1800634 - RNA, 19 nt, Artificial Sequence
  Description of Artificial Sequence: Synthetic oligonucleotide
gcugaucguuccacaauca

SEQ ID NO: 1800635 - RNA, 19 nt, Artificial Sequence
  Description of Artificial Sequence: Synthetic oligonucleotide
acgucguacgcggcuuuga

SEQ ID NO: 1800636 - RNA, 19 nt, Artificial Sequence
  Description of Artificial Sequence: Synthetic oligonucleotide
cugucacuccggacguaga

SEQ ID NO: 1800637 - RNA, 19 nt, Artificial Sequence
  Description of Artificial Sequence: Synthetic oligonucleotide
acacgucguacgcggcuuu

SEQ ID NO: 1800638 - RNA, 19 nt, Artificial Sequence
  Description of Artificial Sequence: Synthetic oligonucleotide
ccaaagucugacugcaagu

SEQ ID NO: 1800639 - RNA, 19 nt, Artificial Sequence
  Description of Artificial Sequence: Synthetic oligonucleotide
gacccgcucacgggagcgc

SEQ ID NO: 1800640 - RNA, 19 nt, Artificial Sequence
  Description of Artificial Sequence: Synthetic oligonucleotide
cacgucguacgcggcuuug

SEQ ID NO: 1800641 - RNA, 19 nt, Artificial Sequence
  Description of Artificial Sequence: Synthetic oligonucleotide
uucgggccgacggcuggac

SEQ ID NO: 1800642 - RNA, 19 nt, Artificial Sequence
  Description of Artificial Sequence: Synthetic oligonucleotide
ccagacccgcucacgggag

SEQ ID NO: 1800643 - RNA, 19 nt, Artificial Sequence
  Description of Artificial Sequence: Synthetic oligonucleotide
cucccaacaucagaacggu

SEQ ID NO: 1800644 - RNA, 19 nt, Artificial Sequence
  Description of Artificial Sequence: Synthetic oligonucleotide
cacaaucaguugacuugua

SEQ ID NO: 1800645 - RNA, 19 nt, Artificial Sequence
  Description of Artificial Sequence: Synthetic oligonucleotide
auccuacuggccagucuau

SEQ ID NO: 1800646 - RNA, 19 nt, Artificial Sequence
  Description of Artificial Sequence: Synthetic oligonucleotide
cgggccgacggcuggaccc

SEQ ID NO: 1800647 - RNA, 19 nt, Artificial Sequence
  Description of Artificial Sequence: Synthetic oligonucleotide
ccuucgggccgacggcugg

SEQ ID NO: 1800648 - RNA, 19 nt, Artificial Sequence
  Description of Artificial Sequence: Synthetic oligonucleotide
aaaggacgcugaggcugua

SEQ ID NO: 1800649 - RNA, 19 nt, Artificial Sequence
  Description of Artificial Sequence: Synthetic oligonucleotide
cgucguacgcggcuuugag

SEQ ID NO: 1800650 - RNA, 19 nt, Artificial Sequence
  Description of Artificial Sequence: Synthetic oligonucleotide
cagcaccgcuuugggcucg

SEQ ID NO: 1800651 - RNA, 19 nt, Artificial Sequence
  Description of Artificial Sequence: Synthetic oligonucleotide
guacucgauuguagcaggu

SEQ ID NO: 1800652 - RNA, 19 nt, Artificial Sequence
  Description of Artificial Sequence: Synthetic oligonucleotide
ggcuguguacucgauugua

SEQ ID NO: 1800653 - RNA, 19 nt, Artificial Sequence
  Description of Artificial Sequence: Synthetic oligonucleotide
cuauccuauccaccuguuu

SEQ ID NO: 1800654 - RNA, 19 nt, Artificial Sequence
  Description of Artificial Sequence: Synthetic oligonucleotide
accuucgggccgacggcug

SEQ ID NO: 1800655 - RNA, 19 nt, Artificial Sequence
  Description of Artificial Sequence: Synthetic oligonucleotide
cagggaccaucagaguaaa

SEQ ID NO: 1800656 - RNA, 19 nt, Artificial Sequence
  Description of Artificial Sequence: Synthetic oligonucleotide
gcccuuuggcuagcaauac

SEQ ID NO: 1800657 - RNA, 19 nt, Artificial Sequence
  Description of Artificial Sequence: Synthetic oligonucleotide
caguugccaagacagccuu

SEQ ID NO: 1800658 - RNA, 19 nt, Artificial Sequence
  Description of Artificial Sequence: Synthetic oligonucleotide
cccagacccgcucacggga

SEQ ID NO: 1800659 - RNA, 19 nt, Artificial Sequence
  Description of Artificial Sequence: Synthetic oligonucleotide
cccuaagcaguugccaaga

SEQ ID NO: 1800660 - RNA, 19 nt, Artificial Sequence
  Description of Artificial Sequence: Synthetic oligonucleotide
cggacguagacauggcaaa

SEQ ID NO: 1800661 - RNA, 19 nt, Artificial Sequence
  Description of Artificial Sequence: Synthetic oligonucleotide
acgcggcuuugagcagcac

SEQ ID NO: 1800662 - RNA, 19 nt, Artificial Sequence
  Description of Artificial Sequence: Synthetic oligonucleotide
cagcugacccucccaacau

SEQ ID NO: 1800663 - RNA, 19 nt, Artificial Sequence
  Description of Artificial Sequence: Synthetic oligonucleotide
ccucccuauaugggcacuc

SEQ ID NO: 1800664 - RNA, 19 nt, Artificial Sequence
  Description of Artificial Sequence: Synthetic oligonucleotide
cucccuauaugggcacucu

SEQ ID NO: 1800665 - RNA, 19 nt, Artificial Sequence
  Description of Artificial Sequence: Synthetic oligonucleotide
ccccucccuauaugggcac

SEQ ID NO: 1800666 - RNA, 19 nt, Artificial Sequence
  Description of Artificial Sequence: Synthetic oligonucleotide
cguacgcggcuuugagcag

SEQ ID NO: 1800667 - RNA, 19 nt, Artificial Sequence
  Description of Artificial Sequence: Synthetic oligonucleotide
cccgcucacgggagcgcgg

SEQ ID NO: 1800668 - RNA, 19 nt, Artificial Sequence
  Description of Artificial Sequence: Synthetic oligonucleotide
cuucgggccgacggcugga

SEQ ID NO: 1800669 - RNA, 19 nt, Artificial Sequence
  Description of Artificial Sequence: Synthetic oligonucleotide
gacugucacuccggacgua

SEQ ID NO: 1800670 - RNA, 19 nt, Artificial Sequence
  Description of Artificial Sequence: Synthetic oligonucleotide
gcgccgcaccuucgggccg

SEQ ID NO: 1800671 - RNA, 19 nt, Artificial Sequence
  Description of Artificial Sequence: Synthetic oligonucleotide
gggccgacggcuggacccc

SEQ ID NO: 1800672 - RNA, 19 nt, Artificial Sequence
  Description of Artificial Sequence: Synthetic oligonucleotide
ccgcucacgggagcgcggc

SEQ ID NO: 1800673 - RNA, 19 nt, Artificial Sequence
  Description of Artificial Sequence: Synthetic oligonucleotide
caccuucgggccgacggcu

SEQ ID NO: 1800674 - RNA, 19 nt, Artificial Sequence
  Description of Artificial Sequence: Synthetic oligonucleotide
cuucauggcgccgcaccuu

SEQ ID NO: 1800675 - RNA, 19 nt, Artificial Sequence
  Description of Artificial Sequence: Synthetic oligonucleotide
caccgcuuugggcucgcuu

SEQ ID NO: 1800676 - RNA, 19 nt, Artificial Sequence
  Description of Artificial Sequence: Synthetic oligonucleotide
gccgacggcuggaccccag

SEQ ID NO: 1800677 - RNA, 19 nt, Artificial Sequence
  Description of Artificial Sequence: Synthetic oligonucleotide
gcacuccaggcuauugauu

SEQ ID NO: 1800678 - RNA, 19 nt, Artificial Sequence
  Description of Artificial Sequence: Synthetic oligonucleotide
gggcacucugaggguagcu

SEQ ID NO: 1800679 - RNA, 19 nt, Artificial Sequence
  Description of Artificial Sequence: Synthetic oligonucleotide
ccacuacuuugaucuugau

SEQ ID NO: 1800680 - RNA, 19 nt, Artificial Sequence
  Description of Artificial Sequence: Synthetic oligonucleotide
cgcuuuuguaaaggacgcu

SEQ ID NO: 1800681 - RNA, 19 nt, Artificial Sequence
  Description of Artificial Sequence: Synthetic oligonucleotide
ccgcaccuucgggccgacg

SEQ ID NO: 1800682 - RNA, 19 nt, Artificial Sequence
  Description of Artificial Sequence: Synthetic oligonucleotide
ggccgacggcuggacccca

SEQ ID NO: 1800683 - RNA, 19 nt, Artificial Sequence
  Description of Artificial Sequence: Synthetic oligonucleotide
gcccugggauggagagguc

SEQ ID NO: 1800684 - RNA, 19 nt, Artificial Sequence
  Description of Artificial Sequence: Synthetic oligonucleotide
gccgcaccuucgggccgac

SEQ ID NO: 1800685 - RNA, 19 nt, Artificial Sequence
  Description of Artificial Sequence: Synthetic oligonucleotide
cccucccuauaugggcacu

SEQ ID NO: 1800686 - RNA, 19 nt, Artificial Sequence
  Description of Artificial Sequence: Synthetic oligonucleotide
cgccgcaccuucgggccga

SEQ ID NO: 1800687 - RNA, 19 nt, Artificial Sequence
  Description of Artificial Sequence: Synthetic oligonucleotide
gcaccgcuuugggcucgcu

SEQ ID NO: 1800688 - RNA, 19 nt, Artificial Sequence
  Description of Artificial Sequence: Synthetic oligonucleotide
aaagaagcuauuuucaucc

SEQ ID NO: 1800689 - RNA, 19 nt, Artificial Sequence
  Description of Artificial Sequence: Synthetic oligonucleotide
uuagaauuaucauugaugg

SEQ ID NO: 1800690 - RNA, 19 nt, Artificial Sequence
  Description of Artificial Sequence: Synthetic oligonucleotide
uuuagaauaagccaauggg

SEQ ID NO: 1800691 - RNA, 19 nt, Artificial Sequence
  Description of Artificial Sequence: Synthetic oligonucleotide
uuacauaucacguacaucc

SEQ ID NO: 1800692 - RNA, 19 nt, Artificial Sequence
  Description of Artificial Sequence: Synthetic oligonucleotide
auaauauggucauugagcc

SEQ ID NO: 1800693 - RNA, 19 nt, Artificial Sequence
  Description of Artificial Sequence: Synthetic oligonucleotide
aaggaaguuaauuuuauag

SEQ ID NO: 1800694 - RNA, 19 nt, Artificial Sequence
  Description of Artificial Sequence: Synthetic oligonucleotide
aauacaacucucuuguggg

SEQ ID NO: 1800695 - RNA, 19 nt, Artificial Sequence
  Description of Artificial Sequence: Synthetic oligonucleotide
uuagaauaagccaaugggg

SEQ ID NO: 1800696 - RNA, 19 nt, Artificial Sequence
  Description of Artificial Sequence: Synthetic oligonucleotide
aaauacaacucucuugugg

SEQ ID NO: 1800697 - RNA, 19 nt, Artificial Sequence
  Description of Artificial Sequence: Synthetic oligonucleotide
aaauggggaaaccaaaagg

SEQ ID NO: 1800698 - RNA, 19 nt, Artificial Sequence
  Description of Artificial Sequence: Synthetic oligonucleotide
uaauuuuauagcaacaaga

SEQ ID NO: 1800699 - RNA, 19 nt, Artificial Sequence
  Description of Artificial Sequence: Synthetic oligonucleotide
uuuuagaauaugaaggccc

SEQ ID NO: 1800700 - RNA, 19 nt, Artificial Sequence
  Description of Artificial Sequence: Synthetic oligonucleotide
aguauucaaaggcaaaccc

SEQ ID NO: 1800701 - RNA, 19 nt, Artificial Sequence
  Description of Artificial Sequence: Synthetic oligonucleotide
uugguuagaauuaucauug

SEQ ID NO: 1800702 - RNA, 19 nt, Artificial Sequence
  Description of Artificial Sequence: Synthetic oligonucleotide
aggaaguuaauuuuauagc

SEQ ID NO: 1800703 - RNA, 19 nt, Artificial Sequence
  Description of Artificial Sequence: Synthetic oligonucleotide
uauaacucaagacuacagg

SEQ ID NO: 1800704 - RNA, 19 nt, Artificial Sequence
  Description of Artificial Sequence: Synthetic oligonucleotide
uucaguguuacauaucacg

SEQ ID NO: 1800705 - RNA, 19 nt, Artificial Sequence
  Description of Artificial Sequence: Synthetic oligonucleotide
uuuuagaucccuuauguca

SEQ ID NO: 1800706 - RNA, 19 nt, Artificial Sequence
  Description of Artificial Sequence: Synthetic oligonucleotide
uuagauuuccuuuagaaua

SEQ ID NO: 1800707 - RNA, 19 nt, Artificial Sequence
  Description of Artificial Sequence: Synthetic oligonucleotide
aaaccaacaaacuccagug

SEQ ID NO: 1800708 - RNA, 19 nt, Artificial Sequence
  Description of Artificial Sequence: Synthetic oligonucleotide
uuaauuuuauagcaacaag

SEQ ID NO: 1800709 - RNA, 19 nt, Artificial Sequence
  Description of Artificial Sequence: Synthetic oligonucleotide
uggagauaaaccaacaaac

SEQ ID NO: 1800710 - RNA, 19 nt, Artificial Sequence
  Description of Artificial Sequence: Synthetic oligonucleotide
cuuacuugaaacuguauag

SEQ ID NO: 1800711 - RNA, 19 nt, Artificial Sequence
  Description of Artificial Sequence: Synthetic oligonucleotide
ucuuguauuguacagggcu

SEQ ID NO: 1800712 - RNA, 19 nt, Artificial Sequence
  Description of Artificial Sequence: Synthetic oligonucleotide
aaagugaagcuucccauuc

SEQ ID NO: 1800713 - RNA, 19 nt, Artificial Sequence
  Description of Artificial Sequence: Synthetic oligonucleotide
ucugcuaugggaaucauaa

SEQ ID NO: 1800714 - RNA, 19 nt, Artificial Sequence
  Description of Artificial Sequence: Synthetic oligonucleotide
aacucaagacuacaggauc

SEQ ID NO: 1800715 - RNA, 19 nt, Artificial Sequence
  Description of Artificial Sequence: Synthetic oligonucleotide
agaauuaucauugauggcu

SEQ ID NO: 1800716 - RNA, 19 nt, Artificial Sequence
  Description of Artificial Sequence: Synthetic oligonucleotide
aagacuacaggauccaucu

SEQ ID NO: 1800717 - RNA, 19 nt, Artificial Sequence
  Description of Artificial Sequence: Synthetic oligonucleotide
aauagugagacauccgacu

SEQ ID NO: 1800718 - RNA, 19 nt, Artificial Sequence
  Description of Artificial Sequence: Synthetic oligonucleotide
ugcuaugggaaucauaaug

SEQ ID NO: 1800719 - RNA, 19 nt, Artificial Sequence
  Description of Artificial Sequence: Synthetic oligonucleotide
ucuuuuagaucccuuaugu

SEQ ID NO: 1800720 - RNA, 19 nt, Artificial Sequence
  Description of Artificial Sequence: Synthetic oligonucleotide
uuuccuuuagaauaagcca

SEQ ID NO: 1800721 - RNA, 19 nt, Artificial Sequence
  Description of Artificial Sequence: Synthetic oligonucleotide
gaaucauaaugaaagaagc

SEQ ID NO: 1800722 - RNA, 19 nt, Artificial Sequence
  Description of Artificial Sequence: Synthetic oligonucleotide
augggaaucauaaugaaag

SEQ ID NO: 1800723 - RNA, 19 nt, Artificial Sequence
  Description of Artificial Sequence: Synthetic oligonucleotide
aagccuuugcauuagagaa

SEQ ID NO: 1800724 - RNA, 19 nt, Artificial Sequence
  Description of Artificial Sequence: Synthetic oligonucleotide
uggucauugagccagcuug

SEQ ID NO: 1800725 - RNA, 19 nt, Artificial Sequence
  Description of Artificial Sequence: Synthetic oligonucleotide
ucccauucagauaaugccg

SEQ ID NO: 1800726 - RNA, 19 nt, Artificial Sequence
  Description of Artificial Sequence: Synthetic oligonucleotide
uuuagaauaugaaggcccc

SEQ ID NO: 1800727 - RNA, 19 nt, Artificial Sequence
  Description of Artificial Sequence: Synthetic oligonucleotide
uuugcauuagagaaugccu

SEQ ID NO: 1800728 - RNA, 19 nt, Artificial Sequence
  Description of Artificial Sequence: Synthetic oligonucleotide
ugauaaagcagacaugguc

SEQ ID NO: 1800729 - RNA, 19 nt, Artificial Sequence
  Description of Artificial Sequence: Synthetic oligonucleotide
auaacucaagacuacagga

SEQ ID NO: 1800730 - RNA, 19 nt, Artificial Sequence
  Description of Artificial Sequence: Synthetic oligonucleotide
uuuccuuuaggcacugagg

SEQ ID NO: 1800731 - RNA, 19 nt, Artificial Sequence
  Description of Artificial Sequence: Synthetic oligonucleotide
ucauccuggagauaaacca

SEQ ID NO: 1800732 - RNA, 19 nt, Artificial Sequence
  Description of Artificial Sequence: Synthetic oligonucleotide
agaaguaggacuaguaaac

SEQ ID NO: 1800733 - RNA, 19 nt, Artificial Sequence
  Description of Artificial Sequence: Synthetic oligonucleotide
aauggggaaaccaaaagga

SEQ ID NO: 1800734 - RNA, 19 nt, Artificial Sequence
  Description of Artificial Sequence: Synthetic oligonucleotide
guuagaauuaucauugaug

SEQ ID NO: 1800735 - RNA, 19 nt, Artificial Sequence
  Description of Artificial Sequence: Synthetic oligonucleotide
ucauaaugaaagaagcuau

SEQ ID NO: 1800736 - RNA, 19 nt, Artificial Sequence
  Description of Artificial Sequence: Synthetic oligonucleotide
uucccauucagauaaugcc

SEQ ID NO: 1800737 - RNA, 19 nt, Artificial Sequence
  Description of Artificial Sequence: Synthetic oligonucleotide
aaacccaauaauaugguca

SEQ ID NO: 1800738 - RNA, 19 nt, Artificial Sequence
  Description of Artificial Sequence: Synthetic oligonucleotide
ugguacauaaguucaagac

SEQ ID NO: 1800739 - RNA, 19 nt, Artificial Sequence
  Description of Artificial Sequence: Synthetic oligonucleotide
ucuuacuugaaacuguaua

SEQ ID NO: 1800740 - RNA, 19 nt, Artificial Sequence
  Description of Artificial Sequence: Synthetic oligonucleotide
uuccuuuagaauaagccaa

SEQ ID NO: 1800741 - RNA, 19 nt, Artificial Sequence
  Description of Artificial Sequence: Synthetic oligonucleotide
uccauauaacucaagacua

SEQ ID NO: 1800742 - RNA, 19 nt, Artificial Sequence
  Description of Artificial Sequence: Synthetic oligonucleotide
ucagaaauccagaagcuau

SEQ ID NO: 1800743 - RNA, 19 nt, Artificial Sequence
  Description of Artificial Sequence: Synthetic oligonucleotide
auucagauaaugccgagga

SEQ ID NO: 1800744 - RNA, 19 nt, Artificial Sequence
  Description of Artificial Sequence: Synthetic oligonucleotide
ucaguguuacauaucacgu

SEQ ID NO: 1800745 - RNA, 19 nt, Artificial Sequence
  Description of Artificial Sequence: Synthetic oligonucleotide
aacaaacuccaguggguac

SEQ ID NO: 1800746 - RNA, 19 nt, Artificial Sequence
  Description of Artificial Sequence: Synthetic oligonucleotide
uuuugcauggauugaguug

SEQ ID NO: 1800747 - RNA, 19 nt, Artificial Sequence
  Description of Artificial Sequence: Synthetic oligonucleotide
uagacuguccauauaacuc

SEQ ID NO: 1800748 - RNA, 19 nt, Artificial Sequence
  Description of Artificial Sequence: Synthetic oligonucleotide
ugagacauccgacugucgc

SEQ ID NO: 1800749 - RNA, 19 nt, Artificial Sequence
  Description of Artificial Sequence: Synthetic oligonucleotide
uauuguacagggcuucuca

SEQ ID NO: 1800750 - RNA, 19 nt, Artificial Sequence
  Description of Artificial Sequence: Synthetic oligonucleotide
guggaguuaggccaaaucc

SEQ ID NO: 1800751 - RNA, 19 nt, Artificial Sequence
  Description of Artificial Sequence: Synthetic oligonucleotide
uaugaaggccccaagugga

SEQ ID NO: 1800752 - RNA, 19 nt, Artificial Sequence
  Description of Artificial Sequence: Synthetic oligonucleotide
agacacuucucacuauggc

SEQ ID NO: 1800753 - RNA, 19 nt, Artificial Sequence
  Description of Artificial Sequence: Synthetic oligonucleotide
gacuacaggauccaucuug

SEQ ID NO: 1800754 - RNA, 19 nt, Artificial Sequence
  Description of Artificial Sequence: Synthetic oligonucleotide
gcugauaaagcagacaugg

SEQ ID NO: 1800755 - RNA, 19 nt, Artificial Sequence
  Description of Artificial Sequence: Synthetic oligonucleotide
ucaugcaugucuuuuagau

SEQ ID NO: 1800756 - RNA, 19 nt, Artificial Sequence
  Description of Artificial Sequence: Synthetic oligonucleotide
uccuugcucccuaagaaag

SEQ ID NO: 1800757 - RNA, 19 nt, Artificial Sequence
  Description of Artificial Sequence: Synthetic oligonucleotide
uuugcagacagaaagccuu

SEQ ID NO: 1800758 - RNA, 19 nt, Artificial Sequence
  Description of Artificial Sequence: Synthetic oligonucleotide
uuuagaucccuuaugucau

SEQ ID NO: 1800759 - RNA, 19 nt, Artificial Sequence
  Description of Artificial Sequence: Synthetic oligonucleotide
gacuaguaaacuuucaucu

SEQ ID NO: 1800760 - RNA, 19 nt, Artificial Sequence
  Description of Artificial Sequence: Synthetic oligonucleotide
guaaacuuucaucuacuag

SEQ ID NO: 1800761 - RNA, 19 nt, Artificial Sequence
  Description of Artificial Sequence: Synthetic oligonucleotide
ugaauugggcgacuucagg

SEQ ID NO: 1800762 - RNA, 19 nt, Artificial Sequence
  Description of Artificial Sequence: Synthetic oligonucleotide
uggaguuaggccaaaucca

SEQ ID NO: 1800763 - RNA, 19 nt, Artificial Sequence
  Description of Artificial Sequence: Synthetic oligonucleotide
ugucuaaagaaguucugac

SEQ ID NO: 1800764 - RNA, 19 nt, Artificial Sequence
  Description of Artificial Sequence: Synthetic oligonucleotide
agaagcuauuccucaggcc

SEQ ID NO: 1800765 - RNA, 19 nt, Artificial Sequence
  Description of Artificial Sequence: Synthetic oligonucleotide
caauaauauggucauugag

SEQ ID NO: 1800766 - RNA, 19 nt, Artificial Sequence
  Description of Artificial Sequence: Synthetic oligonucleotide
uguccauauaacucaagac

SEQ ID NO: 1800767 - RNA, 19 nt, Artificial Sequence
  Description of Artificial Sequence: Synthetic oligonucleotide
agaaucuuacuugaaacug

SEQ ID NO: 1800768 - RNA, 19 nt, Artificial Sequence
  Description of Artificial Sequence: Synthetic oligonucleotide
aaucauaaugaaagaagcu

SEQ ID NO: 1800769 - RNA, 19 nt, Artificial Sequence
  Description of Artificial Sequence: Synthetic oligonucleotide
ucacguacaucccacaguc

SEQ ID NO: 1800770 - RNA, 19 nt, Artificial Sequence
  Description of Artificial Sequence: Synthetic oligonucleotide
gaaagaagcuauuuucauc

SEQ ID NO: 1800771 - RNA, 19 nt, Artificial Sequence
  Description of Artificial Sequence: Synthetic oligonucleotide
uuaaagugaagcuucccau

SEQ ID NO: 1800772 - RNA, 19 nt, Artificial Sequence
  Description of Artificial Sequence: Synthetic oligonucleotide
uucagggcugauaaagcag

SEQ ID NO: 1800773 - RNA, 19 nt, Artificial Sequence
  Description of Artificial Sequence: Synthetic oligonucleotide
uccaucuuguauuguacag

SEQ ID NO: 1800774 - RNA, 19 nt, Artificial Sequence
  Description of Artificial Sequence: Synthetic oligonucleotide
ggaaucauaaugaaagaag

SEQ ID NO: 1800775 - RNA, 19 nt, Artificial Sequence
  Description of Artificial Sequence: Synthetic oligonucleotide
ucaagguuuugguacauaa

SEQ ID NO: 1800776 - RNA, 19 nt, Artificial Sequence
  Description of Artificial Sequence: Synthetic oligonucleotide
uaucacguacaucccacag

SEQ ID NO: 1800777 - RNA, 19 nt, Artificial Sequence
  Description of Artificial Sequence: Synthetic oligonucleotide
gacuucagggcugauaaag

SEQ ID NO: 1800778 - RNA, 19 nt, Artificial Sequence
  Description of Artificial Sequence: Synthetic oligonucleotide
agacuguccauauaacuca

SEQ ID NO: 1800779 - RNA, 19 nt, Artificial Sequence
  Description of Artificial Sequence: Synthetic oligonucleotide
agcuguuuuguugagcugg

SEQ ID NO: 1800780 - RNA, 19 nt, Artificial Sequence
  Description of Artificial Sequence: Synthetic oligonucleotide
aguggaguuaggccaaauc

SEQ ID NO: 1800781 - RNA, 19 nt, Artificial Sequence
  Description of Artificial Sequence: Synthetic oligonucleotide
aaacuuucaucuacuagug

SEQ ID NO: 1800782 - RNA, 19 nt, Artificial Sequence
  Description of Artificial Sequence: Synthetic oligonucleotide
agggguucaaggaacaugg

SEQ ID NO: 1800783 - RNA, 19 nt, Artificial Sequence
  Description of Artificial Sequence: Synthetic oligonucleotide
gcacuuaaugaauugggcg

SEQ ID NO: 1800784 - RNA, 19 nt, Artificial Sequence
  Description of Artificial Sequence: Synthetic oligonucleotide
uguuacauaucacguacau

SEQ ID NO: 1800785 - RNA, 19 nt, Artificial Sequence
  Description of Artificial Sequence: Synthetic oligonucleotide
auagugagacauccgacug

SEQ ID NO: 1800786 - RNA, 19 nt, Artificial Sequence
  Description of Artificial Sequence: Synthetic oligonucleotide
uaaucaugaaacugacugu

SEQ ID NO: 1800787 - RNA, 19 nt, Artificial Sequence
  Description of Artificial Sequence: Synthetic oligonucleotide
gaauacacugcucuccuca

SEQ ID NO: 1800788 - RNA, 19 nt, Artificial Sequence
  Description of Artificial Sequence: Synthetic oligonucleotide
gaagcuauuccucaggccu

SEQ ID NO: 1800789 - RNA, 19 nt, Artificial Sequence
  Description of Artificial Sequence: Synthetic oligonucleotide
acuuaaugaauugggcgac

SEQ ID NO: 1800790 - RNA, 19 nt, Artificial Sequence
  Description of Artificial Sequence: Synthetic oligonucleotide
ucaggguuaaagugaagcu

SEQ ID NO: 1800791 - RNA, 19 nt, Artificial Sequence
  Description of Artificial Sequence: Synthetic oligonucleotide
auugaguugcuucugcuau

SEQ ID NO: 1800792 - RNA, 19 nt, Artificial Sequence
  Description of Artificial Sequence: Synthetic oligonucleotide
aggguuaaagugaagcuuc

SEQ ID NO: 1800793 - RNA, 19 nt, Artificial Sequence
  Description of Artificial Sequence: Synthetic oligonucleotide
ugaguugcuucugcuaugg

SEQ ID NO: 1800794 - RNA, 19 nt, Artificial Sequence
  Description of Artificial Sequence: Synthetic oligonucleotide
uaguaaacuuucaucuacu

SEQ ID NO: 1800795 - RNA, 19 nt, Artificial Sequence
  Description of Artificial Sequence: Synthetic oligonucleotide
cauaucacguacaucccac

SEQ ID NO: 1800796 - RNA, 19 nt, Artificial Sequence
  Description of Artificial Sequence: Synthetic oligonucleotide
uaacucaagacuacaggau

SEQ ID NO: 1800797 - RNA, 19 nt, Artificial Sequence
  Description of Artificial Sequence: Synthetic oligonucleotide
uuaucauugauggcuaaaa

SEQ ID NO: 1800798 - RNA, 19 nt, Artificial Sequence
  Description of Artificial Sequence: Synthetic oligonucleotide
uacagggcuucucagaaau

SEQ ID NO: 1800799 - RNA, 19 nt, Artificial Sequence
  Description of Artificial Sequence: Synthetic oligonucleotide
aaaggaaguuaauuuuaua

SEQ ID NO: 1800800 - RNA, 19 nt, Artificial Sequence
  Description of Artificial Sequence: Synthetic oligonucleotide
ucauugagccagcuuggag

SEQ ID NO: 1800801 - RNA, 19 nt, Artificial Sequence
  Description of Artificial Sequence: Synthetic oligonucleotide
uugguacauaaguucaaga

SEQ ID NO: 1800802 - RNA, 19 nt, Artificial Sequence
  Description of Artificial Sequence: Synthetic oligonucleotide
uagaauuaucauugauggc

SEQ ID NO: 1800803 - RNA, 19 nt, Artificial Sequence
  Description of Artificial Sequence: Synthetic oligonucleotide
aaaaggaaguuaauuuuau

SEQ ID NO: 1800804 - RNA, 19 nt, Artificial Sequence
  Description of Artificial Sequence: Synthetic oligonucleotide
uacauaucacguacauccc

SEQ ID NO: 1800805 - RNA, 19 nt, Artificial Sequence
  Description of Artificial Sequence: Synthetic oligonucleotide
guuaauuuuauagcaacaa

SEQ ID NO: 1800806 - RNA, 19 nt, Artificial Sequence
  Description of Artificial Sequence: Synthetic oligonucleotide
ucuacuagugguuuuccuu

SEQ ID NO: 1800807 - RNA, 19 nt, Artificial Sequence
  Description of Artificial Sequence: Synthetic oligonucleotide
cacuuaaugaauugggcga

SEQ ID NO: 1800808 - RNA, 19 nt, Artificial Sequence
  Description of Artificial Sequence: Synthetic oligonucleotide
agaaauccagaagcuauuc

SEQ ID NO: 1800809 - RNA, 19 nt, Artificial Sequence
  Description of Artificial Sequence: Synthetic oligonucleotide
guccauauaacucaagacu

SEQ ID NO: 1800810 - RNA, 19 nt, Artificial Sequence
  Description of Artificial Sequence: Synthetic oligonucleotide
ugucgcaguagacugucca

SEQ ID NO: 1800811 - RNA, 19 nt, Artificial Sequence
  Description of Artificial Sequence: Synthetic oligonucleotide
auuguacagggcuucucag

SEQ ID NO: 1800812 - RNA, 19 nt, Artificial Sequence
  Description of Artificial Sequence: Synthetic oligonucleotide
ucccuuaugucauugguuu

SEQ ID NO: 1800813 - RNA, 19 nt, Artificial Sequence
  Description of Artificial Sequence: Synthetic oligonucleotide
uguuuugcauggauugagu

SEQ ID NO: 1800814 - RNA, 19 nt, Artificial Sequence
  Description of Artificial Sequence: Synthetic oligonucleotide
uggauugaguugcuucugc

SEQ ID NO: 1800815 - RNA, 19 nt, Artificial Sequence
  Description of Artificial Sequence: Synthetic oligonucleotide
ugucuuuuagaucccuuau

SEQ ID NO: 1800816 - RNA, 19 nt, Artificial Sequence
  Description of Artificial Sequence: Synthetic oligonucleotide
gauaaugccgaggaugaca

SEQ ID NO: 1800817 - RNA, 19 nt, Artificial Sequence
  Description of Artificial Sequence: Synthetic oligonucleotide
ugcuaccuguuuugcaugg

SEQ ID NO: 1800818 - RNA, 19 nt, Artificial Sequence
  Description of Artificial Sequence: Synthetic oligonucleotide
guccgaguaaucaugaaac

SEQ ID NO: 1800819 - RNA, 19 nt, Artificial Sequence
  Description of Artificial Sequence: Synthetic oligonucleotide
agugagacauccgacuguc

SEQ ID NO: 1800820 - RNA, 19 nt, Artificial Sequence
  Description of Artificial Sequence: Synthetic oligonucleotide
uuuugguacauaaguucaa

SEQ ID NO: 1800821 - RNA, 19 nt, Artificial Sequence
  Description of Artificial Sequence: Synthetic oligonucleotide
uuuucucaagguuuuggua

SEQ ID NO: 1800822 - RNA, 19 nt, Artificial Sequence
  Description of Artificial Sequence: Synthetic oligonucleotide
ugaaacugacuguuggcaa

SEQ ID NO: 1800823 - RNA, 19 nt, Artificial Sequence
  Description of Artificial Sequence: Synthetic oligonucleotide
gguuuugguacauaaguuc

SEQ ID NO: 1800824 - RNA, 19 nt, Artificial Sequence
  Description of Artificial Sequence: Synthetic oligonucleotide
cuagugguuuuccuuuagg

SEQ ID NO: 1800825 - RNA, 19 nt, Artificial Sequence
  Description of Artificial Sequence: Synthetic oligonucleotide
agauccagggguucaagga

SEQ ID NO: 1800826 - RNA, 19 nt, Artificial Sequence
  Description of Artificial Sequence: Synthetic oligonucleotide
agacagaaagccuuugcau

SEQ ID NO: 1800827 - RNA, 19 nt, Artificial Sequence
  Description of Artificial Sequence: Synthetic oligonucleotide
caauagugagacauccgac

SEQ ID NO: 1800828 - RNA, 19 nt, Artificial Sequence
  Description of Artificial Sequence: Synthetic oligonucleotide
gugcacuuaaugaauuggg

SEQ ID NO: 1800829 - RNA, 19 nt, Artificial Sequence
  Description of Artificial Sequence: Synthetic oligonucleotide
aggcaaacccaauaauaug

SEQ ID NO: 1800830 - RNA, 19 nt, Artificial Sequence
  Description of Artificial Sequence: Synthetic oligonucleotide
augaaagaagcuauuuuca

SEQ ID NO: 1800831 - RNA, 19 nt, Artificial Sequence
  Description of Artificial Sequence: Synthetic oligonucleotide
aggacuaguaaacuuucau

SEQ ID NO: 1800832 - RNA, 19 nt, Artificial Sequence
  Description of Artificial Sequence: Synthetic oligonucleotide
ugggaaucauaaugaaaga

SEQ ID NO: 1800833 - RNA, 19 nt, Artificial Sequence
  Description of Artificial Sequence: Synthetic oligonucleotide
aauuaucauugauggcuaa

SEQ ID NO: 1800834 - RNA, 19 nt, Artificial Sequence
  Description of Artificial Sequence: Synthetic oligonucleotide
gucuaaagaaguucugaca

SEQ ID NO: 1800835 - RNA, 19 nt, Artificial Sequence
  Description of Artificial Sequence: Synthetic oligonucleotide
ugcuggugcacuuaaugaa

SEQ ID NO: 1800836 - RNA, 19 nt, Artificial Sequence
  Description of Artificial Sequence: Synthetic oligonucleotide
uucucaagguuuugguaca

SEQ ID NO: 1800837 - RNA, 19 nt, Artificial Sequence
  Description of Artificial Sequence: Synthetic oligonucleotide
acauaucacguacauccca

SEQ ID NO: 1800838 - RNA, 19 nt, Artificial Sequence
  Description of Artificial Sequence: Synthetic oligonucleotide
aguuaggccaaauccacuu

SEQ ID NO: 1800839 - RNA, 19 nt, Artificial Sequence
  Description of Artificial Sequence: Synthetic oligonucleotide
cuuuuagaucccuuauguc

SEQ ID NO: 1800840 - RNA, 19 nt, Artificial Sequence
  Description of Artificial Sequence: Synthetic oligonucleotide
gucuuuuagaucccuuaug

SEQ ID NO: 1800841 - RNA, 19 nt, Artificial Sequence
  Description of Artificial Sequence: Synthetic oligonucleotide
aguagacuguccauauaac

SEQ ID NO: 1800842 - RNA, 19 nt, Artificial Sequence
  Description of Artificial Sequence: Synthetic oligonucleotide
agaucccuuaugucauugg

SEQ ID NO: 1800843 - RNA, 19 nt, Artificial Sequence
  Description of Artificial Sequence: Synthetic oligonucleotide
cagacacuucucacuaugg

SEQ ID NO: 1800844 - RNA, 19 nt, Artificial Sequence
  Description of Artificial Sequence: Synthetic oligonucleotide
aguuaauuuuauagcaaca

SEQ ID NO: 1800845 - RNA, 19 nt, Artificial Sequence
  Description of Artificial Sequence: Synthetic oligonucleotide
cauucagauaaugccgagg

SEQ ID NO: 1800846 - RNA, 19 nt, Artificial Sequence
  Description of Artificial Sequence: Synthetic oligonucleotide
cagaagcuauuccucaggc

SEQ ID NO: 1800847 - RNA, 19 nt, Artificial Sequence
  Description of Artificial Sequence: Synthetic oligonucleotide
uaauauggucauugagcca

SEQ ID NO: 1800848 - RNA, 19 nt, Artificial Sequence
  Description of Artificial Sequence: Synthetic oligonucleotide
cagauaaugccgaggauga

SEQ ID NO: 1800849 - RNA, 19 nt, Artificial Sequence
  Description of Artificial Sequence: Synthetic oligonucleotide
caagacuacaggauccauc

SEQ ID NO: 1800850 - RNA, 19 nt, Artificial Sequence
  Description of Artificial Sequence: Synthetic oligonucleotide
acuagugguuuuccuuuag

SEQ ID NO: 1800851 - RNA, 19 nt, Artificial Sequence
  Description of Artificial Sequence: Synthetic oligonucleotide
acguacaucccacagucau

SEQ ID NO: 1800852 - RNA, 19 nt, Artificial Sequence
  Description of Artificial Sequence: Synthetic oligonucleotide
acuguuggcaaaguauuca

SEQ ID NO: 1800853 - RNA, 19 nt, Artificial Sequence
  Description of Artificial Sequence: Synthetic oligonucleotide
uuucauccuggagauaaac

SEQ ID NO: 1800854 - RNA, 19 nt, Artificial Sequence
  Description of Artificial Sequence: Synthetic oligonucleotide
ugugggcaagauccagggg

SEQ ID NO: 1800855 - RNA, 19 nt, Artificial Sequence
  Description of Artificial Sequence: Synthetic oligonucleotide
cuggagauaaaccaacaaa

SEQ ID NO: 1800856 - RNA, 19 nt, Artificial Sequence
  Description of Artificial Sequence: Synthetic oligonucleotide
ggugcacuuaaugaauugg

SEQ ID NO: 1800857 - RNA, 19 nt, Artificial Sequence
  Description of Artificial Sequence: Synthetic oligonucleotide
uuguacagggcuucucaga

SEQ ID NO: 1800858 - RNA, 19 nt, Artificial Sequence
  Description of Artificial Sequence: Synthetic oligonucleotide
uccgaguaaucaugaaacu

SEQ ID NO: 1800859 - RNA, 19 nt, Artificial Sequence
  Description of Artificial Sequence: Synthetic oligonucleotide
acuaguaaacuuucaucua

SEQ ID NO: 1800860 - RNA, 19 nt, Artificial Sequence
  Description of Artificial Sequence: Synthetic oligonucleotide
caugcaugucuuuuagauc

SEQ ID NO: 1800861 - RNA, 19 nt, Artificial Sequence
  Description of Artificial Sequence: Synthetic oligonucleotide
gcuucaguguuacauauca

SEQ ID NO: 1800862 - RNA, 19 nt, Artificial Sequence
  Description of Artificial Sequence: Synthetic oligonucleotide
cauggcaaucuccgcaggg

SEQ ID NO: 1800863 - RNA, 19 nt, Artificial Sequence
  Description of Artificial Sequence: Synthetic oligonucleotide
uaaugaauugggcgacuuc

SEQ ID NO: 1800864 - RNA, 19 nt, Artificial Sequence
  Description of Artificial Sequence: Synthetic oligonucleotide
uggugcacuuaaugaauug

SEQ ID NO: 1800865 - RNA, 19 nt, Artificial Sequence
  Description of Artificial Sequence: Synthetic oligonucleotide
cucacuauggcuguguuaa

SEQ ID NO: 1800866 - RNA, 19 nt, Artificial Sequence
  Description of Artificial Sequence: Synthetic oligonucleotide
auccuggagauaaaccaac

SEQ ID NO: 1800867 - RNA, 19 nt, Artificial Sequence
  Description of Artificial Sequence: Synthetic oligonucleotide
uaggacuaguaaacuuuca

SEQ ID NO: 1800868 - RNA, 19 nt, Artificial Sequence
  Description of Artificial Sequence: Synthetic oligonucleotide
aguaggacuaguaaacuuu

SEQ ID NO: 1800869 - RNA, 19 nt, Artificial Sequence
  Description of Artificial Sequence: Synthetic oligonucleotide
gaaacugacuguuggcaaa

SEQ ID NO: 1800870 - RNA, 19 nt, Artificial Sequence
  Description of Artificial Sequence: Synthetic oligonucleotide
aucacguacaucccacagu

SEQ ID NO: 1800871 - RNA, 19 nt, Artificial Sequence
  Description of Artificial Sequence: Synthetic oligonucleotide
guauucaaaggcaaaccca

SEQ ID NO: 1800872 - RNA, 19 nt, Artificial Sequence
  Description of Artificial Sequence: Synthetic oligonucleotide
aguaaacuuucaucuacua

SEQ ID NO: 1800873 - RNA, 19 nt, Artificial Sequence
  Description of Artificial Sequence: Synthetic oligonucleotide
gauccaucuuguauuguac

SEQ ID NO: 1800874 - RNA, 19 nt, Artificial Sequence
  Description of Artificial Sequence: Synthetic oligonucleotide
aaucuuacuugaaacugua

SEQ ID NO: 1800875 - RNA, 19 nt, Artificial Sequence
  Description of Artificial Sequence: Synthetic oligonucleotide
cuguuuugcauggauugag

SEQ ID NO: 1800876 - RNA, 19 nt, Artificial Sequence
  Description of Artificial Sequence: Synthetic oligonucleotide
uagugagacauccgacugu

SEQ ID NO: 1800877 - RNA, 19 nt, Artificial Sequence
  Description of Artificial Sequence: Synthetic oligonucleotide
auacacugcucuccucagg

SEQ ID NO: 1800878 - RNA, 19 nt, Artificial Sequence
  Description of Artificial Sequence: Synthetic oligonucleotide
ugcauuagagaaugccuua

SEQ ID NO: 1800879 - RNA, 19 nt, Artificial Sequence
  Description of Artificial Sequence: Synthetic oligonucleotide
ugauguaugcuggggugag

SEQ ID NO: 1800880 - RNA, 19 nt, Artificial Sequence
  Description of Artificial Sequence: Synthetic oligonucleotide
ucaucuacuagugguuuuc

SEQ ID NO: 1800881 - RNA, 19 nt, Artificial Sequence
  Description of Artificial Sequence: Synthetic oligonucleotide
augucuuuuagaucccuua

SEQ ID NO: 1800882 - RNA, 19 nt, Artificial Sequence
  Description of Artificial Sequence: Synthetic oligonucleotide
ggacuaguaaacuuucauc

SEQ ID NO: 1800883 - RNA, 19 nt, Artificial Sequence
  Description of Artificial Sequence: Synthetic oligonucleotide
caguagacuguccauauaa

SEQ ID NO: 1800884 - RNA, 19 nt, Artificial Sequence
  Description of Artificial Sequence: Synthetic oligonucleotide
uuggaggguccaauaguga

SEQ ID NO: 1800885 - RNA, 19 nt, Artificial Sequence
  Description of Artificial Sequence: Synthetic oligonucleotide
acugucgcaguagacuguc

SEQ ID NO: 1800886 - RNA, 19 nt, Artificial Sequence
  Description of Artificial Sequence: Synthetic oligonucleotide
ugguuagaauuaucauuga

SEQ ID NO: 1800887 - RNA, 19 nt, Artificial Sequence
  Description of Artificial Sequence: Synthetic oligonucleotide
uuccuugcucccuaagaaa

SEQ ID NO: 1800888 - RNA, 19 nt, Artificial Sequence
  Description of Artificial Sequence: Synthetic oligonucleotide
ugucauugguuugcuuuag

SEQ ID NO: 1800889 - RNA, 19 nt, Artificial Sequence
  Description of Artificial Sequence: Synthetic oligonucleotide
uuccucaggccucaccaac

SEQ ID NO: 1800890 - RNA, 19 nt, Artificial Sequence
  Description of Artificial Sequence: Synthetic oligonucleotide
gauugaguugcuucugcua

SEQ ID NO: 1800891 - RNA, 19 nt, Artificial Sequence
  Description of Artificial Sequence: Synthetic oligonucleotide
uggcaaucuccgcagggcu

SEQ ID NO: 1800892 - RNA, 19 nt, Artificial Sequence
  Description of Artificial Sequence: Synthetic oligonucleotide
guagacuguccauauaacu

SEQ ID NO: 1800893 - RNA, 19 nt, Artificial Sequence
  Description of Artificial Sequence: Synthetic oligonucleotide
acaaagaaguaggacuagu

SEQ ID NO: 1800894 - RNA, 19 nt, Artificial Sequence
  Description of Artificial Sequence: Synthetic oligonucleotide
agacauccgacugucgcag

SEQ ID NO: 1800895 - RNA, 19 nt, Artificial Sequence
  Description of Artificial Sequence: Synthetic oligonucleotide
ucaccaacccaaccagccu

SEQ ID NO: 1800896 - RNA, 19 nt, Artificial Sequence
  Description of Artificial Sequence: Synthetic oligonucleotide
gagacauccgacugucgca

SEQ ID NO: 1800897 - RNA, 19 nt, Artificial Sequence
  Description of Artificial Sequence: Synthetic oligonucleotide
auaaugccgaggaugacau

SEQ ID NO: 1800898 - RNA, 19 nt, Artificial Sequence
  Description of Artificial Sequence: Synthetic oligonucleotide
cauauaacucaagacuaca

SEQ ID NO: 1800899 - RNA, 19 nt, Artificial Sequence
  Description of Artificial Sequence: Synthetic oligonucleotide
uuagaauaugaaggcccca

SEQ ID NO: 1800900 - RNA, 19 nt, Artificial Sequence
  Description of Artificial Sequence: Synthetic oligonucleotide
caguuugucuuccuugcuc

SEQ ID NO: 1800901 - RNA, 19 nt, Artificial Sequence
  Description of Artificial Sequence: Synthetic oligonucleotide
cuucaguguuacauaucac

SEQ ID NO: 1800902 - RNA, 19 nt, Artificial Sequence
  Description of Artificial Sequence: Synthetic oligonucleotide
aggccucaccaacccaacc

SEQ ID NO: 1800903 - RNA, 19 nt, Artificial Sequence
  Description of Artificial Sequence: Synthetic oligonucleotide
uuguauuguacagggcuuc

SEQ ID NO: 1800904 - RNA, 19 nt, Artificial Sequence
  Description of Artificial Sequence: Synthetic oligonucleotide
cauagcuguuuuguugagc

SEQ ID NO: 1800905 - RNA, 19 nt, Artificial Sequence
  Description of Artificial Sequence: Synthetic oligonucleotide
uagaucccuuaugucauug

SEQ ID NO: 1800906 - RNA, 19 nt, Artificial Sequence
  Description of Artificial Sequence: Synthetic oligonucleotide
cacagaauacacugcucuc

SEQ ID NO: 1800907 - RNA, 19 nt, Artificial Sequence
  Description of Artificial Sequence: Synthetic oligonucleotide
uucagauaaugccgaggau

SEQ ID NO: 1800908 - RNA, 19 nt, Artificial Sequence
  Description of Artificial Sequence: Synthetic oligonucleotide
caaagaaguaggacuagua

SEQ ID NO: 1800909 - RNA, 19 nt, Artificial Sequence
  Description of Artificial Sequence: Synthetic oligonucleotide
gaauuaucauugauggcua

SEQ ID NO: 1800910 - RNA, 19 nt, Artificial Sequence
  Description of Artificial Sequence: Synthetic oligonucleotide
acuacaggauccaucuugu

SEQ ID NO: 1800911 - RNA, 19 nt, Artificial Sequence
  Description of Artificial Sequence: Synthetic oligonucleotide
gguucaaggaacauggcaa

SEQ ID NO: 1800912 - RNA, 19 nt, Artificial Sequence
  Description of Artificial Sequence: Synthetic oligonucleotide
aggcacugaggcugucacc

SEQ ID NO: 1800913 - RNA, 19 nt, Artificial Sequence
  Description of Artificial Sequence: Synthetic oligonucleotide
uguauuguacagggcuucu

SEQ ID NO: 1800914 - RNA, 19 nt, Artificial Sequence
  Description of Artificial Sequence: Synthetic oligonucleotide
auuaucauugauggcuaaa

SEQ ID NO: 1800915 - RNA, 19 nt, Artificial Sequence
  Description of Artificial Sequence: Synthetic oligonucleotide
gcugcuggugcacuuaaug

SEQ ID NO: 1800916 - RNA, 19 nt, Artificial Sequence
  Description of Artificial Sequence: Synthetic oligonucleotide
gaaucuuacuugaaacugu

SEQ ID NO: 1800917 - RNA, 19 nt, Artificial Sequence
  Description of Artificial Sequence: Synthetic oligonucleotide
gugggcaagauccaggggu

SEQ ID NO: 1800918 - RNA, 19 nt, Artificial Sequence
  Description of Artificial Sequence: Synthetic oligonucleotide
guaggacuaguaaacuuuc

SEQ ID NO: 1800919 - RNA, 19 nt, Artificial Sequence
  Description of Artificial Sequence: Synthetic oligonucleotide
auuugcagacagaaagccu

SEQ ID NO: 1800920 - RNA, 19 nt, Artificial Sequence
  Description of Artificial Sequence: Synthetic oligonucleotide
gaucccuuaugucauuggu

SEQ ID NO: 1800921 - RNA, 19 nt, Artificial Sequence
  Description of Artificial Sequence: Synthetic oligonucleotide
cugcuggugcacuuaauga

SEQ ID NO: 1800922 - RNA, 19 nt, Artificial Sequence
  Description of Artificial Sequence: Synthetic oligonucleotide
aaauccacuuccagccaga

SEQ ID NO: 1800923 - RNA, 19 nt, Artificial Sequence
  Description of Artificial Sequence: Synthetic oligonucleotide
cuaugggaaucauaaugaa

SEQ ID NO: 1800924 - RNA, 19 nt, Artificial Sequence
  Description of Artificial Sequence: Synthetic oligonucleotide
aguaaucaugaaacugacu

SEQ ID NO: 1800925 - RNA, 19 nt, Artificial Sequence
  Description of Artificial Sequence: Synthetic oligonucleotide
cauggauugaguugcuucu

SEQ ID NO: 1800926 - RNA, 19 nt, Artificial Sequence
  Description of Artificial Sequence: Synthetic oligonucleotide
gacacaaggcuucaguguu

SEQ ID NO: 1800927 - RNA, 19 nt, Artificial Sequence
  Description of Artificial Sequence: Synthetic oligonucleotide
guuaggccaaauccacuuc

SEQ ID NO: 1800928 - RNA, 19 nt, Artificial Sequence
  Description of Artificial Sequence: Synthetic oligonucleotide
caucuacuagugguuuucc

SEQ ID NO: 1800929 - RNA, 19 nt, Artificial Sequence
  Description of Artificial Sequence: Synthetic oligonucleotide
cgaguaaucaugaaacuga

SEQ ID NO: 1800930 - RNA, 19 nt, Artificial Sequence
  Description of Artificial Sequence: Synthetic oligonucleotide
ccauauaacucaagacuac

SEQ ID NO: 1800931 - RNA, 19 nt, Artificial Sequence
  Description of Artificial Sequence: Synthetic oligonucleotide
gcauggauugaguugcuuc

SEQ ID NO: 1800932 - RNA, 19 nt, Artificial Sequence
  Description of Artificial Sequence: Synthetic oligonucleotide
ccuuaugucauugguuugc

SEQ ID NO: 1800933 - RNA, 19 nt, Artificial Sequence
  Description of Artificial Sequence: Synthetic oligonucleotide
aucaugaaacugacuguug

SEQ ID NO: 1800934 - RNA, 19 nt, Artificial Sequence
  Description of Artificial Sequence: Synthetic oligonucleotide
auauggucauugagccagc

SEQ ID NO: 1800935 - RNA, 19 nt, Artificial Sequence
  Description of Artificial Sequence: Synthetic oligonucleotide
ucucacuauggcuguguua

SEQ ID NO: 1800936 - RNA, 19 nt, Artificial Sequence
  Description of Artificial Sequence: Synthetic oligonucleotide
ccaauagugagacauccga

SEQ ID NO: 1800937 - RNA, 19 nt, Artificial Sequence
  Description of Artificial Sequence: Synthetic oligonucleotide
uccgacugucgcaguagac

SEQ ID NO: 1800938 - RNA, 19 nt, Artificial Sequence
  Description of Artificial Sequence: Synthetic oligonucleotide
ggaguuaggccaaauccac

SEQ ID NO: 1800939 - RNA, 19 nt, Artificial Sequence
  Description of Artificial Sequence: Synthetic oligonucleotide
ggucauugagccagcuugg

SEQ ID NO: 1800940 - RNA, 19 nt, Artificial Sequence
  Description of Artificial Sequence: Synthetic oligonucleotide
uacuagugguuuuccuuua

SEQ ID NO: 1800941 - RNA, 19 nt, Artificial Sequence
  Description of Artificial Sequence: Synthetic oligonucleotide
uucucacuauggcuguguu

SEQ ID NO: 1800942 - RNA, 19 nt, Artificial Sequence
  Description of Artificial Sequence: Synthetic oligonucleotide
agguuuugguacauaaguu

SEQ ID NO: 1800943 - RNA, 19 nt, Artificial Sequence
  Description of Artificial Sequence: Synthetic oligonucleotide
gguccgaguaaucaugaaa

SEQ ID NO: 1800944 - RNA, 19 nt, Artificial Sequence
  Description of Artificial Sequence: Synthetic oligonucleotide
gcgacuucagggcugauaa

SEQ ID NO: 1800945 - RNA, 19 nt, Artificial Sequence
  Description of Artificial Sequence: Synthetic oligonucleotide
aacucucuugugggcaaga

SEQ ID NO: 1800946 - RNA, 19 nt, Artificial Sequence
  Description of Artificial Sequence: Synthetic oligonucleotide
gggaaucauaaugaaagaa

SEQ ID NO: 1800947 - RNA, 19 nt, Artificial Sequence
  Description of Artificial Sequence: Synthetic oligonucleotide
uuaugucauugguuugcuu

SEQ ID NO: 1800948 - RNA, 19 nt, Artificial Sequence
  Description of Artificial Sequence: Synthetic oligonucleotide
uauggucauugagccagcu

SEQ ID NO: 1800949 - RNA, 19 nt, Artificial Sequence
  Description of Artificial Sequence: Synthetic oligonucleotide
ugaaggccccaaguggagu

SEQ ID NO: 1800950 - RNA, 19 nt, Artificial Sequence
  Description of Artificial Sequence: Synthetic oligonucleotide
cacuauggcuguguuaaca

SEQ ID NO: 1800951 - RNA, 19 nt, Artificial Sequence
  Description of Artificial Sequence: Synthetic oligonucleotide
cauccgacugucgcaguag

SEQ ID NO: 1800952 - RNA, 19 nt, Artificial Sequence
  Description of Artificial Sequence: Synthetic oligonucleotide
uuagaucccuuaugucauu

SEQ ID NO: 1800953 - RNA, 19 nt, Artificial Sequence
  Description of Artificial Sequence: Synthetic oligonucleotide
agcagacaugguccgagua

SEQ ID NO: 1800954 - RNA, 19 nt, Artificial Sequence
  Description of Artificial Sequence: Synthetic oligonucleotide
ccgaguaaucaugaaacug

SEQ ID NO: 1800955 - RNA, 19 nt, Artificial Sequence
  Description of Artificial Sequence: Synthetic oligonucleotide
auccgacugucgcaguaga

SEQ ID NO: 1800956 - RNA, 19 nt, Artificial Sequence
  Description of Artificial Sequence: Synthetic oligonucleotide
gguuaaagugaagcuuccc

SEQ ID NO: 1800957 - RNA, 19 nt, Artificial Sequence
  Description of Artificial Sequence: Synthetic oligonucleotide
ggauccaucuuguauugua

SEQ ID NO: 1800958 - RNA, 19 nt, Artificial Sequence
  Description of Artificial Sequence: Synthetic oligonucleotide
uacaucccacagucauagc

SEQ ID NO: 1800959 - RNA, 19 nt, Artificial Sequence
  Description of Artificial Sequence: Synthetic oligonucleotide
uggguucuaaagucaucuu

SEQ ID NO: 1800960 - RNA, 19 nt, Artificial Sequence
  Description of Artificial Sequence: Synthetic oligonucleotide
agacaugguccgaguaauc

SEQ ID NO: 1800961 - RNA, 19 nt, Artificial Sequence
  Description of Artificial Sequence: Synthetic oligonucleotide
cuguuuuguugagcugggg

SEQ ID NO: 1800962 - RNA, 19 nt, Artificial Sequence
  Description of Artificial Sequence: Synthetic oligonucleotide
ucaagacuacaggauccau

SEQ ID NO: 1800963 - RNA, 19 nt, Artificial Sequence
  Description of Artificial Sequence: Synthetic oligonucleotide
caguguuacauaucacgua

SEQ ID NO: 1800964 - RNA, 19 nt, Artificial Sequence
  Description of Artificial Sequence: Synthetic oligonucleotide
agggcugauaaagcagaca

SEQ ID NO: 1800965 - RNA, 19 nt, Artificial Sequence
  Description of Artificial Sequence: Synthetic oligonucleotide
ucgcaguagacuguccaua

SEQ ID NO: 1800966 - RNA, 19 nt, Artificial Sequence
  Description of Artificial Sequence: Synthetic oligonucleotide
ucacuauggcuguguuaac

SEQ ID NO: 1800967 - RNA, 19 nt, Artificial Sequence
  Description of Artificial Sequence: Synthetic oligonucleotide
ggagauaaaccaacaaacu

SEQ ID NO: 1800968 - RNA, 19 nt, Artificial Sequence
  Description of Artificial Sequence: Synthetic oligonucleotide
uugcauggauugaguugcu

SEQ ID NO: 1800969 - RNA, 19 nt, Artificial Sequence
  Description of Artificial Sequence: Synthetic oligonucleotide
acauccgacugucgcagua

SEQ ID NO: 1800970 - RNA, 19 nt, Artificial Sequence
  Description of Artificial Sequence: Synthetic oligonucleotide
augaaggccccaaguggag

SEQ ID NO: 1800971 - RNA, 19 nt, Artificial Sequence
  Description of Artificial Sequence: Synthetic oligonucleotide
cugcuugguuagaauuauc

SEQ ID NO: 1800972 - RNA, 19 nt, Artificial Sequence
  Description of Artificial Sequence: Synthetic oligonucleotide
cucccuaagaaagccuuca

SEQ ID NO: 1800973 - RNA, 19 nt, Artificial Sequence
  Description of Artificial Sequence: Synthetic oligonucleotide
gcuguuuuguugagcuggg

SEQ ID NO: 1800974 - RNA, 19 nt, Artificial Sequence
  Description of Artificial Sequence: Synthetic oligonucleotide
cuacuagugguuuuccuuu

SEQ ID NO: 1800975 - RNA, 19 nt, Artificial Sequence
  Description of Artificial Sequence: Synthetic oligonucleotide
ggccucaccaacccaacca

SEQ ID NO: 1800976 - RNA, 19 nt, Artificial Sequence
  Description of Artificial Sequence: Synthetic oligonucleotide
ccaauaauauggucauuga

SEQ ID NO: 1800977 - RNA, 19 nt, Artificial Sequence
  Description of Artificial Sequence: Synthetic oligonucleotide
ccccaaguggaguuaggcc

SEQ ID NO: 1800978 - RNA, 19 nt, Artificial Sequence
  Description of Artificial Sequence: Synthetic oligonucleotide
cucaagacuacaggaucca

SEQ ID NO: 1800979 - RNA, 19 nt, Artificial Sequence
  Description of Artificial Sequence: Synthetic oligonucleotide
agcugcuugguuagaauua

SEQ ID NO: 1800980 - RNA, 19 nt, Artificial Sequence
  Description of Artificial Sequence: Synthetic oligonucleotide
ugguccgaguaaucaugaa

SEQ ID NO: 1800981 - RNA, 19 nt, Artificial Sequence
  Description of Artificial Sequence: Synthetic oligonucleotide
gguuagaauuaucauugau

SEQ ID NO: 1800982 - RNA, 19 nt, Artificial Sequence
  Description of Artificial Sequence: Synthetic oligonucleotide
cuuguauuguacagggcuu

SEQ ID NO: 1800983 - RNA, 19 nt, Artificial Sequence
  Description of Artificial Sequence: Synthetic oligonucleotide
guguuacauaucacguaca

SEQ ID NO: 1800984 - RNA, 19 nt, Artificial Sequence
  Description of Artificial Sequence: Synthetic oligonucleotide
ucucaagguuuugguacau

SEQ ID NO: 1800985 - RNA, 19 nt, Artificial Sequence
  Description of Artificial Sequence: Synthetic oligonucleotide
guauuguacagggcuucuc

SEQ ID NO: 1800986 - RNA, 19 nt, Artificial Sequence
  Description of Artificial Sequence: Synthetic oligonucleotide
gacuguccauauaacucaa

SEQ ID NO: 1800987 - RNA, 19 nt, Artificial Sequence
  Description of Artificial Sequence: Synthetic oligonucleotide
cugucgcaguagacugucc

SEQ ID NO: 1800988 - RNA, 19 nt, Artificial Sequence
  Description of Artificial Sequence: Synthetic oligonucleotide
aaguggaguuaggccaaau

SEQ ID NO: 1800989 - RNA, 19 nt, Artificial Sequence
  Description of Artificial Sequence: Synthetic oligonucleotide
cucagaaauccagaagcua

SEQ ID NO: 1800990 - RNA, 19 nt, Artificial Sequence
  Description of Artificial Sequence: Synthetic oligonucleotide
cccauucagauaaugccga

SEQ ID NO: 1800991 - RNA, 19 nt, Artificial Sequence
  Description of Artificial Sequence: Synthetic oligonucleotide
gcagacaugguccgaguaa

SEQ ID NO: 1800992 - RNA, 19 nt, Artificial Sequence
  Description of Artificial Sequence: Synthetic oligonucleotide
caacaaacuccagugggua

SEQ ID NO: 1800993 - RNA, 19 nt, Artificial Sequence
  Description of Artificial Sequence: Synthetic oligonucleotide
caggccucaccaacccaac

SEQ ID NO: 1800994 - RNA, 19 nt, Artificial Sequence
  Description of Artificial Sequence: Synthetic oligonucleotide
gcaaucuccgcagggcugc

SEQ ID NO: 1800995 - RNA, 19 nt, Artificial Sequence
  Description of Artificial Sequence: Synthetic oligonucleotide
cgacugucgcaguagacug

SEQ ID NO: 1800996 - RNA, 19 nt, Artificial Sequence
  Description of Artificial Sequence: Synthetic oligonucleotide
ugggcgacuucagggcuga

SEQ ID NO: 1800997 - RNA, 19 nt, Artificial Sequence
  Description of Artificial Sequence: Synthetic oligonucleotide
aucuuacuugaaacuguau

SEQ ID NO: 1800998 - RNA, 19 nt, Artificial Sequence
  Description of Artificial Sequence: Synthetic oligonucleotide
ccauucagauaaugccgag

SEQ ID NO: 1800999 - RNA, 19 nt, Artificial Sequence
  Description of Artificial Sequence: Synthetic oligonucleotide
ggcugauaaagcagacaug

SEQ ID NO: 1801000 - RNA, 19 nt, Artificial Sequence
  Description of Artificial Sequence: Synthetic oligonucleotide
ggguccaauagugagacau

SEQ ID NO: 1801001 - RNA, 19 nt, Artificial Sequence
  Description of Artificial Sequence: Synthetic oligonucleotide
cagugauguaugcuggggu

SEQ ID NO: 1801002 - RNA, 19 nt, Artificial Sequence
  Description of Artificial Sequence: Synthetic oligonucleotide
gcuucccauucagauaaug

SEQ ID NO: 1801003 - RNA, 19 nt, Artificial Sequence
  Description of Artificial Sequence: Synthetic oligonucleotide
ggaaaccaaaaggaaguua

SEQ ID NO: 1801004 - RNA, 19 nt, Artificial Sequence
  Description of Artificial Sequence: Synthetic oligonucleotide
guagggacucuggcuguug

SEQ ID NO: 1801005 - RNA, 19 nt, Artificial Sequence
  Description of Artificial Sequence: Synthetic oligonucleotide
agacuacaggauccaucuu

SEQ ID NO: 1801006 - RNA, 19 nt, Artificial Sequence
  Description of Artificial Sequence: Synthetic oligonucleotide
gucauugagccagcuugga

SEQ ID NO: 1801007 - RNA, 19 nt, Artificial Sequence
  Description of Artificial Sequence: Synthetic oligonucleotide
guacagggcuucucagaaa

SEQ ID NO: 1801008 - RNA, 19 nt, Artificial Sequence
  Description of Artificial Sequence: Synthetic oligonucleotide
acucucuugugggcaagau

SEQ ID NO: 1801009 - RNA, 19 nt, Artificial Sequence
  Description of Artificial Sequence: Synthetic oligonucleotide
ggguucuaaagucaucuuu

SEQ ID NO: 1801010 - RNA, 19 nt, Artificial Sequence
  Description of Artificial Sequence: Synthetic oligonucleotide
ccucaccaacccaaccagc

SEQ ID NO: 1801011 - RNA, 19 nt, Artificial Sequence
  Description of Artificial Sequence: Synthetic oligonucleotide
gaguuaggccaaauccacu

SEQ ID NO: 1801012 - RNA, 19 nt, Artificial Sequence
  Description of Artificial Sequence: Synthetic oligonucleotide
cccuuaugucauugguuug

SEQ ID NO: 1801013 - RNA, 19 nt, Artificial Sequence
  Description of Artificial Sequence: Synthetic oligonucleotide
cacguacaucccacaguca

SEQ ID NO: 1801014 - RNA, 19 nt, Artificial Sequence
  Description of Artificial Sequence: Synthetic oligonucleotide
cuaccuguuuugcauggau

SEQ ID NO: 1801015 - RNA, 19 nt, Artificial Sequence
  Description of Artificial Sequence: Synthetic oligonucleotide
gguccaauagugagacauc

SEQ ID NO: 1801016 - RNA, 19 nt, Artificial Sequence
  Description of Artificial Sequence: Synthetic oligonucleotide
uaaugccgaggaugacauu

SEQ ID NO: 1801017 - RNA, 19 nt, Artificial Sequence
  Description of Artificial Sequence: Synthetic oligonucleotide
gcuuggaggguccaauagu

SEQ ID NO: 1801018 - RNA, 19 nt, Artificial Sequence
  Description of Artificial Sequence: Synthetic oligonucleotide
uuuaggcacugaggcuguc

SEQ ID NO: 1801019 - RNA, 19 nt, Artificial Sequence
  Description of Artificial Sequence: Synthetic oligonucleotide
cauuagagaaugccuuauu

SEQ ID NO: 1801020 - RNA, 19 nt, Artificial Sequence
  Description of Artificial Sequence: Synthetic oligonucleotide
caggguuaaagugaagcuu

SEQ ID NO: 1801021 - RNA, 19 nt, Artificial Sequence
  Description of Artificial Sequence: Synthetic oligonucleotide
cuuaaugaauugggcgacu

SEQ ID NO: 1801022 - RNA, 19 nt, Artificial Sequence
  Description of Artificial Sequence: Synthetic oligonucleotide
ccgaggaugacauuuguuu

SEQ ID NO: 1801023 - RNA, 19 nt, Artificial Sequence
  Description of Artificial Sequence: Synthetic oligonucleotide
gucgcaguagacuguccau

SEQ ID NO: 1801024 - RNA, 19 nt, Artificial Sequence
  Description of Artificial Sequence: Synthetic oligonucleotide
cacuucucacuauggcugu

SEQ ID NO: 1801025 - RNA, 19 nt, Artificial Sequence
  Description of Artificial Sequence: Synthetic oligonucleotide
cuggugcacuuaaugaauu

SEQ ID NO: 1801026 - RNA, 19 nt, Artificial Sequence
  Description of Artificial Sequence: Synthetic oligonucleotide
aguagggacucuggcuguu

SEQ ID NO: 1801027 - RNA, 19 nt, Artificial Sequence
  Description of Artificial Sequence: Synthetic oligonucleotide
cuacaggauccaucuugua

SEQ ID NO: 1801028 - RNA, 19 nt, Artificial Sequence
  Description of Artificial Sequence: Synthetic oligonucleotide
cagacaugguccgaguaau

SEQ ID NO: 1801029 - RNA, 19 nt, Artificial Sequence
  Description of Artificial Sequence: Synthetic oligonucleotide
cuucucacuauggcugugu

SEQ ID NO: 1801030 - RNA, 19 nt, Artificial Sequence
  Description of Artificial Sequence: Synthetic oligonucleotide
ccaaguggaguuaggccaa

SEQ ID NO: 1801031 - RNA, 19 nt, Artificial Sequence
  Description of Artificial Sequence: Synthetic oligonucleotide
gauguaugcuggggugagu

SEQ ID NO: 1801032 - RNA, 19 nt, Artificial Sequence
  Description of Artificial Sequence: Synthetic oligonucleotide
gacugucgcaguagacugu

SEQ ID NO: 1801033 - RNA, 19 nt, Artificial Sequence
  Description of Artificial Sequence: Synthetic oligonucleotide
gggguucaaggaacauggc

SEQ ID NO: 1801034 - RNA, 19 nt, Artificial Sequence
  Description of Artificial Sequence: Synthetic oligonucleotide
cucaagguuuugguacaua

SEQ ID NO: 1801035 - RNA, 19 nt, Artificial Sequence
  Description of Artificial Sequence: Synthetic oligonucleotide
gacauccgacugucgcagu

SEQ ID NO: 1801036 - RNA, 19 nt, Artificial Sequence
  Description of Artificial Sequence: Synthetic oligonucleotide
cagucauagcuguuuuguu

SEQ ID NO: 1801037 - RNA, 19 nt, Artificial Sequence
  Description of Artificial Sequence: Synthetic oligonucleotide
ccuguuuugcauggauuga

SEQ ID NO: 1801038 - RNA, 19 nt, Artificial Sequence
  Description of Artificial Sequence: Synthetic oligonucleotide
caguagggacucuggcugu

SEQ ID NO: 1801039 - RNA, 19 nt, Artificial Sequence
  Description of Artificial Sequence: Synthetic oligonucleotide
gcaguagacuguccauaua

SEQ ID NO: 1801040 - RNA, 19 nt, Artificial Sequence
  Description of Artificial Sequence: Synthetic oligonucleotide
cugcuaugggaaucauaau

SEQ ID NO: 1801041 - RNA, 19 nt, Artificial Sequence
  Description of Artificial Sequence: Synthetic oligonucleotide
gcauuagagaaugccuuau

SEQ ID NO: 1801042 - RNA, 19 nt, Artificial Sequence
  Description of Artificial Sequence: Synthetic oligonucleotide
gcuguugucuaaagaaguu

SEQ ID NO: 1801043 - RNA, 19 nt, Artificial Sequence
  Description of Artificial Sequence: Synthetic oligonucleotide
ggccccaaguggaguuagg

SEQ ID NO: 1801044 - RNA, 19 nt, Artificial Sequence
  Description of Artificial Sequence: Synthetic oligonucleotide
gcugcuugguuagaauuau

SEQ ID NO: 1801045 - RNA, 19 nt, Artificial Sequence
  Description of Artificial Sequence: Synthetic oligonucleotide
gcuaccuguuuugcaugga

SEQ ID NO: 1801046 - RNA, 19 nt, Artificial Sequence
  Description of Artificial Sequence: Synthetic oligonucleotide
agccagcuuggagggucca

SEQ ID NO: 1801047 - RNA, 19 nt, Artificial Sequence
  Description of Artificial Sequence: Synthetic oligonucleotide
ggcgacuucagggcugaua

SEQ ID NO: 1801048 - RNA, 19 nt, Artificial Sequence
  Description of Artificial Sequence: Synthetic oligonucleotide
ccgacugucgcaguagacu

SEQ ID NO: 1801049 - RNA, 19 nt, Artificial Sequence
  Description of Artificial Sequence: Synthetic oligonucleotide
agcuucccauucagauaau

SEQ ID NO: 1801050 - RNA, 19 nt, Artificial Sequence
  Description of Artificial Sequence: Synthetic oligonucleotide
ugcucuccucaggguuaaa

SEQ ID NO: 1801051 - RNA, 19 nt, Artificial Sequence
  Description of Artificial Sequence: Synthetic oligonucleotide
gggaaaccaaaaggaaguu

SEQ ID NO: 1801052 - RNA, 19 nt, Artificial Sequence
  Description of Artificial Sequence: Synthetic oligonucleotide
gguuugcuuuagauuuccu

SEQ ID NO: 1801053 - RNA, 19 nt, Artificial Sequence
  Description of Artificial Sequence: Synthetic oligonucleotide
cguacaucccacagucaua

SEQ ID NO: 1801054 - RNA, 19 nt, Artificial Sequence
  Description of Artificial Sequence: Synthetic oligonucleotide
cgaggaugacauuuguuuu

SEQ ID NO: 1801055 - RNA, 19 nt, Artificial Sequence
  Description of Artificial Sequence: Synthetic oligonucleotide
cgcaguagacuguccauau

SEQ ID NO: 1801056 - RNA, 19 nt, Artificial Sequence
  Description of Artificial Sequence: Synthetic oligonucleotide
caaucuccgcagggcugcu

SEQ ID NO: 1801057 - RNA, 19 nt, Artificial Sequence
  Description of Artificial Sequence: Synthetic oligonucleotide
cgacuucagggcugauaaa

SEQ ID NO: 1801058 - RNA, 19 nt, Artificial Sequence
  Description of Artificial Sequence: Synthetic oligonucleotide
ccagggguucaaggaacau

SEQ ID NO: 1801059 - RNA, 19 nt, Artificial Sequence
  Description of Artificial Sequence: Synthetic oligonucleotide
ccccagcugcuugguuaga

SEQ ID NO: 1801060 - RNA, 19 nt, Artificial Sequence
  Description of Artificial Sequence: Synthetic oligonucleotide
gggcgacuucagggcugau

SEQ ID NO: 1801061 - RNA, 19 nt, Artificial Sequence
  Description of Artificial Sequence: Synthetic oligonucleotide
uuaauugacaucaagaauc

SEQ ID NO: 1801062 - RNA, 19 nt, Artificial Sequence
  Description of Artificial Sequence: Synthetic oligonucleotide
aaaaucguuaaugagcggc

SEQ ID NO: 1801063 - RNA, 19 nt, Artificial Sequence
  Description of Artificial Sequence: Synthetic oligonucleotide
aucaaugaaagccuuauac

SEQ ID NO: 1801064 - RNA, 19 nt, Artificial Sequence
  Description of Artificial Sequence: Synthetic oligonucleotide
uuugguauaaauaauguau

SEQ ID NO: 1801065 - RNA, 19 nt, Artificial Sequence
  Description of Artificial Sequence: Synthetic oligonucleotide
uguuguaaaaugcaaauac

SEQ ID NO: 1801066 - RNA, 19 nt, Artificial Sequence
  Description of Artificial Sequence: Synthetic oligonucleotide
aauaauguauuuccaugac

SEQ ID NO: 1801067 - RNA, 19 nt, Artificial Sequence
  Description of Artificial Sequence: Synthetic oligonucleotide
caaauuacgcuuuaaaccc

SEQ ID NO: 1801068 - RNA, 19 nt, Artificial Sequence
  Description of Artificial Sequence: Synthetic oligonucleotide
aguacuuucucuuugaaga

SEQ ID NO: 1801069 - RNA, 19 nt, Artificial Sequence
  Description of Artificial Sequence: Synthetic oligonucleotide
ugcaagaucaaugaaagcc

SEQ ID NO: 1801070 - RNA, 19 nt, Artificial Sequence
  Description of Artificial Sequence: Synthetic oligonucleotide
aauacuuaaaggauaccac

SEQ ID NO: 1801071 - RNA, 19 nt, Artificial Sequence
  Description of Artificial Sequence: Synthetic oligonucleotide
aauacaaugugaggguugc

SEQ ID NO: 1801072 - RNA, 19 nt, Artificial Sequence
  Description of Artificial Sequence: Synthetic oligonucleotide
gauuaaaguaguaaugucc

SEQ ID NO: 1801073 - RNA, 19 nt, Artificial Sequence
  Description of Artificial Sequence: Synthetic oligonucleotide
gauacguuuaauuaguaga

SEQ ID NO: 1801074 - RNA, 19 nt, Artificial Sequence
  Description of Artificial Sequence: Synthetic oligonucleotide
uacucuuuugcauacauca

SEQ ID NO: 1801075 - RNA, 19 nt, Artificial Sequence
  Description of Artificial Sequence: Synthetic oligonucleotide
uaaaggauaccacuaaugu

SEQ ID NO: 1801076 - RNA, 19 nt, Artificial Sequence
  Description of Artificial Sequence: Synthetic oligonucleotide
aauuaccuguaguggaggc

SEQ ID NO: 1801077 - RNA, 19 nt, Artificial Sequence
  Description of Artificial Sequence: Synthetic oligonucleotide
uuaaaggauaccacuaaug

SEQ ID NO: 1801078 - RNA, 19 nt, Artificial Sequence
  Description of Artificial Sequence: Synthetic oligonucleotide
aguaguaauguccagauuu

SEQ ID NO: 1801079 - RNA, 19 nt, Artificial Sequence
  Description of Artificial Sequence: Synthetic oligonucleotide
uuuagauuaucuccugucc

SEQ ID NO: 1801080 - RNA, 19 nt, Artificial Sequence
  Description of Artificial Sequence: Synthetic oligonucleotide
ucuuuugcauacaucaacc

SEQ ID NO: 1801081 - RNA, 19 nt, Artificial Sequence
  Description of Artificial Sequence: Synthetic oligonucleotide
uuaauuaguagaguggccc

SEQ ID NO: 1801082 - RNA, 19 nt, Artificial Sequence
  Description of Artificial Sequence: Synthetic oligonucleotide
ugauuuaacagagaguuga

SEQ ID NO: 1801083 - RNA, 19 nt, Artificial Sequence
  Description of Artificial Sequence: Synthetic oligonucleotide
uacagauaugcccauaucu

SEQ ID NO: 1801084 - RNA, 19 nt, Artificial Sequence
  Description of Artificial Sequence: Synthetic oligonucleotide
ucugacaaagccacuauug

SEQ ID NO: 1801085 - RNA, 19 nt, Artificial Sequence
  Description of Artificial Sequence: Synthetic oligonucleotide
aaaggauaccacuaaugug

SEQ ID NO: 1801086 - RNA, 19 nt, Artificial Sequence
  Description of Artificial Sequence: Synthetic oligonucleotide
uguuggaaaugcaacauga

SEQ ID NO: 1801087 - RNA, 19 nt, Artificial Sequence
  Description of Artificial Sequence: Synthetic oligonucleotide
caugacaauacuuaaagga

SEQ ID NO: 1801088 - RNA, 19 nt, Artificial Sequence
  Description of Artificial Sequence: Synthetic oligonucleotide
aaaguaguaauguccagau

SEQ ID NO: 1801089 - RNA, 19 nt, Artificial Sequence
  Description of Artificial Sequence: Synthetic oligonucleotide
agaguugacggcuacaaug

SEQ ID NO: 1801090 - RNA, 19 nt, Artificial Sequence
  Description of Artificial Sequence: Synthetic oligonucleotide
uuuaauugacaucaagaau

SEQ ID NO: 1801091 - RNA, 19 nt, Artificial Sequence
  Description of Artificial Sequence: Synthetic oligonucleotide
gauacauaugugauuaaag

SEQ ID NO: 1801092 - RNA, 19 nt, Artificial Sequence
  Description of Artificial Sequence: Synthetic oligonucleotide
cacacugaauuuaacaccc

SEQ ID NO: 1801093 - RNA, 19 nt, Artificial Sequence
  Description of Artificial Sequence: Synthetic oligonucleotide
uaaggugucuagaauagac

SEQ ID NO: 1801094 - RNA, 19 nt, Artificial Sequence
  Description of Artificial Sequence: Synthetic oligonucleotide
augauaugcaauuaccugu

SEQ ID NO: 1801095 - RNA, 19 nt, Artificial Sequence
  Description of Artificial Sequence: Synthetic oligonucleotide
cauacaucaaccuugaucu

SEQ ID NO: 1801096 - RNA, 19 nt, Artificial Sequence
  Description of Artificial Sequence: Synthetic oligonucleotide
guucuuaccugcuauaaug

SEQ ID NO: 1801097 - RNA, 19 nt, Artificial Sequence
  Description of Artificial Sequence: Synthetic oligonucleotide
ucuuguuaccugcagaagu

SEQ ID NO: 1801098 - RNA, 19 nt, Artificial Sequence
  Description of Artificial Sequence: Synthetic oligonucleotide
agggugauuuaacagagag

SEQ ID NO: 1801099 - RNA, 19 nt, Artificial Sequence
  Description of Artificial Sequence: Synthetic oligonucleotide
uccaugauaugcaauuacc

SEQ ID NO: 1801100 - RNA, 19 nt, Artificial Sequence
  Description of Artificial Sequence: Synthetic oligonucleotide
uggcuuuuagauuaucucc

SEQ ID NO: 1801101 - RNA, 19 nt, Artificial Sequence
  Description of Artificial Sequence: Synthetic oligonucleotide
ucagggugauuuaacagag

SEQ ID NO: 1801102 - RNA, 19 nt, Artificial Sequence
  Description of Artificial Sequence: Synthetic oligonucleotide
ccaaauuacgcuuuaaacc

SEQ ID NO: 1801103 - RNA, 19 nt, Artificial Sequence
  Description of Artificial Sequence: Synthetic oligonucleotide
acguuuaauuaguagagug

SEQ ID NO: 1801104 - RNA, 19 nt, Artificial Sequence
  Description of Artificial Sequence: Synthetic oligonucleotide
auugcaagaucaaugaaag

SEQ ID NO: 1801105 - RNA, 19 nt, Artificial Sequence
  Description of Artificial Sequence: Synthetic oligonucleotide
auucacaggcaauuaacuc

SEQ ID NO: 1801106 - RNA, 19 nt, Artificial Sequence
  Description of Artificial Sequence: Synthetic oligonucleotide
uuuaauuaguagaguggcc

SEQ ID NO: 1801107 - RNA, 19 nt, Artificial Sequence
  Description of Artificial Sequence: Synthetic oligonucleotide
cuuaccugcuauaauguag

SEQ ID NO: 1801108 - RNA, 19 nt, Artificial Sequence
  Description of Artificial Sequence: Synthetic oligonucleotide
ugauguaauuaaauuauua

SEQ ID NO: 1801109 - RNA, 19 nt, Artificial Sequence
  Description of Artificial Sequence: Synthetic oligonucleotide
guaauguccagauuuacuc

SEQ ID NO: 1801110 - RNA, 19 nt, Artificial Sequence
  Description of Artificial Sequence: Synthetic oligonucleotide
gaugaauaaacacacugaa

SEQ ID NO: 1801111 - RNA, 19 nt, Artificial Sequence
  Description of Artificial Sequence: Synthetic oligonucleotide
cauaacucauggcagauac

SEQ ID NO: 1801112 - RNA, 19 nt, Artificial Sequence
  Description of Artificial Sequence: Synthetic oligonucleotide
ugauacguuuaauuaguag

SEQ ID NO: 1801113 - RNA, 19 nt, Artificial Sequence
  Description of Artificial Sequence: Synthetic oligonucleotide
aauagacugaaaauccuug

SEQ ID NO: 1801114 - RNA, 19 nt, Artificial Sequence
  Description of Artificial Sequence: Synthetic oligonucleotide
aaagccacuauuggcaguc

SEQ ID NO: 1801115 - RNA, 19 nt, Artificial Sequence
  Description of Artificial Sequence: Synthetic oligonucleotide
uguucugugaguacuuucu

SEQ ID NO: 1801116 - RNA, 19 nt, Artificial Sequence
  Description of Artificial Sequence: Synthetic oligonucleotide
uucaugaacgcuuccagcu

SEQ ID NO: 1801117 - RNA, 19 nt, Artificial Sequence
  Description of Artificial Sequence: Synthetic oligonucleotide
auacuuaaaggauaccacu

SEQ ID NO: 1801118 - RNA, 19 nt, Artificial Sequence
  Description of Artificial Sequence: Synthetic oligonucleotide
uuaacagagaguugacggc

SEQ ID NO: 1801119 - RNA, 19 nt, Artificial Sequence
  Description of Artificial Sequence: Synthetic oligonucleotide
uuauacagauguauuucug

SEQ ID NO: 1801120 - RNA, 19 nt, Artificial Sequence
  Description of Artificial Sequence: Synthetic oligonucleotide
uacauaugugauuaaagua

SEQ ID NO: 1801121 - RNA, 19 nt, Artificial Sequence
  Description of Artificial Sequence: Synthetic oligonucleotide
acugaagcaaacaaaagca

SEQ ID NO: 1801122 - RNA, 19 nt, Artificial Sequence
  Description of Artificial Sequence: Synthetic oligonucleotide
uuaacacccugguuguugg

SEQ ID NO: 1801123 - RNA, 19 nt, Artificial Sequence
  Description of Artificial Sequence: Synthetic oligonucleotide
uauuucuguucuuaccugc

SEQ ID NO: 1801124 - RNA, 19 nt, Artificial Sequence
  Description of Artificial Sequence: Synthetic oligonucleotide
uuaccugcuauaauguagu

SEQ ID NO: 1801125 - RNA, 19 nt, Artificial Sequence
  Description of Artificial Sequence: Synthetic oligonucleotide
acaaaagcauugcaagauc

SEQ ID NO: 1801126 - RNA, 19 nt, Artificial Sequence
  Description of Artificial Sequence: Synthetic oligonucleotide
ugaagauaaaguggcagcc

SEQ ID NO: 1801127 - RNA, 19 nt, Artificial Sequence
  Description of Artificial Sequence: Synthetic oligonucleotide
aggugucuagaauagacug

SEQ ID NO: 1801128 - RNA, 19 nt, Artificial Sequence
  Description of Artificial Sequence: Synthetic oligonucleotide
ugcaauuaccuguagugga

SEQ ID NO: 1801129 - RNA, 19 nt, Artificial Sequence
  Description of Artificial Sequence: Synthetic oligonucleotide
agcauugcaagaucaauga

SEQ ID NO: 1801130 - RNA, 19 nt, Artificial Sequence
  Description of Artificial Sequence: Synthetic oligonucleotide
auaauguaguuugugaugu

SEQ ID NO: 1801131 - RNA, 19 nt, Artificial Sequence
  Description of Artificial Sequence: Synthetic oligonucleotide
uuuugaacuggccaccagu

SEQ ID NO: 1801132 - RNA, 19 nt, Artificial Sequence
  Description of Artificial Sequence: Synthetic oligonucleotide
uuaaugagcggcuauuaau

SEQ ID NO: 1801133 - RNA, 19 nt, Artificial Sequence
  Description of Artificial Sequence: Synthetic oligonucleotide
uacgcuuuaaacccaagua

SEQ ID NO: 1801134 - RNA, 19 nt, Artificial Sequence
  Description of Artificial Sequence: Synthetic oligonucleotide
aauuaacuccuuguccuuc

SEQ ID NO: 1801135 - RNA, 19 nt, Artificial Sequence
  Description of Artificial Sequence: Synthetic oligonucleotide
auaauguauuuccaugaca

SEQ ID NO: 1801136 - RNA, 19 nt, Artificial Sequence
  Description of Artificial Sequence: Synthetic oligonucleotide
auacguuuaauuaguagag

SEQ ID NO: 1801137 - RNA, 19 nt, Artificial Sequence
  Description of Artificial Sequence: Synthetic oligonucleotide
uaaugagcggcuauuaauu

SEQ ID NO: 1801138 - RNA, 19 nt, Artificial Sequence
  Description of Artificial Sequence: Synthetic oligonucleotide
uugacagcagauucacagg

SEQ ID NO: 1801139 - RNA, 19 nt, Artificial Sequence
  Description of Artificial Sequence: Synthetic oligonucleotide
aguccuuucggccaaauua

SEQ ID NO: 1801140 - RNA, 19 nt, Artificial Sequence
  Description of Artificial Sequence: Synthetic oligonucleotide
agauucacaggcaauuaac

SEQ ID NO: 1801141 - RNA, 19 nt, Artificial Sequence
  Description of Artificial Sequence: Synthetic oligonucleotide
ugacaauacuuaaaggaua

SEQ ID NO: 1801142 - RNA, 19 nt, Artificial Sequence
  Description of Artificial Sequence: Synthetic oligonucleotide
gaaagccuuauacagaugu

SEQ ID NO: 1801143 - RNA, 19 nt, Artificial Sequence
  Description of Artificial Sequence: Synthetic oligonucleotide
ugcuuuugucaccauaacu

SEQ ID NO: 1801144 - RNA, 19 nt, Artificial Sequence
  Description of Artificial Sequence: Synthetic oligonucleotide
gaguacuuucucuuugaag

SEQ ID NO: 1801145 - RNA, 19 nt, Artificial Sequence
  Description of Artificial Sequence: Synthetic oligonucleotide
caaguaugaccucauuugc

SEQ ID NO: 1801146 - RNA, 19 nt, Artificial Sequence
  Description of Artificial Sequence: Synthetic oligonucleotide
uucuuaccugcuauaaugu

SEQ ID NO: 1801147 - RNA, 19 nt, Artificial Sequence
  Description of Artificial Sequence: Synthetic oligonucleotide
aauuaguagaguggcccuc

SEQ ID NO: 1801148 - RNA, 19 nt, Artificial Sequence
  Description of Artificial Sequence: Synthetic oligonucleotide
caaccuugaucucuguugg

SEQ ID NO: 1801149 - RNA, 19 nt, Artificial Sequence
  Description of Artificial Sequence: Synthetic oligonucleotide
uuacgcuuuaaacccaagu

SEQ ID NO: 1801150 - RNA, 19 nt, Artificial Sequence
  Description of Artificial Sequence: Synthetic oligonucleotide
uuccaugauaugcaauuac

SEQ ID NO: 1801151 - RNA, 19 nt, Artificial Sequence
  Description of Artificial Sequence: Synthetic oligonucleotide
uccuaaggugucuagaaua

SEQ ID NO: 1801152 - RNA, 19 nt, Artificial Sequence
  Description of Artificial Sequence: Synthetic oligonucleotide
aaauacaaugugaggguug

SEQ ID NO: 1801153 - RNA, 19 nt, Artificial Sequence
  Description of Artificial Sequence: Synthetic oligonucleotide
caucaagaaucauguagcc

SEQ ID NO: 1801154 - RNA, 19 nt, Artificial Sequence
  Description of Artificial Sequence: Synthetic oligonucleotide
uaauguccagauuuacucu

SEQ ID NO: 1801155 - RNA, 19 nt, Artificial Sequence
  Description of Artificial Sequence: Synthetic oligonucleotide
uaacucauggcagauacau

SEQ ID NO: 1801156 - RNA, 19 nt, Artificial Sequence
  Description of Artificial Sequence: Synthetic oligonucleotide
auagacugaaaauccuuga

SEQ ID NO: 1801157 - RNA, 19 nt, Artificial Sequence
  Description of Artificial Sequence: Synthetic oligonucleotide
ugauaugcaauuaccugua

SEQ ID NO: 1801158 - RNA, 19 nt, Artificial Sequence
  Description of Artificial Sequence: Synthetic oligonucleotide
auaccacuaaugugcacuc

SEQ ID NO: 1801159 - RNA, 19 nt, Artificial Sequence
  Description of Artificial Sequence: Synthetic oligonucleotide
aaugcaacaugagccagga

SEQ ID NO: 1801160 - RNA, 19 nt, Artificial Sequence
  Description of Artificial Sequence: Synthetic oligonucleotide
aggguugcuauauugcacu

SEQ ID NO: 1801161 - RNA, 19 nt, Artificial Sequence
  Description of Artificial Sequence: Synthetic oligonucleotide
uugacggcuacaaugucuc

SEQ ID NO: 1801162 - RNA, 19 nt, Artificial Sequence
  Description of Artificial Sequence: Synthetic oligonucleotide
auauugcacugguuguugg

SEQ ID NO: 1801163 - RNA, 19 nt, Artificial Sequence
  Description of Artificial Sequence: Synthetic oligonucleotide
uauauugcacugguuguug

SEQ ID NO: 1801164 - RNA, 19 nt, Artificial Sequence
  Description of Artificial Sequence: Synthetic oligonucleotide
auaugcaauuaccuguagu

SEQ ID NO: 1801165 - RNA, 19 nt, Artificial Sequence
  Description of Artificial Sequence: Synthetic oligonucleotide
agauuuacucuuuugcaua

SEQ ID NO: 1801166 - RNA, 19 nt, Artificial Sequence
  Description of Artificial Sequence: Synthetic oligonucleotide
cauugcaagaucaaugaaa

SEQ ID NO: 1801167 - RNA, 19 nt, Artificial Sequence
  Description of Artificial Sequence: Synthetic oligonucleotide
uaauuaguagaguggcccu

SEQ ID NO: 1801168 - RNA, 19 nt, Artificial Sequence
  Description of Artificial Sequence: Synthetic oligonucleotide
caauacuuaaaggauacca

SEQ ID NO: 1801169 - RNA, 19 nt, Artificial Sequence
  Description of Artificial Sequence: Synthetic oligonucleotide
acacugauacguuuaauua

SEQ ID NO: 1801170 - RNA, 19 nt, Artificial Sequence
  Description of Artificial Sequence: Synthetic oligonucleotide
ucuuuacucucaguaagug

SEQ ID NO: 1801171 - RNA, 19 nt, Artificial Sequence
  Description of Artificial Sequence: Synthetic oligonucleotide
acgcuuuaaacccaaguau

SEQ ID NO: 1801172 - RNA, 19 nt, Artificial Sequence
  Description of Artificial Sequence: Synthetic oligonucleotide
agauaugcccauaucuuuc

SEQ ID NO: 1801173 - RNA, 19 nt, Artificial Sequence
  Description of Artificial Sequence: Synthetic oligonucleotide
augcaauuaccuguagugg

SEQ ID NO: 1801174 - RNA, 19 nt, Artificial Sequence
  Description of Artificial Sequence: Synthetic oligonucleotide
uauuuccaugacaauacuu

SEQ ID NO: 1801175 - RNA, 19 nt, Artificial Sequence
  Description of Artificial Sequence: Synthetic oligonucleotide
aguaugaccucauuugcua

SEQ ID NO: 1801176 - RNA, 19 nt, Artificial Sequence
  Description of Artificial Sequence: Synthetic oligonucleotide
acaauacuuaaaggauacc

SEQ ID NO: 1801177 - RNA, 19 nt, Artificial Sequence
  Description of Artificial Sequence: Synthetic oligonucleotide
ucucgcucagcucuaacuc

SEQ ID NO: 1801178 - RNA, 19 nt, Artificial Sequence
  Description of Artificial Sequence: Synthetic oligonucleotide
ucauccaacucgcucucgc

SEQ ID NO: 1801179 - RNA, 19 nt, Artificial Sequence
  Description of Artificial Sequence: Synthetic oligonucleotide
aaagcauugcaagaucaau

SEQ ID NO: 1801180 - RNA, 19 nt, Artificial Sequence
  Description of Artificial Sequence: Synthetic oligonucleotide
aaugagcggcuauuaauuu

SEQ ID NO: 1801181 - RNA, 19 nt, Artificial Sequence
  Description of Artificial Sequence: Synthetic oligonucleotide
cucaguaagugcucugggc

SEQ ID NO: 1801182 - RNA, 19 nt, Artificial Sequence
  Description of Artificial Sequence: Synthetic oligonucleotide
uccuuucggccaaauuacg

SEQ ID NO: 1801183 - RNA, 19 nt, Artificial Sequence
  Description of Artificial Sequence: Synthetic oligonucleotide
acugauacguuuaauuagu

SEQ ID NO: 1801184 - RNA, 19 nt, Artificial Sequence
  Description of Artificial Sequence: Synthetic oligonucleotide
ugcuauaauguaguuugug

SEQ ID NO: 1801185 - RNA, 19 nt, Artificial Sequence
  Description of Artificial Sequence: Synthetic oligonucleotide
ucaugaacgcuuccagcug

SEQ ID NO: 1801186 - RNA, 19 nt, Artificial Sequence
  Description of Artificial Sequence: Synthetic oligonucleotide
caugggacuagagacacug

SEQ ID NO: 1801187 - RNA, 19 nt, Artificial Sequence
  Description of Artificial Sequence: Synthetic oligonucleotide
acuagagacacuguuguaa

SEQ ID NO: 1801188 - RNA, 19 nt, Artificial Sequence
  Description of Artificial Sequence: Synthetic oligonucleotide
aaaucguuaaugagcggcu

SEQ ID NO: 1801189 - RNA, 19 nt, Artificial Sequence
  Description of Artificial Sequence: Synthetic oligonucleotide
gauaugcaauuaccuguag

SEQ ID NO: 1801190 - RNA, 19 nt, Artificial Sequence
  Description of Artificial Sequence: Synthetic oligonucleotide
ucucucucucuccuggccc

SEQ ID NO: 1801191 - RNA, 19 nt, Artificial Sequence
  Description of Artificial Sequence: Synthetic oligonucleotide
gaaaauccuugacagcaga

SEQ ID NO: 1801192 - RNA, 19 nt, Artificial Sequence
  Description of Artificial Sequence: Synthetic oligonucleotide
acggcuacaaugucuccuc

SEQ ID NO: 1801193 - RNA, 19 nt, Artificial Sequence
  Description of Artificial Sequence: Synthetic oligonucleotide
uugcauacaucaaccuuga

SEQ ID NO: 1801194 - RNA, 19 nt, Artificial Sequence
  Description of Artificial Sequence: Synthetic oligonucleotide
ggcaauuaacuccuugucc

SEQ ID NO: 1801195 - RNA, 19 nt, Artificial Sequence
  Description of Artificial Sequence: Synthetic oligonucleotide
auuaucuccugucccaaaa

SEQ ID NO: 1801196 - RNA, 19 nt, Artificial Sequence
  Description of Artificial Sequence: Synthetic oligonucleotide
augacaauacuuaaaggau

SEQ ID NO: 1801197 - RNA, 19 nt, Artificial Sequence
  Description of Artificial Sequence: Synthetic oligonucleotide
auuuucucggucuacucuu

SEQ ID NO: 1801198 - RNA, 19 nt, Artificial Sequence
  Description of Artificial Sequence: Synthetic oligonucleotide
uggcagauacauaugugau

SEQ ID NO: 1801199 - RNA, 19 nt, Artificial Sequence
  Description of Artificial Sequence: Synthetic oligonucleotide
guaagggcacagcuaaagc

SEQ ID NO: 1801200 - RNA, 19 nt, Artificial Sequence
  Description of Artificial Sequence: Synthetic oligonucleotide
gauaccacuaaugugcacu

SEQ ID NO: 1801201 - RNA, 19 nt, Artificial Sequence
  Description of Artificial Sequence: Synthetic oligonucleotide
ucucggucuacucuuguua

SEQ ID NO: 1801202 - RNA, 19 nt, Artificial Sequence
  Description of Artificial Sequence: Synthetic oligonucleotide
acagagaguugacggcuac

SEQ ID NO: 1801203 - RNA, 19 nt, Artificial Sequence
  Description of Artificial Sequence: Synthetic oligonucleotide
aaggugucuagaauagacu

SEQ ID NO: 1801204 - RNA, 19 nt, Artificial Sequence
  Description of Artificial Sequence: Synthetic oligonucleotide
gaggcuguagcccuacuga

SEQ ID NO: 1801205 - RNA, 19 nt, Artificial Sequence
  Description of Artificial Sequence: Synthetic oligonucleotide
uguucuuaccugcuauaau

SEQ ID NO: 1801206 - RNA, 19 nt, Artificial Sequence
  Description of Artificial Sequence: Synthetic oligonucleotide
gcuauaauguaguuuguga

SEQ ID NO: 1801207 - RNA, 19 nt, Artificial Sequence
  Description of Artificial Sequence: Synthetic oligonucleotide
acaaugugaggguugcuau

SEQ ID NO: 1801208 - RNA, 19 nt, Artificial Sequence
  Description of Artificial Sequence: Synthetic oligonucleotide
uuaccugcagaaguucuug

SEQ ID NO: 1801209 - RNA, 19 nt, Artificial Sequence
  Description of Artificial Sequence: Synthetic oligonucleotide
gccauauuccaugauaugc

SEQ ID NO: 1801210 - RNA, 19 nt, Artificial Sequence
  Description of Artificial Sequence: Synthetic oligonucleotide
aaauccuugacagcagauu

SEQ ID NO: 1801211 - RNA, 19 nt, Artificial Sequence
  Description of Artificial Sequence: Synthetic oligonucleotide
uuacagauaugcccauauc

SEQ ID NO: 1801212 - RNA, 19 nt, Artificial Sequence
  Description of Artificial Sequence: Synthetic oligonucleotide
agagacacuguuguaaaau

SEQ ID NO: 1801213 - RNA, 19 nt, Artificial Sequence
  Description of Artificial Sequence: Synthetic oligonucleotide
aaauuacgcuuuaaaccca

SEQ ID NO: 1801214 - RNA, 19 nt, Artificial Sequence
  Description of Artificial Sequence: Synthetic oligonucleotide
cacugaauuuaacacccug

SEQ ID NO: 1801215 - RNA, 19 nt, Artificial Sequence
  Description of Artificial Sequence: Synthetic oligonucleotide
cuguaguggaggcuguagc

SEQ ID NO: 1801216 - RNA, 19 nt, Artificial Sequence
  Description of Artificial Sequence: Synthetic oligonucleotide
agaauagacugaaaauccu

SEQ ID NO: 1801217 - RNA, 19 nt, Artificial Sequence
  Description of Artificial Sequence: Synthetic oligonucleotide
gauuuaacagagaguugac

SEQ ID NO: 1801218 - RNA, 19 nt, Artificial Sequence
  Description of Artificial Sequence: Synthetic oligonucleotide
uacaaugugaggguugcua

SEQ ID NO: 1801219 - RNA, 19 nt, Artificial Sequence
  Description of Artificial Sequence: Synthetic oligonucleotide
agauacauaugugauuaaa

SEQ ID NO: 1801220 - RNA, 19 nt, Artificial Sequence
  Description of Artificial Sequence: Synthetic oligonucleotide
ugccaugggacuagagaca

SEQ ID NO: 1801221 - RNA, 19 nt, Artificial Sequence
  Description of Artificial Sequence: Synthetic oligonucleotide
gcuguagcccuacugaagc

SEQ ID NO: 1801222 - RNA, 19 nt, Artificial Sequence
  Description of Artificial Sequence: Synthetic oligonucleotide
uguccuucaugaacgcuuc

SEQ ID NO: 1801223 - RNA, 19 nt, Artificial Sequence
  Description of Artificial Sequence: Synthetic oligonucleotide
cucggucuacucuuguuac

SEQ ID NO: 1801224 - RNA, 19 nt, Artificial Sequence
  Description of Artificial Sequence: Synthetic oligonucleotide
uacguuuaauuaguagagu

SEQ ID NO: 1801225 - RNA, 19 nt, Artificial Sequence
  Description of Artificial Sequence: Synthetic oligonucleotide
ggaaaugcaacaugagcca

SEQ ID NO: 1801226 - RNA, 19 nt, Artificial Sequence
  Description of Artificial Sequence: Synthetic oligonucleotide
caauuaccuguaguggagg

SEQ ID NO: 1801227 - RNA, 19 nt, Artificial Sequence
  Description of Artificial Sequence: Synthetic oligonucleotide
acuaaugugcacucucauu

SEQ ID NO: 1801228 - RNA, 19 nt, Artificial Sequence
  Description of Artificial Sequence: Synthetic oligonucleotide
guagccauauuccaugaua

SEQ ID NO: 1801229 - RNA, 19 nt, Artificial Sequence
  Description of Artificial Sequence: Synthetic oligonucleotide
aauuacgcuuuaaacccaa

SEQ ID NO: 1801230 - RNA, 19 nt, Artificial Sequence
  Description of Artificial Sequence: Synthetic oligonucleotide
aaaauccuugacagcagau

SEQ ID NO: 1801231 - RNA, 19 nt, Artificial Sequence
  Description of Artificial Sequence: Synthetic oligonucleotide
ucuuaccugcuauaaugua

SEQ ID NO: 1801232 - RNA, 19 nt, Artificial Sequence
  Description of Artificial Sequence: Synthetic oligonucleotide
aagaaucauguagccauau

SEQ ID NO: 1801233 - RNA, 19 nt, Artificial Sequence
  Description of Artificial Sequence: Synthetic oligonucleotide
agucucaaggcacgcucag

SEQ ID NO: 1801234 - RNA, 19 nt, Artificial Sequence
  Description of Artificial Sequence: Synthetic oligonucleotide
cuccucuuacagauaugcc

SEQ ID NO: 1801235 - RNA, 19 nt, Artificial Sequence
  Description of Artificial Sequence: Synthetic oligonucleotide
gguaagggcacagcuaaag

SEQ ID NO: 1801236 - RNA, 19 nt, Artificial Sequence
  Description of Artificial Sequence: Synthetic oligonucleotide
ucuguucuuaccugcuaua

SEQ ID NO: 1801237 - RNA, 19 nt, Artificial Sequence
  Description of Artificial Sequence: Synthetic oligonucleotide
aaguggcagccuccauaac

SEQ ID NO: 1801238 - RNA, 19 nt, Artificial Sequence
  Description of Artificial Sequence: Synthetic oligonucleotide
aaguaguaauguccagauu

SEQ ID NO: 1801239 - RNA, 19 nt, Artificial Sequence
  Description of Artificial Sequence: Synthetic oligonucleotide
cucauggcagauacauaug

SEQ ID NO: 1801240 - RNA, 19 nt, Artificial Sequence
  Description of Artificial Sequence: Synthetic oligonucleotide
uuucuguucuuaccugcua

SEQ ID NO: 1801241 - RNA, 19 nt, Artificial Sequence
  Description of Artificial Sequence: Synthetic oligonucleotide
ucggucuacucuuguuacc

SEQ ID NO: 1801242 - RNA, 19 nt, Artificial Sequence
  Description of Artificial Sequence: Synthetic oligonucleotide
uguagcccuacugaagcaa

SEQ ID NO: 1801243 - RNA, 19 nt, Artificial Sequence
  Description of Artificial Sequence: Synthetic oligonucleotide
gauucacaggcaauuaacu

SEQ ID NO: 1801244 - RNA, 19 nt, Artificial Sequence
  Description of Artificial Sequence: Synthetic oligonucleotide
uaguagaguggcccucucu

SEQ ID NO: 1801245 - RNA, 19 nt, Artificial Sequence
  Description of Artificial Sequence: Synthetic oligonucleotide
cauaugugauuaaaguagu

SEQ ID NO: 1801246 - RNA, 19 nt, Artificial Sequence
  Description of Artificial Sequence: Synthetic oligonucleotide
acagauaugcccauaucuu

SEQ ID NO: 1801247 - RNA, 19 nt, Artificial Sequence
  Description of Artificial Sequence: Synthetic oligonucleotide
auuaguagaguggcccucu

SEQ ID NO: 1801248 - RNA, 19 nt, Artificial Sequence
  Description of Artificial Sequence: Synthetic oligonucleotide
agagaguugacggcuacaa

SEQ ID NO: 1801249 - RNA, 19 nt, Artificial Sequence
  Description of Artificial Sequence: Synthetic oligonucleotide
aucguuaaugagcggcuau

SEQ ID NO: 1801250 - RNA, 19 nt, Artificial Sequence
  Description of Artificial Sequence: Synthetic oligonucleotide
guccagauuuacucuuuug

SEQ ID NO: 1801251 - RNA, 19 nt, Artificial Sequence
  Description of Artificial Sequence: Synthetic oligonucleotide
gaggguugcuauauugcac

SEQ ID NO: 1801252 - RNA, 19 nt, Artificial Sequence
  Description of Artificial Sequence: Synthetic oligonucleotide
uggcaccacacugauacgu

SEQ ID NO: 1801253 - RNA, 19 nt, Artificial Sequence
  Description of Artificial Sequence: Synthetic oligonucleotide
cuuuugguaagggcacagc

SEQ ID NO: 1801254 - RNA, 19 nt, Artificial Sequence
  Description of Artificial Sequence: Synthetic oligonucleotide
augagcggcuauuaauuuu

SEQ ID NO: 1801255 - RNA, 19 nt, Artificial Sequence
  Description of Artificial Sequence: Synthetic oligonucleotide
agcagauucacaggcaauu

SEQ ID NO: 1801256 - RNA, 19 nt, Artificial Sequence
  Description of Artificial Sequence: Synthetic oligonucleotide
auuaccuguaguggaggcu

SEQ ID NO: 1801257 - RNA, 19 nt, Artificial Sequence
  Description of Artificial Sequence: Synthetic oligonucleotide
ugucuagaauagacugaaa

SEQ ID NO: 1801258 - RNA, 19 nt, Artificial Sequence
  Description of Artificial Sequence: Synthetic oligonucleotide
gaacgcuuccagcugaggu

SEQ ID NO: 1801259 - RNA, 19 nt, Artificial Sequence
  Description of Artificial Sequence: Synthetic oligonucleotide
uguccagauuuacucuuuu

SEQ ID NO: 1801260 - RNA, 19 nt, Artificial Sequence
  Description of Artificial Sequence: Synthetic oligonucleotide
gugucuagaauagacugaa

SEQ ID NO: 1801261 - RNA, 19 nt, Artificial Sequence
  Description of Artificial Sequence: Synthetic oligonucleotide
cucucucucucuccuggcc

SEQ ID NO: 1801262 - RNA, 19 nt, Artificial Sequence
  Description of Artificial Sequence: Synthetic oligonucleotide
uucugccaugggacuagag

SEQ ID NO: 1801263 - RNA, 19 nt, Artificial Sequence
  Description of Artificial Sequence: Synthetic oligonucleotide
cuuucggccaaauuacgcu

SEQ ID NO: 1801264 - RNA, 19 nt, Artificial Sequence
  Description of Artificial Sequence: Synthetic oligonucleotide
gcaaacaaaagcauugcaa

SEQ ID NO: 1801265 - RNA, 19 nt, Artificial Sequence
  Description of Artificial Sequence: Synthetic oligonucleotide
gguugcuauauugcacugg

SEQ ID NO: 1801266 - RNA, 19 nt, Artificial Sequence
  Description of Artificial Sequence: Synthetic oligonucleotide
uacucucaguaagugcucu

SEQ ID NO: 1801267 - RNA, 19 nt, Artificial Sequence
  Description of Artificial Sequence: Synthetic oligonucleotide
uagcccuacugaagcaaac

SEQ ID NO: 1801268 - RNA, 19 nt, Artificial Sequence
  Description of Artificial Sequence: Synthetic oligonucleotide
gcaauuaccuguaguggag

SEQ ID NO: 1801269 - RNA, 19 nt, Artificial Sequence
  Description of Artificial Sequence: Synthetic oligonucleotide
ccuuauacagauguauuuc

SEQ ID NO: 1801270 - RNA, 19 nt, Artificial Sequence
  Description of Artificial Sequence: Synthetic oligonucleotide
aguaagugcucugggcuga

SEQ ID NO: 1801271 - RNA, 19 nt, Artificial Sequence
  Description of Artificial Sequence: Synthetic oligonucleotide
aaucguuaaugagcggcua

SEQ ID NO: 1801272 - RNA, 19 nt, Artificial Sequence
  Description of Artificial Sequence: Synthetic oligonucleotide
uucggccaaauuacgcuuu

SEQ ID NO: 1801273 - RNA, 19 nt, Artificial Sequence
  Description of Artificial Sequence: Synthetic oligonucleotide
gugauuuaacagagaguug

SEQ ID NO: 1801274 - RNA, 19 nt, Artificial Sequence
  Description of Artificial Sequence: Synthetic oligonucleotide
ccuuucggccaaauuacgc

SEQ ID NO: 1801275 - RNA, 19 nt, Artificial Sequence
  Description of Artificial Sequence: Synthetic oligonucleotide
uggugauggcuuuuagauu

SEQ ID NO: 1801276 - RNA, 19 nt, Artificial Sequence
  Description of Artificial Sequence: Synthetic oligonucleotide
gaguugacggcuacaaugu

SEQ ID NO: 1801277 - RNA, 19 nt, Artificial Sequence
  Description of Artificial Sequence: Synthetic oligonucleotide
ccucuuacagauaugccca

SEQ ID NO: 1801278 - RNA, 19 nt, Artificial Sequence
  Description of Artificial Sequence: Synthetic oligonucleotide
accucauuugcuacuacau

SEQ ID NO: 1801279 - RNA, 19 nt, Artificial Sequence
  Description of Artificial Sequence: Synthetic oligonucleotide
cuuacagauaugcccauau

SEQ ID NO: 1801280 - RNA, 19 nt, Artificial Sequence
  Description of Artificial Sequence: Synthetic oligonucleotide
cucuuguuaccugcagaag

SEQ ID NO: 1801281 - RNA, 19 nt, Artificial Sequence
  Description of Artificial Sequence: Synthetic oligonucleotide
cacacugauacguuuaauu

SEQ ID NO: 1801282 - RNA, 19 nt, Artificial Sequence
  Description of Artificial Sequence: Synthetic oligonucleotide
cagauuuacucuuuugcau

SEQ ID NO: 1801283 - RNA, 19 nt, Artificial Sequence
  Description of Artificial Sequence: Synthetic oligonucleotide
gaagauaaaguggcagccu

SEQ ID NO: 1801284 - RNA, 19 nt, Artificial Sequence
  Description of Artificial Sequence: Synthetic oligonucleotide
gauuaucuccugucccaaa

SEQ ID NO: 1801285 - RNA, 19 nt, Artificial Sequence
  Description of Artificial Sequence: Synthetic oligonucleotide
gggacuagagacacuguug

SEQ ID NO: 1801286 - RNA, 19 nt, Artificial Sequence
  Description of Artificial Sequence: Synthetic oligonucleotide
ccagauauuuaauugacau

SEQ ID NO: 1801287 - RNA, 19 nt, Artificial Sequence
  Description of Artificial Sequence: Synthetic oligonucleotide
augcaacaugagccaggac

SEQ ID NO: 1801288 - RNA, 19 nt, Artificial Sequence
  Description of Artificial Sequence: Synthetic oligonucleotide
gugcuucaguccuuucggc

SEQ ID NO: 1801289 - RNA, 19 nt, Artificial Sequence
  Description of Artificial Sequence: Synthetic oligonucleotide
gaauagacugaaaauccuu

SEQ ID NO: 1801290 - RNA, 19 nt, Artificial Sequence
  Description of Artificial Sequence: Synthetic oligonucleotide
cuuuugcauacaucaaccu

SEQ ID NO: 1801291 - RNA, 19 nt, Artificial Sequence
  Description of Artificial Sequence: Synthetic oligonucleotide
gcuaaagccucuuuacucu

SEQ ID NO: 1801292 - RNA, 19 nt, Artificial Sequence
  Description of Artificial Sequence: Synthetic oligonucleotide
agcccuacugaagcaaaca

SEQ ID NO: 1801293 - RNA, 19 nt, Artificial Sequence
  Description of Artificial Sequence: Synthetic oligonucleotide
ucguuaaugagcggcuauu

SEQ ID NO: 1801294 - RNA, 19 nt, Artificial Sequence
  Description of Artificial Sequence: Synthetic oligonucleotide
ggacuagagacacuguugu

SEQ ID NO: 1801295 - RNA, 19 nt, Artificial Sequence
  Description of Artificial Sequence: Synthetic oligonucleotide
cuuaaaggauaccacuaau

SEQ ID NO: 1801296 - RNA, 19 nt, Artificial Sequence
  Description of Artificial Sequence: Synthetic oligonucleotide
auuacgcuuuaaacccaag

SEQ ID NO: 1801297 - RNA, 19 nt, Artificial Sequence
  Description of Artificial Sequence: Synthetic oligonucleotide
ugacggcuacaaugucucc

SEQ ID NO: 1801298 - RNA, 19 nt, Artificial Sequence
  Description of Artificial Sequence: Synthetic oligonucleotide
gcugagguaaaaccugcuc

SEQ ID NO: 1801299 - RNA, 19 nt, Artificial Sequence
  Description of Artificial Sequence: Synthetic oligonucleotide
uucucggucuacucuuguu

SEQ ID NO: 1801300 - RNA, 19 nt, Artificial Sequence
  Description of Artificial Sequence: Synthetic oligonucleotide
ucuuacagauaugcccaua

SEQ ID NO: 1801301 - RNA, 19 nt, Artificial Sequence
  Description of Artificial Sequence: Synthetic oligonucleotide
ucggccaaauuacgcuuua

SEQ ID NO: 1801302 - RNA, 19 nt, Artificial Sequence
  Description of Artificial Sequence: Synthetic oligonucleotide
ggccaaauuacgcuuuaaa

SEQ ID NO: 1801303 - RNA, 19 nt, Artificial Sequence
  Description of Artificial Sequence: Synthetic oligonucleotide
uaccuguaguggaggcugu

SEQ ID NO: 1801304 - RNA, 19 nt, Artificial Sequence
  Description of Artificial Sequence: Synthetic oligonucleotide
guugacggcuacaaugucu

SEQ ID NO: 1801305 - RNA, 19 nt, Artificial Sequence
  Description of Artificial Sequence: Synthetic oligonucleotide
aacagagaguugacggcua

SEQ ID NO: 1801306 - RNA, 19 nt, Artificial Sequence
  Description of Artificial Sequence: Synthetic oligonucleotide
gcuauauugcacugguugu

SEQ ID NO: 1801307 - RNA, 19 nt, Artificial Sequence
  Description of Artificial Sequence: Synthetic oligonucleotide
uggcccucucucucucucc

SEQ ID NO: 1801308 - RNA, 19 nt, Artificial Sequence
  Description of Artificial Sequence: Synthetic oligonucleotide
cugauacguuuaauuagua

SEQ ID NO: 1801309 - RNA, 19 nt, Artificial Sequence
  Description of Artificial Sequence: Synthetic oligonucleotide
agccacuauuggcagucau

SEQ ID NO: 1801310 - RNA, 19 nt, Artificial Sequence
  Description of Artificial Sequence: Synthetic oligonucleotide
gaaggcuggucuggcacca

SEQ ID NO: 1801311 - RNA, 19 nt, Artificial Sequence
  Description of Artificial Sequence: Synthetic oligonucleotide
gacuagagacacuguugua

SEQ ID NO: 1801312 - RNA, 19 nt, Artificial Sequence
  Description of Artificial Sequence: Synthetic oligonucleotide
gacggcuacaaugucuccu

SEQ ID NO: 1801313 - RNA, 19 nt, Artificial Sequence
  Description of Artificial Sequence: Synthetic oligonucleotide
ugcauacaucaaccuugau

SEQ ID NO: 1801314 - RNA, 19 nt, Artificial Sequence
  Description of Artificial Sequence: Synthetic oligonucleotide
uaccacuaaugugcacucu

SEQ ID NO: 1801315 - RNA, 19 nt, Artificial Sequence
  Description of Artificial Sequence: Synthetic oligonucleotide
acgcuuccagcugagguaa

SEQ ID NO: 1801316 - RNA, 19 nt, Artificial Sequence
  Description of Artificial Sequence: Synthetic oligonucleotide
cuguucuuaccugcuauaa

SEQ ID NO: 1801317 - RNA, 19 nt, Artificial Sequence
  Description of Artificial Sequence: Synthetic oligonucleotide
ggcuuuuagauuaucuccu

SEQ ID NO: 1801318 - RNA, 19 nt, Artificial Sequence
  Description of Artificial Sequence: Synthetic oligonucleotide
uaccugcuauaauguaguu

SEQ ID NO: 1801319 - RNA, 19 nt, Artificial Sequence
  Description of Artificial Sequence: Synthetic oligonucleotide
cccucucucucucuccugg

SEQ ID NO: 1801320 - RNA, 19 nt, Artificial Sequence
  Description of Artificial Sequence: Synthetic oligonucleotide
ggguugcuauauugcacug

SEQ ID NO: 1801321 - RNA, 19 nt, Artificial Sequence
  Description of Artificial Sequence: Synthetic oligonucleotide
caaugugaggguugcuaua

SEQ ID NO: 1801322 - RNA, 19 nt, Artificial Sequence
  Description of Artificial Sequence: Synthetic oligonucleotide
cagauaugcccauaucuuu

SEQ ID NO: 1801323 - RNA, 19 nt, Artificial Sequence
  Description of Artificial Sequence: Synthetic oligonucleotide
ccagauguuaugcagugcu

SEQ ID NO: 1801324 - RNA, 19 nt, Artificial Sequence
  Description of Artificial Sequence: Synthetic oligonucleotide
ccaugauaugcaauuaccu

SEQ ID NO: 1801325 - RNA, 19 nt, Artificial Sequence
  Description of Artificial Sequence: Synthetic oligonucleotide
gccacuauuggcagucaug

SEQ ID NO: 1801326 - RNA, 19 nt, Artificial Sequence
  Description of Artificial Sequence: Synthetic oligonucleotide
gccaugggacuagagacac

SEQ ID NO: 1801327 - RNA, 19 nt, Artificial Sequence
  Description of Artificial Sequence: Synthetic oligonucleotide
gguuguuggugacuggccu

SEQ ID NO: 1801328 - RNA, 19 nt, Artificial Sequence
  Description of Artificial Sequence: Synthetic oligonucleotide
guagaguggcccucucucu

SEQ ID NO: 1801329 - RNA, 19 nt, Artificial Sequence
  Description of Artificial Sequence: Synthetic oligonucleotide
agcugagguaaaaccugcu

SEQ ID NO: 1801330 - RNA, 19 nt, Artificial Sequence
  Description of Artificial Sequence: Synthetic oligonucleotide
aguggcccucucucucucu

SEQ ID NO: 1801331 - RNA, 19 nt, Artificial Sequence
  Description of Artificial Sequence: Synthetic oligonucleotide
cagggugauuuaacagaga

SEQ ID NO: 1801332 - RNA, 19 nt, Artificial Sequence
  Description of Artificial Sequence: Synthetic oligonucleotide
auacaaugugaggguugcu

SEQ ID NO: 1801333 - RNA, 19 nt, Artificial Sequence
  Description of Artificial Sequence: Synthetic oligonucleotide
augugaggguugcuauauu

SEQ ID NO: 1801334 - RNA, 19 nt, Artificial Sequence
  Description of Artificial Sequence: Synthetic oligonucleotide
guggcccucucucucucuc

SEQ ID NO: 1801335 - RNA, 19 nt, Artificial Sequence
  Description of Artificial Sequence: Synthetic oligonucleotide
gcccuacugaagcaaacaa

SEQ ID NO: 1801336 - RNA, 19 nt, Artificial Sequence
  Description of Artificial Sequence: Synthetic oligonucleotide
ggauaccacuaaugugcac

SEQ ID NO: 1801337 - RNA, 19 nt, Artificial Sequence
  Description of Artificial Sequence: Synthetic oligonucleotide
acccugguuguuggcagcu

SEQ ID NO: 1801338 - RNA, 19 nt, Artificial Sequence
  Description of Artificial Sequence: Synthetic oligonucleotide
acccaaguaugaccucauu

SEQ ID NO: 1801339 - RNA, 19 nt, Artificial Sequence
  Description of Artificial Sequence: Synthetic oligonucleotide
gagaguugacggcuacaau

SEQ ID NO: 1801340 - RNA, 19 nt, Artificial Sequence
  Description of Artificial Sequence: Synthetic oligonucleotide
gccuuauacagauguauuu

SEQ ID NO: 1801341 - RNA, 19 nt, Artificial Sequence
  Description of Artificial Sequence: Synthetic oligonucleotide
ucaguccuuucggccaaau

SEQ ID NO: 1801342 - RNA, 19 nt, Artificial Sequence
  Description of Artificial Sequence: Synthetic oligonucleotide
gaugggaaggccagccuuu

SEQ ID NO: 1801343 - RNA, 19 nt, Artificial Sequence
  Description of Artificial Sequence: Synthetic oligonucleotide
cagagaguugacggcuaca

SEQ ID NO: 1801344 - RNA, 19 nt, Artificial Sequence
  Description of Artificial Sequence: Synthetic oligonucleotide
gucucaaggcacgcucaga

SEQ ID NO: 1801345 - RNA, 19 nt, Artificial Sequence
  Description of Artificial Sequence: Synthetic oligonucleotide
gccagauguuaugcagugc

SEQ ID NO: 1801346 - RNA, 19 nt, Artificial Sequence
  Description of Artificial Sequence: Synthetic oligonucleotide
cuccuaaggugucuagaau

SEQ ID NO: 1801347 - RNA, 19 nt, Artificial Sequence
  Description of Artificial Sequence: Synthetic oligonucleotide
ccucucucucucuccuggc

SEQ ID NO: 1801348 - RNA, 19 nt, Artificial Sequence
  Description of Artificial Sequence: Synthetic oligonucleotide
gcccuccuaaggugucuag

SEQ ID NO: 1801349 - RNA, 19 nt, Artificial Sequence
  Description of Artificial Sequence: Synthetic oligonucleotide
cucuuacagauaugcccau

SEQ ID NO: 1801350 - RNA, 19 nt, Artificial Sequence
  Description of Artificial Sequence: Synthetic oligonucleotide
gcugaugaauaaacacacu

SEQ ID NO: 1801351 - RNA, 19 nt, Artificial Sequence
  Description of Artificial Sequence: Synthetic oligonucleotide
cagcagauucacaggcaau

SEQ ID NO: 1801352 - RNA, 19 nt, Artificial Sequence
  Description of Artificial Sequence: Synthetic oligonucleotide
gcccucucucucucuccug

SEQ ID NO: 1801353 - RNA, 19 nt, Artificial Sequence
  Description of Artificial Sequence: Synthetic oligonucleotide
ggcccucucucucucuccu

SEQ ID NO: 1801354 - RNA, 19 nt, Artificial Sequence
  Description of Artificial Sequence: Synthetic oligonucleotide
caguccuuucggccaaauu

SEQ ID NO: 1801355 - RNA, 19 nt, Artificial Sequence
  Description of Artificial Sequence: Synthetic oligonucleotide
ccauaacucauggcagaua

SEQ ID NO: 1801356 - RNA, 19 nt, Artificial Sequence
  Description of Artificial Sequence: Synthetic oligonucleotide
ggcaccacacugauacguu

SEQ ID NO: 1801357 - RNA, 19 nt, Artificial Sequence
  Description of Artificial Sequence: Synthetic oligonucleotide
cggucuacucuuguuaccu

SEQ ID NO: 1801358 - RNA, 19 nt, Artificial Sequence
  Description of Artificial Sequence: Synthetic oligonucleotide
ccaugggacuagagacacu

SEQ ID NO: 1801359 - RNA, 19 nt, Artificial Sequence
  Description of Artificial Sequence: Synthetic oligonucleotide
uuuacaaacaaccucaagg

SEQ ID NO: 1801360 - RNA, 19 nt, Artificial Sequence
  Description of Artificial Sequence: Synthetic oligonucleotide
uuauaugugagcuugaucc

SEQ ID NO: 1801361 - RNA, 19 nt, Artificial Sequence
  Description of Artificial Sequence: Synthetic oligonucleotide
agcaccauaaccuucaugc

SEQ ID NO: 1801362 - RNA, 19 nt, Artificial Sequence
  Description of Artificial Sequence: Synthetic oligonucleotide
auaagaaugagaauggugc

SEQ ID NO: 1801363 - RNA, 19 nt, Artificial Sequence
  Description of Artificial Sequence: Synthetic oligonucleotide
uucuaauacaaauagagca

SEQ ID NO: 1801364 - RNA, 19 nt, Artificial Sequence
  Description of Artificial Sequence: Synthetic oligonucleotide
aacaaaagcucuuugaacu

SEQ ID NO: 1801365 - RNA, 19 nt, Artificial Sequence
  Description of Artificial Sequence: Synthetic oligonucleotide
aaaucauuggccuggcugg

SEQ ID NO: 1801366 - RNA, 19 nt, Artificial Sequence
  Description of Artificial Sequence: Synthetic oligonucleotide
aggacauuagucuuuaccg

SEQ ID NO: 1801367 - RNA, 19 nt, Artificial Sequence
  Description of Artificial Sequence: Synthetic oligonucleotide
aagagugcaaaguagccuc

SEQ ID NO: 1801368 - RNA, 19 nt, Artificial Sequence
  Description of Artificial Sequence: Synthetic oligonucleotide
aauuguucacuucugcuag

SEQ ID NO: 1801369 - RNA, 19 nt, Artificial Sequence
  Description of Artificial Sequence: Synthetic oligonucleotide
aucguuaucacuguuacac

SEQ ID NO: 1801370 - RNA, 19 nt, Artificial Sequence
  Description of Artificial Sequence: Synthetic oligonucleotide
aauuccauuccacuuauga

SEQ ID NO: 1801371 - RNA, 19 nt, Artificial Sequence
  Description of Artificial Sequence: Synthetic oligonucleotide
uugaggaaaacccuccucg

SEQ ID NO: 1801372 - RNA, 19 nt, Artificial Sequence
  Description of Artificial Sequence: Synthetic oligonucleotide
agaaaaggcucccaggagc

SEQ ID NO: 1801373 - RNA, 19 nt, Artificial Sequence
  Description of Artificial Sequence: Synthetic oligonucleotide
aauuccuuugauugagugg

SEQ ID NO: 1801374 - RNA, 19 nt, Artificial Sequence
  Description of Artificial Sequence: Synthetic oligonucleotide
aguguuuacaaacaaccuc

SEQ ID NO: 1801375 - RNA, 19 nt, Artificial Sequence
  Description of Artificial Sequence: Synthetic oligonucleotide
cuugccagcaaucauaacc

SEQ ID NO: 1801376 - RNA, 19 nt, Artificial Sequence
  Description of Artificial Sequence: Synthetic oligonucleotide
uuaaugacuugcgugaugg

SEQ ID NO: 1801377 - RNA, 19 nt, Artificial Sequence
  Description of Artificial Sequence: Synthetic oligonucleotide
uguaaugucauuuccuccc

SEQ ID NO: 1801378 - RNA, 19 nt, Artificial Sequence
  Description of Artificial Sequence: Synthetic oligonucleotide
ucuaauacaaauagagcac

SEQ ID NO: 1801379 - RNA, 19 nt, Artificial Sequence
  Description of Artificial Sequence: Synthetic oligonucleotide
agaauguugauucuggcug

SEQ ID NO: 1801380 - RNA, 19 nt, Artificial Sequence
  Description of Artificial Sequence: Synthetic oligonucleotide
uaaaucauuggccuggcug

SEQ ID NO: 1801381 - RNA, 19 nt, Artificial Sequence
  Description of Artificial Sequence: Synthetic oligonucleotide
augguaaccagcuagugag

SEQ ID NO: 1801382 - RNA, 19 nt, Artificial Sequence
  Description of Artificial Sequence: Synthetic oligonucleotide
uauacagcaaugcacagaa

SEQ ID NO: 1801383 - RNA, 19 nt, Artificial Sequence
  Description of Artificial Sequence: Synthetic oligonucleotide
uguuugaccguucaaaggu

SEQ ID NO: 1801384 - RNA, 19 nt, Artificial Sequence
  Description of Artificial Sequence: Synthetic oligonucleotide
aaauagagcaccauaaccu

SEQ ID NO: 1801385 - RNA, 19 nt, Artificial Sequence
  Description of Artificial Sequence: Synthetic oligonucleotide
uguguauacagcaaugcac

SEQ ID NO: 1801386 - RNA, 19 nt, Artificial Sequence
  Description of Artificial Sequence: Synthetic oligonucleotide
acaaccucaaggucuaacc

SEQ ID NO: 1801387 - RNA, 19 nt, Artificial Sequence
  Description of Artificial Sequence: Synthetic oligonucleotide
auuccuuugauugaguggg

SEQ ID NO: 1801388 - RNA, 19 nt, Artificial Sequence
  Description of Artificial Sequence: Synthetic oligonucleotide
aacaaaguccgucaugucu

SEQ ID NO: 1801389 - RNA, 19 nt, Artificial Sequence
  Description of Artificial Sequence: Synthetic oligonucleotide
aauucuaucuucaagccgu

SEQ ID NO: 1801390 - RNA, 19 nt, Artificial Sequence
  Description of Artificial Sequence: Synthetic oligonucleotide
auaaccuucaugccaaauc

SEQ ID NO: 1801391 - RNA, 19 nt, Artificial Sequence
  Description of Artificial Sequence: Synthetic oligonucleotide
uccaauaaaucauuggccu

SEQ ID NO: 1801392 - RNA, 19 nt, Artificial Sequence
  Description of Artificial Sequence: Synthetic oligonucleotide
uuacuguaugcugugaugg

SEQ ID NO: 1801393 - RNA, 19 nt, Artificial Sequence
  Description of Artificial Sequence: Synthetic oligonucleotide
caaauagagcaccauaacc

SEQ ID NO: 1801394 - RNA, 19 nt, Artificial Sequence
  Description of Artificial Sequence: Synthetic oligonucleotide
cuagugaggaacaaacacc

SEQ ID NO: 1801395 - RNA, 19 nt, Artificial Sequence
  Description of Artificial Sequence: Synthetic oligonucleotide
cauuguuacaauuccauuc

SEQ ID NO: 1801396 - RNA, 19 nt, Artificial Sequence
  Description of Artificial Sequence: Synthetic oligonucleotide
acaaauagagcaccauaac

SEQ ID NO: 1801397 - RNA, 19 nt, Artificial Sequence
  Description of Artificial Sequence: Synthetic oligonucleotide
gaauucuaucuucaagccg

SEQ ID NO: 1801398 - RNA, 19 nt, Artificial Sequence
  Description of Artificial Sequence: Synthetic oligonucleotide
uggaauaacagguguaaug

SEQ ID NO: 1801399 - RNA, 19 nt, Artificial Sequence
  Description of Artificial Sequence: Synthetic oligonucleotide
ugaauucuaucuucaagcc

SEQ ID NO: 1801400 - RNA, 19 nt, Artificial Sequence
  Description of Artificial Sequence: Synthetic oligonucleotide
uaaccuucaugccaaaucu

SEQ ID NO: 1801401 - RNA, 19 nt, Artificial Sequence
  Description of Artificial Sequence: Synthetic oligonucleotide
aaucauaaccuccuuccca

SEQ ID NO: 1801402 - RNA, 19 nt, Artificial Sequence
  Description of Artificial Sequence: Synthetic oligonucleotide
aaugacuugcgugaugguc

SEQ ID NO: 1801403 - RNA, 19 nt, Artificial Sequence
  Description of Artificial Sequence: Synthetic oligonucleotide
aucacuguuacacuggggu

SEQ ID NO: 1801404 - RNA, 19 nt, Artificial Sequence
  Description of Artificial Sequence: Synthetic oligonucleotide
aaccucaaggucuaaccag

SEQ ID NO: 1801405 - RNA, 19 nt, Artificial Sequence
  Description of Artificial Sequence: Synthetic oligonucleotide
aaauuguucacuucugcua

SEQ ID NO: 1801406 - RNA, 19 nt, Artificial Sequence
  Description of Artificial Sequence: Synthetic oligonucleotide
ugggguugguguuugaccg

SEQ ID NO: 1801407 - RNA, 19 nt, Artificial Sequence
  Description of Artificial Sequence: Synthetic oligonucleotide
ucauugccaggacugaggg

SEQ ID NO: 1801408 - RNA, 19 nt, Artificial Sequence
  Description of Artificial Sequence: Synthetic oligonucleotide
uauaugugagcuugauccg

SEQ ID NO: 1801409 - RNA, 19 nt, Artificial Sequence
  Description of Artificial Sequence: Synthetic oligonucleotide
aauaaaucauuggccuggc

SEQ ID NO: 1801410 - RNA, 19 nt, Artificial Sequence
  Description of Artificial Sequence: Synthetic oligonucleotide
gaggacauuagucuuuacc

SEQ ID NO: 1801411 - RNA, 19 nt, Artificial Sequence
  Description of Artificial Sequence: Synthetic oligonucleotide
guacaguuggaauaacagg

SEQ ID NO: 1801412 - RNA, 19 nt, Artificial Sequence
  Description of Artificial Sequence: Synthetic oligonucleotide
uuaaaugcugggacaacgc

SEQ ID NO: 1801413 - RNA, 19 nt, Artificial Sequence
  Description of Artificial Sequence: Synthetic oligonucleotide
ucugcuagaucuugcauug

SEQ ID NO: 1801414 - RNA, 19 nt, Artificial Sequence
  Description of Artificial Sequence: Synthetic oligonucleotide
cuugugauuauaugugagc

SEQ ID NO: 1801415 - RNA, 19 nt, Artificial Sequence
  Description of Artificial Sequence: Synthetic oligonucleotide
ugccaaaucucaacaaaag

SEQ ID NO: 1801416 - RNA, 19 nt, Artificial Sequence
  Description of Artificial Sequence: Synthetic oligonucleotide
uuuaccgaugcuucaaugu

SEQ ID NO: 1801417 - RNA, 19 nt, Artificial Sequence
  Description of Artificial Sequence: Synthetic oligonucleotide
ugaggaacaaacacccacc

SEQ ID NO: 1801418 - RNA, 19 nt, Artificial Sequence
  Description of Artificial Sequence: Synthetic oligonucleotide
cucuuucaaacauugggag

SEQ ID NO: 1801419 - RNA, 19 nt, Artificial Sequence
  Description of Artificial Sequence: Synthetic oligonucleotide
caauaaaucauuggccugg

SEQ ID NO: 1801420 - RNA, 19 nt, Artificial Sequence
  Description of Artificial Sequence: Synthetic oligonucleotide
aaugagaauggugcuggac

SEQ ID NO: 1801421 - RNA, 19 nt, Artificial Sequence
  Description of Artificial Sequence: Synthetic oligonucleotide
acuuaugaugguaaccagc

SEQ ID NO: 1801422 - RNA, 19 nt, Artificial Sequence
  Description of Artificial Sequence: Synthetic oligonucleotide
gcugcuaggagacagaagc

SEQ ID NO: 1801423 - RNA, 19 nt, Artificial Sequence
  Description of Artificial Sequence: Synthetic oligonucleotide
uguaugcugugauggaggg

SEQ ID NO: 1801424 - RNA, 19 nt, Artificial Sequence
  Description of Artificial Sequence: Synthetic oligonucleotide
ucaaacauugggagaacca

SEQ ID NO: 1801425 - RNA, 19 nt, Artificial Sequence
  Description of Artificial Sequence: Synthetic oligonucleotide
augacuugcgugauggucc

SEQ ID NO: 1801426 - RNA, 19 nt, Artificial Sequence
  Description of Artificial Sequence: Synthetic oligonucleotide
ugcugauugccucaguggc

SEQ ID NO: 1801427 - RNA, 19 nt, Artificial Sequence
  Description of Artificial Sequence: Synthetic oligonucleotide
cuaauacaaauagagcacc

SEQ ID NO: 1801428 - RNA, 19 nt, Artificial Sequence
  Description of Artificial Sequence: Synthetic oligonucleotide
acagagauacaacaguaga

SEQ ID NO: 1801429 - RNA, 19 nt, Artificial Sequence
  Description of Artificial Sequence: Synthetic oligonucleotide
uggguucagaaccuuaaug

SEQ ID NO: 1801430 - RNA, 19 nt, Artificial Sequence
  Description of Artificial Sequence: Synthetic oligonucleotide
gaauuccuuugauugagug

SEQ ID NO: 1801431 - RNA, 19 nt, Artificial Sequence
  Description of Artificial Sequence: Synthetic oligonucleotide
uccacagagauacaacagu

SEQ ID NO: 1801432 - RNA, 19 nt, Artificial Sequence
  Description of Artificial Sequence: Synthetic oligonucleotide
aauagagcaccauaaccuu

SEQ ID NO: 1801433 - RNA, 19 nt, Artificial Sequence
  Description of Artificial Sequence: Synthetic oligonucleotide
uuuccucccaacaaaucca

SEQ ID NO: 1801434 - RNA, 19 nt, Artificial Sequence
  Description of Artificial Sequence: Synthetic oligonucleotide
gugauuauaugugagcuug

SEQ ID NO: 1801435 - RNA, 19 nt, Artificial Sequence
  Description of Artificial Sequence: Synthetic oligonucleotide
uugugauuauaugugagcu

SEQ ID NO: 1801436 - RNA, 19 nt, Artificial Sequence
  Description of Artificial Sequence: Synthetic oligonucleotide
aacgcugcugcuaggagac

SEQ ID NO: 1801437 - RNA, 19 nt, Artificial Sequence
  Description of Artificial Sequence: Synthetic oligonucleotide
accuuaaugacuugcguga

SEQ ID NO: 1801438 - RNA, 19 nt, Artificial Sequence
  Description of Artificial Sequence: Synthetic oligonucleotide
uguuacaauuccauuccac

SEQ ID NO: 1801439 - RNA, 19 nt, Artificial Sequence
  Description of Artificial Sequence: Synthetic oligonucleotide
acaacaguagaaagaaagg

SEQ ID NO: 1801440 - RNA, 19 nt, Artificial Sequence
  Description of Artificial Sequence: Synthetic oligonucleotide
acaaacaaccucaaggucu

SEQ ID NO: 1801441 - RNA, 19 nt, Artificial Sequence
  Description of Artificial Sequence: Synthetic oligonucleotide
ucaugucuagcucugugcu

SEQ ID NO: 1801442 - RNA, 19 nt, Artificial Sequence
  Description of Artificial Sequence: Synthetic oligonucleotide
agaaagggccacucuuugc

SEQ ID NO: 1801443 - RNA, 19 nt, Artificial Sequence
  Description of Artificial Sequence: Synthetic oligonucleotide
gguaaaguguggaaaaggg

SEQ ID NO: 1801444 - RNA, 19 nt, Artificial Sequence
  Description of Artificial Sequence: Synthetic oligonucleotide
uagagcaccauaaccuuca

SEQ ID NO: 1801445 - RNA, 19 nt, Artificial Sequence
  Description of Artificial Sequence: Synthetic oligonucleotide
cauuagucuuuaccgaugc

SEQ ID NO: 1801446 - RNA, 19 nt, Artificial Sequence
  Description of Artificial Sequence: Synthetic oligonucleotide
ucuuucaaacauugggaga

SEQ ID NO: 1801447 - RNA, 19 nt, Artificial Sequence
  Description of Artificial Sequence: Synthetic oligonucleotide
auaugugagcuugauccgc

SEQ ID NO: 1801448 - RNA, 19 nt, Artificial Sequence
  Description of Artificial Sequence: Synthetic oligonucleotide
uguaucguuaucacuguua

SEQ ID NO: 1801449 - RNA, 19 nt, Artificial Sequence
  Description of Artificial Sequence: Synthetic oligonucleotide
cuucaagccguucuuacug

SEQ ID NO: 1801450 - RNA, 19 nt, Artificial Sequence
  Description of Artificial Sequence: Synthetic oligonucleotide
ugauuccaccagcagaagc

SEQ ID NO: 1801451 - RNA, 19 nt, Artificial Sequence
  Description of Artificial Sequence: Synthetic oligonucleotide
uaagaaugagaauggugcu

SEQ ID NO: 1801452 - RNA, 19 nt, Artificial Sequence
  Description of Artificial Sequence: Synthetic oligonucleotide
gaauguugauucuggcugc

SEQ ID NO: 1801453 - RNA, 19 nt, Artificial Sequence
  Description of Artificial Sequence: Synthetic oligonucleotide
aagaaugagaauggugcug

SEQ ID NO: 1801454 - RNA, 19 nt, Artificial Sequence
  Description of Artificial Sequence: Synthetic oligonucleotide
gcaaucauaaccuccuucc

SEQ ID NO: 1801455 - RNA, 19 nt, Artificial Sequence
  Description of Artificial Sequence: Synthetic oligonucleotide
cacucuuugcugcagagac

SEQ ID NO: 1801456 - RNA, 19 nt, Artificial Sequence
  Description of Artificial Sequence: Synthetic oligonucleotide
ugauucuggcugcauaugu

SEQ ID NO: 1801457 - RNA, 19 nt, Artificial Sequence
  Description of Artificial Sequence: Synthetic oligonucleotide
guaucguuaucacuguuac

SEQ ID NO: 1801458 - RNA, 19 nt, Artificial Sequence
  Description of Artificial Sequence: Synthetic oligonucleotide
gccucuuucaaacauuggg

SEQ ID NO: 1801459 - RNA, 19 nt, Artificial Sequence
  Description of Artificial Sequence: Synthetic oligonucleotide
uuugaccguucaaagguga

SEQ ID NO: 1801460 - RNA, 19 nt, Artificial Sequence
  Description of Artificial Sequence: Synthetic oligonucleotide
aacauugggagaaccagca

SEQ ID NO: 1801461 - RNA, 19 nt, Artificial Sequence
  Description of Artificial Sequence: Synthetic oligonucleotide
uguauacagcaaugcacag

SEQ ID NO: 1801462 - RNA, 19 nt, Artificial Sequence
  Description of Artificial Sequence: Synthetic oligonucleotide
uccucgacaguucucucag

SEQ ID NO: 1801463 - RNA, 19 nt, Artificial Sequence
  Description of Artificial Sequence: Synthetic oligonucleotide
cuuugcugcagagacagag

SEQ ID NO: 1801464 - RNA, 19 nt, Artificial Sequence
  Description of Artificial Sequence: Synthetic oligonucleotide
uuaccgaugcuucaauguc

SEQ ID NO: 1801465 - RNA, 19 nt, Artificial Sequence
  Description of Artificial Sequence: Synthetic oligonucleotide
aacuccaucuguccagugu

SEQ ID NO: 1801466 - RNA, 19 nt, Artificial Sequence
  Description of Artificial Sequence: Synthetic oligonucleotide
aagccguucuuacuguaug

SEQ ID NO: 1801467 - RNA, 19 nt, Artificial Sequence
  Description of Artificial Sequence: Synthetic oligonucleotide
agagauacaacaguagaaa

SEQ ID NO: 1801468 - RNA, 19 nt, Artificial Sequence
  Description of Artificial Sequence: Synthetic oligonucleotide
guguuugaccguucaaagg

SEQ ID NO: 1801469 - RNA, 19 nt, Artificial Sequence
  Description of Artificial Sequence: Synthetic oligonucleotide
caaacauugggagaaccag

SEQ ID NO: 1801470 - RNA, 19 nt, Artificial Sequence
  Description of Artificial Sequence: Synthetic oligonucleotide
guguuuacaaacaaccuca

SEQ ID NO: 1801471 - RNA, 19 nt, Artificial Sequence
  Description of Artificial Sequence: Synthetic oligonucleotide
agaaccuuaaugacuugcg

SEQ ID NO: 1801472 - RNA, 19 nt, Artificial Sequence
  Description of Artificial Sequence: Synthetic oligonucleotide
ucucaacaaaagcucuuug

SEQ ID NO: 1801473 - RNA, 19 nt, Artificial Sequence
  Description of Artificial Sequence: Synthetic oligonucleotide
cagcuagugaggaacaaac

SEQ ID NO: 1801474 - RNA, 19 nt, Artificial Sequence
  Description of Artificial Sequence: Synthetic oligonucleotide
gaugguaaccagcuaguga

SEQ ID NO: 1801475 - RNA, 19 nt, Artificial Sequence
  Description of Artificial Sequence: Synthetic oligonucleotide
cucauugccaggacugagg

SEQ ID NO: 1801476 - RNA, 19 nt, Artificial Sequence
  Description of Artificial Sequence: Synthetic oligonucleotide
accaguugcugauugccuc

SEQ ID NO: 1801477 - RNA, 19 nt, Artificial Sequence
  Description of Artificial Sequence: Synthetic oligonucleotide
cuuacuguaugcugugaug

SEQ ID NO: 1801478 - RNA, 19 nt, Artificial Sequence
  Description of Artificial Sequence: Synthetic oligonucleotide
cuguuggaggccuguaucg

SEQ ID NO: 1801479 - RNA, 19 nt, Artificial Sequence
  Description of Artificial Sequence: Synthetic oligonucleotide
ugcuagaucuugcauugcu

SEQ ID NO: 1801480 - RNA, 19 nt, Artificial Sequence
  Description of Artificial Sequence: Synthetic oligonucleotide
gcuggaaugucuuugguac

SEQ ID NO: 1801481 - RNA, 19 nt, Artificial Sequence
  Description of Artificial Sequence: Synthetic oligonucleotide
auugcugagcccuugugau

SEQ ID NO: 1801482 - RNA, 19 nt, Artificial Sequence
  Description of Artificial Sequence: Synthetic oligonucleotide
ucuuacuguaugcugugau

SEQ ID NO: 1801483 - RNA, 19 nt, Artificial Sequence
  Description of Artificial Sequence: Synthetic oligonucleotide
aggaaaacccuccucgaca

SEQ ID NO: 1801484 - RNA, 19 nt, Artificial Sequence
  Description of Artificial Sequence: Synthetic oligonucleotide
gugaggaacaaacacccac

SEQ ID NO: 1801485 - RNA, 19 nt, Artificial Sequence
  Description of Artificial Sequence: Synthetic oligonucleotide
ucccuuauguccauuguua

SEQ ID NO: 1801486 - RNA, 19 nt, Artificial Sequence
  Description of Artificial Sequence: Synthetic oligonucleotide
gguacaguuggaauaacag

SEQ ID NO: 1801487 - RNA, 19 nt, Artificial Sequence
  Description of Artificial Sequence: Synthetic oligonucleotide
uacaaacaaccucaagguc

SEQ ID NO: 1801488 - RNA, 19 nt, Artificial Sequence
  Description of Artificial Sequence: Synthetic oligonucleotide
cccagaauuccuuugauug

SEQ ID NO: 1801489 - RNA, 19 nt, Artificial Sequence
  Description of Artificial Sequence: Synthetic oligonucleotide
auacaaauagagcaccaua

SEQ ID NO: 1801490 - RNA, 19 nt, Artificial Sequence
  Description of Artificial Sequence: Synthetic oligonucleotide
gaaaaggcucccaggagcc

SEQ ID NO: 1801491 - RNA, 19 nt, Artificial Sequence
  Description of Artificial Sequence: Synthetic oligonucleotide
ccuaaugccucuuucaaac

SEQ ID NO: 1801492 - RNA, 19 nt, Artificial Sequence
  Description of Artificial Sequence: Synthetic oligonucleotide
ugccaugaauuccaguccu

SEQ ID NO: 1801493 - RNA, 19 nt, Artificial Sequence
  Description of Artificial Sequence: Synthetic oligonucleotide
aacagguguaaugucauuu

SEQ ID NO: 1801494 - RNA, 19 nt, Artificial Sequence
  Description of Artificial Sequence: Synthetic oligonucleotide
uuagucuuuaccgaugcuu

SEQ ID NO: 1801495 - RNA, 19 nt, Artificial Sequence
  Description of Artificial Sequence: Synthetic oligonucleotide
uucaaacauugggagaacc

SEQ ID NO: 1801496 - RNA, 19 nt, Artificial Sequence
  Description of Artificial Sequence: Synthetic oligonucleotide
uagaucuugcauugcugag

SEQ ID NO: 1801497 - RNA, 19 nt, Artificial Sequence
  Description of Artificial Sequence: Synthetic oligonucleotide
guuuucuugccaugaauuc

SEQ ID NO: 1801498 - RNA, 19 nt, Artificial Sequence
  Description of Artificial Sequence: Synthetic oligonucleotide
aaaguguggaaaagggaga

SEQ ID NO: 1801499 - RNA, 19 nt, Artificial Sequence
  Description of Artificial Sequence: Synthetic oligonucleotide
gguguuugaccguucaaag

SEQ ID NO: 1801500 - RNA, 19 nt, Artificial Sequence
  Description of Artificial Sequence: Synthetic oligonucleotide
ucccuguguuaaaugcugg

SEQ ID NO: 1801501 - RNA, 19 nt, Artificial Sequence
  Description of Artificial Sequence: Synthetic oligonucleotide
gucaugucuagcucugugc

SEQ ID NO: 1801502 - RNA, 19 nt, Artificial Sequence
  Description of Artificial Sequence: Synthetic oligonucleotide
uggagugauuccaccagca

SEQ ID NO: 1801503 - RNA, 19 nt, Artificial Sequence
  Description of Artificial Sequence: Synthetic oligonucleotide
gagugauuccaccagcaga

SEQ ID NO: 1801504 - RNA, 19 nt, Artificial Sequence
  Description of Artificial Sequence: Synthetic oligonucleotide
cuuaugaugguaaccagcu

SEQ ID NO: 1801505 - RNA, 19 nt, Artificial Sequence
  Description of Artificial Sequence: Synthetic oligonucleotide
augugggagggguaaagug

SEQ ID NO: 1801506 - RNA, 19 nt, Artificial Sequence
  Description of Artificial Sequence: Synthetic oligonucleotide
agaaagaaagggccacucu

SEQ ID NO: 1801507 - RNA, 19 nt, Artificial Sequence
  Description of Artificial Sequence: Synthetic oligonucleotide
guguaaugucauuuccucc

SEQ ID NO: 1801508 - RNA, 19 nt, Artificial Sequence
  Description of Artificial Sequence: Synthetic oligonucleotide
ugcuaggagacagaagcug

SEQ ID NO: 1801509 - RNA, 19 nt, Artificial Sequence
  Description of Artificial Sequence: Synthetic oligonucleotide
ugguaaccagcuagugagg

SEQ ID NO: 1801510 - RNA, 19 nt, Artificial Sequence
  Description of Artificial Sequence: Synthetic oligonucleotide
ugagcuugauccgcauucg

SEQ ID NO: 1801511 - RNA, 19 nt, Artificial Sequence
  Description of Artificial Sequence: Synthetic oligonucleotide
guuacaauuccauuccacu

SEQ ID NO: 1801512 - RNA, 19 nt, Artificial Sequence
  Description of Artificial Sequence: Synthetic oligonucleotide
agugauuccaccagcagaa

SEQ ID NO: 1801513 - RNA, 19 nt, Artificial Sequence
  Description of Artificial Sequence: Synthetic oligonucleotide
ugcgugauggucccugugu

SEQ ID NO: 1801514 - RNA, 19 nt, Artificial Sequence
  Description of Artificial Sequence: Synthetic oligonucleotide
uggaaguuucuaauacaaa

SEQ ID NO: 1801515 - RNA, 19 nt, Artificial Sequence
  Description of Artificial Sequence: Synthetic oligonucleotide
aggccuguaucguuaucac

SEQ ID NO: 1801516 - RNA, 19 nt, Artificial Sequence
  Description of Artificial Sequence: Synthetic oligonucleotide
ucuucaagccguucuuacu

SEQ ID NO: 1801517 - RNA, 19 nt, Artificial Sequence
  Description of Artificial Sequence: Synthetic oligonucleotide
cuuuaccgaugcuucaaug

SEQ ID NO: 1801518 - RNA, 19 nt, Artificial Sequence
  Description of Artificial Sequence: Synthetic oligonucleotide
ggaaaacccuccucgacag

SEQ ID NO: 1801519 - RNA, 19 nt, Artificial Sequence
  Description of Artificial Sequence: Synthetic oligonucleotide
gugagcuugauccgcauuc

SEQ ID NO: 1801520 - RNA, 19 nt, Artificial Sequence
  Description of Artificial Sequence: Synthetic oligonucleotide
cugggguugguguuugacc

SEQ ID NO: 1801521 - RNA, 19 nt, Artificial Sequence
  Description of Artificial Sequence: Synthetic oligonucleotide
cuuugauugagugggauaa

SEQ ID NO: 1801522 - RNA, 19 nt, Artificial Sequence
  Description of Artificial Sequence: Synthetic oligonucleotide
aaaacccuccucgacaguu

SEQ ID NO: 1801523 - RNA, 19 nt, Artificial Sequence
  Description of Artificial Sequence: Synthetic oligonucleotide
cagaaccuuaaugacuugc

SEQ ID NO: 1801524 - RNA, 19 nt, Artificial Sequence
  Description of Artificial Sequence: Synthetic oligonucleotide
gccaaaucucaacaaaagc

SEQ ID NO: 1801525 - RNA, 19 nt, Artificial Sequence
  Description of Artificial Sequence: Synthetic oligonucleotide
ucaugccaaaucucaacaa

SEQ ID NO: 1801526 - RNA, 19 nt, Artificial Sequence
  Description of Artificial Sequence: Synthetic oligonucleotide
acaauuccauuccacuuau

SEQ ID NO: 1801527 - RNA, 19 nt, Artificial Sequence
  Description of Artificial Sequence: Synthetic oligonucleotide
cuguguguauacagcaaug

SEQ ID NO: 1801528 - RNA, 19 nt, Artificial Sequence
  Description of Artificial Sequence: Synthetic oligonucleotide
ugagcccuugugauuauau

SEQ ID NO: 1801529 - RNA, 19 nt, Artificial Sequence
  Description of Artificial Sequence: Synthetic oligonucleotide
guucuuacuguaugcugug

SEQ ID NO: 1801530 - RNA, 19 nt, Artificial Sequence
  Description of Artificial Sequence: Synthetic oligonucleotide
ugguguuugaccguucaaa

SEQ ID NO: 1801531 - RNA, 19 nt, Artificial Sequence
  Description of Artificial Sequence: Synthetic oligonucleotide
aaagaaagggccacucuuu

SEQ ID NO: 1801532 - RNA, 19 nt, Artificial Sequence
  Description of Artificial Sequence: Synthetic oligonucleotide
cuuugguacugcagccugg

SEQ ID NO: 1801533 - RNA, 19 nt, Artificial Sequence
  Description of Artificial Sequence: Synthetic oligonucleotide
uuugauugagugggauaag

SEQ ID NO: 1801534 - RNA, 19 nt, Artificial Sequence
  Description of Artificial Sequence: Synthetic oligonucleotide
uguuacacugggguuggug

SEQ ID NO: 1801535 - RNA, 19 nt, Artificial Sequence
  Description of Artificial Sequence: Synthetic oligonucleotide
ucccaacaaauccaauaaa

SEQ ID NO: 1801536 - RNA, 19 nt, Artificial Sequence
  Description of Artificial Sequence: Synthetic oligonucleotide
cuuaaugacuugcgugaug

SEQ ID NO: 1801537 - RNA, 19 nt, Artificial Sequence
  Description of Artificial Sequence: Synthetic oligonucleotide
gaggaaaacccuccucgac

SEQ ID NO: 1801538 - RNA, 19 nt, Artificial Sequence
  Description of Artificial Sequence: Synthetic oligonucleotide
caaggucuaaccaguuuuc

SEQ ID NO: 1801539 - RNA, 19 nt, Artificial Sequence
  Description of Artificial Sequence: Synthetic oligonucleotide
ucuuuaccgaugcuucaau

SEQ ID NO: 1801540 - RNA, 19 nt, Artificial Sequence
  Description of Artificial Sequence: Synthetic oligonucleotide
cuucaaugucagcaguaac

SEQ ID NO: 1801541 - RNA, 19 nt, Artificial Sequence
  Description of Artificial Sequence: Synthetic oligonucleotide
aaggucuaaccaguuuucu

SEQ ID NO: 1801542 - RNA, 19 nt, Artificial Sequence
  Description of Artificial Sequence: Synthetic oligonucleotide
cagagauacaacaguagaa

SEQ ID NO: 1801543 - RNA, 19 nt, Artificial Sequence
  Description of Artificial Sequence: Synthetic oligonucleotide
cacuuaugaugguaaccag

SEQ ID NO: 1801544 - RNA, 19 nt, Artificial Sequence
  Description of Artificial Sequence: Synthetic oligonucleotide
auagagcaccauaaccuuc

SEQ ID NO: 1801545 - RNA, 19 nt, Artificial Sequence
  Description of Artificial Sequence: Synthetic oligonucleotide
cucaacagcagaggagagg

SEQ ID NO: 1801546 - RNA, 19 nt, Artificial Sequence
  Description of Artificial Sequence: Synthetic oligonucleotide
gccuguaucguuaucacug

SEQ ID NO: 1801547 - RNA, 19 nt, Artificial Sequence
  Description of Artificial Sequence: Synthetic oligonucleotide
ugcuucaaugucagcagua

SEQ ID NO: 1801548 - RNA, 19 nt, Artificial Sequence
  Description of Artificial Sequence: Synthetic oligonucleotide
agagugcaaaguagccucc

SEQ ID NO: 1801549 - RNA, 19 nt, Artificial Sequence
  Description of Artificial Sequence: Synthetic oligonucleotide
aacccuccucgacaguucu

SEQ ID NO: 1801550 - RNA, 19 nt, Artificial Sequence
  Description of Artificial Sequence: Synthetic oligonucleotide
uacuguaugcugugaugga

SEQ ID NO: 1801551 - RNA, 19 nt, Artificial Sequence
  Description of Artificial Sequence: Synthetic oligonucleotide
uaucguuaucacuguuaca

SEQ ID NO: 1801552 - RNA, 19 nt, Artificial Sequence
  Description of Artificial Sequence: Synthetic oligonucleotide
caguaacuugaggaaaacc

SEQ ID NO: 1801553 - RNA, 19 nt, Artificial Sequence
  Description of Artificial Sequence: Synthetic oligonucleotide
uucaagccguucuuacugu

SEQ ID NO: 1801554 - RNA, 19 nt, Artificial Sequence
  Description of Artificial Sequence: Synthetic oligonucleotide
ugacuugcgugaugguccc

SEQ ID NO: 1801555 - RNA, 19 nt, Artificial Sequence
  Description of Artificial Sequence: Synthetic oligonucleotide
gagccuaaugccucuuuca

SEQ ID NO: 1801556 - RNA, 19 nt, Artificial Sequence
  Description of Artificial Sequence: Synthetic oligonucleotide
acugggguugguguuugac

SEQ ID NO: 1801557 - RNA, 19 nt, Artificial Sequence
  Description of Artificial Sequence: Synthetic oligonucleotide
gagcccuugugauuauaug

SEQ ID NO: 1801558 - RNA, 19 nt, Artificial Sequence
  Description of Artificial Sequence: Synthetic oligonucleotide
ugaugguaaccagcuagug

SEQ ID NO: 1801559 - RNA, 19 nt, Artificial Sequence
  Description of Artificial Sequence: Synthetic oligonucleotide
gauuccaccagcagaagcu

SEQ ID NO: 1801560 - RNA, 19 nt, Artificial Sequence
  Description of Artificial Sequence: Synthetic oligonucleotide
aauggugcuggacccucau

SEQ ID NO: 1801561 - RNA, 19 nt, Artificial Sequence
  Description of Artificial Sequence: Synthetic oligonucleotide
guuggaauaacagguguaa

SEQ ID NO: 1801562 - RNA, 19 nt, Artificial Sequence
  Description of Artificial Sequence: Synthetic oligonucleotide
acacccaccuugcccaguc

SEQ ID NO: 1801563 - RNA, 19 nt, Artificial Sequence
  Description of Artificial Sequence: Synthetic oligonucleotide
acaguuggaauaacaggug

SEQ ID NO: 1801564 - RNA, 19 nt, Artificial Sequence
  Description of Artificial Sequence: Synthetic oligonucleotide
augcacagaaaaggcuccc

SEQ ID NO: 1801565 - RNA, 19 nt, Artificial Sequence
  Description of Artificial Sequence: Synthetic oligonucleotide
ccuuggaaguuucuaauac

SEQ ID NO: 1801566 - RNA, 19 nt, Artificial Sequence
  Description of Artificial Sequence: Synthetic oligonucleotide
agagaaggaagagugcaaa

SEQ ID NO: 1801567 - RNA, 19 nt, Artificial Sequence
  Description of Artificial Sequence: Synthetic oligonucleotide
uuccacuuaugaugguaac

SEQ ID NO: 1801568 - RNA, 19 nt, Artificial Sequence
  Description of Artificial Sequence: Synthetic oligonucleotide
cuggagugauuccaccagc

SEQ ID NO: 1801569 - RNA, 19 nt, Artificial Sequence
  Description of Artificial Sequence: Synthetic oligonucleotide
aaacccuccucgacaguuc

SEQ ID NO: 1801570 - RNA, 19 nt, Artificial Sequence
  Description of Artificial Sequence: Synthetic oligonucleotide
uccgcauucgcagcuguug

SEQ ID NO: 1801571 - RNA, 19 nt, Artificial Sequence
  Description of Artificial Sequence: Synthetic oligonucleotide
acaacgcugcugcuaggag

SEQ ID NO: 1801572 - RNA, 19 nt, Artificial Sequence
  Description of Artificial Sequence: Synthetic oligonucleotide
caguccacagagauacaac

SEQ ID NO: 1801573 - RNA, 19 nt, Artificial Sequence
  Description of Artificial Sequence: Synthetic oligonucleotide
auaaccuccuucccagaau

SEQ ID NO: 1801574 - RNA, 19 nt, Artificial Sequence
  Description of Artificial Sequence: Synthetic oligonucleotide
agccuaaugccucuuucaa

SEQ ID NO: 1801575 - RNA, 19 nt, Artificial Sequence
  Description of Artificial Sequence: Synthetic oligonucleotide
auaacagguguaaugucau

SEQ ID NO: 1801576 - RNA, 19 nt, Artificial Sequence
  Description of Artificial Sequence: Synthetic oligonucleotide
auuagucuuuaccgaugcu

SEQ ID NO: 1801577 - RNA, 19 nt, Artificial Sequence
  Description of Artificial Sequence: Synthetic oligonucleotide
caugccaaaucucaacaaa

SEQ ID NO: 1801578 - RNA, 19 nt, Artificial Sequence
  Description of Artificial Sequence: Synthetic oligonucleotide
aaugccucuuucaaacauu

SEQ ID NO: 1801579 - RNA, 19 nt, Artificial Sequence
  Description of Artificial Sequence: Synthetic oligonucleotide
caaaguccgucaugucuag

SEQ ID NO: 1801580 - RNA, 19 nt, Artificial Sequence
  Description of Artificial Sequence: Synthetic oligonucleotide
guuacacugggguuggugu

SEQ ID NO: 1801581 - RNA, 19 nt, Artificial Sequence
  Description of Artificial Sequence: Synthetic oligonucleotide
uugauucuggcugcauaug

SEQ ID NO: 1801582 - RNA, 19 nt, Artificial Sequence
  Description of Artificial Sequence: Synthetic oligonucleotide
agaggacauuagucuuuac

SEQ ID NO: 1801583 - RNA, 19 nt, Artificial Sequence
  Description of Artificial Sequence: Synthetic oligonucleotide
gggacaacgcugcugcuag

SEQ ID NO: 1801584 - RNA, 19 nt, Artificial Sequence
  Description of Artificial Sequence: Synthetic oligonucleotide
aagggcagggcucccuuau

SEQ ID NO: 1801585 - RNA, 19 nt, Artificial Sequence
  Description of Artificial Sequence: Synthetic oligonucleotide
ggaauaacagguguaaugu

SEQ ID NO: 1801586 - RNA, 19 nt, Artificial Sequence
  Description of Artificial Sequence: Synthetic oligonucleotide
auggucccuguguuaaaug

SEQ ID NO: 1801587 - RNA, 19 nt, Artificial Sequence
  Description of Artificial Sequence: Synthetic oligonucleotide
guugguguuugaccguuca

SEQ ID NO: 1801588 - RNA, 19 nt, Artificial Sequence
  Description of Artificial Sequence: Synthetic oligonucleotide
uggacccucauugccagga

SEQ ID NO: 1801589 - RNA, 19 nt, Artificial Sequence
  Description of Artificial Sequence: Synthetic oligonucleotide
ugcugagcccuugugauua

SEQ ID NO: 1801590 - RNA, 19 nt, Artificial Sequence
  Description of Artificial Sequence: Synthetic oligonucleotide
gcccagagaauguugauuc

SEQ ID NO: 1801591 - RNA, 19 nt, Artificial Sequence
  Description of Artificial Sequence: Synthetic oligonucleotide
caugucuagcucugugcug

SEQ ID NO: 1801592 - RNA, 19 nt, Artificial Sequence
  Description of Artificial Sequence: Synthetic oligonucleotide
uugaccguucaaaggugaa

SEQ ID NO: 1801593 - RNA, 19 nt, Artificial Sequence
  Description of Artificial Sequence: Synthetic oligonucleotide
caguagaaagaaagggcca

SEQ ID NO: 1801594 - RNA, 19 nt, Artificial Sequence
  Description of Artificial Sequence: Synthetic oligonucleotide
accauaaccuucaugccaa

SEQ ID NO: 1801595 - RNA, 19 nt, Artificial Sequence
  Description of Artificial Sequence: Synthetic oligonucleotide
cauugcugagcccuuguga

SEQ ID NO: 1801596 - RNA, 19 nt, Artificial Sequence
  Description of Artificial Sequence: Synthetic oligonucleotide
cauugccaggacugagggg

SEQ ID NO: 1801597 - RNA, 19 nt, Artificial Sequence
  Description of Artificial Sequence: Synthetic oligonucleotide
gagcuugauccgcauucgc

SEQ ID NO: 1801598 - RNA, 19 nt, Artificial Sequence
  Description of Artificial Sequence: Synthetic oligonucleotide
auaaaucauuggccuggcu

SEQ ID NO: 1801599 - RNA, 19 nt, Artificial Sequence
  Description of Artificial Sequence: Synthetic oligonucleotide
ucuaaccaguuuucuuuua

SEQ ID NO: 1801600 - RNA, 19 nt, Artificial Sequence
  Description of Artificial Sequence: Synthetic oligonucleotide
guuugaccguucaaaggug

SEQ ID NO: 1801601 - RNA, 19 nt, Artificial Sequence
  Description of Artificial Sequence: Synthetic oligonucleotide
guugauucuggcugcauau

SEQ ID NO: 1801602 - RNA, 19 nt, Artificial Sequence
  Description of Artificial Sequence: Synthetic oligonucleotide
gagcaccauaaccuucaug

SEQ ID NO: 1801603 - RNA, 19 nt, Artificial Sequence
  Description of Artificial Sequence: Synthetic oligonucleotide
augccaaaucucaacaaaa

SEQ ID NO: 1801604 - RNA, 19 nt, Artificial Sequence
  Description of Artificial Sequence: Synthetic oligonucleotide
ggacauuagucuuuaccga

SEQ ID NO: 1801605 - RNA, 19 nt, Artificial Sequence
  Description of Artificial Sequence: Synthetic oligonucleotide
ucgacaguucucucagcuc

SEQ ID NO: 1801606 - RNA, 19 nt, Artificial Sequence
  Description of Artificial Sequence: Synthetic oligonucleotide
aaucauuggccuggcuggu

SEQ ID NO: 1801607 - RNA, 19 nt, Artificial Sequence
  Description of Artificial Sequence: Synthetic oligonucleotide
guauacagcaaugcacaga

SEQ ID NO: 1801608 - RNA, 19 nt, Artificial Sequence
  Description of Artificial Sequence: Synthetic oligonucleotide
aggucuaaccaguuuucuu

SEQ ID NO: 1801609 - RNA, 19 nt, Artificial Sequence
  Description of Artificial Sequence: Synthetic oligonucleotide
uugguguuugaccguucaa

SEQ ID NO: 1801610 - RNA, 19 nt, Artificial Sequence
  Description of Artificial Sequence: Synthetic oligonucleotide
uuggaauaacagguguaau

SEQ ID NO: 1801611 - RNA, 19 nt, Artificial Sequence
  Description of Artificial Sequence: Synthetic oligonucleotide
ugguggguacaguuggaau

SEQ ID NO: 1801612 - RNA, 19 nt, Artificial Sequence
  Description of Artificial Sequence: Synthetic oligonucleotide
ucccagaauuccuuugauu

SEQ ID NO: 1801613 - RNA, 19 nt, Artificial Sequence
  Description of Artificial Sequence: Synthetic oligonucleotide
auucgcagcuguugcuucu

SEQ ID NO: 1801614 - RNA, 19 nt, Artificial Sequence
  Description of Artificial Sequence: Synthetic oligonucleotide
agcaguaacuugaggaaaa

SEQ ID NO: 1801615 - RNA, 19 nt, Artificial Sequence
  Description of Artificial Sequence: Synthetic oligonucleotide
acuugcgugauggucccug

SEQ ID NO: 1801616 - RNA, 19 nt, Artificial Sequence
  Description of Artificial Sequence: Synthetic oligonucleotide
uuccuuugauugaguggga

SEQ ID NO: 1801617 - RNA, 19 nt, Artificial Sequence
  Description of Artificial Sequence: Synthetic oligonucleotide
ggagugauuccaccagcag

SEQ ID NO: 1801618 - RNA, 19 nt, Artificial Sequence
  Description of Artificial Sequence: Synthetic oligonucleotide
uuguucacuucugcuagau

SEQ ID NO: 1801619 - RNA, 19 nt, Artificial Sequence
  Description of Artificial Sequence: Synthetic oligonucleotide
gcccaguccacagagauac

SEQ ID NO: 1801620 - RNA, 19 nt, Artificial Sequence
  Description of Artificial Sequence: Synthetic oligonucleotide
acccucauugccaggacug

SEQ ID NO: 1801621 - RNA, 19 nt, Artificial Sequence
  Description of Artificial Sequence: Synthetic oligonucleotide
uggcugcauaugugggagg

SEQ ID NO: 1801622 - RNA, 19 nt, Artificial Sequence
  Description of Artificial Sequence: Synthetic oligonucleotide
ugugagcuugauccgcauu

SEQ ID NO: 1801623 - RNA, 19 nt, Artificial Sequence
  Description of Artificial Sequence: Synthetic oligonucleotide
gguggguacaguuggaaua

SEQ ID NO: 1801624 - RNA, 19 nt, Artificial Sequence
  Description of Artificial Sequence: Synthetic oligonucleotide
ccucuuucaaacauuggga

SEQ ID NO: 1801625 - RNA, 19 nt, Artificial Sequence
  Description of Artificial Sequence: Synthetic oligonucleotide
uuacacugggguugguguu

SEQ ID NO: 1801626 - RNA, 19 nt, Artificial Sequence
  Description of Artificial Sequence: Synthetic oligonucleotide
ggcugcauaugugggaggg

SEQ ID NO: 1801627 - RNA, 19 nt, Artificial Sequence
  Description of Artificial Sequence: Synthetic oligonucleotide
aggugaauucuaucuucaa

SEQ ID NO: 1801628 - RNA, 19 nt, Artificial Sequence
  Description of Artificial Sequence: Synthetic oligonucleotide
ugcauaugugggaggggua

SEQ ID NO: 1801629 - RNA, 19 nt, Artificial Sequence
  Description of Artificial Sequence: Synthetic oligonucleotide
gcuaggagacagaagcugc

SEQ ID NO: 1801630 - RNA, 19 nt, Artificial Sequence
  Description of Artificial Sequence: Synthetic oligonucleotide
aaccagcuagugaggaaca

SEQ ID NO: 1801631 - RNA, 19 nt, Artificial Sequence
  Description of Artificial Sequence: Synthetic oligonucleotide
caacgcugcugcuaggaga

SEQ ID NO: 1801632 - RNA, 19 nt, Artificial Sequence
  Description of Artificial Sequence: Synthetic oligonucleotide
gauugccucaguggcccag

SEQ ID NO: 1801633 - RNA, 19 nt, Artificial Sequence
  Description of Artificial Sequence: Synthetic oligonucleotide
uccuuugauugagugggau

SEQ ID NO: 1801634 - RNA, 19 nt, Artificial Sequence
  Description of Artificial Sequence: Synthetic oligonucleotide
aaaggcucccaggagccua

SEQ ID NO: 1801635 - RNA, 19 nt, Artificial Sequence
  Description of Artificial Sequence: Synthetic oligonucleotide
ucaagccguucuuacugua

SEQ ID NO: 1801636 - RNA, 19 nt, Artificial Sequence
  Description of Artificial Sequence: Synthetic oligonucleotide
ugugcuguuggaggccugu

SEQ ID NO: 1801637 - RNA, 19 nt, Artificial Sequence
  Description of Artificial Sequence: Synthetic oligonucleotide
uccucgugcccaugguaca

SEQ ID NO: 1801638 - RNA, 19 nt, Artificial Sequence
  Description of Artificial Sequence: Synthetic oligonucleotide
guaugcugugauggagggg

SEQ ID NO: 1801639 - RNA, 19 nt, Artificial Sequence
  Description of Artificial Sequence: Synthetic oligonucleotide
ugaccguucaaaggugaau

SEQ ID NO: 1801640 - RNA, 19 nt, Artificial Sequence
  Description of Artificial Sequence: Synthetic oligonucleotide
gaaugagaauggugcugga

SEQ ID NO: 1801641 - RNA, 19 nt, Artificial Sequence
  Description of Artificial Sequence: Synthetic oligonucleotide
agcuagugaggaacaaaca

SEQ ID NO: 1801642 - RNA, 19 nt, Artificial Sequence
  Description of Artificial Sequence: Synthetic oligonucleotide
aaagggcagggcucccuua

SEQ ID NO: 1801643 - RNA, 19 nt, Artificial Sequence
  Description of Artificial Sequence: Synthetic oligonucleotide
cauaaccuccuucccagaa

SEQ ID NO: 1801644 - RNA, 19 nt, Artificial Sequence
  Description of Artificial Sequence: Synthetic oligonucleotide
gauuauaugugagcuugau

SEQ ID NO: 1801645 - RNA, 19 nt, Artificial Sequence
  Description of Artificial Sequence: Synthetic oligonucleotide
gcccuugugauuauaugug

SEQ ID NO: 1801646 - RNA, 19 nt, Artificial Sequence
  Description of Artificial Sequence: Synthetic oligonucleotide
gaauuccaguccucuccuc

SEQ ID NO: 1801647 - RNA, 19 nt, Artificial Sequence
  Description of Artificial Sequence: Synthetic oligonucleotide
uaacagguguaaugucauu

SEQ ID NO: 1801648 - RNA, 19 nt, Artificial Sequence
  Description of Artificial Sequence: Synthetic oligonucleotide
ccuggagugauuccaccag

SEQ ID NO: 1801649 - RNA, 19 nt, Artificial Sequence
  Description of Artificial Sequence: Synthetic oligonucleotide
ccacuuaugaugguaacca

SEQ ID NO: 1801650 - RNA, 19 nt, Artificial Sequence
  Description of Artificial Sequence: Synthetic oligonucleotide
gcuguuggaggccuguauc

SEQ ID NO: 1801651 - RNA, 19 nt, Artificial Sequence
  Description of Artificial Sequence: Synthetic oligonucleotide
gugauggucccuguguuaa

SEQ ID NO: 1801652 - RNA, 19 nt, Artificial Sequence
  Description of Artificial Sequence: Synthetic oligonucleotide
gccagcaaucauaaccucc

SEQ ID NO: 1801653 - RNA, 19 nt, Artificial Sequence
  Description of Artificial Sequence: Synthetic oligonucleotide
gugaguguuuucuugccau

SEQ ID NO: 1801654 - RNA, 19 nt, Artificial Sequence
  Description of Artificial Sequence: Synthetic oligonucleotide
guaaccagcuagugaggaa

SEQ ID NO: 1801655 - RNA, 19 nt, Artificial Sequence
  Description of Artificial Sequence: Synthetic oligonucleotide
caguccucuccuccagacc

SEQ ID NO: 1801656 - RNA, 19 nt, Artificial Sequence
  Description of Artificial Sequence: Synthetic oligonucleotide
gcaccauaaccuucaugcc

SEQ ID NO: 1801657 - RNA, 19 nt, Artificial Sequence
  Description of Artificial Sequence: Synthetic oligonucleotide
caauuccauuccacuuaug

SEQ ID NO: 1801658 - RNA, 19 nt, Artificial Sequence
  Description of Artificial Sequence: Synthetic oligonucleotide
ugccagcaaucauaaccuc

SEQ ID NO: 1801659 - RNA, 19 nt, Artificial Sequence
  Description of Artificial Sequence: Synthetic oligonucleotide
gggguaaaguguggaaaag

SEQ ID NO: 1801660 - RNA, 19 nt, Artificial Sequence
  Description of Artificial Sequence: Synthetic oligonucleotide
cccuuauguccauuguuac

SEQ ID NO: 1801661 - RNA, 19 nt, Artificial Sequence
  Description of Artificial Sequence: Synthetic oligonucleotide
ggcucccuuauguccauug

SEQ ID NO: 1801662 - RNA, 19 nt, Artificial Sequence
  Description of Artificial Sequence: Synthetic oligonucleotide
cucuuugaacuccaucugu

SEQ ID NO: 1801663 - RNA, 19 nt, Artificial Sequence
  Description of Artificial Sequence: Synthetic oligonucleotide
ggagccuaaugccucuuuc

SEQ ID NO: 1801664 - RNA, 19 nt, Artificial Sequence
  Description of Artificial Sequence: Synthetic oligonucleotide
gguaaccagcuagugagga

SEQ ID NO: 1801665 - RNA, 19 nt, Artificial Sequence
  Description of Artificial Sequence: Synthetic oligonucleotide
gagaggacauuagucuuua

SEQ ID NO: 1801666 - RNA, 19 nt, Artificial Sequence
  Description of Artificial Sequence: Synthetic oligonucleotide
ugauggucccuguguuaaa

SEQ ID NO: 1801667 - RNA, 19 nt, Artificial Sequence
  Description of Artificial Sequence: Synthetic oligonucleotide
gaccguucaaaggugaauu

SEQ ID NO: 1801668 - RNA, 19 nt, Artificial Sequence
  Description of Artificial Sequence: Synthetic oligonucleotide
ugggacaacgcugcugcua

SEQ ID NO: 1801669 - RNA, 19 nt, Artificial Sequence
  Description of Artificial Sequence: Synthetic oligonucleotide
cauuccacuuaugauggua

SEQ ID NO: 1801670 - RNA, 19 nt, Artificial Sequence
  Description of Artificial Sequence: Synthetic oligonucleotide
uucuaucuucaagccguuc

SEQ ID NO: 1801671 - RNA, 19 nt, Artificial Sequence
  Description of Artificial Sequence: Synthetic oligonucleotide
uccucccaacaaauccaau

SEQ ID NO: 1801672 - RNA, 19 nt, Artificial Sequence
  Description of Artificial Sequence: Synthetic oligonucleotide
guggcccagagaauguuga

SEQ ID NO: 1801673 - RNA, 19 nt, Artificial Sequence
  Description of Artificial Sequence: Synthetic oligonucleotide
ccguucuuacuguaugcug

SEQ ID NO: 1801674 - RNA, 19 nt, Artificial Sequence
  Description of Artificial Sequence: Synthetic oligonucleotide
gugauuccaccagcagaag

SEQ ID NO: 1801675 - RNA, 19 nt, Artificial Sequence
  Description of Artificial Sequence: Synthetic oligonucleotide
ccagaccaguugcugauug

SEQ ID NO: 1801676 - RNA, 19 nt, Artificial Sequence
  Description of Artificial Sequence: Synthetic oligonucleotide
aucauuggccuggcuggug

SEQ ID NO: 1801677 - RNA, 19 nt, Artificial Sequence
  Description of Artificial Sequence: Synthetic oligonucleotide
augugagcuugauccgcau

SEQ ID NO: 1801678 - RNA, 19 nt, Artificial Sequence
  Description of Artificial Sequence: Synthetic oligonucleotide
agagcaccauaaccuucau

SEQ ID NO: 1801679 - RNA, 19 nt, Artificial Sequence
  Description of Artificial Sequence: Synthetic oligonucleotide
cuggacccucauugccagg

SEQ ID NO: 1801680 - RNA, 19 nt, Artificial Sequence
  Description of Artificial Sequence: Synthetic oligonucleotide
ggucuugccagcaaucaua

SEQ ID NO: 1801681 - RNA, 19 nt, Artificial Sequence
  Description of Artificial Sequence: Synthetic oligonucleotide
agcuccucgugcccauggu

SEQ ID NO: 1801682 - RNA, 19 nt, Artificial Sequence
  Description of Artificial Sequence: Synthetic oligonucleotide
acacugggguugguguuug

SEQ ID NO: 1801683 - RNA, 19 nt, Artificial Sequence
  Description of Artificial Sequence: Synthetic oligonucleotide
ggguacaguuggaauaaca

SEQ ID NO: 1801684 - RNA, 19 nt, Artificial Sequence
  Description of Artificial Sequence: Synthetic oligonucleotide
gacccucauugccaggacu

SEQ ID NO: 1801685 - RNA, 19 nt, Artificial Sequence
  Description of Artificial Sequence: Synthetic oligonucleotide
cagaggagaggacauuagu

SEQ ID NO: 1801686 - RNA, 19 nt, Artificial Sequence
  Description of Artificial Sequence: Synthetic oligonucleotide
cugcuagaucuugcauugc

SEQ ID NO: 1801687 - RNA, 19 nt, Artificial Sequence
  Description of Artificial Sequence: Synthetic oligonucleotide
aggagccuaaugccucuuu

SEQ ID NO: 1801688 - RNA, 19 nt, Artificial Sequence
  Description of Artificial Sequence: Synthetic oligonucleotide
gucuaaccaguuuucuuuu

SEQ ID NO: 1801689 - RNA, 19 nt, Artificial Sequence
  Description of Artificial Sequence: Synthetic oligonucleotide
ccaguccucuccuccagac

SEQ ID NO: 1801690 - RNA, 19 nt, Artificial Sequence
  Description of Artificial Sequence: Synthetic oligonucleotide
ccacagagauacaacagua

SEQ ID NO: 1801691 - RNA, 19 nt, Artificial Sequence
  Description of Artificial Sequence: Synthetic oligonucleotide
ccagcaaucauaaccuccu

SEQ ID NO: 1801692 - RNA, 19 nt, Artificial Sequence
  Description of Artificial Sequence: Synthetic oligonucleotide
gaauggugcuggacccuca

SEQ ID NO: 1801693 - RNA, 19 nt, Artificial Sequence
  Description of Artificial Sequence: Synthetic oligonucleotide
ccgcauucgcagcuguugc

SEQ ID NO: 1801694 - RNA, 19 nt, Artificial Sequence
  Description of Artificial Sequence: Synthetic oligonucleotide
gauccgcauucgcagcugu

SEQ ID NO: 1801695 - RNA, 19 nt, Artificial Sequence
  Description of Artificial Sequence: Synthetic oligonucleotide
gcugcauaugugggagggg

SEQ ID NO: 1801696 - RNA, 19 nt, Artificial Sequence
  Description of Artificial Sequence: Synthetic oligonucleotide
gccuggagugauuccacca

SEQ ID NO: 1801697 - RNA, 19 nt, Artificial Sequence
  Description of Artificial Sequence: Synthetic oligonucleotide
ccucaacagcagaggagag

SEQ ID NO: 1801698 - RNA, 19 nt, Artificial Sequence
  Description of Artificial Sequence: Synthetic oligonucleotide
gguuugcugguggguacag

SEQ ID NO: 1801699 - RNA, 19 nt, Artificial Sequence
  Description of Artificial Sequence: Synthetic oligonucleotide
gaaaagggcagggcucccu

SEQ ID NO: 1801700 - RNA, 19 nt, Artificial Sequence
  Description of Artificial Sequence: Synthetic oligonucleotide
gcauaugugggagggguaa

SEQ ID NO: 1801701 - RNA, 19 nt, Artificial Sequence
  Description of Artificial Sequence: Synthetic oligonucleotide
ccuguguuaaaugcuggga

SEQ ID NO: 1801702 - RNA, 19 nt, Artificial Sequence
  Description of Artificial Sequence: Synthetic oligonucleotide
gaccaguugcugauugccu

SEQ ID NO: 1801703 - RNA, 19 nt, Artificial Sequence
  Description of Artificial Sequence: Synthetic oligonucleotide
accagcuagugaggaacaa

SEQ ID NO: 1801704 - RNA, 19 nt, Artificial Sequence
  Description of Artificial Sequence: Synthetic oligonucleotide
cuggaaugucuuugguacu

SEQ ID NO: 1801705 - RNA, 19 nt, Artificial Sequence
  Description of Artificial Sequence: Synthetic oligonucleotide
gggaugccuggagugauuc

SEQ ID NO: 1801706 - RNA, 19 nt, Artificial Sequence
  Description of Artificial Sequence: Synthetic oligonucleotide
gaaaacccuccucgacagu

SEQ ID NO: 1801707 - RNA, 19 nt, Artificial Sequence
  Description of Artificial Sequence: Synthetic oligonucleotide
ggcagggcucccuuauguc

SEQ ID NO: 1801708 - RNA, 19 nt, Artificial Sequence
  Description of Artificial Sequence: Synthetic oligonucleotide
cugguggguacaguuggaa

SEQ ID NO: 1801709 - RNA, 19 nt, Artificial Sequence
  Description of Artificial Sequence: Synthetic oligonucleotide
guacugcagccuggaaaac

SEQ ID NO: 1801710 - RNA, 19 nt, Artificial Sequence
  Description of Artificial Sequence: Synthetic oligonucleotide
cauaugugggagggguaaa

SEQ ID NO: 1801711 - RNA, 19 nt, Artificial Sequence
  Description of Artificial Sequence: Synthetic oligonucleotide
guuggaggccuguaucguu

SEQ ID NO: 1801712 - RNA, 19 nt, Artificial Sequence
  Description of Artificial Sequence: Synthetic oligonucleotide
gagaauggugcuggacccu

SEQ ID NO: 1801713 - RNA, 19 nt, Artificial Sequence
  Description of Artificial Sequence: Synthetic oligonucleotide
ccucauugccaggacugag

SEQ ID NO: 1801714 - RNA, 19 nt, Artificial Sequence
  Description of Artificial Sequence: Synthetic oligonucleotide
ccuuugauugagugggaua

SEQ ID NO: 1801715 - RNA, 19 nt, Artificial Sequence
  Description of Artificial Sequence: Synthetic oligonucleotide
guggguucagaaccuuaau

SEQ ID NO: 1801716 - RNA, 19 nt, Artificial Sequence
  Description of Artificial Sequence: Synthetic oligonucleotide
cucaaggucuaaccaguuu

SEQ ID NO: 1801717 - RNA, 19 nt, Artificial Sequence
  Description of Artificial Sequence: Synthetic oligonucleotide
acccuccucgacaguucuc

SEQ ID NO: 1801718 - RNA, 19 nt, Artificial Sequence
  Description of Artificial Sequence: Synthetic oligonucleotide
gcugguuugcuggugggua

SEQ ID NO: 1801719 - RNA, 19 nt, Artificial Sequence
  Description of Artificial Sequence: Synthetic oligonucleotide
ggacccucauugccaggac

SEQ ID NO: 1801720 - RNA, 19 nt, Artificial Sequence
  Description of Artificial Sequence: Synthetic oligonucleotide
cuugcgugauggucccugu

SEQ ID NO: 1801721 - RNA, 19 nt, Artificial Sequence
  Description of Artificial Sequence: Synthetic oligonucleotide
cauaaccuucaugccaaau

SEQ ID NO: 1801722 - RNA, 19 nt, Artificial Sequence
  Description of Artificial Sequence: Synthetic oligonucleotide
ccucgugcccaugguacag

SEQ ID NO: 1801723 - RNA, 19 nt, Artificial Sequence
  Description of Artificial Sequence: Synthetic oligonucleotide
ccucgacaguucucucagc

SEQ ID NO: 1801724 - RNA, 19 nt, Artificial Sequence
  Description of Artificial Sequence: Synthetic oligonucleotide
ggaggccuguaucguuauc

SEQ ID NO: 1801725 - RNA, 19 nt, Artificial Sequence
  Description of Artificial Sequence: Synthetic oligonucleotide
ccuguaucguuaucacugu

SEQ ID NO: 1801726 - RNA, 19 nt, Artificial Sequence
  Description of Artificial Sequence: Synthetic oligonucleotide
gccguucuuacuguaugcu

SEQ ID NO: 1801727 - RNA, 19 nt, Artificial Sequence
  Description of Artificial Sequence: Synthetic oligonucleotide
gguugguguuugaccguuc

SEQ ID NO: 1801728 - RNA, 19 nt, Artificial Sequence
  Description of Artificial Sequence: Synthetic oligonucleotide
gcuccucgugcccauggua

SEQ ID NO: 1801729 - RNA, 19 nt, Artificial Sequence
  Description of Artificial Sequence: Synthetic oligonucleotide
cuguaucguuaucacuguu

SEQ ID NO: 1801730 - RNA, 19 nt, Artificial Sequence
  Description of Artificial Sequence: Synthetic oligonucleotide
ccagcuagugaggaacaaa

SEQ ID NO: 1801731 - RNA, 19 nt, Artificial Sequence
  Description of Artificial Sequence: Synthetic oligonucleotide
cacugggguugguguuuga

SEQ ID NO: 1801732 - RNA, 19 nt, Artificial Sequence
  Description of Artificial Sequence: Synthetic oligonucleotide
gggucuugccagcaaucau

SEQ ID NO: 1801733 - RNA, 19 nt, Artificial Sequence
  Description of Artificial Sequence: Synthetic oligonucleotide
auccgcauucgcagcuguu

SEQ ID NO: 1801734 - RNA, 19 nt, Artificial Sequence
  Description of Artificial Sequence: Synthetic oligonucleotide
cuccaucuguccaguguuu

SEQ ID NO: 1801735 - RNA, 19 nt, Artificial Sequence
  Description of Artificial Sequence: Synthetic oligonucleotide
gggguugguguuugaccgu

SEQ ID NO: 1801736 - RNA, 19 nt, Artificial Sequence
  Description of Artificial Sequence: Synthetic oligonucleotide
cugagcccuugugauuaua

SEQ ID NO: 1801737 - RNA, 19 nt, Artificial Sequence
  Description of Artificial Sequence: Synthetic oligonucleotide
acgcugcugcuaggagaca

SEQ ID NO: 1801738 - RNA, 19 nt, Artificial Sequence
  Description of Artificial Sequence: Synthetic oligonucleotide
gcauucgcagcuguugcuu

SEQ ID NO: 1801739 - RNA, 19 nt, Artificial Sequence
  Description of Artificial Sequence: Synthetic oligonucleotide
cccuccucgacaguucucu

SEQ ID NO: 1801740 - RNA, 19 nt, Artificial Sequence
  Description of Artificial Sequence: Synthetic oligonucleotide
cagaagcagccagccucaa

SEQ ID NO: 1801741 - RNA, 19 nt, Artificial Sequence
  Description of Artificial Sequence: Synthetic oligonucleotide
ggguugguguuugaccguu

SEQ ID NO: 1801742 - RNA, 19 nt, Artificial Sequence
  Description of Artificial Sequence: Synthetic oligonucleotide
gacuugcgugauggucccu

SEQ ID NO: 1801743 - RNA, 19 nt, Artificial Sequence
  Description of Artificial Sequence: Synthetic oligonucleotide
gcugagcccuugugauuau

SEQ ID NO: 1801744 - RNA, 19 nt, Artificial Sequence
  Description of Artificial Sequence: Synthetic oligonucleotide
cgcauucgcagcuguugcu

SEQ ID NO: 1801745 - RNA, 19 nt, Artificial Sequence
  Description of Artificial Sequence: Synthetic oligonucleotide
cuguuacacugggguuggu

SEQ ID NO: 1801746 - RNA, 19 nt, Artificial Sequence
  Description of Artificial Sequence: Synthetic oligonucleotide
ggggaugccuggagugauu

SEQ ID NO: 1801747 - RNA, 19 nt, Artificial Sequence
  Description of Artificial Sequence: Synthetic oligonucleotide
uguauuguggauauuguga

SEQ ID NO: 1801748 - RNA, 19 nt, Artificial Sequence
  Description of Artificial Sequence: Synthetic oligonucleotide
ugguauuugagucgcaugg

SEQ ID NO: 1801749 - RNA, 19 nt, Artificial Sequence
  Description of Artificial Sequence: Synthetic oligonucleotide
gaaacagagauccacacac

SEQ ID NO: 1801750 - RNA, 19 nt, Artificial Sequence
  Description of Artificial Sequence: Synthetic oligonucleotide
aaauguauuguggauauug

SEQ ID NO: 1801751 - RNA, 19 nt, Artificial Sequence
  Description of Artificial Sequence: Synthetic oligonucleotide
aacguuuccgcaccggacc

SEQ ID NO: 1801752 - RNA, 19 nt, Artificial Sequence
  Description of Artificial Sequence: Synthetic oligonucleotide
uauaugacgaugcuauugc

SEQ ID NO: 1801753 - RNA, 19 nt, Artificial Sequence
  Description of Artificial Sequence: Synthetic oligonucleotide
uuaaaugggucccaaauau

SEQ ID NO: 1801754 - RNA, 19 nt, Artificial Sequence
  Description of Artificial Sequence: Synthetic oligonucleotide
aaaucgugcauuuucaguu

SEQ ID NO: 1801755 - RNA, 19 nt, Artificial Sequence
  Description of Artificial Sequence: Synthetic oligonucleotide
guuugaaccggucaucucg

SEQ ID NO: 1801756 - RNA, 19 nt, Artificial Sequence
  Description of Artificial Sequence: Synthetic oligonucleotide
ugaagauaccaucuucagg

SEQ ID NO: 1801757 - RNA, 19 nt, Artificial Sequence
  Description of Artificial Sequence: Synthetic oligonucleotide
caguuuaacugucugaucc

SEQ ID NO: 1801758 - RNA, 19 nt, Artificial Sequence
  Description of Artificial Sequence: Synthetic oligonucleotide
aaguauucaacugccacuc

SEQ ID NO: 1801759 - RNA, 19 nt, Artificial Sequence
  Description of Artificial Sequence: Synthetic oligonucleotide
uaugauuacguggacuugg

SEQ ID NO: 1801760 - RNA, 19 nt, Artificial Sequence
  Description of Artificial Sequence: Synthetic oligonucleotide
aguuuaacugucugauccc

SEQ ID NO: 1801761 - RNA, 19 nt, Artificial Sequence
  Description of Artificial Sequence: Synthetic oligonucleotide
acagacguaucccaggagg

SEQ ID NO: 1801762 - RNA, 19 nt, Artificial Sequence
  Description of Artificial Sequence: Synthetic oligonucleotide
ucugauaggggcaucguga

SEQ ID NO: 1801763 - RNA, 19 nt, Artificial Sequence
  Description of Artificial Sequence: Synthetic oligonucleotide
ucucguguuagccuaagca

SEQ ID NO: 1801764 - RNA, 19 nt, Artificial Sequence
  Description of Artificial Sequence: Synthetic oligonucleotide
gaugcagcgagucugguac

SEQ ID NO: 1801765 - RNA, 19 nt, Artificial Sequence
  Description of Artificial Sequence: Synthetic oligonucleotide
uucacuuccggacaguacu

SEQ ID NO: 1801766 - RNA, 19 nt, Artificial Sequence
  Description of Artificial Sequence: Synthetic oligonucleotide
auugugaaaggaaauggcg

SEQ ID NO: 1801767 - RNA, 19 nt, Artificial Sequence
  Description of Artificial Sequence: Synthetic oligonucleotide
aucguagaggcgcacagac

SEQ ID NO: 1801768 - RNA, 19 nt, Artificial Sequence
  Description of Artificial Sequence: Synthetic oligonucleotide
uauggaacuggcacagccg

SEQ ID NO: 1801769 - RNA, 19 nt, Artificial Sequence
  Description of Artificial Sequence: Synthetic oligonucleotide
cuugaacucguuugaaccg

SEQ ID NO: 1801770 - RNA, 19 nt, Artificial Sequence
  Description of Artificial Sequence: Synthetic oligonucleotide
ucaguguucaaaucgugca

SEQ ID NO: 1801771 - RNA, 19 nt, Artificial Sequence
  Description of Artificial Sequence: Synthetic oligonucleotide
uugugaaaggaaauggcgu

SEQ ID NO: 1801772 - RNA, 19 nt, Artificial Sequence
  Description of Artificial Sequence: Synthetic oligonucleotide
cauuacaaggaguucuggg

SEQ ID NO: 1801773 - RNA, 19 nt, Artificial Sequence
  Description of Artificial Sequence: Synthetic oligonucleotide
agagacgcaaugcuagugg

SEQ ID NO: 1801774 - RNA, 19 nt, Artificial Sequence
  Description of Artificial Sequence: Synthetic oligonucleotide
ugcguuggaucguagaaag

SEQ ID NO: 1801775 - RNA, 19 nt, Artificial Sequence
  Description of Artificial Sequence: Synthetic oligonucleotide
uuacugaaggcaagagacg

SEQ ID NO: 1801776 - RNA, 19 nt, Artificial Sequence
  Description of Artificial Sequence: Synthetic oligonucleotide
gaccaguaggaacugagag

SEQ ID NO: 1801777 - RNA, 19 nt, Artificial Sequence
  Description of Artificial Sequence: Synthetic oligonucleotide
agcaaagcuuuccacagag

SEQ ID NO: 1801778 - RNA, 19 nt, Artificial Sequence
  Description of Artificial Sequence: Synthetic oligonucleotide
agucgcauggaguuggcgg

SEQ ID NO: 1801779 - RNA, 19 nt, Artificial Sequence
  Description of Artificial Sequence: Synthetic oligonucleotide
ucauacauauaugacgaug

SEQ ID NO: 1801780 - RNA, 19 nt, Artificial Sequence
  Description of Artificial Sequence: Synthetic oligonucleotide
uuuacaaauccaucagaac

SEQ ID NO: 1801781 - RNA, 19 nt, Artificial Sequence
  Description of Artificial Sequence: Synthetic oligonucleotide
uaagcaacguuuccgcacc

SEQ ID NO: 1801782 - RNA, 19 nt, Artificial Sequence
  Description of Artificial Sequence: Synthetic oligonucleotide
aggaaacagagauccacac

SEQ ID NO: 1801783 - RNA, 19 nt, Artificial Sequence
  Description of Artificial Sequence: Synthetic oligonucleotide
gagauccacacacuagacg

SEQ ID NO: 1801784 - RNA, 19 nt, Artificial Sequence
  Description of Artificial Sequence: Synthetic oligonucleotide
acugacaggguguauaccu

SEQ ID NO: 1801785 - RNA, 19 nt, Artificial Sequence
  Description of Artificial Sequence: Synthetic oligonucleotide
gaugcuauugcaagcguag

SEQ ID NO: 1801786 - RNA, 19 nt, Artificial Sequence
  Description of Artificial Sequence: Synthetic oligonucleotide
agaaagcgcaguccaagac

SEQ ID NO: 1801787 - RNA, 19 nt, Artificial Sequence
  Description of Artificial Sequence: Synthetic oligonucleotide
uuuguaggaagcaaagcuu

SEQ ID NO: 1801788 - RNA, 19 nt, Artificial Sequence
  Description of Artificial Sequence: Synthetic oligonucleotide
aaucgugcauuuucaguug

SEQ ID NO: 1801789 - RNA, 19 nt, Artificial Sequence
  Description of Artificial Sequence: Synthetic oligonucleotide
acauauaugacgaugcuau

SEQ ID NO: 1801790 - RNA, 19 nt, Artificial Sequence
  Description of Artificial Sequence: Synthetic oligonucleotide
gacgaugcuauugcaagcg

SEQ ID NO: 1801791 - RNA, 19 nt, Artificial Sequence
  Description of Artificial Sequence: Synthetic oligonucleotide
uauuugagucgcauggagu

SEQ ID NO: 1801792 - RNA, 19 nt, Artificial Sequence
  Description of Artificial Sequence: Synthetic oligonucleotide
cugcacauagcccauauuc

SEQ ID NO: 1801793 - RNA, 19 nt, Artificial Sequence
  Description of Artificial Sequence: Synthetic oligonucleotide
cuauggaacuggcacagcc

SEQ ID NO: 1801794 - RNA, 19 nt, Artificial Sequence
  Description of Artificial Sequence: Synthetic oligonucleotide
aacucguuugaaccgguca

SEQ ID NO: 1801795 - RNA, 19 nt, Artificial Sequence
  Description of Artificial Sequence: Synthetic oligonucleotide
uggacuugggcuuuguuuc

SEQ ID NO: 1801796 - RNA, 19 nt, Artificial Sequence
  Description of Artificial Sequence: Synthetic oligonucleotide
uauugcaagcguaguuccg

SEQ ID NO: 1801797 - RNA, 19 nt, Artificial Sequence
  Description of Artificial Sequence: Synthetic oligonucleotide
auauaugacgaugcuauug

SEQ ID NO: 1801798 - RNA, 19 nt, Artificial Sequence
  Description of Artificial Sequence: Synthetic oligonucleotide
cuauugcaagcguaguucc

SEQ ID NO: 1801799 - RNA, 19 nt, Artificial Sequence
  Description of Artificial Sequence: Synthetic oligonucleotide
augaagauaccaucuucag

SEQ ID NO: 1801800 - RNA, 19 nt, Artificial Sequence
  Description of Artificial Sequence: Synthetic oligonucleotide
uccaccauaugauuacgug

SEQ ID NO: 1801801 - RNA, 19 nt, Artificial Sequence
  Description of Artificial Sequence: Synthetic oligonucleotide
uguccccggacacugacag

SEQ ID NO: 1801802 - RNA, 19 nt, Artificial Sequence
  Description of Artificial Sequence: Synthetic oligonucleotide
acugucugaucccaacuuc

SEQ ID NO: 1801803 - RNA, 19 nt, Artificial Sequence
  Description of Artificial Sequence: Synthetic oligonucleotide
uaucuauggaacuggcaca

SEQ ID NO: 1801804 - RNA, 19 nt, Artificial Sequence
  Description of Artificial Sequence: Synthetic oligonucleotide
aaaggaaauggcguugacu

SEQ ID NO: 1801805 - RNA, 19 nt, Artificial Sequence
  Description of Artificial Sequence: Synthetic oligonucleotide
uacugaaggcaagagacgc

SEQ ID NO: 1801806 - RNA, 19 nt, Artificial Sequence
  Description of Artificial Sequence: Synthetic oligonucleotide
ucguguuagccuaagcaac

SEQ ID NO: 1801807 - RNA, 19 nt, Artificial Sequence
  Description of Artificial Sequence: Synthetic oligonucleotide
guauuugagucgcauggag

SEQ ID NO: 1801808 - RNA, 19 nt, Artificial Sequence
  Description of Artificial Sequence: Synthetic oligonucleotide
acuuggcgaaugaagauac

SEQ ID NO: 1801809 - RNA, 19 nt, Artificial Sequence
  Description of Artificial Sequence: Synthetic oligonucleotide
uuggaucguagaaagcgca

SEQ ID NO: 1801810 - RNA, 19 nt, Artificial Sequence
  Description of Artificial Sequence: Synthetic oligonucleotide
guaaccaucacauucacuu

SEQ ID NO: 1801811 - RNA, 19 nt, Artificial Sequence
  Description of Artificial Sequence: Synthetic oligonucleotide
acuaacaccccguuucucu

SEQ ID NO: 1801812 - RNA, 19 nt, Artificial Sequence
  Description of Artificial Sequence: Synthetic oligonucleotide
aauguauuguggauauugu

SEQ ID NO: 1801813 - RNA, 19 nt, Artificial Sequence
  Description of Artificial Sequence: Synthetic oligonucleotide
ucccaaauauuuacaaauc

SEQ ID NO: 1801814 - RNA, 19 nt, Artificial Sequence
  Description of Artificial Sequence: Synthetic oligonucleotide
gacuacagcagcccuuggg

SEQ ID NO: 1801815 - RNA, 19 nt, Artificial Sequence
  Description of Artificial Sequence: Synthetic oligonucleotide
uuagccuaagcaacguuuc

SEQ ID NO: 1801816 - RNA, 19 nt, Artificial Sequence
  Description of Artificial Sequence: Synthetic oligonucleotide
uugaacucguuugaaccgg

SEQ ID NO: 1801817 - RNA, 19 nt, Artificial Sequence
  Description of Artificial Sequence: Synthetic oligonucleotide
aauggcguugacuggguaa

SEQ ID NO: 1801818 - RNA, 19 nt, Artificial Sequence
  Description of Artificial Sequence: Synthetic oligonucleotide
gagacgcaaugcuaguggg

SEQ ID NO: 1801819 - RNA, 19 nt, Artificial Sequence
  Description of Artificial Sequence: Synthetic oligonucleotide
uuaacugucugaucccaac

SEQ ID NO: 1801820 - RNA, 19 nt, Artificial Sequence
  Description of Artificial Sequence: Synthetic oligonucleotide
gauuacguggacuugggcu

SEQ ID NO: 1801821 - RNA, 19 nt, Artificial Sequence
  Description of Artificial Sequence: Synthetic oligonucleotide
uguggauauugugaaagga

SEQ ID NO: 1801822 - RNA, 19 nt, Artificial Sequence
  Description of Artificial Sequence: Synthetic oligonucleotide
guuuguaggaagcaaagcu

SEQ ID NO: 1801823 - RNA, 19 nt, Artificial Sequence
  Description of Artificial Sequence: Synthetic oligonucleotide
cuaagcaacguuuccgcac

SEQ ID NO: 1801824 - RNA, 19 nt, Artificial Sequence
  Description of Artificial Sequence: Synthetic oligonucleotide
uacaagggcaugaagccuc

SEQ ID NO: 1801825 - RNA, 19 nt, Artificial Sequence
  Description of Artificial Sequence: Synthetic oligonucleotide
aaaugggucccaaauauuu

SEQ ID NO: 1801826 - RNA, 19 nt, Artificial Sequence
  Description of Artificial Sequence: Synthetic oligonucleotide
gcuugaacucguuugaacc

SEQ ID NO: 1801827 - RNA, 19 nt, Artificial Sequence
  Description of Artificial Sequence: Synthetic oligonucleotide
uuuagccugugacacuuga

SEQ ID NO: 1801828 - RNA, 19 nt, Artificial Sequence
  Description of Artificial Sequence: Synthetic oligonucleotide
uccccggacacugacaggg

SEQ ID NO: 1801829 - RNA, 19 nt, Artificial Sequence
  Description of Artificial Sequence: Synthetic oligonucleotide
uuguaggaagcaaagcuuu

SEQ ID NO: 1801830 - RNA, 19 nt, Artificial Sequence
  Description of Artificial Sequence: Synthetic oligonucleotide
aacaccccguuucucuccg

SEQ ID NO: 1801831 - RNA, 19 nt, Artificial Sequence
  Description of Artificial Sequence: Synthetic oligonucleotide
uuggcgaaugaagauacca

SEQ ID NO: 1801832 - RNA, 19 nt, Artificial Sequence
  Description of Artificial Sequence: Synthetic oligonucleotide
caccggaccaacuaacacc

SEQ ID NO: 1801833 - RNA, 19 nt, Artificial Sequence
  Description of Artificial Sequence: Synthetic oligonucleotide
ggaguuggcgggcacaucg

SEQ ID NO: 1801834 - RNA, 19 nt, Artificial Sequence
  Description of Artificial Sequence: Synthetic oligonucleotide
ucgggcugagagaaggucc

SEQ ID NO: 1801835 - RNA, 19 nt, Artificial Sequence
  Description of Artificial Sequence: Synthetic oligonucleotide
uagacggagucuccaauga

SEQ ID NO: 1801836 - RNA, 19 nt, Artificial Sequence
  Description of Artificial Sequence: Synthetic oligonucleotide
uguuuguaggaagcaaagc

SEQ ID NO: 1801837 - RNA, 19 nt, Artificial Sequence
  Description of Artificial Sequence: Synthetic oligonucleotide
caggguguauaccuuuucg

SEQ ID NO: 1801838 - RNA, 19 nt, Artificial Sequence
  Description of Artificial Sequence: Synthetic oligonucleotide
acauaacccugcuuguuug

SEQ ID NO: 1801839 - RNA, 19 nt, Artificial Sequence
  Description of Artificial Sequence: Synthetic oligonucleotide
gcuagugggguaucuaugg

SEQ ID NO: 1801840 - RNA, 19 nt, Artificial Sequence
  Description of Artificial Sequence: Synthetic oligonucleotide
auuacguggacuugggcuu

SEQ ID NO: 1801841 - RNA, 19 nt, Artificial Sequence
  Description of Artificial Sequence: Synthetic oligonucleotide
uaacugucugaucccaacu

SEQ ID NO: 1801842 - RNA, 19 nt, Artificial Sequence
  Description of Artificial Sequence: Synthetic oligonucleotide
guagacaagagacauuucu

SEQ ID NO: 1801843 - RNA, 19 nt, Artificial Sequence
  Description of Artificial Sequence: Synthetic oligonucleotide
uggaucguagaaagcgcag

SEQ ID NO: 1801844 - RNA, 19 nt, Artificial Sequence
  Description of Artificial Sequence: Synthetic oligonucleotide
uucaggaugcuccguguca

SEQ ID NO: 1801845 - RNA, 19 nt, Artificial Sequence
  Description of Artificial Sequence: Synthetic oligonucleotide
aacugucugaucccaacuu

SEQ ID NO: 1801846 - RNA, 19 nt, Artificial Sequence
  Description of Artificial Sequence: Synthetic oligonucleotide
guugacuggguaaaucugc

SEQ ID NO: 1801847 - RNA, 19 nt, Artificial Sequence
  Description of Artificial Sequence: Synthetic oligonucleotide
uucaguugaugaucuaauc

SEQ ID NO: 1801848 - RNA, 19 nt, Artificial Sequence
  Description of Artificial Sequence: Synthetic oligonucleotide
caccauaugauuacgugga

SEQ ID NO: 1801849 - RNA, 19 nt, Artificial Sequence
  Description of Artificial Sequence: Synthetic oligonucleotide
gaucguagaaagcgcaguc

SEQ ID NO: 1801850 - RNA, 19 nt, Artificial Sequence
  Description of Artificial Sequence: Synthetic oligonucleotide
gguguauaccuuuucgggc

SEQ ID NO: 1801851 - RNA, 19 nt, Artificial Sequence
  Description of Artificial Sequence: Synthetic oligonucleotide
gucgcauggaguuggcggg

SEQ ID NO: 1801852 - RNA, 19 nt, Artificial Sequence
  Description of Artificial Sequence: Synthetic oligonucleotide
acacacuagacggagucuc

SEQ ID NO: 1801853 - RNA, 19 nt, Artificial Sequence
  Description of Artificial Sequence: Synthetic oligonucleotide
acaucguagaggcgcacag

SEQ ID NO: 1801854 - RNA, 19 nt, Artificial Sequence
  Description of Artificial Sequence: Synthetic oligonucleotide
aucuauggaacuggcacag

SEQ ID NO: 1801855 - RNA, 19 nt, Artificial Sequence
  Description of Artificial Sequence: Synthetic oligonucleotide
gaugaucuaauccuccacu

SEQ ID NO: 1801856 - RNA, 19 nt, Artificial Sequence
  Description of Artificial Sequence: Synthetic oligonucleotide
acaucugauaggggcaucg

SEQ ID NO: 1801857 - RNA, 19 nt, Artificial Sequence
  Description of Artificial Sequence: Synthetic oligonucleotide
accauaugauuacguggac

SEQ ID NO: 1801858 - RNA, 19 nt, Artificial Sequence
  Description of Artificial Sequence: Synthetic oligonucleotide
ggcaucgugaguuccaacc

SEQ ID NO: 1801859 - RNA, 19 nt, Artificial Sequence
  Description of Artificial Sequence: Synthetic oligonucleotide
cuagacggagucuccaaug

SEQ ID NO: 1801860 - RNA, 19 nt, Artificial Sequence
  Description of Artificial Sequence: Synthetic oligonucleotide
ugcuagugggguaucuaug

SEQ ID NO: 1801861 - RNA, 19 nt, Artificial Sequence
  Description of Artificial Sequence: Synthetic oligonucleotide
ugacgaugcuauugcaagc

SEQ ID NO: 1801862 - RNA, 19 nt, Artificial Sequence
  Description of Artificial Sequence: Synthetic oligonucleotide
cuuguuugggaaggcacgg

SEQ ID NO: 1801863 - RNA, 19 nt, Artificial Sequence
  Description of Artificial Sequence: Synthetic oligonucleotide
aaucagccuguccccggac

SEQ ID NO: 1801864 - RNA, 19 nt, Artificial Sequence
  Description of Artificial Sequence: Synthetic oligonucleotide
agcccauauuccucaaguc

SEQ ID NO: 1801865 - RNA, 19 nt, Artificial Sequence
  Description of Artificial Sequence: Synthetic oligonucleotide
agacggagucuccaaugac

SEQ ID NO: 1801866 - RNA, 19 nt, Artificial Sequence
  Description of Artificial Sequence: Synthetic oligonucleotide
aagagacgcaaugcuagug

SEQ ID NO: 1801867 - RNA, 19 nt, Artificial Sequence
  Description of Artificial Sequence: Synthetic oligonucleotide
ugaaccggucaucucgugu

SEQ ID NO: 1801868 - RNA, 19 nt, Artificial Sequence
  Description of Artificial Sequence: Synthetic oligonucleotide
aucucguguuagccuaagc

SEQ ID NO: 1801869 - RNA, 19 nt, Artificial Sequence
  Description of Artificial Sequence: Synthetic oligonucleotide
ugauuacguggacuugggc

SEQ ID NO: 1801870 - RNA, 19 nt, Artificial Sequence
  Description of Artificial Sequence: Synthetic oligonucleotide
ucguagaggcgcacagacg

SEQ ID NO: 1801871 - RNA, 19 nt, Artificial Sequence
  Description of Artificial Sequence: Synthetic oligonucleotide
cugauaggggcaucgugag

SEQ ID NO: 1801872 - RNA, 19 nt, Artificial Sequence
  Description of Artificial Sequence: Synthetic oligonucleotide
uuuaacugucugaucccaa

SEQ ID NO: 1801873 - RNA, 19 nt, Artificial Sequence
  Description of Artificial Sequence: Synthetic oligonucleotide
ccaccauaugauuacgugg

SEQ ID NO: 1801874 - RNA, 19 nt, Artificial Sequence
  Description of Artificial Sequence: Synthetic oligonucleotide
ccaacuuccaguaaccauc

SEQ ID NO: 1801875 - RNA, 19 nt, Artificial Sequence
  Description of Artificial Sequence: Synthetic oligonucleotide
uacauauaugacgaugcua

SEQ ID NO: 1801876 - RNA, 19 nt, Artificial Sequence
  Description of Artificial Sequence: Synthetic oligonucleotide
caauuacagaguagacaag

SEQ ID NO: 1801877 - RNA, 19 nt, Artificial Sequence
  Description of Artificial Sequence: Synthetic oligonucleotide
aucugauaggggcaucgug

SEQ ID NO: 1801878 - RNA, 19 nt, Artificial Sequence
  Description of Artificial Sequence: Synthetic oligonucleotide
uagccuaagcaacguuucc

SEQ ID NO: 1801879 - RNA, 19 nt, Artificial Sequence
  Description of Artificial Sequence: Synthetic oligonucleotide
ugggguaucuauggaacug

SEQ ID NO: 1801880 - RNA, 19 nt, Artificial Sequence
  Description of Artificial Sequence: Synthetic oligonucleotide
aacuaacaccccguuucuc

SEQ ID NO: 1801881 - RNA, 19 nt, Artificial Sequence
  Description of Artificial Sequence: Synthetic oligonucleotide
ugcuauugcaagcguaguu

SEQ ID NO: 1801882 - RNA, 19 nt, Artificial Sequence
  Description of Artificial Sequence: Synthetic oligonucleotide
uuccaccauaugauuacgu

SEQ ID NO: 1801883 - RNA, 19 nt, Artificial Sequence
  Description of Artificial Sequence: Synthetic oligonucleotide
acugagagguguuggggcu

SEQ ID NO: 1801884 - RNA, 19 nt, Artificial Sequence
  Description of Artificial Sequence: Synthetic oligonucleotide
agcguaguuccgucauuac

SEQ ID NO: 1801885 - RNA, 19 nt, Artificial Sequence
  Description of Artificial Sequence: Synthetic oligonucleotide
uuccggacaguacuccaca

SEQ ID NO: 1801886 - RNA, 19 nt, Artificial Sequence
  Description of Artificial Sequence: Synthetic oligonucleotide
acucguuugaaccggucau

SEQ ID NO: 1801887 - RNA, 19 nt, Artificial Sequence
  Description of Artificial Sequence: Synthetic oligonucleotide
ccaggcaugcguuggaucg

SEQ ID NO: 1801888 - RNA, 19 nt, Artificial Sequence
  Description of Artificial Sequence: Synthetic oligonucleotide
gagcucaacacauaacccu

SEQ ID NO: 1801889 - RNA, 19 nt, Artificial Sequence
  Description of Artificial Sequence: Synthetic oligonucleotide
gcccauauuccucaagucc

SEQ ID NO: 1801890 - RNA, 19 nt, Artificial Sequence
  Description of Artificial Sequence: Synthetic oligonucleotide
guuggaucguagaaagcgc

SEQ ID NO: 1801891 - RNA, 19 nt, Artificial Sequence
  Description of Artificial Sequence: Synthetic oligonucleotide
agggcuuggguccaaguau

SEQ ID NO: 1801892 - RNA, 19 nt, Artificial Sequence
  Description of Artificial Sequence: Synthetic oligonucleotide
aagcaacguuuccgcaccg

SEQ ID NO: 1801893 - RNA, 19 nt, Artificial Sequence
  Description of Artificial Sequence: Synthetic oligonucleotide
gacacuugaaggcauacuu

SEQ ID NO: 1801894 - RNA, 19 nt, Artificial Sequence
  Description of Artificial Sequence: Synthetic oligonucleotide
auugcaagcguaguuccgu

SEQ ID NO: 1801895 - RNA, 19 nt, Artificial Sequence
  Description of Artificial Sequence: Synthetic oligonucleotide
aaguguuuguaggaagcaa

SEQ ID NO: 1801896 - RNA, 19 nt, Artificial Sequence
  Description of Artificial Sequence: Synthetic oligonucleotide
ucggguggcugguugagcu

SEQ ID NO: 1801897 - RNA, 19 nt, Artificial Sequence
  Description of Artificial Sequence: Synthetic oligonucleotide
auagcccauauuccucaag

SEQ ID NO: 1801898 - RNA, 19 nt, Artificial Sequence
  Description of Artificial Sequence: Synthetic oligonucleotide
aguguuuguaggaagcaaa

SEQ ID NO: 1801899 - RNA, 19 nt, Artificial Sequence
  Description of Artificial Sequence: Synthetic oligonucleotide
cguaguuccgucauuacug

SEQ ID NO: 1801900 - RNA, 19 nt, Artificial Sequence
  Description of Artificial Sequence: Synthetic oligonucleotide
ucacuuggcgaaugaagau

SEQ ID NO: 1801901 - RNA, 19 nt, Artificial Sequence
  Description of Artificial Sequence: Synthetic oligonucleotide
gaggcgcacagacguaucc

SEQ ID NO: 1801902 - RNA, 19 nt, Artificial Sequence
  Description of Artificial Sequence: Synthetic oligonucleotide
ucguuugaaccggucaucu

SEQ ID NO: 1801903 - RNA, 19 nt, Artificial Sequence
  Description of Artificial Sequence: Synthetic oligonucleotide
uaacaccccguuucucucc

SEQ ID NO: 1801904 - RNA, 19 nt, Artificial Sequence
  Description of Artificial Sequence: Synthetic oligonucleotide
ugaacucguuugaaccggu

SEQ ID NO: 1801905 - RNA, 19 nt, Artificial Sequence
  Description of Artificial Sequence: Synthetic oligonucleotide
uaacccugcuuguuuggga

SEQ ID NO: 1801906 - RNA, 19 nt, Artificial Sequence
  Description of Artificial Sequence: Synthetic oligonucleotide
cauaugauuacguggacuu

SEQ ID NO: 1801907 - RNA, 19 nt, Artificial Sequence
  Description of Artificial Sequence: Synthetic oligonucleotide
augauuacguggacuuggg

SEQ ID NO: 1801908 - RNA, 19 nt, Artificial Sequence
  Description of Artificial Sequence: Synthetic oligonucleotide
cguuggaucguagaaagcg

SEQ ID NO: 1801909 - RNA, 19 nt, Artificial Sequence
  Description of Artificial Sequence: Synthetic oligonucleotide
gagguguuggggcugaacu

SEQ ID NO: 1801910 - RNA, 19 nt, Artificial Sequence
  Description of Artificial Sequence: Synthetic oligonucleotide
accccguuucucuccgagc

SEQ ID NO: 1801911 - RNA, 19 nt, Artificial Sequence
  Description of Artificial Sequence: Synthetic oligonucleotide
uuagccugugacacuugaa

SEQ ID NO: 1801912 - RNA, 19 nt, Artificial Sequence
  Description of Artificial Sequence: Synthetic oligonucleotide
ccaaguauucaacugccac

SEQ ID NO: 1801913 - RNA, 19 nt, Artificial Sequence
  Description of Artificial Sequence: Synthetic oligonucleotide
aagcaaguguuuguaggaa

SEQ ID NO: 1801914 - RNA, 19 nt, Artificial Sequence
  Description of Artificial Sequence: Synthetic oligonucleotide
ugcaagcguaguuccguca

SEQ ID NO: 1801915 - RNA, 19 nt, Artificial Sequence
  Description of Artificial Sequence: Synthetic oligonucleotide
gaaacaacuuccaccauau

SEQ ID NO: 1801916 - RNA, 19 nt, Artificial Sequence
  Description of Artificial Sequence: Synthetic oligonucleotide
aucgugcauuuucaguuga

SEQ ID NO: 1801917 - RNA, 19 nt, Artificial Sequence
  Description of Artificial Sequence: Synthetic oligonucleotide
ugugacacuugaaggcaua

SEQ ID NO: 1801918 - RNA, 19 nt, Artificial Sequence
  Description of Artificial Sequence: Synthetic oligonucleotide
cuaacaccccguuucucuc

SEQ ID NO: 1801919 - RNA, 19 nt, Artificial Sequence
  Description of Artificial Sequence: Synthetic oligonucleotide
augcuagugggguaucuau

SEQ ID NO: 1801920 - RNA, 19 nt, Artificial Sequence
  Description of Artificial Sequence: Synthetic oligonucleotide
uauaccuuuucgggcugag

SEQ ID NO: 1801921 - RNA, 19 nt, Artificial Sequence
  Description of Artificial Sequence: Synthetic oligonucleotide
uucauacauauaugacgau

SEQ ID NO: 1801922 - RNA, 19 nt, Artificial Sequence
  Description of Artificial Sequence: Synthetic oligonucleotide
cuuccggacaguacuccac

SEQ ID NO: 1801923 - RNA, 19 nt, Artificial Sequence
  Description of Artificial Sequence: Synthetic oligonucleotide
acuagacggagucuccaau

SEQ ID NO: 1801924 - RNA, 19 nt, Artificial Sequence
  Description of Artificial Sequence: Synthetic oligonucleotide
aaugggucccaaauauuua

SEQ ID NO: 1801925 - RNA, 19 nt, Artificial Sequence
  Description of Artificial Sequence: Synthetic oligonucleotide
aggcgcacagacguauccc

SEQ ID NO: 1801926 - RNA, 19 nt, Artificial Sequence
  Description of Artificial Sequence: Synthetic oligonucleotide
aguuccaaccagauuuucu

SEQ ID NO: 1801927 - RNA, 19 nt, Artificial Sequence
  Description of Artificial Sequence: Synthetic oligonucleotide
uguuagccuaagcaacguu

SEQ ID NO: 1801928 - RNA, 19 nt, Artificial Sequence
  Description of Artificial Sequence: Synthetic oligonucleotide
ggcgaaugaagauaccauc

SEQ ID NO: 1801929 - RNA, 19 nt, Artificial Sequence
  Description of Artificial Sequence: Synthetic oligonucleotide
aaugcuagugggguaucua

SEQ ID NO: 1801930 - RNA, 19 nt, Artificial Sequence
  Description of Artificial Sequence: Synthetic oligonucleotide
auggagcucaacacauaac

SEQ ID NO: 1801931 - RNA, 19 nt, Artificial Sequence
  Description of Artificial Sequence: Synthetic oligonucleotide
auaugauuacguggacuug

SEQ ID NO: 1801932 - RNA, 19 nt, Artificial Sequence
  Description of Artificial Sequence: Synthetic oligonucleotide
cuuggcgaaugaagauacc

SEQ ID NO: 1801933 - RNA, 19 nt, Artificial Sequence
  Description of Artificial Sequence: Synthetic oligonucleotide
ucgugaguuccaaccagau

SEQ ID NO: 1801934 - RNA, 19 nt, Artificial Sequence
  Description of Artificial Sequence: Synthetic oligonucleotide
cacggaugcagcgagucug

SEQ ID NO: 1801935 - RNA, 19 nt, Artificial Sequence
  Description of Artificial Sequence: Synthetic oligonucleotide
caacguuuccgcaccggac

SEQ ID NO: 1801936 - RNA, 19 nt, Artificial Sequence
  Description of Artificial Sequence: Synthetic oligonucleotide
ucacuuccggacaguacuc

SEQ ID NO: 1801937 - RNA, 19 nt, Artificial Sequence
  Description of Artificial Sequence: Synthetic oligonucleotide
gcgggcacaucguagaggc

SEQ ID NO: 1801938 - RNA, 19 nt, Artificial Sequence
  Description of Artificial Sequence: Synthetic oligonucleotide
caaguauucaacugccacu

SEQ ID NO: 1801939 - RNA, 19 nt, Artificial Sequence
  Description of Artificial Sequence: Synthetic oligonucleotide
aguguucaaaucgugcauu

SEQ ID NO: 1801940 - RNA, 19 nt, Artificial Sequence
  Description of Artificial Sequence: Synthetic oligonucleotide
acaagggcaugaagccucc

SEQ ID NO: 1801941 - RNA, 19 nt, Artificial Sequence
  Description of Artificial Sequence: Synthetic oligonucleotide
ccaaacaauuacagaguag

SEQ ID NO: 1801942 - RNA, 19 nt, Artificial Sequence
  Description of Artificial Sequence: Synthetic oligonucleotide
gcuauugcaagcguaguuc

SEQ ID NO: 1801943 - RNA, 19 nt, Artificial Sequence
  Description of Artificial Sequence: Synthetic oligonucleotide
gcaaguguuuguaggaagc

SEQ ID NO: 1801944 - RNA, 19 nt, Artificial Sequence
  Description of Artificial Sequence: Synthetic oligonucleotide
gucaucucguguuagccua

SEQ ID NO: 1801945 - RNA, 19 nt, Artificial Sequence
  Description of Artificial Sequence: Synthetic oligonucleotide
uccgcaccggaccaacuaa

SEQ ID NO: 1801946 - RNA, 19 nt, Artificial Sequence
  Description of Artificial Sequence: Synthetic oligonucleotide
caugcguuggaucguagaa

SEQ ID NO: 1801947 - RNA, 19 nt, Artificial Sequence
  Description of Artificial Sequence: Synthetic oligonucleotide
cacaaucagccuguccccg

SEQ ID NO: 1801948 - RNA, 19 nt, Artificial Sequence
  Description of Artificial Sequence: Synthetic oligonucleotide
agacgcaaugcuagugggg

SEQ ID NO: 1801949 - RNA, 19 nt, Artificial Sequence
  Description of Artificial Sequence: Synthetic oligonucleotide
uuccgucauuacugaaggc

SEQ ID NO: 1801950 - RNA, 19 nt, Artificial Sequence
  Description of Artificial Sequence: Synthetic oligonucleotide
ugauaggggcaucgugagu

SEQ ID NO: 1801951 - RNA, 19 nt, Artificial Sequence
  Description of Artificial Sequence: Synthetic oligonucleotide
gccuaagcaacguuuccgc

SEQ ID NO: 1801952 - RNA, 19 nt, Artificial Sequence
  Description of Artificial Sequence: Synthetic oligonucleotide
cguguuagccuaagcaacg

SEQ ID NO: 1801953 - RNA, 19 nt, Artificial Sequence
  Description of Artificial Sequence: Synthetic oligonucleotide
ggagcucaacacauaaccc

SEQ ID NO: 1801954 - RNA, 19 nt, Artificial Sequence
  Description of Artificial Sequence: Synthetic oligonucleotide
gacacugacaggguguaua

SEQ ID NO: 1801955 - RNA, 19 nt, Artificial Sequence
  Description of Artificial Sequence: Synthetic oligonucleotide
gaccgaggagaugccaucc

SEQ ID NO: 1801956 - RNA, 19 nt, Artificial Sequence
  Description of Artificial Sequence: Synthetic oligonucleotide
aaauggcguugacugggua

SEQ ID NO: 1801957 - RNA, 19 nt, Artificial Sequence
  Description of Artificial Sequence: Synthetic oligonucleotide
guuggcgggcacaucguag

SEQ ID NO: 1801958 - RNA, 19 nt, Artificial Sequence
  Description of Artificial Sequence: Synthetic oligonucleotide
ggaaacagagauccacaca

SEQ ID NO: 1801959 - RNA, 19 nt, Artificial Sequence
  Description of Artificial Sequence: Synthetic oligonucleotide
ugagucgcauggaguuggc

SEQ ID NO: 1801960 - RNA, 19 nt, Artificial Sequence
  Description of Artificial Sequence: Synthetic oligonucleotide
cuucaggaugcuccguguc

SEQ ID NO: 1801961 - RNA, 19 nt, Artificial Sequence
  Description of Artificial Sequence: Synthetic oligonucleotide
acuugaccgaggagaugcc

SEQ ID NO: 1801962 - RNA, 19 nt, Artificial Sequence
  Description of Artificial Sequence: Synthetic oligonucleotide
uacuguacaagggcaugaa

SEQ ID NO: 1801963 - RNA, 19 nt, Artificial Sequence
  Description of Artificial Sequence: Synthetic oligonucleotide
ugaucccaacuuccaguaa

SEQ ID NO: 1801964 - RNA, 19 nt, Artificial Sequence
  Description of Artificial Sequence: Synthetic oligonucleotide
gugcugguauuugagucgc

SEQ ID NO: 1801965 - RNA, 19 nt, Artificial Sequence
  Description of Artificial Sequence: Synthetic oligonucleotide
acgaugcuauugcaagcgu

SEQ ID NO: 1801966 - RNA, 19 nt, Artificial Sequence
  Description of Artificial Sequence: Synthetic oligonucleotide
cagacguaucccaggagga

SEQ ID NO: 1801967 - RNA, 19 nt, Artificial Sequence
  Description of Artificial Sequence: Synthetic oligonucleotide
agaaccaccuguggcaaau

SEQ ID NO: 1801968 - RNA, 19 nt, Artificial Sequence
  Description of Artificial Sequence: Synthetic oligonucleotide
uggcgggcacaucguagag

SEQ ID NO: 1801969 - RNA, 19 nt, Artificial Sequence
  Description of Artificial Sequence: Synthetic oligonucleotide
gacgcaaugcuaguggggu

SEQ ID NO: 1801970 - RNA, 19 nt, Artificial Sequence
  Description of Artificial Sequence: Synthetic oligonucleotide
gggcacaucguagaggcgc

SEQ ID NO: 1801971 - RNA, 19 nt, Artificial Sequence
  Description of Artificial Sequence: Synthetic oligonucleotide
ccaguaaccaucacauuca

SEQ ID NO: 1801972 - RNA, 19 nt, Artificial Sequence
  Description of Artificial Sequence: Synthetic oligonucleotide
ucaucucguguuagccuaa

SEQ ID NO: 1801973 - RNA, 19 nt, Artificial Sequence
  Description of Artificial Sequence: Synthetic oligonucleotide
ugaaggcaagagacgcaau

SEQ ID NO: 1801974 - RNA, 19 nt, Artificial Sequence
  Description of Artificial Sequence: Synthetic oligonucleotide
gcaugaagccuccccaccc

SEQ ID NO: 1801975 - RNA, 19 nt, Artificial Sequence
  Description of Artificial Sequence: Synthetic oligonucleotide
uccggacaguacuccacac

SEQ ID NO: 1801976 - RNA, 19 nt, Artificial Sequence
  Description of Artificial Sequence: Synthetic oligonucleotide
uugaaccggucaucucgug

SEQ ID NO: 1801977 - RNA, 19 nt, Artificial Sequence
  Description of Artificial Sequence: Synthetic oligonucleotide
uugcaagcguaguuccguc

SEQ ID NO: 1801978 - RNA, 19 nt, Artificial Sequence
  Description of Artificial Sequence: Synthetic oligonucleotide
gagucgcauggaguuggcg

SEQ ID NO: 1801979 - RNA, 19 nt, Artificial Sequence
  Description of Artificial Sequence: Synthetic oligonucleotide
agcaacguuuccgcaccgg

SEQ ID NO: 1801980 - RNA, 19 nt, Artificial Sequence
  Description of Artificial Sequence: Synthetic oligonucleotide
gacggagucuccaaugacu

SEQ ID NO: 1801981 - RNA, 19 nt, Artificial Sequence
  Description of Artificial Sequence: Synthetic oligonucleotide
uagaggcgcacagacguau

SEQ ID NO: 1801982 - RNA, 19 nt, Artificial Sequence
  Description of Artificial Sequence: Synthetic oligonucleotide
ggagaugccauccucgggu

SEQ ID NO: 1801983 - RNA, 19 nt, Artificial Sequence
  Description of Artificial Sequence: Synthetic oligonucleotide
ucgugcauuuucaguugau

SEQ ID NO: 1801984 - RNA, 19 nt, Artificial Sequence
  Description of Artificial Sequence: Synthetic oligonucleotide
uuguuugggaaggcacgga

SEQ ID NO: 1801985 - RNA, 19 nt, Artificial Sequence
  Description of Artificial Sequence: Synthetic oligonucleotide
aucgugaguuccaaccaga

SEQ ID NO: 1801986 - RNA, 19 nt, Artificial Sequence
  Description of Artificial Sequence: Synthetic oligonucleotide
acguuuccgcaccggacca

SEQ ID NO: 1801987 - RNA, 19 nt, Artificial Sequence
  Description of Artificial Sequence: Synthetic oligonucleotide
ugagagguguuggggcuga

SEQ ID NO: 1801988 - RNA, 19 nt, Artificial Sequence
  Description of Artificial Sequence: Synthetic oligonucleotide
aguaaccaucacauucacu

SEQ ID NO: 1801989 - RNA, 19 nt, Artificial Sequence
  Description of Artificial Sequence: Synthetic oligonucleotide
auggcguugacuggguaaa

SEQ ID NO: 1801990 - RNA, 19 nt, Artificial Sequence
  Description of Artificial Sequence: Synthetic oligonucleotide
cuuuagccugugacacuug

SEQ ID NO: 1801991 - RNA, 19 nt, Artificial Sequence
  Description of Artificial Sequence: Synthetic oligonucleotide
cauauuccucaagucccac

SEQ ID NO: 1801992 - RNA, 19 nt, Artificial Sequence
  Description of Artificial Sequence: Synthetic oligonucleotide
ucggccuucaauggagcuc

SEQ ID NO: 1801993 - RNA, 19 nt, Artificial Sequence
  Description of Artificial Sequence: Synthetic oligonucleotide
uuuccgcaccggaccaacu

SEQ ID NO: 1801994 - RNA, 19 nt, Artificial Sequence
  Description of Artificial Sequence: Synthetic oligonucleotide
gaaccggucaucucguguu

SEQ ID NO: 1801995 - RNA, 19 nt, Artificial Sequence
  Description of Artificial Sequence: Synthetic oligonucleotide
ccaaugacuacagcagccc

SEQ ID NO: 1801996 - RNA, 19 nt, Artificial Sequence
  Description of Artificial Sequence: Synthetic oligonucleotide
aaccggucaucucguguua

SEQ ID NO: 1801997 - RNA, 19 nt, Artificial Sequence
  Description of Artificial Sequence: Synthetic oligonucleotide
cuagugggguaucuaugga

SEQ ID NO: 1801998 - RNA, 19 nt, Artificial Sequence
  Description of Artificial Sequence: Synthetic oligonucleotide
acggaugcagcgagucugg

SEQ ID NO: 1801999 - RNA, 19 nt, Artificial Sequence
  Description of Artificial Sequence: Synthetic oligonucleotide
augcguuggaucguagaaa

SEQ ID NO: 1802000 - RNA, 19 nt, Artificial Sequence
  Description of Artificial Sequence: Synthetic oligonucleotide
uccucggguggcugguuga

SEQ ID NO: 1802001 - RNA, 19 nt, Artificial Sequence
  Description of Artificial Sequence: Synthetic oligonucleotide
agaccaguaggaacugaga

SEQ ID NO: 1802002 - RNA, 19 nt, Artificial Sequence
  Description of Artificial Sequence: Synthetic oligonucleotide
gcauuacaaggaguucugg

SEQ ID NO: 1802003 - RNA, 19 nt, Artificial Sequence
  Description of Artificial Sequence: Synthetic oligonucleotide
acugaaggcaagagacgca

SEQ ID NO: 1802004 - RNA, 19 nt, Artificial Sequence
  Description of Artificial Sequence: Synthetic oligonucleotide
gugacacuugaaggcauac

SEQ ID NO: 1802005 - RNA, 19 nt, Artificial Sequence
  Description of Artificial Sequence: Synthetic oligonucleotide
cucguuugaaccggucauc

SEQ ID NO: 1802006 - RNA, 19 nt, Artificial Sequence
  Description of Artificial Sequence: Synthetic oligonucleotide
aacuggcacagccgcuuuu

SEQ ID NO: 1802007 - RNA, 19 nt, Artificial Sequence
  Description of Artificial Sequence: Synthetic oligonucleotide
ggcaaauguauuguggaua

SEQ ID NO: 1802008 - RNA, 19 nt, Artificial Sequence
  Description of Artificial Sequence: Synthetic oligonucleotide
guuagccuaagcaacguuu

SEQ ID NO: 1802009 - RNA, 19 nt, Artificial Sequence
  Description of Artificial Sequence: Synthetic oligonucleotide
cagaguagacaagagacau

SEQ ID NO: 1802010 - RNA, 19 nt, Artificial Sequence
  Description of Artificial Sequence: Synthetic oligonucleotide
ccacacacuagacggaguc

SEQ ID NO: 1802011 - RNA, 19 nt, Artificial Sequence
  Description of Artificial Sequence: Synthetic oligonucleotide
ugcugguauuugagucgca

SEQ ID NO: 1802012 - RNA, 19 nt, Artificial Sequence
  Description of Artificial Sequence: Synthetic oligonucleotide
acggagucuccaaugacua

SEQ ID NO: 1802013 - RNA, 19 nt, Artificial Sequence
  Description of Artificial Sequence: Synthetic oligonucleotide
cucggcggccugcuguacc

SEQ ID NO: 1802014 - RNA, 19 nt, Artificial Sequence
  Description of Artificial Sequence: Synthetic oligonucleotide
cagcgagucugguacuuca

SEQ ID NO: 1802015 - RNA, 19 nt, Artificial Sequence
  Description of Artificial Sequence: Synthetic oligonucleotide
agcgagucugguacuucag

SEQ ID NO: 1802016 - RNA, 19 nt, Artificial Sequence
  Description of Artificial Sequence: Synthetic oligonucleotide
aguuggcgggcacaucgua

SEQ ID NO: 1802017 - RNA, 19 nt, Artificial Sequence
  Description of Artificial Sequence: Synthetic oligonucleotide
gaugcuccgugucauccau

SEQ ID NO: 1802018 - RNA, 19 nt, Artificial Sequence
  Description of Artificial Sequence: Synthetic oligonucleotide
gguauuugagucgcaugga

SEQ ID NO: 1802019 - RNA, 19 nt, Artificial Sequence
  Description of Artificial Sequence: Synthetic oligonucleotide
agaggcgcacagacguauc

SEQ ID NO: 1802020 - RNA, 19 nt, Artificial Sequence
  Description of Artificial Sequence: Synthetic oligonucleotide
caguaggaacugagaggug

SEQ ID NO: 1802021 - RNA, 19 nt, Artificial Sequence
  Description of Artificial Sequence: Synthetic oligonucleotide
caucucguguuagccuaag

SEQ ID NO: 1802022 - RNA, 19 nt, Artificial Sequence
  Description of Artificial Sequence: Synthetic oligonucleotide
ucgcauggaguuggcgggc

SEQ ID NO: 1802023 - RNA, 19 nt, Artificial Sequence
  Description of Artificial Sequence: Synthetic oligonucleotide
ccugcgcugcugcacauag

SEQ ID NO: 1802024 - RNA, 19 nt, Artificial Sequence
  Description of Artificial Sequence: Synthetic oligonucleotide
gaacucguuugaaccgguc

SEQ ID NO: 1802025 - RNA, 19 nt, Artificial Sequence
  Description of Artificial Sequence: Synthetic oligonucleotide
gcaccggaccaacuaacac

SEQ ID NO: 1802026 - RNA, 19 nt, Artificial Sequence
  Description of Artificial Sequence: Synthetic oligonucleotide
agaguagacaagagacauu

SEQ ID NO: 1802027 - RNA, 19 nt, Artificial Sequence
  Description of Artificial Sequence: Synthetic oligonucleotide
gcacagacguaucccagga

SEQ ID NO: 1802028 - RNA, 19 nt, Artificial Sequence
  Description of Artificial Sequence: Synthetic oligonucleotide
ggagaagcaaguguuugua

SEQ ID NO: 1802029 - RNA, 19 nt, Artificial Sequence
  Description of Artificial Sequence: Synthetic oligonucleotide
gcguugacuggguaaaucu

SEQ ID NO: 1802030 - RNA, 19 nt, Artificial Sequence
  Description of Artificial Sequence: Synthetic oligonucleotide
auaccuuuucgggcugaga

SEQ ID NO: 1802031 - RNA, 19 nt, Artificial Sequence
  Description of Artificial Sequence: Synthetic oligonucleotide
gcaacguuuccgcaccgga

SEQ ID NO: 1802032 - RNA, 19 nt, Artificial Sequence
  Description of Artificial Sequence: Synthetic oligonucleotide
cguugacuggguaaaucug

SEQ ID NO: 1802033 - RNA, 19 nt, Artificial Sequence
  Description of Artificial Sequence: Synthetic oligonucleotide
ggcgcacagacguauccca

SEQ ID NO: 1802034 - RNA, 19 nt, Artificial Sequence
  Description of Artificial Sequence: Synthetic oligonucleotide
ggaguucugggaucccaca

SEQ ID NO: 1802035 - RNA, 19 nt, Artificial Sequence
  Description of Artificial Sequence: Synthetic oligonucleotide
ggguaucuauggaacuggc

SEQ ID NO: 1802036 - RNA, 19 nt, Artificial Sequence
  Description of Artificial Sequence: Synthetic oligonucleotide
gcgaaugaagauaccaucu

SEQ ID NO: 1802037 - RNA, 19 nt, Artificial Sequence
  Description of Artificial Sequence: Synthetic oligonucleotide
cuugaccgaggagaugcca

SEQ ID NO: 1802038 - RNA, 19 nt, Artificial Sequence
  Description of Artificial Sequence: Synthetic oligonucleotide
gugggguaucuauggaacu

SEQ ID NO: 1802039 - RNA, 19 nt, Artificial Sequence
  Description of Artificial Sequence: Synthetic oligonucleotide
guccccggacacugacagg

SEQ ID NO: 1802040 - RNA, 19 nt, Artificial Sequence
  Description of Artificial Sequence: Synthetic oligonucleotide
gacuacuguacaagggcau

SEQ ID NO: 1802041 - RNA, 19 nt, Artificial Sequence
  Description of Artificial Sequence: Synthetic oligonucleotide
agacagcaccagugugcug

SEQ ID NO: 1802042 - RNA, 19 nt, Artificial Sequence
  Description of Artificial Sequence: Synthetic oligonucleotide
cacuagacggagucuccaa

SEQ ID NO: 1802043 - RNA, 19 nt, Artificial Sequence
  Description of Artificial Sequence: Synthetic oligonucleotide
cgcacagacguaucccagg

SEQ ID NO: 1802044 - RNA, 19 nt, Artificial Sequence
  Description of Artificial Sequence: Synthetic oligonucleotide
uuacguggacuugggcuuu

SEQ ID NO: 1802045 - RNA, 19 nt, Artificial Sequence
  Description of Artificial Sequence: Synthetic oligonucleotide
ugcagcgagucugguacuu

SEQ ID NO: 1802046 - RNA, 19 nt, Artificial Sequence
  Description of Artificial Sequence: Synthetic oligonucleotide
caaugacuacagcagcccu

SEQ ID NO: 1802047 - RNA, 19 nt, Artificial Sequence
  Description of Artificial Sequence: Synthetic oligonucleotide
caauggagcucaacacaua

SEQ ID NO: 1802048 - RNA, 19 nt, Artificial Sequence
  Description of Artificial Sequence: Synthetic oligonucleotide
cacauaacccugcuuguuu

SEQ ID NO: 1802049 - RNA, 19 nt, Artificial Sequence
  Description of Artificial Sequence: Synthetic oligonucleotide
gggcaugaagccuccccac

SEQ ID NO: 1802050 - RNA, 19 nt, Artificial Sequence
  Description of Artificial Sequence: Synthetic oligonucleotide
caagagacgcaaugcuagu

SEQ ID NO: 1802051 - RNA, 19 nt, Artificial Sequence
  Description of Artificial Sequence: Synthetic oligonucleotide
gcaugcguuggaucguaga

SEQ ID NO: 1802052 - RNA, 19 nt, Artificial Sequence
  Description of Artificial Sequence: Synthetic oligonucleotide
cccaaacaauuacagagua

SEQ ID NO: 1802053 - RNA, 19 nt, Artificial Sequence
  Description of Artificial Sequence: Synthetic oligonucleotide
ggguggcugguugagcuug

SEQ ID NO: 1802054 - RNA, 19 nt, Artificial Sequence
  Description of Artificial Sequence: Synthetic oligonucleotide
caacuaacaccccguuucu

SEQ ID NO: 1802055 - RNA, 19 nt, Artificial Sequence
  Description of Artificial Sequence: Synthetic oligonucleotide
guacaagggcaugaagccu

SEQ ID NO: 1802056 - RNA, 19 nt, Artificial Sequence
  Description of Artificial Sequence: Synthetic oligonucleotide
cauagcccauauuccucaa

SEQ ID NO: 1802057 - RNA, 19 nt, Artificial Sequence
  Description of Artificial Sequence: Synthetic oligonucleotide
acgcaaugcuaguggggua

SEQ ID NO: 1802058 - RNA, 19 nt, Artificial Sequence
  Description of Artificial Sequence: Synthetic oligonucleotide
cucggguggcugguugagc

SEQ ID NO: 1802059 - RNA, 19 nt, Artificial Sequence
  Description of Artificial Sequence: Synthetic oligonucleotide
guauaccuuuucgggcuga

SEQ ID NO: 1802060 - RNA, 19 nt, Artificial Sequence
  Description of Artificial Sequence: Synthetic oligonucleotide
cccaccccaaacaauuaca

SEQ ID NO: 1802061 - RNA, 19 nt, Artificial Sequence
  Description of Artificial Sequence: Synthetic oligonucleotide
cuccacuccaggcaugcgu

SEQ ID NO: 1802062 - RNA, 19 nt, Artificial Sequence
  Description of Artificial Sequence: Synthetic oligonucleotide
aggggcaucgugaguucca

SEQ ID NO: 1802063 - RNA, 19 nt, Artificial Sequence
  Description of Artificial Sequence: Synthetic oligonucleotide
ccuuuucgggcugagagaa

SEQ ID NO: 1802064 - RNA, 19 nt, Artificial Sequence
  Description of Artificial Sequence: Synthetic oligonucleotide
ggcguugacuggguaaauc

SEQ ID NO: 1802065 - RNA, 19 nt, Artificial Sequence
  Description of Artificial Sequence: Synthetic oligonucleotide
ccggucaucucguguuagc

SEQ ID NO: 1802066 - RNA, 19 nt, Artificial Sequence
  Description of Artificial Sequence: Synthetic oligonucleotide
caucguagaggcgcacaga

SEQ ID NO: 1802067 - RNA, 19 nt, Artificial Sequence
  Description of Artificial Sequence: Synthetic oligonucleotide
ggcacggaugcagcgaguc

SEQ ID NO: 1802068 - RNA, 19 nt, Artificial Sequence
  Description of Artificial Sequence: Synthetic oligonucleotide
ggcaagagacgcaaugcua

SEQ ID NO: 1802069 - RNA, 19 nt, Artificial Sequence
  Description of Artificial Sequence: Synthetic oligonucleotide
cguagaggcgcacagacgu

SEQ ID NO: 1802070 - RNA, 19 nt, Artificial Sequence
  Description of Artificial Sequence: Synthetic oligonucleotide
ccuaagcaacguuuccgca

SEQ ID NO: 1802071 - RNA, 19 nt, Artificial Sequence
  Description of Artificial Sequence: Synthetic oligonucleotide
ccccaccccaaacaauuac

SEQ ID NO: 1802072 - RNA, 19 nt, Artificial Sequence
  Description of Artificial Sequence: Synthetic oligonucleotide
gcguaguuccgucauuacu

SEQ ID NO: 1802073 - RNA, 19 nt, Artificial Sequence
  Description of Artificial Sequence: Synthetic oligonucleotide
cggucaucucguguuagcc

SEQ ID NO: 1802074 - RNA, 19 nt, Artificial Sequence
  Description of Artificial Sequence: Synthetic oligonucleotide
guguuagccuaagcaacgu

SEQ ID NO: 1802075 - RNA, 19 nt, Artificial Sequence
  Description of Artificial Sequence: Synthetic oligonucleotide
ggaucguagaaagcgcagu

SEQ ID NO: 1802076 - RNA, 19 nt, Artificial Sequence
  Description of Artificial Sequence: Synthetic oligonucleotide
ccgaggagaugccauccuc

SEQ ID NO: 1802077 - RNA, 19 nt, Artificial Sequence
  Description of Artificial Sequence: Synthetic oligonucleotide
uggcguugacuggguaaau

SEQ ID NO: 1802078 - RNA, 19 nt, Artificial Sequence
  Description of Artificial Sequence: Synthetic oligonucleotide
ggacaguacuccacacauc

SEQ ID NO: 1802079 - RNA, 19 nt, Artificial Sequence
  Description of Artificial Sequence: Synthetic oligonucleotide
gcaagcguaguuccgucau

SEQ ID NO: 1802080 - RNA, 19 nt, Artificial Sequence
  Description of Artificial Sequence: Synthetic oligonucleotide
gcgcacagacguaucccag

SEQ ID NO: 1802081 - RNA, 19 nt, Artificial Sequence
  Description of Artificial Sequence: Synthetic oligonucleotide
aggcaugcguuggaucgua

SEQ ID NO: 1802082 - RNA, 19 nt, Artificial Sequence
  Description of Artificial Sequence: Synthetic oligonucleotide
ccgcaccggaccaacuaac

SEQ ID NO: 1802083 - RNA, 19 nt, Artificial Sequence
  Description of Artificial Sequence: Synthetic oligonucleotide
gcguuggaucguagaaagc

SEQ ID NO: 1802084 - RNA, 19 nt, Artificial Sequence
  Description of Artificial Sequence: Synthetic oligonucleotide
ggaccaacuaacaccccgu

SEQ ID NO: 1802085 - RNA, 19 nt, Artificial Sequence
  Description of Artificial Sequence: Synthetic oligonucleotide
ggcaugcguuggaucguag

SEQ ID NO: 1802086 - RNA, 19 nt, Artificial Sequence
  Description of Artificial Sequence: Synthetic oligonucleotide
gggcaucgugaguuccaac

SEQ ID NO: 1802087 - RNA, 19 nt, Artificial Sequence
  Description of Artificial Sequence: Synthetic oligonucleotide
cagaaccaccuguggcaaa

SEQ ID NO: 1802088 - RNA, 19 nt, Artificial Sequence
  Description of Artificial Sequence: Synthetic oligonucleotide
ccggacaguacuccacaca

SEQ ID NO: 1802089 - RNA, 19 nt, Artificial Sequence
  Description of Artificial Sequence: Synthetic oligonucleotide
gaacuggcacagccgcuuu

SEQ ID NO: 1802090 - RNA, 19 nt, Artificial Sequence
  Description of Artificial Sequence: Synthetic oligonucleotide
ccauaugauuacguggacu

SEQ ID NO: 1802091 - RNA, 19 nt, Artificial Sequence
  Description of Artificial Sequence: Synthetic oligonucleotide
guagaggcgcacagacgua

SEQ ID NO: 1802092 - RNA, 19 nt, Artificial Sequence
  Description of Artificial Sequence: Synthetic oligonucleotide
caaugcuagugggguaucu

SEQ ID NO: 1802093 - RNA, 19 nt, Artificial Sequence
  Description of Artificial Sequence: Synthetic oligonucleotide
gaguuggcgggcacaucgu

SEQ ID NO: 1802094 - RNA, 19 nt, Artificial Sequence
  Description of Artificial Sequence: Synthetic oligonucleotide
cguuugaaccggucaucuc

SEQ ID NO: 1802095 - RNA, 19 nt, Artificial Sequence
  Description of Artificial Sequence: Synthetic oligonucleotide
ggcggccugcuguacccac

SEQ ID NO: 1802096 - RNA, 19 nt, Artificial Sequence
  Description of Artificial Sequence: Synthetic oligonucleotide
ggcuuggguccaaguauuc

SEQ ID NO: 1802097 - RNA, 19 nt, Artificial Sequence
  Description of Artificial Sequence: Synthetic oligonucleotide
cccguuucucuccgagcac

SEQ ID NO: 1802098 - RNA, 19 nt, Artificial Sequence
  Description of Artificial Sequence: Synthetic oligonucleotide
caucugauaggggcaucgu

SEQ ID NO: 1802099 - RNA, 19 nt, Artificial Sequence
  Description of Artificial Sequence: Synthetic oligonucleotide
cuggguaaaucugcucaau

SEQ ID NO: 1802100 - RNA, 19 nt, Artificial Sequence
  Description of Artificial Sequence: Synthetic oligonucleotide
cgaugcuauugcaagcgua

SEQ ID NO: 1802101 - RNA, 19 nt, Artificial Sequence
  Description of Artificial Sequence: Synthetic oligonucleotide
gcaaugcuagugggguauc

SEQ ID NO: 1802102 - RNA, 19 nt, Artificial Sequence
  Description of Artificial Sequence: Synthetic oligonucleotide
gcacucggcggccugcugu

SEQ ID NO: 1802103 - RNA, 19 nt, Artificial Sequence
  Description of Artificial Sequence: Synthetic oligonucleotide
ccggaccaacuaacacccc

SEQ ID NO: 1802104 - RNA, 19 nt, Artificial Sequence
  Description of Artificial Sequence: Synthetic oligonucleotide
ccucggguggcugguugag

SEQ ID NO: 1802105 - RNA, 19 nt, Artificial Sequence
  Description of Artificial Sequence: Synthetic oligonucleotide
aggcacggaugcagcgagu

SEQ ID NO: 1802106 - RNA, 19 nt, Artificial Sequence
  Description of Artificial Sequence: Synthetic oligonucleotide
ggggcaucgugaguuccaa

SEQ ID NO: 1802107 - RNA, 19 nt, Artificial Sequence
  Description of Artificial Sequence: Synthetic oligonucleotide
ccggacacugacagggugu

SEQ ID NO: 1802108 - RNA, 19 nt, Artificial Sequence
  Description of Artificial Sequence: Synthetic oligonucleotide
caagcguaguuccgucauu

SEQ ID NO: 1802109 - RNA, 19 nt, Artificial Sequence
  Description of Artificial Sequence: Synthetic oligonucleotide
ccuuuagccugugacacuu

SEQ ID NO: 1802110 - RNA, 19 nt, Artificial Sequence
  Description of Artificial Sequence: Synthetic oligonucleotide
augcuccgugucauccauu

SEQ ID NO: 1802111 - RNA, 19 nt, Artificial Sequence
  Description of Artificial Sequence: Synthetic oligonucleotide
cgggcacaucguagaggcg

SEQ ID NO: 1802112 - RNA, 19 nt, Artificial Sequence
  Description of Artificial Sequence: Synthetic oligonucleotide
gcacggaugcagcgagucu

SEQ ID NO: 1802113 - RNA, 19 nt, Artificial Sequence
  Description of Artificial Sequence: Synthetic oligonucleotide
caggcaugcguuggaucgu

SEQ ID NO: 1802114 - RNA, 19 nt, Artificial Sequence
  Description of Artificial Sequence: Synthetic oligonucleotide
ccguuucucuccgagcacu

SEQ ID NO: 1802115 - RNA, 19 nt, Artificial Sequence
  Description of Artificial Sequence: Synthetic oligonucleotide
cagccuguccccggacacu

SEQ ID NO: 1802116 - RNA, 19 nt, Artificial Sequence
  Description of Artificial Sequence: Synthetic oligonucleotide
ggacacugacaggguguau

SEQ ID NO: 1802117 - RNA, 19 nt, Artificial Sequence
  Description of Artificial Sequence: Synthetic oligonucleotide
cguuuccgcaccggaccaa

SEQ ID NO: 1802118 - RNA, 19 nt, Artificial Sequence
  Description of Artificial Sequence: Synthetic oligonucleotide
cggaugcagcgagucuggu

SEQ ID NO: 1802119 - RNA, 19 nt, Artificial Sequence
  Description of Artificial Sequence: Synthetic oligonucleotide
cggcggccugcuguaccca

SEQ ID NO: 1802120 - RNA, 19 nt, Artificial Sequence
  Description of Artificial Sequence: Synthetic oligonucleotide
aaaacuagacuucugacgc

SEQ ID NO: 1802121 - RNA, 19 nt, Artificial Sequence
  Description of Artificial Sequence: Synthetic oligonucleotide
aauaagguggcacacacgc

SEQ ID NO: 1802122 - RNA, 19 nt, Artificial Sequence
  Description of Artificial Sequence: Synthetic oligonucleotide
acuauaauauggcacaagc

SEQ ID NO: 1802123 - RNA, 19 nt, Artificial Sequence
  Description of Artificial Sequence: Synthetic oligonucleotide
aaggaaacaacuguguucc

SEQ ID NO: 1802124 - RNA, 19 nt, Artificial Sequence
  Description of Artificial Sequence: Synthetic oligonucleotide
ucugcuuagcuaaauaagg

SEQ ID NO: 1802125 - RNA, 19 nt, Artificial Sequence
  Description of Artificial Sequence: Synthetic oligonucleotide
ucaaacauuauaauggcac

SEQ ID NO: 1802126 - RNA, 19 nt, Artificial Sequence
  Description of Artificial Sequence: Synthetic oligonucleotide
aagacaauagauuuugccu

SEQ ID NO: 1802127 - RNA, 19 nt, Artificial Sequence
  Description of Artificial Sequence: Synthetic oligonucleotide
uuuauugccacacaauaca

SEQ ID NO: 1802128 - RNA, 19 nt, Artificial Sequence
  Description of Artificial Sequence: Synthetic oligonucleotide
aaugcuuauaaacaaggga

SEQ ID NO: 1802129 - RNA, 19 nt, Artificial Sequence
  Description of Artificial Sequence: Synthetic oligonucleotide
uauaauggcacauugggcu

SEQ ID NO: 1802130 - RNA, 19 nt, Artificial Sequence
  Description of Artificial Sequence: Synthetic oligonucleotide
gauuauuugaaauacaacu

SEQ ID NO: 1802131 - RNA, 19 nt, Artificial Sequence
  Description of Artificial Sequence: Synthetic oligonucleotide
acuuauuuagauuauuuga

SEQ ID NO: 1802132 - RNA, 19 nt, Artificial Sequence
  Description of Artificial Sequence: Synthetic oligonucleotide
uguuuuaacugccacauuc

SEQ ID NO: 1802133 - RNA, 19 nt, Artificial Sequence
  Description of Artificial Sequence: Synthetic oligonucleotide
aacugaauugaccucaggu

SEQ ID NO: 1802134 - RNA, 19 nt, Artificial Sequence
  Description of Artificial Sequence: Synthetic oligonucleotide
aacaaacaagauuucacca

SEQ ID NO: 1802135 - RNA, 19 nt, Artificial Sequence
  Description of Artificial Sequence: Synthetic oligonucleotide
gaagacaauagauuuugcc

SEQ ID NO: 1802136 - RNA, 19 nt, Artificial Sequence
  Description of Artificial Sequence: Synthetic oligonucleotide
aaugacaguaacaaacaag

SEQ ID NO: 1802137 - RNA, 19 nt, Artificial Sequence
  Description of Artificial Sequence: Synthetic oligonucleotide
uuguuaacuauaauauggc

SEQ ID NO: 1802138 - RNA, 19 nt, Artificial Sequence
  Description of Artificial Sequence: Synthetic oligonucleotide
gauucacuuauuuagauua

SEQ ID NO: 1802139 - RNA, 19 nt, Artificial Sequence
  Description of Artificial Sequence: Synthetic oligonucleotide
uuaauggguccucuguugg

SEQ ID NO: 1802140 - RNA, 19 nt, Artificial Sequence
  Description of Artificial Sequence: Synthetic oligonucleotide
ggaugauucacuuauuuag

SEQ ID NO: 1802141 - RNA, 19 nt, Artificial Sequence
  Description of Artificial Sequence: Synthetic oligonucleotide
aacgucgucuucccggugc

SEQ ID NO: 1802142 - RNA, 19 nt, Artificial Sequence
  Description of Artificial Sequence: Synthetic oligonucleotide
aaccucuaaaucaugcucg

SEQ ID NO: 1802143 - RNA, 19 nt, Artificial Sequence
  Description of Artificial Sequence: Synthetic oligonucleotide
auagaagguauguuuuaac

SEQ ID NO: 1802144 - RNA, 19 nt, Artificial Sequence
  Description of Artificial Sequence: Synthetic oligonucleotide
uuauaauggcacauugggc

SEQ ID NO: 1802145 - RNA, 19 nt, Artificial Sequence
  Description of Artificial Sequence: Synthetic oligonucleotide
aauagugugaggugacugu

SEQ ID NO: 1802146 - RNA, 19 nt, Artificial Sequence
  Description of Artificial Sequence: Synthetic oligonucleotide
acaaggagaacauaacuga

SEQ ID NO: 1802147 - RNA, 19 nt, Artificial Sequence
  Description of Artificial Sequence: Synthetic oligonucleotide
uuguaggugacucuugaug

SEQ ID NO: 1802148 - RNA, 19 nt, Artificial Sequence
  Description of Artificial Sequence: Synthetic oligonucleotide
aaaugcuuauaaacaaggg

SEQ ID NO: 1802149 - RNA, 19 nt, Artificial Sequence
  Description of Artificial Sequence: Synthetic oligonucleotide
uguaggugacucuugaugu

SEQ ID NO: 1802150 - RNA, 19 nt, Artificial Sequence
  Description of Artificial Sequence: Synthetic oligonucleotide
uaauauggcacaagcuucc

SEQ ID NO: 1802151 - RNA, 19 nt, Artificial Sequence
  Description of Artificial Sequence: Synthetic oligonucleotide
aaaucaugcucguacugug

SEQ ID NO: 1802152 - RNA, 19 nt, Artificial Sequence
  Description of Artificial Sequence: Synthetic oligonucleotide
uuagauuauuugaaauaca

SEQ ID NO: 1802153 - RNA, 19 nt, Artificial Sequence
  Description of Artificial Sequence: Synthetic oligonucleotide
uagaagguauguuuuaacu

SEQ ID NO: 1802154 - RNA, 19 nt, Artificial Sequence
  Description of Artificial Sequence: Synthetic oligonucleotide
uaccagaucucuaugccag

SEQ ID NO: 1802155 - RNA, 19 nt, Artificial Sequence
  Description of Artificial Sequence: Synthetic oligonucleotide
cuuagcuaaauaagguggc

SEQ ID NO: 1802156 - RNA, 19 nt, Artificial Sequence
  Description of Artificial Sequence: Synthetic oligonucleotide
uguuaacuauaauauggca

SEQ ID NO: 1802157 - RNA, 19 nt, Artificial Sequence
  Description of Artificial Sequence: Synthetic oligonucleotide
uucuucucgaacucgcccg

SEQ ID NO: 1802158 - RNA, 19 nt, Artificial Sequence
  Description of Artificial Sequence: Synthetic oligonucleotide
uuggauguaguagccaucg

SEQ ID NO: 1802159 - RNA, 19 nt, Artificial Sequence
  Description of Artificial Sequence: Synthetic oligonucleotide
uggcgcuucacgaacgucg

SEQ ID NO: 1802160 - RNA, 19 nt, Artificial Sequence
  Description of Artificial Sequence: Synthetic oligonucleotide
aauacaauggggauguuuu

SEQ ID NO: 1802161 - RNA, 19 nt, Artificial Sequence
  Description of Artificial Sequence: Synthetic oligonucleotide
uucaggaaggaaacaacug

SEQ ID NO: 1802162 - RNA, 19 nt, Artificial Sequence
  Description of Artificial Sequence: Synthetic oligonucleotide
aaacagcuaaauaugcaag

SEQ ID NO: 1802163 - RNA, 19 nt, Artificial Sequence
  Description of Artificial Sequence: Synthetic oligonucleotide
aagaaugggaaugacagua

SEQ ID NO: 1802164 - RNA, 19 nt, Artificial Sequence
  Description of Artificial Sequence: Synthetic oligonucleotide
acaauggggauguuuucac

SEQ ID NO: 1802165 - RNA, 19 nt, Artificial Sequence
  Description of Artificial Sequence: Synthetic oligonucleotide
agaaaugucauaguacuga

SEQ ID NO: 1802166 - RNA, 19 nt, Artificial Sequence
  Description of Artificial Sequence: Synthetic oligonucleotide
auugaccucagguaauaag

SEQ ID NO: 1802167 - RNA, 19 nt, Artificial Sequence
  Description of Artificial Sequence: Synthetic oligonucleotide
agaucucuaugccaguuag

SEQ ID NO: 1802168 - RNA, 19 nt, Artificial Sequence
  Description of Artificial Sequence: Synthetic oligonucleotide
ucuugauguuacaucaaac

SEQ ID NO: 1802169 - RNA, 19 nt, Artificial Sequence
  Description of Artificial Sequence: Synthetic oligonucleotide
uuucgguggaagacaauag

SEQ ID NO: 1802170 - RNA, 19 nt, Artificial Sequence
  Description of Artificial Sequence: Synthetic oligonucleotide
ucuguugguauggaagacg

SEQ ID NO: 1802171 - RNA, 19 nt, Artificial Sequence
  Description of Artificial Sequence: Synthetic oligonucleotide
gaacauaacugaauugacc

SEQ ID NO: 1802172 - RNA, 19 nt, Artificial Sequence
  Description of Artificial Sequence: Synthetic oligonucleotide
uccaaugaaguacacgauc

SEQ ID NO: 1802173 - RNA, 19 nt, Artificial Sequence
  Description of Artificial Sequence: Synthetic oligonucleotide
gauguuuucacacacccgu

SEQ ID NO: 1802174 - RNA, 19 nt, Artificial Sequence
  Description of Artificial Sequence: Synthetic oligonucleotide
cagguaauaagcaaaggca

SEQ ID NO: 1802175 - RNA, 19 nt, Artificial Sequence
  Description of Artificial Sequence: Synthetic oligonucleotide
ucuaaaucaugcucguacu

SEQ ID NO: 1802176 - RNA, 19 nt, Artificial Sequence
  Description of Artificial Sequence: Synthetic oligonucleotide
uccgacugaagcuggaaag

SEQ ID NO: 1802177 - RNA, 19 nt, Artificial Sequence
  Description of Artificial Sequence: Synthetic oligonucleotide
ucaaaugccggagacgcag

SEQ ID NO: 1802178 - RNA, 19 nt, Artificial Sequence
  Description of Artificial Sequence: Synthetic oligonucleotide
caaguuagggucuccaaug

SEQ ID NO: 1802179 - RNA, 19 nt, Artificial Sequence
  Description of Artificial Sequence: Synthetic oligonucleotide
ugacugaauagugugaggu

SEQ ID NO: 1802180 - RNA, 19 nt, Artificial Sequence
  Description of Artificial Sequence: Synthetic oligonucleotide
uguaguuacuuuuggcaga

SEQ ID NO: 1802181 - RNA, 19 nt, Artificial Sequence
  Description of Artificial Sequence: Synthetic oligonucleotide
ugagcaaccucuaaaucau

SEQ ID NO: 1802182 - RNA, 19 nt, Artificial Sequence
  Description of Artificial Sequence: Synthetic oligonucleotide
acuuuauugccacacaaua

SEQ ID NO: 1802183 - RNA, 19 nt, Artificial Sequence
  Description of Artificial Sequence: Synthetic oligonucleotide
ucacuuauuuagauuauuu

SEQ ID NO: 1802184 - RNA, 19 nt, Artificial Sequence
  Description of Artificial Sequence: Synthetic oligonucleotide
guugguauggaagacgagc

SEQ ID NO: 1802185 - RNA, 19 nt, Artificial Sequence
  Description of Artificial Sequence: Synthetic oligonucleotide
aaucaugcucguacugugc

SEQ ID NO: 1802186 - RNA, 19 nt, Artificial Sequence
  Description of Artificial Sequence: Synthetic oligonucleotide
aaaugccggagacgcagcg

SEQ ID NO: 1802187 - RNA, 19 nt, Artificial Sequence
  Description of Artificial Sequence: Synthetic oligonucleotide
ggaagcgggauucaaaugc

SEQ ID NO: 1802188 - RNA, 19 nt, Artificial Sequence
  Description of Artificial Sequence: Synthetic oligonucleotide
guaacaaacaagauuucac

SEQ ID NO: 1802189 - RNA, 19 nt, Artificial Sequence
  Description of Artificial Sequence: Synthetic oligonucleotide
aguuacuuuuggcagaaau

SEQ ID NO: 1802190 - RNA, 19 nt, Artificial Sequence
  Description of Artificial Sequence: Synthetic oligonucleotide
uauggcacaagcuuccuua

SEQ ID NO: 1802191 - RNA, 19 nt, Artificial Sequence
  Description of Artificial Sequence: Synthetic oligonucleotide
acgaacgucgucuucccgg

SEQ ID NO: 1802192 - RNA, 19 nt, Artificial Sequence
  Description of Artificial Sequence: Synthetic oligonucleotide
augcuuauaaacaagggau

SEQ ID NO: 1802193 - RNA, 19 nt, Artificial Sequence
  Description of Artificial Sequence: Synthetic oligonucleotide
aacuagacuucugacgcag

SEQ ID NO: 1802194 - RNA, 19 nt, Artificial Sequence
  Description of Artificial Sequence: Synthetic oligonucleotide
gauucaaaugccggagacg

SEQ ID NO: 1802195 - RNA, 19 nt, Artificial Sequence
  Description of Artificial Sequence: Synthetic oligonucleotide
uucgguggaagacaauaga

SEQ ID NO: 1802196 - RNA, 19 nt, Artificial Sequence
  Description of Artificial Sequence: Synthetic oligonucleotide
acagcuaaauaugcaaguc

SEQ ID NO: 1802197 - RNA, 19 nt, Artificial Sequence
  Description of Artificial Sequence: Synthetic oligonucleotide
uguuuucacacacccguac

SEQ ID NO: 1802198 - RNA, 19 nt, Artificial Sequence
  Description of Artificial Sequence: Synthetic oligonucleotide
agcuaaauaagguggcaca

SEQ ID NO: 1802199 - RNA, 19 nt, Artificial Sequence
  Description of Artificial Sequence: Synthetic oligonucleotide
gaacucgcccgucaagugg

SEQ ID NO: 1802200 - RNA, 19 nt, Artificial Sequence
  Description of Artificial Sequence: Synthetic oligonucleotide
uaaaucaugcucguacugu

SEQ ID NO: 1802201 - RNA, 19 nt, Artificial Sequence
  Description of Artificial Sequence: Synthetic oligonucleotide
gaucugcuuagcuaaauaa

SEQ ID NO: 1802202 - RNA, 19 nt, Artificial Sequence
  Description of Artificial Sequence: Synthetic oligonucleotide
acugaauugaccucaggua

SEQ ID NO: 1802203 - RNA, 19 nt, Artificial Sequence
  Description of Artificial Sequence: Synthetic oligonucleotide
aaacauuauaauggcacau

SEQ ID NO: 1802204 - RNA, 19 nt, Artificial Sequence
  Description of Artificial Sequence: Synthetic oligonucleotide
ugguauggaagacgagcgg

SEQ ID NO: 1802205 - RNA, 19 nt, Artificial Sequence
  Description of Artificial Sequence: Synthetic oligonucleotide
uucacgaacgucgucuucc

SEQ ID NO: 1802206 - RNA, 19 nt, Artificial Sequence
  Description of Artificial Sequence: Synthetic oligonucleotide
gguacauucuuguagguga

SEQ ID NO: 1802207 - RNA, 19 nt, Artificial Sequence
  Description of Artificial Sequence: Synthetic oligonucleotide
uuauugccacacaauacaa

SEQ ID NO: 1802208 - RNA, 19 nt, Artificial Sequence
  Description of Artificial Sequence: Synthetic oligonucleotide
acugacugaauagugugag

SEQ ID NO: 1802209 - RNA, 19 nt, Artificial Sequence
  Description of Artificial Sequence: Synthetic oligonucleotide
acuuuuggcagaaauguca

SEQ ID NO: 1802210 - RNA, 19 nt, Artificial Sequence
  Description of Artificial Sequence: Synthetic oligonucleotide
aacaagggaugauucacuu

SEQ ID NO: 1802211 - RNA, 19 nt, Artificial Sequence
  Description of Artificial Sequence: Synthetic oligonucleotide
acugaauagugugagguga

SEQ ID NO: 1802212 - RNA, 19 nt, Artificial Sequence
  Description of Artificial Sequence: Synthetic oligonucleotide
ucgguggaagacaauagau

SEQ ID NO: 1802213 - RNA, 19 nt, Artificial Sequence
  Description of Artificial Sequence: Synthetic oligonucleotide
gauuucaccacugacugaa

SEQ ID NO: 1802214 - RNA, 19 nt, Artificial Sequence
  Description of Artificial Sequence: Synthetic oligonucleotide
aaaugucauaguacugaag

SEQ ID NO: 1802215 - RNA, 19 nt, Artificial Sequence
  Description of Artificial Sequence: Synthetic oligonucleotide
aucucuaugccaguuaggu

SEQ ID NO: 1802216 - RNA, 19 nt, Artificial Sequence
  Description of Artificial Sequence: Synthetic oligonucleotide
gaugauucacuuauuuaga

SEQ ID NO: 1802217 - RNA, 19 nt, Artificial Sequence
  Description of Artificial Sequence: Synthetic oligonucleotide
agucguuugagcaaccucu

SEQ ID NO: 1802218 - RNA, 19 nt, Artificial Sequence
  Description of Artificial Sequence: Synthetic oligonucleotide
uuuugaaauucaggaagga

SEQ ID NO: 1802219 - RNA, 19 nt, Artificial Sequence
  Description of Artificial Sequence: Synthetic oligonucleotide
uacacgaucugcuuagcua

SEQ ID NO: 1802220 - RNA, 19 nt, Artificial Sequence
  Description of Artificial Sequence: Synthetic oligonucleotide
cuaaaucaugcucguacug

SEQ ID NO: 1802221 - RNA, 19 nt, Artificial Sequence
  Description of Artificial Sequence: Synthetic oligonucleotide
aagacgagcgggugcaccu

SEQ ID NO: 1802222 - RNA, 19 nt, Artificial Sequence
  Description of Artificial Sequence: Synthetic oligonucleotide
acacgaucugcuuagcuaa

SEQ ID NO: 1802223 - RNA, 19 nt, Artificial Sequence
  Description of Artificial Sequence: Synthetic oligonucleotide
aaacuagacuucugacgca

SEQ ID NO: 1802224 - RNA, 19 nt, Artificial Sequence
  Description of Artificial Sequence: Synthetic oligonucleotide
guauguuuuaacugccaca

SEQ ID NO: 1802225 - RNA, 19 nt, Artificial Sequence
  Description of Artificial Sequence: Synthetic oligonucleotide
caaacauuauaauggcaca

SEQ ID NO: 1802226 - RNA, 19 nt, Artificial Sequence
  Description of Artificial Sequence: Synthetic oligonucleotide
uauugccacacaauacaau

SEQ ID NO: 1802227 - RNA, 19 nt, Artificial Sequence
  Description of Artificial Sequence: Synthetic oligonucleotide
ugaauuuaauggguccucu

SEQ ID NO: 1802228 - RNA, 19 nt, Artificial Sequence
  Description of Artificial Sequence: Synthetic oligonucleotide
aaacaagggaugauucacu

SEQ ID NO: 1802229 - RNA, 19 nt, Artificial Sequence
  Description of Artificial Sequence: Synthetic oligonucleotide
ucuaugccaguuagguaca

SEQ ID NO: 1802230 - RNA, 19 nt, Artificial Sequence
  Description of Artificial Sequence: Synthetic oligonucleotide
agcuucacugucucacagg

SEQ ID NO: 1802231 - RNA, 19 nt, Artificial Sequence
  Description of Artificial Sequence: Synthetic oligonucleotide
cugaauugaccucagguaa

SEQ ID NO: 1802232 - RNA, 19 nt, Artificial Sequence
  Description of Artificial Sequence: Synthetic oligonucleotide
gguauggaagacgagcggg

SEQ ID NO: 1802233 - RNA, 19 nt, Artificial Sequence
  Description of Artificial Sequence: Synthetic oligonucleotide
gagggcagucguuugagca

SEQ ID NO: 1802234 - RNA, 19 nt, Artificial Sequence
  Description of Artificial Sequence: Synthetic oligonucleotide
aacuuuauucugauucuaa

SEQ ID NO: 1802235 - RNA, 19 nt, Artificial Sequence
  Description of Artificial Sequence: Synthetic oligonucleotide
uguugguauggaagacgag

SEQ ID NO: 1802236 - RNA, 19 nt, Artificial Sequence
  Description of Artificial Sequence: Synthetic oligonucleotide
auucugauucuaaacaaaa

SEQ ID NO: 1802237 - RNA, 19 nt, Artificial Sequence
  Description of Artificial Sequence: Synthetic oligonucleotide
aucgcggcgauccuuccag

SEQ ID NO: 1802238 - RNA, 19 nt, Artificial Sequence
  Description of Artificial Sequence: Synthetic oligonucleotide
aaugccggagacgcagcgg

SEQ ID NO: 1802239 - RNA, 19 nt, Artificial Sequence
  Description of Artificial Sequence: Synthetic oligonucleotide
uaauaagcaaaggcauugu

SEQ ID NO: 1802240 - RNA, 19 nt, Artificial Sequence
  Description of Artificial Sequence: Synthetic oligonucleotide
ucugacgcagggcuccagc

SEQ ID NO: 1802241 - RNA, 19 nt, Artificial Sequence
  Description of Artificial Sequence: Synthetic oligonucleotide
caugcucguacugugcugc

SEQ ID NO: 1802242 - RNA, 19 nt, Artificial Sequence
  Description of Artificial Sequence: Synthetic oligonucleotide
cagaaaugucauaguacug

SEQ ID NO: 1802243 - RNA, 19 nt, Artificial Sequence
  Description of Artificial Sequence: Synthetic oligonucleotide
gaagcgggauucaaaugcc

SEQ ID NO: 1802244 - RNA, 19 nt, Artificial Sequence
  Description of Artificial Sequence: Synthetic oligonucleotide
ucaaguggcgcuucacgaa

SEQ ID NO: 1802245 - RNA, 19 nt, Artificial Sequence
  Description of Artificial Sequence: Synthetic oligonucleotide
agggaugauucacuuauuu

SEQ ID NO: 1802246 - RNA, 19 nt, Artificial Sequence
  Description of Artificial Sequence: Synthetic oligonucleotide
ucacacacccguaccagau

SEQ ID NO: 1802247 - RNA, 19 nt, Artificial Sequence
  Description of Artificial Sequence: Synthetic oligonucleotide
uugaauuuaauggguccuc

SEQ ID NO: 1802248 - RNA, 19 nt, Artificial Sequence
  Description of Artificial Sequence: Synthetic oligonucleotide
cuguugguauggaagacga

SEQ ID NO: 1802249 - RNA, 19 nt, Artificial Sequence
  Description of Artificial Sequence: Synthetic oligonucleotide
gaucucuaugccaguuagg

SEQ ID NO: 1802250 - RNA, 19 nt, Artificial Sequence
  Description of Artificial Sequence: Synthetic oligonucleotide
aagcgggauucaaaugccg

SEQ ID NO: 1802251 - RNA, 19 nt, Artificial Sequence
  Description of Artificial Sequence: Synthetic oligonucleotide
uauggaagacgagcgggug

SEQ ID NO: 1802252 - RNA, 19 nt, Artificial Sequence
  Description of Artificial Sequence: Synthetic oligonucleotide
acaguugccuauaaaacua

SEQ ID NO: 1802253 - RNA, 19 nt, Artificial Sequence
  Description of Artificial Sequence: Synthetic oligonucleotide
guuuuaacugccacauuca

SEQ ID NO: 1802254 - RNA, 19 nt, Artificial Sequence
  Description of Artificial Sequence: Synthetic oligonucleotide
caaguggcgcuucacgaac

SEQ ID NO: 1802255 - RNA, 19 nt, Artificial Sequence
  Description of Artificial Sequence: Synthetic oligonucleotide
ucgaacucgcccgucaagu

SEQ ID NO: 1802256 - RNA, 19 nt, Artificial Sequence
  Description of Artificial Sequence: Synthetic oligonucleotide
aauauggcacaagcuuccu

SEQ ID NO: 1802257 - RNA, 19 nt, Artificial Sequence
  Description of Artificial Sequence: Synthetic oligonucleotide
agcgggauucaaaugccgg

SEQ ID NO: 1802258 - RNA, 19 nt, Artificial Sequence
  Description of Artificial Sequence: Synthetic oligonucleotide
auaauggcacauugggcuu

SEQ ID NO: 1802259 - RNA, 19 nt, Artificial Sequence
  Description of Artificial Sequence: Synthetic oligonucleotide
aguacacgaucugcuuagc

SEQ ID NO: 1802260 - RNA, 19 nt, Artificial Sequence
  Description of Artificial Sequence: Synthetic oligonucleotide
ggauucaaaugccggagac

SEQ ID NO: 1802261 - RNA, 19 nt, Artificial Sequence
  Description of Artificial Sequence: Synthetic oligonucleotide
uguccuuaauauccacuuu

SEQ ID NO: 1802262 - RNA, 19 nt, Artificial Sequence
  Description of Artificial Sequence: Synthetic oligonucleotide
ugggaaugacaguaacaaa

SEQ ID NO: 1802263 - RNA, 19 nt, Artificial Sequence
  Description of Artificial Sequence: Synthetic oligonucleotide
ucacgaacgucgucuuccc

SEQ ID NO: 1802264 - RNA, 19 nt, Artificial Sequence
  Description of Artificial Sequence: Synthetic oligonucleotide
uaacuauaauauggcacaa

SEQ ID NO: 1802265 - RNA, 19 nt, Artificial Sequence
  Description of Artificial Sequence: Synthetic oligonucleotide
cuuggauguaguagccauc

SEQ ID NO: 1802266 - RNA, 19 nt, Artificial Sequence
  Description of Artificial Sequence: Synthetic oligonucleotide
aucaaacauuauaauggca

SEQ ID NO: 1802267 - RNA, 19 nt, Artificial Sequence
  Description of Artificial Sequence: Synthetic oligonucleotide
accucuaaaucaugcucgu

SEQ ID NO: 1802268 - RNA, 19 nt, Artificial Sequence
  Description of Artificial Sequence: Synthetic oligonucleotide
guaccagaucucuaugcca

SEQ ID NO: 1802269 - RNA, 19 nt, Artificial Sequence
  Description of Artificial Sequence: Synthetic oligonucleotide
ugaauagugugaggugacu

SEQ ID NO: 1802270 - RNA, 19 nt, Artificial Sequence
  Description of Artificial Sequence: Synthetic oligonucleotide
auaacugaauugaccucag

SEQ ID NO: 1802271 - RNA, 19 nt, Artificial Sequence
  Description of Artificial Sequence: Synthetic oligonucleotide
uucaaaugccggagacgca

SEQ ID NO: 1802272 - RNA, 19 nt, Artificial Sequence
  Description of Artificial Sequence: Synthetic oligonucleotide
ucguacugugcugccaaag

SEQ ID NO: 1802273 - RNA, 19 nt, Artificial Sequence
  Description of Artificial Sequence: Synthetic oligonucleotide
uaauggguccucuguuggu

SEQ ID NO: 1802274 - RNA, 19 nt, Artificial Sequence
  Description of Artificial Sequence: Synthetic oligonucleotide
ucauccgggagggcagucg

SEQ ID NO: 1802275 - RNA, 19 nt, Artificial Sequence
  Description of Artificial Sequence: Synthetic oligonucleotide
aggaaggaaacaacugugu

SEQ ID NO: 1802276 - RNA, 19 nt, Artificial Sequence
  Description of Artificial Sequence: Synthetic oligonucleotide
agaagacucuccgcgcccg

SEQ ID NO: 1802277 - RNA, 19 nt, Artificial Sequence
  Description of Artificial Sequence: Synthetic oligonucleotide
caugaccaccucagguggg

SEQ ID NO: 1802278 - RNA, 19 nt, Artificial Sequence
  Description of Artificial Sequence: Synthetic oligonucleotide
cuucccggugccaccgucg

SEQ ID NO: 1802279 - RNA, 19 nt, Artificial Sequence
  Description of Artificial Sequence: Synthetic oligonucleotide
uccaaguuagggucuccaa

SEQ ID NO: 1802280 - RNA, 19 nt, Artificial Sequence
  Description of Artificial Sequence: Synthetic oligonucleotide
ugguuuuaaaaugcuuaua

SEQ ID NO: 1802281 - RNA, 19 nt, Artificial Sequence
  Description of Artificial Sequence: Synthetic oligonucleotide
augcucguacugugcugcc

SEQ ID NO: 1802282 - RNA, 19 nt, Artificial Sequence
  Description of Artificial Sequence: Synthetic oligonucleotide
ggacaguugccuauaaaac

SEQ ID NO: 1802283 - RNA, 19 nt, Artificial Sequence
  Description of Artificial Sequence: Synthetic oligonucleotide
ucucuaugccaguuaggua

SEQ ID NO: 1802284 - RNA, 19 nt, Artificial Sequence
  Description of Artificial Sequence: Synthetic oligonucleotide
cguugaauuuaaugggucc

SEQ ID NO: 1802285 - RNA, 19 nt, Artificial Sequence
  Description of Artificial Sequence: Synthetic oligonucleotide
agauuucaccacugacuga

SEQ ID NO: 1802286 - RNA, 19 nt, Artificial Sequence
  Description of Artificial Sequence: Synthetic oligonucleotide
gaagacgagcgggugcacc

SEQ ID NO: 1802287 - RNA, 19 nt, Artificial Sequence
  Description of Artificial Sequence: Synthetic oligonucleotide
acccguaccagaucucuau

SEQ ID NO: 1802288 - RNA, 19 nt, Artificial Sequence
  Description of Artificial Sequence: Synthetic oligonucleotide
cacaauacaauggggaugu

SEQ ID NO: 1802289 - RNA, 19 nt, Artificial Sequence
  Description of Artificial Sequence: Synthetic oligonucleotide
gcuuauaaacaagggauga

SEQ ID NO: 1802290 - RNA, 19 nt, Artificial Sequence
  Description of Artificial Sequence: Synthetic oligonucleotide
accucagguaauaagcaaa

SEQ ID NO: 1802291 - RNA, 19 nt, Artificial Sequence
  Description of Artificial Sequence: Synthetic oligonucleotide
ucguuugagcaaccucuaa

SEQ ID NO: 1802292 - RNA, 19 nt, Artificial Sequence
  Description of Artificial Sequence: Synthetic oligonucleotide
aagacucuccgcgcccguc

SEQ ID NO: 1802293 - RNA, 19 nt, Artificial Sequence
  Description of Artificial Sequence: Synthetic oligonucleotide
cuuucgguggaagacaaua

SEQ ID NO: 1802294 - RNA, 19 nt, Artificial Sequence
  Description of Artificial Sequence: Synthetic oligonucleotide
ccacugacugaauagugug

SEQ ID NO: 1802295 - RNA, 19 nt, Artificial Sequence
  Description of Artificial Sequence: Synthetic oligonucleotide
gcauccaaugaaguacacg

SEQ ID NO: 1802296 - RNA, 19 nt, Artificial Sequence
  Description of Artificial Sequence: Synthetic oligonucleotide
guuugugaagguaggcaca

SEQ ID NO: 1802297 - RNA, 19 nt, Artificial Sequence
  Description of Artificial Sequence: Synthetic oligonucleotide
acaagggaugauucacuua

SEQ ID NO: 1802298 - RNA, 19 nt, Artificial Sequence
  Description of Artificial Sequence: Synthetic oligonucleotide
ccaugaccaccucaggugg

SEQ ID NO: 1802299 - RNA, 19 nt, Artificial Sequence
  Description of Artificial Sequence: Synthetic oligonucleotide
cagaagacucuccgcgccc

SEQ ID NO: 1802300 - RNA, 19 nt, Artificial Sequence
  Description of Artificial Sequence: Synthetic oligonucleotide
gguaggcacaaggagaaca

SEQ ID NO: 1802301 - RNA, 19 nt, Artificial Sequence
  Description of Artificial Sequence: Synthetic oligonucleotide
uucccggugccaccgucgc

SEQ ID NO: 1802302 - RNA, 19 nt, Artificial Sequence
  Description of Artificial Sequence: Synthetic oligonucleotide
agggcagucguuugagcaa

SEQ ID NO: 1802303 - RNA, 19 nt, Artificial Sequence
  Description of Artificial Sequence: Synthetic oligonucleotide
acuccaaguuagggucucc

SEQ ID NO: 1802304 - RNA, 19 nt, Artificial Sequence
  Description of Artificial Sequence: Synthetic oligonucleotide
gacgagcgggugcaccucc

SEQ ID NO: 1802305 - RNA, 19 nt, Artificial Sequence
  Description of Artificial Sequence: Synthetic oligonucleotide
cagucguuugagcaaccuc

SEQ ID NO: 1802306 - RNA, 19 nt, Artificial Sequence
  Description of Artificial Sequence: Synthetic oligonucleotide
aguggcgcuucacgaacgu

SEQ ID NO: 1802307 - RNA, 19 nt, Artificial Sequence
  Description of Artificial Sequence: Synthetic oligonucleotide
acacacgcugcaccgcuga

SEQ ID NO: 1802308 - RNA, 19 nt, Artificial Sequence
  Description of Artificial Sequence: Synthetic oligonucleotide
cucgaacucgcccgucaag

SEQ ID NO: 1802309 - RNA, 19 nt, Artificial Sequence
  Description of Artificial Sequence: Synthetic oligonucleotide
auagugugaggugacugua

SEQ ID NO: 1802310 - RNA, 19 nt, Artificial Sequence
  Description of Artificial Sequence: Synthetic oligonucleotide
cgauccuuccagaagacuc

SEQ ID NO: 1802311 - RNA, 19 nt, Artificial Sequence
  Description of Artificial Sequence: Synthetic oligonucleotide
aguugccuauaaaacuaga

SEQ ID NO: 1802312 - RNA, 19 nt, Artificial Sequence
  Description of Artificial Sequence: Synthetic oligonucleotide
auugggcuuggauguagua

SEQ ID NO: 1802313 - RNA, 19 nt, Artificial Sequence
  Description of Artificial Sequence: Synthetic oligonucleotide
cucuguugguauggaagac

SEQ ID NO: 1802314 - RNA, 19 nt, Artificial Sequence
  Description of Artificial Sequence: Synthetic oligonucleotide
ggagacgcagcggacgccg

SEQ ID NO: 1802315 - RNA, 19 nt, Artificial Sequence
  Description of Artificial Sequence: Synthetic oligonucleotide
auauggcacaagcuuccuu

SEQ ID NO: 1802316 - RNA, 19 nt, Artificial Sequence
  Description of Artificial Sequence: Synthetic oligonucleotide
ucgucuucccggugccacc

SEQ ID NO: 1802317 - RNA, 19 nt, Artificial Sequence
  Description of Artificial Sequence: Synthetic oligonucleotide
aguagccaucgcgcaggcc

SEQ ID NO: 1802318 - RNA, 19 nt, Artificial Sequence
  Description of Artificial Sequence: Synthetic oligonucleotide
caguuagguacauucuugu

SEQ ID NO: 1802319 - RNA, 19 nt, Artificial Sequence
  Description of Artificial Sequence: Synthetic oligonucleotide
ucuuucgguggaagacaau

SEQ ID NO: 1802320 - RNA, 19 nt, Artificial Sequence
  Description of Artificial Sequence: Synthetic oligonucleotide
accagaucucuaugccagu

SEQ ID NO: 1802321 - RNA, 19 nt, Artificial Sequence
  Description of Artificial Sequence: Synthetic oligonucleotide
ccaaacagcuaaauaugca

SEQ ID NO: 1802322 - RNA, 19 nt, Artificial Sequence
  Description of Artificial Sequence: Synthetic oligonucleotide
ucacugucucacaggucau

SEQ ID NO: 1802323 - RNA, 19 nt, Artificial Sequence
  Description of Artificial Sequence: Synthetic oligonucleotide
cacgaacgucgucuucccg

SEQ ID NO: 1802324 - RNA, 19 nt, Artificial Sequence
  Description of Artificial Sequence: Synthetic oligonucleotide
ucuucccggugccaccguc

SEQ ID NO: 1802325 - RNA, 19 nt, Artificial Sequence
  Description of Artificial Sequence: Synthetic oligonucleotide
ggaagacaauagauuuugc

SEQ ID NO: 1802326 - RNA, 19 nt, Artificial Sequence
  Description of Artificial Sequence: Synthetic oligonucleotide
ggcacaaggagaacauaac

SEQ ID NO: 1802327 - RNA, 19 nt, Artificial Sequence
  Description of Artificial Sequence: Synthetic oligonucleotide
gcacauugggcuuggaugu

SEQ ID NO: 1802328 - RNA, 19 nt, Artificial Sequence
  Description of Artificial Sequence: Synthetic oligonucleotide
ggguccucuguugguaugg

SEQ ID NO: 1802329 - RNA, 19 nt, Artificial Sequence
  Description of Artificial Sequence: Synthetic oligonucleotide
auaagguggcacacacgcu

SEQ ID NO: 1802330 - RNA, 19 nt, Artificial Sequence
  Description of Artificial Sequence: Synthetic oligonucleotide
cuucacgaacgucgucuuc

SEQ ID NO: 1802331 - RNA, 19 nt, Artificial Sequence
  Description of Artificial Sequence: Synthetic oligonucleotide
guccgacugaagcuggaaa

SEQ ID NO: 1802332 - RNA, 19 nt, Artificial Sequence
  Description of Artificial Sequence: Synthetic oligonucleotide
cauucuuguaggugacucu

SEQ ID NO: 1802333 - RNA, 19 nt, Artificial Sequence
  Description of Artificial Sequence: Synthetic oligonucleotide
ggaaacaacuguguuccaa

SEQ ID NO: 1802334 - RNA, 19 nt, Artificial Sequence
  Description of Artificial Sequence: Synthetic oligonucleotide
cuuauaaacaagggaugau

SEQ ID NO: 1802335 - RNA, 19 nt, Artificial Sequence
  Description of Artificial Sequence: Synthetic oligonucleotide
cacacacccguaccagauc

SEQ ID NO: 1802336 - RNA, 19 nt, Artificial Sequence
  Description of Artificial Sequence: Synthetic oligonucleotide
gcggcgauccuuccagaag

SEQ ID NO: 1802337 - RNA, 19 nt, Artificial Sequence
  Description of Artificial Sequence: Synthetic oligonucleotide
agacgagcgggugcaccuc

SEQ ID NO: 1802338 - RNA, 19 nt, Artificial Sequence
  Description of Artificial Sequence: Synthetic oligonucleotide
gcgcccguccgacugaagc

SEQ ID NO: 1802339 - RNA, 19 nt, Artificial Sequence
  Description of Artificial Sequence: Synthetic oligonucleotide
uccgggagggcagucguuu

SEQ ID NO: 1802340 - RNA, 19 nt, Artificial Sequence
  Description of Artificial Sequence: Synthetic oligonucleotide
acucuugauguuacaucaa

SEQ ID NO: 1802341 - RNA, 19 nt, Artificial Sequence
  Description of Artificial Sequence: Synthetic oligonucleotide
gcgggauucaaaugccgga

SEQ ID NO: 1802342 - RNA, 19 nt, Artificial Sequence
  Description of Artificial Sequence: Synthetic oligonucleotide
ggggauguuuucacacacc

SEQ ID NO: 1802343 - RNA, 19 nt, Artificial Sequence
  Description of Artificial Sequence: Synthetic oligonucleotide
gcaaccucuaaaucaugcu

SEQ ID NO: 1802344 - RNA, 19 nt, Artificial Sequence
  Description of Artificial Sequence: Synthetic oligonucleotide
guauggaagacgagcgggu

SEQ ID NO: 1802345 - RNA, 19 nt, Artificial Sequence
  Description of Artificial Sequence: Synthetic oligonucleotide
ugccggagacgcagcggac

SEQ ID NO: 1802346 - RNA, 19 nt, Artificial Sequence
  Description of Artificial Sequence: Synthetic oligonucleotide
gcuuggauguaguagccau

SEQ ID NO: 1802347 - RNA, 19 nt, Artificial Sequence
  Description of Artificial Sequence: Synthetic oligonucleotide
uccgcgcccguccgacuga

SEQ ID NO: 1802348 - RNA, 19 nt, Artificial Sequence
  Description of Artificial Sequence: Synthetic oligonucleotide
ggugccaccgucgcccacc

SEQ ID NO: 1802349 - RNA, 19 nt, Artificial Sequence
  Description of Artificial Sequence: Synthetic oligonucleotide
cacugucucacaggucauc

SEQ ID NO: 1802350 - RNA, 19 nt, Artificial Sequence
  Description of Artificial Sequence: Synthetic oligonucleotide
auguuuucacacacccgua

SEQ ID NO: 1802351 - RNA, 19 nt, Artificial Sequence
  Description of Artificial Sequence: Synthetic oligonucleotide
ucccggugccaccgucgcc

SEQ ID NO: 1802352 - RNA, 19 nt, Artificial Sequence
  Description of Artificial Sequence: Synthetic oligonucleotide
gcuaaauaugcaaguccaa

SEQ ID NO: 1802353 - RNA, 19 nt, Artificial Sequence
  Description of Artificial Sequence: Synthetic oligonucleotide
gcucguacugugcugccaa

SEQ ID NO: 1802354 - RNA, 19 nt, Artificial Sequence
  Description of Artificial Sequence: Synthetic oligonucleotide
caauacaauggggauguuu

SEQ ID NO: 1802355 - RNA, 19 nt, Artificial Sequence
  Description of Artificial Sequence: Synthetic oligonucleotide
gguaauaagcaaaggcauu

SEQ ID NO: 1802356 - RNA, 19 nt, Artificial Sequence
  Description of Artificial Sequence: Synthetic oligonucleotide
ccaaagcuggguccaugac

SEQ ID NO: 1802357 - RNA, 19 nt, Artificial Sequence
  Description of Artificial Sequence: Synthetic oligonucleotide
cacgcugcaccgcugacau

SEQ ID NO: 1802358 - RNA, 19 nt, Artificial Sequence
  Description of Artificial Sequence: Synthetic oligonucleotide
ucgcggcgauccuuccaga

SEQ ID NO: 1802359 - RNA, 19 nt, Artificial Sequence
  Description of Artificial Sequence: Synthetic oligonucleotide
cacacgcugcaccgcugac

SEQ ID NO: 1802360 - RNA, 19 nt, Artificial Sequence
  Description of Artificial Sequence: Synthetic oligonucleotide
gggcagucguuugagcaac

SEQ ID NO: 1802361 - RNA, 19 nt, Artificial Sequence
  Description of Artificial Sequence: Synthetic oligonucleotide
cucuccgcgcccguccgac

SEQ ID NO: 1802362 - RNA, 19 nt, Artificial Sequence
  Description of Artificial Sequence: Synthetic oligonucleotide
cauugggcuuggauguagu

SEQ ID NO: 1802363 - RNA, 19 nt, Artificial Sequence
  Description of Artificial Sequence: Synthetic oligonucleotide
uaguuacuuuuggcagaaa

SEQ ID NO: 1802364 - RNA, 19 nt, Artificial Sequence
  Description of Artificial Sequence: Synthetic oligonucleotide
guggaagacaauagauuuu

SEQ ID NO: 1802365 - RNA, 19 nt, Artificial Sequence
  Description of Artificial Sequence: Synthetic oligonucleotide
gucguuugagcaaccucua

SEQ ID NO: 1802366 - RNA, 19 nt, Artificial Sequence
  Description of Artificial Sequence: Synthetic oligonucleotide
cguuugagcaaccucuaaa

SEQ ID NO: 1802367 - RNA, 19 nt, Artificial Sequence
  Description of Artificial Sequence: Synthetic oligonucleotide
ccggagacgcagcggacgc

SEQ ID NO: 1802368 - RNA, 19 nt, Artificial Sequence
  Description of Artificial Sequence: Synthetic oligonucleotide
cccguccgacugaagcugg

SEQ ID NO: 1802369 - RNA, 19 nt, Artificial Sequence
  Description of Artificial Sequence: Synthetic oligonucleotide
gcggaagcgggauucaaau

SEQ ID NO: 1802370 - RNA, 19 nt, Artificial Sequence
  Description of Artificial Sequence: Synthetic oligonucleotide
cugacaucacaggacaguu

SEQ ID NO: 1802371 - RNA, 19 nt, Artificial Sequence
  Description of Artificial Sequence: Synthetic oligonucleotide
cccguaccagaucucuaug

SEQ ID NO: 1802372 - RNA, 19 nt, Artificial Sequence
  Description of Artificial Sequence: Synthetic oligonucleotide
ucuccgcgcccguccgacu

SEQ ID NO: 1802373 - RNA, 19 nt, Artificial Sequence
  Description of Artificial Sequence: Synthetic oligonucleotide
acucuccgcgcccguccga

SEQ ID NO: 1802374 - RNA, 19 nt, Artificial Sequence
  Description of Artificial Sequence: Synthetic oligonucleotide
gcccguccgacugaagcug

SEQ ID NO: 1802375 - RNA, 19 nt, Artificial Sequence
  Description of Artificial Sequence: Synthetic oligonucleotide
ggcgauccuuccagaagac

SEQ ID NO: 1802376 - RNA, 19 nt, Artificial Sequence
  Description of Artificial Sequence: Synthetic oligonucleotide
gcgggugcaccuccacgcc

SEQ ID NO: 1802377 - RNA, 19 nt, Artificial Sequence
  Description of Artificial Sequence: Synthetic oligonucleotide
cucguacugugcugccaaa

SEQ ID NO: 1802378 - RNA, 19 nt, Artificial Sequence
  Description of Artificial Sequence: Synthetic oligonucleotide
cgaacucgcccgucaagug

SEQ ID NO: 1802379 - RNA, 19 nt, Artificial Sequence
  Description of Artificial Sequence: Synthetic oligonucleotide
cggaagcgggauucaaaug

SEQ ID NO: 1802380 - RNA, 19 nt, Artificial Sequence
  Description of Artificial Sequence: Synthetic oligonucleotide
ggcacacacgcugcaccgc

SEQ ID NO: 1802381 - RNA, 19 nt, Artificial Sequence
  Description of Artificial Sequence: Synthetic oligonucleotide
cauccgggagggcagucgu

SEQ ID NO: 1802382 - RNA, 19 nt, Artificial Sequence
  Description of Artificial Sequence: Synthetic oligonucleotide
cauccucauccgggagggc

SEQ ID NO: 1802383 - RNA, 19 nt, Artificial Sequence
  Description of Artificial Sequence: Synthetic oligonucleotide
cggcgauccuuccagaaga

SEQ ID NO: 1802384 - RNA, 19 nt, Artificial Sequence
  Description of Artificial Sequence: Synthetic oligonucleotide
ccgacugaagcuggaaaga

SEQ ID NO: 1802385 - RNA, 19 nt, Artificial Sequence
  Description of Artificial Sequence: Synthetic oligonucleotide
guguuccaaacagcuaaau

SEQ ID NO: 1802386 - RNA, 19 nt, Artificial Sequence
  Description of Artificial Sequence: Synthetic oligonucleotide
ccaaguuagggucuccaau

SEQ ID NO: 1802387 - RNA, 19 nt, Artificial Sequence
  Description of Artificial Sequence: Synthetic oligonucleotide
guggcgcuucacgaacguc

SEQ ID NO: 1802388 - RNA, 19 nt, Artificial Sequence
  Description of Artificial Sequence: Synthetic oligonucleotide
cugcaccgcugacaucaca

SEQ ID NO: 1802389 - RNA, 19 nt, Artificial Sequence
  Description of Artificial Sequence: Synthetic oligonucleotide
ccggcugugucccacacgu

SEQ ID NO: 1802390 - RNA, 19 nt, Artificial Sequence
  Description of Artificial Sequence: Synthetic oligonucleotide
ggcggaagcgggauucaaa

SEQ ID NO: 1802391 - RNA, 19 nt, Artificial Sequence
  Description of Artificial Sequence: Synthetic oligonucleotide
gguccucuguugguaugga

SEQ ID NO: 1802392 - RNA, 19 nt, Artificial Sequence
  Description of Artificial Sequence: Synthetic oligonucleotide
acgagcgggugcaccucca

SEQ ID NO: 1802393 - RNA, 19 nt, Artificial Sequence
  Description of Artificial Sequence: Synthetic oligonucleotide
cacauugggcuuggaugua

SEQ ID NO: 1802394 - RNA, 19 nt, Artificial Sequence
  Description of Artificial Sequence: Synthetic oligonucleotide
cgaucugcuuagcuaaaua

SEQ ID NO: 1802395 - RNA, 19 nt, Artificial Sequence
  Description of Artificial Sequence: Synthetic oligonucleotide
ccgggagggcagucguuug

SEQ ID NO: 1802396 - RNA, 19 nt, Artificial Sequence
  Description of Artificial Sequence: Synthetic oligonucleotide
ccuuaauauccacuuuauu

SEQ ID NO: 1802397 - RNA, 19 nt, Artificial Sequence
  Description of Artificial Sequence: Synthetic oligonucleotide
auggcacauugggcuugga

SEQ ID NO: 1802398 - RNA, 19 nt, Artificial Sequence
  Description of Artificial Sequence: Synthetic oligonucleotide
gcuucacgaacgucgucuu

SEQ ID NO: 1802399 - RNA, 19 nt, Artificial Sequence
  Description of Artificial Sequence: Synthetic oligonucleotide
gcagucguuugagcaaccu

SEQ ID NO: 1802400 - RNA, 19 nt, Artificial Sequence
  Description of Artificial Sequence: Synthetic oligonucleotide
ccgucaaguggcgcuucac

SEQ ID NO: 1802401 - RNA, 19 nt, Artificial Sequence
  Description of Artificial Sequence: Synthetic oligonucleotide
ggcgcuucacgaacgucgu

SEQ ID NO: 1802402 - RNA, 19 nt, Artificial Sequence
  Description of Artificial Sequence: Synthetic oligonucleotide
cgcuucacgaacgucgucu

SEQ ID NO: 1802403 - RNA, 19 nt, Artificial Sequence
  Description of Artificial Sequence: Synthetic oligonucleotide
gcgcuucacgaacgucguc

SEQ ID NO: 1802404 - RNA, 19 nt, Artificial Sequence
  Description of Artificial Sequence: Synthetic oligonucleotide
cuaugccaguuagguacau

SEQ ID NO: 1802405 - RNA, 19 nt, Artificial Sequence
  Description of Artificial Sequence: Synthetic oligonucleotide
gcgauccuuccagaagacu

SEQ ID NO: 1802406 - RNA, 19 nt, Artificial Sequence
  Description of Artificial Sequence: Synthetic oligonucleotide
gcugcaccgcugacaucac

SEQ ID NO: 1802407 - RNA, 19 nt, Artificial Sequence
  Description of Artificial Sequence: Synthetic oligonucleotide
cgagcgggugcaccuccac

SEQ ID NO: 1802408 - RNA, 19 nt, Artificial Sequence
  Description of Artificial Sequence: Synthetic oligonucleotide
cgaacgucgucuucccggu

SEQ ID NO: 1802409 - RNA, 19 nt, Artificial Sequence
  Description of Artificial Sequence: Synthetic oligonucleotide
cccgucaaguggcgcuuca

SEQ ID NO: 1802410 - RNA, 19 nt, Artificial Sequence
  Description of Artificial Sequence: Synthetic oligonucleotide
ccguccgacugaagcugga

SEQ ID NO: 1802411 - RNA, 19 nt, Artificial Sequence
  Description of Artificial Sequence: Synthetic oligonucleotide
cgcggcgauccuuccagaa

SEQ ID NO: 1802412 - RNA, 19 nt, Artificial Sequence
  Description of Artificial Sequence: Synthetic oligonucleotide
ccagaucucuaugccaguu

SEQ ID NO: 1802413 - RNA, 19 nt, Artificial Sequence
  Description of Artificial Sequence: Synthetic oligonucleotide
gcccgucaaguggcgcuuc

SEQ ID NO: 1802414 - RNA, 19 nt, Artificial Sequence
  Description of Artificial Sequence: Synthetic oligonucleotide
ggucuccaaugagcuuucu

SEQ ID NO: 1802415 - RNA, 19 nt, Artificial Sequence
  Description of Artificial Sequence: Synthetic oligonucleotide
cgcccguccgacugaagcu

SEQ ID NO: 1802416 - RNA, 19 nt, Artificial Sequence
  Description of Artificial Sequence: Synthetic oligonucleotide
ccgcgcccguccgacugaa

SEQ ID NO: 1802417 - RNA, 19 nt, Artificial Sequence
  Description of Artificial Sequence: Synthetic oligonucleotide
cgcccgucaaguggcgcuu

SEQ ID NO: 1802418 - RNA, 19 nt, Artificial Sequence
  Description of Artificial Sequence: Synthetic oligonucleotide
cggcugugucccacacguu

SEQ ID NO: 1802419 - RNA, 19 nt, Artificial Sequence
  Description of Artificial Sequence: Synthetic oligonucleotide
cuuauaauaagcaaacugc

SEQ ID NO: 1802420 - RNA, 19 nt, Artificial Sequence
  Description of Artificial Sequence: Synthetic oligonucleotide
aauagugguacaugguagc

SEQ ID NO: 1802421 - RNA, 19 nt, Artificial Sequence
  Description of Artificial Sequence: Synthetic oligonucleotide
uuuaaugugguccucagcu

SEQ ID NO: 1802422 - RNA, 19 nt, Artificial Sequence
  Description of Artificial Sequence: Synthetic oligonucleotide
aaaugcucgucugagaggc

SEQ ID NO: 1802423 - RNA, 19 nt, Artificial Sequence
  Description of Artificial Sequence: Synthetic oligonucleotide
aaaguaugcgaacugcagg

SEQ ID NO: 1802424 - RNA, 19 nt, Artificial Sequence
  Description of Artificial Sequence: Synthetic oligonucleotide
ugagguaucagcaacccag

SEQ ID NO: 1802425 - RNA, 19 nt, Artificial Sequence
  Description of Artificial Sequence: Synthetic oligonucleotide
ucaacuuauaauaagcaaa

SEQ ID NO: 1802426 - RNA, 19 nt, Artificial Sequence
  Description of Artificial Sequence: Synthetic oligonucleotide
auagguaugagccgcagcg

SEQ ID NO: 1802427 - RNA, 19 nt, Artificial Sequence
  Description of Artificial Sequence: Synthetic oligonucleotide
aaucuugcauuccagaacu

SEQ ID NO: 1802428 - RNA, 19 nt, Artificial Sequence
  Description of Artificial Sequence: Synthetic oligonucleotide
ugcaaauagugguacaugg

SEQ ID NO: 1802429 - RNA, 19 nt, Artificial Sequence
  Description of Artificial Sequence: Synthetic oligonucleotide
cauucaacuuauaauaagc

SEQ ID NO: 1802430 - RNA, 19 nt, Artificial Sequence
  Description of Artificial Sequence: Synthetic oligonucleotide
auaagcaaacugcaaauag

SEQ ID NO: 1802431 - RNA, 19 nt, Artificial Sequence
  Description of Artificial Sequence: Synthetic oligonucleotide
aauuucuccacgcgauagc

SEQ ID NO: 1802432 - RNA, 19 nt, Artificial Sequence
  Description of Artificial Sequence: Synthetic oligonucleotide
aacagcagguagcugacgg

SEQ ID NO: 1802433 - RNA, 19 nt, Artificial Sequence
  Description of Artificial Sequence: Synthetic oligonucleotide
aacugaacugcuucggguc

SEQ ID NO: 1802434 - RNA, 19 nt, Artificial Sequence
  Description of Artificial Sequence: Synthetic oligonucleotide
uccuuaaucucccuggagc

SEQ ID NO: 1802435 - RNA, 19 nt, Artificial Sequence
  Description of Artificial Sequence: Synthetic oligonucleotide
acauuaacgaacugaacug

SEQ ID NO: 1802436 - RNA, 19 nt, Artificial Sequence
  Description of Artificial Sequence: Synthetic oligonucleotide
uaaaguaugcgaacugcag

SEQ ID NO: 1802437 - RNA, 19 nt, Artificial Sequence
  Description of Artificial Sequence: Synthetic oligonucleotide
ucucauaugacuugguuuc

SEQ ID NO: 1802438 - RNA, 19 nt, Artificial Sequence
  Description of Artificial Sequence: Synthetic oligonucleotide
ucuuccuuuaaaagggaag

SEQ ID NO: 1802439 - RNA, 19 nt, Artificial Sequence
  Description of Artificial Sequence: Synthetic oligonucleotide
aacgaacugaacugcuucg

SEQ ID NO: 1802440 - RNA, 19 nt, Artificial Sequence
  Description of Artificial Sequence: Synthetic oligonucleotide
acuuugagguaucagcaac

SEQ ID NO: 1802441 - RNA, 19 nt, Artificial Sequence
  Description of Artificial Sequence: Synthetic oligonucleotide
cagcagauagguaugagcc

SEQ ID NO: 1802442 - RNA, 19 nt, Artificial Sequence
  Description of Artificial Sequence: Synthetic oligonucleotide
uguaauaugccauguuucu

SEQ ID NO: 1802443 - RNA, 19 nt, Artificial Sequence
  Description of Artificial Sequence: Synthetic oligonucleotide
uuaaaguaugcgaacugca

SEQ ID NO: 1802444 - RNA, 19 nt, Artificial Sequence
  Description of Artificial Sequence: Synthetic oligonucleotide
uucaucauuucaucgucgg

SEQ ID NO: 1802445 - RNA, 19 nt, Artificial Sequence
  Description of Artificial Sequence: Synthetic oligonucleotide
aucgucauccauuaggugu

SEQ ID NO: 1802446 - RNA, 19 nt, Artificial Sequence
  Description of Artificial Sequence: Synthetic oligonucleotide
uaugacuugguuuccaggu

SEQ ID NO: 1802447 - RNA, 19 nt, Artificial Sequence
  Description of Artificial Sequence: Synthetic oligonucleotide
aaauagugguacaugguag

SEQ ID NO: 1802448 - RNA, 19 nt, Artificial Sequence
  Description of Artificial Sequence: Synthetic oligonucleotide
gaagaagucagggagggcc

SEQ ID NO: 1802449 - RNA, 19 nt, Artificial Sequence
  Description of Artificial Sequence: Synthetic oligonucleotide
cauagucacauuaacgaac

SEQ ID NO: 1802450 - RNA, 19 nt, Artificial Sequence
  Description of Artificial Sequence: Synthetic oligonucleotide
uauaauaagcaaacugcaa

SEQ ID NO: 1802451 - RNA, 19 nt, Artificial Sequence
  Description of Artificial Sequence: Synthetic oligonucleotide
aguuccauguccauaacgg

SEQ ID NO: 1802452 - RNA, 19 nt, Artificial Sequence
  Description of Artificial Sequence: Synthetic oligonucleotide
agcggcaucagcucguccc

SEQ ID NO: 1802453 - RNA, 19 nt, Artificial Sequence
  Description of Artificial Sequence: Synthetic oligonucleotide
uaaugugguccucagcucc

SEQ ID NO: 1802454 - RNA, 19 nt, Artificial Sequence
  Description of Artificial Sequence: Synthetic oligonucleotide
ugauaguagaccagguucu

SEQ ID NO: 1802455 - RNA, 19 nt, Artificial Sequence
  Description of Artificial Sequence: Synthetic oligonucleotide
ucgaacagcagguagcuga

SEQ ID NO: 1802456 - RNA, 19 nt, Artificial Sequence
  Description of Artificial Sequence: Synthetic oligonucleotide
guaucagcaacccaggcac

SEQ ID NO: 1802457 - RNA, 19 nt, Artificial Sequence
  Description of Artificial Sequence: Synthetic oligonucleotide
uuguaauaugccauguuuc

SEQ ID NO: 1802458 - RNA, 19 nt, Artificial Sequence
  Description of Artificial Sequence: Synthetic oligonucleotide
ucugggcuggaaaugcucg

SEQ ID NO: 1802459 - RNA, 19 nt, Artificial Sequence
  Description of Artificial Sequence: Synthetic oligonucleotide
ugcacggacaaacagguuc

SEQ ID NO: 1802460 - RNA, 19 nt, Artificial Sequence
  Description of Artificial Sequence: Synthetic oligonucleotide
cugauaguagaccagguuc

SEQ ID NO: 1802461 - RNA, 19 nt, Artificial Sequence
  Description of Artificial Sequence: Synthetic oligonucleotide
uuggccuuaaaguaugcga

SEQ ID NO: 1802462 - RNA, 19 nt, Artificial Sequence
  Description of Artificial Sequence: Synthetic oligonucleotide
gagaagucucuucaguugc

SEQ ID NO: 1802463 - RNA, 19 nt, Artificial Sequence
  Description of Artificial Sequence: Synthetic oligonucleotide
uaugcgaacugcaggaacu

SEQ ID NO: 1802464 - RNA, 19 nt, Artificial Sequence
  Description of Artificial Sequence: Synthetic oligonucleotide
cuuaaaguaugcgaacugc

SEQ ID NO: 1802465 - RNA, 19 nt, Artificial Sequence
  Description of Artificial Sequence: Synthetic oligonucleotide
auuucuccacgcgauagcc

SEQ ID NO: 1802466 - RNA, 19 nt, Artificial Sequence
  Description of Artificial Sequence: Synthetic oligonucleotide
auacuccacaaccucuccc

SEQ ID NO: 1802467 - RNA, 19 nt, Artificial Sequence
  Description of Artificial Sequence: Synthetic oligonucleotide
cagcauagucacauuaacg

SEQ ID NO: 1802468 - RNA, 19 nt, Artificial Sequence
  Description of Artificial Sequence: Synthetic oligonucleotide
uguaggcccgcacugcacg

SEQ ID NO: 1802469 - RNA, 19 nt, Artificial Sequence
  Description of Artificial Sequence: Synthetic oligonucleotide
cuuugagguaucagcaacc

SEQ ID NO: 1802470 - RNA, 19 nt, Artificial Sequence
  Description of Artificial Sequence: Synthetic oligonucleotide
uugucgaacagcagguagc

SEQ ID NO: 1802471 - RNA, 19 nt, Artificial Sequence
  Description of Artificial Sequence: Synthetic oligonucleotide
ucaucauuucaucgucggg

SEQ ID NO: 1802472 - RNA, 19 nt, Artificial Sequence
  Description of Artificial Sequence: Synthetic oligonucleotide
ugguacugauaguagacca

SEQ ID NO: 1802473 - RNA, 19 nt, Artificial Sequence
  Description of Artificial Sequence: Synthetic oligonucleotide
uaacgaacugaacugcuuc

SEQ ID NO: 1802474 - RNA, 19 nt, Artificial Sequence
  Description of Artificial Sequence: Synthetic oligonucleotide
cacaaccucucccucaucg

SEQ ID NO: 1802475 - RNA, 19 nt, Artificial Sequence
  Description of Artificial Sequence: Synthetic oligonucleotide
ugagcaaagcuguacaguu

SEQ ID NO: 1802476 - RNA, 19 nt, Artificial Sequence
  Description of Artificial Sequence: Synthetic oligonucleotide
aggucauucaacuuauaau

SEQ ID NO: 1802477 - RNA, 19 nt, Artificial Sequence
  Description of Artificial Sequence: Synthetic oligonucleotide
uggccuuaaaguaugcgaa

SEQ ID NO: 1802478 - RNA, 19 nt, Artificial Sequence
  Description of Artificial Sequence: Synthetic oligonucleotide
gaauuucuccacgcgauag

SEQ ID NO: 1802479 - RNA, 19 nt, Artificial Sequence
  Description of Artificial Sequence: Synthetic oligonucleotide
uucucauaugacuugguuu

SEQ ID NO: 1802480 - RNA, 19 nt, Artificial Sequence
  Description of Artificial Sequence: Synthetic oligonucleotide
cuucaucauuucaucgucg

SEQ ID NO: 1802481 - RNA, 19 nt, Artificial Sequence
  Description of Artificial Sequence: Synthetic oligonucleotide
agcagauagguaugagccg

SEQ ID NO: 1802482 - RNA, 19 nt, Artificial Sequence
  Description of Artificial Sequence: Synthetic oligonucleotide
guagccacgaauuucucca

SEQ ID NO: 1802483 - RNA, 19 nt, Artificial Sequence
  Description of Artificial Sequence: Synthetic oligonucleotide
aagcugcggaagcuguagc

SEQ ID NO: 1802484 - RNA, 19 nt, Artificial Sequence
  Description of Artificial Sequence: Synthetic oligonucleotide
ggucauucaacuuauaaua

SEQ ID NO: 1802485 - RNA, 19 nt, Artificial Sequence
  Description of Artificial Sequence: Synthetic oligonucleotide
uucaguugcugcaggcuag

SEQ ID NO: 1802486 - RNA, 19 nt, Artificial Sequence
  Description of Artificial Sequence: Synthetic oligonucleotide
ucuaacaggucauccacau

SEQ ID NO: 1802487 - RNA, 19 nt, Artificial Sequence
  Description of Artificial Sequence: Synthetic oligonucleotide
uccauaacggacguccucc

SEQ ID NO: 1802488 - RNA, 19 nt, Artificial Sequence
  Description of Artificial Sequence: Synthetic oligonucleotide
cacugcacggacaaacagg

SEQ ID NO: 1802489 - RNA, 19 nt, Artificial Sequence
  Description of Artificial Sequence: Synthetic oligonucleotide
cuugucgaacagcagguag

SEQ ID NO: 1802490 - RNA, 19 nt, Artificial Sequence
  Description of Artificial Sequence: Synthetic oligonucleotide
uuugagguaucagcaaccc

SEQ ID NO: 1802491 - RNA, 19 nt, Artificial Sequence
  Description of Artificial Sequence: Synthetic oligonucleotide
guacugauaguagaccagg

SEQ ID NO: 1802492 - RNA, 19 nt, Artificial Sequence
  Description of Artificial Sequence: Synthetic oligonucleotide
uccugagcaaagcuguaca

SEQ ID NO: 1802493 - RNA, 19 nt, Artificial Sequence
  Description of Artificial Sequence: Synthetic oligonucleotide
guaugagccgcagcgaugg

SEQ ID NO: 1802494 - RNA, 19 nt, Artificial Sequence
  Description of Artificial Sequence: Synthetic oligonucleotide
cauuagguguuccugagca

SEQ ID NO: 1802495 - RNA, 19 nt, Artificial Sequence
  Description of Artificial Sequence: Synthetic oligonucleotide
uccauuagguguuccugag

SEQ ID NO: 1802496 - RNA, 19 nt, Artificial Sequence
  Description of Artificial Sequence: Synthetic oligonucleotide
cauuaacgaacugaacugc

SEQ ID NO: 1802497 - RNA, 19 nt, Artificial Sequence
  Description of Artificial Sequence: Synthetic oligonucleotide
uucaucgucgggaugcuuc

SEQ ID NO: 1802498 - RNA, 19 nt, Artificial Sequence
  Description of Artificial Sequence: Synthetic oligonucleotide
caagcucuuguaauaugcc

SEQ ID NO: 1802499 - RNA, 19 nt, Artificial Sequence
  Description of Artificial Sequence: Synthetic oligonucleotide
gaacuuguagggcucgcgc

SEQ ID NO: 1802500 - RNA, 19 nt, Artificial Sequence
  Description of Artificial Sequence: Synthetic oligonucleotide
cacauuaacgaacugaacu

SEQ ID NO: 1802501 - RNA, 19 nt, Artificial Sequence
  Description of Artificial Sequence: Synthetic oligonucleotide
aucgucgggaugcuucagc

SEQ ID NO: 1802502 - RNA, 19 nt, Artificial Sequence
  Description of Artificial Sequence: Synthetic oligonucleotide
guucuccucacacugaauc

SEQ ID NO: 1802503 - RNA, 19 nt, Artificial Sequence
  Description of Artificial Sequence: Synthetic oligonucleotide
aauaagcaaacugcaaaua

SEQ ID NO: 1802504 - RNA, 19 nt, Artificial Sequence
  Description of Artificial Sequence: Synthetic oligonucleotide
auaguagaccagguucugc

SEQ ID NO: 1802505 - RNA, 19 nt, Artificial Sequence
  Description of Artificial Sequence: Synthetic oligonucleotide
aacuuauaauaagcaaacu

SEQ ID NO: 1802506 - RNA, 19 nt, Artificial Sequence
  Description of Artificial Sequence: Synthetic oligonucleotide
uuuccaggucuuuaaugug

SEQ ID NO: 1802507 - RNA, 19 nt, Artificial Sequence
  Description of Artificial Sequence: Synthetic oligonucleotide
ugagacacugcgcgcggcg

SEQ ID NO: 1802508 - RNA, 19 nt, Artificial Sequence
  Description of Artificial Sequence: Synthetic oligonucleotide
cuugcagcgcuugagacac

SEQ ID NO: 1802509 - RNA, 19 nt, Artificial Sequence
  Description of Artificial Sequence: Synthetic oligonucleotide
cauaugacuugguuuccag

SEQ ID NO: 1802510 - RNA, 19 nt, Artificial Sequence
  Description of Artificial Sequence: Synthetic oligonucleotide
agguaucagcaacccaggc

SEQ ID NO: 1802511 - RNA, 19 nt, Artificial Sequence
  Description of Artificial Sequence: Synthetic oligonucleotide
augacuugguuuccagguc

SEQ ID NO: 1802512 - RNA, 19 nt, Artificial Sequence
  Description of Artificial Sequence: Synthetic oligonucleotide
ugcagcauagucacauuaa

SEQ ID NO: 1802513 - RNA, 19 nt, Artificial Sequence
  Description of Artificial Sequence: Synthetic oligonucleotide
auaacggacguccuccagu

SEQ ID NO: 1802514 - RNA, 19 nt, Artificial Sequence
  Description of Artificial Sequence: Synthetic oligonucleotide
gauagccuccuaugacugg

SEQ ID NO: 1802515 - RNA, 19 nt, Artificial Sequence
  Description of Artificial Sequence: Synthetic oligonucleotide
agcugcggaagcuguagcg

SEQ ID NO: 1802516 - RNA, 19 nt, Artificial Sequence
  Description of Artificial Sequence: Synthetic oligonucleotide
cuauggacagguagaaguc

SEQ ID NO: 1802517 - RNA, 19 nt, Artificial Sequence
  Description of Artificial Sequence: Synthetic oligonucleotide
uucucaccauuguaggccc

SEQ ID NO: 1802518 - RNA, 19 nt, Artificial Sequence
  Description of Artificial Sequence: Synthetic oligonucleotide
gaugcuucagcagauaggu

SEQ ID NO: 1802519 - RNA, 19 nt, Artificial Sequence
  Description of Artificial Sequence: Synthetic oligonucleotide
aacugcaaauagugguaca

SEQ ID NO: 1802520 - RNA, 19 nt, Artificial Sequence
  Description of Artificial Sequence: Synthetic oligonucleotide
cauaaaaggcuuugaagaa

SEQ ID NO: 1802521 - RNA, 19 nt, Artificial Sequence
  Description of Artificial Sequence: Synthetic oligonucleotide
gaagacuuugagguaucag

SEQ ID NO: 1802522 - RNA, 19 nt, Artificial Sequence
  Description of Artificial Sequence: Synthetic oligonucleotide
uucgggaggucauuggccu

SEQ ID NO: 1802523 - RNA, 19 nt, Artificial Sequence
  Description of Artificial Sequence: Synthetic oligonucleotide
ucacauuaacgaacugaac

SEQ ID NO: 1802524 - RNA, 19 nt, Artificial Sequence
  Description of Artificial Sequence: Synthetic oligonucleotide
ucauccauuagguguuccu

SEQ ID NO: 1802525 - RNA, 19 nt, Artificial Sequence
  Description of Artificial Sequence: Synthetic oligonucleotide
gaacugcaggaacuuguag

SEQ ID NO: 1802526 - RNA, 19 nt, Artificial Sequence
  Description of Artificial Sequence: Synthetic oligonucleotide
cuucgggaggucauuggcc

SEQ ID NO: 1802527 - RNA, 19 nt, Artificial Sequence
  Description of Artificial Sequence: Synthetic oligonucleotide
cuugucauccuugucgaac

SEQ ID NO: 1802528 - RNA, 19 nt, Artificial Sequence
  Description of Artificial Sequence: Synthetic oligonucleotide
cuuuaaugugguccucagc

SEQ ID NO: 1802529 - RNA, 19 nt, Artificial Sequence
  Description of Artificial Sequence: Synthetic oligonucleotide
ucuacauaaugaucugcua

SEQ ID NO: 1802530 - RNA, 19 nt, Artificial Sequence
  Description of Artificial Sequence: Synthetic oligonucleotide
uuaacgaacugaacugcuu

SEQ ID NO: 1802531 - RNA, 19 nt, Artificial Sequence
  Description of Artificial Sequence: Synthetic oligonucleotide
cagcgcuugagacacugcg

SEQ ID NO: 1802532 - RNA, 19 nt, Artificial Sequence
  Description of Artificial Sequence: Synthetic oligonucleotide
uuaaucucccuggagcccu

SEQ ID NO: 1802533 - RNA, 19 nt, Artificial Sequence
  Description of Artificial Sequence: Synthetic oligonucleotide
auccauuagguguuccuga

SEQ ID NO: 1802534 - RNA, 19 nt, Artificial Sequence
  Description of Artificial Sequence: Synthetic oligonucleotide
ucuuguaauaugccauguu

SEQ ID NO: 1802535 - RNA, 19 nt, Artificial Sequence
  Description of Artificial Sequence: Synthetic oligonucleotide
uugguuuccaggucuuuaa

SEQ ID NO: 1802536 - RNA, 19 nt, Artificial Sequence
  Description of Artificial Sequence: Synthetic oligonucleotide
accauuguaggcccgcacu

SEQ ID NO: 1802537 - RNA, 19 nt, Artificial Sequence
  Description of Artificial Sequence: Synthetic oligonucleotide
ugacgagaagucucuucag

SEQ ID NO: 1802538 - RNA, 19 nt, Artificial Sequence
  Description of Artificial Sequence: Synthetic oligonucleotide
uuaaugugguccucagcuc

SEQ ID NO: 1802539 - RNA, 19 nt, Artificial Sequence
  Description of Artificial Sequence: Synthetic oligonucleotide
caaauagugguacauggua

SEQ ID NO: 1802540 - RNA, 19 nt, Artificial Sequence
  Description of Artificial Sequence: Synthetic oligonucleotide
caucauuucaucgucggga

SEQ ID NO: 1802541 - RNA, 19 nt, Artificial Sequence
  Description of Artificial Sequence: Synthetic oligonucleotide
aucauuucaucgucgggau

SEQ ID NO: 1802542 - RNA, 19 nt, Artificial Sequence
  Description of Artificial Sequence: Synthetic oligonucleotide
guugcgguggcagaaggcc

SEQ ID NO: 1802543 - RNA, 19 nt, Artificial Sequence
  Description of Artificial Sequence: Synthetic oligonucleotide
gucacauuaacgaacugaa

SEQ ID NO: 1802544 - RNA, 19 nt, Artificial Sequence
  Description of Artificial Sequence: Synthetic oligonucleotide
agguguuccugagcaaagc

SEQ ID NO: 1802545 - RNA, 19 nt, Artificial Sequence
  Description of Artificial Sequence: Synthetic oligonucleotide
ugguacaugguagccacga

SEQ ID NO: 1802546 - RNA, 19 nt, Artificial Sequence
  Description of Artificial Sequence: Synthetic oligonucleotide
ucuugcauuccagaacuuc

SEQ ID NO: 1802547 - RNA, 19 nt, Artificial Sequence
  Description of Artificial Sequence: Synthetic oligonucleotide
acugcacggacaaacaggu

SEQ ID NO: 1802548 - RNA, 19 nt, Artificial Sequence
  Description of Artificial Sequence: Synthetic oligonucleotide
uugagguaucagcaaccca

SEQ ID NO: 1802549 - RNA, 19 nt, Artificial Sequence
  Description of Artificial Sequence: Synthetic oligonucleotide
auuguaggcccgcacugca

SEQ ID NO: 1802550 - RNA, 19 nt, Artificial Sequence
  Description of Artificial Sequence: Synthetic oligonucleotide
ucgucauccauuagguguu

SEQ ID NO: 1802551 - RNA, 19 nt, Artificial Sequence
  Description of Artificial Sequence: Synthetic oligonucleotide
aaggaacacugacgagaag

SEQ ID NO: 1802552 - RNA, 19 nt, Artificial Sequence
  Description of Artificial Sequence: Synthetic oligonucleotide
cuucaggucauucaacuua

SEQ ID NO: 1802553 - RNA, 19 nt, Artificial Sequence
  Description of Artificial Sequence: Synthetic oligonucleotide
aagaggcgcagcucggcgu

SEQ ID NO: 1802554 - RNA, 19 nt, Artificial Sequence
  Description of Artificial Sequence: Synthetic oligonucleotide
agcgcguggcgguaggccg

SEQ ID NO: 1802555 - RNA, 19 nt, Artificial Sequence
  Description of Artificial Sequence: Synthetic oligonucleotide
augguagccacgaauuucu

SEQ ID NO: 1802556 - RNA, 19 nt, Artificial Sequence
  Description of Artificial Sequence: Synthetic oligonucleotide
auuaacgaacugaacugcu

SEQ ID NO: 1802557 - RNA, 19 nt, Artificial Sequence
  Description of Artificial Sequence: Synthetic oligonucleotide
acgagaagucucuucaguu

SEQ ID NO: 1802558 - RNA, 19 nt, Artificial Sequence
  Description of Artificial Sequence: Synthetic oligonucleotide
ucgucgggaugcuucagca

SEQ ID NO: 1802559 - RNA, 19 nt, Artificial Sequence
  Description of Artificial Sequence: Synthetic oligonucleotide
acugaacugcuucgggucu

SEQ ID NO: 1802560 - RNA, 19 nt, Artificial Sequence
  Description of Artificial Sequence: Synthetic oligonucleotide
ccuuaaucucccuggagcc

SEQ ID NO: 1802561 - RNA, 19 nt, Artificial Sequence
  Description of Artificial Sequence: Synthetic oligonucleotide
acugcaaauagugguacau

SEQ ID NO: 1802562 - RNA, 19 nt, Artificial Sequence
  Description of Artificial Sequence: Synthetic oligonucleotide
ucauuucaucgucgggaug

SEQ ID NO: 1802563 - RNA, 19 nt, Artificial Sequence
  Description of Artificial Sequence: Synthetic oligonucleotide
ucaucgucgggaugcuuca

SEQ ID NO: 1802564 - RNA, 19 nt, Artificial Sequence
  Description of Artificial Sequence: Synthetic oligonucleotide
acgaacugaacugcuucgg

SEQ ID NO: 1802565 - RNA, 19 nt, Artificial Sequence
  Description of Artificial Sequence: Synthetic oligonucleotide
guaugcgaacugcaggaac

SEQ ID NO: 1802566 - RNA, 19 nt, Artificial Sequence
  Description of Artificial Sequence: Synthetic oligonucleotide
cacgcgauagccuccuaug

SEQ ID NO: 1802567 - RNA, 19 nt, Artificial Sequence
  Description of Artificial Sequence: Synthetic oligonucleotide
cauacuccacaaccucucc

SEQ ID NO: 1802568 - RNA, 19 nt, Artificial Sequence
  Description of Artificial Sequence: Synthetic oligonucleotide
cuuaaucucccuggagccc

SEQ ID NO: 1802569 - RNA, 19 nt, Artificial Sequence
  Description of Artificial Sequence: Synthetic oligonucleotide
uccaggcaagcucuuguaa

SEQ ID NO: 1802570 - RNA, 19 nt, Artificial Sequence
  Description of Artificial Sequence: Synthetic oligonucleotide
uuucuccacgcgauagccu

SEQ ID NO: 1802571 - RNA, 19 nt, Artificial Sequence
  Description of Artificial Sequence: Synthetic oligonucleotide
gcgcuugagacacugcgcg

SEQ ID NO: 1802572 - RNA, 19 nt, Artificial Sequence
  Description of Artificial Sequence: Synthetic oligonucleotide
cuugagacacugcgcgcgg

SEQ ID NO: 1802573 - RNA, 19 nt, Artificial Sequence
  Description of Artificial Sequence: Synthetic oligonucleotide
cauccauuagguguuccug

SEQ ID NO: 1802574 - RNA, 19 nt, Artificial Sequence
  Description of Artificial Sequence: Synthetic oligonucleotide
aguugcgguggcagaaggc

SEQ ID NO: 1802575 - RNA, 19 nt, Artificial Sequence
  Description of Artificial Sequence: Synthetic oligonucleotide
aaugcucgucugagaggcc

SEQ ID NO: 1802576 - RNA, 19 nt, Artificial Sequence
  Description of Artificial Sequence: Synthetic oligonucleotide
ucucaccauuguaggcccg

SEQ ID NO: 1802577 - RNA, 19 nt, Artificial Sequence
  Description of Artificial Sequence: Synthetic oligonucleotide
uguccauaacggacguccu

SEQ ID NO: 1802578 - RNA, 19 nt, Artificial Sequence
  Description of Artificial Sequence: Synthetic oligonucleotide
cuuguaauaugccauguuu

SEQ ID NO: 1802579 - RNA, 19 nt, Artificial Sequence
  Description of Artificial Sequence: Synthetic oligonucleotide
acagguucucauaugacuu

SEQ ID NO: 1802580 - RNA, 19 nt, Artificial Sequence
  Description of Artificial Sequence: Synthetic oligonucleotide
gggaugcuucagcagauag

SEQ ID NO: 1802581 - RNA, 19 nt, Artificial Sequence
  Description of Artificial Sequence: Synthetic oligonucleotide
gacuuugagguaucagcaa

SEQ ID NO: 1802582 - RNA, 19 nt, Artificial Sequence
  Description of Artificial Sequence: Synthetic oligonucleotide
acgcucuccgcccagugcu

SEQ ID NO: 1802583 - RNA, 19 nt, Artificial Sequence
  Description of Artificial Sequence: Synthetic oligonucleotide
uagucacauuaacgaacug

SEQ ID NO: 1802584 - RNA, 19 nt, Artificial Sequence
  Description of Artificial Sequence: Synthetic oligonucleotide
guacuggucgagcgcgugg

SEQ ID NO: 1802585 - RNA, 19 nt, Artificial Sequence
  Description of Artificial Sequence: Synthetic oligonucleotide
agcucuuguaauaugccau

SEQ ID NO: 1802586 - RNA, 19 nt, Artificial Sequence
  Description of Artificial Sequence: Synthetic oligonucleotide
cuacauaaugaucugcuau

SEQ ID NO: 1802587 - RNA, 19 nt, Artificial Sequence
  Description of Artificial Sequence: Synthetic oligonucleotide
ggugagguucuccucacac

SEQ ID NO: 1802588 - RNA, 19 nt, Artificial Sequence
  Description of Artificial Sequence: Synthetic oligonucleotide
gcagauagguaugagccgc

SEQ ID NO: 1802589 - RNA, 19 nt, Artificial Sequence
  Description of Artificial Sequence: Synthetic oligonucleotide
uaacggacguccuccaguu

SEQ ID NO: 1802590 - RNA, 19 nt, Artificial Sequence
  Description of Artificial Sequence: Synthetic oligonucleotide
agguaugagccgcagcgau

SEQ ID NO: 1802591 - RNA, 19 nt, Artificial Sequence
  Description of Artificial Sequence: Synthetic oligonucleotide
gaacugaacugcuucgggu

SEQ ID NO: 1802592 - RNA, 19 nt, Artificial Sequence
  Description of Artificial Sequence: Synthetic oligonucleotide
gucauucaacuuauaauaa

SEQ ID NO: 1802593 - RNA, 19 nt, Artificial Sequence
  Description of Artificial Sequence: Synthetic oligonucleotide
guuccauguccauaacgga

SEQ ID NO: 1802594 - RNA, 19 nt, Artificial Sequence
  Description of Artificial Sequence: Synthetic oligonucleotide
agcucgucccgcgggaagc

SEQ ID NO: 1802595 - RNA, 19 nt, Artificial Sequence
  Description of Artificial Sequence: Synthetic oligonucleotide
gguacugauaguagaccag

SEQ ID NO: 1802596 - RNA, 19 nt, Artificial Sequence
  Description of Artificial Sequence: Synthetic oligonucleotide
ugcagcgcuugagacacug

SEQ ID NO: 1802597 - RNA, 19 nt, Artificial Sequence
  Description of Artificial Sequence: Synthetic oligonucleotide
cugugguacugauaguaga

SEQ ID NO: 1802598 - RNA, 19 nt, Artificial Sequence
  Description of Artificial Sequence: Synthetic oligonucleotide
cacgaauuucuccacgcga

SEQ ID NO: 1802599 - RNA, 19 nt, Artificial Sequence
  Description of Artificial Sequence: Synthetic oligonucleotide
caucagcucgucccgcggg

SEQ ID NO: 1802600 - RNA, 19 nt, Artificial Sequence
  Description of Artificial Sequence: Synthetic oligonucleotide
cacugaaucuugcauucca

SEQ ID NO: 1802601 - RNA, 19 nt, Artificial Sequence
  Description of Artificial Sequence: Synthetic oligonucleotide
gcuugagacacugcgcgcg

SEQ ID NO: 1802602 - RNA, 19 nt, Artificial Sequence
  Description of Artificial Sequence: Synthetic oligonucleotide
cugcaaauagugguacaug

SEQ ID NO: 1802603 - RNA, 19 nt, Artificial Sequence
  Description of Artificial Sequence: Synthetic oligonucleotide
cauuguaggcccgcacugc

SEQ ID NO: 1802604 - RNA, 19 nt, Artificial Sequence
  Description of Artificial Sequence: Synthetic oligonucleotide
cauaacggacguccuccag

SEQ ID NO: 1802605 - RNA, 19 nt, Artificial Sequence
  Description of Artificial Sequence: Synthetic oligonucleotide
uagcucacgcucuccgccc

SEQ ID NO: 1802606 - RNA, 19 nt, Artificial Sequence
  Description of Artificial Sequence: Synthetic oligonucleotide
cucauaugacuugguuucc

SEQ ID NO: 1802607 - RNA, 19 nt, Artificial Sequence
  Description of Artificial Sequence: Synthetic oligonucleotide
ucuccacgcgauagccucc

SEQ ID NO: 1802608 - RNA, 19 nt, Artificial Sequence
  Description of Artificial Sequence: Synthetic oligonucleotide
ucgucugagaggccccacu

SEQ ID NO: 1802609 - RNA, 19 nt, Artificial Sequence
  Description of Artificial Sequence: Synthetic oligonucleotide
gcagcauagucacauuaac

SEQ ID NO: 1802610 - RNA, 19 nt, Artificial Sequence
  Description of Artificial Sequence: Synthetic oligonucleotide
cucuucaucauuucaucgu

SEQ ID NO: 1802611 - RNA, 19 nt, Artificial Sequence
  Description of Artificial Sequence: Synthetic oligonucleotide
auuagguguuccugagcaa

SEQ ID NO: 1802612 - RNA, 19 nt, Artificial Sequence
  Description of Artificial Sequence: Synthetic oligonucleotide
gacgagaagucucuucagu

SEQ ID NO: 1802613 - RNA, 19 nt, Artificial Sequence
  Description of Artificial Sequence: Synthetic oligonucleotide
acgcgauagccuccuauga

SEQ ID NO: 1802614 - RNA, 19 nt, Artificial Sequence
  Description of Artificial Sequence: Synthetic oligonucleotide
aggaacuuguagggcucgc

SEQ ID NO: 1802615 - RNA, 19 nt, Artificial Sequence
  Description of Artificial Sequence: Synthetic oligonucleotide
acgaauuucuccacgcgau

SEQ ID NO: 1802616 - RNA, 19 nt, Artificial Sequence
  Description of Artificial Sequence: Synthetic oligonucleotide
guggcgguaggccgacucg

SEQ ID NO: 1802617 - RNA, 19 nt, Artificial Sequence
  Description of Artificial Sequence: Synthetic oligonucleotide
caaccucucccucaucguc

SEQ ID NO: 1802618 - RNA, 19 nt, Artificial Sequence
  Description of Artificial Sequence: Synthetic oligonucleotide
ugcucgucugagaggcccc

SEQ ID NO: 1802619 - RNA, 19 nt, Artificial Sequence
  Description of Artificial Sequence: Synthetic oligonucleotide
ucgucccgcgggaagcugc

SEQ ID NO: 1802620 - RNA, 19 nt, Artificial Sequence
  Description of Artificial Sequence: Synthetic oligonucleotide
agauagguaugagccgcag

SEQ ID NO: 1802621 - RNA, 19 nt, Artificial Sequence
  Description of Artificial Sequence: Synthetic oligonucleotide
ccuuaaaguaugcgaacug

SEQ ID NO: 1802622 - RNA, 19 nt, Artificial Sequence
  Description of Artificial Sequence: Synthetic oligonucleotide
uaucagcaacccaggcacu

SEQ ID NO: 1802623 - RNA, 19 nt, Artificial Sequence
  Description of Artificial Sequence: Synthetic oligonucleotide
ugcgguggcagaaggccuc

SEQ ID NO: 1802624 - RNA, 19 nt, Artificial Sequence
  Description of Artificial Sequence: Synthetic oligonucleotide
acaugguagccacgaauuu

SEQ ID NO: 1802625 - RNA, 19 nt, Artificial Sequence
  Description of Artificial Sequence: Synthetic oligonucleotide
guaggcccgcacugcacgg

SEQ ID NO: 1802626 - RNA, 19 nt, Artificial Sequence
  Description of Artificial Sequence: Synthetic oligonucleotide
gcaacccaggcacucgagg

SEQ ID NO: 1802627 - RNA, 19 nt, Artificial Sequence
  Description of Artificial Sequence: Synthetic oligonucleotide
ucgggaugcuucagcagau

SEQ ID NO: 1802628 - RNA, 19 nt, Artificial Sequence
  Description of Artificial Sequence: Synthetic oligonucleotide
cacgccgccgaagaggcgc

SEQ ID NO: 1802629 - RNA, 19 nt, Artificial Sequence
  Description of Artificial Sequence: Synthetic oligonucleotide
gccacgaauuucuccacgc

SEQ ID NO: 1802630 - RNA, 19 nt, Artificial Sequence
  Description of Artificial Sequence: Synthetic oligonucleotide
uccuaugacuggggugagg

SEQ ID NO: 1802631 - RNA, 19 nt, Artificial Sequence
  Description of Artificial Sequence: Synthetic oligonucleotide
ggaagccaggcauucauaa

SEQ ID NO: 1802632 - RNA, 19 nt, Artificial Sequence
  Description of Artificial Sequence: Synthetic oligonucleotide
ucgagcggcaucagcucgu

SEQ ID NO: 1802633 - RNA, 19 nt, Artificial Sequence
  Description of Artificial Sequence: Synthetic oligonucleotide
cucuaacaggucauccaca

SEQ ID NO: 1802634 - RNA, 19 nt, Artificial Sequence
  Description of Artificial Sequence: Synthetic oligonucleotide
ccagaacuucuacauaaug

SEQ ID NO: 1802635 - RNA, 19 nt, Artificial Sequence
  Description of Artificial Sequence: Synthetic oligonucleotide
uagguaugagccgcagcga

SEQ ID NO: 1802636 - RNA, 19 nt, Artificial Sequence
  Description of Artificial Sequence: Synthetic oligonucleotide
ucacgcucuccgcccagug

SEQ ID NO: 1802637 - RNA, 19 nt, Artificial Sequence
  Description of Artificial Sequence: Synthetic oligonucleotide
ucgagcgcguggcgguagg

SEQ ID NO: 1802638 - RNA, 19 nt, Artificial Sequence
  Description of Artificial Sequence: Synthetic oligonucleotide
aggcccgcacugcacggac

SEQ ID NO: 1802639 - RNA, 19 nt, Artificial Sequence
  Description of Artificial Sequence: Synthetic oligonucleotide
gacucgagcggcaucagcu

SEQ ID NO: 1802640 - RNA, 19 nt, Artificial Sequence
  Description of Artificial Sequence: Synthetic oligonucleotide
ccugugguacugauaguag

SEQ ID NO: 1802641 - RNA, 19 nt, Artificial Sequence
  Description of Artificial Sequence: Synthetic oligonucleotide
ugcgaacugcaggaacuug

SEQ ID NO: 1802642 - RNA, 19 nt, Artificial Sequence
  Description of Artificial Sequence: Synthetic oligonucleotide
cucaccauuguaggcccgc

SEQ ID NO: 1802643 - RNA, 19 nt, Artificial Sequence
  Description of Artificial Sequence: Synthetic oligonucleotide
cagcgauggccuucgggag

SEQ ID NO: 1802644 - RNA, 19 nt, Artificial Sequence
  Description of Artificial Sequence: Synthetic oligonucleotide
ggaacuuguagggcucgcg

SEQ ID NO: 1802645 - RNA, 19 nt, Artificial Sequence
  Description of Artificial Sequence: Synthetic oligonucleotide
agugcucgccgccguacug

SEQ ID NO: 1802646 - RNA, 19 nt, Artificial Sequence
  Description of Artificial Sequence: Synthetic oligonucleotide
agaggccccacuugucccu

SEQ ID NO: 1802647 - RNA, 19 nt, Artificial Sequence
  Description of Artificial Sequence: Synthetic oligonucleotide
cugcgcgcggcgcagcacg

SEQ ID NO: 1802648 - RNA, 19 nt, Artificial Sequence
  Description of Artificial Sequence: Synthetic oligonucleotide
ccugagcaaagcuguacag

SEQ ID NO: 1802649 - RNA, 19 nt, Artificial Sequence
  Description of Artificial Sequence: Synthetic oligonucleotide
gagcaaagcuguacaguuc

SEQ ID NO: 1802650 - RNA, 19 nt, Artificial Sequence
  Description of Artificial Sequence: Synthetic oligonucleotide
ugcggaagcuguagcgcuc

SEQ ID NO: 1802651 - RNA, 19 nt, Artificial Sequence
  Description of Artificial Sequence: Synthetic oligonucleotide
guagggcucgcgcugcuga

SEQ ID NO: 1802652 - RNA, 19 nt, Artificial Sequence
  Description of Artificial Sequence: Synthetic oligonucleotide
cuggucgagcgcguggcgg

SEQ ID NO: 1802653 - RNA, 19 nt, Artificial Sequence
  Description of Artificial Sequence: Synthetic oligonucleotide
ggccuuaaaguaugcgaac

SEQ ID NO: 1802654 - RNA, 19 nt, Artificial Sequence
  Description of Artificial Sequence: Synthetic oligonucleotide
ggcaagcucuuguaauaug

SEQ ID NO: 1802655 - RNA, 19 nt, Artificial Sequence
  Description of Artificial Sequence: Synthetic oligonucleotide
gcauagucacauuaacgaa

SEQ ID NO: 1802656 - RNA, 19 nt, Artificial Sequence
  Description of Artificial Sequence: Synthetic oligonucleotide
aucagcucgucccgcggga

SEQ ID NO: 1802657 - RNA, 19 nt, Artificial Sequence
  Description of Artificial Sequence: Synthetic oligonucleotide
uaugagccgcagcgauggc

SEQ ID NO: 1802658 - RNA, 19 nt, Artificial Sequence
  Description of Artificial Sequence: Synthetic oligonucleotide
agccuccuaugacuggggu

SEQ ID NO: 1802659 - RNA, 19 nt, Artificial Sequence
  Description of Artificial Sequence: Synthetic oligonucleotide
cgagaagucucuucaguug

SEQ ID NO: 1802660 - RNA, 19 nt, Artificial Sequence
  Description of Artificial Sequence: Synthetic oligonucleotide
agaagucucuucaguugcu

SEQ ID NO: 1802661 - RNA, 19 nt, Artificial Sequence
  Description of Artificial Sequence: Synthetic oligonucleotide
uugucccugugguacugau

SEQ ID NO: 1802662 - RNA, 19 nt, Artificial Sequence
  Description of Artificial Sequence: Synthetic oligonucleotide
acggacaaacagguucuca

SEQ ID NO: 1802663 - RNA, 19 nt, Artificial Sequence
  Description of Artificial Sequence: Synthetic oligonucleotide
cacgcucuccgcccagugc

SEQ ID NO: 1802664 - RNA, 19 nt, Artificial Sequence
  Description of Artificial Sequence: Synthetic oligonucleotide
aguaugcgaacugcaggaa

SEQ ID NO: 1802665 - RNA, 19 nt, Artificial Sequence
  Description of Artificial Sequence: Synthetic oligonucleotide
agacacugcgcgcggcgca

SEQ ID NO: 1802666 - RNA, 19 nt, Artificial Sequence
  Description of Artificial Sequence: Synthetic oligonucleotide
cgguaggccgacucgagcg

SEQ ID NO: 1802667 - RNA, 19 nt, Artificial Sequence
  Description of Artificial Sequence: Synthetic oligonucleotide
gagacacugcgcgcggcgc

SEQ ID NO: 1802668 - RNA, 19 nt, Artificial Sequence
  Description of Artificial Sequence: Synthetic oligonucleotide
cugcagcauagucacauua

SEQ ID NO: 1802669 - RNA, 19 nt, Artificial Sequence
  Description of Artificial Sequence: Synthetic oligonucleotide
uugagacacugcgcgcggc

SEQ ID NO: 1802670 - RNA, 19 nt, Artificial Sequence
  Description of Artificial Sequence: Synthetic oligonucleotide
cugcgacuggcggaaggcg

SEQ ID NO: 1802671 - RNA, 19 nt, Artificial Sequence
  Description of Artificial Sequence: Synthetic oligonucleotide
guucucauaugacuugguu

SEQ ID NO: 1802672 - RNA, 19 nt, Artificial Sequence
  Description of Artificial Sequence: Synthetic oligonucleotide
gacacugcgcgcggcgcag

SEQ ID NO: 1802673 - RNA, 19 nt, Artificial Sequence
  Description of Artificial Sequence: Synthetic oligonucleotide
caccauuguaggcccgcac

SEQ ID NO: 1802674 - RNA, 19 nt, Artificial Sequence
  Description of Artificial Sequence: Synthetic oligonucleotide
uguagggcucgcgcugcug

SEQ ID NO: 1802675 - RNA, 19 nt, Artificial Sequence
  Description of Artificial Sequence: Synthetic oligonucleotide
cagauagguaugagccgca

SEQ ID NO: 1802676 - RNA, 19 nt, Artificial Sequence
  Description of Artificial Sequence: Synthetic oligonucleotide
cucgcaggaagccaggcau

SEQ ID NO: 1802677 - RNA, 19 nt, Artificial Sequence
  Description of Artificial Sequence: Synthetic oligonucleotide
gcggcaucagcucgucccg

SEQ ID NO: 1802678 - RNA, 19 nt, Artificial Sequence
  Description of Artificial Sequence: Synthetic oligonucleotide
ucgcaggaagccaggcauu

SEQ ID NO: 1802679 - RNA, 19 nt, Artificial Sequence
  Description of Artificial Sequence: Synthetic oligonucleotide
gcggaaggcgggcaggccc

SEQ ID NO: 1802680 - RNA, 19 nt, Artificial Sequence
  Description of Artificial Sequence: Synthetic oligonucleotide
ccauuagguguuccugagc

SEQ ID NO: 1802681 - RNA, 19 nt, Artificial Sequence
  Description of Artificial Sequence: Synthetic oligonucleotide
gggcucgcgcugcugaaag

SEQ ID NO: 1802682 - RNA, 19 nt, Artificial Sequence
  Description of Artificial Sequence: Synthetic oligonucleotide
gguguuccugagcaaagcu

SEQ ID NO: 1802683 - RNA, 19 nt, Artificial Sequence
  Description of Artificial Sequence: Synthetic oligonucleotide
ggcugcgacuggcggaagg

SEQ ID NO: 1802684 - RNA, 19 nt, Artificial Sequence
  Description of Artificial Sequence: Synthetic oligonucleotide
ucuccgcccagugcucgcc

SEQ ID NO: 1802685 - RNA, 19 nt, Artificial Sequence
  Description of Artificial Sequence: Synthetic oligonucleotide
cugcugaaagucggccagc

SEQ ID NO: 1802686 - RNA, 19 nt, Artificial Sequence
  Description of Artificial Sequence: Synthetic oligonucleotide
gguaugagccgcagcgaug

SEQ ID NO: 1802687 - RNA, 19 nt, Artificial Sequence
  Description of Artificial Sequence: Synthetic oligonucleotide
cgauagccuccuaugacug

SEQ ID NO: 1802688 - RNA, 19 nt, Artificial Sequence
  Description of Artificial Sequence: Synthetic oligonucleotide
gccuccuaugacuggggug

SEQ ID NO: 1802689 - RNA, 19 nt, Artificial Sequence
  Description of Artificial Sequence: Synthetic oligonucleotide
agcucacgcucuccgccca

SEQ ID NO: 1802690 - RNA, 19 nt, Artificial Sequence
  Description of Artificial Sequence: Synthetic oligonucleotide
cuggcggaaggcgggcagg

SEQ ID NO: 1802691 - RNA, 19 nt, Artificial Sequence
  Description of Artificial Sequence: Synthetic oligonucleotide
ggccgcguucuucagguca

SEQ ID NO: 1802692 - RNA, 19 nt, Artificial Sequence
  Description of Artificial Sequence: Synthetic oligonucleotide
agcaacccaggcacucgag

SEQ ID NO: 1802693 - RNA, 19 nt, Artificial Sequence
  Description of Artificial Sequence: Synthetic oligonucleotide
cucuccgcccagugcucgc

SEQ ID NO: 1802694 - RNA, 19 nt, Artificial Sequence
  Description of Artificial Sequence: Synthetic oligonucleotide
gagcggcaucagcucgucc

SEQ ID NO: 1802695 - RNA, 19 nt, Artificial Sequence
  Description of Artificial Sequence: Synthetic oligonucleotide
cuccgcccagugcucgccg

SEQ ID NO: 1802696 - RNA, 19 nt, Artificial Sequence
  Description of Artificial Sequence: Synthetic oligonucleotide
agcuccaggcaagcucuug

SEQ ID NO: 1802697 - RNA, 19 nt, Artificial Sequence
  Description of Artificial Sequence: Synthetic oligonucleotide
uagggcucgcgcugcugaa

SEQ ID NO: 1802698 - RNA, 19 nt, Artificial Sequence
  Description of Artificial Sequence: Synthetic oligonucleotide
cagcucgucccgcgggaag

SEQ ID NO: 1802699 - RNA, 19 nt, Artificial Sequence
  Description of Artificial Sequence: Synthetic oligonucleotide
gcugcgacuggcggaaggc

SEQ ID NO: 1802700 - RNA, 19 nt, Artificial Sequence
  Description of Artificial Sequence: Synthetic oligonucleotide
gucgaacagcagguagcug

SEQ ID NO: 1802701 - RNA, 19 nt, Artificial Sequence
  Description of Artificial Sequence: Synthetic oligonucleotide
acugcgcgcggcgcagcac

SEQ ID NO: 1802702 - RNA, 19 nt, Artificial Sequence
  Description of Artificial Sequence: Synthetic oligonucleotide
cauguccauaacggacguc

SEQ ID NO: 1802703 - RNA, 19 nt, Artificial Sequence
  Description of Artificial Sequence: Synthetic oligonucleotide
acacugcgcgcggcgcagc

SEQ ID NO: 1802704 - RNA, 19 nt, Artificial Sequence
  Description of Artificial Sequence: Synthetic oligonucleotide
ggcgggcaggcccugcuug

SEQ ID NO: 1802705 - RNA, 19 nt, Artificial Sequence
  Description of Artificial Sequence: Synthetic oligonucleotide
gcagguagcugacggcaca

SEQ ID NO: 1802706 - RNA, 19 nt, Artificial Sequence
  Description of Artificial Sequence: Synthetic oligonucleotide
cagcaacccaggcacucga

SEQ ID NO: 1802707 - RNA, 19 nt, Artificial Sequence
  Description of Artificial Sequence: Synthetic oligonucleotide
ucagcucgucccgcgggaa

SEQ ID NO: 1802708 - RNA, 19 nt, Artificial Sequence
  Description of Artificial Sequence: Synthetic oligonucleotide
caucgucgggaugcuucag

SEQ ID NO: 1802709 - RNA, 19 nt, Artificial Sequence
  Description of Artificial Sequence: Synthetic oligonucleotide
gccuuaaaguaugcgaacu

SEQ ID NO: 1802710 - RNA, 19 nt, Artificial Sequence
  Description of Artificial Sequence: Synthetic oligonucleotide
cgcgauagccuccuaugac

SEQ ID NO: 1802711 - RNA, 19 nt, Artificial Sequence
  Description of Artificial Sequence: Synthetic oligonucleotide
ucgggaggucauuggccuu

SEQ ID NO: 1802712 - RNA, 19 nt, Artificial Sequence
  Description of Artificial Sequence: Synthetic oligonucleotide
gcucgcgcugcugaaaguc

SEQ ID NO: 1802713 - RNA, 19 nt, Artificial Sequence
  Description of Artificial Sequence: Synthetic oligonucleotide
cuccuaugacuggggugag

SEQ ID NO: 1802714 - RNA, 19 nt, Artificial Sequence
  Description of Artificial Sequence: Synthetic oligonucleotide
gcgguaggccgacucgagc

SEQ ID NO: 1802715 - RNA, 19 nt, Artificial Sequence
  Description of Artificial Sequence: Synthetic oligonucleotide
gguacaugguagccacgaa

SEQ ID NO: 1802716 - RNA, 19 nt, Artificial Sequence
  Description of Artificial Sequence: Synthetic oligonucleotide
gccgcagcgauggccuucg

SEQ ID NO: 1802717 - RNA, 19 nt, Artificial Sequence
  Description of Artificial Sequence: Synthetic oligonucleotide
gucggccagcaccgcgcgg

SEQ ID NO: 1802718 - RNA, 19 nt, Artificial Sequence
  Description of Artificial Sequence: Synthetic oligonucleotide
ccucacacugaaucuugca

SEQ ID NO: 1802719 - RNA, 19 nt, Artificial Sequence
  Description of Artificial Sequence: Synthetic oligonucleotide
gucgagcgcguggcgguag

SEQ ID NO: 1802720 - RNA, 19 nt, Artificial Sequence
  Description of Artificial Sequence: Synthetic oligonucleotide
cacggacaaacagguucuc

SEQ ID NO: 1802721 - RNA, 19 nt, Artificial Sequence
  Description of Artificial Sequence: Synthetic oligonucleotide
gccgacucgagcggcauca

SEQ ID NO: 1802722 - RNA, 19 nt, Artificial Sequence
  Description of Artificial Sequence: Synthetic oligonucleotide
ucgccgccguacuggucga

SEQ ID NO: 1802723 - RNA, 19 nt, Artificial Sequence
  Description of Artificial Sequence: Synthetic oligonucleotide
caccgcgcggcugggcugc

SEQ ID NO: 1802724 - RNA, 19 nt, Artificial Sequence
  Description of Artificial Sequence: Synthetic oligonucleotide
gcucuccgcccagugcucg

SEQ ID NO: 1802725 - RNA, 19 nt, Artificial Sequence
  Description of Artificial Sequence: Synthetic oligonucleotide
guuccuucugcagcauagu

SEQ ID NO: 1802726 - RNA, 19 nt, Artificial Sequence
  Description of Artificial Sequence: Synthetic oligonucleotide
ggggccgcguucuucaggu

SEQ ID NO: 1802727 - RNA, 19 nt, Artificial Sequence
  Description of Artificial Sequence: Synthetic oligonucleotide
cucgucugagaggccccac

SEQ ID NO: 1802728 - RNA, 19 nt, Artificial Sequence
  Description of Artificial Sequence: Synthetic oligonucleotide
ggccuucgggaggucauug

SEQ ID NO: 1802729 - RNA, 19 nt, Artificial Sequence
  Description of Artificial Sequence: Synthetic oligonucleotide
cgcagcgauggccuucggg

SEQ ID NO: 1802730 - RNA, 19 nt, Artificial Sequence
  Description of Artificial Sequence: Synthetic oligonucleotide
ggucuuuaaugugguccuc

SEQ ID NO: 1802731 - RNA, 19 nt, Artificial Sequence
  Description of Artificial Sequence: Synthetic oligonucleotide
gcgaacugcaggaacuugu

SEQ ID NO: 1802732 - RNA, 19 nt, Artificial Sequence
  Description of Artificial Sequence: Synthetic oligonucleotide
gcgcugcugaaagucggcc

SEQ ID NO: 1802733 - RNA, 19 nt, Artificial Sequence
  Description of Artificial Sequence: Synthetic oligonucleotide
cugggcuggaaaugcucgu

SEQ ID NO: 1802734 - RNA, 19 nt, Artificial Sequence
  Description of Artificial Sequence: Synthetic oligonucleotide
ggcgguaggccgacucgag

SEQ ID NO: 1802735 - RNA, 19 nt, Artificial Sequence
  Description of Artificial Sequence: Synthetic oligonucleotide
cccucaucgucauccauua

SEQ ID NO: 1802736 - RNA, 19 nt, Artificial Sequence
  Description of Artificial Sequence: Synthetic oligonucleotide
cccugugguacugauagua

SEQ ID NO: 1802737 - RNA, 19 nt, Artificial Sequence
  Description of Artificial Sequence: Synthetic oligonucleotide
aucuugcauuccagaacuu

SEQ ID NO: 1802738 - RNA, 19 nt, Artificial Sequence
  Description of Artificial Sequence: Synthetic oligonucleotide
ccucaucgucauccauuag

SEQ ID NO: 1802739 - RNA, 19 nt, Artificial Sequence
  Description of Artificial Sequence: Synthetic oligonucleotide
uccacgcgauagccuccua

SEQ ID NO: 1802740 - RNA, 19 nt, Artificial Sequence
  Description of Artificial Sequence: Synthetic oligonucleotide
cgcuugagacacugcgcgc

SEQ ID NO: 1802741 - RNA, 19 nt, Artificial Sequence
  Description of Artificial Sequence: Synthetic oligonucleotide
cucgucccgcgggaagcug

SEQ ID NO: 1802742 - RNA, 19 nt, Artificial Sequence
  Description of Artificial Sequence: Synthetic oligonucleotide
gcgguggcagaaggccucg

SEQ ID NO: 1802743 - RNA, 19 nt, Artificial Sequence
  Description of Artificial Sequence: Synthetic oligonucleotide
ccauaacggacguccucca

SEQ ID NO: 1802744 - RNA, 19 nt, Artificial Sequence
  Description of Artificial Sequence: Synthetic oligonucleotide
agggcucgcgcugcugaaa

SEQ ID NO: 1802745 - RNA, 19 nt, Artificial Sequence
  Description of Artificial Sequence: Synthetic oligonucleotide
ccaggcaagcucuuguaau

SEQ ID NO: 1802746 - RNA, 19 nt, Artificial Sequence
  Description of Artificial Sequence: Synthetic oligonucleotide
gcucacgcucuccgcccag

SEQ ID NO: 1802747 - RNA, 19 nt, Artificial Sequence
  Description of Artificial Sequence: Synthetic oligonucleotide
ccgcaggcucaccuccagg

SEQ ID NO: 1802748 - RNA, 19 nt, Artificial Sequence
  Description of Artificial Sequence: Synthetic oligonucleotide
gcccgcacugcacggacaa

SEQ ID NO: 1802749 - RNA, 19 nt, Artificial Sequence
  Description of Artificial Sequence: Synthetic oligonucleotide
gccgccguacuggucgagc

SEQ ID NO: 1802750 - RNA, 19 nt, Artificial Sequence
  Description of Artificial Sequence: Synthetic oligonucleotide
cguggcgguaggccgacuc

SEQ ID NO: 1802751 - RNA, 19 nt, Artificial Sequence
  Description of Artificial Sequence: Synthetic oligonucleotide
cacugcgcgcggcgcagca

SEQ ID NO: 1802752 - RNA, 19 nt, Artificial Sequence
  Description of Artificial Sequence: Synthetic oligonucleotide
gguucucauaugacuuggu

SEQ ID NO: 1802753 - RNA, 19 nt, Artificial Sequence
  Description of Artificial Sequence: Synthetic oligonucleotide
cgucccgcgggaagcugcg

SEQ ID NO: 1802754 - RNA, 19 nt, Artificial Sequence
  Description of Artificial Sequence: Synthetic oligonucleotide
aggccgacucgagcggcau

SEQ ID NO: 1802755 - RNA, 19 nt, Artificial Sequence
  Description of Artificial Sequence: Synthetic oligonucleotide
ccagugcucgccgccguac

SEQ ID NO: 1802756 - RNA, 19 nt, Artificial Sequence
  Description of Artificial Sequence: Synthetic oligonucleotide
gcaggaagccaggcauuca

SEQ ID NO: 1802757 - RNA, 19 nt, Artificial Sequence
  Description of Artificial Sequence: Synthetic oligonucleotide
ccucgcaggaagccaggca

SEQ ID NO: 1802758 - RNA, 19 nt, Artificial Sequence
  Description of Artificial Sequence: Synthetic oligonucleotide
ggcauucauaaaaggcuuu

SEQ ID NO: 1802759 - RNA, 19 nt, Artificial Sequence
  Description of Artificial Sequence: Synthetic oligonucleotide
cgccguacuggucgagcgc

SEQ ID NO: 1802760 - RNA, 19 nt, Artificial Sequence
  Description of Artificial Sequence: Synthetic oligonucleotide
gcaccgcgcggcugggcug

SEQ ID NO: 1802761 - RNA, 19 nt, Artificial Sequence
  Description of Artificial Sequence: Synthetic oligonucleotide
ggcggaaggcgggcaggcc

SEQ ID NO: 1802762 - RNA, 19 nt, Artificial Sequence
  Description of Artificial Sequence: Synthetic oligonucleotide
cccucgcaggaagccaggc

SEQ ID NO: 1802763 - RNA, 19 nt, Artificial Sequence
  Description of Artificial Sequence: Synthetic oligonucleotide
cgggaagcugcggaagcug

SEQ ID NO: 1802764 - RNA, 19 nt, Artificial Sequence
  Description of Artificial Sequence: Synthetic oligonucleotide
acgccgccgaagaggcgca

SEQ ID NO: 1802765 - RNA, 19 nt, Artificial Sequence
  Description of Artificial Sequence: Synthetic oligonucleotide
ccgcccagugcucgccgcc

SEQ ID NO: 1802766 - RNA, 19 nt, Artificial Sequence
  Description of Artificial Sequence: Synthetic oligonucleotide
cagcaccgcgcggcugggc

SEQ ID NO: 1802767 - RNA, 19 nt, Artificial Sequence
  Description of Artificial Sequence: Synthetic oligonucleotide
cuccacgcgauagccuccu

SEQ ID NO: 1802768 - RNA, 19 nt, Artificial Sequence
  Description of Artificial Sequence: Synthetic oligonucleotide
ccauguccauaacggacgu

SEQ ID NO: 1802769 - RNA, 19 nt, Artificial Sequence
  Description of Artificial Sequence: Synthetic oligonucleotide
cgaauuucuccacgcgaua

SEQ ID NO: 1802770 - RNA, 19 nt, Artificial Sequence
  Description of Artificial Sequence: Synthetic oligonucleotide
gcucgucugagaggcccca

SEQ ID NO: 1802771 - RNA, 19 nt, Artificial Sequence
  Description of Artificial Sequence: Synthetic oligonucleotide
ggucugggcuggaaaugcu

SEQ ID NO: 1802772 - RNA, 19 nt, Artificial Sequence
  Description of Artificial Sequence: Synthetic oligonucleotide
gcgauggccuucgggaggu

SEQ ID NO: 1802773 - RNA, 19 nt, Artificial Sequence
  Description of Artificial Sequence: Synthetic oligonucleotide
accgcgcggcugggcugcg

SEQ ID NO: 1802774 - RNA, 19 nt, Artificial Sequence
  Description of Artificial Sequence: Synthetic oligonucleotide
cccaggcacucgaggaaaa

SEQ ID NO: 1802775 - RNA, 19 nt, Artificial Sequence
  Description of Artificial Sequence: Synthetic oligonucleotide
gcgggcggggccgcgcugc

SEQ ID NO: 1802776 - RNA, 19 nt, Artificial Sequence
  Description of Artificial Sequence: Synthetic oligonucleotide
ggcgcagcacgccgccgaa

SEQ ID NO: 1802777 - RNA, 19 nt, Artificial Sequence
  Description of Artificial Sequence: Synthetic oligonucleotide
cugcacggacaaacagguu

SEQ ID NO: 1802778 - RNA, 19 nt, Artificial Sequence
  Description of Artificial Sequence: Synthetic oligonucleotide
cccgcgggaagcugcggaa

SEQ ID NO: 1802779 - RNA, 19 nt, Artificial Sequence
  Description of Artificial Sequence: Synthetic oligonucleotide
gcacgccgccgaagaggcg

SEQ ID NO: 1802780 - RNA, 19 nt, Artificial Sequence
  Description of Artificial Sequence: Synthetic oligonucleotide
ccgacucgagcggcaucag

SEQ ID NO: 1802781 - RNA, 19 nt, Artificial Sequence
  Description of Artificial Sequence: Synthetic oligonucleotide
ggcucgcgcugcugaaagu

SEQ ID NO: 1802782 - RNA, 19 nt, Artificial Sequence
  Description of Artificial Sequence: Synthetic oligonucleotide
gccgcgcugcaguugcggu

SEQ ID NO: 1802783 - RNA, 19 nt, Artificial Sequence
  Description of Artificial Sequence: Synthetic oligonucleotide
gggccgcguucuucagguc

SEQ ID NO: 1802784 - RNA, 19 nt, Artificial Sequence
  Description of Artificial Sequence: Synthetic oligonucleotide
ccacgcgauagccuccuau

SEQ ID NO: 1802785 - RNA, 19 nt, Artificial Sequence
  Description of Artificial Sequence: Synthetic oligonucleotide
gcggcgcagcacgccgccg

SEQ ID NO: 1802786 - RNA, 19 nt, Artificial Sequence
  Description of Artificial Sequence: Synthetic oligonucleotide
gggccgcgcugcaguugcg

SEQ ID NO: 1802787 - RNA, 19 nt, Artificial Sequence
  Description of Artificial Sequence: Synthetic oligonucleotide
ggcccgcacugcacggaca

SEQ ID NO: 1802788 - RNA, 19 nt, Artificial Sequence
  Description of Artificial Sequence: Synthetic oligonucleotide
gcgcguggcgguaggccga

SEQ ID NO: 1802789 - RNA, 19 nt, Artificial Sequence
  Description of Artificial Sequence: Synthetic oligonucleotide
ccgccgaagaggcgcagcu

SEQ ID NO: 1802790 - RNA, 19 nt, Artificial Sequence
  Description of Artificial Sequence: Synthetic oligonucleotide
cgcucuccgcccagugcuc

SEQ ID NO: 1802791 - RNA, 19 nt, Artificial Sequence
  Description of Artificial Sequence: Synthetic oligonucleotide
cgagcgcguggcgguaggc

SEQ ID NO: 1802792 - RNA, 19 nt, Artificial Sequence
  Description of Artificial Sequence: Synthetic oligonucleotide
gggcugcgacuggcggaag

SEQ ID NO: 1802793 - RNA, 19 nt, Artificial Sequence
  Description of Artificial Sequence: Synthetic oligonucleotide
cgagcggcaucagcucguc

SEQ ID NO: 1802794 - RNA, 19 nt, Artificial Sequence
  Description of Artificial Sequence: Synthetic oligonucleotide
ggucgagcgcguggcggua

SEQ ID NO: 1802795 - RNA, 19 nt, Artificial Sequence
  Description of Artificial Sequence: Synthetic oligonucleotide
ggcgcagcucggcguggcu

SEQ ID NO: 1802796 - RNA, 19 nt, Artificial Sequence
  Description of Artificial Sequence: Synthetic oligonucleotide
gcucgucccgcgggaagcu

SEQ ID NO: 1802797 - RNA, 19 nt, Artificial Sequence
  Description of Artificial Sequence: Synthetic oligonucleotide
ccgcagcgauggccuucgg

SEQ ID NO: 1802798 - RNA, 19 nt, Artificial Sequence
  Description of Artificial Sequence: Synthetic oligonucleotide
cgggaggucauuggccuua

SEQ ID NO: 1802799 - RNA, 19 nt, Artificial Sequence
  Description of Artificial Sequence: Synthetic oligonucleotide
cccagugcucgccgccgua

SEQ ID NO: 1802800 - RNA, 19 nt, Artificial Sequence
  Description of Artificial Sequence: Synthetic oligonucleotide
ccguacuggucgagcgcgu

SEQ ID NO: 1802801 - RNA, 19 nt, Artificial Sequence
  Description of Artificial Sequence: Synthetic oligonucleotide
gcgcggcugggcugcgacu

SEQ ID NO: 1802802 - RNA, 19 nt, Artificial Sequence
  Description of Artificial Sequence: Synthetic oligonucleotide
cccgcacugcacggacaaa

SEQ ID NO: 1802803 - RNA, 19 nt, Artificial Sequence
  Description of Artificial Sequence: Synthetic oligonucleotide
cgccgccgaagaggcgcag

SEQ ID NO: 1802804 - RNA, 19 nt, Artificial Sequence
  Description of Artificial Sequence: Synthetic oligonucleotide
gcguggcgguaggccgacu

SEQ ID NO: 1802805 - RNA, 19 nt, Artificial Sequence
  Description of Artificial Sequence: Synthetic oligonucleotide
ccgcgcggcugggcugcga

SEQ ID NO: 1802806 - RNA, 19 nt, Artificial Sequence
  Description of Artificial Sequence: Synthetic oligonucleotide
aaauaagugugcucgaucc

SEQ ID NO: 1802807 - RNA, 19 nt, Artificial Sequence
  Description of Artificial Sequence: Synthetic oligonucleotide
aauccaaucauuuccggcc

SEQ ID NO: 1802808 - RNA, 19 nt, Artificial Sequence
  Description of Artificial Sequence: Synthetic oligonucleotide
uacacuugcaauuucaugg

SEQ ID NO: 1802809 - RNA, 19 nt, Artificial Sequence
  Description of Artificial Sequence: Synthetic oligonucleotide
aaaauuugauuacuggagg

SEQ ID NO: 1802810 - RNA, 19 nt, Artificial Sequence
  Description of Artificial Sequence: Synthetic oligonucleotide
aauacaaaguauaagauca

SEQ ID NO: 1802811 - RNA, 19 nt, Artificial Sequence
  Description of Artificial Sequence: Synthetic oligonucleotide
aaauuugauuacuggaggc

SEQ ID NO: 1802812 - RNA, 19 nt, Artificial Sequence
  Description of Artificial Sequence: Synthetic oligonucleotide
aaucauauuucugucaccc

SEQ ID NO: 1802813 - RNA, 19 nt, Artificial Sequence
  Description of Artificial Sequence: Synthetic oligonucleotide
aauagucuaaucuucauau

SEQ ID NO: 1802814 - RNA, 19 nt, Artificial Sequence
  Description of Artificial Sequence: Synthetic oligonucleotide
aauuucauggccuuccuug

SEQ ID NO: 1802815 - RNA, 19 nt, Artificial Sequence
  Description of Artificial Sequence: Synthetic oligonucleotide
cauuagaucauaaaaccgg

SEQ ID NO: 1802816 - RNA, 19 nt, Artificial Sequence
  Description of Artificial Sequence: Synthetic oligonucleotide
uuuauuuaccagaaaagac

SEQ ID NO: 1802817 - RNA, 19 nt, Artificial Sequence
  Description of Artificial Sequence: Synthetic oligonucleotide
agauaaaauugcuuguugg

SEQ ID NO: 1802818 - RNA, 19 nt, Artificial Sequence
  Description of Artificial Sequence: Synthetic oligonucleotide
ugaaugacccuccaaaacc

SEQ ID NO: 1802819 - RNA, 19 nt, Artificial Sequence
  Description of Artificial Sequence: Synthetic oligonucleotide
uguaucucaaaacuugagc

SEQ ID NO: 1802820 - RNA, 19 nt, Artificial Sequence
  Description of Artificial Sequence: Synthetic oligonucleotide
gauugaagagauaaaauug

SEQ ID NO: 1802821 - RNA, 19 nt, Artificial Sequence
  Description of Artificial Sequence: Synthetic oligonucleotide
agugauaucccaaauaauc

SEQ ID NO: 1802822 - RNA, 19 nt, Artificial Sequence
  Description of Artificial Sequence: Synthetic oligonucleotide
uaugcaauuagauuuccug

SEQ ID NO: 1802823 - RNA, 19 nt, Artificial Sequence
  Description of Artificial Sequence: Synthetic oligonucleotide
ugaaaguuuccucagggug

SEQ ID NO: 1802824 - RNA, 19 nt, Artificial Sequence
  Description of Artificial Sequence: Synthetic oligonucleotide
auaaaauugcuuguugggc

SEQ ID NO: 1802825 - RNA, 19 nt, Artificial Sequence
  Description of Artificial Sequence: Synthetic oligonucleotide
aggaaaaucauauuucugu

SEQ ID NO: 1802826 - RNA, 19 nt, Artificial Sequence
  Description of Artificial Sequence: Synthetic oligonucleotide
uaugucacgaaaccaaggc

SEQ ID NO: 1802827 - RNA, 19 nt, Artificial Sequence
  Description of Artificial Sequence: Synthetic oligonucleotide
uauuguaugucacgaaacc

SEQ ID NO: 1802828 - RNA, 19 nt, Artificial Sequence
  Description of Artificial Sequence: Synthetic oligonucleotide
uagucuaaucuucauauca

SEQ ID NO: 1802829 - RNA, 19 nt, Artificial Sequence
  Description of Artificial Sequence: Synthetic oligonucleotide
agugugcugacauuaacgg

SEQ ID NO: 1802830 - RNA, 19 nt, Artificial Sequence
  Description of Artificial Sequence: Synthetic oligonucleotide
ugaauccccacucucaaag

SEQ ID NO: 1802831 - RNA, 19 nt, Artificial Sequence
  Description of Artificial Sequence: Synthetic oligonucleotide
accauaugcaauuagauuu

SEQ ID NO: 1802832 - RNA, 19 nt, Artificial Sequence
  Description of Artificial Sequence: Synthetic oligonucleotide
accuaaauaagugugcucg

SEQ ID NO: 1802833 - RNA, 19 nt, Artificial Sequence
  Description of Artificial Sequence: Synthetic oligonucleotide
ucuaaucuucauaucagca

SEQ ID NO: 1802834 - RNA, 19 nt, Artificial Sequence
  Description of Artificial Sequence: Synthetic oligonucleotide
agaucauaaaaccggauca

SEQ ID NO: 1802835 - RNA, 19 nt, Artificial Sequence
  Description of Artificial Sequence: Synthetic oligonucleotide
cuugaggauaacuggaccg

SEQ ID NO: 1802836 - RNA, 19 nt, Artificial Sequence
  Description of Artificial Sequence: Synthetic oligonucleotide
ugauugaagagauaaaauu

SEQ ID NO: 1802837 - RNA, 19 nt, Artificial Sequence
  Description of Artificial Sequence: Synthetic oligonucleotide
uugcagaccaccuaaauaa

SEQ ID NO: 1802838 - RNA, 19 nt, Artificial Sequence
  Description of Artificial Sequence: Synthetic oligonucleotide
cuugaaaguuuccucaggg

SEQ ID NO: 1802839 - RNA, 19 nt, Artificial Sequence
  Description of Artificial Sequence: Synthetic oligonucleotide
uucuaugccaggaaagacc

SEQ ID NO: 1802840 - RNA, 19 nt, Artificial Sequence
  Description of Artificial Sequence: Synthetic oligonucleotide
cauaaaaccggaucauucc

SEQ ID NO: 1802841 - RNA, 19 nt, Artificial Sequence
  Description of Artificial Sequence: Synthetic oligonucleotide
ucuauuguaugucacgaaa

SEQ ID NO: 1802842 - RNA, 19 nt, Artificial Sequence
  Description of Artificial Sequence: Synthetic oligonucleotide
ugucacgaaaccaaggcac

SEQ ID NO: 1802843 - RNA, 19 nt, Artificial Sequence
  Description of Artificial Sequence: Synthetic oligonucleotide
aguaaauagucuaaucuuc

SEQ ID NO: 1802844 - RNA, 19 nt, Artificial Sequence
  Description of Artificial Sequence: Synthetic oligonucleotide
ugaauuugaaacugacuug

SEQ ID NO: 1802845 - RNA, 19 nt, Artificial Sequence
  Description of Artificial Sequence: Synthetic oligonucleotide
agaucugaaguaaauaguc

SEQ ID NO: 1802846 - RNA, 19 nt, Artificial Sequence
  Description of Artificial Sequence: Synthetic oligonucleotide
uagaucauaaaaccggauc

SEQ ID NO: 1802847 - RNA, 19 nt, Artificial Sequence
  Description of Artificial Sequence: Synthetic oligonucleotide
acuggaccgagugauaucc

SEQ ID NO: 1802848 - RNA, 19 nt, Artificial Sequence
  Description of Artificial Sequence: Synthetic oligonucleotide
aaaugagccgucugcuuuc

SEQ ID NO: 1802849 - RNA, 19 nt, Artificial Sequence
  Description of Artificial Sequence: Synthetic oligonucleotide
aacugagacauuucuagau

SEQ ID NO: 1802850 - RNA, 19 nt, Artificial Sequence
  Description of Artificial Sequence: Synthetic oligonucleotide
aaaauugcuuguugggcca

SEQ ID NO: 1802851 - RNA, 19 nt, Artificial Sequence
  Description of Artificial Sequence: Synthetic oligonucleotide
ucugauugaagagauaaaa

SEQ ID NO: 1802852 - RNA, 19 nt, Artificial Sequence
  Description of Artificial Sequence: Synthetic oligonucleotide
aaaccggaucauuccauuc

SEQ ID NO: 1802853 - RNA, 19 nt, Artificial Sequence
  Description of Artificial Sequence: Synthetic oligonucleotide
gaaagaccagauccgacag

SEQ ID NO: 1802854 - RNA, 19 nt, Artificial Sequence
  Description of Artificial Sequence: Synthetic oligonucleotide
uugcgaauaaguuuucacu

SEQ ID NO: 1802855 - RNA, 19 nt, Artificial Sequence
  Description of Artificial Sequence: Synthetic oligonucleotide
aaaaugagccgucugcuuu

SEQ ID NO: 1802856 - RNA, 19 nt, Artificial Sequence
  Description of Artificial Sequence: Synthetic oligonucleotide
accaaauagccuucuauug

SEQ ID NO: 1802857 - RNA, 19 nt, Artificial Sequence
  Description of Artificial Sequence: Synthetic oligonucleotide
ccaauaaccacauaauuac

SEQ ID NO: 1802858 - RNA, 19 nt, Artificial Sequence
  Description of Artificial Sequence: Synthetic oligonucleotide
agauccgacagcuacagaa

SEQ ID NO: 1802859 - RNA, 19 nt, Artificial Sequence
  Description of Artificial Sequence: Synthetic oligonucleotide
uguuuuguacugaauuccu

SEQ ID NO: 1802860 - RNA, 19 nt, Artificial Sequence
  Description of Artificial Sequence: Synthetic oligonucleotide
augccaucaacucggacuc

SEQ ID NO: 1802861 - RNA, 19 nt, Artificial Sequence
  Description of Artificial Sequence: Synthetic oligonucleotide
aaaaccuuauauucauuuu

SEQ ID NO: 1802862 - RNA, 19 nt, Artificial Sequence
  Description of Artificial Sequence: Synthetic oligonucleotide
aauguacacaugccaauaa

SEQ ID NO: 1802863 - RNA, 19 nt, Artificial Sequence
  Description of Artificial Sequence: Synthetic oligonucleotide
cuauuguaugucacgaaac

SEQ ID NO: 1802864 - RNA, 19 nt, Artificial Sequence
  Description of Artificial Sequence: Synthetic oligonucleotide
aaagacaacugagacauuu

SEQ ID NO: 1802865 - RNA, 19 nt, Artificial Sequence
  Description of Artificial Sequence: Synthetic oligonucleotide
uaaauaagugugcucgauc

SEQ ID NO: 1802866 - RNA, 19 nt, Artificial Sequence
  Description of Artificial Sequence: Synthetic oligonucleotide
auccgacagcuacagaacc

SEQ ID NO: 1802867 - RNA, 19 nt, Artificial Sequence
  Description of Artificial Sequence: Synthetic oligonucleotide
ugcgaauaaguuuucacua

SEQ ID NO: 1802868 - RNA, 19 nt, Artificial Sequence
  Description of Artificial Sequence: Synthetic oligonucleotide
aucacuuacacuugcaauu

SEQ ID NO: 1802869 - RNA, 19 nt, Artificial Sequence
  Description of Artificial Sequence: Synthetic oligonucleotide
aggauaacuggaccgagug

SEQ ID NO: 1802870 - RNA, 19 nt, Artificial Sequence
  Description of Artificial Sequence: Synthetic oligonucleotide
auuacugccaccauaugca

SEQ ID NO: 1802871 - RNA, 19 nt, Artificial Sequence
  Description of Artificial Sequence: Synthetic oligonucleotide
aaccggaucauuccauucu

SEQ ID NO: 1802872 - RNA, 19 nt, Artificial Sequence
  Description of Artificial Sequence: Synthetic oligonucleotide
auaaaaccggaucauucca

SEQ ID NO: 1802873 - RNA, 19 nt, Artificial Sequence
  Description of Artificial Sequence: Synthetic oligonucleotide
aaggcacagaaggcgaccc

SEQ ID NO: 1802874 - RNA, 19 nt, Artificial Sequence
  Description of Artificial Sequence: Synthetic oligonucleotide
aagaucugaaguaaauagu

SEQ ID NO: 1802875 - RNA, 19 nt, Artificial Sequence
  Description of Artificial Sequence: Synthetic oligonucleotide
auagucuaaucuucauauc

SEQ ID NO: 1802876 - RNA, 19 nt, Artificial Sequence
  Description of Artificial Sequence: Synthetic oligonucleotide
aauaagugugcucgaucca

SEQ ID NO: 1802877 - RNA, 19 nt, Artificial Sequence
  Description of Artificial Sequence: Synthetic oligonucleotide
aaauucuaccacauguaca

SEQ ID NO: 1802878 - RNA, 19 nt, Artificial Sequence
  Description of Artificial Sequence: Synthetic oligonucleotide
cagaccaccuaaauaagug

SEQ ID NO: 1802879 - RNA, 19 nt, Artificial Sequence
  Description of Artificial Sequence: Synthetic oligonucleotide
auuugauuacuggaggcag

SEQ ID NO: 1802880 - RNA, 19 nt, Artificial Sequence
  Description of Artificial Sequence: Synthetic oligonucleotide
ucacuaauugcagaccacc

SEQ ID NO: 1802881 - RNA, 19 nt, Artificial Sequence
  Description of Artificial Sequence: Synthetic oligonucleotide
agaaccagugaggaugggc

SEQ ID NO: 1802882 - RNA, 19 nt, Artificial Sequence
  Description of Artificial Sequence: Synthetic oligonucleotide
ucgaguuuggucucugggc

SEQ ID NO: 1802883 - RNA, 19 nt, Artificial Sequence
  Description of Artificial Sequence: Synthetic oligonucleotide
aaucgaguuuggucucugg

SEQ ID NO: 1802884 - RNA, 19 nt, Artificial Sequence
  Description of Artificial Sequence: Synthetic oligonucleotide
ugcucgauccaugugaaca

SEQ ID NO: 1802885 - RNA, 19 nt, Artificial Sequence
  Description of Artificial Sequence: Synthetic oligonucleotide
augugaacaggucuugucu

SEQ ID NO: 1802886 - RNA, 19 nt, Artificial Sequence
  Description of Artificial Sequence: Synthetic oligonucleotide
auaauuacugccaccauau

SEQ ID NO: 1802887 - RNA, 19 nt, Artificial Sequence
  Description of Artificial Sequence: Synthetic oligonucleotide
guugcgaauaaguuuucac

SEQ ID NO: 1802888 - RNA, 19 nt, Artificial Sequence
  Description of Artificial Sequence: Synthetic oligonucleotide
uguucuaugccaggaaaga

SEQ ID NO: 1802889 - RNA, 19 nt, Artificial Sequence
  Description of Artificial Sequence: Synthetic oligonucleotide
ugcuuguugggccauuaga

SEQ ID NO: 1802890 - RNA, 19 nt, Artificial Sequence
  Description of Artificial Sequence: Synthetic oligonucleotide
accaccuaaauaagugugc

SEQ ID NO: 1802891 - RNA, 19 nt, Artificial Sequence
  Description of Artificial Sequence: Synthetic oligonucleotide
agugguugcgaauaaguuu

SEQ ID NO: 1802892 - RNA, 19 nt, Artificial Sequence
  Description of Artificial Sequence: Synthetic oligonucleotide
uacacaugccaauaaccac

SEQ ID NO: 1802893 - RNA, 19 nt, Artificial Sequence
  Description of Artificial Sequence: Synthetic oligonucleotide
ccauuagaucauaaaaccg

SEQ ID NO: 1802894 - RNA, 19 nt, Artificial Sequence
  Description of Artificial Sequence: Synthetic oligonucleotide
aagacaacugagacauuuc

SEQ ID NO: 1802895 - RNA, 19 nt, Artificial Sequence
  Description of Artificial Sequence: Synthetic oligonucleotide
ucugaaugacccuccaaaa

SEQ ID NO: 1802896 - RNA, 19 nt, Artificial Sequence
  Description of Artificial Sequence: Synthetic oligonucleotide
aacuggaccgagugauauc

SEQ ID NO: 1802897 - RNA, 19 nt, Artificial Sequence
  Description of Artificial Sequence: Synthetic oligonucleotide
uaaauagucuaaucuucau

SEQ ID NO: 1802898 - RNA, 19 nt, Artificial Sequence
  Description of Artificial Sequence: Synthetic oligonucleotide
gaauccccacucucaaagg

SEQ ID NO: 1802899 - RNA, 19 nt, Artificial Sequence
  Description of Artificial Sequence: Synthetic oligonucleotide
gauuacuggaggcagugaa

SEQ ID NO: 1802900 - RNA, 19 nt, Artificial Sequence
  Description of Artificial Sequence: Synthetic oligonucleotide
uuaacggugucuguucuga

SEQ ID NO: 1802901 - RNA, 19 nt, Artificial Sequence
  Description of Artificial Sequence: Synthetic oligonucleotide
agucuaaucuucauaucag

SEQ ID NO: 1802902 - RNA, 19 nt, Artificial Sequence
  Description of Artificial Sequence: Synthetic oligonucleotide
gaaaucugaaugacccucc

SEQ ID NO: 1802903 - RNA, 19 nt, Artificial Sequence
  Description of Artificial Sequence: Synthetic oligonucleotide
uccguaguguuuuguacug

SEQ ID NO: 1802904 - RNA, 19 nt, Artificial Sequence
  Description of Artificial Sequence: Synthetic oligonucleotide
ugaaauguccguaguguuu

SEQ ID NO: 1802905 - RNA, 19 nt, Artificial Sequence
  Description of Artificial Sequence: Synthetic oligonucleotide
caguauacuggauacaaaa

SEQ ID NO: 1802906 - RNA, 19 nt, Artificial Sequence
  Description of Artificial Sequence: Synthetic oligonucleotide
uacuggaggcagugaaucg

SEQ ID NO: 1802907 - RNA, 19 nt, Artificial Sequence
  Description of Artificial Sequence: Synthetic oligonucleotide
aaaaccggaucauuccauu

SEQ ID NO: 1802908 - RNA, 19 nt, Artificial Sequence
  Description of Artificial Sequence: Synthetic oligonucleotide
auugcagaccaccuaaaua

SEQ ID NO: 1802909 - RNA, 19 nt, Artificial Sequence
  Description of Artificial Sequence: Synthetic oligonucleotide
uuagaucauaaaaccggau

SEQ ID NO: 1802910 - RNA, 19 nt, Artificial Sequence
  Description of Artificial Sequence: Synthetic oligonucleotide
uaaaaccggaucauuccau

SEQ ID NO: 1802911 - RNA, 19 nt, Artificial Sequence
  Description of Artificial Sequence: Synthetic oligonucleotide
agaccaccuaaauaagugu

SEQ ID NO: 1802912 - RNA, 19 nt, Artificial Sequence
  Description of Artificial Sequence: Synthetic oligonucleotide
aguguucuaugccaggaaa

SEQ ID NO: 1802913 - RNA, 19 nt, Artificial Sequence
  Description of Artificial Sequence: Synthetic oligonucleotide
uugauuacuggaggcagug

SEQ ID NO: 1802914 - RNA, 19 nt, Artificial Sequence
  Description of Artificial Sequence: Synthetic oligonucleotide
gaccaccuaaauaagugug

SEQ ID NO: 1802915 - RNA, 19 nt, Artificial Sequence
  Description of Artificial Sequence: Synthetic oligonucleotide
ugccaauaaccacauaauu

SEQ ID NO: 1802916 - RNA, 19 nt, Artificial Sequence
  Description of Artificial Sequence: Synthetic oligonucleotide
uguccguaguguuuuguac

SEQ ID NO: 1802917 - RNA, 19 nt, Artificial Sequence
  Description of Artificial Sequence: Synthetic oligonucleotide
auuagaucauaaaaccgga

SEQ ID NO: 1802918 - RNA, 19 nt, Artificial Sequence
  Description of Artificial Sequence: Synthetic oligonucleotide
guaaauagucuaaucuuca

SEQ ID NO: 1802919 - RNA, 19 nt, Artificial Sequence
  Description of Artificial Sequence: Synthetic oligonucleotide
aaucuucauaucagcagcu

SEQ ID NO: 1802920 - RNA, 19 nt, Artificial Sequence
  Description of Artificial Sequence: Synthetic oligonucleotide
uaagugugcucgauccaug

SEQ ID NO: 1802921 - RNA, 19 nt, Artificial Sequence
  Description of Artificial Sequence: Synthetic oligonucleotide
ucuugucucuugaggauaa

SEQ ID NO: 1802922 - RNA, 19 nt, Artificial Sequence
  Description of Artificial Sequence: Synthetic oligonucleotide
uucacuaauugcagaccac

SEQ ID NO: 1802923 - RNA, 19 nt, Artificial Sequence
  Description of Artificial Sequence: Synthetic oligonucleotide
cacauaauuacugccacca

SEQ ID NO: 1802924 - RNA, 19 nt, Artificial Sequence
  Description of Artificial Sequence: Synthetic oligonucleotide
cuuguugggccauuagauc

SEQ ID NO: 1802925 - RNA, 19 nt, Artificial Sequence
  Description of Artificial Sequence: Synthetic oligonucleotide
agaaaaugagccgucugcu

SEQ ID NO: 1802926 - RNA, 19 nt, Artificial Sequence
  Description of Artificial Sequence: Synthetic oligonucleotide
uuacuggaggcagugaauc

SEQ ID NO: 1802927 - RNA, 19 nt, Artificial Sequence
  Description of Artificial Sequence: Synthetic oligonucleotide
ggaaaaucauauuucuguc

SEQ ID NO: 1802928 - RNA, 19 nt, Artificial Sequence
  Description of Artificial Sequence: Synthetic oligonucleotide
guaugucacgaaaccaagg

SEQ ID NO: 1802929 - RNA, 19 nt, Artificial Sequence
  Description of Artificial Sequence: Synthetic oligonucleotide
acuccguggugaaaugucc

SEQ ID NO: 1802930 - RNA, 19 nt, Artificial Sequence
  Description of Artificial Sequence: Synthetic oligonucleotide
guacacaugccaauaacca

SEQ ID NO: 1802931 - RNA, 19 nt, Artificial Sequence
  Description of Artificial Sequence: Synthetic oligonucleotide
ggcuaugccaucaacucgg

SEQ ID NO: 1802932 - RNA, 19 nt, Artificial Sequence
  Description of Artificial Sequence: Synthetic oligonucleotide
uaauuacugccaccauaug

SEQ ID NO: 1802933 - RNA, 19 nt, Artificial Sequence
  Description of Artificial Sequence: Synthetic oligonucleotide
uccgacagcuacagaacca

SEQ ID NO: 1802934 - RNA, 19 nt, Artificial Sequence
  Description of Artificial Sequence: Synthetic oligonucleotide
uugccauuuugccaggaua

SEQ ID NO: 1802935 - RNA, 19 nt, Artificial Sequence
  Description of Artificial Sequence: Synthetic oligonucleotide
uugaggauaacuggaccga

SEQ ID NO: 1802936 - RNA, 19 nt, Artificial Sequence
  Description of Artificial Sequence: Synthetic oligonucleotide
acgaaaccaaggcacagaa

SEQ ID NO: 1802937 - RNA, 19 nt, Artificial Sequence
  Description of Artificial Sequence: Synthetic oligonucleotide
gauaucccaaauaauccaa

SEQ ID NO: 1802938 - RNA, 19 nt, Artificial Sequence
  Description of Artificial Sequence: Synthetic oligonucleotide
auuaacggugucuguucug

SEQ ID NO: 1802939 - RNA, 19 nt, Artificial Sequence
  Description of Artificial Sequence: Synthetic oligonucleotide
acuaauugcagaccaccua

SEQ ID NO: 1802940 - RNA, 19 nt, Artificial Sequence
  Description of Artificial Sequence: Synthetic oligonucleotide
agcaccaacuuugaaggug

SEQ ID NO: 1802941 - RNA, 19 nt, Artificial Sequence
  Description of Artificial Sequence: Synthetic oligonucleotide
uuucaagcaccagugugcu

SEQ ID NO: 1802942 - RNA, 19 nt, Artificial Sequence
  Description of Artificial Sequence: Synthetic oligonucleotide
cuccguggugaaauguccg

SEQ ID NO: 1802943 - RNA, 19 nt, Artificial Sequence
  Description of Artificial Sequence: Synthetic oligonucleotide
gauuucuccaaaauauaua

SEQ ID NO: 1802944 - RNA, 19 nt, Artificial Sequence
  Description of Artificial Sequence: Synthetic oligonucleotide
aaauguccguaguguuuug

SEQ ID NO: 1802945 - RNA, 19 nt, Artificial Sequence
  Description of Artificial Sequence: Synthetic oligonucleotide
aacucggacuccgugguga

SEQ ID NO: 1802946 - RNA, 19 nt, Artificial Sequence
  Description of Artificial Sequence: Synthetic oligonucleotide
cauaugcaauuagauuucc

SEQ ID NO: 1802947 - RNA, 19 nt, Artificial Sequence
  Description of Artificial Sequence: Synthetic oligonucleotide
uucuauuguaugucacgaa

SEQ ID NO: 1802948 - RNA, 19 nt, Artificial Sequence
  Description of Artificial Sequence: Synthetic oligonucleotide
gauaacuggaccgagugau

SEQ ID NO: 1802949 - RNA, 19 nt, Artificial Sequence
  Description of Artificial Sequence: Synthetic oligonucleotide
aaggcgacccgagcacugc

SEQ ID NO: 1802950 - RNA, 19 nt, Artificial Sequence
  Description of Artificial Sequence: Synthetic oligonucleotide
uggaccgagugauauccca

SEQ ID NO: 1802951 - RNA, 19 nt, Artificial Sequence
  Description of Artificial Sequence: Synthetic oligonucleotide
ugaggauaacuggaccgag

SEQ ID NO: 1802952 - RNA, 19 nt, Artificial Sequence
  Description of Artificial Sequence: Synthetic oligonucleotide
agagauaaaauugcuuguu

SEQ ID NO: 1802953 - RNA, 19 nt, Artificial Sequence
  Description of Artificial Sequence: Synthetic oligonucleotide
ugccaccauaugcaauuag

SEQ ID NO: 1802954 - RNA, 19 nt, Artificial Sequence
  Description of Artificial Sequence: Synthetic oligonucleotide
ggaaagaccagauccgaca

SEQ ID NO: 1802955 - RNA, 19 nt, Artificial Sequence
  Description of Artificial Sequence: Synthetic oligonucleotide
aacggugucuguucugauu

SEQ ID NO: 1802956 - RNA, 19 nt, Artificial Sequence
  Description of Artificial Sequence: Synthetic oligonucleotide
aauguccguaguguuuugu

SEQ ID NO: 1802957 - RNA, 19 nt, Artificial Sequence
  Description of Artificial Sequence: Synthetic oligonucleotide
ggccauuagaucauaaaac

SEQ ID NO: 1802958 - RNA, 19 nt, Artificial Sequence
  Description of Artificial Sequence: Synthetic oligonucleotide
cauaauuacugccaccaua

SEQ ID NO: 1802959 - RNA, 19 nt, Artificial Sequence
  Description of Artificial Sequence: Synthetic oligonucleotide
ucauuuccggccacagcac

SEQ ID NO: 1802960 - RNA, 19 nt, Artificial Sequence
  Description of Artificial Sequence: Synthetic oligonucleotide
acuugagcaguuguaagaa

SEQ ID NO: 1802961 - RNA, 19 nt, Artificial Sequence
  Description of Artificial Sequence: Synthetic oligonucleotide
caggauagccagugguugc

SEQ ID NO: 1802962 - RNA, 19 nt, Artificial Sequence
  Description of Artificial Sequence: Synthetic oligonucleotide
cugacuugccauuuugcca

SEQ ID NO: 1802963 - RNA, 19 nt, Artificial Sequence
  Description of Artificial Sequence: Synthetic oligonucleotide
ucacccaaaacaagagcuu

SEQ ID NO: 1802964 - RNA, 19 nt, Artificial Sequence
  Description of Artificial Sequence: Synthetic oligonucleotide
ugacccuccaaaaccuuau

SEQ ID NO: 1802965 - RNA, 19 nt, Artificial Sequence
  Description of Artificial Sequence: Synthetic oligonucleotide
ccugaaauguacacaugcc

SEQ ID NO: 1802966 - RNA, 19 nt, Artificial Sequence
  Description of Artificial Sequence: Synthetic oligonucleotide
aggauagccagugguugcg

SEQ ID NO: 1802967 - RNA, 19 nt, Artificial Sequence
  Description of Artificial Sequence: Synthetic oligonucleotide
auguccuaaaugaugaauu

SEQ ID NO: 1802968 - RNA, 19 nt, Artificial Sequence
  Description of Artificial Sequence: Synthetic oligonucleotide
aucauauuucugucaccca

SEQ ID NO: 1802969 - RNA, 19 nt, Artificial Sequence
  Description of Artificial Sequence: Synthetic oligonucleotide
auccaaucauuuccggcca

SEQ ID NO: 1802970 - RNA, 19 nt, Artificial Sequence
  Description of Artificial Sequence: Synthetic oligonucleotide
caaauagccuucuauugua

SEQ ID NO: 1802971 - RNA, 19 nt, Artificial Sequence
  Description of Artificial Sequence: Synthetic oligonucleotide
cagugggaguguucuaugc

SEQ ID NO: 1802972 - RNA, 19 nt, Artificial Sequence
  Description of Artificial Sequence: Synthetic oligonucleotide
acucauuccaggagaauga

SEQ ID NO: 1802973 - RNA, 19 nt, Artificial Sequence
  Description of Artificial Sequence: Synthetic oligonucleotide
auaagugugcucgauccau

SEQ ID NO: 1802974 - RNA, 19 nt, Artificial Sequence
  Description of Artificial Sequence: Synthetic oligonucleotide
gauccgacagcuacagaac

SEQ ID NO: 1802975 - RNA, 19 nt, Artificial Sequence
  Description of Artificial Sequence: Synthetic oligonucleotide
ugggcugagaauguccuaa

SEQ ID NO: 1802976 - RNA, 19 nt, Artificial Sequence
  Description of Artificial Sequence: Synthetic oligonucleotide
uaacuggaccgagugauau

SEQ ID NO: 1802977 - RNA, 19 nt, Artificial Sequence
  Description of Artificial Sequence: Synthetic oligonucleotide
gugggaguguucuaugcca

SEQ ID NO: 1802978 - RNA, 19 nt, Artificial Sequence
  Description of Artificial Sequence: Synthetic oligonucleotide
agccuucuauuguauguca

SEQ ID NO: 1802979 - RNA, 19 nt, Artificial Sequence
  Description of Artificial Sequence: Synthetic oligonucleotide
uuccugaauccccacucuc

SEQ ID NO: 1802980 - RNA, 19 nt, Artificial Sequence
  Description of Artificial Sequence: Synthetic oligonucleotide
ucacuuacacuugcaauuu

SEQ ID NO: 1802981 - RNA, 19 nt, Artificial Sequence
  Description of Artificial Sequence: Synthetic oligonucleotide
cacccaaaacaagagcuug

SEQ ID NO: 1802982 - RNA, 19 nt, Artificial Sequence
  Description of Artificial Sequence: Synthetic oligonucleotide
uccguggugaaauguccgu

SEQ ID NO: 1802983 - RNA, 19 nt, Artificial Sequence
  Description of Artificial Sequence: Synthetic oligonucleotide
acuggaggcagugaaucga

SEQ ID NO: 1802984 - RNA, 19 nt, Artificial Sequence
  Description of Artificial Sequence: Synthetic oligonucleotide
ugacauuaacggugucugu

SEQ ID NO: 1802985 - RNA, 19 nt, Artificial Sequence
  Description of Artificial Sequence: Synthetic oligonucleotide
guucuaugccaggaaagac

SEQ ID NO: 1802986 - RNA, 19 nt, Artificial Sequence
  Description of Artificial Sequence: Synthetic oligonucleotide
caaucauuuccggccacag

SEQ ID NO: 1802987 - RNA, 19 nt, Artificial Sequence
  Description of Artificial Sequence: Synthetic oligonucleotide
gaaccagugaggaugggcu

SEQ ID NO: 1802988 - RNA, 19 nt, Artificial Sequence
  Description of Artificial Sequence: Synthetic oligonucleotide
gcucgauccaugugaacag

SEQ ID NO: 1802989 - RNA, 19 nt, Artificial Sequence
  Description of Artificial Sequence: Synthetic oligonucleotide
acauaauuacugccaccau

SEQ ID NO: 1802990 - RNA, 19 nt, Artificial Sequence
  Description of Artificial Sequence: Synthetic oligonucleotide
ucggacuccguggugaaau

SEQ ID NO: 1802991 - RNA, 19 nt, Artificial Sequence
  Description of Artificial Sequence: Synthetic oligonucleotide
auagccagugguugcgaau

SEQ ID NO: 1802992 - RNA, 19 nt, Artificial Sequence
  Description of Artificial Sequence: Synthetic oligonucleotide
ugagccgucugcuuuccuu

SEQ ID NO: 1802993 - RNA, 19 nt, Artificial Sequence
  Description of Artificial Sequence: Synthetic oligonucleotide
caccuaaauaagugugcuc

SEQ ID NO: 1802994 - RNA, 19 nt, Artificial Sequence
  Description of Artificial Sequence: Synthetic oligonucleotide
gacuugccauuuugccagg

SEQ ID NO: 1802995 - RNA, 19 nt, Artificial Sequence
  Description of Artificial Sequence: Synthetic oligonucleotide
ccauaugcaauuagauuuc

SEQ ID NO: 1802996 - RNA, 19 nt, Artificial Sequence
  Description of Artificial Sequence: Synthetic oligonucleotide
cagaaggcgacccgagcac

SEQ ID NO: 1802997 - RNA, 19 nt, Artificial Sequence
  Description of Artificial Sequence: Synthetic oligonucleotide
gaaugacccuccaaaaccu

SEQ ID NO: 1802998 - RNA, 19 nt, Artificial Sequence
  Description of Artificial Sequence: Synthetic oligonucleotide
auaugcaauuagauuuccu

SEQ ID NO: 1802999 - RNA, 19 nt, Artificial Sequence
  Description of Artificial Sequence: Synthetic oligonucleotide
uagcaucuugcuucaucgu

SEQ ID NO: 1803000 - RNA, 19 nt, Artificial Sequence
  Description of Artificial Sequence: Synthetic oligonucleotide
auguccguaguguuuugua

SEQ ID NO: 1803001 - RNA, 19 nt, Artificial Sequence
  Description of Artificial Sequence: Synthetic oligonucleotide
gacuccguggugaaauguc

SEQ ID NO: 1803002 - RNA, 19 nt, Artificial Sequence
  Description of Artificial Sequence: Synthetic oligonucleotide
ugauuacuggaggcaguga

SEQ ID NO: 1803003 - RNA, 19 nt, Artificial Sequence
  Description of Artificial Sequence: Synthetic oligonucleotide
gaaucgaguuuggucucug

SEQ ID NO: 1803004 - RNA, 19 nt, Artificial Sequence
  Description of Artificial Sequence: Synthetic oligonucleotide
gccaauaaccacauaauua

SEQ ID NO: 1803005 - RNA, 19 nt, Artificial Sequence
  Description of Artificial Sequence: Synthetic oligonucleotide
gaccgagugauaucccaaa

SEQ ID NO: 1803006 - RNA, 19 nt, Artificial Sequence
  Description of Artificial Sequence: Synthetic oligonucleotide
cuccugaaauguacacaug

SEQ ID NO: 1803007 - RNA, 19 nt, Artificial Sequence
  Description of Artificial Sequence: Synthetic oligonucleotide
gauagccagugguugcgaa

SEQ ID NO: 1803008 - RNA, 19 nt, Artificial Sequence
  Description of Artificial Sequence: Synthetic oligonucleotide
accgagugauaucccaaau

SEQ ID NO: 1803009 - RNA, 19 nt, Artificial Sequence
  Description of Artificial Sequence: Synthetic oligonucleotide
auaucccaaauaauccaau

SEQ ID NO: 1803010 - RNA, 19 nt, Artificial Sequence
  Description of Artificial Sequence: Synthetic oligonucleotide
auuacuggaggcagugaau

SEQ ID NO: 1803011 - RNA, 19 nt, Artificial Sequence
  Description of Artificial Sequence: Synthetic oligonucleotide
aucguguaucucaaaacuu

SEQ ID NO: 1803012 - RNA, 19 nt, Artificial Sequence
  Description of Artificial Sequence: Synthetic oligonucleotide
guccguaguguuuuguacu

SEQ ID NO: 1803013 - RNA, 19 nt, Artificial Sequence
  Description of Artificial Sequence: Synthetic oligonucleotide
gaucauaaaaccggaucau

SEQ ID NO: 1803014 - RNA, 19 nt, Artificial Sequence
  Description of Artificial Sequence: Synthetic oligonucleotide
gacauuaacggugucuguu

SEQ ID NO: 1803015 - RNA, 19 nt, Artificial Sequence
  Description of Artificial Sequence: Synthetic oligonucleotide
caauaaccacauaauuacu

SEQ ID NO: 1803016 - RNA, 19 nt, Artificial Sequence
  Description of Artificial Sequence: Synthetic oligonucleotide
cuggaccgagugauauccc

SEQ ID NO: 1803017 - RNA, 19 nt, Artificial Sequence
  Description of Artificial Sequence: Synthetic oligonucleotide
cugagguacaaaauuugau

SEQ ID NO: 1803018 - RNA, 19 nt, Artificial Sequence
  Description of Artificial Sequence: Synthetic oligonucleotide
cacuuacacuugcaauuuc

SEQ ID NO: 1803019 - RNA, 19 nt, Artificial Sequence
  Description of Artificial Sequence: Synthetic oligonucleotide
ugguugcgaauaaguuuuc

SEQ ID NO: 1803020 - RNA, 19 nt, Artificial Sequence
  Description of Artificial Sequence: Synthetic oligonucleotide
gaaggcgacccgagcacug

SEQ ID NO: 1803021 - RNA, 19 nt, Artificial Sequence
  Description of Artificial Sequence: Synthetic oligonucleotide
aaugacccuccaaaaccuu

SEQ ID NO: 1803022 - RNA, 19 nt, Artificial Sequence
  Description of Artificial Sequence: Synthetic oligonucleotide
ggugaaauguccguagugu

SEQ ID NO: 1803023 - RNA, 19 nt, Artificial Sequence
  Description of Artificial Sequence: Synthetic oligonucleotide
gaaaaugagccgucugcuu

SEQ ID NO: 1803024 - RNA, 19 nt, Artificial Sequence
  Description of Artificial Sequence: Synthetic oligonucleotide
gcgaauaaguuuucacuaa

SEQ ID NO: 1803025 - RNA, 19 nt, Artificial Sequence
  Description of Artificial Sequence: Synthetic oligonucleotide
ggauggaacaccaagucau

SEQ ID NO: 1803026 - RNA, 19 nt, Artificial Sequence
  Description of Artificial Sequence: Synthetic oligonucleotide
cugagacauuucuagauuu

SEQ ID NO: 1803027 - RNA, 19 nt, Artificial Sequence
  Description of Artificial Sequence: Synthetic oligonucleotide
ugaacaggucuugucucuu

SEQ ID NO: 1803028 - RNA, 19 nt, Artificial Sequence
  Description of Artificial Sequence: Synthetic oligonucleotide
agaaggcgacccgagcacu

SEQ ID NO: 1803029 - RNA, 19 nt, Artificial Sequence
  Description of Artificial Sequence: Synthetic oligonucleotide
cacuaauugcagaccaccu

SEQ ID NO: 1803030 - RNA, 19 nt, Artificial Sequence
  Description of Artificial Sequence: Synthetic oligonucleotide
gucaucacuuacacuugca

SEQ ID NO: 1803031 - RNA, 19 nt, Artificial Sequence
  Description of Artificial Sequence: Synthetic oligonucleotide
uaacggugucuguucugau

SEQ ID NO: 1803032 - RNA, 19 nt, Artificial Sequence
  Description of Artificial Sequence: Synthetic oligonucleotide
ggauaacuggaccgaguga

SEQ ID NO: 1803033 - RNA, 19 nt, Artificial Sequence
  Description of Artificial Sequence: Synthetic oligonucleotide
caguuguaagaaccaaaua

SEQ ID NO: 1803034 - RNA, 19 nt, Artificial Sequence
  Description of Artificial Sequence: Synthetic oligonucleotide
cauuaacggugucuguucu

SEQ ID NO: 1803035 - RNA, 19 nt, Artificial Sequence
  Description of Artificial Sequence: Synthetic oligonucleotide
gugaaauguccguaguguu

SEQ ID NO: 1803036 - RNA, 19 nt, Artificial Sequence
  Description of Artificial Sequence: Synthetic oligonucleotide
ggaguguucuaugccagga

SEQ ID NO: 1803037 - RNA, 19 nt, Artificial Sequence
  Description of Artificial Sequence: Synthetic oligonucleotide
ggcagugaaucgaguuugg

SEQ ID NO: 1803038 - RNA, 19 nt, Artificial Sequence
  Description of Artificial Sequence: Synthetic oligonucleotide
cacgaaaccaaggcacaga

SEQ ID NO: 1803039 - RNA, 19 nt, Artificial Sequence
  Description of Artificial Sequence: Synthetic oligonucleotide
cuugucucuugaggauaac

SEQ ID NO: 1803040 - RNA, 19 nt, Artificial Sequence
  Description of Artificial Sequence: Synthetic oligonucleotide
cuaaauaagugugcucgau

SEQ ID NO: 1803041 - RNA, 19 nt, Artificial Sequence
  Description of Artificial Sequence: Synthetic oligonucleotide
ccuaaauaagugugcucga

SEQ ID NO: 1803042 - RNA, 19 nt, Artificial Sequence
  Description of Artificial Sequence: Synthetic oligonucleotide
uccacaguguaggcagcau

SEQ ID NO: 1803043 - RNA, 19 nt, Artificial Sequence
  Description of Artificial Sequence: Synthetic oligonucleotide
augacccuccaaaaccuua

SEQ ID NO: 1803044 - RNA, 19 nt, Artificial Sequence
  Description of Artificial Sequence: Synthetic oligonucleotide
acucggacuccguggugaa

SEQ ID NO: 1803045 - RNA, 19 nt, Artificial Sequence
  Description of Artificial Sequence: Synthetic oligonucleotide
gaggauaacuggaccgagu

SEQ ID NO: 1803046 - RNA, 19 nt, Artificial Sequence
  Description of Artificial Sequence: Synthetic oligonucleotide
gguugcgaauaaguuuuca

SEQ ID NO: 1803047 - RNA, 19 nt, Artificial Sequence
  Description of Artificial Sequence: Synthetic oligonucleotide
gacccuccaaaaccuuaua

SEQ ID NO: 1803048 - RNA, 19 nt, Artificial Sequence
  Description of Artificial Sequence: Synthetic oligonucleotide
auaacuggaccgagugaua

SEQ ID NO: 1803049 - RNA, 19 nt, Artificial Sequence
  Description of Artificial Sequence: Synthetic oligonucleotide
aggcgacccgagcacugcu

SEQ ID NO: 1803050 - RNA, 19 nt, Artificial Sequence
  Description of Artificial Sequence: Synthetic oligonucleotide
caacucggacuccguggug

SEQ ID NO: 1803051 - RNA, 19 nt, Artificial Sequence
  Description of Artificial Sequence: Synthetic oligonucleotide
augggcugagaauguccua

SEQ ID NO: 1803052 - RNA, 19 nt, Artificial Sequence
  Description of Artificial Sequence: Synthetic oligonucleotide
gccauuuugccaggauagc

SEQ ID NO: 1803053 - RNA, 19 nt, Artificial Sequence
  Description of Artificial Sequence: Synthetic oligonucleotide
gcuuguugggccauuagau

SEQ ID NO: 1803054 - RNA, 19 nt, Artificial Sequence
  Description of Artificial Sequence: Synthetic oligonucleotide
auucuaccacauguacaua

SEQ ID NO: 1803055 - RNA, 19 nt, Artificial Sequence
  Description of Artificial Sequence: Synthetic oligonucleotide
cagugguugcgaauaaguu

SEQ ID NO: 1803056 - RNA, 19 nt, Artificial Sequence
  Description of Artificial Sequence: Synthetic oligonucleotide
gugcucgauccaugugaac

SEQ ID NO: 1803057 - RNA, 19 nt, Artificial Sequence
  Description of Artificial Sequence: Synthetic oligonucleotide
ccagugguugcgaauaagu

SEQ ID NO: 1803058 - RNA, 19 nt, Artificial Sequence
  Description of Artificial Sequence: Synthetic oligonucleotide
augagccgucugcuuuccu

SEQ ID NO: 1803059 - RNA, 19 nt, Artificial Sequence
  Description of Artificial Sequence: Synthetic oligonucleotide
gccagugguugcgaauaag

SEQ ID NO: 1803060 - RNA, 19 nt, Artificial Sequence
  Description of Artificial Sequence: Synthetic oligonucleotide
gcuucaucguguaucucaa

SEQ ID NO: 1803061 - RNA, 19 nt, Artificial Sequence
  Description of Artificial Sequence: Synthetic oligonucleotide
ccaggcuaugccaucaacu

SEQ ID NO: 1803062 - RNA, 19 nt, Artificial Sequence
  Description of Artificial Sequence: Synthetic oligonucleotide
ccaacugcacacaguggga

SEQ ID NO: 1803063 - RNA, 19 nt, Artificial Sequence
  Description of Artificial Sequence: Synthetic oligonucleotide
cguaguguuuuguacugaa

SEQ ID NO: 1803064 - RNA, 19 nt, Artificial Sequence
  Description of Artificial Sequence: Synthetic oligonucleotide
ggucuugucucuugaggau

SEQ ID NO: 1803065 - RNA, 19 nt, Artificial Sequence
  Description of Artificial Sequence: Synthetic oligonucleotide
ccaccauaugcaauuagau

SEQ ID NO: 1803066 - RNA, 19 nt, Artificial Sequence
  Description of Artificial Sequence: Synthetic oligonucleotide
ccaacuuugaagguguuuu

SEQ ID NO: 1803067 - RNA, 19 nt, Artificial Sequence
  Description of Artificial Sequence: Synthetic oligonucleotide
uggccuuccuugggaugga

SEQ ID NO: 1803068 - RNA, 19 nt, Artificial Sequence
  Description of Artificial Sequence: Synthetic oligonucleotide
ccgagugauaucccaaaua

SEQ ID NO: 1803069 - RNA, 19 nt, Artificial Sequence
  Description of Artificial Sequence: Synthetic oligonucleotide
auccugcagguguggucau

SEQ ID NO: 1803070 - RNA, 19 nt, Artificial Sequence
  Description of Artificial Sequence: Synthetic oligonucleotide
ggaccgagugauaucccaa

SEQ ID NO: 1803071 - RNA, 19 nt, Artificial Sequence
  Description of Artificial Sequence: Synthetic oligonucleotide
cucagggugccagcacaca

SEQ ID NO: 1803072 - RNA, 19 nt, Artificial Sequence
  Description of Artificial Sequence: Synthetic oligonucleotide
caaauccugcagguguggu

SEQ ID NO: 1803073 - RNA, 19 nt, Artificial Sequence
  Description of Artificial Sequence: Synthetic oligonucleotide
guugggccauuagaucaua

SEQ ID NO: 1803074 - RNA, 19 nt, Artificial Sequence
  Description of Artificial Sequence: Synthetic oligonucleotide
cagauccgacagcuacaga

SEQ ID NO: 1803075 - RNA, 19 nt, Artificial Sequence
  Description of Artificial Sequence: Synthetic oligonucleotide
ggauagccagugguugcga

SEQ ID NO: 1803076 - RNA, 19 nt, Artificial Sequence
  Description of Artificial Sequence: Synthetic oligonucleotide
gccuuccuugggauggaac

SEQ ID NO: 1803077 - RNA, 19 nt, Artificial Sequence
  Description of Artificial Sequence: Synthetic oligonucleotide
ccaccuaaauaagugugcu

SEQ ID NO: 1803078 - RNA, 19 nt, Artificial Sequence
  Description of Artificial Sequence: Synthetic oligonucleotide
ccaaucauuuccggccaca

SEQ ID NO: 1803079 - RNA, 19 nt, Artificial Sequence
  Description of Artificial Sequence: Synthetic oligonucleotide
cccgagcacugcucucccg

SEQ ID NO: 1803080 - RNA, 19 nt, Artificial Sequence
  Description of Artificial Sequence: Synthetic oligonucleotide
cgaauaaguuuucacuaau

SEQ ID NO: 1803081 - RNA, 19 nt, Artificial Sequence
  Description of Artificial Sequence: Synthetic oligonucleotide
guuuggucucugggcucca

SEQ ID NO: 1803082 - RNA, 19 nt, Artificial Sequence
  Description of Artificial Sequence: Synthetic oligonucleotide
agaccagauccgacagcua

SEQ ID NO: 1803083 - RNA, 19 nt, Artificial Sequence
  Description of Artificial Sequence: Synthetic oligonucleotide
ggacuccguggugaaaugu

SEQ ID NO: 1803084 - RNA, 19 nt, Artificial Sequence
  Description of Artificial Sequence: Synthetic oligonucleotide
gcgacccgagcacugcucu

SEQ ID NO: 1803085 - RNA, 19 nt, Artificial Sequence
  Description of Artificial Sequence: Synthetic oligonucleotide
gcagugaaucgaguuuggu

SEQ ID NO: 1803086 - RNA, 19 nt, Artificial Sequence
  Description of Artificial Sequence: Synthetic oligonucleotide
ggcgacccgagcacugcuc

SEQ ID NO: 1803087 - RNA, 19 nt, Artificial Sequence
  Description of Artificial Sequence: Synthetic oligonucleotide
cggacuccguggugaaaug

SEQ ID NO: 1803088 - RNA, 19 nt, Artificial Sequence
  Description of Artificial Sequence: Synthetic oligonucleotide
ccgucugcuuuccuuccaa

SEQ ID NO: 1803089 - RNA, 19 nt, Artificial Sequence
  Description of Artificial Sequence: Synthetic oligonucleotide
ccguaguguuuuguacuga

SEQ ID NO: 1803090 - RNA, 19 nt, Artificial Sequence
  Description of Artificial Sequence: Synthetic oligonucleotide
cucggacuccguggugaaa

SEQ ID NO: 1803091 - RNA, 19 nt, Artificial Sequence
  Description of Artificial Sequence: Synthetic oligonucleotide
caccaacuuugaagguguu

SEQ ID NO: 1803092 - RNA, 19 nt, Artificial Sequence
  Description of Artificial Sequence: Synthetic oligonucleotide
aauaacacgauucugaacu

SEQ ID NO: 1803093 - RNA, 19 nt, Artificial Sequence
  Description of Artificial Sequence: Synthetic oligonucleotide
acuaaaaguagauaaaugg

SEQ ID NO: 1803094 - RNA, 19 nt, Artificial Sequence
  Description of Artificial Sequence: Synthetic oligonucleotide
uauuauacaagcaauagga

SEQ ID NO: 1803095 - RNA, 19 nt, Artificial Sequence
  Description of Artificial Sequence: Synthetic oligonucleotide
aacacgauagacgagaugc

SEQ ID NO: 1803096 - RNA, 19 nt, Artificial Sequence
  Description of Artificial Sequence: Synthetic oligonucleotide
aaaauggcaucucagaaac

SEQ ID NO: 1803097 - RNA, 19 nt, Artificial Sequence
  Description of Artificial Sequence: Synthetic oligonucleotide
aguauuuucaacuacuaac

SEQ ID NO: 1803098 - RNA, 19 nt, Artificial Sequence
  Description of Artificial Sequence: Synthetic oligonucleotide
agcaauaaacaauaaagcc

SEQ ID NO: 1803099 - RNA, 19 nt, Artificial Sequence
  Description of Artificial Sequence: Synthetic oligonucleotide
aucaauaccacccagagug

SEQ ID NO: 1803100 - RNA, 19 nt, Artificial Sequence
  Description of Artificial Sequence: Synthetic oligonucleotide
aacccagcaauauagaauc

SEQ ID NO: 1803101 - RNA, 19 nt, Artificial Sequence
  Description of Artificial Sequence: Synthetic oligonucleotide
uauagaaucauuuucuaca

SEQ ID NO: 1803102 - RNA, 19 nt, Artificial Sequence
  Description of Artificial Sequence: Synthetic oligonucleotide
uuuuauacaauagucacag

SEQ ID NO: 1803103 - RNA, 19 nt, Artificial Sequence
  Description of Artificial Sequence: Synthetic oligonucleotide
aaaugguaacaacugacac

SEQ ID NO: 1803104 - RNA, 19 nt, Artificial Sequence
  Description of Artificial Sequence: Synthetic oligonucleotide
uuauuauacaagcaauagg

SEQ ID NO: 1803105 - RNA, 19 nt, Artificial Sequence
  Description of Artificial Sequence: Synthetic oligonucleotide
uuuucaacuacuaacuuca

SEQ ID NO: 1803106 - RNA, 19 nt, Artificial Sequence
  Description of Artificial Sequence: Synthetic oligonucleotide
ucaacuacuaacuucagga

SEQ ID NO: 1803107 - RNA, 19 nt, Artificial Sequence
  Description of Artificial Sequence: Synthetic oligonucleotide
uacagauuuaauaacacga

SEQ ID NO: 1803108 - RNA, 19 nt, Artificial Sequence
  Description of Artificial Sequence: Synthetic oligonucleotide
auugaguccuacuacauac

SEQ ID NO: 1803109 - RNA, 19 nt, Artificial Sequence
  Description of Artificial Sequence: Synthetic oligonucleotide
uaaacaauaaagccuauac

SEQ ID NO: 1803110 - RNA, 19 nt, Artificial Sequence
  Description of Artificial Sequence: Synthetic oligonucleotide
ucuacuuaaucacugacug

SEQ ID NO: 1803111 - RNA, 19 nt, Artificial Sequence
  Description of Artificial Sequence: Synthetic oligonucleotide
aaaacuuuggaugaaaagu

SEQ ID NO: 1803112 - RNA, 19 nt, Artificial Sequence
  Description of Artificial Sequence: Synthetic oligonucleotide
aaaauaaugcaucuuaaua

SEQ ID NO: 1803113 - RNA, 19 nt, Artificial Sequence
  Description of Artificial Sequence: Synthetic oligonucleotide
acaagaguuauuuauuuuc

SEQ ID NO: 1803114 - RNA, 19 nt, Artificial Sequence
  Description of Artificial Sequence: Synthetic oligonucleotide
uauuuagucacuuggagga

SEQ ID NO: 1803115 - RNA, 19 nt, Artificial Sequence
  Description of Artificial Sequence: Synthetic oligonucleotide
uguaauucuacuuaaucac

SEQ ID NO: 1803116 - RNA, 19 nt, Artificial Sequence
  Description of Artificial Sequence: Synthetic oligonucleotide
aauuacacuuuauuaaggu

SEQ ID NO: 1803117 - RNA, 19 nt, Artificial Sequence
  Description of Artificial Sequence: Synthetic oligonucleotide
uacaaaacacgauagacga

SEQ ID NO: 1803118 - RNA, 19 nt, Artificial Sequence
  Description of Artificial Sequence: Synthetic oligonucleotide
aaaucaguccuuugguuac

SEQ ID NO: 1803119 - RNA, 19 nt, Artificial Sequence
  Description of Artificial Sequence: Synthetic oligonucleotide
auuaaggucauaaaccagc

SEQ ID NO: 1803120 - RNA, 19 nt, Artificial Sequence
  Description of Artificial Sequence: Synthetic oligonucleotide
uaaugcaucuuaauaaccc

SEQ ID NO: 1803121 - RNA, 19 nt, Artificial Sequence
  Description of Artificial Sequence: Synthetic oligonucleotide
uagauaaaugguaacaacu

SEQ ID NO: 1803122 - RNA, 19 nt, Artificial Sequence
  Description of Artificial Sequence: Synthetic oligonucleotide
uuuauuauacaagcaauag

SEQ ID NO: 1803123 - RNA, 19 nt, Artificial Sequence
  Description of Artificial Sequence: Synthetic oligonucleotide
uaggaauuggaccaaauga

SEQ ID NO: 1803124 - RNA, 19 nt, Artificial Sequence
  Description of Artificial Sequence: Synthetic oligonucleotide
cugauaaaagaacaaaccc

SEQ ID NO: 1803125 - RNA, 19 nt, Artificial Sequence
  Description of Artificial Sequence: Synthetic oligonucleotide
uuuagaugaacuccuaaga

SEQ ID NO: 1803126 - RNA, 19 nt, Artificial Sequence
  Description of Artificial Sequence: Synthetic oligonucleotide
guuaaagugggaaagaccc

SEQ ID NO: 1803127 - RNA, 19 nt, Artificial Sequence
  Description of Artificial Sequence: Synthetic oligonucleotide
gaacaagucgguuaaagug

SEQ ID NO: 1803128 - RNA, 19 nt, Artificial Sequence
  Description of Artificial Sequence: Synthetic oligonucleotide
aacuccuaagacuaugauc

SEQ ID NO: 1803129 - RNA, 19 nt, Artificial Sequence
  Description of Artificial Sequence: Synthetic oligonucleotide
uuguaauucuacuuaauca

SEQ ID NO: 1803130 - RNA, 19 nt, Artificial Sequence
  Description of Artificial Sequence: Synthetic oligonucleotide
uuuauaaccacagcaaaug

SEQ ID NO: 1803131 - RNA, 19 nt, Artificial Sequence
  Description of Artificial Sequence: Synthetic oligonucleotide
uuauacaauagucacaguu

SEQ ID NO: 1803132 - RNA, 19 nt, Artificial Sequence
  Description of Artificial Sequence: Synthetic oligonucleotide
aguccuacuacauaccagg

SEQ ID NO: 1803133 - RNA, 19 nt, Artificial Sequence
  Description of Artificial Sequence: Synthetic oligonucleotide
uauguagucugacacugcg

SEQ ID NO: 1803134 - RNA, 19 nt, Artificial Sequence
  Description of Artificial Sequence: Synthetic oligonucleotide
aaaugauuaugauaaucca

SEQ ID NO: 1803135 - RNA, 19 nt, Artificial Sequence
  Description of Artificial Sequence: Synthetic oligonucleotide
aagaccuuccuacauaugu

SEQ ID NO: 1803136 - RNA, 19 nt, Artificial Sequence
  Description of Artificial Sequence: Synthetic oligonucleotide
ugguaauacauaauuacac

SEQ ID NO: 1803137 - RNA, 19 nt, Artificial Sequence
  Description of Artificial Sequence: Synthetic oligonucleotide
aacaaacccagcaauauag

SEQ ID NO: 1803138 - RNA, 19 nt, Artificial Sequence
  Description of Artificial Sequence: Synthetic oligonucleotide
uauacaagcaauaggaauu

SEQ ID NO: 1803139 - RNA, 19 nt, Artificial Sequence
  Description of Artificial Sequence: Synthetic oligonucleotide
aaugauuaugauaauccag

SEQ ID NO: 1803140 - RNA, 19 nt, Artificial Sequence
  Description of Artificial Sequence: Synthetic oligonucleotide
aaugguaacaacugacaca

SEQ ID NO: 1803141 - RNA, 19 nt, Artificial Sequence
  Description of Artificial Sequence: Synthetic oligonucleotide
aacaagucgguuaaagugg

SEQ ID NO: 1803142 - RNA, 19 nt, Artificial Sequence
  Description of Artificial Sequence: Synthetic oligonucleotide
gaugcuacacaaaaggucc

SEQ ID NO: 1803143 - RNA, 19 nt, Artificial Sequence
  Description of Artificial Sequence: Synthetic oligonucleotide
ugauaauccagagugagug

SEQ ID NO: 1803144 - RNA, 19 nt, Artificial Sequence
  Description of Artificial Sequence: Synthetic oligonucleotide
ucuuaauaaccccagcuga

SEQ ID NO: 1803145 - RNA, 19 nt, Artificial Sequence
  Description of Artificial Sequence: Synthetic oligonucleotide
uuaaaucuggguauuggug

SEQ ID NO: 1803146 - RNA, 19 nt, Artificial Sequence
  Description of Artificial Sequence: Synthetic oligonucleotide
cuaauaggagauaagcgag

SEQ ID NO: 1803147 - RNA, 19 nt, Artificial Sequence
  Description of Artificial Sequence: Synthetic oligonucleotide
agcaauaggaauuggacca

SEQ ID NO: 1803148 - RNA, 19 nt, Artificial Sequence
  Description of Artificial Sequence: Synthetic oligonucleotide
aaaacaacaggauguacaa

SEQ ID NO: 1803149 - RNA, 19 nt, Artificial Sequence
  Description of Artificial Sequence: Synthetic oligonucleotide
uuccauuagaaaacaacag

SEQ ID NO: 1803150 - RNA, 19 nt, Artificial Sequence
  Description of Artificial Sequence: Synthetic oligonucleotide
guauuuagucacuuggagg

SEQ ID NO: 1803151 - RNA, 19 nt, Artificial Sequence
  Description of Artificial Sequence: Synthetic oligonucleotide
uaugucaaauuguauuuag

SEQ ID NO: 1803152 - RNA, 19 nt, Artificial Sequence
  Description of Artificial Sequence: Synthetic oligonucleotide
auuacacuuuauuaagguc

SEQ ID NO: 1803153 - RNA, 19 nt, Artificial Sequence
  Description of Artificial Sequence: Synthetic oligonucleotide
uaauucuacuuaaucacug

SEQ ID NO: 1803154 - RNA, 19 nt, Artificial Sequence
  Description of Artificial Sequence: Synthetic oligonucleotide
auaaaugguaacaacugac

SEQ ID NO: 1803155 - RNA, 19 nt, Artificial Sequence
  Description of Artificial Sequence: Synthetic oligonucleotide
gagugaguguuuuauaacc

SEQ ID NO: 1803156 - RNA, 19 nt, Artificial Sequence
  Description of Artificial Sequence: Synthetic oligonucleotide
aaauuaaccuagaagucag

SEQ ID NO: 1803157 - RNA, 19 nt, Artificial Sequence
  Description of Artificial Sequence: Synthetic oligonucleotide
uaugauaauccagagugag

SEQ ID NO: 1803158 - RNA, 19 nt, Artificial Sequence
  Description of Artificial Sequence: Synthetic oligonucleotide
uaaaucuggguauuggugu

SEQ ID NO: 1803159 - RNA, 19 nt, Artificial Sequence
  Description of Artificial Sequence: Synthetic oligonucleotide
uguagucugacacugcgga

SEQ ID NO: 1803160 - RNA, 19 nt, Artificial Sequence
  Description of Artificial Sequence: Synthetic oligonucleotide
aaaccacaaccacauguac

SEQ ID NO: 1803161 - RNA, 19 nt, Artificial Sequence
  Description of Artificial Sequence: Synthetic oligonucleotide
ccuauuaugguuuagauga

SEQ ID NO: 1803162 - RNA, 19 nt, Artificial Sequence
  Description of Artificial Sequence: Synthetic oligonucleotide
ugauucaaaacuuguaaaa

SEQ ID NO: 1803163 - RNA, 19 nt, Artificial Sequence
  Description of Artificial Sequence: Synthetic oligonucleotide
aacuacuaacuucaggagu

SEQ ID NO: 1803164 - RNA, 19 nt, Artificial Sequence
  Description of Artificial Sequence: Synthetic oligonucleotide
uuauacaagcaauaggaau

SEQ ID NO: 1803165 - RNA, 19 nt, Artificial Sequence
  Description of Artificial Sequence: Synthetic oligonucleotide
gaccaaaugauuaugauaa

SEQ ID NO: 1803166 - RNA, 19 nt, Artificial Sequence
  Description of Artificial Sequence: Synthetic oligonucleotide
uaaccuagaagucagccuc

SEQ ID NO: 1803167 - RNA, 19 nt, Artificial Sequence
  Description of Artificial Sequence: Synthetic oligonucleotide
acacaaaagguccaggaug

SEQ ID NO: 1803168 - RNA, 19 nt, Artificial Sequence
  Description of Artificial Sequence: Synthetic oligonucleotide
ucaauugaguccuacuaca

SEQ ID NO: 1803169 - RNA, 19 nt, Artificial Sequence
  Description of Artificial Sequence: Synthetic oligonucleotide
uuauaaccacagcaaaugc

SEQ ID NO: 1803170 - RNA, 19 nt, Artificial Sequence
  Description of Artificial Sequence: Synthetic oligonucleotide
uuccuucugauucaaaacu

SEQ ID NO: 1803171 - RNA, 19 nt, Artificial Sequence
  Description of Artificial Sequence: Synthetic oligonucleotide
ugaaaauggcaucucagaa

SEQ ID NO: 1803172 - RNA, 19 nt, Artificial Sequence
  Description of Artificial Sequence: Synthetic oligonucleotide
uuagugugcucacagaaaa

SEQ ID NO: 1803173 - RNA, 19 nt, Artificial Sequence
  Description of Artificial Sequence: Synthetic oligonucleotide
aauucuacuuaaucacuga

SEQ ID NO: 1803174 - RNA, 19 nt, Artificial Sequence
  Description of Artificial Sequence: Synthetic oligonucleotide
aaaaguagauaaaugguaa

SEQ ID NO: 1803175 - RNA, 19 nt, Artificial Sequence
  Description of Artificial Sequence: Synthetic oligonucleotide
gauuugugaacuucagagc

SEQ ID NO: 1803176 - RNA, 19 nt, Artificial Sequence
  Description of Artificial Sequence: Synthetic oligonucleotide
uccuuaaucucaaagcuau

SEQ ID NO: 1803177 - RNA, 19 nt, Artificial Sequence
  Description of Artificial Sequence: Synthetic oligonucleotide
uuaggcagugauuaaaauc

SEQ ID NO: 1803178 - RNA, 19 nt, Artificial Sequence
  Description of Artificial Sequence: Synthetic oligonucleotide
accagguuugacuucaauc

SEQ ID NO: 1803179 - RNA, 19 nt, Artificial Sequence
  Description of Artificial Sequence: Synthetic oligonucleotide
agagugaguguuuuauaac

SEQ ID NO: 1803180 - RNA, 19 nt, Artificial Sequence
  Description of Artificial Sequence: Synthetic oligonucleotide
uucaauugaguccuacuac

SEQ ID NO: 1803181 - RNA, 19 nt, Artificial Sequence
  Description of Artificial Sequence: Synthetic oligonucleotide
agaaaauuacaaaacacga

SEQ ID NO: 1803182 - RNA, 19 nt, Artificial Sequence
  Description of Artificial Sequence: Synthetic oligonucleotide
aguugguaaaacuuuauua

SEQ ID NO: 1803183 - RNA, 19 nt, Artificial Sequence
  Description of Artificial Sequence: Synthetic oligonucleotide
aaguagauaaaugguaaca

SEQ ID NO: 1803184 - RNA, 19 nt, Artificial Sequence
  Description of Artificial Sequence: Synthetic oligonucleotide
uucagaauccauuucaauu

SEQ ID NO: 1803185 - RNA, 19 nt, Artificial Sequence
  Description of Artificial Sequence: Synthetic oligonucleotide
uacuuaaucacugacuggu

SEQ ID NO: 1803186 - RNA, 19 nt, Artificial Sequence
  Description of Artificial Sequence: Synthetic oligonucleotide
cauacuuggccaacuaggg

SEQ ID NO: 1803187 - RNA, 19 nt, Artificial Sequence
  Description of Artificial Sequence: Synthetic oligonucleotide
aucuuaauaaccccagcug

SEQ ID NO: 1803188 - RNA, 19 nt, Artificial Sequence
  Description of Artificial Sequence: Synthetic oligonucleotide
auaaugcaucuuaauaacc

SEQ ID NO: 1803189 - RNA, 19 nt, Artificial Sequence
  Description of Artificial Sequence: Synthetic oligonucleotide
aacuaaaaguagauaaaug

SEQ ID NO: 1803190 - RNA, 19 nt, Artificial Sequence
  Description of Artificial Sequence: Synthetic oligonucleotide
cuucugauggcaugcaagg

SEQ ID NO: 1803191 - RNA, 19 nt, Artificial Sequence
  Description of Artificial Sequence: Synthetic oligonucleotide
agagcuugaaaauggcauc

SEQ ID NO: 1803192 - RNA, 19 nt, Artificial Sequence
  Description of Artificial Sequence: Synthetic oligonucleotide
uagaugaacuccuaagacu

SEQ ID NO: 1803193 - RNA, 19 nt, Artificial Sequence
  Description of Artificial Sequence: Synthetic oligonucleotide
uccauuucaauugaguccu

SEQ ID NO: 1803194 - RNA, 19 nt, Artificial Sequence
  Description of Artificial Sequence: Synthetic oligonucleotide
cuuguaauucuacuuaauc

SEQ ID NO: 1803195 - RNA, 19 nt, Artificial Sequence
  Description of Artificial Sequence: Synthetic oligonucleotide
uugacuucaaucuuccaaa

SEQ ID NO: 1803196 - RNA, 19 nt, Artificial Sequence
  Description of Artificial Sequence: Synthetic oligonucleotide
acaauaaagccuauacaac

SEQ ID NO: 1803197 - RNA, 19 nt, Artificial Sequence
  Description of Artificial Sequence: Synthetic oligonucleotide
aaaaguaugucaaauugua

SEQ ID NO: 1803198 - RNA, 19 nt, Artificial Sequence
  Description of Artificial Sequence: Synthetic oligonucleotide
ggauuuucgaacaagucgg

SEQ ID NO: 1803199 - RNA, 19 nt, Artificial Sequence
  Description of Artificial Sequence: Synthetic oligonucleotide
gauaaaugguaacaacuga

SEQ ID NO: 1803200 - RNA, 19 nt, Artificial Sequence
  Description of Artificial Sequence: Synthetic oligonucleotide
gaaaacaacaggauguaca

SEQ ID NO: 1803201 - RNA, 19 nt, Artificial Sequence
  Description of Artificial Sequence: Synthetic oligonucleotide
ugcaucuuaauaaccccag

SEQ ID NO: 1803202 - RNA, 19 nt, Artificial Sequence
  Description of Artificial Sequence: Synthetic oligonucleotide
guguuuuauaaccacagca

SEQ ID NO: 1803203 - RNA, 19 nt, Artificial Sequence
  Description of Artificial Sequence: Synthetic oligonucleotide
uugguuaccagguuugacu

SEQ ID NO: 1803204 - RNA, 19 nt, Artificial Sequence
  Description of Artificial Sequence: Synthetic oligonucleotide
uuaaucacugacugguaca

SEQ ID NO: 1803205 - RNA, 19 nt, Artificial Sequence
  Description of Artificial Sequence: Synthetic oligonucleotide
aguaugucaaauuguauuu

SEQ ID NO: 1803206 - RNA, 19 nt, Artificial Sequence
  Description of Artificial Sequence: Synthetic oligonucleotide
ugaguguuuuauaaccaca

SEQ ID NO: 1803207 - RNA, 19 nt, Artificial Sequence
  Description of Artificial Sequence: Synthetic oligonucleotide
uccuauuaugguuuagaug

SEQ ID NO: 1803208 - RNA, 19 nt, Artificial Sequence
  Description of Artificial Sequence: Synthetic oligonucleotide
uuuucgaacaagucgguua

SEQ ID NO: 1803209 - RNA, 19 nt, Artificial Sequence
  Description of Artificial Sequence: Synthetic oligonucleotide
auaaagccuauacaacuug

SEQ ID NO: 1803210 - RNA, 19 nt, Artificial Sequence
  Description of Artificial Sequence: Synthetic oligonucleotide
agcaaaugccacuguacac

SEQ ID NO: 1803211 - RNA, 19 nt, Artificial Sequence
  Description of Artificial Sequence: Synthetic oligonucleotide
agaugcuacacaaaagguc

SEQ ID NO: 1803212 - RNA, 19 nt, Artificial Sequence
  Description of Artificial Sequence: Synthetic oligonucleotide
aacuuguaauucuacuuaa

SEQ ID NO: 1803213 - RNA, 19 nt, Artificial Sequence
  Description of Artificial Sequence: Synthetic oligonucleotide
ugacugguacagcuaauag

SEQ ID NO: 1803214 - RNA, 19 nt, Artificial Sequence
  Description of Artificial Sequence: Synthetic oligonucleotide
caguacaagaccuuccuac

SEQ ID NO: 1803215 - RNA, 19 nt, Artificial Sequence
  Description of Artificial Sequence: Synthetic oligonucleotide
agauaaaugguaacaacug

SEQ ID NO: 1803216 - RNA, 19 nt, Artificial Sequence
  Description of Artificial Sequence: Synthetic oligonucleotide
acuuggaggaaaauccgcc

SEQ ID NO: 1803217 - RNA, 19 nt, Artificial Sequence
  Description of Artificial Sequence: Synthetic oligonucleotide
ugaacuccuaagacuauga

SEQ ID NO: 1803218 - RNA, 19 nt, Artificial Sequence
  Description of Artificial Sequence: Synthetic oligonucleotide
aagccuauacaacuuguaa

SEQ ID NO: 1803219 - RNA, 19 nt, Artificial Sequence
  Description of Artificial Sequence: Synthetic oligonucleotide
uuucgaacaagucgguuaa

SEQ ID NO: 1803220 - RNA, 19 nt, Artificial Sequence
  Description of Artificial Sequence: Synthetic oligonucleotide
uguacuucugauggcaugc

SEQ ID NO: 1803221 - RNA, 19 nt, Artificial Sequence
  Description of Artificial Sequence: Synthetic oligonucleotide
uuggaccaaaugauuauga

SEQ ID NO: 1803222 - RNA, 19 nt, Artificial Sequence
  Description of Artificial Sequence: Synthetic oligonucleotide
uacaacuuguaauucuacu

SEQ ID NO: 1803223 - RNA, 19 nt, Artificial Sequence
  Description of Artificial Sequence: Synthetic oligonucleotide
uuaugauaauccagaguga

SEQ ID NO: 1803224 - RNA, 19 nt, Artificial Sequence
  Description of Artificial Sequence: Synthetic oligonucleotide
agcuaauaggagauaagcg

SEQ ID NO: 1803225 - RNA, 19 nt, Artificial Sequence
  Description of Artificial Sequence: Synthetic oligonucleotide
cuuaaucacugacugguac

SEQ ID NO: 1803226 - RNA, 19 nt, Artificial Sequence
  Description of Artificial Sequence: Synthetic oligonucleotide
ugguacagcuaauaggaga

SEQ ID NO: 1803227 - RNA, 19 nt, Artificial Sequence
  Description of Artificial Sequence: Synthetic oligonucleotide
aaaccagcaauaaacaaua

SEQ ID NO: 1803228 - RNA, 19 nt, Artificial Sequence
  Description of Artificial Sequence: Synthetic oligonucleotide
uuugcucuuagugugcuca

SEQ ID NO: 1803229 - RNA, 19 nt, Artificial Sequence
  Description of Artificial Sequence: Synthetic oligonucleotide
acaacugacacaguacaag

SEQ ID NO: 1803230 - RNA, 19 nt, Artificial Sequence
  Description of Artificial Sequence: Synthetic oligonucleotide
ugaguccuacuacauacca

SEQ ID NO: 1803231 - RNA, 19 nt, Artificial Sequence
  Description of Artificial Sequence: Synthetic oligonucleotide
ugccaauacagauuuaaua

SEQ ID NO: 1803232 - RNA, 19 nt, Artificial Sequence
  Description of Artificial Sequence: Synthetic oligonucleotide
uaauaggagauaagcgaga

SEQ ID NO: 1803233 - RNA, 19 nt, Artificial Sequence
  Description of Artificial Sequence: Synthetic oligonucleotide
agaaguuccuauuaugguu

SEQ ID NO: 1803234 - RNA, 19 nt, Artificial Sequence
  Description of Artificial Sequence: Synthetic oligonucleotide
acaacuuguaauucuacuu

SEQ ID NO: 1803235 - RNA, 19 nt, Artificial Sequence
  Description of Artificial Sequence: Synthetic oligonucleotide
uaauaaccccagcugauaa

SEQ ID NO: 1803236 - RNA, 19 nt, Artificial Sequence
  Description of Artificial Sequence: Synthetic oligonucleotide
uaucaguugguaaaacuuu

SEQ ID NO: 1803237 - RNA, 19 nt, Artificial Sequence
  Description of Artificial Sequence: Synthetic oligonucleotide
uagacgagaugcuacacaa

SEQ ID NO: 1803238 - RNA, 19 nt, Artificial Sequence
  Description of Artificial Sequence: Synthetic oligonucleotide
uaaagccuauacaacuugu

SEQ ID NO: 1803239 - RNA, 19 nt, Artificial Sequence
  Description of Artificial Sequence: Synthetic oligonucleotide
aaaauccgccacuccauca

SEQ ID NO: 1803240 - RNA, 19 nt, Artificial Sequence
  Description of Artificial Sequence: Synthetic oligonucleotide
aaagacccacaaaucaguc

SEQ ID NO: 1803241 - RNA, 19 nt, Artificial Sequence
  Description of Artificial Sequence: Synthetic oligonucleotide
gcugguaauacauaauuac

SEQ ID NO: 1803242 - RNA, 19 nt, Artificial Sequence
  Description of Artificial Sequence: Synthetic oligonucleotide
aggauaucaagauuuguuu

SEQ ID NO: 1803243 - RNA, 19 nt, Artificial Sequence
  Description of Artificial Sequence: Synthetic oligonucleotide
gcuaauaggagauaagcga

SEQ ID NO: 1803244 - RNA, 19 nt, Artificial Sequence
  Description of Artificial Sequence: Synthetic oligonucleotide
ugaacuguacaagaguuau

SEQ ID NO: 1803245 - RNA, 19 nt, Artificial Sequence
  Description of Artificial Sequence: Synthetic oligonucleotide
cuagaagucagccucagaa

SEQ ID NO: 1803246 - RNA, 19 nt, Artificial Sequence
  Description of Artificial Sequence: Synthetic oligonucleotide
uucagagcuugaaaauggc

SEQ ID NO: 1803247 - RNA, 19 nt, Artificial Sequence
  Description of Artificial Sequence: Synthetic oligonucleotide
agcaauauagaaucauuuu

SEQ ID NO: 1803248 - RNA, 19 nt, Artificial Sequence
  Description of Artificial Sequence: Synthetic oligonucleotide
cagcuaauaggagauaagc

SEQ ID NO: 1803249 - RNA, 19 nt, Artificial Sequence
  Description of Artificial Sequence: Synthetic oligonucleotide
aaaaugggcaggguggaga

SEQ ID NO: 1803250 - RNA, 19 nt, Artificial Sequence
  Description of Artificial Sequence: Synthetic oligonucleotide
uccaucaauaccacccaga

SEQ ID NO: 1803251 - RNA, 19 nt, Artificial Sequence
  Description of Artificial Sequence: Synthetic oligonucleotide
aaccacauguacuucugau

SEQ ID NO: 1803252 - RNA, 19 nt, Artificial Sequence
  Description of Artificial Sequence: Synthetic oligonucleotide
auuaugguuuagaugaacu

SEQ ID NO: 1803253 - RNA, 19 nt, Artificial Sequence
  Description of Artificial Sequence: Synthetic oligonucleotide
ugcggauuugugaacuuca

SEQ ID NO: 1803254 - RNA, 19 nt, Artificial Sequence
  Description of Artificial Sequence: Synthetic oligonucleotide
ucgaacaagucgguuaaag

SEQ ID NO: 1803255 - RNA, 19 nt, Artificial Sequence
  Description of Artificial Sequence: Synthetic oligonucleotide
aauugaguccuacuacaua

SEQ ID NO: 1803256 - RNA, 19 nt, Artificial Sequence
  Description of Artificial Sequence: Synthetic oligonucleotide
aauaggagauaagcgagaa

SEQ ID NO: 1803257 - RNA, 19 nt, Artificial Sequence
  Description of Artificial Sequence: Synthetic oligonucleotide
caggauguacaaaacuuug

SEQ ID NO: 1803258 - RNA, 19 nt, Artificial Sequence
  Description of Artificial Sequence: Synthetic oligonucleotide
aguagauaaaugguaacaa

SEQ ID NO: 1803259 - RNA, 19 nt, Artificial Sequence
  Description of Artificial Sequence: Synthetic oligonucleotide
uaccaggcaccauacuugg

SEQ ID NO: 1803260 - RNA, 19 nt, Artificial Sequence
  Description of Artificial Sequence: Synthetic oligonucleotide
cuaaaaguagauaaauggu

SEQ ID NO: 1803261 - RNA, 19 nt, Artificial Sequence
  Description of Artificial Sequence: Synthetic oligonucleotide
cuacuuaaucacugacugg

SEQ ID NO: 1803262 - RNA, 19 nt, Artificial Sequence
  Description of Artificial Sequence: Synthetic oligonucleotide
uuaaagugggaaagaccca

SEQ ID NO: 1803263 - RNA, 19 nt, Artificial Sequence
  Description of Artificial Sequence: Synthetic oligonucleotide
aguacaagaccuuccuaca

SEQ ID NO: 1803264 - RNA, 19 nt, Artificial Sequence
  Description of Artificial Sequence: Synthetic oligonucleotide
aaacacgauagacgagaug

SEQ ID NO: 1803265 - RNA, 19 nt, Artificial Sequence
  Description of Artificial Sequence: Synthetic oligonucleotide
uccuacuacauaccaggca

SEQ ID NO: 1803266 - RNA, 19 nt, Artificial Sequence
  Description of Artificial Sequence: Synthetic oligonucleotide
gacacugcggauuugugaa

SEQ ID NO: 1803267 - RNA, 19 nt, Artificial Sequence
  Description of Artificial Sequence: Synthetic oligonucleotide
uacacaaaagguccaggau

SEQ ID NO: 1803268 - RNA, 19 nt, Artificial Sequence
  Description of Artificial Sequence: Synthetic oligonucleotide
agccuauacaacuuguaau

SEQ ID NO: 1803269 - RNA, 19 nt, Artificial Sequence
  Description of Artificial Sequence: Synthetic oligonucleotide
caacuacuaacuucaggag

SEQ ID NO: 1803270 - RNA, 19 nt, Artificial Sequence
  Description of Artificial Sequence: Synthetic oligonucleotide
augaaaaguaugucaaauu

SEQ ID NO: 1803271 - RNA, 19 nt, Artificial Sequence
  Description of Artificial Sequence: Synthetic oligonucleotide
acauauguagucugacacu

SEQ ID NO: 1803272 - RNA, 19 nt, Artificial Sequence
  Description of Artificial Sequence: Synthetic oligonucleotide
auaagcgagaaguuccuau

SEQ ID NO: 1803273 - RNA, 19 nt, Artificial Sequence
  Description of Artificial Sequence: Synthetic oligonucleotide
uaauaacacgauucugaac

SEQ ID NO: 1803274 - RNA, 19 nt, Artificial Sequence
  Description of Artificial Sequence: Synthetic oligonucleotide
aaauccgccacuccaucaa

SEQ ID NO: 1803275 - RNA, 19 nt, Artificial Sequence
  Description of Artificial Sequence: Synthetic oligonucleotide
auagacgagaugcuacaca

SEQ ID NO: 1803276 - RNA, 19 nt, Artificial Sequence
  Description of Artificial Sequence: Synthetic oligonucleotide
aauaaccccagcugauaaa

SEQ ID NO: 1803277 - RNA, 19 nt, Artificial Sequence
  Description of Artificial Sequence: Synthetic oligonucleotide
uacacuuuauuaaggucau

SEQ ID NO: 1803278 - RNA, 19 nt, Artificial Sequence
  Description of Artificial Sequence: Synthetic oligonucleotide
uugaguccuacuacauacc

SEQ ID NO: 1803279 - RNA, 19 nt, Artificial Sequence
  Description of Artificial Sequence: Synthetic oligonucleotide
uacauaccaggcaccauac

SEQ ID NO: 1803280 - RNA, 19 nt, Artificial Sequence
  Description of Artificial Sequence: Synthetic oligonucleotide
acgauagacgagaugcuac

SEQ ID NO: 1803281 - RNA, 19 nt, Artificial Sequence
  Description of Artificial Sequence: Synthetic oligonucleotide
aggaugacugcaguuuuac

SEQ ID NO: 1803282 - RNA, 19 nt, Artificial Sequence
  Description of Artificial Sequence: Synthetic oligonucleotide
uuuggaugaaaaguauguc

SEQ ID NO: 1803283 - RNA, 19 nt, Artificial Sequence
  Description of Artificial Sequence: Synthetic oligonucleotide
caaaacacgauagacgaga

SEQ ID NO: 1803284 - RNA, 19 nt, Artificial Sequence
  Description of Artificial Sequence: Synthetic oligonucleotide
acaacaggauguacaaaac

SEQ ID NO: 1803285 - RNA, 19 nt, Artificial Sequence
  Description of Artificial Sequence: Synthetic oligonucleotide
gucgguuaaagugggaaag

SEQ ID NO: 1803286 - RNA, 19 nt, Artificial Sequence
  Description of Artificial Sequence: Synthetic oligonucleotide
uuccuauuaugguuuagau

SEQ ID NO: 1803287 - RNA, 19 nt, Artificial Sequence
  Description of Artificial Sequence: Synthetic oligonucleotide
auacaagcaauaggaauug

SEQ ID NO: 1803288 - RNA, 19 nt, Artificial Sequence
  Description of Artificial Sequence: Synthetic oligonucleotide
uauuaugguuuagaugaac

SEQ ID NO: 1803289 - RNA, 19 nt, Artificial Sequence
  Description of Artificial Sequence: Synthetic oligonucleotide
aaauggcaucucagaaacc

SEQ ID NO: 1803290 - RNA, 19 nt, Artificial Sequence
  Description of Artificial Sequence: Synthetic oligonucleotide
uuccuacauauguagucug

SEQ ID NO: 1803291 - RNA, 19 nt, Artificial Sequence
  Description of Artificial Sequence: Synthetic oligonucleotide
ccuacuacauaccaggcac

SEQ ID NO: 1803292 - RNA, 19 nt, Artificial Sequence
  Description of Artificial Sequence: Synthetic oligonucleotide
aaaucuggguauugguguu

SEQ ID NO: 1803293 - RNA, 19 nt, Artificial Sequence
  Description of Artificial Sequence: Synthetic oligonucleotide
aagucgguuaaagugggaa

SEQ ID NO: 1803294 - RNA, 19 nt, Artificial Sequence
  Description of Artificial Sequence: Synthetic oligonucleotide
gauuaugauaauccagagu

SEQ ID NO: 1803295 - RNA, 19 nt, Artificial Sequence
  Description of Artificial Sequence: Synthetic oligonucleotide
aagugggaaagacccacaa

SEQ ID NO: 1803296 - RNA, 19 nt, Artificial Sequence
  Description of Artificial Sequence: Synthetic oligonucleotide
auaggagauaagcgagaag

SEQ ID NO: 1803297 - RNA, 19 nt, Artificial Sequence
  Description of Artificial Sequence: Synthetic oligonucleotide
guaacaacugacacaguac

SEQ ID NO: 1803298 - RNA, 19 nt, Artificial Sequence
  Description of Artificial Sequence: Synthetic oligonucleotide
auaacacgauucugaacug

SEQ ID NO: 1803299 - RNA, 19 nt, Artificial Sequence
  Description of Artificial Sequence: Synthetic oligonucleotide
agaugaacuccuaagacua

SEQ ID NO: 1803300 - RNA, 19 nt, Artificial Sequence
  Description of Artificial Sequence: Synthetic oligonucleotide
acgauucugaacuguacaa

SEQ ID NO: 1803301 - RNA, 19 nt, Artificial Sequence
  Description of Artificial Sequence: Synthetic oligonucleotide
uggaggaaaauccgccacu

SEQ ID NO: 1803302 - RNA, 19 nt, Artificial Sequence
  Description of Artificial Sequence: Synthetic oligonucleotide
agguuugacuucaaucuuc

SEQ ID NO: 1803303 - RNA, 19 nt, Artificial Sequence
  Description of Artificial Sequence: Synthetic oligonucleotide
gaauuggaccaaaugauua

SEQ ID NO: 1803304 - RNA, 19 nt, Artificial Sequence
  Description of Artificial Sequence: Synthetic oligonucleotide
guaauacauaauuacacuu

SEQ ID NO: 1803305 - RNA, 19 nt, Artificial Sequence
  Description of Artificial Sequence: Synthetic oligonucleotide
uccuucugauucaaaacuu

SEQ ID NO: 1803306 - RNA, 19 nt, Artificial Sequence
  Description of Artificial Sequence: Synthetic oligonucleotide
aggaauuggaccaaaugau

SEQ ID NO: 1803307 - RNA, 19 nt, Artificial Sequence
  Description of Artificial Sequence: Synthetic oligonucleotide
cuacacaaaagguccagga

SEQ ID NO: 1803308 - RNA, 19 nt, Artificial Sequence
  Description of Artificial Sequence: Synthetic oligonucleotide
cugauucaaaacuuguaaa

SEQ ID NO: 1803309 - RNA, 19 nt, Artificial Sequence
  Description of Artificial Sequence: Synthetic oligonucleotide
acuacuaacuucaggaguu

SEQ ID NO: 1803310 - RNA, 19 nt, Artificial Sequence
  Description of Artificial Sequence: Synthetic oligonucleotide
acaagucgguuaaaguggg

SEQ ID NO: 1803311 - RNA, 19 nt, Artificial Sequence
  Description of Artificial Sequence: Synthetic oligonucleotide
ccacaaaucaguccuuugg

SEQ ID NO: 1803312 - RNA, 19 nt, Artificial Sequence
  Description of Artificial Sequence: Synthetic oligonucleotide
gaugaaaaguaugucaaau

SEQ ID NO: 1803313 - RNA, 19 nt, Artificial Sequence
  Description of Artificial Sequence: Synthetic oligonucleotide
aagcgagaaguuccuauua

SEQ ID NO: 1803314 - RNA, 19 nt, Artificial Sequence
  Description of Artificial Sequence: Synthetic oligonucleotide
cuacuacauaccaggcacc

SEQ ID NO: 1803315 - RNA, 19 nt, Artificial Sequence
  Description of Artificial Sequence: Synthetic oligonucleotide
uggaccaaaugauuaugau

SEQ ID NO: 1803316 - RNA, 19 nt, Artificial Sequence
  Description of Artificial Sequence: Synthetic oligonucleotide
uccagagugaguguuuuau

SEQ ID NO: 1803317 - RNA, 19 nt, Artificial Sequence
  Description of Artificial Sequence: Synthetic oligonucleotide
uacaagcaauaggaauugg

SEQ ID NO: 1803318 - RNA, 19 nt, Artificial Sequence
  Description of Artificial Sequence: Synthetic oligonucleotide
acaagcaauaggaauugga

SEQ ID NO: 1803319 - RNA, 19 nt, Artificial Sequence
  Description of Artificial Sequence: Synthetic oligonucleotide
caaaucaguccuuugguua

SEQ ID NO: 1803320 - RNA, 19 nt, Artificial Sequence
  Description of Artificial Sequence: Synthetic oligonucleotide
gauguacaaaacuuuggau

SEQ ID NO: 1803321 - RNA, 19 nt, Artificial Sequence
  Description of Artificial Sequence: Synthetic oligonucleotide
acaaaucaguccuuugguu

SEQ ID NO: 1803322 - RNA, 19 nt, Artificial Sequence
  Description of Artificial Sequence: Synthetic oligonucleotide
augguuuagaugaacuccu

SEQ ID NO: 1803323 - RNA, 19 nt, Artificial Sequence
  Description of Artificial Sequence: Synthetic oligonucleotide
auguacuucugauggcaug

SEQ ID NO: 1803324 - RNA, 19 nt, Artificial Sequence
  Description of Artificial Sequence: Synthetic oligonucleotide
uaagcgagaaguuccuauu

SEQ ID NO: 1803325 - RNA, 19 nt, Artificial Sequence
  Description of Artificial Sequence: Synthetic oligonucleotide
aguccuuugguuaccaggu

SEQ ID NO: 1803326 - RNA, 19 nt, Artificial Sequence
  Description of Artificial Sequence: Synthetic oligonucleotide
gaaaauccgccacuccauc

SEQ ID NO: 1803327 - RNA, 19 nt, Artificial Sequence
  Description of Artificial Sequence: Synthetic oligonucleotide
ugguuaccagguuugacuu

SEQ ID NO: 1803328 - RNA, 19 nt, Artificial Sequence
  Description of Artificial Sequence: Synthetic oligonucleotide
auaccaggcaccauacuug

SEQ ID NO: 1803329 - RNA, 19 nt, Artificial Sequence
  Description of Artificial Sequence: Synthetic oligonucleotide
cagagugaguguuuuauaa

SEQ ID NO: 1803330 - RNA, 19 nt, Artificial Sequence
  Description of Artificial Sequence: Synthetic oligonucleotide
gguaacaacugacacagua

SEQ ID NO: 1803331 - RNA, 19 nt, Artificial Sequence
  Description of Artificial Sequence: Synthetic oligonucleotide
uccgccacuccaucaauac

SEQ ID NO: 1803332 - RNA, 19 nt, Artificial Sequence
  Description of Artificial Sequence: Synthetic oligonucleotide
uguuuuaggcagugauuaa

SEQ ID NO: 1803333 - RNA, 19 nt, Artificial Sequence
  Description of Artificial Sequence: Synthetic oligonucleotide
gaggaaaauccgccacucc

SEQ ID NO: 1803334 - RNA, 19 nt, Artificial Sequence
  Description of Artificial Sequence: Synthetic oligonucleotide
auaaccccagcugauaaaa

SEQ ID NO: 1803335 - RNA, 19 nt, Artificial Sequence
  Description of Artificial Sequence: Synthetic oligonucleotide
uuaauaaccccagcugaua

SEQ ID NO: 1803336 - RNA, 19 nt, Artificial Sequence
  Description of Artificial Sequence: Synthetic oligonucleotide
gguaauacauaauuacacu

SEQ ID NO: 1803337 - RNA, 19 nt, Artificial Sequence
  Description of Artificial Sequence: Synthetic oligonucleotide
auuauacaagcaauaggaa

SEQ ID NO: 1803338 - RNA, 19 nt, Artificial Sequence
  Description of Artificial Sequence: Synthetic oligonucleotide
agugugcucacagaaaauu

SEQ ID NO: 1803339 - RNA, 19 nt, Artificial Sequence
  Description of Artificial Sequence: Synthetic oligonucleotide
ugacuucaaucuuccaaaa

SEQ ID NO: 1803340 - RNA, 19 nt, Artificial Sequence
  Description of Artificial Sequence: Synthetic oligonucleotide
gaaaccacaaccacaugua

SEQ ID NO: 1803341 - RNA, 19 nt, Artificial Sequence
  Description of Artificial Sequence: Synthetic oligonucleotide
uuugguuaccagguuugac

SEQ ID NO: 1803342 - RNA, 19 nt, Artificial Sequence
  Description of Artificial Sequence: Synthetic oligonucleotide
guuaccagguuugacuuca

SEQ ID NO: 1803343 - RNA, 19 nt, Artificial Sequence
  Description of Artificial Sequence: Synthetic oligonucleotide
gguuaaagugggaaagacc

SEQ ID NO: 1803344 - RNA, 19 nt, Artificial Sequence
  Description of Artificial Sequence: Synthetic oligonucleotide
cccagaguguuuuaggcag

SEQ ID NO: 1803345 - RNA, 19 nt, Artificial Sequence
  Description of Artificial Sequence: Synthetic oligonucleotide
agucgguuaaagugggaaa

SEQ ID NO: 1803346 - RNA, 19 nt, Artificial Sequence
  Description of Artificial Sequence: Synthetic oligonucleotide
gaguccuacuacauaccag

SEQ ID NO: 1803347 - RNA, 19 nt, Artificial Sequence
  Description of Artificial Sequence: Synthetic oligonucleotide
guuccuauuaugguuuaga

SEQ ID NO: 1803348 - RNA, 19 nt, Artificial Sequence
  Description of Artificial Sequence: Synthetic oligonucleotide
acccagaguguuuuaggca

SEQ ID NO: 1803349 - RNA, 19 nt, Artificial Sequence
  Description of Artificial Sequence: Synthetic oligonucleotide
agcgagaaguuccuauuau

SEQ ID NO: 1803350 - RNA, 19 nt, Artificial Sequence
  Description of Artificial Sequence: Synthetic oligonucleotide
cuauacaacuuguaauucu

SEQ ID NO: 1803351 - RNA, 19 nt, Artificial Sequence
  Description of Artificial Sequence: Synthetic oligonucleotide
acacgauucugaacuguac

SEQ ID NO: 1803352 - RNA, 19 nt, Artificial Sequence
  Description of Artificial Sequence: Synthetic oligonucleotide
ucgguuaaagugggaaaga

SEQ ID NO: 1803353 - RNA, 19 nt, Artificial Sequence
  Description of Artificial Sequence: Synthetic oligonucleotide
acacugcggauuugugaac

SEQ ID NO: 1803354 - RNA, 19 nt, Artificial Sequence
  Description of Artificial Sequence: Synthetic oligonucleotide
cuguacaagaguuauuuau

SEQ ID NO: 1803355 - RNA, 19 nt, Artificial Sequence
  Description of Artificial Sequence: Synthetic oligonucleotide
cacgauucugaacuguaca

SEQ ID NO: 1803356 - RNA, 19 nt, Artificial Sequence
  Description of Artificial Sequence: Synthetic oligonucleotide
caucuuaauaaccccagcu

SEQ ID NO: 1803357 - RNA, 19 nt, Artificial Sequence
  Description of Artificial Sequence: Synthetic oligonucleotide
aaaacacgauagacgagau

SEQ ID NO: 1803358 - RNA, 19 nt, Artificial Sequence
  Description of Artificial Sequence: Synthetic oligonucleotide
gauagacgagaugcuacac

SEQ ID NO: 1803359 - RNA, 19 nt, Artificial Sequence
  Description of Artificial Sequence: Synthetic oligonucleotide
cuuggaggaaaauccgcca

SEQ ID NO: 1803360 - RNA, 19 nt, Artificial Sequence
  Description of Artificial Sequence: Synthetic oligonucleotide
gcucuuagugugcucacag

SEQ ID NO: 1803361 - RNA, 19 nt, Artificial Sequence
  Description of Artificial Sequence: Synthetic oligonucleotide
aaagccuauacaacuugua

SEQ ID NO: 1803362 - RNA, 19 nt, Artificial Sequence
  Description of Artificial Sequence: Synthetic oligonucleotide
gaacaaacccagcaauaua

SEQ ID NO: 1803363 - RNA, 19 nt, Artificial Sequence
  Description of Artificial Sequence: Synthetic oligonucleotide
gaguguuuuaggcagugau

SEQ ID NO: 1803364 - RNA, 19 nt, Artificial Sequence
  Description of Artificial Sequence: Synthetic oligonucleotide
cauuucaauugaguccuac

SEQ ID NO: 1803365 - RNA, 19 nt, Artificial Sequence
  Description of Artificial Sequence: Synthetic oligonucleotide
aacacgauucugaacugua

SEQ ID NO: 1803366 - RNA, 19 nt, Artificial Sequence
  Description of Artificial Sequence: Synthetic oligonucleotide
cagcaaaugccacuguaca

SEQ ID NO: 1803367 - RNA, 19 nt, Artificial Sequence
  Description of Artificial Sequence: Synthetic oligonucleotide
uacuucugauggcaugcaa

SEQ ID NO: 1803368 - RNA, 19 nt, Artificial Sequence
  Description of Artificial Sequence: Synthetic oligonucleotide
aaagugggaaagacccaca

SEQ ID NO: 1803369 - RNA, 19 nt, Artificial Sequence
  Description of Artificial Sequence: Synthetic oligonucleotide
cuacauaccaggcaccaua

SEQ ID NO: 1803370 - RNA, 19 nt, Artificial Sequence
  Description of Artificial Sequence: Synthetic oligonucleotide
agugggaaagacccacaaa

SEQ ID NO: 1803371 - RNA, 19 nt, Artificial Sequence
  Description of Artificial Sequence: Synthetic oligonucleotide
uagucugacacugcggauu

SEQ ID NO: 1803372 - RNA, 19 nt, Artificial Sequence
  Description of Artificial Sequence: Synthetic oligonucleotide
aagucagccucagaacaau

SEQ ID NO: 1803373 - RNA, 19 nt, Artificial Sequence
  Description of Artificial Sequence: Synthetic oligonucleotide
acaaaacacgauagacgag

SEQ ID NO: 1803374 - RNA, 19 nt, Artificial Sequence
  Description of Artificial Sequence: Synthetic oligonucleotide
aaguuccuauuaugguuua

SEQ ID NO: 1803375 - RNA, 19 nt, Artificial Sequence
  Description of Artificial Sequence: Synthetic oligonucleotide
aauccgccacuccaucaau

SEQ ID NO: 1803376 - RNA, 19 nt, Artificial Sequence
  Description of Artificial Sequence: Synthetic oligonucleotide
acaggauguacaaaacuuu

SEQ ID NO: 1803377 - RNA, 19 nt, Artificial Sequence
  Description of Artificial Sequence: Synthetic oligonucleotide
auguagucugacacugcgg

SEQ ID NO: 1803378 - RNA, 19 nt, Artificial Sequence
  Description of Artificial Sequence: Synthetic oligonucleotide
ccuucugauucaaaacuug

SEQ ID NO: 1803379 - RNA, 19 nt, Artificial Sequence
  Description of Artificial Sequence: Synthetic oligonucleotide
uagugugcucacagaaaau

SEQ ID NO: 1803380 - RNA, 19 nt, Artificial Sequence
  Description of Artificial Sequence: Synthetic oligonucleotide
accacccagaguguuuuag

SEQ ID NO: 1803381 - RNA, 19 nt, Artificial Sequence
  Description of Artificial Sequence: Synthetic oligonucleotide
ggaccaaaugauuaugaua

SEQ ID NO: 1803382 - RNA, 19 nt, Artificial Sequence
  Description of Artificial Sequence: Synthetic oligonucleotide
agauaagcgagaaguuccu

SEQ ID NO: 1803383 - RNA, 19 nt, Artificial Sequence
  Description of Artificial Sequence: Synthetic oligonucleotide
uccuaagacuaugaucuuu

SEQ ID NO: 1803384 - RNA, 19 nt, Artificial Sequence
  Description of Artificial Sequence: Synthetic oligonucleotide
guacaagaguuauuuauuu

SEQ ID NO: 1803385 - RNA, 19 nt, Artificial Sequence
  Description of Artificial Sequence: Synthetic oligonucleotide
ucacugacugguacagcua

SEQ ID NO: 1803386 - RNA, 19 nt, Artificial Sequence
  Description of Artificial Sequence: Synthetic oligonucleotide
ccuuugguuaccagguuug

SEQ ID NO: 1803387 - RNA, 19 nt, Artificial Sequence
  Description of Artificial Sequence: Synthetic oligonucleotide
guaauucuacuuaaucacu

SEQ ID NO: 1803388 - RNA, 19 nt, Artificial Sequence
  Description of Artificial Sequence: Synthetic oligonucleotide
augauaauccagagugagu

SEQ ID NO: 1803389 - RNA, 19 nt, Artificial Sequence
  Description of Artificial Sequence: Synthetic oligonucleotide
ugguuuagaugaacuccua

SEQ ID NO: 1803390 - RNA, 19 nt, Artificial Sequence
  Description of Artificial Sequence: Synthetic oligonucleotide
accaaaugauuaugauaau

SEQ ID NO: 1803391 - RNA, 19 nt, Artificial Sequence
  Description of Artificial Sequence: Synthetic oligonucleotide
aguuccuauuaugguuuag

SEQ ID NO: 1803392 - RNA, 19 nt, Artificial Sequence
  Description of Artificial Sequence: Synthetic oligonucleotide
caaauuguauuuagucacu

SEQ ID NO: 1803393 - RNA, 19 nt, Artificial Sequence
  Description of Artificial Sequence: Synthetic oligonucleotide
aaccuagaagucagccuca

SEQ ID NO: 1803394 - RNA, 19 nt, Artificial Sequence
  Description of Artificial Sequence: Synthetic oligonucleotide
aggucauaaaccagcaaua

SEQ ID NO: 1803395 - RNA, 19 nt, Artificial Sequence
  Description of Artificial Sequence: Synthetic oligonucleotide
cuuaauaaccccagcugau

SEQ ID NO: 1803396 - RNA, 19 nt, Artificial Sequence
  Description of Artificial Sequence: Synthetic oligonucleotide
gagaugcuacacaaaaggu

SEQ ID NO: 1803397 - RNA, 19 nt, Artificial Sequence
  Description of Artificial Sequence: Synthetic oligonucleotide
aguguuuuaggcagugauu

SEQ ID NO: 1803398 - RNA, 19 nt, Artificial Sequence
  Description of Artificial Sequence: Synthetic oligonucleotide
acaguacaagaccuuccua

SEQ ID NO: 1803399 - RNA, 19 nt, Artificial Sequence
  Description of Artificial Sequence: Synthetic oligonucleotide
cuaacuucaggaguuauuu

SEQ ID NO: 1803400 - RNA, 19 nt, Artificial Sequence
  Description of Artificial Sequence: Synthetic oligonucleotide
gugcucacagaaaauuaca

SEQ ID NO: 1803401 - RNA, 19 nt, Artificial Sequence
  Description of Artificial Sequence: Synthetic oligonucleotide
acuguacacacugccaaua

SEQ ID NO: 1803402 - RNA, 19 nt, Artificial Sequence
  Description of Artificial Sequence: Synthetic oligonucleotide
caugcaaggucuuccuaaa

SEQ ID NO: 1803403 - RNA, 19 nt, Artificial Sequence
  Description of Artificial Sequence: Synthetic oligonucleotide
gaaggauaucaagauuugu

SEQ ID NO: 1803404 - RNA, 19 nt, Artificial Sequence
  Description of Artificial Sequence: Synthetic oligonucleotide
acauaccaggcaccauacu

SEQ ID NO: 1803405 - RNA, 19 nt, Artificial Sequence
  Description of Artificial Sequence: Synthetic oligonucleotide
cagaguguuuuaggcagug

SEQ ID NO: 1803406 - RNA, 19 nt, Artificial Sequence
  Description of Artificial Sequence: Synthetic oligonucleotide
gcaucuuaauaaccccagc

SEQ ID NO: 1803407 - RNA, 19 nt, Artificial Sequence
  Description of Artificial Sequence: Synthetic oligonucleotide
ugcucuuagugugcucaca

SEQ ID NO: 1803408 - RNA, 19 nt, Artificial Sequence
  Description of Artificial Sequence: Synthetic oligonucleotide
cagcaauauagaaucauuu

SEQ ID NO: 1803409 - RNA, 19 nt, Artificial Sequence
  Description of Artificial Sequence: Synthetic oligonucleotide
accccagcugauaaaagaa

SEQ ID NO: 1803410 - RNA, 19 nt, Artificial Sequence
  Description of Artificial Sequence: Synthetic oligonucleotide
cuauuaugguuuagaugaa

SEQ ID NO: 1803411 - RNA, 19 nt, Artificial Sequence
  Description of Artificial Sequence: Synthetic oligonucleotide
cuuccuacauauguagucu

SEQ ID NO: 1803412 - RNA, 19 nt, Artificial Sequence
  Description of Artificial Sequence: Synthetic oligonucleotide
guccuacuacauaccaggc

SEQ ID NO: 1803413 - RNA, 19 nt, Artificial Sequence
  Description of Artificial Sequence: Synthetic oligonucleotide
gcaugcaaggucuuccuaa

SEQ ID NO: 1803414 - RNA, 19 nt, Artificial Sequence
  Description of Artificial Sequence: Synthetic oligonucleotide
cucuuagugugcucacaga

SEQ ID NO: 1803415 - RNA, 19 nt, Artificial Sequence
  Description of Artificial Sequence: Synthetic oligonucleotide
ccacccagaguguuuuagg

SEQ ID NO: 1803416 - RNA, 19 nt, Artificial Sequence
  Description of Artificial Sequence: Synthetic oligonucleotide
accuagaagucagccucag

SEQ ID NO: 1803417 - RNA, 19 nt, Artificial Sequence
  Description of Artificial Sequence: Synthetic oligonucleotide
augcaaggucuuccuaaaa

SEQ ID NO: 1803418 - RNA, 19 nt, Artificial Sequence
  Description of Artificial Sequence: Synthetic oligonucleotide
aaaugccacuguacacacu

SEQ ID NO: 1803419 - RNA, 19 nt, Artificial Sequence
  Description of Artificial Sequence: Synthetic oligonucleotide
cacaguacaagaccuuccu

SEQ ID NO: 1803420 - RNA, 19 nt, Artificial Sequence
  Description of Artificial Sequence: Synthetic oligonucleotide
gaacuccuaagacuaugau

SEQ ID NO: 1803421 - RNA, 19 nt, Artificial Sequence
  Description of Artificial Sequence: Synthetic oligonucleotide
gccaacuagggauuuucga

SEQ ID NO: 1803422 - RNA, 19 nt, Artificial Sequence
  Description of Artificial Sequence: Synthetic oligonucleotide
cugcugguaauacauaauu

SEQ ID NO: 1803423 - RNA, 19 nt, Artificial Sequence
  Description of Artificial Sequence: Synthetic oligonucleotide
ccuacauauguagucugac

SEQ ID NO: 1803424 - RNA, 19 nt, Artificial Sequence
  Description of Artificial Sequence: Synthetic oligonucleotide
gccuauacaacuuguaauu

SEQ ID NO: 1803425 - RNA, 19 nt, Artificial Sequence
  Description of Artificial Sequence: Synthetic oligonucleotide
agaguguuuuaggcaguga

SEQ ID NO: 1803426 - RNA, 19 nt, Artificial Sequence
  Description of Artificial Sequence: Synthetic oligonucleotide
uuaccagguuugacuucaa

SEQ ID NO: 1803427 - RNA, 19 nt, Artificial Sequence
  Description of Artificial Sequence: Synthetic oligonucleotide
gguacagcuaauaggagau

SEQ ID NO: 1803428 - RNA, 19 nt, Artificial Sequence
  Description of Artificial Sequence: Synthetic oligonucleotide
cacagcaaaugccacugua

SEQ ID NO: 1803429 - RNA, 19 nt, Artificial Sequence
  Description of Artificial Sequence: Synthetic oligonucleotide
agaccuuccuacauaugua

SEQ ID NO: 1803430 - RNA, 19 nt, Artificial Sequence
  Description of Artificial Sequence: Synthetic oligonucleotide
ugguaacaacugacacagu

SEQ ID NO: 1803431 - RNA, 19 nt, Artificial Sequence
  Description of Artificial Sequence: Synthetic oligonucleotide
accuuccuacauauguagu

SEQ ID NO: 1803432 - RNA, 19 nt, Artificial Sequence
  Description of Artificial Sequence: Synthetic oligonucleotide
acacgauagacgagaugcu

SEQ ID NO: 1803433 - RNA, 19 nt, Artificial Sequence
  Description of Artificial Sequence: Synthetic oligonucleotide
cugcggauuugugaacuuc

SEQ ID NO: 1803434 - RNA, 19 nt, Artificial Sequence
  Description of Artificial Sequence: Synthetic oligonucleotide
ggaggaaaauccgccacuc

SEQ ID NO: 1803435 - RNA, 19 nt, Artificial Sequence
  Description of Artificial Sequence: Synthetic oligonucleotide
acugcggauuugugaacuu

SEQ ID NO: 1803436 - RNA, 19 nt, Artificial Sequence
  Description of Artificial Sequence: Synthetic oligonucleotide
aaacacccugcugguaaua

SEQ ID NO: 1803437 - RNA, 19 nt, Artificial Sequence
  Description of Artificial Sequence: Synthetic oligonucleotide
ggccaacuagggauuuucg

SEQ ID NO: 1803438 - RNA, 19 nt, Artificial Sequence
  Description of Artificial Sequence: Synthetic oligonucleotide
gauaagcgagaaguuccua

SEQ ID NO: 1803439 - RNA, 19 nt, Artificial Sequence
  Description of Artificial Sequence: Synthetic oligonucleotide
guacaagaccuuccuacau

SEQ ID NO: 1803440 - RNA, 19 nt, Artificial Sequence
  Description of Artificial Sequence: Synthetic oligonucleotide
caauugaguccuacuacau

SEQ ID NO: 1803441 - RNA, 19 nt, Artificial Sequence
  Description of Artificial Sequence: Synthetic oligonucleotide
cugacugguacagcuaaua

SEQ ID NO: 1803442 - RNA, 19 nt, Artificial Sequence
  Description of Artificial Sequence: Synthetic oligonucleotide
acuuaaucacugacuggua

SEQ ID NO: 1803443 - RNA, 19 nt, Artificial Sequence
  Description of Artificial Sequence: Synthetic oligonucleotide
cuuugguuaccagguuuga

SEQ ID NO: 1803444 - RNA, 19 nt, Artificial Sequence
  Description of Artificial Sequence: Synthetic oligonucleotide
acuacauaccaggcaccau

SEQ ID NO: 1803445 - RNA, 19 nt, Artificial Sequence
  Description of Artificial Sequence: Synthetic oligonucleotide
cgauucugaacuguacaag

SEQ ID NO: 1803446 - RNA, 19 nt, Artificial Sequence
  Description of Artificial Sequence: Synthetic oligonucleotide
ggaugacugcaguuuuaca

SEQ ID NO: 1803447 - RNA, 19 nt, Artificial Sequence
  Description of Artificial Sequence: Synthetic oligonucleotide
uucgaacaagucgguuaaa

SEQ ID NO: 1803448 - RNA, 19 nt, Artificial Sequence
  Description of Artificial Sequence: Synthetic oligonucleotide
gguuaccagguuugacuuc

SEQ ID NO: 1803449 - RNA, 19 nt, Artificial Sequence
  Description of Artificial Sequence: Synthetic oligonucleotide
aggcaccauacuuggccaa

SEQ ID NO: 1803450 - RNA, 19 nt, Artificial Sequence
  Description of Artificial Sequence: Synthetic oligonucleotide
aucuggguauugguguuuu

SEQ ID NO: 1803451 - RNA, 19 nt, Artificial Sequence
  Description of Artificial Sequence: Synthetic oligonucleotide
gcggauuugugaacuucag

SEQ ID NO: 1803452 - RNA, 19 nt, Artificial Sequence
  Description of Artificial Sequence: Synthetic oligonucleotide
cacgauagacgagaugcua

SEQ ID NO: 1803453 - RNA, 19 nt, Artificial Sequence
  Description of Artificial Sequence: Synthetic oligonucleotide
caagucgguuaaaguggga

SEQ ID NO: 1803454 - RNA, 19 nt, Artificial Sequence
  Description of Artificial Sequence: Synthetic oligonucleotide
cccacaaaucaguccuuug

SEQ ID NO: 1803455 - RNA, 19 nt, Artificial Sequence
  Description of Artificial Sequence: Synthetic oligonucleotide
acccacaaaucaguccuuu

SEQ ID NO: 1803456 - RNA, 19 nt, Artificial Sequence
  Description of Artificial Sequence: Synthetic oligonucleotide
caucaauaccacccagagu

SEQ ID NO: 1803457 - RNA, 19 nt, Artificial Sequence
  Description of Artificial Sequence: Synthetic oligonucleotide
cauguacuucugauggcau

SEQ ID NO: 1803458 - RNA, 19 nt, Artificial Sequence
  Description of Artificial Sequence: Synthetic oligonucleotide
agacgagaugcuacacaaa

SEQ ID NO: 1803459 - RNA, 19 nt, Artificial Sequence
  Description of Artificial Sequence: Synthetic oligonucleotide
acccagcaauauagaauca

SEQ ID NO: 1803460 - RNA, 19 nt, Artificial Sequence
  Description of Artificial Sequence: Synthetic oligonucleotide
gaugaacuccuaagacuau

SEQ ID NO: 1803461 - RNA, 19 nt, Artificial Sequence
  Description of Artificial Sequence: Synthetic oligonucleotide
ccuaagacuaugaucuuuu

SEQ ID NO: 1803462 - RNA, 19 nt, Artificial Sequence
  Description of Artificial Sequence: Synthetic oligonucleotide
ggaauuggaccaaaugauu

SEQ ID NO: 1803463 - RNA, 19 nt, Artificial Sequence
  Description of Artificial Sequence: Synthetic oligonucleotide
cgauagacgagaugcuaca

SEQ ID NO: 1803464 - RNA, 19 nt, Artificial Sequence
  Description of Artificial Sequence: Synthetic oligonucleotide
agucagccucagaacaaua

SEQ ID NO: 1803465 - RNA, 19 nt, Artificial Sequence
  Description of Artificial Sequence: Synthetic oligonucleotide
ggcaccauacuuggccaac

SEQ ID NO: 1803466 - RNA, 19 nt, Artificial Sequence
  Description of Artificial Sequence: Synthetic oligonucleotide
caccauacuuggccaacua

SEQ ID NO: 1803467 - RNA, 19 nt, Artificial Sequence
  Description of Artificial Sequence: Synthetic oligonucleotide
cuacuaacuucaggaguua

SEQ ID NO: 1803468 - RNA, 19 nt, Artificial Sequence
  Description of Artificial Sequence: Synthetic oligonucleotide
guagucugacacugcggau

SEQ ID NO: 1803469 - RNA, 19 nt, Artificial Sequence
  Description of Artificial Sequence: Synthetic oligonucleotide
cacugcggauuugugaacu

SEQ ID NO: 1803470 - RNA, 19 nt, Artificial Sequence
  Description of Artificial Sequence: Synthetic oligonucleotide
uaccacccagaguguuuua

SEQ ID NO: 1803471 - RNA, 19 nt, Artificial Sequence
  Description of Artificial Sequence: Synthetic oligonucleotide
gggcaggguggagaguugc

SEQ ID NO: 1803472 - RNA, 19 nt, Artificial Sequence
  Description of Artificial Sequence: Synthetic oligonucleotide
cagguuugacuucaaucuu

SEQ ID NO: 1803473 - RNA, 19 nt, Artificial Sequence
  Description of Artificial Sequence: Synthetic oligonucleotide
ggaaaauccgccacuccau

SEQ ID NO: 1803474 - RNA, 19 nt, Artificial Sequence
  Description of Artificial Sequence: Synthetic oligonucleotide
auccgccacuccaucaaua

SEQ ID NO: 1803475 - RNA, 19 nt, Artificial Sequence
  Description of Artificial Sequence: Synthetic oligonucleotide
ccagcaauauagaaucauu

SEQ ID NO: 1803476 - RNA, 19 nt, Artificial Sequence
  Description of Artificial Sequence: Synthetic oligonucleotide
cgaacaagucgguuaaagu

SEQ ID NO: 1803477 - RNA, 19 nt, Artificial Sequence
  Description of Artificial Sequence: Synthetic oligonucleotide
cggauuugugaacuucaga

SEQ ID NO: 1803478 - RNA, 19 nt, Artificial Sequence
  Description of Artificial Sequence: Synthetic oligonucleotide
ccuagaagucagccucaga

SEQ ID NO: 1803479 - RNA, 19 nt, Artificial Sequence
  Description of Artificial Sequence: Synthetic oligonucleotide
guccuuugguuaccagguu

SEQ ID NO: 1803480 - RNA, 19 nt, Artificial Sequence
  Description of Artificial Sequence: Synthetic oligonucleotide
ggagaguugcaaacuucau

SEQ ID NO: 1803481 - RNA, 19 nt, Artificial Sequence
  Description of Artificial Sequence: Synthetic oligonucleotide
gacccacaaaucaguccuu

SEQ ID NO: 1803482 - RNA, 19 nt, Artificial Sequence
  Description of Artificial Sequence: Synthetic oligonucleotide
ccauuucaauugaguccua

SEQ ID NO: 1803483 - RNA, 19 nt, Artificial Sequence
  Description of Artificial Sequence: Synthetic oligonucleotide
aauaagguagguaagaagc

SEQ ID NO: 1803484 - RNA, 19 nt, Artificial Sequence
  Description of Artificial Sequence: Synthetic oligonucleotide
aagagaaacaaucaugguc

SEQ ID NO: 1803485 - RNA, 19 nt, Artificial Sequence
  Description of Artificial Sequence: Synthetic oligonucleotide
auaauagauaaucaggaac

SEQ ID NO: 1803486 - RNA, 19 nt, Artificial Sequence
  Description of Artificial Sequence: Synthetic oligonucleotide
gauacaacacccaugaugg

SEQ ID NO: 1803487 - RNA, 19 nt, Artificial Sequence
  Description of Artificial Sequence: Synthetic oligonucleotide
aauguguccuauuuuggcc

SEQ ID NO: 1803488 - RNA, 19 nt, Artificial Sequence
  Description of Artificial Sequence: Synthetic oligonucleotide
acauguauaauuaaggugg

SEQ ID NO: 1803489 - RNA, 19 nt, Artificial Sequence
  Description of Artificial Sequence: Synthetic oligonucleotide
ucaacuauuacccuaaguc

SEQ ID NO: 1803490 - RNA, 19 nt, Artificial Sequence
  Description of Artificial Sequence: Synthetic oligonucleotide
uaauagauaaucaggaaca

SEQ ID NO: 1803491 - RNA, 19 nt, Artificial Sequence
  Description of Artificial Sequence: Synthetic oligonucleotide
aguaaggaguuacagacgc

SEQ ID NO: 1803492 - RNA, 19 nt, Artificial Sequence
  Description of Artificial Sequence: Synthetic oligonucleotide
uguuauagcuaguucaugg

SEQ ID NO: 1803493 - RNA, 19 nt, Artificial Sequence
  Description of Artificial Sequence: Synthetic oligonucleotide
uaaguaaggaguuacagac

SEQ ID NO: 1803494 - RNA, 19 nt, Artificial Sequence
  Description of Artificial Sequence: Synthetic oligonucleotide
caaacuauguuauagcuag

SEQ ID NO: 1803495 - RNA, 19 nt, Artificial Sequence
  Description of Artificial Sequence: Synthetic oligonucleotide
gaugucaugaaacauuaag

SEQ ID NO: 1803496 - RNA, 19 nt, Artificial Sequence
  Description of Artificial Sequence: Synthetic oligonucleotide
aacaugcuacaacaggugc

SEQ ID NO: 1803497 - RNA, 19 nt, Artificial Sequence
  Description of Artificial Sequence: Synthetic oligonucleotide
uugaauauagcuaaagcaa

SEQ ID NO: 1803498 - RNA, 19 nt, Artificial Sequence
  Description of Artificial Sequence: Synthetic oligonucleotide
uuguuuaucucccuuuugg

SEQ ID NO: 1803499 - RNA, 19 nt, Artificial Sequence
  Description of Artificial Sequence: Synthetic oligonucleotide
aauccuuggugcuagaaug

SEQ ID NO: 1803500 - RNA, 19 nt, Artificial Sequence
  Description of Artificial Sequence: Synthetic oligonucleotide
acgagcagaacacacaccc

SEQ ID NO: 1803501 - RNA, 19 nt, Artificial Sequence
  Description of Artificial Sequence: Synthetic oligonucleotide
auuacugcagauuucauga

SEQ ID NO: 1803502 - RNA, 19 nt, Artificial Sequence
  Description of Artificial Sequence: Synthetic oligonucleotide
gagauaauagauaaucagg

SEQ ID NO: 1803503 - RNA, 19 nt, Artificial Sequence
  Description of Artificial Sequence: Synthetic oligonucleotide
aagacauguauaauuaagg

SEQ ID NO: 1803504 - RNA, 19 nt, Artificial Sequence
  Description of Artificial Sequence: Synthetic oligonucleotide
ucugcucucagcuacaacc

SEQ ID NO: 1803505 - RNA, 19 nt, Artificial Sequence
  Description of Artificial Sequence: Synthetic oligonucleotide
uuuuacuagauuacugcag

SEQ ID NO: 1803506 - RNA, 19 nt, Artificial Sequence
  Description of Artificial Sequence: Synthetic oligonucleotide
uuuacuagauuacugcaga

SEQ ID NO: 1803507 - RNA, 19 nt, Artificial Sequence
  Description of Artificial Sequence: Synthetic oligonucleotide
uguauaauuaagguggaug

SEQ ID NO: 1803508 - RNA, 19 nt, Artificial Sequence
  Description of Artificial Sequence: Synthetic oligonucleotide
agcuaaagcaaacaucaac

SEQ ID NO: 1803509 - RNA, 19 nt, Artificial Sequence
  Description of Artificial Sequence: Synthetic oligonucleotide
aucgagauaauagauaauc

SEQ ID NO: 1803510 - RNA, 19 nt, Artificial Sequence
  Description of Artificial Sequence: Synthetic oligonucleotide
gacauguauaauuaaggug

SEQ ID NO: 1803511 - RNA, 19 nt, Artificial Sequence
  Description of Artificial Sequence: Synthetic oligonucleotide
uagguaagaagcaaguugu

SEQ ID NO: 1803512 - RNA, 19 nt, Artificial Sequence
  Description of Artificial Sequence: Synthetic oligonucleotide
cuugaauauagcuaaagca

SEQ ID NO: 1803513 - RNA, 19 nt, Artificial Sequence
  Description of Artificial Sequence: Synthetic oligonucleotide
aaugauuccguguugguuu

SEQ ID NO: 1803514 - RNA, 19 nt, Artificial Sequence
  Description of Artificial Sequence: Synthetic oligonucleotide
uuacagacgcuacacagag

SEQ ID NO: 1803515 - RNA, 19 nt, Artificial Sequence
  Description of Artificial Sequence: Synthetic oligonucleotide
agaaccagcuuccuguagc

SEQ ID NO: 1803516 - RNA, 19 nt, Artificial Sequence
  Description of Artificial Sequence: Synthetic oligonucleotide
ugggcuaaagacuuguucc

SEQ ID NO: 1803517 - RNA, 19 nt, Artificial Sequence
  Description of Artificial Sequence: Synthetic oligonucleotide
aacaaucauggucaugaag

SEQ ID NO: 1803518 - RNA, 19 nt, Artificial Sequence
  Description of Artificial Sequence: Synthetic oligonucleotide
aguagaaccagcuuccugu

SEQ ID NO: 1803519 - RNA, 19 nt, Artificial Sequence
  Description of Artificial Sequence: Synthetic oligonucleotide
aaagacuuguuccccaaug

SEQ ID NO: 1803520 - RNA, 19 nt, Artificial Sequence
  Description of Artificial Sequence: Synthetic oligonucleotide
uauagcuaaagcaaacauc

SEQ ID NO: 1803521 - RNA, 19 nt, Artificial Sequence
  Description of Artificial Sequence: Synthetic oligonucleotide
auguguccuauuuuggccc

SEQ ID NO: 1803522 - RNA, 19 nt, Artificial Sequence
  Description of Artificial Sequence: Synthetic oligonucleotide
aauggauccacaaacuaug

SEQ ID NO: 1803523 - RNA, 19 nt, Artificial Sequence
  Description of Artificial Sequence: Synthetic oligonucleotide
agaaaagaggcguuuccac

SEQ ID NO: 1803524 - RNA, 19 nt, Artificial Sequence
  Description of Artificial Sequence: Synthetic oligonucleotide
guagguaagaagcaaguug

SEQ ID NO: 1803525 - RNA, 19 nt, Artificial Sequence
  Description of Artificial Sequence: Synthetic oligonucleotide
augaaguacauuuuaggcu

SEQ ID NO: 1803526 - RNA, 19 nt, Artificial Sequence
  Description of Artificial Sequence: Synthetic oligonucleotide
uccacaaacuauguuauag

SEQ ID NO: 1803527 - RNA, 19 nt, Artificial Sequence
  Description of Artificial Sequence: Synthetic oligonucleotide
ugaaguacauuuuaggcuu

SEQ ID NO: 1803528 - RNA, 19 nt, Artificial Sequence
  Description of Artificial Sequence: Synthetic oligonucleotide
acagacgcuacacagagca

SEQ ID NO: 1803529 - RNA, 19 nt, Artificial Sequence
  Description of Artificial Sequence: Synthetic oligonucleotide
aauauagcuaaagcaaaca

SEQ ID NO: 1803530 - RNA, 19 nt, Artificial Sequence
  Description of Artificial Sequence: Synthetic oligonucleotide
uauagcuaguucaugggcu

SEQ ID NO: 1803531 - RNA, 19 nt, Artificial Sequence
  Description of Artificial Sequence: Synthetic oligonucleotide
aguaagcuuaaguaaggag

SEQ ID NO: 1803532 - RNA, 19 nt, Artificial Sequence
  Description of Artificial Sequence: Synthetic oligonucleotide
acuauguuauagcuaguuc

SEQ ID NO: 1803533 - RNA, 19 nt, Artificial Sequence
  Description of Artificial Sequence: Synthetic oligonucleotide
gauuacugcagauuucaug

SEQ ID NO: 1803534 - RNA, 19 nt, Artificial Sequence
  Description of Artificial Sequence: Synthetic oligonucleotide
guuauagcuaguucauggg

SEQ ID NO: 1803535 - RNA, 19 nt, Artificial Sequence
  Description of Artificial Sequence: Synthetic oligonucleotide
caucgaaggacuuugucag

SEQ ID NO: 1803536 - RNA, 19 nt, Artificial Sequence
  Description of Artificial Sequence: Synthetic oligonucleotide
ucuaaaagucuaccuacug

SEQ ID NO: 1803537 - RNA, 19 nt, Artificial Sequence
  Description of Artificial Sequence: Synthetic oligonucleotide
uguacgaaagagcaaaguu

SEQ ID NO: 1803538 - RNA, 19 nt, Artificial Sequence
  Description of Artificial Sequence: Synthetic oligonucleotide
ugugaucacaguaagcuua

SEQ ID NO: 1803539 - RNA, 19 nt, Artificial Sequence
  Description of Artificial Sequence: Synthetic oligonucleotide
auaaucaggaacagcaggg

SEQ ID NO: 1803540 - RNA, 19 nt, Artificial Sequence
  Description of Artificial Sequence: Synthetic oligonucleotide
uacccuaagucauaguuca

SEQ ID NO: 1803541 - RNA, 19 nt, Artificial Sequence
  Description of Artificial Sequence: Synthetic oligonucleotide
agacauguauaauuaaggu

SEQ ID NO: 1803542 - RNA, 19 nt, Artificial Sequence
  Description of Artificial Sequence: Synthetic oligonucleotide
agauaauagauaaucagga

SEQ ID NO: 1803543 - RNA, 19 nt, Artificial Sequence
  Description of Artificial Sequence: Synthetic oligonucleotide
agagcagucacccgucagc

SEQ ID NO: 1803544 - RNA, 19 nt, Artificial Sequence
  Description of Artificial Sequence: Synthetic oligonucleotide
ucgagauaauagauaauca

SEQ ID NO: 1803545 - RNA, 19 nt, Artificial Sequence
  Description of Artificial Sequence: Synthetic oligonucleotide
gauggaucgagauaauaga

SEQ ID NO: 1803546 - RNA, 19 nt, Artificial Sequence
  Description of Artificial Sequence: Synthetic oligonucleotide
ugacagcacagauggaucg

SEQ ID NO: 1803547 - RNA, 19 nt, Artificial Sequence
  Description of Artificial Sequence: Synthetic oligonucleotide
auuaagguggaugucauga

SEQ ID NO: 1803548 - RNA, 19 nt, Artificial Sequence
  Description of Artificial Sequence: Synthetic oligonucleotide
auaauuaagguggauguca

SEQ ID NO: 1803549 - RNA, 19 nt, Artificial Sequence
  Description of Artificial Sequence: Synthetic oligonucleotide
agggauacaacacccauga

SEQ ID NO: 1803550 - RNA, 19 nt, Artificial Sequence
  Description of Artificial Sequence: Synthetic oligonucleotide
auuacccuaagucauaguu

SEQ ID NO: 1803551 - RNA, 19 nt, Artificial Sequence
  Description of Artificial Sequence: Synthetic oligonucleotide
ucagugguccauuuauuag

SEQ ID NO: 1803552 - RNA, 19 nt, Artificial Sequence
  Description of Artificial Sequence: Synthetic oligonucleotide
aacagcagggauacaacac

SEQ ID NO: 1803553 - RNA, 19 nt, Artificial Sequence
  Description of Artificial Sequence: Synthetic oligonucleotide
aacaucaacuauuacccua

SEQ ID NO: 1803554 - RNA, 19 nt, Artificial Sequence
  Description of Artificial Sequence: Synthetic oligonucleotide
cauuuuaggcuucucuucc

SEQ ID NO: 1803555 - RNA, 19 nt, Artificial Sequence
  Description of Artificial Sequence: Synthetic oligonucleotide
guaagaagcaaguugugga

SEQ ID NO: 1803556 - RNA, 19 nt, Artificial Sequence
  Description of Artificial Sequence: Synthetic oligonucleotide
uccguguugguuuagucca

SEQ ID NO: 1803557 - RNA, 19 nt, Artificial Sequence
  Description of Artificial Sequence: Synthetic oligonucleotide
cacacacacacaaaacucc

SEQ ID NO: 1803558 - RNA, 19 nt, Artificial Sequence
  Description of Artificial Sequence: Synthetic oligonucleotide
uaagcuuaaguaaggaguu

SEQ ID NO: 1803559 - RNA, 19 nt, Artificial Sequence
  Description of Artificial Sequence: Synthetic oligonucleotide
guuuaucucccuuuuggcc

SEQ ID NO: 1803560 - RNA, 19 nt, Artificial Sequence
  Description of Artificial Sequence: Synthetic oligonucleotide
aagacaggcuuauuuacaa

SEQ ID NO: 1803561 - RNA, 19 nt, Artificial Sequence
  Description of Artificial Sequence: Synthetic oligonucleotide
uguuuaucucccuuuuggc

SEQ ID NO: 1803562 - RNA, 19 nt, Artificial Sequence
  Description of Artificial Sequence: Synthetic oligonucleotide
caauaagguagguaagaag

SEQ ID NO: 1803563 - RNA, 19 nt, Artificial Sequence
  Description of Artificial Sequence: Synthetic oligonucleotide
agaggcagacccaaggugc

SEQ ID NO: 1803564 - RNA, 19 nt, Artificial Sequence
  Description of Artificial Sequence: Synthetic oligonucleotide
ggauacaacacccaugaug

SEQ ID NO: 1803565 - RNA, 19 nt, Artificial Sequence
  Description of Artificial Sequence: Synthetic oligonucleotide
agauggaucgagauaauag

SEQ ID NO: 1803566 - RNA, 19 nt, Artificial Sequence
  Description of Artificial Sequence: Synthetic oligonucleotide
agcuuaaguaaggaguuac

SEQ ID NO: 1803567 - RNA, 19 nt, Artificial Sequence
  Description of Artificial Sequence: Synthetic oligonucleotide
uagauuacugcagauuuca

SEQ ID NO: 1803568 - RNA, 19 nt, Artificial Sequence
  Description of Artificial Sequence: Synthetic oligonucleotide
augggcuaaagacuuguuc

SEQ ID NO: 1803569 - RNA, 19 nt, Artificial Sequence
  Description of Artificial Sequence: Synthetic oligonucleotide
cacagcaucagugcaaugg

SEQ ID NO: 1803570 - RNA, 19 nt, Artificial Sequence
  Description of Artificial Sequence: Synthetic oligonucleotide
uaagaagcaaguuguggac

SEQ ID NO: 1803571 - RNA, 19 nt, Artificial Sequence
  Description of Artificial Sequence: Synthetic oligonucleotide
auauagcuaaagcaaacau

SEQ ID NO: 1803572 - RNA, 19 nt, Artificial Sequence
  Description of Artificial Sequence: Synthetic oligonucleotide
accacuaccuugaauauag

SEQ ID NO: 1803573 - RNA, 19 nt, Artificial Sequence
  Description of Artificial Sequence: Synthetic oligonucleotide
aaaaugauuccguguuggu

SEQ ID NO: 1803574 - RNA, 19 nt, Artificial Sequence
  Description of Artificial Sequence: Synthetic oligonucleotide
ggugagaaaacagaggcag

SEQ ID NO: 1803575 - RNA, 19 nt, Artificial Sequence
  Description of Artificial Sequence: Synthetic oligonucleotide
ugcucuaaaagucuaccua

SEQ ID NO: 1803576 - RNA, 19 nt, Artificial Sequence
  Description of Artificial Sequence: Synthetic oligonucleotide
aacaggugccacuguuuac

SEQ ID NO: 1803577 - RNA, 19 nt, Artificial Sequence
  Description of Artificial Sequence: Synthetic oligonucleotide
aacuauuacccuaagucau

SEQ ID NO: 1803578 - RNA, 19 nt, Artificial Sequence
  Description of Artificial Sequence: Synthetic oligonucleotide
aauuaagguggaugucaug

SEQ ID NO: 1803579 - RNA, 19 nt, Artificial Sequence
  Description of Artificial Sequence: Synthetic oligonucleotide
guauaauuaagguggaugu

SEQ ID NO: 1803580 - RNA, 19 nt, Artificial Sequence
  Description of Artificial Sequence: Synthetic oligonucleotide
uuacccuaagucauaguuc

SEQ ID NO: 1803581 - RNA, 19 nt, Artificial Sequence
  Description of Artificial Sequence: Synthetic oligonucleotide
uacugaaagggcaugugau

SEQ ID NO: 1803582 - RNA, 19 nt, Artificial Sequence
  Description of Artificial Sequence: Synthetic oligonucleotide
uggaugucaugaaacauua

SEQ ID NO: 1803583 - RNA, 19 nt, Artificial Sequence
  Description of Artificial Sequence: Synthetic oligonucleotide
ggugccacuguuuacagug

SEQ ID NO: 1803584 - RNA, 19 nt, Artificial Sequence
  Description of Artificial Sequence: Synthetic oligonucleotide
uuggccauuccaauguacu

SEQ ID NO: 1803585 - RNA, 19 nt, Artificial Sequence
  Description of Artificial Sequence: Synthetic oligonucleotide
ucauaguucacuguacgaa

SEQ ID NO: 1803586 - RNA, 19 nt, Artificial Sequence
  Description of Artificial Sequence: Synthetic oligonucleotide
gacaguagaaccagcuucc

SEQ ID NO: 1803587 - RNA, 19 nt, Artificial Sequence
  Description of Artificial Sequence: Synthetic oligonucleotide
aaacaucaacuauuacccu

SEQ ID NO: 1803588 - RNA, 19 nt, Artificial Sequence
  Description of Artificial Sequence: Synthetic oligonucleotide
acaugcuacaacaggugcc

SEQ ID NO: 1803589 - RNA, 19 nt, Artificial Sequence
  Description of Artificial Sequence: Synthetic oligonucleotide
aaguaaggaguuacagacg

SEQ ID NO: 1803590 - RNA, 19 nt, Artificial Sequence
  Description of Artificial Sequence: Synthetic oligonucleotide
cuaccuugaauauagcuaa

SEQ ID NO: 1803591 - RNA, 19 nt, Artificial Sequence
  Description of Artificial Sequence: Synthetic oligonucleotide
ggcucuuucccaucgaagg

SEQ ID NO: 1803592 - RNA, 19 nt, Artificial Sequence
  Description of Artificial Sequence: Synthetic oligonucleotide
aacaccugacagcacagau

SEQ ID NO: 1803593 - RNA, 19 nt, Artificial Sequence
  Description of Artificial Sequence: Synthetic oligonucleotide
caacuauuacccuaaguca

SEQ ID NO: 1803594 - RNA, 19 nt, Artificial Sequence
  Description of Artificial Sequence: Synthetic oligonucleotide
aucagugcaauggauccac

SEQ ID NO: 1803595 - RNA, 19 nt, Artificial Sequence
  Description of Artificial Sequence: Synthetic oligonucleotide
aaagaggcguuuccaccag

SEQ ID NO: 1803596 - RNA, 19 nt, Artificial Sequence
  Description of Artificial Sequence: Synthetic oligonucleotide
aaacaugcuacaacaggug

SEQ ID NO: 1803597 - RNA, 19 nt, Artificial Sequence
  Description of Artificial Sequence: Synthetic oligonucleotide
agaccugcagucuccacag

SEQ ID NO: 1803598 - RNA, 19 nt, Artificial Sequence
  Description of Artificial Sequence: Synthetic oligonucleotide
agcuacaacccugcaaagc

SEQ ID NO: 1803599 - RNA, 19 nt, Artificial Sequence
  Description of Artificial Sequence: Synthetic oligonucleotide
uccagguaggaagacaggc

SEQ ID NO: 1803600 - RNA, 19 nt, Artificial Sequence
  Description of Artificial Sequence: Synthetic oligonucleotide
aguucacuguacgaaagag

SEQ ID NO: 1803601 - RNA, 19 nt, Artificial Sequence
  Description of Artificial Sequence: Synthetic oligonucleotide
aggcuuauuuacaagaaga

SEQ ID NO: 1803602 - RNA, 19 nt, Artificial Sequence
  Description of Artificial Sequence: Synthetic oligonucleotide
cuaaaagucuaccuacuga

SEQ ID NO: 1803603 - RNA, 19 nt, Artificial Sequence
  Description of Artificial Sequence: Synthetic oligonucleotide
aacuauguuauagcuaguu

SEQ ID NO: 1803604 - RNA, 19 nt, Artificial Sequence
  Description of Artificial Sequence: Synthetic oligonucleotide
uacaacccugcaaagcaga

SEQ ID NO: 1803605 - RNA, 19 nt, Artificial Sequence
  Description of Artificial Sequence: Synthetic oligonucleotide
uuccaauguacuucaaaau

SEQ ID NO: 1803606 - RNA, 19 nt, Artificial Sequence
  Description of Artificial Sequence: Synthetic oligonucleotide
guacgaaagagcaaaguuc

SEQ ID NO: 1803607 - RNA, 19 nt, Artificial Sequence
  Description of Artificial Sequence: Synthetic oligonucleotide
uggaucgagauaauagaua

SEQ ID NO: 1803608 - RNA, 19 nt, Artificial Sequence
  Description of Artificial Sequence: Synthetic oligonucleotide
uguugguuuaguccaggaa

SEQ ID NO: 1803609 - RNA, 19 nt, Artificial Sequence
  Description of Artificial Sequence: Synthetic oligonucleotide
aaggaguuacagacgcuac

SEQ ID NO: 1803610 - RNA, 19 nt, Artificial Sequence
  Description of Artificial Sequence: Synthetic oligonucleotide
gacgcgcguagucucaacg

SEQ ID NO: 1803611 - RNA, 19 nt, Artificial Sequence
  Description of Artificial Sequence: Synthetic oligonucleotide
guaagcuuaaguaaggagu

SEQ ID NO: 1803612 - RNA, 19 nt, Artificial Sequence
  Description of Artificial Sequence: Synthetic oligonucleotide
uucagugguccauuuauua

SEQ ID NO: 1803613 - RNA, 19 nt, Artificial Sequence
  Description of Artificial Sequence: Synthetic oligonucleotide
aacgagcagaacacacacc

SEQ ID NO: 1803614 - RNA, 19 nt, Artificial Sequence
  Description of Artificial Sequence: Synthetic oligonucleotide
cucaacgagcagaacacac

SEQ ID NO: 1803615 - RNA, 19 nt, Artificial Sequence
  Description of Artificial Sequence: Synthetic oligonucleotide
aguucaccacuucccaggg

SEQ ID NO: 1803616 - RNA, 19 nt, Artificial Sequence
  Description of Artificial Sequence: Synthetic oligonucleotide
acaguaagcuuaaguaagg

SEQ ID NO: 1803617 - RNA, 19 nt, Artificial Sequence
  Description of Artificial Sequence: Synthetic oligonucleotide
aacugcucuaaaagucuac

SEQ ID NO: 1803618 - RNA, 19 nt, Artificial Sequence
  Description of Artificial Sequence: Synthetic oligonucleotide
ucgaaggacuuugucagcc

SEQ ID NO: 1803619 - RNA, 19 nt, Artificial Sequence
  Description of Artificial Sequence: Synthetic oligonucleotide
gguaagaagcaaguugugg

SEQ ID NO: 1803620 - RNA, 19 nt, Artificial Sequence
  Description of Artificial Sequence: Synthetic oligonucleotide
caacgagcagaacacacac

SEQ ID NO: 1803621 - RNA, 19 nt, Artificial Sequence
  Description of Artificial Sequence: Synthetic oligonucleotide
augauggcagguggaaacc

SEQ ID NO: 1803622 - RNA, 19 nt, Artificial Sequence
  Description of Artificial Sequence: Synthetic oligonucleotide
aguucaugggcuaaagacu

SEQ ID NO: 1803623 - RNA, 19 nt, Artificial Sequence
  Description of Artificial Sequence: Synthetic oligonucleotide
aagaagcaaguuguggacu

SEQ ID NO: 1803624 - RNA, 19 nt, Artificial Sequence
  Description of Artificial Sequence: Synthetic oligonucleotide
uauaauuaagguggauguc

SEQ ID NO: 1803625 - RNA, 19 nt, Artificial Sequence
  Description of Artificial Sequence: Synthetic oligonucleotide
ggaucgagauaauagauaa

SEQ ID NO: 1803626 - RNA, 19 nt, Artificial Sequence
  Description of Artificial Sequence: Synthetic oligonucleotide
aucaacuauuacccuaagu

SEQ ID NO: 1803627 - RNA, 19 nt, Artificial Sequence
  Description of Artificial Sequence: Synthetic oligonucleotide
uaaggaguuacagacgcua

SEQ ID NO: 1803628 - RNA, 19 nt, Artificial Sequence
  Description of Artificial Sequence: Synthetic oligonucleotide
auacaacacccaugauggc

SEQ ID NO: 1803629 - RNA, 19 nt, Artificial Sequence
  Description of Artificial Sequence: Synthetic oligonucleotide
agaagacauguauaauuaa

SEQ ID NO: 1803630 - RNA, 19 nt, Artificial Sequence
  Description of Artificial Sequence: Synthetic oligonucleotide
ccaaacaugcuacaacagg

SEQ ID NO: 1803631 - RNA, 19 nt, Artificial Sequence
  Description of Artificial Sequence: Synthetic oligonucleotide
ucccuuuuggccauuccaa

SEQ ID NO: 1803632 - RNA, 19 nt, Artificial Sequence
  Description of Artificial Sequence: Synthetic oligonucleotide
cuugcugccccacccaagc

SEQ ID NO: 1803633 - RNA, 19 nt, Artificial Sequence
  Description of Artificial Sequence: Synthetic oligonucleotide
acuaccuugaauauagcua

SEQ ID NO: 1803634 - RNA, 19 nt, Artificial Sequence
  Description of Artificial Sequence: Synthetic oligonucleotide
caggcuuauuuacaagaag

SEQ ID NO: 1803635 - RNA, 19 nt, Artificial Sequence
  Description of Artificial Sequence: Synthetic oligonucleotide
aaaccaggcucuuucccau

SEQ ID NO: 1803636 - RNA, 19 nt, Artificial Sequence
  Description of Artificial Sequence: Synthetic oligonucleotide
aaaugauuccguguugguu

SEQ ID NO: 1803637 - RNA, 19 nt, Artificial Sequence
  Description of Artificial Sequence: Synthetic oligonucleotide
ccuugaauauagcuaaagc

SEQ ID NO: 1803638 - RNA, 19 nt, Artificial Sequence
  Description of Artificial Sequence: Synthetic oligonucleotide
cuuggugcuagaaugggaa

SEQ ID NO: 1803639 - RNA, 19 nt, Artificial Sequence
  Description of Artificial Sequence: Synthetic oligonucleotide
ucacccgucagcagucugc

SEQ ID NO: 1803640 - RNA, 19 nt, Artificial Sequence
  Description of Artificial Sequence: Synthetic oligonucleotide
gcucuaaaagucuaccuac

SEQ ID NO: 1803641 - RNA, 19 nt, Artificial Sequence
  Description of Artificial Sequence: Synthetic oligonucleotide
cuauuacccuaagucauag

SEQ ID NO: 1803642 - RNA, 19 nt, Artificial Sequence
  Description of Artificial Sequence: Synthetic oligonucleotide
cuagauuacugcagauuuc

SEQ ID NO: 1803643 - RNA, 19 nt, Artificial Sequence
  Description of Artificial Sequence: Synthetic oligonucleotide
gaucacaguaagcuuaagu

SEQ ID NO: 1803644 - RNA, 19 nt, Artificial Sequence
  Description of Artificial Sequence: Synthetic oligonucleotide
agcacagauggaucgagau

SEQ ID NO: 1803645 - RNA, 19 nt, Artificial Sequence
  Description of Artificial Sequence: Synthetic oligonucleotide
agacaggcuuauuuacaag

SEQ ID NO: 1803646 - RNA, 19 nt, Artificial Sequence
  Description of Artificial Sequence: Synthetic oligonucleotide
cagagguucaguccugcag

SEQ ID NO: 1803647 - RNA, 19 nt, Artificial Sequence
  Description of Artificial Sequence: Synthetic oligonucleotide
gaaacaccugacagcacag

SEQ ID NO: 1803648 - RNA, 19 nt, Artificial Sequence
  Description of Artificial Sequence: Synthetic oligonucleotide
uggugcuagaaugggaaca

SEQ ID NO: 1803649 - RNA, 19 nt, Artificial Sequence
  Description of Artificial Sequence: Synthetic oligonucleotide
guucacuguacgaaagagc

SEQ ID NO: 1803650 - RNA, 19 nt, Artificial Sequence
  Description of Artificial Sequence: Synthetic oligonucleotide
uugcuugagaagcuuguuu

SEQ ID NO: 1803651 - RNA, 19 nt, Artificial Sequence
  Description of Artificial Sequence: Synthetic oligonucleotide
ugaaagggcaugugaucac

SEQ ID NO: 1803652 - RNA, 19 nt, Artificial Sequence
  Description of Artificial Sequence: Synthetic oligonucleotide
auaagguagguaagaagca

SEQ ID NO: 1803653 - RNA, 19 nt, Artificial Sequence
  Description of Artificial Sequence: Synthetic oligonucleotide
uggaaaccaggcucuuucc

SEQ ID NO: 1803654 - RNA, 19 nt, Artificial Sequence
  Description of Artificial Sequence: Synthetic oligonucleotide
agcaucacuucuccccauc

SEQ ID NO: 1803655 - RNA, 19 nt, Artificial Sequence
  Description of Artificial Sequence: Synthetic oligonucleotide
uacaacaggugccacuguu

SEQ ID NO: 1803656 - RNA, 19 nt, Artificial Sequence
  Description of Artificial Sequence: Synthetic oligonucleotide
ggaagacaggcuuauuuac

SEQ ID NO: 1803657 - RNA, 19 nt, Artificial Sequence
  Description of Artificial Sequence: Synthetic oligonucleotide
uagaaccagcuuccuguag

SEQ ID NO: 1803658 - RNA, 19 nt, Artificial Sequence
  Description of Artificial Sequence: Synthetic oligonucleotide
gaagcugcauuauucauuu

SEQ ID NO: 1803659 - RNA, 19 nt, Artificial Sequence
  Description of Artificial Sequence: Synthetic oligonucleotide
ggaaacaccugacagcaca

SEQ ID NO: 1803660 - RNA, 19 nt, Artificial Sequence
  Description of Artificial Sequence: Synthetic oligonucleotide
gaagacaggcuuauuuaca

SEQ ID NO: 1803661 - RNA, 19 nt, Artificial Sequence
  Description of Artificial Sequence: Synthetic oligonucleotide
gcuacaacccugcaaagca

SEQ ID NO: 1803662 - RNA, 19 nt, Artificial Sequence
  Description of Artificial Sequence: Synthetic oligonucleotide
aggaguuacagacgcuaca

SEQ ID NO: 1803663 - RNA, 19 nt, Artificial Sequence
  Description of Artificial Sequence: Synthetic oligonucleotide
ucaugggcuaaagacuugu

SEQ ID NO: 1803664 - RNA, 19 nt, Artificial Sequence
  Description of Artificial Sequence: Synthetic oligonucleotide
acacacaaaacuccaggua

SEQ ID NO: 1803665 - RNA, 19 nt, Artificial Sequence
  Description of Artificial Sequence: Synthetic oligonucleotide
cauaguucacuguacgaaa

SEQ ID NO: 1803666 - RNA, 19 nt, Artificial Sequence
  Description of Artificial Sequence: Synthetic oligonucleotide
uuacuagauuacugcagau

SEQ ID NO: 1803667 - RNA, 19 nt, Artificial Sequence
  Description of Artificial Sequence: Synthetic oligonucleotide
caccgaagcugcauuauuc

SEQ ID NO: 1803668 - RNA, 19 nt, Artificial Sequence
  Description of Artificial Sequence: Synthetic oligonucleotide
caguccugcagauuucaac

SEQ ID NO: 1803669 - RNA, 19 nt, Artificial Sequence
  Description of Artificial Sequence: Synthetic oligonucleotide
gggaacaagguagucagcc

SEQ ID NO: 1803670 - RNA, 19 nt, Artificial Sequence
  Description of Artificial Sequence: Synthetic oligonucleotide
agggcaugugaucacagua

SEQ ID NO: 1803671 - RNA, 19 nt, Artificial Sequence
  Description of Artificial Sequence: Synthetic oligonucleotide
acugcagauuucaugaaau

SEQ ID NO: 1803672 - RNA, 19 nt, Artificial Sequence
  Description of Artificial Sequence: Synthetic oligonucleotide
cccaauguguccuauuuug

SEQ ID NO: 1803673 - RNA, 19 nt, Artificial Sequence
  Description of Artificial Sequence: Synthetic oligonucleotide
cugacagcacagauggauc

SEQ ID NO: 1803674 - RNA, 19 nt, Artificial Sequence
  Description of Artificial Sequence: Synthetic oligonucleotide
aaaagucuaccuacugaaa

SEQ ID NO: 1803675 - RNA, 19 nt, Artificial Sequence
  Description of Artificial Sequence: Synthetic oligonucleotide
agacgcuacacagagcagu

SEQ ID NO: 1803676 - RNA, 19 nt, Artificial Sequence
  Description of Artificial Sequence: Synthetic oligonucleotide
ggcaugugaucacaguaag

SEQ ID NO: 1803677 - RNA, 19 nt, Artificial Sequence
  Description of Artificial Sequence: Synthetic oligonucleotide
uucaugggcuaaagacuug

SEQ ID NO: 1803678 - RNA, 19 nt, Artificial Sequence
  Description of Artificial Sequence: Synthetic oligonucleotide
cacaaacuauguuauagcu

SEQ ID NO: 1803679 - RNA, 19 nt, Artificial Sequence
  Description of Artificial Sequence: Synthetic oligonucleotide
auagcuaguucaugggcua

SEQ ID NO: 1803680 - RNA, 19 nt, Artificial Sequence
  Description of Artificial Sequence: Synthetic oligonucleotide
cagggauacaacacccaug

SEQ ID NO: 1803681 - RNA, 19 nt, Artificial Sequence
  Description of Artificial Sequence: Synthetic oligonucleotide
cuuuagagaaaagaggcgu

SEQ ID NO: 1803682 - RNA, 19 nt, Artificial Sequence
  Description of Artificial Sequence: Synthetic oligonucleotide
caaaguucaccacuuccca

SEQ ID NO: 1803683 - RNA, 19 nt, Artificial Sequence
  Description of Artificial Sequence: Synthetic oligonucleotide
cugaaagggcaugugauca

SEQ ID NO: 1803684 - RNA, 19 nt, Artificial Sequence
  Description of Artificial Sequence: Synthetic oligonucleotide
ccacaaacuauguuauagc

SEQ ID NO: 1803685 - RNA, 19 nt, Artificial Sequence
  Description of Artificial Sequence: Synthetic oligonucleotide
cauguauaauuaaggugga

SEQ ID NO: 1803686 - RNA, 19 nt, Artificial Sequence
  Description of Artificial Sequence: Synthetic oligonucleotide
cacuguuuacagugcuggg

SEQ ID NO: 1803687 - RNA, 19 nt, Artificial Sequence
  Description of Artificial Sequence: Synthetic oligonucleotide
auccuuggugcuagaaugg

SEQ ID NO: 1803688 - RNA, 19 nt, Artificial Sequence
  Description of Artificial Sequence: Synthetic oligonucleotide
aaguacauuuuaggcuucu

SEQ ID NO: 1803689 - RNA, 19 nt, Artificial Sequence
  Description of Artificial Sequence: Synthetic oligonucleotide
uacuagauuacugcagauu

SEQ ID NO: 1803690 - RNA, 19 nt, Artificial Sequence
  Description of Artificial Sequence: Synthetic oligonucleotide
ucauggucaugaaguacau

SEQ ID NO: 1803691 - RNA, 19 nt, Artificial Sequence
  Description of Artificial Sequence: Synthetic oligonucleotide
cuacugaaagggcauguga

SEQ ID NO: 1803692 - RNA, 19 nt, Artificial Sequence
  Description of Artificial Sequence: Synthetic oligonucleotide
cugcagauuucaugaaauc

SEQ ID NO: 1803693 - RNA, 19 nt, Artificial Sequence
  Description of Artificial Sequence: Synthetic oligonucleotide
uauuacccuaagucauagu

SEQ ID NO: 1803694 - RNA, 19 nt, Artificial Sequence
  Description of Artificial Sequence: Synthetic oligonucleotide
cuagaaugggaacaaggua

SEQ ID NO: 1803695 - RNA, 19 nt, Artificial Sequence
  Description of Artificial Sequence: Synthetic oligonucleotide
agcaaccgcagcaagagaa

SEQ ID NO: 1803696 - RNA, 19 nt, Artificial Sequence
  Description of Artificial Sequence: Synthetic oligonucleotide
uguguccuauuuuggcccu

SEQ ID NO: 1803697 - RNA, 19 nt, Artificial Sequence
  Description of Artificial Sequence: Synthetic oligonucleotide
cuucccaggggcagggcgc

SEQ ID NO: 1803698 - RNA, 19 nt, Artificial Sequence
  Description of Artificial Sequence: Synthetic oligonucleotide
agacccaaggugcaggcuu

SEQ ID NO: 1803699 - RNA, 19 nt, Artificial Sequence
  Description of Artificial Sequence: Synthetic oligonucleotide
acaucaacuauuacccuaa

SEQ ID NO: 1803700 - RNA, 19 nt, Artificial Sequence
  Description of Artificial Sequence: Synthetic oligonucleotide
uucacagcaucagugcaau

SEQ ID NO: 1803701 - RNA, 19 nt, Artificial Sequence
  Description of Artificial Sequence: Synthetic oligonucleotide
uuggugcuagaaugggaac

SEQ ID NO: 1803702 - RNA, 19 nt, Artificial Sequence
  Description of Artificial Sequence: Synthetic oligonucleotide
acaaacuauguuauagcua

SEQ ID NO: 1803703 - RNA, 19 nt, Artificial Sequence
  Description of Artificial Sequence: Synthetic oligonucleotide
auggaucgagauaauagau

SEQ ID NO: 1803704 - RNA, 19 nt, Artificial Sequence
  Description of Artificial Sequence: Synthetic oligonucleotide
agaaugggaacaagguagu

SEQ ID NO: 1803705 - RNA, 19 nt, Artificial Sequence
  Description of Artificial Sequence: Synthetic oligonucleotide
gaguuacagacgcuacaca

SEQ ID NO: 1803706 - RNA, 19 nt, Artificial Sequence
  Description of Artificial Sequence: Synthetic oligonucleotide
acagcacagauggaucgag

SEQ ID NO: 1803707 - RNA, 19 nt, Artificial Sequence
  Description of Artificial Sequence: Synthetic oligonucleotide
ggcuuauuuacaagaagac

SEQ ID NO: 1803708 - RNA, 19 nt, Artificial Sequence
  Description of Artificial Sequence: Synthetic oligonucleotide
uacagacgcuacacagagc

SEQ ID NO: 1803709 - RNA, 19 nt, Artificial Sequence
  Description of Artificial Sequence: Synthetic oligonucleotide
ugcucucagcuacaacccu

SEQ ID NO: 1803710 - RNA, 19 nt, Artificial Sequence
  Description of Artificial Sequence: Synthetic oligonucleotide
cacacaccccaccaacacc

SEQ ID NO: 1803711 - RNA, 19 nt, Artificial Sequence
  Description of Artificial Sequence: Synthetic oligonucleotide
cacuguacgaaagagcaaa

SEQ ID NO: 1803712 - RNA, 19 nt, Artificial Sequence
  Description of Artificial Sequence: Synthetic oligonucleotide
agaccacuaccuugaauau

SEQ ID NO: 1803713 - RNA, 19 nt, Artificial Sequence
  Description of Artificial Sequence: Synthetic oligonucleotide
gggcuaaagacuuguuccc

SEQ ID NO: 1803714 - RNA, 19 nt, Artificial Sequence
  Description of Artificial Sequence: Synthetic oligonucleotide
guuacggacgcgcguaguc

SEQ ID NO: 1803715 - RNA, 19 nt, Artificial Sequence
  Description of Artificial Sequence: Synthetic oligonucleotide
gaaagggcaugugaucaca

SEQ ID NO: 1803716 - RNA, 19 nt, Artificial Sequence
  Description of Artificial Sequence: Synthetic oligonucleotide
uuaucucccuuuuggccau

SEQ ID NO: 1803717 - RNA, 19 nt, Artificial Sequence
  Description of Artificial Sequence: Synthetic oligonucleotide
ucuuccagaccugcagucu

SEQ ID NO: 1803718 - RNA, 19 nt, Artificial Sequence
  Description of Artificial Sequence: Synthetic oligonucleotide
caugcuacaacaggugcca

SEQ ID NO: 1803719 - RNA, 19 nt, Artificial Sequence
  Description of Artificial Sequence: Synthetic oligonucleotide
cuuccagaccugcagucuc

SEQ ID NO: 1803720 - RNA, 19 nt, Artificial Sequence
  Description of Artificial Sequence: Synthetic oligonucleotide
aaacaccugacagcacaga

SEQ ID NO: 1803721 - RNA, 19 nt, Artificial Sequence
  Description of Artificial Sequence: Synthetic oligonucleotide
ugguuuaguccaggaagca

SEQ ID NO: 1803722 - RNA, 19 nt, Artificial Sequence
  Description of Artificial Sequence: Synthetic oligonucleotide
agguagguaagaagcaagu

SEQ ID NO: 1803723 - RNA, 19 nt, Artificial Sequence
  Description of Artificial Sequence: Synthetic oligonucleotide
agaaacaaucauggucaug

SEQ ID NO: 1803724 - RNA, 19 nt, Artificial Sequence
  Description of Artificial Sequence: Synthetic oligonucleotide
gcuuauuuacaagaagaca

SEQ ID NO: 1803725 - RNA, 19 nt, Artificial Sequence
  Description of Artificial Sequence: Synthetic oligonucleotide
uuacggacgcgcguagucu

SEQ ID NO: 1803726 - RNA, 19 nt, Artificial Sequence
  Description of Artificial Sequence: Synthetic oligonucleotide
ucguuacggacgcgcguag

SEQ ID NO: 1803727 - RNA, 19 nt, Artificial Sequence
  Description of Artificial Sequence: Synthetic oligonucleotide
gacuuguuccccaaugugu

SEQ ID NO: 1803728 - RNA, 19 nt, Artificial Sequence
  Description of Artificial Sequence: Synthetic oligonucleotide
ccacuguuuacagugcugg

SEQ ID NO: 1803729 - RNA, 19 nt, Artificial Sequence
  Description of Artificial Sequence: Synthetic oligonucleotide
ucucaacgagcagaacaca

SEQ ID NO: 1803730 - RNA, 19 nt, Artificial Sequence
  Description of Artificial Sequence: Synthetic oligonucleotide
cuaguucaugggcuaaaga

SEQ ID NO: 1803731 - RNA, 19 nt, Artificial Sequence
  Description of Artificial Sequence: Synthetic oligonucleotide
aaacagaggcagacccaag

SEQ ID NO: 1803732 - RNA, 19 nt, Artificial Sequence
  Description of Artificial Sequence: Synthetic oligonucleotide
uguccuauuuuggcccuca

SEQ ID NO: 1803733 - RNA, 19 nt, Artificial Sequence
  Description of Artificial Sequence: Synthetic oligonucleotide
gaagcaaguuguggacuug

SEQ ID NO: 1803734 - RNA, 19 nt, Artificial Sequence
  Description of Artificial Sequence: Synthetic oligonucleotide
gccacagaccacuaccuug

SEQ ID NO: 1803735 - RNA, 19 nt, Artificial Sequence
  Description of Artificial Sequence: Synthetic oligonucleotide
gauccacaaacuauguuau

SEQ ID NO: 1803736 - RNA, 19 nt, Artificial Sequence
  Description of Artificial Sequence: Synthetic oligonucleotide
gcagucugcucucagcuac

SEQ ID NO: 1803737 - RNA, 19 nt, Artificial Sequence
  Description of Artificial Sequence: Synthetic oligonucleotide
acgaaagagcaaaguucac

SEQ ID NO: 1803738 - RNA, 19 nt, Artificial Sequence
  Description of Artificial Sequence: Synthetic oligonucleotide
caguagaaccagcuuccug

SEQ ID NO: 1803739 - RNA, 19 nt, Artificial Sequence
  Description of Artificial Sequence: Synthetic oligonucleotide
cagcccacagcucugcguc

SEQ ID NO: 1803740 - RNA, 19 nt, Artificial Sequence
  Description of Artificial Sequence: Synthetic oligonucleotide
acaggcuuauuuacaagaa

SEQ ID NO: 1803741 - RNA, 19 nt, Artificial Sequence
  Description of Artificial Sequence: Synthetic oligonucleotide
cucccuuuuggccauucca

SEQ ID NO: 1803742 - RNA, 19 nt, Artificial Sequence
  Description of Artificial Sequence: Synthetic oligonucleotide
aagucacaauaagguaggu

SEQ ID NO: 1803743 - RNA, 19 nt, Artificial Sequence
  Description of Artificial Sequence: Synthetic oligonucleotide
ucaguccugcagauuucaa

SEQ ID NO: 1803744 - RNA, 19 nt, Artificial Sequence
  Description of Artificial Sequence: Synthetic oligonucleotide
gacgcuacacagagcaguc

SEQ ID NO: 1803745 - RNA, 19 nt, Artificial Sequence
  Description of Artificial Sequence: Synthetic oligonucleotide
agucacaauaagguaggua

SEQ ID NO: 1803746 - RNA, 19 nt, Artificial Sequence
  Description of Artificial Sequence: Synthetic oligonucleotide
acgcgcguagucucaacga

SEQ ID NO: 1803747 - RNA, 19 nt, Artificial Sequence
  Description of Artificial Sequence: Synthetic oligonucleotide
uacggacgcgcguagucuc

SEQ ID NO: 1803748 - RNA, 19 nt, Artificial Sequence
  Description of Artificial Sequence: Synthetic oligonucleotide
uggccauuccaauguacuu

SEQ ID NO: 1803749 - RNA, 19 nt, Artificial Sequence
  Description of Artificial Sequence: Synthetic oligonucleotide
cacuaccuugaauauagcu

SEQ ID NO: 1803750 - RNA, 19 nt, Artificial Sequence
  Description of Artificial Sequence: Synthetic oligonucleotide
guagucucaacgagcagaa

SEQ ID NO: 1803751 - RNA, 19 nt, Artificial Sequence
  Description of Artificial Sequence: Synthetic oligonucleotide
ccaucagcaucacuucucc

SEQ ID NO: 1803752 - RNA, 19 nt, Artificial Sequence
  Description of Artificial Sequence: Synthetic oligonucleotide
gugguccauuuauuagagc

SEQ ID NO: 1803753 - RNA, 19 nt, Artificial Sequence
  Description of Artificial Sequence: Synthetic oligonucleotide
agauuucaacugcucuaaa

SEQ ID NO: 1803754 - RNA, 19 nt, Artificial Sequence
  Description of Artificial Sequence: Synthetic oligonucleotide
guccauuuauuagagccaa

SEQ ID NO: 1803755 - RNA, 19 nt, Artificial Sequence
  Description of Artificial Sequence: Synthetic oligonucleotide
uaccuacugaaagggcaug

SEQ ID NO: 1803756 - RNA, 19 nt, Artificial Sequence
  Description of Artificial Sequence: Synthetic oligonucleotide
gcuaaagacuuguucccca

SEQ ID NO: 1803757 - RNA, 19 nt, Artificial Sequence
  Description of Artificial Sequence: Synthetic oligonucleotide
cacagagcagucacccguc

SEQ ID NO: 1803758 - RNA, 19 nt, Artificial Sequence
  Description of Artificial Sequence: Synthetic oligonucleotide
ugaucacaguaagcuuaag

SEQ ID NO: 1803759 - RNA, 19 nt, Artificial Sequence
  Description of Artificial Sequence: Synthetic oligonucleotide
aagcuuaaguaaggaguua

SEQ ID NO: 1803760 - RNA, 19 nt, Artificial Sequence
  Description of Artificial Sequence: Synthetic oligonucleotide
ggcagggcgcacuccaccg

SEQ ID NO: 1803761 - RNA, 19 nt, Artificial Sequence
  Description of Artificial Sequence: Synthetic oligonucleotide
gagcagucacccgucagca

SEQ ID NO: 1803762 - RNA, 19 nt, Artificial Sequence
  Description of Artificial Sequence: Synthetic oligonucleotide
accuacugaaagggcaugu

SEQ ID NO: 1803763 - RNA, 19 nt, Artificial Sequence
  Description of Artificial Sequence: Synthetic oligonucleotide
augauuccguguugguuua

SEQ ID NO: 1803764 - RNA, 19 nt, Artificial Sequence
  Description of Artificial Sequence: Synthetic oligonucleotide
gaaugggaacaagguaguc

SEQ ID NO: 1803765 - RNA, 19 nt, Artificial Sequence
  Description of Artificial Sequence: Synthetic oligonucleotide
cagcuacaacccugcaaag

SEQ ID NO: 1803766 - RNA, 19 nt, Artificial Sequence
  Description of Artificial Sequence: Synthetic oligonucleotide
acuauuacccuaagucaua

SEQ ID NO: 1803767 - RNA, 19 nt, Artificial Sequence
  Description of Artificial Sequence: Synthetic oligonucleotide
agguaagaagcaaguugug

SEQ ID NO: 1803768 - RNA, 19 nt, Artificial Sequence
  Description of Artificial Sequence: Synthetic oligonucleotide
cucuaaaagucuaccuacu

SEQ ID NO: 1803769 - RNA, 19 nt, Artificial Sequence
  Description of Artificial Sequence: Synthetic oligonucleotide
agcccacagcucugcgucg

SEQ ID NO: 1803770 - RNA, 19 nt, Artificial Sequence
  Description of Artificial Sequence: Synthetic oligonucleotide
acaaaacuccagguaggaa

SEQ ID NO: 1803771 - RNA, 19 nt, Artificial Sequence
  Description of Artificial Sequence: Synthetic oligonucleotide
auguauaauuaagguggau

SEQ ID NO: 1803772 - RNA, 19 nt, Artificial Sequence
  Description of Artificial Sequence: Synthetic oligonucleotide
gcaucacuucuccccaucc

SEQ ID NO: 1803773 - RNA, 19 nt, Artificial Sequence
  Description of Artificial Sequence: Synthetic oligonucleotide
ggcuaaagacuuguucccc

SEQ ID NO: 1803774 - RNA, 19 nt, Artificial Sequence
  Description of Artificial Sequence: Synthetic oligonucleotide
gcuaguucaugggcuaaag

SEQ ID NO: 1803775 - RNA, 19 nt, Artificial Sequence
  Description of Artificial Sequence: Synthetic oligonucleotide
cagacgcuacacagagcag

SEQ ID NO: 1803776 - RNA, 19 nt, Artificial Sequence
  Description of Artificial Sequence: Synthetic oligonucleotide
aucguuacggacgcgcgua

SEQ ID NO: 1803777 - RNA, 19 nt, Artificial Sequence
  Description of Artificial Sequence: Synthetic oligonucleotide
gacagcacagauggaucga

SEQ ID NO: 1803778 - RNA, 19 nt, Artificial Sequence
  Description of Artificial Sequence: Synthetic oligonucleotide
ggccauuccaauguacuuc

SEQ ID NO: 1803779 - RNA, 19 nt, Artificial Sequence
  Description of Artificial Sequence: Synthetic oligonucleotide
gguccauuuauuagagcca

SEQ ID NO: 1803780 - RNA, 19 nt, Artificial Sequence
  Description of Artificial Sequence: Synthetic oligonucleotide
caacaggugccacuguuua

SEQ ID NO: 1803781 - RNA, 19 nt, Artificial Sequence
  Description of Artificial Sequence: Synthetic oligonucleotide
cagugcaauggauccacaa

SEQ ID NO: 1803782 - RNA, 19 nt, Artificial Sequence
  Description of Artificial Sequence: Synthetic oligonucleotide
ggcagacccaaggugcagg

SEQ ID NO: 1803783 - RNA, 19 nt, Artificial Sequence
  Description of Artificial Sequence: Synthetic oligonucleotide
gcaauggauccacaaacua

SEQ ID NO: 1803784 - RNA, 19 nt, Artificial Sequence
  Description of Artificial Sequence: Synthetic oligonucleotide
augcuacaacaggugccac

SEQ ID NO: 1803785 - RNA, 19 nt, Artificial Sequence
  Description of Artificial Sequence: Synthetic oligonucleotide
auccacaaacuauguuaua

SEQ ID NO: 1803786 - RNA, 19 nt, Artificial Sequence
  Description of Artificial Sequence: Synthetic oligonucleotide
ccaucguuacggacgcgcg

SEQ ID NO: 1803787 - RNA, 19 nt, Artificial Sequence
  Description of Artificial Sequence: Synthetic oligonucleotide
guagaaccagcuuccugua

SEQ ID NO: 1803788 - RNA, 19 nt, Artificial Sequence
  Description of Artificial Sequence: Synthetic oligonucleotide
guccuauuuuggcccucag

SEQ ID NO: 1803789 - RNA, 19 nt, Artificial Sequence
  Description of Artificial Sequence: Synthetic oligonucleotide
aggugccacuguuuacagu

SEQ ID NO: 1803790 - RNA, 19 nt, Artificial Sequence
  Description of Artificial Sequence: Synthetic oligonucleotide
gccaucguuacggacgcgc

SEQ ID NO: 1803791 - RNA, 19 nt, Artificial Sequence
  Description of Artificial Sequence: Synthetic oligonucleotide
aucucccuuuuggccauuc

SEQ ID NO: 1803792 - RNA, 19 nt, Artificial Sequence
  Description of Artificial Sequence: Synthetic oligonucleotide
gugaucacaguaagcuuaa

SEQ ID NO: 1803793 - RNA, 19 nt, Artificial Sequence
  Description of Artificial Sequence: Synthetic oligonucleotide
agcagggauacaacaccca

SEQ ID NO: 1803794 - RNA, 19 nt, Artificial Sequence
  Description of Artificial Sequence: Synthetic oligonucleotide
uguggacuugcugccccac

SEQ ID NO: 1803795 - RNA, 19 nt, Artificial Sequence
  Description of Artificial Sequence: Synthetic oligonucleotide
gugcuagaaugggaacaag

SEQ ID NO: 1803796 - RNA, 19 nt, Artificial Sequence
  Description of Artificial Sequence: Synthetic oligonucleotide
acaacaggugccacuguuu

SEQ ID NO: 1803797 - RNA, 19 nt, Artificial Sequence
  Description of Artificial Sequence: Synthetic oligonucleotide
gcucuuucccaucgaagga

SEQ ID NO: 1803798 - RNA, 19 nt, Artificial Sequence
  Description of Artificial Sequence: Synthetic oligonucleotide
ggugcuagaaugggaacaa

SEQ ID NO: 1803799 - RNA, 19 nt, Artificial Sequence
  Description of Artificial Sequence: Synthetic oligonucleotide
agcaaguuguggacuugcu

SEQ ID NO: 1803800 - RNA, 19 nt, Artificial Sequence
  Description of Artificial Sequence: Synthetic oligonucleotide
uagcuaguucaugggcuaa

SEQ ID NO: 1803801 - RNA, 19 nt, Artificial Sequence
  Description of Artificial Sequence: Synthetic oligonucleotide
aagcugcauuauucauuuu

SEQ ID NO: 1803802 - RNA, 19 nt, Artificial Sequence
  Description of Artificial Sequence: Synthetic oligonucleotide
acuugcugccccacccaag

SEQ ID NO: 1803803 - RNA, 19 nt, Artificial Sequence
  Description of Artificial Sequence: Synthetic oligonucleotide
cuaccuacugaaagggcau

SEQ ID NO: 1803804 - RNA, 19 nt, Artificial Sequence
  Description of Artificial Sequence: Synthetic oligonucleotide
gacccaaggugcaggcuuc

SEQ ID NO: 1803805 - RNA, 19 nt, Artificial Sequence
  Description of Artificial Sequence: Synthetic oligonucleotide
agauuacugcagauuucau

SEQ ID NO: 1803806 - RNA, 19 nt, Artificial Sequence
  Description of Artificial Sequence: Synthetic oligonucleotide
gucugcucucagcuacaac

SEQ ID NO: 1803807 - RNA, 19 nt, Artificial Sequence
  Description of Artificial Sequence: Synthetic oligonucleotide
uuccccaauguguccuauu

SEQ ID NO: 1803808 - RNA, 19 nt, Artificial Sequence
  Description of Artificial Sequence: Synthetic oligonucleotide
agcuaguucaugggcuaaa

SEQ ID NO: 1803809 - RNA, 19 nt, Artificial Sequence
  Description of Artificial Sequence: Synthetic oligonucleotide
cuccgccaucguuacggac

SEQ ID NO: 1803810 - RNA, 19 nt, Artificial Sequence
  Description of Artificial Sequence: Synthetic oligonucleotide
gauuccguguugguuuagu

SEQ ID NO: 1803811 - RNA, 19 nt, Artificial Sequence
  Description of Artificial Sequence: Synthetic oligonucleotide
gcucucagcuacaacccug

SEQ ID NO: 1803812 - RNA, 19 nt, Artificial Sequence
  Description of Artificial Sequence: Synthetic oligonucleotide
caucagugcaauggaucca

SEQ ID NO: 1803813 - RNA, 19 nt, Artificial Sequence
  Description of Artificial Sequence: Synthetic oligonucleotide
cagcacagauggaucgaga

SEQ ID NO: 1803814 - RNA, 19 nt, Artificial Sequence
  Description of Artificial Sequence: Synthetic oligonucleotide
gggcgcacuccaccgaagc

SEQ ID NO: 1803815 - RNA, 19 nt, Artificial Sequence
  Description of Artificial Sequence: Synthetic oligonucleotide
gaucgagauaauagauaau

SEQ ID NO: 1803816 - RNA, 19 nt, Artificial Sequence
  Description of Artificial Sequence: Synthetic oligonucleotide
gcgcacuccaccgaagcug

SEQ ID NO: 1803817 - RNA, 19 nt, Artificial Sequence
  Description of Artificial Sequence: Synthetic oligonucleotide
gcagucacccgucagcagu

SEQ ID NO: 1803818 - RNA, 19 nt, Artificial Sequence
  Description of Artificial Sequence: Synthetic oligonucleotide
acccgucagcagucugcuc

SEQ ID NO: 1803819 - RNA, 19 nt, Artificial Sequence
  Description of Artificial Sequence: Synthetic oligonucleotide
ccaagcaaccgcagcaaga

SEQ ID NO: 1803820 - RNA, 19 nt, Artificial Sequence
  Description of Artificial Sequence: Synthetic oligonucleotide
cguagucucaacgagcaga

SEQ ID NO: 1803821 - RNA, 19 nt, Artificial Sequence
  Description of Artificial Sequence: Synthetic oligonucleotide
cagauggaucgagauaaua

SEQ ID NO: 1803822 - RNA, 19 nt, Artificial Sequence
  Description of Artificial Sequence: Synthetic oligonucleotide
uggcccucagagguucagu

SEQ ID NO: 1803823 - RNA, 19 nt, Artificial Sequence
  Description of Artificial Sequence: Synthetic oligonucleotide
agguaggaagacaggcuua

SEQ ID NO: 1803824 - RNA, 19 nt, Artificial Sequence
  Description of Artificial Sequence: Synthetic oligonucleotide
cuguacgaaagagcaaagu

SEQ ID NO: 1803825 - RNA, 19 nt, Artificial Sequence
  Description of Artificial Sequence: Synthetic oligonucleotide
acgcuacacagagcaguca

SEQ ID NO: 1803826 - RNA, 19 nt, Artificial Sequence
  Description of Artificial Sequence: Synthetic oligonucleotide
cccaucgaaggacuuuguc

SEQ ID NO: 1803827 - RNA, 19 nt, Artificial Sequence
  Description of Artificial Sequence: Synthetic oligonucleotide
caucacuucuccccauccu

SEQ ID NO: 1803828 - RNA, 19 nt, Artificial Sequence
  Description of Artificial Sequence: Synthetic oligonucleotide
cagucugcucucagcuaca

SEQ ID NO: 1803829 - RNA, 19 nt, Artificial Sequence
  Description of Artificial Sequence: Synthetic oligonucleotide
cccaagcaaccgcagcaag

SEQ ID NO: 1803830 - RNA, 19 nt, Artificial Sequence
  Description of Artificial Sequence: Synthetic oligonucleotide
cgcguagucucaacgagca

SEQ ID NO: 1803831 - RNA, 19 nt, Artificial Sequence
  Description of Artificial Sequence: Synthetic oligonucleotide
ccacuaccuugaauauagc

SEQ ID NO: 1803832 - RNA, 19 nt, Artificial Sequence
  Description of Artificial Sequence: Synthetic oligonucleotide
gggcagggcgcacuccacc

SEQ ID NO: 1803833 - RNA, 19 nt, Artificial Sequence
  Description of Artificial Sequence: Synthetic oligonucleotide
ccgccaucguuacggacgc

SEQ ID NO: 1803834 - RNA, 19 nt, Artificial Sequence
  Description of Artificial Sequence: Synthetic oligonucleotide
gcgcguagucucaacgagc

SEQ ID NO: 1803835 - RNA, 19 nt, Artificial Sequence
  Description of Artificial Sequence: Synthetic oligonucleotide
gcacagauggaucgagaua

SEQ ID NO: 1803836 - RNA, 19 nt, Artificial Sequence
  Description of Artificial Sequence: Synthetic oligonucleotide
ccuuggugcuagaauggga

SEQ ID NO: 1803837 - RNA, 19 nt, Artificial Sequence
  Description of Artificial Sequence: Synthetic oligonucleotide
agucacccgucagcagucu

SEQ ID NO: 1803838 - RNA, 19 nt, Artificial Sequence
  Description of Artificial Sequence: Synthetic oligonucleotide
cgcgcguagucucaacgag

SEQ ID NO: 1803839 - RNA, 19 nt, Artificial Sequence
  Description of Artificial Sequence: Synthetic oligonucleotide
guaaggaguuacagacgcu

SEQ ID NO: 1803840 - RNA, 19 nt, Artificial Sequence
  Description of Artificial Sequence: Synthetic oligonucleotide
caccaacacccgcacgcca

SEQ ID NO: 1803841 - RNA, 19 nt, Artificial Sequence
  Description of Artificial Sequence: Synthetic oligonucleotide
gcguagucucaacgagcag

SEQ ID NO: 1803842 - RNA, 19 nt, Artificial Sequence
  Description of Artificial Sequence: Synthetic oligonucleotide
gguaggaagacaggcuuau

SEQ ID NO: 1803843 - RNA, 19 nt, Artificial Sequence
  Description of Artificial Sequence: Synthetic oligonucleotide
ccguguugguuuaguccag

SEQ ID NO: 1803844 - RNA, 19 nt, Artificial Sequence
  Description of Artificial Sequence: Synthetic oligonucleotide
caucguuacggacgcgcgu

SEQ ID NO: 1803845 - RNA, 19 nt, Artificial Sequence
  Description of Artificial Sequence: Synthetic oligonucleotide
gcuggggaggugagaaaac

SEQ ID NO: 1803846 - RNA, 19 nt, Artificial Sequence
  Description of Artificial Sequence: Synthetic oligonucleotide
agggcgcacuccaccgaag

SEQ ID NO: 1803847 - RNA, 19 nt, Artificial Sequence
  Description of Artificial Sequence: Synthetic oligonucleotide
cccacccaagcaaccgcag

SEQ ID NO: 1803848 - RNA, 19 nt, Artificial Sequence
  Description of Artificial Sequence: Synthetic oligonucleotide
cagggcgcacuccaccgaa

SEQ ID NO: 1803849 - RNA, 19 nt, Artificial Sequence
  Description of Artificial Sequence: Synthetic oligonucleotide
cagcaucagugcaauggau

SEQ ID NO: 1803850 - RNA, 19 nt, Artificial Sequence
  Description of Artificial Sequence: Synthetic oligonucleotide
ccacuucccaggggcaggg

SEQ ID NO: 1803851 - RNA, 19 nt, Artificial Sequence
  Description of Artificial Sequence: Synthetic oligonucleotide
acggacgcgcguagucuca

SEQ ID NO: 1803852 - RNA, 19 nt, Artificial Sequence
  Description of Artificial Sequence: Synthetic oligonucleotide
guucagugguccauuuauu

SEQ ID NO: 1803853 - RNA, 19 nt, Artificial Sequence
  Description of Artificial Sequence: Synthetic oligonucleotide
cacuucccaggggcagggc

SEQ ID NO: 1803854 - RNA, 19 nt, Artificial Sequence
  Description of Artificial Sequence: Synthetic oligonucleotide
gcaaccgcagcaagagaaa

SEQ ID NO: 1803855 - RNA, 19 nt, Artificial Sequence
  Description of Artificial Sequence: Synthetic oligonucleotide
guguccuauuuuggcccuc

SEQ ID NO: 1803856 - RNA, 19 nt, Artificial Sequence
  Description of Artificial Sequence: Synthetic oligonucleotide
caugggcuaaagacuuguu

SEQ ID NO: 1803857 - RNA, 19 nt, Artificial Sequence
  Description of Artificial Sequence: Synthetic oligonucleotide
agguggaaaccaggcucuu

SEQ ID NO: 1803858 - RNA, 19 nt, Artificial Sequence
  Description of Artificial Sequence: Synthetic oligonucleotide
ggacgcgcguagucucaac

SEQ ID NO: 1803859 - RNA, 19 nt, Artificial Sequence
  Description of Artificial Sequence: Synthetic oligonucleotide
ccccacccaagcaaccgca

SEQ ID NO: 1803860 - RNA, 19 nt, Artificial Sequence
  Description of Artificial Sequence: Synthetic oligonucleotide
gcagggcgcacuccaccga

SEQ ID NO: 1803861 - RNA, 19 nt, Artificial Sequence
  Description of Artificial Sequence: Synthetic oligonucleotide
ggcgcacuccaccgaagcu

SEQ ID NO: 1803862 - RNA, 19 nt, Artificial Sequence
  Description of Artificial Sequence: Synthetic oligonucleotide
cgaagcugcauuauucauu

SEQ ID NO: 1803863 - RNA, 19 nt, Artificial Sequence
  Description of Artificial Sequence: Synthetic oligonucleotide
cagcucugcgucgaguuuu

SEQ ID NO: 1803864 - RNA, 19 nt, Artificial Sequence
  Description of Artificial Sequence: Synthetic oligonucleotide
cacccgucagcagucugcu

SEQ ID NO: 1803865 - RNA, 19 nt, Artificial Sequence
  Description of Artificial Sequence: Synthetic oligonucleotide
cagugcuggggaggugaga

SEQ ID NO: 1803866 - RNA, 19 nt, Artificial Sequence
  Description of Artificial Sequence: Synthetic oligonucleotide
cacuccaccgaagcugcau

SEQ ID NO: 1803867 - RNA, 19 nt, Artificial Sequence
  Description of Artificial Sequence: Synthetic oligonucleotide
guaggaagacaggcuuauu

SEQ ID NO: 1803868 - RNA, 19 nt, Artificial Sequence
  Description of Artificial Sequence: Synthetic oligonucleotide
guuccccaauguguccuau

SEQ ID NO: 1803869 - RNA, 19 nt, Artificial Sequence
  Description of Artificial Sequence: Synthetic oligonucleotide
gcccacagcucugcgucga

SEQ ID NO: 1803870 - RNA, 19 nt, Artificial Sequence
  Description of Artificial Sequence: Synthetic oligonucleotide
ccauuccaauguacuucaa

SEQ ID NO: 1803871 - RNA, 19 nt, Artificial Sequence
  Description of Artificial Sequence: Synthetic oligonucleotide
gggauacaacacccaugau

SEQ ID NO: 1803872 - RNA, 19 nt, Artificial Sequence
  Description of Artificial Sequence: Synthetic oligonucleotide
cagcaucacuucuccccau

SEQ ID NO: 1803873 - RNA, 19 nt, Artificial Sequence
  Description of Artificial Sequence: Synthetic oligonucleotide
caggaacagcagggauaca

SEQ ID NO: 1803874 - RNA, 19 nt, Artificial Sequence
  Description of Artificial Sequence: Synthetic oligonucleotide
cagacccaaggugcaggcu

SEQ ID NO: 1803875 - RNA, 19 nt, Artificial Sequence
  Description of Artificial Sequence: Synthetic oligonucleotide
ccccaauguguccuauuuu

SEQ ID NO: 1803876 - RNA, 19 nt, Artificial Sequence
  Description of Artificial Sequence: Synthetic oligonucleotide
gcacuccaccgaagcugca

SEQ ID NO: 1803877 - RNA, 19 nt, Artificial Sequence
  Description of Artificial Sequence: Synthetic oligonucleotide
ccgcagcaagagaaacaau

SEQ ID NO: 1803878 - RNA, 19 nt, Artificial Sequence
  Description of Artificial Sequence: Synthetic oligonucleotide
cgccaucguuacggacgcg

SEQ ID NO: 1803879 - RNA, 19 nt, Artificial Sequence
  Description of Artificial Sequence: Synthetic oligonucleotide
ccacagcucugcgucgagu

SEQ ID NO: 1803880 - RNA, 19 nt, Artificial Sequence
  Description of Artificial Sequence: Synthetic oligonucleotide
cguuacggacgcgcguagu

SEQ ID NO: 1803881 - RNA, 19 nt, Artificial Sequence
  Description of Artificial Sequence: Synthetic oligonucleotide
cggacgcgcguagucucaa

SEQ ID NO: 1803882 - RNA, 19 nt, Artificial Sequence
  Description of Artificial Sequence: Synthetic oligonucleotide
aaaugucuaaaguaggagc

SEQ ID NO: 1803883 - RNA, 19 nt, Artificial Sequence
  Description of Artificial Sequence: Synthetic oligonucleotide
aaaacaacaucauauagca

SEQ ID NO: 1803884 - RNA, 19 nt, Artificial Sequence
  Description of Artificial Sequence: Synthetic oligonucleotide
uuuacuuaaauccaccuug

SEQ ID NO: 1803885 - RNA, 19 nt, Artificial Sequence
  Description of Artificial Sequence: Synthetic oligonucleotide
uaugauuucugaaagagga

SEQ ID NO: 1803886 - RNA, 19 nt, Artificial Sequence
  Description of Artificial Sequence: Synthetic oligonucleotide
auggaaagagauuugaugg

SEQ ID NO: 1803887 - RNA, 19 nt, Artificial Sequence
  Description of Artificial Sequence: Synthetic oligonucleotide
aauaccuaaguugauacac

SEQ ID NO: 1803888 - RNA, 19 nt, Artificial Sequence
  Description of Artificial Sequence: Synthetic oligonucleotide
aauggaaagagauuugaug

SEQ ID NO: 1803889 - RNA, 19 nt, Artificial Sequence
  Description of Artificial Sequence: Synthetic oligonucleotide
auacgaaggauucagguac

SEQ ID NO: 1803890 - RNA, 19 nt, Artificial Sequence
  Description of Artificial Sequence: Synthetic oligonucleotide
uguagaaucaaacugugaa

SEQ ID NO: 1803891 - RNA, 19 nt, Artificial Sequence
  Description of Artificial Sequence: Synthetic oligonucleotide
uuaacaaucacugagcuuc

SEQ ID NO: 1803892 - RNA, 19 nt, Artificial Sequence
  Description of Artificial Sequence: Synthetic oligonucleotide
ugaacuuagaaauaggcaa

SEQ ID NO: 1803893 - RNA, 19 nt, Artificial Sequence
  Description of Artificial Sequence: Synthetic oligonucleotide
aauaaucaucaaauguucc

SEQ ID NO: 1803894 - RNA, 19 nt, Artificial Sequence
  Description of Artificial Sequence: Synthetic oligonucleotide
aacaucauauagcauagca

SEQ ID NO: 1803895 - RNA, 19 nt, Artificial Sequence
  Description of Artificial Sequence: Synthetic oligonucleotide
aacaacaauccucugaagu

SEQ ID NO: 1803896 - RNA, 19 nt, Artificial Sequence
  Description of Artificial Sequence: Synthetic oligonucleotide
aacauuauaugguauagua

SEQ ID NO: 1803897 - RNA, 19 nt, Artificial Sequence
  Description of Artificial Sequence: Synthetic oligonucleotide
uucagguacagucacaaug

SEQ ID NO: 1803898 - RNA, 19 nt, Artificial Sequence
  Description of Artificial Sequence: Synthetic oligonucleotide
uucuaaagcaggucaaugg

SEQ ID NO: 1803899 - RNA, 19 nt, Artificial Sequence
  Description of Artificial Sequence: Synthetic oligonucleotide
uauaguaugauuucugaaa

SEQ ID NO: 1803900 - RNA, 19 nt, Artificial Sequence
  Description of Artificial Sequence: Synthetic oligonucleotide
uuagaaauaggcaaauguc

SEQ ID NO: 1803901 - RNA, 19 nt, Artificial Sequence
  Description of Artificial Sequence: Synthetic oligonucleotide
agaaucaaacugugaaucc

SEQ ID NO: 1803902 - RNA, 19 nt, Artificial Sequence
  Description of Artificial Sequence: Synthetic oligonucleotide
cuucacauuauucugacac

SEQ ID NO: 1803903 - RNA, 19 nt, Artificial Sequence
  Description of Artificial Sequence: Synthetic oligonucleotide
aaaacauuauaugguauag

SEQ ID NO: 1803904 - RNA, 19 nt, Artificial Sequence
  Description of Artificial Sequence: Synthetic oligonucleotide
aagacauuaacugcaacag

SEQ ID NO: 1803905 - RNA, 19 nt, Artificial Sequence
  Description of Artificial Sequence: Synthetic oligonucleotide
cacauguauauauaguagg

SEQ ID NO: 1803906 - RNA, 19 nt, Artificial Sequence
  Description of Artificial Sequence: Synthetic oligonucleotide
acagggaucaaaaugaguc

SEQ ID NO: 1803907 - RNA, 19 nt, Artificial Sequence
  Description of Artificial Sequence: Synthetic oligonucleotide
acaacaauccucugaaguc

SEQ ID NO: 1803908 - RNA, 19 nt, Artificial Sequence
  Description of Artificial Sequence: Synthetic oligonucleotide
aacugcaacagauuccaag

SEQ ID NO: 1803909 - RNA, 19 nt, Artificial Sequence
  Description of Artificial Sequence: Synthetic oligonucleotide
acuauucuaaagcagguca

SEQ ID NO: 1803910 - RNA, 19 nt, Artificial Sequence
  Description of Artificial Sequence: Synthetic oligonucleotide
ugaagucuggauucgaugc

SEQ ID NO: 1803911 - RNA, 19 nt, Artificial Sequence
  Description of Artificial Sequence: Synthetic oligonucleotide
agaaaacuauucuaaagca

SEQ ID NO: 1803912 - RNA, 19 nt, Artificial Sequence
  Description of Artificial Sequence: Synthetic oligonucleotide
uuuauacgaaggauucagg

SEQ ID NO: 1803913 - RNA, 19 nt, Artificial Sequence
  Description of Artificial Sequence: Synthetic oligonucleotide
aauccaguaaaugacaaaa

SEQ ID NO: 1803914 - RNA, 19 nt, Artificial Sequence
  Description of Artificial Sequence: Synthetic oligonucleotide
ucuaaagcaggucaaugga

SEQ ID NO: 1803915 - RNA, 19 nt, Artificial Sequence
  Description of Artificial Sequence: Synthetic oligonucleotide
ucaaauguuccaccuaagc

SEQ ID NO: 1803916 - RNA, 19 nt, Artificial Sequence
  Description of Artificial Sequence: Synthetic oligonucleotide
aggcauuauagccacuacc

SEQ ID NO: 1803917 - RNA, 19 nt, Artificial Sequence
  Description of Artificial Sequence: Synthetic oligonucleotide
aaugucuaaaguaggagca

SEQ ID NO: 1803918 - RNA, 19 nt, Artificial Sequence
  Description of Artificial Sequence: Synthetic oligonucleotide
cauuauagccacuaccagc

SEQ ID NO: 1803919 - RNA, 19 nt, Artificial Sequence
  Description of Artificial Sequence: Synthetic oligonucleotide
caggguuuaacaaucacug

SEQ ID NO: 1803920 - RNA, 19 nt, Artificial Sequence
  Description of Artificial Sequence: Synthetic oligonucleotide
uuuaacucaaggaagucuu

SEQ ID NO: 1803921 - RNA, 19 nt, Artificial Sequence
  Description of Artificial Sequence: Synthetic oligonucleotide
uuauacgaaggauucaggu

SEQ ID NO: 1803922 - RNA, 19 nt, Artificial Sequence
  Description of Artificial Sequence: Synthetic oligonucleotide
uuaacugcaacagauucca

SEQ ID NO: 1803923 - RNA, 19 nt, Artificial Sequence
  Description of Artificial Sequence: Synthetic oligonucleotide
ucuuagagaaccaacuuuu

SEQ ID NO: 1803924 - RNA, 19 nt, Artificial Sequence
  Description of Artificial Sequence: Synthetic oligonucleotide
aaggcgauugauuuuccug

SEQ ID NO: 1803925 - RNA, 19 nt, Artificial Sequence
  Description of Artificial Sequence: Synthetic oligonucleotide
uccaguuguagaaucaaac

SEQ ID NO: 1803926 - RNA, 19 nt, Artificial Sequence
  Description of Artificial Sequence: Synthetic oligonucleotide
ucaauaccccugaaaacag

SEQ ID NO: 1803927 - RNA, 19 nt, Artificial Sequence
  Description of Artificial Sequence: Synthetic oligonucleotide
uccaagaccacacuaacuu

SEQ ID NO: 1803928 - RNA, 19 nt, Artificial Sequence
  Description of Artificial Sequence: Synthetic oligonucleotide
uucuacacaggguuuaaca

SEQ ID NO: 1803929 - RNA, 19 nt, Artificial Sequence
  Description of Artificial Sequence: Synthetic oligonucleotide
aaaguuuauuugaacuuag

SEQ ID NO: 1803930 - RNA, 19 nt, Artificial Sequence
  Description of Artificial Sequence: Synthetic oligonucleotide
acuuaaauccaccuugcgu

SEQ ID NO: 1803931 - RNA, 19 nt, Artificial Sequence
  Description of Artificial Sequence: Synthetic oligonucleotide
ucccauagaaauaugucaa

SEQ ID NO: 1803932 - RNA, 19 nt, Artificial Sequence
  Description of Artificial Sequence: Synthetic oligonucleotide
acugcaacagauuccaaga

SEQ ID NO: 1803933 - RNA, 19 nt, Artificial Sequence
  Description of Artificial Sequence: Synthetic oligonucleotide
acaaaggcgauugauuuuc

SEQ ID NO: 1803934 - RNA, 19 nt, Artificial Sequence
  Description of Artificial Sequence: Synthetic oligonucleotide
ucaauagggaacaguaguc

SEQ ID NO: 1803935 - RNA, 19 nt, Artificial Sequence
  Description of Artificial Sequence: Synthetic oligonucleotide
caguuguagaaucaaacug

SEQ ID NO: 1803936 - RNA, 19 nt, Artificial Sequence
  Description of Artificial Sequence: Synthetic oligonucleotide
aagagauuugauggcaguc

SEQ ID NO: 1803937 - RNA, 19 nt, Artificial Sequence
  Description of Artificial Sequence: Synthetic oligonucleotide
cauuaacugcaacagauuc

SEQ ID NO: 1803938 - RNA, 19 nt, Artificial Sequence
  Description of Artificial Sequence: Synthetic oligonucleotide
aggauucagguacagucac

SEQ ID NO: 1803939 - RNA, 19 nt, Artificial Sequence
  Description of Artificial Sequence: Synthetic oligonucleotide
ugguuuuaccuagaaaucc

SEQ ID NO: 1803940 - RNA, 19 nt, Artificial Sequence
  Description of Artificial Sequence: Synthetic oligonucleotide
aacuauucuaaagcagguc

SEQ ID NO: 1803941 - RNA, 19 nt, Artificial Sequence
  Description of Artificial Sequence: Synthetic oligonucleotide
aauagggaacaguagucaa

SEQ ID NO: 1803942 - RNA, 19 nt, Artificial Sequence
  Description of Artificial Sequence: Synthetic oligonucleotide
aaauaccuaaguugauaca

SEQ ID NO: 1803943 - RNA, 19 nt, Artificial Sequence
  Description of Artificial Sequence: Synthetic oligonucleotide
uguaagcaaguaaaaugga

SEQ ID NO: 1803944 - RNA, 19 nt, Artificial Sequence
  Description of Artificial Sequence: Synthetic oligonucleotide
ugguauaguaugauuucug

SEQ ID NO: 1803945 - RNA, 19 nt, Artificial Sequence
  Description of Artificial Sequence: Synthetic oligonucleotide
ugcguuuugauuucuguaa

SEQ ID NO: 1803946 - RNA, 19 nt, Artificial Sequence
  Description of Artificial Sequence: Synthetic oligonucleotide
auuucuguaagcaaguaaa

SEQ ID NO: 1803947 - RNA, 19 nt, Artificial Sequence
  Description of Artificial Sequence: Synthetic oligonucleotide
ggguuuaacaaucacugag

SEQ ID NO: 1803948 - RNA, 19 nt, Artificial Sequence
  Description of Artificial Sequence: Synthetic oligonucleotide
aguuguagaaucaaacugu

SEQ ID NO: 1803949 - RNA, 19 nt, Artificial Sequence
  Description of Artificial Sequence: Synthetic oligonucleotide
ucuacacaggguuuaacaa

SEQ ID NO: 1803950 - RNA, 19 nt, Artificial Sequence
  Description of Artificial Sequence: Synthetic oligonucleotide
acaugggaaaacaaaggcg

SEQ ID NO: 1803951 - RNA, 19 nt, Artificial Sequence
  Description of Artificial Sequence: Synthetic oligonucleotide
cuggcuaucaaaguggaac

SEQ ID NO: 1803952 - RNA, 19 nt, Artificial Sequence
  Description of Artificial Sequence: Synthetic oligonucleotide
guaagcaaguaaaauggag

SEQ ID NO: 1803953 - RNA, 19 nt, Artificial Sequence
  Description of Artificial Sequence: Synthetic oligonucleotide
acuaccagcauagccauag

SEQ ID NO: 1803954 - RNA, 19 nt, Artificial Sequence
  Description of Artificial Sequence: Synthetic oligonucleotide
uguuugagcacaugggaaa

SEQ ID NO: 1803955 - RNA, 19 nt, Artificial Sequence
  Description of Artificial Sequence: Synthetic oligonucleotide
uggcuaucaaaguggaacc

SEQ ID NO: 1803956 - RNA, 19 nt, Artificial Sequence
  Description of Artificial Sequence: Synthetic oligonucleotide
ugugaauccauuucagcua

SEQ ID NO: 1803957 - RNA, 19 nt, Artificial Sequence
  Description of Artificial Sequence: Synthetic oligonucleotide
aggaagucuuuauacgaag

SEQ ID NO: 1803958 - RNA, 19 nt, Artificial Sequence
  Description of Artificial Sequence: Synthetic oligonucleotide
aguaggcucccauagaaau

SEQ ID NO: 1803959 - RNA, 19 nt, Artificial Sequence
  Description of Artificial Sequence: Synthetic oligonucleotide
uauacgaaggauucaggua

SEQ ID NO: 1803960 - RNA, 19 nt, Artificial Sequence
  Description of Artificial Sequence: Synthetic oligonucleotide
gugaauccauuucagcuag

SEQ ID NO: 1803961 - RNA, 19 nt, Artificial Sequence
  Description of Artificial Sequence: Synthetic oligonucleotide
auaguaggcucccauagaa

SEQ ID NO: 1803962 - RNA, 19 nt, Artificial Sequence
  Description of Artificial Sequence: Synthetic oligonucleotide
cuagaaauccaguuguaga

SEQ ID NO: 1803963 - RNA, 19 nt, Artificial Sequence
  Description of Artificial Sequence: Synthetic oligonucleotide
cuuagaaauaggcaaaugu

SEQ ID NO: 1803964 - RNA, 19 nt, Artificial Sequence
  Description of Artificial Sequence: Synthetic oligonucleotide
cuaacuugcaaaucaccuc

SEQ ID NO: 1803965 - RNA, 19 nt, Artificial Sequence
  Description of Artificial Sequence: Synthetic oligonucleotide
uccaguaaucuucaaugaa

SEQ ID NO: 1803966 - RNA, 19 nt, Artificial Sequence
  Description of Artificial Sequence: Synthetic oligonucleotide
auagccacuaccagcauag

SEQ ID NO: 1803967 - RNA, 19 nt, Artificial Sequence
  Description of Artificial Sequence: Synthetic oligonucleotide
aacucaaggaagucuuuau

SEQ ID NO: 1803968 - RNA, 19 nt, Artificial Sequence
  Description of Artificial Sequence: Synthetic oligonucleotide
cacacuaacuugcaaauca

SEQ ID NO: 1803969 - RNA, 19 nt, Artificial Sequence
  Description of Artificial Sequence: Synthetic oligonucleotide
uucccaugguuuuaccuag

SEQ ID NO: 1803970 - RNA, 19 nt, Artificial Sequence
  Description of Artificial Sequence: Synthetic oligonucleotide
acuaacuugcaaaucaccu

SEQ ID NO: 1803971 - RNA, 19 nt, Artificial Sequence
  Description of Artificial Sequence: Synthetic oligonucleotide
cugacacaaauaaucauca

SEQ ID NO: 1803972 - RNA, 19 nt, Artificial Sequence
  Description of Artificial Sequence: Synthetic oligonucleotide
gaaagagauuugauggcag

SEQ ID NO: 1803973 - RNA, 19 nt, Artificial Sequence
  Description of Artificial Sequence: Synthetic oligonucleotide
caaauguuccaccuaagca

SEQ ID NO: 1803974 - RNA, 19 nt, Artificial Sequence
  Description of Artificial Sequence: Synthetic oligonucleotide
aaguggaaccccaagacau

SEQ ID NO: 1803975 - RNA, 19 nt, Artificial Sequence
  Description of Artificial Sequence: Synthetic oligonucleotide
uuucuguaagcaaguaaaa

SEQ ID NO: 1803976 - RNA, 19 nt, Artificial Sequence
  Description of Artificial Sequence: Synthetic oligonucleotide
ugucguuuucuucuucaca

SEQ ID NO: 1803977 - RNA, 19 nt, Artificial Sequence
  Description of Artificial Sequence: Synthetic oligonucleotide
uccucugaagucuggauuc

SEQ ID NO: 1803978 - RNA, 19 nt, Artificial Sequence
  Description of Artificial Sequence: Synthetic oligonucleotide
acacauguauauauaguag

SEQ ID NO: 1803979 - RNA, 19 nt, Artificial Sequence
  Description of Artificial Sequence: Synthetic oligonucleotide
uggccuauuucaauggaaa

SEQ ID NO: 1803980 - RNA, 19 nt, Artificial Sequence
  Description of Artificial Sequence: Synthetic oligonucleotide
cuucaauaccccugaaaac

SEQ ID NO: 1803981 - RNA, 19 nt, Artificial Sequence
  Description of Artificial Sequence: Synthetic oligonucleotide
aaacuauucuaaagcaggu

SEQ ID NO: 1803982 - RNA, 19 nt, Artificial Sequence
  Description of Artificial Sequence: Synthetic oligonucleotide
aggcgauugauuuuccuga

SEQ ID NO: 1803983 - RNA, 19 nt, Artificial Sequence
  Description of Artificial Sequence: Synthetic oligonucleotide
ucaccucaguuuaauaauc

SEQ ID NO: 1803984 - RNA, 19 nt, Artificial Sequence
  Description of Artificial Sequence: Synthetic oligonucleotide
aaaggcgauugauuuuccu

SEQ ID NO: 1803985 - RNA, 19 nt, Artificial Sequence
  Description of Artificial Sequence: Synthetic oligonucleotide
uugauggcagucacuuugc

SEQ ID NO: 1803986 - RNA, 19 nt, Artificial Sequence
  Description of Artificial Sequence: Synthetic oligonucleotide
agcagaacaacaauccucu

SEQ ID NO: 1803987 - RNA, 19 nt, Artificial Sequence
  Description of Artificial Sequence: Synthetic oligonucleotide
gagauuugauggcagucac

SEQ ID NO: 1803988 - RNA, 19 nt, Artificial Sequence
  Description of Artificial Sequence: Synthetic oligonucleotide
ucacauuauucugacacaa

SEQ ID NO: 1803989 - RNA, 19 nt, Artificial Sequence
  Description of Artificial Sequence: Synthetic oligonucleotide
uaguaugauuucugaaaga

SEQ ID NO: 1803990 - RNA, 19 nt, Artificial Sequence
  Description of Artificial Sequence: Synthetic oligonucleotide
auuauaugguauaguauga

SEQ ID NO: 1803991 - RNA, 19 nt, Artificial Sequence
  Description of Artificial Sequence: Synthetic oligonucleotide
auucugacacaaauaauca

SEQ ID NO: 1803992 - RNA, 19 nt, Artificial Sequence
  Description of Artificial Sequence: Synthetic oligonucleotide
aaacagggaucaaaaugag

SEQ ID NO: 1803993 - RNA, 19 nt, Artificial Sequence
  Description of Artificial Sequence: Synthetic oligonucleotide
guauauauaguaggcuccc

SEQ ID NO: 1803994 - RNA, 19 nt, Artificial Sequence
  Description of Artificial Sequence: Synthetic oligonucleotide
uaccccugaaaacagggau

SEQ ID NO: 1803995 - RNA, 19 nt, Artificial Sequence
  Description of Artificial Sequence: Synthetic oligonucleotide
aacaaaggcgauugauuuu

SEQ ID NO: 1803996 - RNA, 19 nt, Artificial Sequence
  Description of Artificial Sequence: Synthetic oligonucleotide
aaagcaggucaauggaauu

SEQ ID NO: 1803997 - RNA, 19 nt, Artificial Sequence
  Description of Artificial Sequence: Synthetic oligonucleotide
uuugcuucucagacuuuca

SEQ ID NO: 1803998 - RNA, 19 nt, Artificial Sequence
  Description of Artificial Sequence: Synthetic oligonucleotide
cuuaaauccaccuugcguu

SEQ ID NO: 1803999 - RNA, 19 nt, Artificial Sequence
  Description of Artificial Sequence: Synthetic oligonucleotide
gaaagggccagggucgccg

SEQ ID NO: 1804000 - RNA, 19 nt, Artificial Sequence
  Description of Artificial Sequence: Synthetic oligonucleotide
acaaucacugagcuucaca

SEQ ID NO: 1804001 - RNA, 19 nt, Artificial Sequence
  Description of Artificial Sequence: Synthetic oligonucleotide
agagauuugauggcaguca

SEQ ID NO: 1804002 - RNA, 19 nt, Artificial Sequence
  Description of Artificial Sequence: Synthetic oligonucleotide
uaccuaaguugauacacau

SEQ ID NO: 1804003 - RNA, 19 nt, Artificial Sequence
  Description of Artificial Sequence: Synthetic oligonucleotide
gaccacacuaacuugcaaa

SEQ ID NO: 1804004 - RNA, 19 nt, Artificial Sequence
  Description of Artificial Sequence: Synthetic oligonucleotide
gguuuaacaaucacugagc

SEQ ID NO: 1804005 - RNA, 19 nt, Artificial Sequence
  Description of Artificial Sequence: Synthetic oligonucleotide
cauagcaauuuuguuuggc

SEQ ID NO: 1804006 - RNA, 19 nt, Artificial Sequence
  Description of Artificial Sequence: Synthetic oligonucleotide
accacacuaacuugcaaau

SEQ ID NO: 1804007 - RNA, 19 nt, Artificial Sequence
  Description of Artificial Sequence: Synthetic oligonucleotide
acacuaacuugcaaaucac

SEQ ID NO: 1804008 - RNA, 19 nt, Artificial Sequence
  Description of Artificial Sequence: Synthetic oligonucleotide
aaaucaccucaguuuaaua

SEQ ID NO: 1804009 - RNA, 19 nt, Artificial Sequence
  Description of Artificial Sequence: Synthetic oligonucleotide
ucugaagucuggauucgau

SEQ ID NO: 1804010 - RNA, 19 nt, Artificial Sequence
  Description of Artificial Sequence: Synthetic oligonucleotide
cuaaaguaggagcaauaca

SEQ ID NO: 1804011 - RNA, 19 nt, Artificial Sequence
  Description of Artificial Sequence: Synthetic oligonucleotide
gucaauagggaacaguagu

SEQ ID NO: 1804012 - RNA, 19 nt, Artificial Sequence
  Description of Artificial Sequence: Synthetic oligonucleotide
gucuuuauacgaaggauuc

SEQ ID NO: 1804013 - RNA, 19 nt, Artificial Sequence
  Description of Artificial Sequence: Synthetic oligonucleotide
gaacaacaauccucugaag

SEQ ID NO: 1804014 - RNA, 19 nt, Artificial Sequence
  Description of Artificial Sequence: Synthetic oligonucleotide
agcgccacgacaucaguga

SEQ ID NO: 1804015 - RNA, 19 nt, Artificial Sequence
  Description of Artificial Sequence: Synthetic oligonucleotide
auagcauagcaauuuuguu

SEQ ID NO: 1804016 - RNA, 19 nt, Artificial Sequence
  Description of Artificial Sequence: Synthetic oligonucleotide
uauagccacuaccagcaua

SEQ ID NO: 1804017 - RNA, 19 nt, Artificial Sequence
  Description of Artificial Sequence: Synthetic oligonucleotide
gagucaauagggaacagua

SEQ ID NO: 1804018 - RNA, 19 nt, Artificial Sequence
  Description of Artificial Sequence: Synthetic oligonucleotide
ugagucaauagggaacagu

SEQ ID NO: 1804019 - RNA, 19 nt, Artificial Sequence
  Description of Artificial Sequence: Synthetic oligonucleotide
acaggguuuaacaaucacu

SEQ ID NO: 1804020 - RNA, 19 nt, Artificial Sequence
  Description of Artificial Sequence: Synthetic oligonucleotide
ccucaguuuaauaauccag

SEQ ID NO: 1804021 - RNA, 19 nt, Artificial Sequence
  Description of Artificial Sequence: Synthetic oligonucleotide
aacaaucacugagcuucac

SEQ ID NO: 1804022 - RNA, 19 nt, Artificial Sequence
  Description of Artificial Sequence: Synthetic oligonucleotide
ggaagucuuuauacgaagg

SEQ ID NO: 1804023 - RNA, 19 nt, Artificial Sequence
  Description of Artificial Sequence: Synthetic oligonucleotide
cucaguuuaauaauccagu

SEQ ID NO: 1804024 - RNA, 19 nt, Artificial Sequence
  Description of Artificial Sequence: Synthetic oligonucleotide
aaggaagucuuuauacgaa

SEQ ID NO: 1804025 - RNA, 19 nt, Artificial Sequence
  Description of Artificial Sequence: Synthetic oligonucleotide
gaacuuagaaauaggcaaa

SEQ ID NO: 1804026 - RNA, 19 nt, Artificial Sequence
  Description of Artificial Sequence: Synthetic oligonucleotide
aguucccauaguugccagg

SEQ ID NO: 1804027 - RNA, 19 nt, Artificial Sequence
  Description of Artificial Sequence: Synthetic oligonucleotide
uucgaugccugcauauuuu

SEQ ID NO: 1804028 - RNA, 19 nt, Artificial Sequence
  Description of Artificial Sequence: Synthetic oligonucleotide
uugcguuuugauuucugua

SEQ ID NO: 1804029 - RNA, 19 nt, Artificial Sequence
  Description of Artificial Sequence: Synthetic oligonucleotide
uacgaaggauucagguaca

SEQ ID NO: 1804030 - RNA, 19 nt, Artificial Sequence
  Description of Artificial Sequence: Synthetic oligonucleotide
uaacaaucacugagcuuca

SEQ ID NO: 1804031 - RNA, 19 nt, Artificial Sequence
  Description of Artificial Sequence: Synthetic oligonucleotide
cagaacaacaauccucuga

SEQ ID NO: 1804032 - RNA, 19 nt, Artificial Sequence
  Description of Artificial Sequence: Synthetic oligonucleotide
augguauaguaugauuucu

SEQ ID NO: 1804033 - RNA, 19 nt, Artificial Sequence
  Description of Artificial Sequence: Synthetic oligonucleotide
cuuucagugagucugucgu

SEQ ID NO: 1804034 - RNA, 19 nt, Artificial Sequence
  Description of Artificial Sequence: Synthetic oligonucleotide
augguuuauaauauuugaa

SEQ ID NO: 1804035 - RNA, 19 nt, Artificial Sequence
  Description of Artificial Sequence: Synthetic oligonucleotide
cuagacaccagaaaacuau

SEQ ID NO: 1804036 - RNA, 19 nt, Artificial Sequence
  Description of Artificial Sequence: Synthetic oligonucleotide
agucaauagggaacaguag

SEQ ID NO: 1804037 - RNA, 19 nt, Artificial Sequence
  Description of Artificial Sequence: Synthetic oligonucleotide
uauucuaaagcaggucaau

SEQ ID NO: 1804038 - RNA, 19 nt, Artificial Sequence
  Description of Artificial Sequence: Synthetic oligonucleotide
uuaagaauguugggaugcu

SEQ ID NO: 1804039 - RNA, 19 nt, Artificial Sequence
  Description of Artificial Sequence: Synthetic oligonucleotide
agaaauaugucaacagcuu

SEQ ID NO: 1804040 - RNA, 19 nt, Artificial Sequence
  Description of Artificial Sequence: Synthetic oligonucleotide
aacagggaucaaaaugagu

SEQ ID NO: 1804041 - RNA, 19 nt, Artificial Sequence
  Description of Artificial Sequence: Synthetic oligonucleotide
acauuauaugguauaguau

SEQ ID NO: 1804042 - RNA, 19 nt, Artificial Sequence
  Description of Artificial Sequence: Synthetic oligonucleotide
uauauauaguaggcuccca

SEQ ID NO: 1804043 - RNA, 19 nt, Artificial Sequence
  Description of Artificial Sequence: Synthetic oligonucleotide
ggcauuauagccacuacca

SEQ ID NO: 1804044 - RNA, 19 nt, Artificial Sequence
  Description of Artificial Sequence: Synthetic oligonucleotide
agcuccaguaaucuucaau

SEQ ID NO: 1804045 - RNA, 19 nt, Artificial Sequence
  Description of Artificial Sequence: Synthetic oligonucleotide
ugacacaaauaaucaucaa

SEQ ID NO: 1804046 - RNA, 19 nt, Artificial Sequence
  Description of Artificial Sequence: Synthetic oligonucleotide
uccaccuugcguuuugauu

SEQ ID NO: 1804047 - RNA, 19 nt, Artificial Sequence
  Description of Artificial Sequence: Synthetic oligonucleotide
ugucuaaaguaggagcaau

SEQ ID NO: 1804048 - RNA, 19 nt, Artificial Sequence
  Description of Artificial Sequence: Synthetic oligonucleotide
aggguuuaacaaucacuga

SEQ ID NO: 1804049 - RNA, 19 nt, Artificial Sequence
  Description of Artificial Sequence: Synthetic oligonucleotide
uuaacucaaggaagucuuu

SEQ ID NO: 1804050 - RNA, 19 nt, Artificial Sequence
  Description of Artificial Sequence: Synthetic oligonucleotide
uucagcuaguaguuuguuu

SEQ ID NO: 1804051 - RNA, 19 nt, Artificial Sequence
  Description of Artificial Sequence: Synthetic oligonucleotide
ccuaaguugauacacaugu

SEQ ID NO: 1804052 - RNA, 19 nt, Artificial Sequence
  Description of Artificial Sequence: Synthetic oligonucleotide
ucucagacuuucagugagu

SEQ ID NO: 1804053 - RNA, 19 nt, Artificial Sequence
  Description of Artificial Sequence: Synthetic oligonucleotide
cuaagcagcuagacaccag

SEQ ID NO: 1804054 - RNA, 19 nt, Artificial Sequence
  Description of Artificial Sequence: Synthetic oligonucleotide
aguaggagcaauacagaau

SEQ ID NO: 1804055 - RNA, 19 nt, Artificial Sequence
  Description of Artificial Sequence: Synthetic oligonucleotide
gucaauggaauuuaucauu

SEQ ID NO: 1804056 - RNA, 19 nt, Artificial Sequence
  Description of Artificial Sequence: Synthetic oligonucleotide
gauuugauggcagucacuu

SEQ ID NO: 1804057 - RNA, 19 nt, Artificial Sequence
  Description of Artificial Sequence: Synthetic oligonucleotide
agggucgccggaccgcggc

SEQ ID NO: 1804058 - RNA, 19 nt, Artificial Sequence
  Description of Artificial Sequence: Synthetic oligonucleotide
agaaauccaguuguagaau

SEQ ID NO: 1804059 - RNA, 19 nt, Artificial Sequence
  Description of Artificial Sequence: Synthetic oligonucleotide
auuucaauggaaagagauu

SEQ ID NO: 1804060 - RNA, 19 nt, Artificial Sequence
  Description of Artificial Sequence: Synthetic oligonucleotide
caaaggcgauugauuuucc

SEQ ID NO: 1804061 - RNA, 19 nt, Artificial Sequence
  Description of Artificial Sequence: Synthetic oligonucleotide
ucgaugccugcauauuuuc

SEQ ID NO: 1804062 - RNA, 19 nt, Artificial Sequence
  Description of Artificial Sequence: Synthetic oligonucleotide
agcagcuagacaccagaaa

SEQ ID NO: 1804063 - RNA, 19 nt, Artificial Sequence
  Description of Artificial Sequence: Synthetic oligonucleotide
ggccuauuucaauggaaag

SEQ ID NO: 1804064 - RNA, 19 nt, Artificial Sequence
  Description of Artificial Sequence: Synthetic oligonucleotide
cagcuaguaguuuguuuug

SEQ ID NO: 1804065 - RNA, 19 nt, Artificial Sequence
  Description of Artificial Sequence: Synthetic oligonucleotide
caauagggaacaguaguca

SEQ ID NO: 1804066 - RNA, 19 nt, Artificial Sequence
  Description of Artificial Sequence: Synthetic oligonucleotide
agggaucaaaaugagucaa

SEQ ID NO: 1804067 - RNA, 19 nt, Artificial Sequence
  Description of Artificial Sequence: Synthetic oligonucleotide
auaccuaaguugauacaca

SEQ ID NO: 1804068 - RNA, 19 nt, Artificial Sequence
  Description of Artificial Sequence: Synthetic oligonucleotide
accccugaaaacagggauc

SEQ ID NO: 1804069 - RNA, 19 nt, Artificial Sequence
  Description of Artificial Sequence: Synthetic oligonucleotide
cagggaucaaaaugaguca

SEQ ID NO: 1804070 - RNA, 19 nt, Artificial Sequence
  Description of Artificial Sequence: Synthetic oligonucleotide
uucagugagucugucguuu

SEQ ID NO: 1804071 - RNA, 19 nt, Artificial Sequence
  Description of Artificial Sequence: Synthetic oligonucleotide
gcguuuugauuucuguaag

SEQ ID NO: 1804072 - RNA, 19 nt, Artificial Sequence
  Description of Artificial Sequence: Synthetic oligonucleotide
cagcauagccauaguuccc

SEQ ID NO: 1804073 - RNA, 19 nt, Artificial Sequence
  Description of Artificial Sequence: Synthetic oligonucleotide
cuguuugagcacaugggaa

SEQ ID NO: 1804074 - RNA, 19 nt, Artificial Sequence
  Description of Artificial Sequence: Synthetic oligonucleotide
cucagacuuucagugaguc

SEQ ID NO: 1804075 - RNA, 19 nt, Artificial Sequence
  Description of Artificial Sequence: Synthetic oligonucleotide
guucccauaguugccagga

SEQ ID NO: 1804076 - RNA, 19 nt, Artificial Sequence
  Description of Artificial Sequence: Synthetic oligonucleotide
uuucuacacaggguuuaac

SEQ ID NO: 1804077 - RNA, 19 nt, Artificial Sequence
  Description of Artificial Sequence: Synthetic oligonucleotide
auaguugccaggagguccu

SEQ ID NO: 1804078 - RNA, 19 nt, Artificial Sequence
  Description of Artificial Sequence: Synthetic oligonucleotide
aucaaauguuccaccuaag

SEQ ID NO: 1804079 - RNA, 19 nt, Artificial Sequence
  Description of Artificial Sequence: Synthetic oligonucleotide
gcuaucaaaguggaacccc

SEQ ID NO: 1804080 - RNA, 19 nt, Artificial Sequence
  Description of Artificial Sequence: Synthetic oligonucleotide
ggaaagagauuugauggca

SEQ ID NO: 1804081 - RNA, 19 nt, Artificial Sequence
  Description of Artificial Sequence: Synthetic oligonucleotide
aggaaagggccagggucgc

SEQ ID NO: 1804082 - RNA, 19 nt, Artificial Sequence
  Description of Artificial Sequence: Synthetic oligonucleotide
aaacaacaucauauagcau

SEQ ID NO: 1804083 - RNA, 19 nt, Artificial Sequence
  Description of Artificial Sequence: Synthetic oligonucleotide
gguuuuaccuagaaaucca

SEQ ID NO: 1804084 - RNA, 19 nt, Artificial Sequence
  Description of Artificial Sequence: Synthetic oligonucleotide
cagucacuuugcuucucag

SEQ ID NO: 1804085 - RNA, 19 nt, Artificial Sequence
  Description of Artificial Sequence: Synthetic oligonucleotide
uggaaccccaagacauuaa

SEQ ID NO: 1804086 - RNA, 19 nt, Artificial Sequence
  Description of Artificial Sequence: Synthetic oligonucleotide
ugauuucuguaagcaagua

SEQ ID NO: 1804087 - RNA, 19 nt, Artificial Sequence
  Description of Artificial Sequence: Synthetic oligonucleotide
uggauucgaugccugcaua

SEQ ID NO: 1804088 - RNA, 19 nt, Artificial Sequence
  Description of Artificial Sequence: Synthetic oligonucleotide
agcuaguaguuuguuuuga

SEQ ID NO: 1804089 - RNA, 19 nt, Artificial Sequence
  Description of Artificial Sequence: Synthetic oligonucleotide
cuuuaacucaaggaagucu

SEQ ID NO: 1804090 - RNA, 19 nt, Artificial Sequence
  Description of Artificial Sequence: Synthetic oligonucleotide
ccuagaaauccaguuguag

SEQ ID NO: 1804091 - RNA, 19 nt, Artificial Sequence
  Description of Artificial Sequence: Synthetic oligonucleotide
ugagcgccacgacaucagu

SEQ ID NO: 1804092 - RNA, 19 nt, Artificial Sequence
  Description of Artificial Sequence: Synthetic oligonucleotide
auagggaacaguagucaaa

SEQ ID NO: 1804093 - RNA, 19 nt, Artificial Sequence
  Description of Artificial Sequence: Synthetic oligonucleotide
accuaaguugauacacaug

SEQ ID NO: 1804094 - RNA, 19 nt, Artificial Sequence
  Description of Artificial Sequence: Synthetic oligonucleotide
cagguacagucacaaugac

SEQ ID NO: 1804095 - RNA, 19 nt, Artificial Sequence
  Description of Artificial Sequence: Synthetic oligonucleotide
gccuauuucaauggaaaga

SEQ ID NO: 1804096 - RNA, 19 nt, Artificial Sequence
  Description of Artificial Sequence: Synthetic oligonucleotide
caacaucauauagcauagc

SEQ ID NO: 1804097 - RNA, 19 nt, Artificial Sequence
  Description of Artificial Sequence: Synthetic oligonucleotide
cacgccucauccugccggg

SEQ ID NO: 1804098 - RNA, 19 nt, Artificial Sequence
  Description of Artificial Sequence: Synthetic oligonucleotide
caggcauuauagccacuac

SEQ ID NO: 1804099 - RNA, 19 nt, Artificial Sequence
  Description of Artificial Sequence: Synthetic oligonucleotide
uuauagccacuaccagcau

SEQ ID NO: 1804100 - RNA, 19 nt, Artificial Sequence
  Description of Artificial Sequence: Synthetic oligonucleotide
ucccaugguuuuaccuaga

SEQ ID NO: 1804101 - RNA, 19 nt, Artificial Sequence
  Description of Artificial Sequence: Synthetic oligonucleotide
gcacgccucauccugccgg

SEQ ID NO: 1804102 - RNA, 19 nt, Artificial Sequence
  Description of Artificial Sequence: Synthetic oligonucleotide
acgaaggauucagguacag

SEQ ID NO: 1804103 - RNA, 19 nt, Artificial Sequence
  Description of Artificial Sequence: Synthetic oligonucleotide
auuugauggcagucacuuu

SEQ ID NO: 1804104 - RNA, 19 nt, Artificial Sequence
  Description of Artificial Sequence: Synthetic oligonucleotide
cguuuugauuucuguaagc

SEQ ID NO: 1804105 - RNA, 19 nt, Artificial Sequence
  Description of Artificial Sequence: Synthetic oligonucleotide
aggcuacuucaauaccccu

SEQ ID NO: 1804106 - RNA, 19 nt, Artificial Sequence
  Description of Artificial Sequence: Synthetic oligonucleotide
cauggccuauuucaaugga

SEQ ID NO: 1804107 - RNA, 19 nt, Artificial Sequence
  Description of Artificial Sequence: Synthetic oligonucleotide
augucuaaaguaggagcaa

SEQ ID NO: 1804108 - RNA, 19 nt, Artificial Sequence
  Description of Artificial Sequence: Synthetic oligonucleotide
cuacacaggguuuaacaau

SEQ ID NO: 1804109 - RNA, 19 nt, Artificial Sequence
  Description of Artificial Sequence: Synthetic oligonucleotide
gagcgccacgacaucagug

SEQ ID NO: 1804110 - RNA, 19 nt, Artificial Sequence
  Description of Artificial Sequence: Synthetic oligonucleotide
agauuugauggcagucacu

SEQ ID NO: 1804111 - RNA, 19 nt, Artificial Sequence
  Description of Artificial Sequence: Synthetic oligonucleotide
agaccacacuaacuugcaa

SEQ ID NO: 1804112 - RNA, 19 nt, Artificial Sequence
  Description of Artificial Sequence: Synthetic oligonucleotide
ggcuaucaaaguggaaccc

SEQ ID NO: 1804113 - RNA, 19 nt, Artificial Sequence
  Description of Artificial Sequence: Synthetic oligonucleotide
ggaucaaaaugagucaaua

SEQ ID NO: 1804114 - RNA, 19 nt, Artificial Sequence
  Description of Artificial Sequence: Synthetic oligonucleotide
cugcacgccucauccugcc

SEQ ID NO: 1804115 - RNA, 19 nt, Artificial Sequence
  Description of Artificial Sequence: Synthetic oligonucleotide
gaaccccaagacauuaacu

SEQ ID NO: 1804116 - RNA, 19 nt, Artificial Sequence
  Description of Artificial Sequence: Synthetic oligonucleotide
aaaggcgggcgaggaggag

SEQ ID NO: 1804117 - RNA, 19 nt, Artificial Sequence
  Description of Artificial Sequence: Synthetic oligonucleotide
auggccuauuucaauggaa

SEQ ID NO: 1804118 - RNA, 19 nt, Artificial Sequence
  Description of Artificial Sequence: Synthetic oligonucleotide
cuaguaguuuguuuugauu

SEQ ID NO: 1804119 - RNA, 19 nt, Artificial Sequence
  Description of Artificial Sequence: Synthetic oligonucleotide
caccuugcguuuugauuuc

SEQ ID NO: 1804120 - RNA, 19 nt, Artificial Sequence
  Description of Artificial Sequence: Synthetic oligonucleotide
cagugagucugucguuuuc

SEQ ID NO: 1804121 - RNA, 19 nt, Artificial Sequence
  Description of Artificial Sequence: Synthetic oligonucleotide
agacuuucagugagucugu

SEQ ID NO: 1804122 - RNA, 19 nt, Artificial Sequence
  Description of Artificial Sequence: Synthetic oligonucleotide
caauggaaagagauuugau

SEQ ID NO: 1804123 - RNA, 19 nt, Artificial Sequence
  Description of Artificial Sequence: Synthetic oligonucleotide
ccccaagacauuaacugca

SEQ ID NO: 1804124 - RNA, 19 nt, Artificial Sequence
  Description of Artificial Sequence: Synthetic oligonucleotide
gcgauugauuuuccugaac

SEQ ID NO: 1804125 - RNA, 19 nt, Artificial Sequence
  Description of Artificial Sequence: Synthetic oligonucleotide
cagaaugguuuauaauauu

SEQ ID NO: 1804126 - RNA, 19 nt, Artificial Sequence
  Description of Artificial Sequence: Synthetic oligonucleotide
gcagaacaacaauccucug

SEQ ID NO: 1804127 - RNA, 19 nt, Artificial Sequence
  Description of Artificial Sequence: Synthetic oligonucleotide
aguggaaccccaagacauu

SEQ ID NO: 1804128 - RNA, 19 nt, Artificial Sequence
  Description of Artificial Sequence: Synthetic oligonucleotide
ccuugcguuuugauuucug

SEQ ID NO: 1804129 - RNA, 19 nt, Artificial Sequence
  Description of Artificial Sequence: Synthetic oligonucleotide
ccugcacgccucauccugc

SEQ ID NO: 1804130 - RNA, 19 nt, Artificial Sequence
  Description of Artificial Sequence: Synthetic oligonucleotide
ggccucuuagagaaccaac

SEQ ID NO: 1804131 - RNA, 19 nt, Artificial Sequence
  Description of Artificial Sequence: Synthetic oligonucleotide
gauucgaugccugcauauu

SEQ ID NO: 1804132 - RNA, 19 nt, Artificial Sequence
  Description of Artificial Sequence: Synthetic oligonucleotide
ggcgauugauuuuccugaa

SEQ ID NO: 1804133 - RNA, 19 nt, Artificial Sequence
  Description of Artificial Sequence: Synthetic oligonucleotide
ggaccgcggcuucaguccc

SEQ ID NO: 1804134 - RNA, 19 nt, Artificial Sequence
  Description of Artificial Sequence: Synthetic oligonucleotide
ggauucgaugccugcauau

SEQ ID NO: 1804135 - RNA, 19 nt, Artificial Sequence
  Description of Artificial Sequence: Synthetic oligonucleotide
accgcggcuucagucccag

SEQ ID NO: 1804136 - RNA, 19 nt, Artificial Sequence
  Description of Artificial Sequence: Synthetic oligonucleotide
cucugagcgccacgacauc

SEQ ID NO: 1804137 - RNA, 19 nt, Artificial Sequence
  Description of Artificial Sequence: Synthetic oligonucleotide
accuagaaauccaguugua

SEQ ID NO: 1804138 - RNA, 19 nt, Artificial Sequence
  Description of Artificial Sequence: Synthetic oligonucleotide
gcuaguaguuuguuuugau

SEQ ID NO: 1804139 - RNA, 19 nt, Artificial Sequence
  Description of Artificial Sequence: Synthetic oligonucleotide
gccucuuagagaaccaacu

SEQ ID NO: 1804140 - RNA, 19 nt, Artificial Sequence
  Description of Artificial Sequence: Synthetic oligonucleotide
cggaccgcggcuucagucc

SEQ ID NO: 1804141 - RNA, 19 nt, Artificial Sequence
  Description of Artificial Sequence: Synthetic oligonucleotide
cagauuccaagaccacacu

SEQ ID NO: 1804142 - RNA, 19 nt, Artificial Sequence
  Description of Artificial Sequence: Synthetic oligonucleotide
ggcucccauagaaauaugu

SEQ ID NO: 1804143 - RNA, 19 nt, Artificial Sequence
  Description of Artificial Sequence: Synthetic oligonucleotide
gucccuguuugagcacaug

SEQ ID NO: 1804144 - RNA, 19 nt, Artificial Sequence
  Description of Artificial Sequence: Synthetic oligonucleotide
cagggucgccggaccgcgg

SEQ ID NO: 1804145 - RNA, 19 nt, Artificial Sequence
  Description of Artificial Sequence: Synthetic oligonucleotide
ccaugguuuuaccuagaaa

SEQ ID NO: 1804146 - RNA, 19 nt, Artificial Sequence
  Description of Artificial Sequence: Synthetic oligonucleotide
ccacacuaacuugcaaauc

SEQ ID NO: 1804147 - RNA, 19 nt, Artificial Sequence
  Description of Artificial Sequence: Synthetic oligonucleotide
cgccacgacaucagugaag

SEQ ID NO: 1804148 - RNA, 19 nt, Artificial Sequence
  Description of Artificial Sequence: Synthetic oligonucleotide
ccuucacccaggccugcac

SEQ ID NO: 1804149 - RNA, 19 nt, Artificial Sequence
  Description of Artificial Sequence: Synthetic oligonucleotide
ccggaccgcggcuucaguc

SEQ ID NO: 1804150 - RNA, 19 nt, Artificial Sequence
  Description of Artificial Sequence: Synthetic oligonucleotide
ccagggucgccggaccgcg

SEQ ID NO: 1804151 - RNA, 19 nt, Artificial Sequence
  Description of Artificial Sequence: Synthetic oligonucleotide
gcaaaucaccucaguuuaa

SEQ ID NO: 1804152 - RNA, 19 nt, Artificial Sequence
  Description of Artificial Sequence: Synthetic oligonucleotide
ucgccggaccgcggcuuca

SEQ ID NO: 1804153 - RNA, 19 nt, Artificial Sequence
  Description of Artificial Sequence: Synthetic oligonucleotide
gggccucuuagagaaccaa

SEQ ID NO: 1804154 - RNA, 19 nt, Artificial Sequence
  Description of Artificial Sequence: Synthetic oligonucleotide
gccagggucgccggaccgc

SEQ ID NO: 1804155 - RNA, 19 nt, Artificial Sequence
  Description of Artificial Sequence: Synthetic oligonucleotide
cacuaccagcauagccaua

SEQ ID NO: 1804156 - RNA, 19 nt, Artificial Sequence
  Description of Artificial Sequence: Synthetic oligonucleotide
gcgccacgacaucagugaa

SEQ ID NO: 1804157 - RNA, 19 nt, Artificial Sequence
  Description of Artificial Sequence: Synthetic oligonucleotide
cgaaggauucagguacagu

SEQ ID NO: 1804158 - RNA, 19 nt, Artificial Sequence
  Description of Artificial Sequence: Synthetic oligonucleotide
cgccggaccgcggcuucag

SEQ ID NO: 1804159 - RNA, 19 nt, Artificial Sequence
  Description of Artificial Sequence: Synthetic oligonucleotide
gccggaccgcggcuucagu

SEQ ID NO: 1804160 - RNA, 19 nt, Artificial Sequence
  Description of Artificial Sequence: Synthetic oligonucleotide
ggucgccggaccgcggcuu

SEQ ID NO: 1804161 - RNA, 19 nt, Artificial Sequence
  Description of Artificial Sequence: Synthetic oligonucleotide
uuuaggaucacucaguacu

SEQ ID NO: 1804162 - RNA, 19 nt, Artificial Sequence
  Description of Artificial Sequence: Synthetic oligonucleotide
caaaauaugaguagcaggg

SEQ ID NO: 1804163 - RNA, 19 nt, Artificial Sequence
  Description of Artificial Sequence: Synthetic oligonucleotide
uguaauaauagucuuuccc

SEQ ID NO: 1804164 - RNA, 19 nt, Artificial Sequence
  Description of Artificial Sequence: Synthetic oligonucleotide
accucuuuaaauuuucucc

SEQ ID NO: 1804165 - RNA, 19 nt, Artificial Sequence
  Description of Artificial Sequence: Synthetic oligonucleotide
aaacugaucauauaucucu

SEQ ID NO: 1804166 - RNA, 19 nt, Artificial Sequence
  Description of Artificial Sequence: Synthetic oligonucleotide
ugucuuaucaaaauaugag

SEQ ID NO: 1804167 - RNA, 19 nt, Artificial Sequence
  Description of Artificial Sequence: Synthetic oligonucleotide
agguauauuucuuccaucc

SEQ ID NO: 1804168 - RNA, 19 nt, Artificial Sequence
  Description of Artificial Sequence: Synthetic oligonucleotide
ugauacucuaaguucaugg

SEQ ID NO: 1804169 - RNA, 19 nt, Artificial Sequence
  Description of Artificial Sequence: Synthetic oligonucleotide
auuuaaugaacccucagca

SEQ ID NO: 1804170 - RNA, 19 nt, Artificial Sequence
  Description of Artificial Sequence: Synthetic oligonucleotide
uuuacgagaaaucuucaug

SEQ ID NO: 1804171 - RNA, 19 nt, Artificial Sequence
  Description of Artificial Sequence: Synthetic oligonucleotide
ucuuuuacgagaaaucuuc

SEQ ID NO: 1804172 - RNA, 19 nt, Artificial Sequence
  Description of Artificial Sequence: Synthetic oligonucleotide
uucauggauaacaggaggg

SEQ ID NO: 1804173 - RNA, 19 nt, Artificial Sequence
  Description of Artificial Sequence: Synthetic oligonucleotide
acauuaauugagcagccac

SEQ ID NO: 1804174 - RNA, 19 nt, Artificial Sequence
  Description of Artificial Sequence: Synthetic oligonucleotide
ucuuaucaaaauaugagua

SEQ ID NO: 1804175 - RNA, 19 nt, Artificial Sequence
  Description of Artificial Sequence: Synthetic oligonucleotide
uuucccuuuguaaagaaac

SEQ ID NO: 1804176 - RNA, 19 nt, Artificial Sequence
  Description of Artificial Sequence: Synthetic oligonucleotide
aucuucaugcguuugguac

SEQ ID NO: 1804177 - RNA, 19 nt, Artificial Sequence
  Description of Artificial Sequence: Synthetic oligonucleotide
ucuaaguucauggauaaca

SEQ ID NO: 1804178 - RNA, 19 nt, Artificial Sequence
  Description of Artificial Sequence: Synthetic oligonucleotide
uuaaugaacccucagcagu

SEQ ID NO: 1804179 - RNA, 19 nt, Artificial Sequence
  Description of Artificial Sequence: Synthetic oligonucleotide
cuuaucaaaauaugaguag

SEQ ID NO: 1804180 - RNA, 19 nt, Artificial Sequence
  Description of Artificial Sequence: Synthetic oligonucleotide
ucccaaaauguaauaauag

SEQ ID NO: 1804181 - RNA, 19 nt, Artificial Sequence
  Description of Artificial Sequence: Synthetic oligonucleotide
uaauugagcagccacacaa

SEQ ID NO: 1804182 - RNA, 19 nt, Artificial Sequence
  Description of Artificial Sequence: Synthetic oligonucleotide
aauaugaguagcaggguuc

SEQ ID NO: 1804183 - RNA, 19 nt, Artificial Sequence
  Description of Artificial Sequence: Synthetic oligonucleotide
acuauuugguguuucauca

SEQ ID NO: 1804184 - RNA, 19 nt, Artificial Sequence
  Description of Artificial Sequence: Synthetic oligonucleotide
uuaucaaaauaugaguagc

SEQ ID NO: 1804185 - RNA, 19 nt, Artificial Sequence
  Description of Artificial Sequence: Synthetic oligonucleotide
caggguuuaaucuuuuacg

SEQ ID NO: 1804186 - RNA, 19 nt, Artificial Sequence
  Description of Artificial Sequence: Synthetic oligonucleotide
uuaauaucgauggugagaa

SEQ ID NO: 1804187 - RNA, 19 nt, Artificial Sequence
  Description of Artificial Sequence: Synthetic oligonucleotide
auaucacugauugacauag

SEQ ID NO: 1804188 - RNA, 19 nt, Artificial Sequence
  Description of Artificial Sequence: Synthetic oligonucleotide
acuauauuugauccgucuc

SEQ ID NO: 1804189 - RNA, 19 nt, Artificial Sequence
  Description of Artificial Sequence: Synthetic oligonucleotide
ugcaauuuaaugaacccuc

SEQ ID NO: 1804190 - RNA, 19 nt, Artificial Sequence
  Description of Artificial Sequence: Synthetic oligonucleotide
aauacuauuugguguuuca

SEQ ID NO: 1804191 - RNA, 19 nt, Artificial Sequence
  Description of Artificial Sequence: Synthetic oligonucleotide
uauccguucaugcugaauc

SEQ ID NO: 1804192 - RNA, 19 nt, Artificial Sequence
  Description of Artificial Sequence: Synthetic oligonucleotide
uuagcuuucccuuuguaaa

SEQ ID NO: 1804193 - RNA, 19 nt, Artificial Sequence
  Description of Artificial Sequence: Synthetic oligonucleotide
uuuaauaucgauggugaga

SEQ ID NO: 1804194 - RNA, 19 nt, Artificial Sequence
  Description of Artificial Sequence: Synthetic oligonucleotide
aaugccuugaaaugaacuu

SEQ ID NO: 1804195 - RNA, 19 nt, Artificial Sequence
  Description of Artificial Sequence: Synthetic oligonucleotide
auauccaauaauucuccuc

SEQ ID NO: 1804196 - RNA, 19 nt, Artificial Sequence
  Description of Artificial Sequence: Synthetic oligonucleotide
uaaucuuuuacgagaaauc

SEQ ID NO: 1804197 - RNA, 19 nt, Artificial Sequence
  Description of Artificial Sequence: Synthetic oligonucleotide
ucauauaucucucucuuuu

SEQ ID NO: 1804198 - RNA, 19 nt, Artificial Sequence
  Description of Artificial Sequence: Synthetic oligonucleotide
caugcaauuuaaugaaccc

SEQ ID NO: 1804199 - RNA, 19 nt, Artificial Sequence
  Description of Artificial Sequence: Synthetic oligonucleotide
aacucuaccagcaggucac

SEQ ID NO: 1804200 - RNA, 19 nt, Artificial Sequence
  Description of Artificial Sequence: Synthetic oligonucleotide
agcgguguaaacuauauuu

SEQ ID NO: 1804201 - RNA, 19 nt, Artificial Sequence
  Description of Artificial Sequence: Synthetic oligonucleotide
gaagguaccgccuugucca

SEQ ID NO: 1804202 - RNA, 19 nt, Artificial Sequence
  Description of Artificial Sequence: Synthetic oligonucleotide
uuucgaaugccuugaaaug

SEQ ID NO: 1804203 - RNA, 19 nt, Artificial Sequence
  Description of Artificial Sequence: Synthetic oligonucleotide
aaucugagggcuugcuuuc

SEQ ID NO: 1804204 - RNA, 19 nt, Artificial Sequence
  Description of Artificial Sequence: Synthetic oligonucleotide
ccuuuguaaagaaacagcg

SEQ ID NO: 1804205 - RNA, 19 nt, Artificial Sequence
  Description of Artificial Sequence: Synthetic oligonucleotide
augcguuugguacagccac

SEQ ID NO: 1804206 - RNA, 19 nt, Artificial Sequence
  Description of Artificial Sequence: Synthetic oligonucleotide
auguaauaauagucuuucc

SEQ ID NO: 1804207 - RNA, 19 nt, Artificial Sequence
  Description of Artificial Sequence: Synthetic oligonucleotide
aaacucuaccagcagguca

SEQ ID NO: 1804208 - RNA, 19 nt, Artificial Sequence
  Description of Artificial Sequence: Synthetic oligonucleotide
ugccuugaaaugaacuuag

SEQ ID NO: 1804209 - RNA, 19 nt, Artificial Sequence
  Description of Artificial Sequence: Synthetic oligonucleotide
aauaucgauggugagaauu

SEQ ID NO: 1804210 - RNA, 19 nt, Artificial Sequence
  Description of Artificial Sequence: Synthetic oligonucleotide
caagugauacucuaaguuc

SEQ ID NO: 1804211 - RNA, 19 nt, Artificial Sequence
  Description of Artificial Sequence: Synthetic oligonucleotide
uguuucaucaccuucccuu

SEQ ID NO: 1804212 - RNA, 19 nt, Artificial Sequence
  Description of Artificial Sequence: Synthetic oligonucleotide
uuuuaauaucgauggugag

SEQ ID NO: 1804213 - RNA, 19 nt, Artificial Sequence
  Description of Artificial Sequence: Synthetic oligonucleotide
cauccuacgaggcagggag

SEQ ID NO: 1804214 - RNA, 19 nt, Artificial Sequence
  Description of Artificial Sequence: Synthetic oligonucleotide
aggguuuaaucuuuuacga

SEQ ID NO: 1804215 - RNA, 19 nt, Artificial Sequence
  Description of Artificial Sequence: Synthetic oligonucleotide
aguaccuccccgcuccucc

SEQ ID NO: 1804216 - RNA, 19 nt, Artificial Sequence
  Description of Artificial Sequence: Synthetic oligonucleotide
aagguguaccugaagguac

SEQ ID NO: 1804217 - RNA, 19 nt, Artificial Sequence
  Description of Artificial Sequence: Synthetic oligonucleotide
auccguucaugcugaaucc

SEQ ID NO: 1804218 - RNA, 19 nt, Artificial Sequence
  Description of Artificial Sequence: Synthetic oligonucleotide
ugaucauauaucucucucu

SEQ ID NO: 1804219 - RNA, 19 nt, Artificial Sequence
  Description of Artificial Sequence: Synthetic oligonucleotide
aagugauacucuaaguuca

SEQ ID NO: 1804220 - RNA, 19 nt, Artificial Sequence
  Description of Artificial Sequence: Synthetic oligonucleotide
aauaauagucuuucccauu

SEQ ID NO: 1804221 - RNA, 19 nt, Artificial Sequence
  Description of Artificial Sequence: Synthetic oligonucleotide
cacuuugcccaucugagcc

SEQ ID NO: 1804222 - RNA, 19 nt, Artificial Sequence
  Description of Artificial Sequence: Synthetic oligonucleotide
ugauccgucucuuuuaaau

SEQ ID NO: 1804223 - RNA, 19 nt, Artificial Sequence
  Description of Artificial Sequence: Synthetic oligonucleotide
aucaaaauaugaguagcag

SEQ ID NO: 1804224 - RNA, 19 nt, Artificial Sequence
  Description of Artificial Sequence: Synthetic oligonucleotide
uaauaauagucuuucccau

SEQ ID NO: 1804225 - RNA, 19 nt, Artificial Sequence
  Description of Artificial Sequence: Synthetic oligonucleotide
aacccucagcaguuuacac

SEQ ID NO: 1804226 - RNA, 19 nt, Artificial Sequence
  Description of Artificial Sequence: Synthetic oligonucleotide
agggucuuguuugagacgg

SEQ ID NO: 1804227 - RNA, 19 nt, Artificial Sequence
  Description of Artificial Sequence: Synthetic oligonucleotide
gauacucuaaguucaugga

SEQ ID NO: 1804228 - RNA, 19 nt, Artificial Sequence
  Description of Artificial Sequence: Synthetic oligonucleotide
guguaaacuauauuugauc

SEQ ID NO: 1804229 - RNA, 19 nt, Artificial Sequence
  Description of Artificial Sequence: Synthetic oligonucleotide
ucaugcguuugguacagcc

SEQ ID NO: 1804230 - RNA, 19 nt, Artificial Sequence
  Description of Artificial Sequence: Synthetic oligonucleotide
auagguauauuucuuccau

SEQ ID NO: 1804231 - RNA, 19 nt, Artificial Sequence
  Description of Artificial Sequence: Synthetic oligonucleotide
gacauagguauauuucuuc

SEQ ID NO: 1804232 - RNA, 19 nt, Artificial Sequence
  Description of Artificial Sequence: Synthetic oligonucleotide
aauaucacugauugacaua

SEQ ID NO: 1804233 - RNA, 19 nt, Artificial Sequence
  Description of Artificial Sequence: Synthetic oligonucleotide
aucucuauacagaauucac

SEQ ID NO: 1804234 - RNA, 19 nt, Artificial Sequence
  Description of Artificial Sequence: Synthetic oligonucleotide
uucgaaugccuugaaauga

SEQ ID NO: 1804235 - RNA, 19 nt, Artificial Sequence
  Description of Artificial Sequence: Synthetic oligonucleotide
uacagaauucacauccguc

SEQ ID NO: 1804236 - RNA, 19 nt, Artificial Sequence
  Description of Artificial Sequence: Synthetic oligonucleotide
uacuauuugguguuucauc

SEQ ID NO: 1804237 - RNA, 19 nt, Artificial Sequence
  Description of Artificial Sequence: Synthetic oligonucleotide
uggaauacuauuugguguu

SEQ ID NO: 1804238 - RNA, 19 nt, Artificial Sequence
  Description of Artificial Sequence: Synthetic oligonucleotide
guucuucucauccuacgag

SEQ ID NO: 1804239 - RNA, 19 nt, Artificial Sequence
  Description of Artificial Sequence: Synthetic oligonucleotide
aacugaucauauaucucuc

SEQ ID NO: 1804240 - RNA, 19 nt, Artificial Sequence
  Description of Artificial Sequence: Synthetic oligonucleotide
uggcacauuaauugagcag

SEQ ID NO: 1804241 - RNA, 19 nt, Artificial Sequence
  Description of Artificial Sequence: Synthetic oligonucleotide
acaaugucugcuggaauac

SEQ ID NO: 1804242 - RNA, 19 nt, Artificial Sequence
  Description of Artificial Sequence: Synthetic oligonucleotide
aggaggauauggcaucagg

SEQ ID NO: 1804243 - RNA, 19 nt, Artificial Sequence
  Description of Artificial Sequence: Synthetic oligonucleotide
ucgaccuccacccauccgu

SEQ ID NO: 1804244 - RNA, 19 nt, Artificial Sequence
  Description of Artificial Sequence: Synthetic oligonucleotide
uucccuuuguaaagaaaca

SEQ ID NO: 1804245 - RNA, 19 nt, Artificial Sequence
  Description of Artificial Sequence: Synthetic oligonucleotide
aaaauaugaguagcagggu

SEQ ID NO: 1804246 - RNA, 19 nt, Artificial Sequence
  Description of Artificial Sequence: Synthetic oligonucleotide
uuggcacauuaauugagca

SEQ ID NO: 1804247 - RNA, 19 nt, Artificial Sequence
  Description of Artificial Sequence: Synthetic oligonucleotide
uucaagugauacucuaagu

SEQ ID NO: 1804248 - RNA, 19 nt, Artificial Sequence
  Description of Artificial Sequence: Synthetic oligonucleotide
gauauggcaucagggaaag

SEQ ID NO: 1804249 - RNA, 19 nt, Artificial Sequence
  Description of Artificial Sequence: Synthetic oligonucleotide
uuagcgguguaaacuauau

SEQ ID NO: 1804250 - RNA, 19 nt, Artificial Sequence
  Description of Artificial Sequence: Synthetic oligonucleotide
cuucauaggcuucugcgac

SEQ ID NO: 1804251 - RNA, 19 nt, Artificial Sequence
  Description of Artificial Sequence: Synthetic oligonucleotide
aaaucuucaugcguuuggu

SEQ ID NO: 1804252 - RNA, 19 nt, Artificial Sequence
  Description of Artificial Sequence: Synthetic oligonucleotide
uccgucucuuuuaaauuug

SEQ ID NO: 1804253 - RNA, 19 nt, Artificial Sequence
  Description of Artificial Sequence: Synthetic oligonucleotide
uagucuuucccauuucgaa

SEQ ID NO: 1804254 - RNA, 19 nt, Artificial Sequence
  Description of Artificial Sequence: Synthetic oligonucleotide
ugagaauuuuguccucaga

SEQ ID NO: 1804255 - RNA, 19 nt, Artificial Sequence
  Description of Artificial Sequence: Synthetic oligonucleotide
cugggauauccguucaugc

SEQ ID NO: 1804256 - RNA, 19 nt, Artificial Sequence
  Description of Artificial Sequence: Synthetic oligonucleotide
agccaugcaauuuaaugaa

SEQ ID NO: 1804257 - RNA, 19 nt, Artificial Sequence
  Description of Artificial Sequence: Synthetic oligonucleotide
augaguagcaggguucuuc

SEQ ID NO: 1804258 - RNA, 19 nt, Artificial Sequence
  Description of Artificial Sequence: Synthetic oligonucleotide
uuaauugagcagccacaca

SEQ ID NO: 1804259 - RNA, 19 nt, Artificial Sequence
  Description of Artificial Sequence: Synthetic oligonucleotide
cuaccagcaggucaccgcg

SEQ ID NO: 1804260 - RNA, 19 nt, Artificial Sequence
  Description of Artificial Sequence: Synthetic oligonucleotide
ucucuagccaugcaauuua

SEQ ID NO: 1804261 - RNA, 19 nt, Artificial Sequence
  Description of Artificial Sequence: Synthetic oligonucleotide
aaagguguaccugaaggua

SEQ ID NO: 1804262 - RNA, 19 nt, Artificial Sequence
  Description of Artificial Sequence: Synthetic oligonucleotide
cuugaaaugaacuuagcuu

SEQ ID NO: 1804263 - RNA, 19 nt, Artificial Sequence
  Description of Artificial Sequence: Synthetic oligonucleotide
aaacaaugucugcuggaau

SEQ ID NO: 1804264 - RNA, 19 nt, Artificial Sequence
  Description of Artificial Sequence: Synthetic oligonucleotide
auacagaauucacauccgu

SEQ ID NO: 1804265 - RNA, 19 nt, Artificial Sequence
  Description of Artificial Sequence: Synthetic oligonucleotide
cucuuauauuuucaguguc

SEQ ID NO: 1804266 - RNA, 19 nt, Artificial Sequence
  Description of Artificial Sequence: Synthetic oligonucleotide
ugggauauccguucaugcu

SEQ ID NO: 1804267 - RNA, 19 nt, Artificial Sequence
  Description of Artificial Sequence: Synthetic oligonucleotide
uccaucaguaccuccccgc

SEQ ID NO: 1804268 - RNA, 19 nt, Artificial Sequence
  Description of Artificial Sequence: Synthetic oligonucleotide
uuccgucaggguuuaaucu

SEQ ID NO: 1804269 - RNA, 19 nt, Artificial Sequence
  Description of Artificial Sequence: Synthetic oligonucleotide
acuuugcccaucugagccg

SEQ ID NO: 1804270 - RNA, 19 nt, Artificial Sequence
  Description of Artificial Sequence: Synthetic oligonucleotide
uaaugaacccucagcaguu

SEQ ID NO: 1804271 - RNA, 19 nt, Artificial Sequence
  Description of Artificial Sequence: Synthetic oligonucleotide
cauugucucgaccuccacc

SEQ ID NO: 1804272 - RNA, 19 nt, Artificial Sequence
  Description of Artificial Sequence: Synthetic oligonucleotide
uuuaaucuuuuacgagaaa

SEQ ID NO: 1804273 - RNA, 19 nt, Artificial Sequence
  Description of Artificial Sequence: Synthetic oligonucleotide
ccaugcaauuuaaugaacc

SEQ ID NO: 1804274 - RNA, 19 nt, Artificial Sequence
  Description of Artificial Sequence: Synthetic oligonucleotide
gucuuaucaaaauaugagu

SEQ ID NO: 1804275 - RNA, 19 nt, Artificial Sequence
  Description of Artificial Sequence: Synthetic oligonucleotide
ugaucuuagcgguguaaac

SEQ ID NO: 1804276 - RNA, 19 nt, Artificial Sequence
  Description of Artificial Sequence: Synthetic oligonucleotide
ucgaaugccuugaaaugaa

SEQ ID NO: 1804277 - RNA, 19 nt, Artificial Sequence
  Description of Artificial Sequence: Synthetic oligonucleotide
ugacauagguauauuucuu

SEQ ID NO: 1804278 - RNA, 19 nt, Artificial Sequence
  Description of Artificial Sequence: Synthetic oligonucleotide
uccuaaggaucucuuugga

SEQ ID NO: 1804279 - RNA, 19 nt, Artificial Sequence
  Description of Artificial Sequence: Synthetic oligonucleotide
ucugggauauccguucaug

SEQ ID NO: 1804280 - RNA, 19 nt, Artificial Sequence
  Description of Artificial Sequence: Synthetic oligonucleotide
ucguuggcacauuaauuga

SEQ ID NO: 1804281 - RNA, 19 nt, Artificial Sequence
  Description of Artificial Sequence: Synthetic oligonucleotide
aucuuagcgguguaaacua

SEQ ID NO: 1804282 - RNA, 19 nt, Artificial Sequence
  Description of Artificial Sequence: Synthetic oligonucleotide
augcaauuuaaugaacccu

SEQ ID NO: 1804283 - RNA, 19 nt, Artificial Sequence
  Description of Artificial Sequence: Synthetic oligonucleotide
ggaggauauggcaucaggg

SEQ ID NO: 1804284 - RNA, 19 nt, Artificial Sequence
  Description of Artificial Sequence: Synthetic oligonucleotide
aacggcagcccauauccaa

SEQ ID NO: 1804285 - RNA, 19 nt, Artificial Sequence
  Description of Artificial Sequence: Synthetic oligonucleotide
acuaaaggggucaccaucu

SEQ ID NO: 1804286 - RNA, 19 nt, Artificial Sequence
  Description of Artificial Sequence: Synthetic oligonucleotide
guuggcacauuaauugagc

SEQ ID NO: 1804287 - RNA, 19 nt, Artificial Sequence
  Description of Artificial Sequence: Synthetic oligonucleotide
cacugauugacauagguau

SEQ ID NO: 1804288 - RNA, 19 nt, Artificial Sequence
  Description of Artificial Sequence: Synthetic oligonucleotide
ucuucauugucucgaccuc

SEQ ID NO: 1804289 - RNA, 19 nt, Artificial Sequence
  Description of Artificial Sequence: Synthetic oligonucleotide
cuuccgucaggguuuaauc

SEQ ID NO: 1804290 - RNA, 19 nt, Artificial Sequence
  Description of Artificial Sequence: Synthetic oligonucleotide
cugcaaacguggcaugagg

SEQ ID NO: 1804291 - RNA, 19 nt, Artificial Sequence
  Description of Artificial Sequence: Synthetic oligonucleotide
gggauauccguucaugcug

SEQ ID NO: 1804292 - RNA, 19 nt, Artificial Sequence
  Description of Artificial Sequence: Synthetic oligonucleotide
cuauuugguguuucaucac

SEQ ID NO: 1804293 - RNA, 19 nt, Artificial Sequence
  Description of Artificial Sequence: Synthetic oligonucleotide
aaggcacuaaaggggucac

SEQ ID NO: 1804294 - RNA, 19 nt, Artificial Sequence
  Description of Artificial Sequence: Synthetic oligonucleotide
uuaggaucacucaguacuu

SEQ ID NO: 1804295 - RNA, 19 nt, Artificial Sequence
  Description of Artificial Sequence: Synthetic oligonucleotide
cauagguauauuucuucca

SEQ ID NO: 1804296 - RNA, 19 nt, Artificial Sequence
  Description of Artificial Sequence: Synthetic oligonucleotide
auggauaacaggagggucu

SEQ ID NO: 1804297 - RNA, 19 nt, Artificial Sequence
  Description of Artificial Sequence: Synthetic oligonucleotide
uucugcgaccucuuuaaau

SEQ ID NO: 1804298 - RNA, 19 nt, Artificial Sequence
  Description of Artificial Sequence: Synthetic oligonucleotide
aaucuucaugcguuuggua

SEQ ID NO: 1804299 - RNA, 19 nt, Artificial Sequence
  Description of Artificial Sequence: Synthetic oligonucleotide
uaaaggggucaccaucuau

SEQ ID NO: 1804300 - RNA, 19 nt, Artificial Sequence
  Description of Artificial Sequence: Synthetic oligonucleotide
ucuccgugaaagguguacc

SEQ ID NO: 1804301 - RNA, 19 nt, Artificial Sequence
  Description of Artificial Sequence: Synthetic oligonucleotide
aaggggucaccaucuauuu

SEQ ID NO: 1804302 - RNA, 19 nt, Artificial Sequence
  Description of Artificial Sequence: Synthetic oligonucleotide
acccucagcaguuuacaca

SEQ ID NO: 1804303 - RNA, 19 nt, Artificial Sequence
  Description of Artificial Sequence: Synthetic oligonucleotide
agguguaccugaagguacc

SEQ ID NO: 1804304 - RNA, 19 nt, Artificial Sequence
  Description of Artificial Sequence: Synthetic oligonucleotide
cuucauugucucgaccucc

SEQ ID NO: 1804305 - RNA, 19 nt, Artificial Sequence
  Description of Artificial Sequence: Synthetic oligonucleotide
gaucuuagcgguguaaacu

SEQ ID NO: 1804306 - RNA, 19 nt, Artificial Sequence
  Description of Artificial Sequence: Synthetic oligonucleotide
uucaaagggguuggaaccu

SEQ ID NO: 1804307 - RNA, 19 nt, Artificial Sequence
  Description of Artificial Sequence: Synthetic oligonucleotide
ucccgcaaacugaucuuag

SEQ ID NO: 1804308 - RNA, 19 nt, Artificial Sequence
  Description of Artificial Sequence: Synthetic oligonucleotide
auaugaguagcaggguucu

SEQ ID NO: 1804309 - RNA, 19 nt, Artificial Sequence
  Description of Artificial Sequence: Synthetic oligonucleotide
caaagggguuggaaccucc

SEQ ID NO: 1804310 - RNA, 19 nt, Artificial Sequence
  Description of Artificial Sequence: Synthetic oligonucleotide
auuccugucucugggauau

SEQ ID NO: 1804311 - RNA, 19 nt, Artificial Sequence
  Description of Artificial Sequence: Synthetic oligonucleotide
agaaaucuucaugcguuug

SEQ ID NO: 1804312 - RNA, 19 nt, Artificial Sequence
  Description of Artificial Sequence: Synthetic oligonucleotide
uccgucaggguuuaaucuu

SEQ ID NO: 1804313 - RNA, 19 nt, Artificial Sequence
  Description of Artificial Sequence: Synthetic oligonucleotide
cuuuuacgagaaaucuuca

SEQ ID NO: 1804314 - RNA, 19 nt, Artificial Sequence
  Description of Artificial Sequence: Synthetic oligonucleotide
gaauacuauuugguguuuc

SEQ ID NO: 1804315 - RNA, 19 nt, Artificial Sequence
  Description of Artificial Sequence: Synthetic oligonucleotide
guacuucauaggcuucugc

SEQ ID NO: 1804316 - RNA, 19 nt, Artificial Sequence
  Description of Artificial Sequence: Synthetic oligonucleotide
ccgcaaacugaucuuagcg

SEQ ID NO: 1804317 - RNA, 19 nt, Artificial Sequence
  Description of Artificial Sequence: Synthetic oligonucleotide
caggguucuuuggaaacgg

SEQ ID NO: 1804318 - RNA, 19 nt, Artificial Sequence
  Description of Artificial Sequence: Synthetic oligonucleotide
auuugguguuucaucaccu

SEQ ID NO: 1804319 - RNA, 19 nt, Artificial Sequence
  Description of Artificial Sequence: Synthetic oligonucleotide
caucugagccgucucuagc

SEQ ID NO: 1804320 - RNA, 19 nt, Artificial Sequence
  Description of Artificial Sequence: Synthetic oligonucleotide
ucuuagcgguguaaacuau

SEQ ID NO: 1804321 - RNA, 19 nt, Artificial Sequence
  Description of Artificial Sequence: Synthetic oligonucleotide
uccaucguuggcacauuaa

SEQ ID NO: 1804322 - RNA, 19 nt, Artificial Sequence
  Description of Artificial Sequence: Synthetic oligonucleotide
aauugagcagccacacaau

SEQ ID NO: 1804323 - RNA, 19 nt, Artificial Sequence
  Description of Artificial Sequence: Synthetic oligonucleotide
agggcuugcuuucgguaag

SEQ ID NO: 1804324 - RNA, 19 nt, Artificial Sequence
  Description of Artificial Sequence: Synthetic oligonucleotide
uguuugagacgggaggguc

SEQ ID NO: 1804325 - RNA, 19 nt, Artificial Sequence
  Description of Artificial Sequence: Synthetic oligonucleotide
uuugguguuucaucaccuu

SEQ ID NO: 1804326 - RNA, 19 nt, Artificial Sequence
  Description of Artificial Sequence: Synthetic oligonucleotide
gucucugggauauccguuc

SEQ ID NO: 1804327 - RNA, 19 nt, Artificial Sequence
  Description of Artificial Sequence: Synthetic oligonucleotide
agacgggagggucccacag

SEQ ID NO: 1804328 - RNA, 19 nt, Artificial Sequence
  Description of Artificial Sequence: Synthetic oligonucleotide
cuucaugcguuugguacag

SEQ ID NO: 1804329 - RNA, 19 nt, Artificial Sequence
  Description of Artificial Sequence: Synthetic oligonucleotide
auagucuuucccauuucga

SEQ ID NO: 1804330 - RNA, 19 nt, Artificial Sequence
  Description of Artificial Sequence: Synthetic oligonucleotide
aagggguuggaaccuccaa

SEQ ID NO: 1804331 - RNA, 19 nt, Artificial Sequence
  Description of Artificial Sequence: Synthetic oligonucleotide
ugcgaccucuuuaaauuuu

SEQ ID NO: 1804332 - RNA, 19 nt, Artificial Sequence
  Description of Artificial Sequence: Synthetic oligonucleotide
cgcaaacugaucuuagcgg

SEQ ID NO: 1804333 - RNA, 19 nt, Artificial Sequence
  Description of Artificial Sequence: Synthetic oligonucleotide
acccauccgucuuccaaag

SEQ ID NO: 1804334 - RNA, 19 nt, Artificial Sequence
  Description of Artificial Sequence: Synthetic oligonucleotide
cauccguccacugccgugc

SEQ ID NO: 1804335 - RNA, 19 nt, Artificial Sequence
  Description of Artificial Sequence: Synthetic oligonucleotide
cagcaggucaccgcguugg

SEQ ID NO: 1804336 - RNA, 19 nt, Artificial Sequence
  Description of Artificial Sequence: Synthetic oligonucleotide
auaucgauggugagaauuu

SEQ ID NO: 1804337 - RNA, 19 nt, Artificial Sequence
  Description of Artificial Sequence: Synthetic oligonucleotide
cacaucucuauacagaauu

SEQ ID NO: 1804338 - RNA, 19 nt, Artificial Sequence
  Description of Artificial Sequence: Synthetic oligonucleotide
ugagggcuugcuuucggua

SEQ ID NO: 1804339 - RNA, 19 nt, Artificial Sequence
  Description of Artificial Sequence: Synthetic oligonucleotide
ugucucgaccuccacccau

SEQ ID NO: 1804340 - RNA, 19 nt, Artificial Sequence
  Description of Artificial Sequence: Synthetic oligonucleotide
gucaccgcguuggucaggg

SEQ ID NO: 1804341 - RNA, 19 nt, Artificial Sequence
  Description of Artificial Sequence: Synthetic oligonucleotide
ggguucuucucauccuacg

SEQ ID NO: 1804342 - RNA, 19 nt, Artificial Sequence
  Description of Artificial Sequence: Synthetic oligonucleotide
accgcguuggucaggguuc

SEQ ID NO: 1804343 - RNA, 19 nt, Artificial Sequence
  Description of Artificial Sequence: Synthetic oligonucleotide
aggguucuuuggaaacggc

SEQ ID NO: 1804344 - RNA, 19 nt, Artificial Sequence
  Description of Artificial Sequence: Synthetic oligonucleotide
aggguucuucucauccuac

SEQ ID NO: 1804345 - RNA, 19 nt, Artificial Sequence
  Description of Artificial Sequence: Synthetic oligonucleotide
acauccguccacugccgug

SEQ ID NO: 1804346 - RNA, 19 nt, Artificial Sequence
  Description of Artificial Sequence: Synthetic oligonucleotide
uccccgcuccuccuuuccg

SEQ ID NO: 1804347 - RNA, 19 nt, Artificial Sequence
  Description of Artificial Sequence: Synthetic oligonucleotide
uccuacgaggcagggaggu

SEQ ID NO: 1804348 - RNA, 19 nt, Artificial Sequence
  Description of Artificial Sequence: Synthetic oligonucleotide
gggauuuguucuuguccgg

SEQ ID NO: 1804349 - RNA, 19 nt, Artificial Sequence
  Description of Artificial Sequence: Synthetic oligonucleotide
aaagggguuggaaccucca

SEQ ID NO: 1804350 - RNA, 19 nt, Artificial Sequence
  Description of Artificial Sequence: Synthetic oligonucleotide
auauuugauccgucucuuu

SEQ ID NO: 1804351 - RNA, 19 nt, Artificial Sequence
  Description of Artificial Sequence: Synthetic oligonucleotide
aucuuuuacgagaaaucuu

SEQ ID NO: 1804352 - RNA, 19 nt, Artificial Sequence
  Description of Artificial Sequence: Synthetic oligonucleotide
uacgaggcagggaggugcu

SEQ ID NO: 1804353 - RNA, 19 nt, Artificial Sequence
  Description of Artificial Sequence: Synthetic oligonucleotide
cucagcaguuuacacaucu

SEQ ID NO: 1804354 - RNA, 19 nt, Artificial Sequence
  Description of Artificial Sequence: Synthetic oligonucleotide
uugggguguucuuugucuu

SEQ ID NO: 1804355 - RNA, 19 nt, Artificial Sequence
  Description of Artificial Sequence: Synthetic oligonucleotide
caguccucuuauauuuuca

SEQ ID NO: 1804356 - RNA, 19 nt, Artificial Sequence
  Description of Artificial Sequence: Synthetic oligonucleotide
uugcuuucgguaagccuuu

SEQ ID NO: 1804357 - RNA, 19 nt, Artificial Sequence
  Description of Artificial Sequence: Synthetic oligonucleotide
gauccgucucuuuuaaauu

SEQ ID NO: 1804358 - RNA, 19 nt, Artificial Sequence
  Description of Artificial Sequence: Synthetic oligonucleotide
aacugaucuuagcggugua

SEQ ID NO: 1804359 - RNA, 19 nt, Artificial Sequence
  Description of Artificial Sequence: Synthetic oligonucleotide
cuuagcgguguaaacuaua

SEQ ID NO: 1804360 - RNA, 19 nt, Artificial Sequence
  Description of Artificial Sequence: Synthetic oligonucleotide
aggcacuaaaggggucacc

SEQ ID NO: 1804361 - RNA, 19 nt, Artificial Sequence
  Description of Artificial Sequence: Synthetic oligonucleotide
ggcacuaaaggggucacca

SEQ ID NO: 1804362 - RNA, 19 nt, Artificial Sequence
  Description of Artificial Sequence: Synthetic oligonucleotide
ugauugacauagguauauu

SEQ ID NO: 1804363 - RNA, 19 nt, Artificial Sequence
  Description of Artificial Sequence: Synthetic oligonucleotide
agcaguuuacacaucucua

SEQ ID NO: 1804364 - RNA, 19 nt, Artificial Sequence
  Description of Artificial Sequence: Synthetic oligonucleotide
ccgucucuuuuaaauuugg

SEQ ID NO: 1804365 - RNA, 19 nt, Artificial Sequence
  Description of Artificial Sequence: Synthetic oligonucleotide
uagcgguguaaacuauauu

SEQ ID NO: 1804366 - RNA, 19 nt, Artificial Sequence
  Description of Artificial Sequence: Synthetic oligonucleotide
uccuuuccggccccuuccu

SEQ ID NO: 1804367 - RNA, 19 nt, Artificial Sequence
  Description of Artificial Sequence: Synthetic oligonucleotide
cauuucgaaugccuugaaa

SEQ ID NO: 1804368 - RNA, 19 nt, Artificial Sequence
  Description of Artificial Sequence: Synthetic oligonucleotide
ugccgugccaguccucuua

SEQ ID NO: 1804369 - RNA, 19 nt, Artificial Sequence
  Description of Artificial Sequence: Synthetic oligonucleotide
ugcuugcggggauuuguuc

SEQ ID NO: 1804370 - RNA, 19 nt, Artificial Sequence
  Description of Artificial Sequence: Synthetic oligonucleotide
uaucgauggugagaauuuu

SEQ ID NO: 1804371 - RNA, 19 nt, Artificial Sequence
  Description of Artificial Sequence: Synthetic oligonucleotide
ugagacgggagggucccac

SEQ ID NO: 1804372 - RNA, 19 nt, Artificial Sequence
  Description of Artificial Sequence: Synthetic oligonucleotide
gaucuguaacuccuuccgu

SEQ ID NO: 1804373 - RNA, 19 nt, Artificial Sequence
  Description of Artificial Sequence: Synthetic oligonucleotide
cacacaaugccucccgcaa

SEQ ID NO: 1804374 - RNA, 19 nt, Artificial Sequence
  Description of Artificial Sequence: Synthetic oligonucleotide
acacaaugccucccgcaaa

SEQ ID NO: 1804375 - RNA, 19 nt, Artificial Sequence
  Description of Artificial Sequence: Synthetic oligonucleotide
acugccgugccaguccucu

SEQ ID NO: 1804376 - RNA, 19 nt, Artificial Sequence
  Description of Artificial Sequence: Synthetic oligonucleotide
uggauaacaggagggucuu

SEQ ID NO: 1804377 - RNA, 19 nt, Artificial Sequence
  Description of Artificial Sequence: Synthetic oligonucleotide
gguaccgccuuguccauca

SEQ ID NO: 1804378 - RNA, 19 nt, Artificial Sequence
  Description of Artificial Sequence: Synthetic oligonucleotide
ugcggggauuuguucuugu

SEQ ID NO: 1804379 - RNA, 19 nt, Artificial Sequence
  Description of Artificial Sequence: Synthetic oligonucleotide
gaggaggauauggcaucag

SEQ ID NO: 1804380 - RNA, 19 nt, Artificial Sequence
  Description of Artificial Sequence: Synthetic oligonucleotide
uaauaucgauggugagaau

SEQ ID NO: 1804381 - RNA, 19 nt, Artificial Sequence
  Description of Artificial Sequence: Synthetic oligonucleotide
uggaaacggcagcccauau

SEQ ID NO: 1804382 - RNA, 19 nt, Artificial Sequence
  Description of Artificial Sequence: Synthetic oligonucleotide
cucauccuacgaggcaggg

SEQ ID NO: 1804383 - RNA, 19 nt, Artificial Sequence
  Description of Artificial Sequence: Synthetic oligonucleotide
gucuccgugaaagguguac

SEQ ID NO: 1804384 - RNA, 19 nt, Artificial Sequence
  Description of Artificial Sequence: Synthetic oligonucleotide
aagguaccgccuuguccau

SEQ ID NO: 1804385 - RNA, 19 nt, Artificial Sequence
  Description of Artificial Sequence: Synthetic oligonucleotide
agugauacucuaaguucau

SEQ ID NO: 1804386 - RNA, 19 nt, Artificial Sequence
  Description of Artificial Sequence: Synthetic oligonucleotide
cugaucuuagcgguguaaa

SEQ ID NO: 1804387 - RNA, 19 nt, Artificial Sequence
  Description of Artificial Sequence: Synthetic oligonucleotide
ggugagaauuuuguccuca

SEQ ID NO: 1804388 - RNA, 19 nt, Artificial Sequence
  Description of Artificial Sequence: Synthetic oligonucleotide
gcccauauccaauaauucu

SEQ ID NO: 1804389 - RNA, 19 nt, Artificial Sequence
  Description of Artificial Sequence: Synthetic oligonucleotide
uugcccaucugagccgucu

SEQ ID NO: 1804390 - RNA, 19 nt, Artificial Sequence
  Description of Artificial Sequence: Synthetic oligonucleotide
aggucaccgcguuggucag

SEQ ID NO: 1804391 - RNA, 19 nt, Artificial Sequence
  Description of Artificial Sequence: Synthetic oligonucleotide
ggaaacggcagcccauauc

SEQ ID NO: 1804392 - RNA, 19 nt, Artificial Sequence
  Description of Artificial Sequence: Synthetic oligonucleotide
caucaguaccuccccgcuc

SEQ ID NO: 1804393 - RNA, 19 nt, Artificial Sequence
  Description of Artificial Sequence: Synthetic oligonucleotide
gguguaccugaagguaccg

SEQ ID NO: 1804394 - RNA, 19 nt, Artificial Sequence
  Description of Artificial Sequence: Synthetic oligonucleotide
gcacauuaauugagcagcc

SEQ ID NO: 1804395 - RNA, 19 nt, Artificial Sequence
  Description of Artificial Sequence: Synthetic oligonucleotide
cagcccauauccaauaauu

SEQ ID NO: 1804396 - RNA, 19 nt, Artificial Sequence
  Description of Artificial Sequence: Synthetic oligonucleotide
cugaagguaccgccuuguc

SEQ ID NO: 1804397 - RNA, 19 nt, Artificial Sequence
  Description of Artificial Sequence: Synthetic oligonucleotide
ugggguguucuuugucuuu

SEQ ID NO: 1804398 - RNA, 19 nt, Artificial Sequence
  Description of Artificial Sequence: Synthetic oligonucleotide
ggauauccguucaugcuga

SEQ ID NO: 1804399 - RNA, 19 nt, Artificial Sequence
  Description of Artificial Sequence: Synthetic oligonucleotide
cacauuaauugagcagcca

SEQ ID NO: 1804400 - RNA, 19 nt, Artificial Sequence
  Description of Artificial Sequence: Synthetic oligonucleotide
ugcccaucugagccgucuc

SEQ ID NO: 1804401 - RNA, 19 nt, Artificial Sequence
  Description of Artificial Sequence: Synthetic oligonucleotide
auccaucguuggcacauua

SEQ ID NO: 1804402 - RNA, 19 nt, Artificial Sequence
  Description of Artificial Sequence: Synthetic oligonucleotide
cugauugacauagguauau

SEQ ID NO: 1804403 - RNA, 19 nt, Artificial Sequence
  Description of Artificial Sequence: Synthetic oligonucleotide
ccuugaaaugaacuuagcu

SEQ ID NO: 1804404 - RNA, 19 nt, Artificial Sequence
  Description of Artificial Sequence: Synthetic oligonucleotide
cacccauccgucuuccaaa

SEQ ID NO: 1804405 - RNA, 19 nt, Artificial Sequence
  Description of Artificial Sequence: Synthetic oligonucleotide
gcaguuuacacaucucuau

SEQ ID NO: 1804406 - RNA, 19 nt, Artificial Sequence
  Description of Artificial Sequence: Synthetic oligonucleotide
gagccgucucuagccaugc

SEQ ID NO: 1804407 - RNA, 19 nt, Artificial Sequence
  Description of Artificial Sequence: Synthetic oligonucleotide
uugcggggauuuguucuug

SEQ ID NO: 1804408 - RNA, 19 nt, Artificial Sequence
  Description of Artificial Sequence: Synthetic oligonucleotide
gauauccguucaugcugaa

SEQ ID NO: 1804409 - RNA, 19 nt, Artificial Sequence
  Description of Artificial Sequence: Synthetic oligonucleotide
cccgcaaacugaucuuagc

SEQ ID NO: 1804410 - RNA, 19 nt, Artificial Sequence
  Description of Artificial Sequence: Synthetic oligonucleotide
auccuacgaggcagggagg

SEQ ID NO: 1804411 - RNA, 19 nt, Artificial Sequence
  Description of Artificial Sequence: Synthetic oligonucleotide
caucguuggcacauuaauu

SEQ ID NO: 1804412 - RNA, 19 nt, Artificial Sequence
  Description of Artificial Sequence: Synthetic oligonucleotide
gcugcaaacguggcaugag

SEQ ID NO: 1804413 - RNA, 19 nt, Artificial Sequence
  Description of Artificial Sequence: Synthetic oligonucleotide
uucaugcguuugguacagc

SEQ ID NO: 1804414 - RNA, 19 nt, Artificial Sequence
  Description of Artificial Sequence: Synthetic oligonucleotide
cuccccgcuccuccuuucc

SEQ ID NO: 1804415 - RNA, 19 nt, Artificial Sequence
  Description of Artificial Sequence: Synthetic oligonucleotide
gcuugcggggauuuguucu

SEQ ID NO: 1804416 - RNA, 19 nt, Artificial Sequence
  Description of Artificial Sequence: Synthetic oligonucleotide
ccgugaaagguguaccuga

SEQ ID NO: 1804417 - RNA, 19 nt, Artificial Sequence
  Description of Artificial Sequence: Synthetic oligonucleotide
cuccacccauccgucuucc

SEQ ID NO: 1804418 - RNA, 19 nt, Artificial Sequence
  Description of Artificial Sequence: Synthetic oligonucleotide
ccucuuauauuuucagugu

SEQ ID NO: 1804419 - RNA, 19 nt, Artificial Sequence
  Description of Artificial Sequence: Synthetic oligonucleotide
uccacccauccgucuucca

SEQ ID NO: 1804420 - RNA, 19 nt, Artificial Sequence
  Description of Artificial Sequence: Synthetic oligonucleotide
agguaccgccuuguccauc

SEQ ID NO: 1804421 - RNA, 19 nt, Artificial Sequence
  Description of Artificial Sequence: Synthetic oligonucleotide
uaugaguagcaggguucuu

SEQ ID NO: 1804422 - RNA, 19 nt, Artificial Sequence
  Description of Artificial Sequence: Synthetic oligonucleotide
gucucgaccuccacccauc

SEQ ID NO: 1804423 - RNA, 19 nt, Artificial Sequence
  Description of Artificial Sequence: Synthetic oligonucleotide
cuaaaggggucaccaucua

SEQ ID NO: 1804424 - RNA, 19 nt, Artificial Sequence
  Description of Artificial Sequence: Synthetic oligonucleotide
augccucccgcaaacugau

SEQ ID NO: 1804425 - RNA, 19 nt, Artificial Sequence
  Description of Artificial Sequence: Synthetic oligonucleotide
gcgaccucuuuaaauuuuc

SEQ ID NO: 1804426 - RNA, 19 nt, Artificial Sequence
  Description of Artificial Sequence: Synthetic oligonucleotide
gccacacaaugccucccgc

SEQ ID NO: 1804427 - RNA, 19 nt, Artificial Sequence
  Description of Artificial Sequence: Synthetic oligonucleotide
gccucccgcaaacugaucu

SEQ ID NO: 1804428 - RNA, 19 nt, Artificial Sequence
  Description of Artificial Sequence: Synthetic oligonucleotide
guaccugaagguaccgccu

SEQ ID NO: 1804429 - RNA, 19 nt, Artificial Sequence
  Description of Artificial Sequence: Synthetic oligonucleotide
guaccgccuuguccaucag

SEQ ID NO: 1804430 - RNA, 19 nt, Artificial Sequence
  Description of Artificial Sequence: Synthetic oligonucleotide
cgaaugccuugaaaugaac

SEQ ID NO: 1804431 - RNA, 19 nt, Artificial Sequence
  Description of Artificial Sequence: Synthetic oligonucleotide
gucucuagccaugcaauuu

SEQ ID NO: 1804432 - RNA, 19 nt, Artificial Sequence
  Description of Artificial Sequence: Synthetic oligonucleotide
ccccgcuccuccuuuccgg

SEQ ID NO: 1804433 - RNA, 19 nt, Artificial Sequence
  Description of Artificial Sequence: Synthetic oligonucleotide
cccauuucgaaugccuuga

SEQ ID NO: 1804434 - RNA, 19 nt, Artificial Sequence
  Description of Artificial Sequence: Synthetic oligonucleotide
guacagccacuaaauauuu

SEQ ID NO: 1804435 - RNA, 19 nt, Artificial Sequence
  Description of Artificial Sequence: Synthetic oligonucleotide
auauggcaucagggaaaga

SEQ ID NO: 1804436 - RNA, 19 nt, Artificial Sequence
  Description of Artificial Sequence: Synthetic oligonucleotide
ugccucccgcaaacugauc

SEQ ID NO: 1804437 - RNA, 19 nt, Artificial Sequence
  Description of Artificial Sequence: Synthetic oligonucleotide
ggugccuucuuuccacccu

SEQ ID NO: 1804438 - RNA, 19 nt, Artificial Sequence
  Description of Artificial Sequence: Synthetic oligonucleotide
ccguccacugccgugccag

SEQ ID NO: 1804439 - RNA, 19 nt, Artificial Sequence
  Description of Artificial Sequence: Synthetic oligonucleotide
cuugcggggauuuguucuu

SEQ ID NO: 1804440 - RNA, 19 nt, Artificial Sequence
  Description of Artificial Sequence: Synthetic oligonucleotide
gggucuuguuugagacggg

SEQ ID NO: 1804441 - RNA, 19 nt, Artificial Sequence
  Description of Artificial Sequence: Synthetic oligonucleotide
uugagacgggaggguccca

SEQ ID NO: 1804442 - RNA, 19 nt, Artificial Sequence
  Description of Artificial Sequence: Synthetic oligonucleotide
uaccuccccgcuccuccuu

SEQ ID NO: 1804443 - RNA, 19 nt, Artificial Sequence
  Description of Artificial Sequence: Synthetic oligonucleotide
gcggggauuuguucuuguc

SEQ ID NO: 1804444 - RNA, 19 nt, Artificial Sequence
  Description of Artificial Sequence: Synthetic oligonucleotide
cucccgcaaacugaucuua

SEQ ID NO: 1804445 - RNA, 19 nt, Artificial Sequence
  Description of Artificial Sequence: Synthetic oligonucleotide
cuuugcccaucugagccgu

SEQ ID NO: 1804446 - RNA, 19 nt, Artificial Sequence
  Description of Artificial Sequence: Synthetic oligonucleotide
cugcgaccucuuuaaauuu

SEQ ID NO: 1804447 - RNA, 19 nt, Artificial Sequence
  Description of Artificial Sequence: Synthetic oligonucleotide
ccguucaugcugaauccaa

SEQ ID NO: 1804448 - RNA, 19 nt, Artificial Sequence
  Description of Artificial Sequence: Synthetic oligonucleotide
ucaccgcguuggucagggu

SEQ ID NO: 1804449 - RNA, 19 nt, Artificial Sequence
  Description of Artificial Sequence: Synthetic oligonucleotide
ccaucguuggcacauuaau

SEQ ID NO: 1804450 - RNA, 19 nt, Artificial Sequence
  Description of Artificial Sequence: Synthetic oligonucleotide
ccgucuuccaaagaaaauu

SEQ ID NO: 1804451 - RNA, 19 nt, Artificial Sequence
  Description of Artificial Sequence: Synthetic oligonucleotide
ggucaccgcguuggucagg

SEQ ID NO: 1804452 - RNA, 19 nt, Artificial Sequence
  Description of Artificial Sequence: Synthetic oligonucleotide
caccgcguuggucaggguu

SEQ ID NO: 1804453 - RNA, 19 nt, Artificial Sequence
  Description of Artificial Sequence: Synthetic oligonucleotide
cgugaaagguguaccugaa

SEQ ID NO: 1804454 - RNA, 19 nt, Artificial Sequence
  Description of Artificial Sequence: Synthetic oligonucleotide
cacugccgugccaguccuc

SEQ ID NO: 1804455 - RNA, 19 nt, Artificial Sequence
  Description of Artificial Sequence: Synthetic oligonucleotide
cugcuugcggggauuuguu

SEQ ID NO: 1804456 - RNA, 19 nt, Artificial Sequence
  Description of Artificial Sequence: Synthetic oligonucleotide
cgugccaguccucuuauau

SEQ ID NO: 1804457 - RNA, 19 nt, Artificial Sequence
  Description of Artificial Sequence: Synthetic oligonucleotide
uccuuccgucaggguuuaa

SEQ ID NO: 1804458 - RNA, 19 nt, Artificial Sequence
  Description of Artificial Sequence: Synthetic oligonucleotide
ccuccccgcuccuccuuuc

SEQ ID NO: 1804459 - RNA, 19 nt, Artificial Sequence
  Description of Artificial Sequence: Synthetic oligonucleotide
ccuuccgucaggguuuaau

SEQ ID NO: 1804460 - RNA, 19 nt, Artificial Sequence
  Description of Artificial Sequence: Synthetic oligonucleotide
gccgugccaguccucuuau

SEQ ID NO: 1804461 - RNA, 19 nt, Artificial Sequence
  Description of Artificial Sequence: Synthetic oligonucleotide
gcguuggucaggguucuuu

SEQ ID NO: 1804462 - RNA, 19 nt, Artificial Sequence
  Description of Artificial Sequence: Synthetic oligonucleotide
cuccucugcuugcggggau

SEQ ID NO: 1804463 - RNA, 19 nt, Artificial Sequence
  Description of Artificial Sequence: Synthetic oligonucleotide
cauccaucguuggcacauu

SEQ ID NO: 1804464 - RNA, 19 nt, Artificial Sequence
  Description of Artificial Sequence: Synthetic oligonucleotide
ccuuuccggccccuuccuu

SEQ ID NO: 1804465 - RNA, 19 nt, Artificial Sequence
  Description of Artificial Sequence: Synthetic oligonucleotide
ccgcguuggucaggguucu

SEQ ID NO: 1804466 - RNA, 19 nt, Artificial Sequence
  Description of Artificial Sequence: Synthetic oligonucleotide
aauaaacacuuccacagcc

SEQ ID NO: 1804467 - RNA, 19 nt, Artificial Sequence
  Description of Artificial Sequence: Synthetic oligonucleotide
aaaguaaaaucugaagugc

SEQ ID NO: 1804468 - RNA, 19 nt, Artificial Sequence
  Description of Artificial Sequence: Synthetic oligonucleotide
uguagcauaacugucauag

SEQ ID NO: 1804469 - RNA, 19 nt, Artificial Sequence
  Description of Artificial Sequence: Synthetic oligonucleotide
uauaaauaaacacuuccac

SEQ ID NO: 1804470 - RNA, 19 nt, Artificial Sequence
  Description of Artificial Sequence: Synthetic oligonucleotide
ugaagugcuuuccaaaacg

SEQ ID NO: 1804471 - RNA, 19 nt, Artificial Sequence
  Description of Artificial Sequence: Synthetic oligonucleotide
agguaacaaacccaaagcc

SEQ ID NO: 1804472 - RNA, 19 nt, Artificial Sequence
  Description of Artificial Sequence: Synthetic oligonucleotide
ugugaauacaacaucgaug

SEQ ID NO: 1804473 - RNA, 19 nt, Artificial Sequence
  Description of Artificial Sequence: Synthetic oligonucleotide
aaagcggccaccuccauag

SEQ ID NO: 1804474 - RNA, 19 nt, Artificial Sequence
  Description of Artificial Sequence: Synthetic oligonucleotide
gaauacaacaucgauggag

SEQ ID NO: 1804475 - RNA, 19 nt, Artificial Sequence
  Description of Artificial Sequence: Synthetic oligonucleotide
cacuacacaacguucagcg

SEQ ID NO: 1804476 - RNA, 19 nt, Artificial Sequence
  Description of Artificial Sequence: Synthetic oligonucleotide
cuguugaugggucagaacc

SEQ ID NO: 1804477 - RNA, 19 nt, Artificial Sequence
  Description of Artificial Sequence: Synthetic oligonucleotide
agaagcaggcuguugaugg

SEQ ID NO: 1804478 - RNA, 19 nt, Artificial Sequence
  Description of Artificial Sequence: Synthetic oligonucleotide
ucaucgauguucucaaagg

SEQ ID NO: 1804479 - RNA, 19 nt, Artificial Sequence
  Description of Artificial Sequence: Synthetic oligonucleotide
uucgugaagccaaagaaac

SEQ ID NO: 1804480 - RNA, 19 nt, Artificial Sequence
  Description of Artificial Sequence: Synthetic oligonucleotide
cacugugaauacaacaucg

SEQ ID NO: 1804481 - RNA, 19 nt, Artificial Sequence
  Description of Artificial Sequence: Synthetic oligonucleotide
aaccgaaaggacuacaaaa

SEQ ID NO: 1804482 - RNA, 19 nt, Artificial Sequence
  Description of Artificial Sequence: Synthetic oligonucleotide
aauacaacaucgauggagu

SEQ ID NO: 1804483 - RNA, 19 nt, Artificial Sequence
  Description of Artificial Sequence: Synthetic oligonucleotide
auuacagccauggaaggac

SEQ ID NO: 1804484 - RNA, 19 nt, Artificial Sequence
  Description of Artificial Sequence: Synthetic oligonucleotide
auugaguccauuucaucuc

SEQ ID NO: 1804485 - RNA, 19 nt, Artificial Sequence
  Description of Artificial Sequence: Synthetic oligonucleotide
uacaaaaguggggacaagg

SEQ ID NO: 1804486 - RNA, 19 nt, Artificial Sequence
  Description of Artificial Sequence: Synthetic oligonucleotide
uuaaugggcgaccacacaa

SEQ ID NO: 1804487 - RNA, 19 nt, Artificial Sequence
  Description of Artificial Sequence: Synthetic oligonucleotide
ucgauguucucaaagguaa

SEQ ID NO: 1804488 - RNA, 19 nt, Artificial Sequence
  Description of Artificial Sequence: Synthetic oligonucleotide
ucauagcugucucuguagg

SEQ ID NO: 1804489 - RNA, 19 nt, Artificial Sequence
  Description of Artificial Sequence: Synthetic oligonucleotide
aaagaaaagucuggucacg

SEQ ID NO: 1804490 - RNA, 19 nt, Artificial Sequence
  Description of Artificial Sequence: Synthetic oligonucleotide
uuggugucgaagcucagcc

SEQ ID NO: 1804491 - RNA, 19 nt, Artificial Sequence
  Description of Artificial Sequence: Synthetic oligonucleotide
ucacacggucuuuuaaucg

SEQ ID NO: 1804492 - RNA, 19 nt, Artificial Sequence
  Description of Artificial Sequence: Synthetic oligonucleotide
gaugggucagaaccgaaag

SEQ ID NO: 1804493 - RNA, 19 nt, Artificial Sequence
  Description of Artificial Sequence: Synthetic oligonucleotide
uuuuaaucggcuucgugaa

SEQ ID NO: 1804494 - RNA, 19 nt, Artificial Sequence
  Description of Artificial Sequence: Synthetic oligonucleotide
acaacguucagcgaagcuc

SEQ ID NO: 1804495 - RNA, 19 nt, Artificial Sequence
  Description of Artificial Sequence: Synthetic oligonucleotide
acaaguaaccaaaacccac

SEQ ID NO: 1804496 - RNA, 19 nt, Artificial Sequence
  Description of Artificial Sequence: Synthetic oligonucleotide
acaauauaaauaaacacuu

SEQ ID NO: 1804497 - RNA, 19 nt, Artificial Sequence
  Description of Artificial Sequence: Synthetic oligonucleotide
accccgacaauuuagagaa

SEQ ID NO: 1804498 - RNA, 19 nt, Artificial Sequence
  Description of Artificial Sequence: Synthetic oligonucleotide
cacuccgggacucaaagcg

SEQ ID NO: 1804499 - RNA, 19 nt, Artificial Sequence
  Description of Artificial Sequence: Synthetic oligonucleotide
uuaaucggcuucgugaagc

SEQ ID NO: 1804500 - RNA, 19 nt, Artificial Sequence
  Description of Artificial Sequence: Synthetic oligonucleotide
caacguucagcgaagcucc

SEQ ID NO: 1804501 - RNA, 19 nt, Artificial Sequence
  Description of Artificial Sequence: Synthetic oligonucleotide
aaccccgacaauuuagaga

SEQ ID NO: 1804502 - RNA, 19 nt, Artificial Sequence
  Description of Artificial Sequence: Synthetic oligonucleotide
guacaagaauuccucagcc

SEQ ID NO: 1804503 - RNA, 19 nt, Artificial Sequence
  Description of Artificial Sequence: Synthetic oligonucleotide
cacacggucuuuuaaucgg

SEQ ID NO: 1804504 - RNA, 19 nt, Artificial Sequence
  Description of Artificial Sequence: Synthetic oligonucleotide
aggugcucacuacacaacg

SEQ ID NO: 1804505 - RNA, 19 nt, Artificial Sequence
  Description of Artificial Sequence: Synthetic oligonucleotide
aaggacuacaaaagugggg

SEQ ID NO: 1804506 - RNA, 19 nt, Artificial Sequence
  Description of Artificial Sequence: Synthetic oligonucleotide
uccuuuaccaccaccacuu

SEQ ID NO: 1804507 - RNA, 19 nt, Artificial Sequence
  Description of Artificial Sequence: Synthetic oligonucleotide
ucuuuuaaucggcuucgug

SEQ ID NO: 1804508 - RNA, 19 nt, Artificial Sequence
  Description of Artificial Sequence: Synthetic oligonucleotide
acaacaucgauggaguaug

SEQ ID NO: 1804509 - RNA, 19 nt, Artificial Sequence
  Description of Artificial Sequence: Synthetic oligonucleotide
ggaaggacgaucuggacgc

SEQ ID NO: 1804510 - RNA, 19 nt, Artificial Sequence
  Description of Artificial Sequence: Synthetic oligonucleotide
aguccauuucaucucagga

SEQ ID NO: 1804511 - RNA, 19 nt, Artificial Sequence
  Description of Artificial Sequence: Synthetic oligonucleotide
uuacagccauggaaggacg

SEQ ID NO: 1804512 - RNA, 19 nt, Artificial Sequence
  Description of Artificial Sequence: Synthetic oligonucleotide
cucuggagaacccacggcc

SEQ ID NO: 1804513 - RNA, 19 nt, Artificial Sequence
  Description of Artificial Sequence: Synthetic oligonucleotide
aucuuggucagaagcaggc

SEQ ID NO: 1804514 - RNA, 19 nt, Artificial Sequence
  Description of Artificial Sequence: Synthetic oligonucleotide
aaacuggguacaagaauuc

SEQ ID NO: 1804515 - RNA, 19 nt, Artificial Sequence
  Description of Artificial Sequence: Synthetic oligonucleotide
cucaaauugaguccauuuc

SEQ ID NO: 1804516 - RNA, 19 nt, Artificial Sequence
  Description of Artificial Sequence: Synthetic oligonucleotide
ucucuguaggacccgcccg

SEQ ID NO: 1804517 - RNA, 19 nt, Artificial Sequence
  Description of Artificial Sequence: Synthetic oligonucleotide
uuuuacucguuguguguag

SEQ ID NO: 1804518 - RNA, 19 nt, Artificial Sequence
  Description of Artificial Sequence: Synthetic oligonucleotide
cuccgauaaccauagcugc

SEQ ID NO: 1804519 - RNA, 19 nt, Artificial Sequence
  Description of Artificial Sequence: Synthetic oligonucleotide
uguguguagcauaacuguc

SEQ ID NO: 1804520 - RNA, 19 nt, Artificial Sequence
  Description of Artificial Sequence: Synthetic oligonucleotide
acaauuuagagaaaacaaa

SEQ ID NO: 1804521 - RNA, 19 nt, Artificial Sequence
  Description of Artificial Sequence: Synthetic oligonucleotide
accgaaaggacuacaaaag

SEQ ID NO: 1804522 - RNA, 19 nt, Artificial Sequence
  Description of Artificial Sequence: Synthetic oligonucleotide
uuucacacggucuuuuaau

SEQ ID NO: 1804523 - RNA, 19 nt, Artificial Sequence
  Description of Artificial Sequence: Synthetic oligonucleotide
aacaaguaaccaaaaccca

SEQ ID NO: 1804524 - RNA, 19 nt, Artificial Sequence
  Description of Artificial Sequence: Synthetic oligonucleotide
uuuaaucggcuucgugaag

SEQ ID NO: 1804525 - RNA, 19 nt, Artificial Sequence
  Description of Artificial Sequence: Synthetic oligonucleotide
gaguccauuucaucucagg

SEQ ID NO: 1804526 - RNA, 19 nt, Artificial Sequence
  Description of Artificial Sequence: Synthetic oligonucleotide
uggcauaguagucucugga

SEQ ID NO: 1804527 - RNA, 19 nt, Artificial Sequence
  Description of Artificial Sequence: Synthetic oligonucleotide
uugaguccauuucaucuca

SEQ ID NO: 1804528 - RNA, 19 nt, Artificial Sequence
  Description of Artificial Sequence: Synthetic oligonucleotide
agaaaagucuggucacgag

SEQ ID NO: 1804529 - RNA, 19 nt, Artificial Sequence
  Description of Artificial Sequence: Synthetic oligonucleotide
guuguguguagcauaacug

SEQ ID NO: 1804530 - RNA, 19 nt, Artificial Sequence
  Description of Artificial Sequence: Synthetic oligonucleotide
uccgauaaccauagcugcc

SEQ ID NO: 1804531 - RNA, 19 nt, Artificial Sequence
  Description of Artificial Sequence: Synthetic oligonucleotide
aauuacagccauggaagga

SEQ ID NO: 1804532 - RNA, 19 nt, Artificial Sequence
  Description of Artificial Sequence: Synthetic oligonucleotide
ucuuaauuacagccaugga

SEQ ID NO: 1804533 - RNA, 19 nt, Artificial Sequence
  Description of Artificial Sequence: Synthetic oligonucleotide
ggcgucuuuagcaucaucg

SEQ ID NO: 1804534 - RNA, 19 nt, Artificial Sequence
  Description of Artificial Sequence: Synthetic oligonucleotide
uguguagcauaacugucau

SEQ ID NO: 1804535 - RNA, 19 nt, Artificial Sequence
  Description of Artificial Sequence: Synthetic oligonucleotide
gguacaagaauuccucagc

SEQ ID NO: 1804536 - RNA, 19 nt, Artificial Sequence
  Description of Artificial Sequence: Synthetic oligonucleotide
acgcggagggcuuuuacuc

SEQ ID NO: 1804537 - RNA, 19 nt, Artificial Sequence
  Description of Artificial Sequence: Synthetic oligonucleotide
caucauggcgucuuuagca

SEQ ID NO: 1804538 - RNA, 19 nt, Artificial Sequence
  Description of Artificial Sequence: Synthetic oligonucleotide
acuuaaugggcgaccacac

SEQ ID NO: 1804539 - RNA, 19 nt, Artificial Sequence
  Description of Artificial Sequence: Synthetic oligonucleotide
uucacacggucuuuuaauc

SEQ ID NO: 1804540 - RNA, 19 nt, Artificial Sequence
  Description of Artificial Sequence: Synthetic oligonucleotide
ucaucucaggaaguauggg

SEQ ID NO: 1804541 - RNA, 19 nt, Artificial Sequence
  Description of Artificial Sequence: Synthetic oligonucleotide
caaguaaccaaaacccaca

SEQ ID NO: 1804542 - RNA, 19 nt, Artificial Sequence
  Description of Artificial Sequence: Synthetic oligonucleotide
guaugcauaucuucgguaa

SEQ ID NO: 1804543 - RNA, 19 nt, Artificial Sequence
  Description of Artificial Sequence: Synthetic oligonucleotide
cacaaccccgacaauuuag

SEQ ID NO: 1804544 - RNA, 19 nt, Artificial Sequence
  Description of Artificial Sequence: Synthetic oligonucleotide
aaugggcgaccacacaaaa

SEQ ID NO: 1804545 - RNA, 19 nt, Artificial Sequence
  Description of Artificial Sequence: Synthetic oligonucleotide
aguaugggccgccagacuu

SEQ ID NO: 1804546 - RNA, 19 nt, Artificial Sequence
  Description of Artificial Sequence: Synthetic oligonucleotide
uaugcauaucuucgguaaa

SEQ ID NO: 1804547 - RNA, 19 nt, Artificial Sequence
  Description of Artificial Sequence: Synthetic oligonucleotide
uuacucguuguguguagca

SEQ ID NO: 1804548 - RNA, 19 nt, Artificial Sequence
  Description of Artificial Sequence: Synthetic oligonucleotide
aagacagugcuuccuuaaa

SEQ ID NO: 1804549 - RNA, 19 nt, Artificial Sequence
  Description of Artificial Sequence: Synthetic oligonucleotide
aacugucauagcugucucu

SEQ ID NO: 1804550 - RNA, 19 nt, Artificial Sequence
  Description of Artificial Sequence: Synthetic oligonucleotide
aucgcugggucucucuguc

SEQ ID NO: 1804551 - RNA, 19 nt, Artificial Sequence
  Description of Artificial Sequence: Synthetic oligonucleotide
uuuacucguuguguguagc

SEQ ID NO: 1804552 - RNA, 19 nt, Artificial Sequence
  Description of Artificial Sequence: Synthetic oligonucleotide
uaaucggcuucgugaagcc

SEQ ID NO: 1804553 - RNA, 19 nt, Artificial Sequence
  Description of Artificial Sequence: Synthetic oligonucleotide
aguaugcauaucuucggua

SEQ ID NO: 1804554 - RNA, 19 nt, Artificial Sequence
  Description of Artificial Sequence: Synthetic oligonucleotide
auggaaggacgaucuggac

SEQ ID NO: 1804555 - RNA, 19 nt, Artificial Sequence
  Description of Artificial Sequence: Synthetic oligonucleotide
acuucagagaucugcccgu

SEQ ID NO: 1804556 - RNA, 19 nt, Artificial Sequence
  Description of Artificial Sequence: Synthetic oligonucleotide
ugcucacuacacaacguuc

SEQ ID NO: 1804557 - RNA, 19 nt, Artificial Sequence
  Description of Artificial Sequence: Synthetic oligonucleotide
cagaagacuugccagccug

SEQ ID NO: 1804558 - RNA, 19 nt, Artificial Sequence
  Description of Artificial Sequence: Synthetic oligonucleotide
auauccgcgggaccgguug

SEQ ID NO: 1804559 - RNA, 19 nt, Artificial Sequence
  Description of Artificial Sequence: Synthetic oligonucleotide
agacuuaaugggcgaccac

SEQ ID NO: 1804560 - RNA, 19 nt, Artificial Sequence
  Description of Artificial Sequence: Synthetic oligonucleotide
ucgugaagccaaagaaacu

SEQ ID NO: 1804561 - RNA, 19 nt, Artificial Sequence
  Description of Artificial Sequence: Synthetic oligonucleotide
ccccaucuuaauuacagcc

SEQ ID NO: 1804562 - RNA, 19 nt, Artificial Sequence
  Description of Artificial Sequence: Synthetic oligonucleotide
uaaugggcgaccacacaaa

SEQ ID NO: 1804563 - RNA, 19 nt, Artificial Sequence
  Description of Artificial Sequence: Synthetic oligonucleotide
cauggaaggacgaucugga

SEQ ID NO: 1804564 - RNA, 19 nt, Artificial Sequence
  Description of Artificial Sequence: Synthetic oligonucleotide
uacaacaucgauggaguau

SEQ ID NO: 1804565 - RNA, 19 nt, Artificial Sequence
  Description of Artificial Sequence: Synthetic oligonucleotide
gaacccacggccccggcug

SEQ ID NO: 1804566 - RNA, 19 nt, Artificial Sequence
  Description of Artificial Sequence: Synthetic oligonucleotide
gaaguaugggccgccagac

SEQ ID NO: 1804567 - RNA, 19 nt, Artificial Sequence
  Description of Artificial Sequence: Synthetic oligonucleotide
gaucugcccguacuuggag

SEQ ID NO: 1804568 - RNA, 19 nt, Artificial Sequence
  Description of Artificial Sequence: Synthetic oligonucleotide
ggucuuuuaaucggcuucg

SEQ ID NO: 1804569 - RNA, 19 nt, Artificial Sequence
  Description of Artificial Sequence: Synthetic oligonucleotide
gacgaucuggacgcggagg

SEQ ID NO: 1804570 - RNA, 19 nt, Artificial Sequence
  Description of Artificial Sequence: Synthetic oligonucleotide
ggguacaagaauuccucag

SEQ ID NO: 1804571 - RNA, 19 nt, Artificial Sequence
  Description of Artificial Sequence: Synthetic oligonucleotide
gaaacuggguacaagaauu

SEQ ID NO: 1804572 - RNA, 19 nt, Artificial Sequence
  Description of Artificial Sequence: Synthetic oligonucleotide
agacagugcuuccuuaaaa

SEQ ID NO: 1804573 - RNA, 19 nt, Artificial Sequence
  Description of Artificial Sequence: Synthetic oligonucleotide
gacgcgggcgggaagacag

SEQ ID NO: 1804574 - RNA, 19 nt, Artificial Sequence
  Description of Artificial Sequence: Synthetic oligonucleotide
aacaucgauggaguaugca

SEQ ID NO: 1804575 - RNA, 19 nt, Artificial Sequence
  Description of Artificial Sequence: Synthetic oligonucleotide
aucauggcgucuuuagcau

SEQ ID NO: 1804576 - RNA, 19 nt, Artificial Sequence
  Description of Artificial Sequence: Synthetic oligonucleotide
acacggucuuuuaaucggc

SEQ ID NO: 1804577 - RNA, 19 nt, Artificial Sequence
  Description of Artificial Sequence: Synthetic oligonucleotide
cuucgugaagccaaagaaa

SEQ ID NO: 1804578 - RNA, 19 nt, Artificial Sequence
  Description of Artificial Sequence: Synthetic oligonucleotide
gaccacacaaaaggaaaac

SEQ ID NO: 1804579 - RNA, 19 nt, Artificial Sequence
  Description of Artificial Sequence: Synthetic oligonucleotide
auggcuugcucaaauugag

SEQ ID NO: 1804580 - RNA, 19 nt, Artificial Sequence
  Description of Artificial Sequence: Synthetic oligonucleotide
guagcauaacugucauagc

SEQ ID NO: 1804581 - RNA, 19 nt, Artificial Sequence
  Description of Artificial Sequence: Synthetic oligonucleotide
ucacuacacaacguucagc

SEQ ID NO: 1804582 - RNA, 19 nt, Artificial Sequence
  Description of Artificial Sequence: Synthetic oligonucleotide
cuggcauaguagucucugg

SEQ ID NO: 1804583 - RNA, 19 nt, Artificial Sequence
  Description of Artificial Sequence: Synthetic oligonucleotide
caucuuaauuacagccaug

SEQ ID NO: 1804584 - RNA, 19 nt, Artificial Sequence
  Description of Artificial Sequence: Synthetic oligonucleotide
auaaacacuuccacagccu

SEQ ID NO: 1804585 - RNA, 19 nt, Artificial Sequence
  Description of Artificial Sequence: Synthetic oligonucleotide
acuggguacaagaauuccu

SEQ ID NO: 1804586 - RNA, 19 nt, Artificial Sequence
  Description of Artificial Sequence: Synthetic oligonucleotide
uggucacgaggccaucuug

SEQ ID NO: 1804587 - RNA, 19 nt, Artificial Sequence
  Description of Artificial Sequence: Synthetic oligonucleotide
gaaccgaaaggacuacaaa

SEQ ID NO: 1804588 - RNA, 19 nt, Artificial Sequence
  Description of Artificial Sequence: Synthetic oligonucleotide
gucagaagacuugccagcc

SEQ ID NO: 1804589 - RNA, 19 nt, Artificial Sequence
  Description of Artificial Sequence: Synthetic oligonucleotide
accgcgauauccgcgggac

SEQ ID NO: 1804590 - RNA, 19 nt, Artificial Sequence
  Description of Artificial Sequence: Synthetic oligonucleotide
aaguaugggccgccagacu

SEQ ID NO: 1804591 - RNA, 19 nt, Artificial Sequence
  Description of Artificial Sequence: Synthetic oligonucleotide
caggaccugugcccgaugg

SEQ ID NO: 1804592 - RNA, 19 nt, Artificial Sequence
  Description of Artificial Sequence: Synthetic oligonucleotide
cauggcgucuuuagcauca

SEQ ID NO: 1804593 - RNA, 19 nt, Artificial Sequence
  Description of Artificial Sequence: Synthetic oligonucleotide
ucucucuguccuuuaccac

SEQ ID NO: 1804594 - RNA, 19 nt, Artificial Sequence
  Description of Artificial Sequence: Synthetic oligonucleotide
gcuccgauaaccauagcug

SEQ ID NO: 1804595 - RNA, 19 nt, Artificial Sequence
  Description of Artificial Sequence: Synthetic oligonucleotide
caaccccgacaauuuagag

SEQ ID NO: 1804596 - RNA, 19 nt, Artificial Sequence
  Description of Artificial Sequence: Synthetic oligonucleotide
accugugcccgaugggcgg

SEQ ID NO: 1804597 - RNA, 19 nt, Artificial Sequence
  Description of Artificial Sequence: Synthetic oligonucleotide
acacaacguucagcgaagc

SEQ ID NO: 1804598 - RNA, 19 nt, Artificial Sequence
  Description of Artificial Sequence: Synthetic oligonucleotide
acuacacaacguucagcga

SEQ ID NO: 1804599 - RNA, 19 nt, Artificial Sequence
  Description of Artificial Sequence: Synthetic oligonucleotide
aacguucagcgaagcuccc

SEQ ID NO: 1804600 - RNA, 19 nt, Artificial Sequence
  Description of Artificial Sequence: Synthetic oligonucleotide
uggucgacucggaucugcc

SEQ ID NO: 1804601 - RNA, 19 nt, Artificial Sequence
  Description of Artificial Sequence: Synthetic oligonucleotide
guguguagcauaacuguca

SEQ ID NO: 1804602 - RNA, 19 nt, Artificial Sequence
  Description of Artificial Sequence: Synthetic oligonucleotide
aggaaguaugggccgccag

SEQ ID NO: 1804603 - RNA, 19 nt, Artificial Sequence
  Description of Artificial Sequence: Synthetic oligonucleotide
gcuugccuucaucugaugc

SEQ ID NO: 1804604 - RNA, 19 nt, Artificial Sequence
  Description of Artificial Sequence: Synthetic oligonucleotide
ucucuggagccuccguaac

SEQ ID NO: 1804605 - RNA, 19 nt, Artificial Sequence
  Description of Artificial Sequence: Synthetic oligonucleotide
aacccauggcucaugguaa

SEQ ID NO: 1804606 - RNA, 19 nt, Artificial Sequence
  Description of Artificial Sequence: Synthetic oligonucleotide
aaacaacaccacaacugaa

SEQ ID NO: 1804607 - RNA, 19 nt, Artificial Sequence
  Description of Artificial Sequence: Synthetic oligonucleotide
gcuucgugaagccaaagaa

SEQ ID NO: 1804608 - RNA, 19 nt, Artificial Sequence
  Description of Artificial Sequence: Synthetic oligonucleotide
ugcccguacuuggagaaga

SEQ ID NO: 1804609 - RNA, 19 nt, Artificial Sequence
  Description of Artificial Sequence: Synthetic oligonucleotide
uucagagaucugcccguac

SEQ ID NO: 1804610 - RNA, 19 nt, Artificial Sequence
  Description of Artificial Sequence: Synthetic oligonucleotide
cucuggagccuccguaacc

SEQ ID NO: 1804611 - RNA, 19 nt, Artificial Sequence
  Description of Artificial Sequence: Synthetic oligonucleotide
gaagacagcgcgccacaca

SEQ ID NO: 1804612 - RNA, 19 nt, Artificial Sequence
  Description of Artificial Sequence: Synthetic oligonucleotide
acucguuguguguagcaua

SEQ ID NO: 1804613 - RNA, 19 nt, Artificial Sequence
  Description of Artificial Sequence: Synthetic oligonucleotide
caucgauggaguaugcaua

SEQ ID NO: 1804614 - RNA, 19 nt, Artificial Sequence
  Description of Artificial Sequence: Synthetic oligonucleotide
cauaacugucauagcuguc

SEQ ID NO: 1804615 - RNA, 19 nt, Artificial Sequence
  Description of Artificial Sequence: Synthetic oligonucleotide
auaguagucucuggagccu

SEQ ID NO: 1804616 - RNA, 19 nt, Artificial Sequence
  Description of Artificial Sequence: Synthetic oligonucleotide
caacaucgauggaguaugc

SEQ ID NO: 1804617 - RNA, 19 nt, Artificial Sequence
  Description of Artificial Sequence: Synthetic oligonucleotide
ggucacgaggccaucuugg

SEQ ID NO: 1804618 - RNA, 19 nt, Artificial Sequence
  Description of Artificial Sequence: Synthetic oligonucleotide
uggagaacccacggccccg

SEQ ID NO: 1804619 - RNA, 19 nt, Artificial Sequence
  Description of Artificial Sequence: Synthetic oligonucleotide
acguucagcgaagcucccc

SEQ ID NO: 1804620 - RNA, 19 nt, Artificial Sequence
  Description of Artificial Sequence: Synthetic oligonucleotide
ggagccaccgcgauauccg

SEQ ID NO: 1804621 - RNA, 19 nt, Artificial Sequence
  Description of Artificial Sequence: Synthetic oligonucleotide
agccauggaaggacgaucu

SEQ ID NO: 1804622 - RNA, 19 nt, Artificial Sequence
  Description of Artificial Sequence: Synthetic oligonucleotide
cucguuguguguagcauaa

SEQ ID NO: 1804623 - RNA, 19 nt, Artificial Sequence
  Description of Artificial Sequence: Synthetic oligonucleotide
gaguaugcauaucuucggu

SEQ ID NO: 1804624 - RNA, 19 nt, Artificial Sequence
  Description of Artificial Sequence: Synthetic oligonucleotide
ucugccgcccauccacaga

SEQ ID NO: 1804625 - RNA, 19 nt, Artificial Sequence
  Description of Artificial Sequence: Synthetic oligonucleotide
ucaggaaguaugggccgcc

SEQ ID NO: 1804626 - RNA, 19 nt, Artificial Sequence
  Description of Artificial Sequence: Synthetic oligonucleotide
acaaccccgacaauuuaga

SEQ ID NO: 1804627 - RNA, 19 nt, Artificial Sequence
  Description of Artificial Sequence: Synthetic oligonucleotide
agcggagccaccgcgauau

SEQ ID NO: 1804628 - RNA, 19 nt, Artificial Sequence
  Description of Artificial Sequence: Synthetic oligonucleotide
ucuuggucagaagcaggcu

SEQ ID NO: 1804629 - RNA, 19 nt, Artificial Sequence
  Description of Artificial Sequence: Synthetic oligonucleotide
gucagaaccgaaaggacua

SEQ ID NO: 1804630 - RNA, 19 nt, Artificial Sequence
  Description of Artificial Sequence: Synthetic oligonucleotide
ucauggcgucuuuagcauc

SEQ ID NO: 1804631 - RNA, 19 nt, Artificial Sequence
  Description of Artificial Sequence: Synthetic oligonucleotide
cuagagagccauggcuugc

SEQ ID NO: 1804632 - RNA, 19 nt, Artificial Sequence
  Description of Artificial Sequence: Synthetic oligonucleotide
cauagcugucucuguagga

SEQ ID NO: 1804633 - RNA, 19 nt, Artificial Sequence
  Description of Artificial Sequence: Synthetic oligonucleotide
acuccgggacucaaagcgg

SEQ ID NO: 1804634 - RNA, 19 nt, Artificial Sequence
  Description of Artificial Sequence: Synthetic oligonucleotide
ucagaaccgaaaggacuac

SEQ ID NO: 1804635 - RNA, 19 nt, Artificial Sequence
  Description of Artificial Sequence: Synthetic oligonucleotide
uccgggacucaaagcggcc

SEQ ID NO: 1804636 - RNA, 19 nt, Artificial Sequence
  Description of Artificial Sequence: Synthetic oligonucleotide
ggaaaacaacaccacaacu

SEQ ID NO: 1804637 - RNA, 19 nt, Artificial Sequence
  Description of Artificial Sequence: Synthetic oligonucleotide
cugacuccggcuggcauag

SEQ ID NO: 1804638 - RNA, 19 nt, Artificial Sequence
  Description of Artificial Sequence: Synthetic oligonucleotide
agucucuggagccuccgua

SEQ ID NO: 1804639 - RNA, 19 nt, Artificial Sequence
  Description of Artificial Sequence: Synthetic oligonucleotide
gggccgccagacuuaaugg

SEQ ID NO: 1804640 - RNA, 19 nt, Artificial Sequence
  Description of Artificial Sequence: Synthetic oligonucleotide
cucaaagcggccaccucca

SEQ ID NO: 1804641 - RNA, 19 nt, Artificial Sequence
  Description of Artificial Sequence: Synthetic oligonucleotide
aaucggcuucgugaagcca

SEQ ID NO: 1804642 - RNA, 19 nt, Artificial Sequence
  Description of Artificial Sequence: Synthetic oligonucleotide
ggccgccagacuuaauggg

SEQ ID NO: 1804643 - RNA, 19 nt, Artificial Sequence
  Description of Artificial Sequence: Synthetic oligonucleotide
caaauugaguccauuucau

SEQ ID NO: 1804644 - RNA, 19 nt, Artificial Sequence
  Description of Artificial Sequence: Synthetic oligonucleotide
uacucguuguguguagcau

SEQ ID NO: 1804645 - RNA, 19 nt, Artificial Sequence
  Description of Artificial Sequence: Synthetic oligonucleotide
uaggacccgcccgagcucc

SEQ ID NO: 1804646 - RNA, 19 nt, Artificial Sequence
  Description of Artificial Sequence: Synthetic oligonucleotide
cucaggaaguaugggccgc

SEQ ID NO: 1804647 - RNA, 19 nt, Artificial Sequence
  Description of Artificial Sequence: Synthetic oligonucleotide
cuccagcggagccaccgcg

SEQ ID NO: 1804648 - RNA, 19 nt, Artificial Sequence
  Description of Artificial Sequence: Synthetic oligonucleotide
ggaaguaugggccgccaga

SEQ ID NO: 1804649 - RNA, 19 nt, Artificial Sequence
  Description of Artificial Sequence: Synthetic oligonucleotide
auacaacaucgauggagua

SEQ ID NO: 1804650 - RNA, 19 nt, Artificial Sequence
  Description of Artificial Sequence: Synthetic oligonucleotide
ugcccgaugggcgggaccu

SEQ ID NO: 1804651 - RNA, 19 nt, Artificial Sequence
  Description of Artificial Sequence: Synthetic oligonucleotide
gccaccgcgauauccgcgg

SEQ ID NO: 1804652 - RNA, 19 nt, Artificial Sequence
  Description of Artificial Sequence: Synthetic oligonucleotide
cuuaaugggcgaccacaca

SEQ ID NO: 1804653 - RNA, 19 nt, Artificial Sequence
  Description of Artificial Sequence: Synthetic oligonucleotide
uccggcuggcauaguaguc

SEQ ID NO: 1804654 - RNA, 19 nt, Artificial Sequence
  Description of Artificial Sequence: Synthetic oligonucleotide
aagaccugcuccagcgccu

SEQ ID NO: 1804655 - RNA, 19 nt, Artificial Sequence
  Description of Artificial Sequence: Synthetic oligonucleotide
gagccaccgcgauauccgc

SEQ ID NO: 1804656 - RNA, 19 nt, Artificial Sequence
  Description of Artificial Sequence: Synthetic oligonucleotide
aucggcuucgugaagccaa

SEQ ID NO: 1804657 - RNA, 19 nt, Artificial Sequence
  Description of Artificial Sequence: Synthetic oligonucleotide
caucgauguucucaaaggu

SEQ ID NO: 1804658 - RNA, 19 nt, Artificial Sequence
  Description of Artificial Sequence: Synthetic oligonucleotide
caggcuguugaugggucag

SEQ ID NO: 1804659 - RNA, 19 nt, Artificial Sequence
  Description of Artificial Sequence: Synthetic oligonucleotide
cuuuuacucguugugugua

SEQ ID NO: 1804660 - RNA, 19 nt, Artificial Sequence
  Description of Artificial Sequence: Synthetic oligonucleotide
uggaucgcugggucucucu

SEQ ID NO: 1804661 - RNA, 19 nt, Artificial Sequence
  Description of Artificial Sequence: Synthetic oligonucleotide
ccgacaauuuagagaaaac

SEQ ID NO: 1804662 - RNA, 19 nt, Artificial Sequence
  Description of Artificial Sequence: Synthetic oligonucleotide
acggucuuuuaaucggcuu

SEQ ID NO: 1804663 - RNA, 19 nt, Artificial Sequence
  Description of Artificial Sequence: Synthetic oligonucleotide
uccccacgggccaggaccu

SEQ ID NO: 1804664 - RNA, 19 nt, Artificial Sequence
  Description of Artificial Sequence: Synthetic oligonucleotide
gggaccgguugucagaaga

SEQ ID NO: 1804665 - RNA, 19 nt, Artificial Sequence
  Description of Artificial Sequence: Synthetic oligonucleotide
gaaggacgaucuggacgcg

SEQ ID NO: 1804666 - RNA, 19 nt, Artificial Sequence
  Description of Artificial Sequence: Synthetic oligonucleotide
cuggucgacucggaucugc

SEQ ID NO: 1804667 - RNA, 19 nt, Artificial Sequence
  Description of Artificial Sequence: Synthetic oligonucleotide
ccgccagacuuaaugggcg

SEQ ID NO: 1804668 - RNA, 19 nt, Artificial Sequence
  Description of Artificial Sequence: Synthetic oligonucleotide
ggacaaggugcucacuaca

SEQ ID NO: 1804669 - RNA, 19 nt, Artificial Sequence
  Description of Artificial Sequence: Synthetic oligonucleotide
uauccgcgggaccgguugu

SEQ ID NO: 1804670 - RNA, 19 nt, Artificial Sequence
  Description of Artificial Sequence: Synthetic oligonucleotide
cagacuuaaugggcgacca

SEQ ID NO: 1804671 - RNA, 19 nt, Artificial Sequence
  Description of Artificial Sequence: Synthetic oligonucleotide
gacgcggagggcuuuuacu

SEQ ID NO: 1804672 - RNA, 19 nt, Artificial Sequence
  Description of Artificial Sequence: Synthetic oligonucleotide
ggcuucgugaagccaaaga

SEQ ID NO: 1804673 - RNA, 19 nt, Artificial Sequence
  Description of Artificial Sequence: Synthetic oligonucleotide
aggccaucuuggucagaag

SEQ ID NO: 1804674 - RNA, 19 nt, Artificial Sequence
  Description of Artificial Sequence: Synthetic oligonucleotide
uuccucagccacugugaau

SEQ ID NO: 1804675 - RNA, 19 nt, Artificial Sequence
  Description of Artificial Sequence: Synthetic oligonucleotide
gggacaaggugcucacuac

SEQ ID NO: 1804676 - RNA, 19 nt, Artificial Sequence
  Description of Artificial Sequence: Synthetic oligonucleotide
gacuccggcuggcauagua

SEQ ID NO: 1804677 - RNA, 19 nt, Artificial Sequence
  Description of Artificial Sequence: Synthetic oligonucleotide
ugcucaaauugaguccauu

SEQ ID NO: 1804678 - RNA, 19 nt, Artificial Sequence
  Description of Artificial Sequence: Synthetic oligonucleotide
cugugaauacaacaucgau

SEQ ID NO: 1804679 - RNA, 19 nt, Artificial Sequence
  Description of Artificial Sequence: Synthetic oligonucleotide
gagucgggcaggucccuga

SEQ ID NO: 1804680 - RNA, 19 nt, Artificial Sequence
  Description of Artificial Sequence: Synthetic oligonucleotide
cugucucuguaggacccgc

SEQ ID NO: 1804681 - RNA, 19 nt, Artificial Sequence
  Description of Artificial Sequence: Synthetic oligonucleotide
uaugggccgccagacuuaa

SEQ ID NO: 1804682 - RNA, 19 nt, Artificial Sequence
  Description of Artificial Sequence: Synthetic oligonucleotide
ccgguugucagaagacuug

SEQ ID NO: 1804683 - RNA, 19 nt, Artificial Sequence
  Description of Artificial Sequence: Synthetic oligonucleotide
cgacaauuuagagaaaaca

SEQ ID NO: 1804684 - RNA, 19 nt, Artificial Sequence
  Description of Artificial Sequence: Synthetic oligonucleotide
cagccauggaaggacgauc

SEQ ID NO: 1804685 - RNA, 19 nt, Artificial Sequence
  Description of Artificial Sequence: Synthetic oligonucleotide
gacuucccauucauagcca

SEQ ID NO: 1804686 - RNA, 19 nt, Artificial Sequence
  Description of Artificial Sequence: Synthetic oligonucleotide
cuguaggacccgcccgagc

SEQ ID NO: 1804687 - RNA, 19 nt, Artificial Sequence
  Description of Artificial Sequence: Synthetic oligonucleotide
aggacgaucuggacgcgga

SEQ ID NO: 1804688 - RNA, 19 nt, Artificial Sequence
  Description of Artificial Sequence: Synthetic oligonucleotide
gcgucuuuagcaucaucga

SEQ ID NO: 1804689 - RNA, 19 nt, Artificial Sequence
  Description of Artificial Sequence: Synthetic oligonucleotide
ugaugccauggcagccgcu

SEQ ID NO: 1804690 - RNA, 19 nt, Artificial Sequence
  Description of Artificial Sequence: Synthetic oligonucleotide
ggagggcuuuuacucguug

SEQ ID NO: 1804691 - RNA, 19 nt, Artificial Sequence
  Description of Artificial Sequence: Synthetic oligonucleotide
acccauggcucaugguaaa

SEQ ID NO: 1804692 - RNA, 19 nt, Artificial Sequence
  Description of Artificial Sequence: Synthetic oligonucleotide
gccacccugacuccggcug

SEQ ID NO: 1804693 - RNA, 19 nt, Artificial Sequence
  Description of Artificial Sequence: Synthetic oligonucleotide
gguugucagaagacuugcc

SEQ ID NO: 1804694 - RNA, 19 nt, Artificial Sequence
  Description of Artificial Sequence: Synthetic oligonucleotide
uggcgucuuuagcaucauc

SEQ ID NO: 1804695 - RNA, 19 nt, Artificial Sequence
  Description of Artificial Sequence: Synthetic oligonucleotide
ucaaagcggccaccuccau

SEQ ID NO: 1804696 - RNA, 19 nt, Artificial Sequence
  Description of Artificial Sequence: Synthetic oligonucleotide
gccaaagaaacuggguaca

SEQ ID NO: 1804697 - RNA, 19 nt, Artificial Sequence
  Description of Artificial Sequence: Synthetic oligonucleotide
gcuguugaugggucagaac

SEQ ID NO: 1804698 - RNA, 19 nt, Artificial Sequence
  Description of Artificial Sequence: Synthetic oligonucleotide
cgcggaagaagccucggcc

SEQ ID NO: 1804699 - RNA, 19 nt, Artificial Sequence
  Description of Artificial Sequence: Synthetic oligonucleotide
cagccgcugagucgggcag

SEQ ID NO: 1804700 - RNA, 19 nt, Artificial Sequence
  Description of Artificial Sequence: Synthetic oligonucleotide
ucuggaucgcugggucucu

SEQ ID NO: 1804701 - RNA, 19 nt, Artificial Sequence
  Description of Artificial Sequence: Synthetic oligonucleotide
ggaagaagccucggccucc

SEQ ID NO: 1804702 - RNA, 19 nt, Artificial Sequence
  Description of Artificial Sequence: Synthetic oligonucleotide
augccauggcagccgcuga

SEQ ID NO: 1804703 - RNA, 19 nt, Artificial Sequence
  Description of Artificial Sequence: Synthetic oligonucleotide
gccgccagacuuaaugggc

SEQ ID NO: 1804704 - RNA, 19 nt, Artificial Sequence
  Description of Artificial Sequence: Synthetic oligonucleotide
agucuggucacgaggccau

SEQ ID NO: 1804705 - RNA, 19 nt, Artificial Sequence
  Description of Artificial Sequence: Synthetic oligonucleotide
ggcgggaagacagcgcgcc

SEQ ID NO: 1804706 - RNA, 19 nt, Artificial Sequence
  Description of Artificial Sequence: Synthetic oligonucleotide
ucgauggaguaugcauauc

SEQ ID NO: 1804707 - RNA, 19 nt, Artificial Sequence
  Description of Artificial Sequence: Synthetic oligonucleotide
ggggcuagagagccauggc

SEQ ID NO: 1804708 - RNA, 19 nt, Artificial Sequence
  Description of Artificial Sequence: Synthetic oligonucleotide
ccagacuuaaugggcgacc

SEQ ID NO: 1804709 - RNA, 19 nt, Artificial Sequence
  Description of Artificial Sequence: Synthetic oligonucleotide
cgcgauauccgcgggaccg

SEQ ID NO: 1804710 - RNA, 19 nt, Artificial Sequence
  Description of Artificial Sequence: Synthetic oligonucleotide
acagcgcgccacacacacc

SEQ ID NO: 1804711 - RNA, 19 nt, Artificial Sequence
  Description of Artificial Sequence: Synthetic oligonucleotide
gggcaggucccugacgcgg

SEQ ID NO: 1804712 - RNA, 19 nt, Artificial Sequence
  Description of Artificial Sequence: Synthetic oligonucleotide
gcgaccacacaaaaggaaa

SEQ ID NO: 1804713 - RNA, 19 nt, Artificial Sequence
  Description of Artificial Sequence: Synthetic oligonucleotide
ggacgaucuggacgcggag

SEQ ID NO: 1804714 - RNA, 19 nt, Artificial Sequence
  Description of Artificial Sequence: Synthetic oligonucleotide
ucguuguguguagcauaac

SEQ ID NO: 1804715 - RNA, 19 nt, Artificial Sequence
  Description of Artificial Sequence: Synthetic oligonucleotide
cggucuuuuaaucggcuuc

SEQ ID NO: 1804716 - RNA, 19 nt, Artificial Sequence
  Description of Artificial Sequence: Synthetic oligonucleotide
gugcucacuacacaacguu

SEQ ID NO: 1804717 - RNA, 19 nt, Artificial Sequence
  Description of Artificial Sequence: Synthetic oligonucleotide
uccgcgggaccgguuguca

SEQ ID NO: 1804718 - RNA, 19 nt, Artificial Sequence
  Description of Artificial Sequence: Synthetic oligonucleotide
gaagacuugccagccuggu

SEQ ID NO: 1804719 - RNA, 19 nt, Artificial Sequence
  Description of Artificial Sequence: Synthetic oligonucleotide
gcugagucgggcagguccc

SEQ ID NO: 1804720 - RNA, 19 nt, Artificial Sequence
  Description of Artificial Sequence: Synthetic oligonucleotide
guaggacccgcccgagcuc

SEQ ID NO: 1804721 - RNA, 19 nt, Artificial Sequence
  Description of Artificial Sequence: Synthetic oligonucleotide
gaucugccgcccauccaca

SEQ ID NO: 1804722 - RNA, 19 nt, Artificial Sequence
  Description of Artificial Sequence: Synthetic oligonucleotide
ccucuggagaacccacggc

SEQ ID NO: 1804723 - RNA, 19 nt, Artificial Sequence
  Description of Artificial Sequence: Synthetic oligonucleotide
gaccgguugucagaagacu

SEQ ID NO: 1804724 - RNA, 19 nt, Artificial Sequence
  Description of Artificial Sequence: Synthetic oligonucleotide
cgggcgggaagacagcgcg

SEQ ID NO: 1804725 - RNA, 19 nt, Artificial Sequence
  Description of Artificial Sequence: Synthetic oligonucleotide
gcgccacacacacccaagc

SEQ ID NO: 1804726 - RNA, 19 nt, Artificial Sequence
  Description of Artificial Sequence: Synthetic oligonucleotide
ugccacccugacuccggcu

SEQ ID NO: 1804727 - RNA, 19 nt, Artificial Sequence
  Description of Artificial Sequence: Synthetic oligonucleotide
cagaaccgaaaggacuaca

SEQ ID NO: 1804728 - RNA, 19 nt, Artificial Sequence
  Description of Artificial Sequence: Synthetic oligonucleotide
ggaccgguugucagaagac

SEQ ID NO: 1804729 - RNA, 19 nt, Artificial Sequence
  Description of Artificial Sequence: Synthetic oligonucleotide
gccuggucgacucggaucu

SEQ ID NO: 1804730 - RNA, 19 nt, Artificial Sequence
  Description of Artificial Sequence: Synthetic oligonucleotide
cacgggccaggaccugugc

SEQ ID NO: 1804731 - RNA, 19 nt, Artificial Sequence
  Description of Artificial Sequence: Synthetic oligonucleotide
gggcuagagagccauggcu

SEQ ID NO: 1804732 - RNA, 19 nt, Artificial Sequence
  Description of Artificial Sequence: Synthetic oligonucleotide
cacagacuucccauucaua

SEQ ID NO: 1804733 - RNA, 19 nt, Artificial Sequence
  Description of Artificial Sequence: Synthetic oligonucleotide
gcugcacguccccacgggc

SEQ ID NO: 1804734 - RNA, 19 nt, Artificial Sequence
  Description of Artificial Sequence: Synthetic oligonucleotide
agccgcugagucgggcagg

SEQ ID NO: 1804735 - RNA, 19 nt, Artificial Sequence
  Description of Artificial Sequence: Synthetic oligonucleotide
cucagcccucccacgaaaa

SEQ ID NO: 1804736 - RNA, 19 nt, Artificial Sequence
  Description of Artificial Sequence: Synthetic oligonucleotide
gucacgaggccaucuuggu

SEQ ID NO: 1804737 - RNA, 19 nt, Artificial Sequence
  Description of Artificial Sequence: Synthetic oligonucleotide
ugacgcgggcgggaagaca

SEQ ID NO: 1804738 - RNA, 19 nt, Artificial Sequence
  Description of Artificial Sequence: Synthetic oligonucleotide
auccgcgggaccgguuguc

SEQ ID NO: 1804739 - RNA, 19 nt, Artificial Sequence
  Description of Artificial Sequence: Synthetic oligonucleotide
caggucccugacgcgggcg

SEQ ID NO: 1804740 - RNA, 19 nt, Artificial Sequence
  Description of Artificial Sequence: Synthetic oligonucleotide
gagcuccgauaaccauagc

SEQ ID NO: 1804741 - RNA, 19 nt, Artificial Sequence
  Description of Artificial Sequence: Synthetic oligonucleotide
cgcggagggcuuuuacucg

SEQ ID NO: 1804742 - RNA, 19 nt, Artificial Sequence
  Description of Artificial Sequence: Synthetic oligonucleotide
ggcgaccacacaaaaggaa

SEQ ID NO: 1804743 - RNA, 19 nt, Artificial Sequence
  Description of Artificial Sequence: Synthetic oligonucleotide
gcugucucuguaggacccg

SEQ ID NO: 1804744 - RNA, 19 nt, Artificial Sequence
  Description of Artificial Sequence: Synthetic oligonucleotide
caaagcggccaccuccaua

SEQ ID NO: 1804745 - RNA, 19 nt, Artificial Sequence
  Description of Artificial Sequence: Synthetic oligonucleotide
uggucagaagcaggcuguu

SEQ ID NO: 1804746 - RNA, 19 nt, Artificial Sequence
  Description of Artificial Sequence: Synthetic oligonucleotide
gggaagacagcgcgccaca

SEQ ID NO: 1804747 - RNA, 19 nt, Artificial Sequence
  Description of Artificial Sequence: Synthetic oligonucleotide
cacggucuuuuaaucggcu

SEQ ID NO: 1804748 - RNA, 19 nt, Artificial Sequence
  Description of Artificial Sequence: Synthetic oligonucleotide
cccgacaauuuagagaaaa

SEQ ID NO: 1804749 - RNA, 19 nt, Artificial Sequence
  Description of Artificial Sequence: Synthetic oligonucleotide
guguagcauaacugucaua

SEQ ID NO: 1804750 - RNA, 19 nt, Artificial Sequence
  Description of Artificial Sequence: Synthetic oligonucleotide
cuccggcuggcauaguagu

SEQ ID NO: 1804751 - RNA, 19 nt, Artificial Sequence
  Description of Artificial Sequence: Synthetic oligonucleotide
ugggcgggaccugcugcgc

SEQ ID NO: 1804752 - RNA, 19 nt, Artificial Sequence
  Description of Artificial Sequence: Synthetic oligonucleotide
gugcccgaugggcgggacc

SEQ ID NO: 1804753 - RNA, 19 nt, Artificial Sequence
  Description of Artificial Sequence: Synthetic oligonucleotide
ccgauaaccauagcugcca

SEQ ID NO: 1804754 - RNA, 19 nt, Artificial Sequence
  Description of Artificial Sequence: Synthetic oligonucleotide
cucggaucugccgcccauc

SEQ ID NO: 1804755 - RNA, 19 nt, Artificial Sequence
  Description of Artificial Sequence: Synthetic oligonucleotide
cacaacguucagcgaagcu

SEQ ID NO: 1804756 - RNA, 19 nt, Artificial Sequence
  Description of Artificial Sequence: Synthetic oligonucleotide
cgguugucagaagacuugc

SEQ ID NO: 1804757 - RNA, 19 nt, Artificial Sequence
  Description of Artificial Sequence: Synthetic oligonucleotide
cgauggaguaugcauaucu

SEQ ID NO: 1804758 - RNA, 19 nt, Artificial Sequence
  Description of Artificial Sequence: Synthetic oligonucleotide
acgcgggcgggaagacagc

SEQ ID NO: 1804759 - RNA, 19 nt, Artificial Sequence
  Description of Artificial Sequence: Synthetic oligonucleotide
ggacgcggagggcuuuuac

SEQ ID NO: 1804760 - RNA, 19 nt, Artificial Sequence
  Description of Artificial Sequence: Synthetic oligonucleotide
gcgauauccgcgggaccgg

SEQ ID NO: 1804761 - RNA, 19 nt, Artificial Sequence
  Description of Artificial Sequence: Synthetic oligonucleotide
gcggaagaagccucggccu

SEQ ID NO: 1804762 - RNA, 19 nt, Artificial Sequence
  Description of Artificial Sequence: Synthetic oligonucleotide
ccgaaaggacuacaaaagu

SEQ ID NO: 1804763 - RNA, 19 nt, Artificial Sequence
  Description of Artificial Sequence: Synthetic oligonucleotide
guaugggccgccagacuua

SEQ ID NO: 1804764 - RNA, 19 nt, Artificial Sequence
  Description of Artificial Sequence: Synthetic oligonucleotide
ccacccugacuccggcugg

SEQ ID NO: 1804765 - RNA, 19 nt, Artificial Sequence
  Description of Artificial Sequence: Synthetic oligonucleotide
ggaagacagcgcgccacac

SEQ ID NO: 1804766 - RNA, 19 nt, Artificial Sequence
  Description of Artificial Sequence: Synthetic oligonucleotide
cguuguguguagcauaacu

SEQ ID NO: 1804767 - RNA, 19 nt, Artificial Sequence
  Description of Artificial Sequence: Synthetic oligonucleotide
gccagacuuaaugggcgac

SEQ ID NO: 1804768 - RNA, 19 nt, Artificial Sequence
  Description of Artificial Sequence: Synthetic oligonucleotide
ucuggacgcggagggcuuu

SEQ ID NO: 1804769 - RNA, 19 nt, Artificial Sequence
  Description of Artificial Sequence: Synthetic oligonucleotide
ugugcccgaugggcgggac

SEQ ID NO: 1804770 - RNA, 19 nt, Artificial Sequence
  Description of Artificial Sequence: Synthetic oligonucleotide
cgauaaccauagcugccac

SEQ ID NO: 1804771 - RNA, 19 nt, Artificial Sequence
  Description of Artificial Sequence: Synthetic oligonucleotide
cugacgcgggcgggaagac

SEQ ID NO: 1804772 - RNA, 19 nt, Artificial Sequence
  Description of Artificial Sequence: Synthetic oligonucleotide
ucccugacgcgggcgggaa

SEQ ID NO: 1804773 - RNA, 19 nt, Artificial Sequence
  Description of Artificial Sequence: Synthetic oligonucleotide
caccgcgauauccgcggga

SEQ ID NO: 1804774 - RNA, 19 nt, Artificial Sequence
  Description of Artificial Sequence: Synthetic oligonucleotide
ccgagcuccgauaaccaua

SEQ ID NO: 1804775 - RNA, 19 nt, Artificial Sequence
  Description of Artificial Sequence: Synthetic oligonucleotide
gggcgaccacacaaaagga

SEQ ID NO: 1804776 - RNA, 19 nt, Artificial Sequence
  Description of Artificial Sequence: Synthetic oligonucleotide
ccccgcggaagaagccucg

SEQ ID NO: 1804777 - RNA, 19 nt, Artificial Sequence
  Description of Artificial Sequence: Synthetic oligonucleotide
gucuuuuaaucggcuucgu

SEQ ID NO: 1804778 - RNA, 19 nt, Artificial Sequence
  Description of Artificial Sequence: Synthetic oligonucleotide
ggugcucacuacacaacgu

SEQ ID NO: 1804779 - RNA, 19 nt, Artificial Sequence
  Description of Artificial Sequence: Synthetic oligonucleotide
cgaccacacaaaaggaaaa

SEQ ID NO: 1804780 - RNA, 19 nt, Artificial Sequence
  Description of Artificial Sequence: Synthetic oligonucleotide
ccgcggaagaagccucggc

SEQ ID NO: 1804781 - RNA, 19 nt, Artificial Sequence
  Description of Artificial Sequence: Synthetic oligonucleotide
cuggaucgcugggucucuc

SEQ ID NO: 1804782 - RNA, 19 nt, Artificial Sequence
  Description of Artificial Sequence: Synthetic oligonucleotide
ggcgggaccugcugcgcuc

SEQ ID NO: 1804783 - RNA, 19 nt, Artificial Sequence
  Description of Artificial Sequence: Synthetic oligonucleotide
uggacgcggagggcuuuua

SEQ ID NO: 1804784 - RNA, 19 nt, Artificial Sequence
  Description of Artificial Sequence: Synthetic oligonucleotide
acccgcccgagcuccgaua

SEQ ID NO: 1804785 - RNA, 19 nt, Artificial Sequence
  Description of Artificial Sequence: Synthetic oligonucleotide
aucuggacgcggagggcuu

SEQ ID NO: 1804786 - RNA, 19 nt, Artificial Sequence
  Description of Artificial Sequence: Synthetic oligonucleotide
ggacucaaagcggccaccu

SEQ ID NO: 1804787 - RNA, 19 nt, Artificial Sequence
  Description of Artificial Sequence: Synthetic oligonucleotide
ccaaagaaacuggguacaa

SEQ ID NO: 1804788 - RNA, 19 nt, Artificial Sequence
  Description of Artificial Sequence: Synthetic oligonucleotide
ccuccagcggagccaccgc

SEQ ID NO: 1804789 - RNA, 19 nt, Artificial Sequence
  Description of Artificial Sequence: Synthetic oligonucleotide
ccugugcccgaugggcggg

SEQ ID NO: 1804790 - RNA, 19 nt, Artificial Sequence
  Description of Artificial Sequence: Synthetic oligonucleotide
ccugacuccggcuggcaua

SEQ ID NO: 1804791 - RNA, 19 nt, Artificial Sequence
  Description of Artificial Sequence: Synthetic oligonucleotide
acccugacuccggcuggca

SEQ ID NO: 1804792 - RNA, 19 nt, Artificial Sequence
  Description of Artificial Sequence: Synthetic oligonucleotide
cgcgccacacacacccaag

SEQ ID NO: 1804793 - RNA, 19 nt, Artificial Sequence
  Description of Artificial Sequence: Synthetic oligonucleotide
aggacccgcccgagcuccg

SEQ ID NO: 1804794 - RNA, 19 nt, Artificial Sequence
  Description of Artificial Sequence: Synthetic oligonucleotide
gcggagggcuuuuacucgu

SEQ ID NO: 1804795 - RNA, 19 nt, Artificial Sequence
  Description of Artificial Sequence: Synthetic oligonucleotide
cucccggacugcugcacgu

SEQ ID NO: 1804796 - RNA, 19 nt, Artificial Sequence
  Description of Artificial Sequence: Synthetic oligonucleotide
ccugacgcgggcgggaaga

SEQ ID NO: 1804797 - RNA, 19 nt, Artificial Sequence
  Description of Artificial Sequence: Synthetic oligonucleotide
ccaccgcgauauccgcggg

SEQ ID NO: 1804798 - RNA, 19 nt, Artificial Sequence
  Description of Artificial Sequence: Synthetic oligonucleotide
ccgcgggaccgguugucag

SEQ ID NO: 1804799 - RNA, 19 nt, Artificial Sequence
  Description of Artificial Sequence: Synthetic oligonucleotide
ccgcgauauccgcgggacc

SEQ ID NO: 1804800 - RNA, 19 nt, Artificial Sequence
  Description of Artificial Sequence: Synthetic oligonucleotide
cggcuggcauaguagucuc

SEQ ID NO: 1804801 - RNA, 19 nt, Artificial Sequence
  Description of Artificial Sequence: Synthetic oligonucleotide
gauauccgcgggaccgguu

SEQ ID NO: 1804802 - RNA, 19 nt, Artificial Sequence
  Description of Artificial Sequence: Synthetic oligonucleotide
gcgggaccgguugucagaa

SEQ ID NO: 1804803 - RNA, 19 nt, Artificial Sequence
  Description of Artificial Sequence: Synthetic oligonucleotide
ugacuccggcuggcauagu

SEQ ID NO: 1804804 - RNA, 19 nt, Artificial Sequence
  Description of Artificial Sequence: Synthetic oligonucleotide
acguccccacgggccagga

SEQ ID NO: 1804805 - RNA, 19 nt, Artificial Sequence
  Description of Artificial Sequence: Synthetic oligonucleotide
gcgcgccacacacacccaa

SEQ ID NO: 1804806 - RNA, 19 nt, Artificial Sequence
  Description of Artificial Sequence: Synthetic oligonucleotide
cgucuuuagcaucaucgau

SEQ ID NO: 1804807 - RNA, 19 nt, Artificial Sequence
  Description of Artificial Sequence: Synthetic oligonucleotide
gcgggaagacagcgcgcca

SEQ ID NO: 1804808 - RNA, 19 nt, Artificial Sequence
  Description of Artificial Sequence: Synthetic oligonucleotide
ccaccacuucagagaucug

SEQ ID NO: 1804809 - RNA, 19 nt, Artificial Sequence
  Description of Artificial Sequence: Synthetic oligonucleotide
ccgggacucaaagcggcca

SEQ ID NO: 1804810 - RNA, 19 nt, Artificial Sequence
  Description of Artificial Sequence: Synthetic oligonucleotide
gacccgcccgagcuccgau

SEQ ID NO: 1804811 - RNA, 19 nt, Artificial Sequence
  Description of Artificial Sequence: Synthetic oligonucleotide
cccgcccgagcuccgauaa

SEQ ID NO: 1804812 - RNA, 19 nt, Artificial Sequence
  Description of Artificial Sequence: Synthetic oligonucleotide
cgccagacuuaaugggcga

SEQ ID NO: 1804813 - RNA, 19 nt, Artificial Sequence
  Description of Artificial Sequence: Synthetic oligonucleotide
cagccuggucgacucggau

SEQ ID NO: 1804814 - RNA, 19 nt, Artificial Sequence
  Description of Artificial Sequence: Synthetic oligonucleotide
cugugcccgaugggcggga

SEQ ID NO: 1804815 - RNA, 19 nt, Artificial Sequence
  Description of Artificial Sequence: Synthetic oligonucleotide
cccugacgcgggcgggaag

SEQ ID NO: 1804816 - RNA, 19 nt, Artificial Sequence
  Description of Artificial Sequence: Synthetic oligonucleotide
cgcgggaccgguugucaga

SEQ ID NO: 1804817 - RNA, 19 nt, Artificial Sequence
  Description of Artificial Sequence: Synthetic oligonucleotide
cccauggcucaugguaaaa

SEQ ID NO: 1804818 - RNA, 19 nt, Artificial Sequence
  Description of Artificial Sequence: Synthetic oligonucleotide
cugagucgggcaggucccu

SEQ ID NO: 1804819 - RNA, 19 nt, Artificial Sequence
  Description of Artificial Sequence: Synthetic oligonucleotide
gggcgggaccugcugcgcu

SEQ ID NO: 1804820 - RNA, 19 nt, Artificial Sequence
  Description of Artificial Sequence: Synthetic oligonucleotide
augggccgccagacuuaau

SEQ ID NO: 1804821 - RNA, 19 nt, Artificial Sequence
  Description of Artificial Sequence: Synthetic oligonucleotide
ccuggucgacucggaucug

SEQ ID NO: 1804822 - RNA, 19 nt, Artificial Sequence
  Description of Artificial Sequence: Synthetic oligonucleotide
cggcuucgugaagccaaag

SEQ ID NO: 1804823 - RNA, 19 nt, Artificial Sequence
  Description of Artificial Sequence: Synthetic oligonucleotide
cgggaccgguugucagaag

SEQ ID NO: 1804824 - RNA, 19 nt, Artificial Sequence
  Description of Artificial Sequence: Synthetic oligonucleotide
ccgcccgagcuccgauaac

SEQ ID NO: 1804825 - RNA, 19 nt, Artificial Sequence
  Description of Artificial Sequence: Synthetic oligonucleotide
ggacccgcccgagcuccga

SEQ ID NO: 1804826 - RNA, 19 nt, Artificial Sequence
  Description of Artificial Sequence: Synthetic oligonucleotide
cccgagcuccgauaaccau

SEQ ID NO: 1804827 - RNA, 19 nt, Artificial Sequence
  Description of Artificial Sequence: Synthetic oligonucleotide
gccgcugagucgggcaggu

SEQ ID NO: 1804828 - RNA, 19 nt, Artificial Sequence
  Description of Artificial Sequence: Synthetic oligonucleotide
ccccacuccgggacucaaa

SEQ ID NO: 1804829 - RNA, 19 nt, Artificial Sequence
  Description of Artificial Sequence: Synthetic oligonucleotide
gcccgaugggcgggaccug

SEQ ID NO: 1804830 - RNA, 19 nt, Artificial Sequence
  Description of Artificial Sequence: Synthetic oligonucleotide
ccccgacaauuuagagaaa

SEQ ID NO: 1804831 - RNA, 19 nt, Artificial Sequence
  Description of Artificial Sequence: Synthetic oligonucleotide
gcggagccaccgcgauauc

SEQ ID NO: 1804832 - RNA, 19 nt, Artificial Sequence
  Description of Artificial Sequence: Synthetic oligonucleotide
cuggacgcggagggcuuuu

SEQ ID NO: 1804833 - RNA, 19 nt, Artificial Sequence
  Description of Artificial Sequence: Synthetic oligonucleotide
cccugacuccggcuggcau

SEQ ID NO: 1804834 - RNA, 19 nt, Artificial Sequence
  Description of Artificial Sequence: Synthetic oligonucleotide
ccgcugagucgggcagguc

SEQ ID NO: 1804835 - RNA, 19 nt, Artificial Sequence
  Description of Artificial Sequence: Synthetic oligonucleotide
cccacacaaccccgacaau

SEQ ID NO: 1804836 - RNA, 19 nt, Artificial Sequence
  Description of Artificial Sequence: Synthetic oligonucleotide
cgauauccgcgggaccggu

SEQ ID NO: 1804837 - RNA, 19 nt, Artificial Sequence
  Description of Artificial Sequence: Synthetic oligonucleotide
aaacauagcaguuaguaac

SEQ ID NO: 1804838 - RNA, 19 nt, Artificial Sequence
  Description of Artificial Sequence: Synthetic oligonucleotide
auuaagaugauucauggcg

SEQ ID NO: 1804839 - RNA, 19 nt, Artificial Sequence
  Description of Artificial Sequence: Synthetic oligonucleotide
acaaaauuaaucuuccugc

SEQ ID NO: 1804840 - RNA, 19 nt, Artificial Sequence
  Description of Artificial Sequence: Synthetic oligonucleotide
aaugccuacauucauaacu

SEQ ID NO: 1804841 - RNA, 19 nt, Artificial Sequence
  Description of Artificial Sequence: Synthetic oligonucleotide
aaauuaaucuuccugcaag

SEQ ID NO: 1804842 - RNA, 19 nt, Artificial Sequence
  Description of Artificial Sequence: Synthetic oligonucleotide
uuuaaaacggugcaauggg

SEQ ID NO: 1804843 - RNA, 19 nt, Artificial Sequence
  Description of Artificial Sequence: Synthetic oligonucleotide
uuaacuaaugccuacauuc

SEQ ID NO: 1804844 - RNA, 19 nt, Artificial Sequence
  Description of Artificial Sequence: Synthetic oligonucleotide
uaaauugcuaaccaacagg

SEQ ID NO: 1804845 - RNA, 19 nt, Artificial Sequence
  Description of Artificial Sequence: Synthetic oligonucleotide
  modified_base (5)..(5): a, c, u, g, unknown or other
uuucngaacagucaauagg

SEQ ID NO: 1804846 - RNA, 19 nt, Artificial Sequence
  Description of Artificial Sequence: Synthetic oligonucleotide
uuuagagagaguaacacgu

SEQ ID NO: 1804847 - RNA, 19 nt, Artificial Sequence
  Description of Artificial Sequence: Synthetic oligonucleotide
ugucuuaagaaauuaauac

SEQ ID NO: 1804848 - RNA, 19 nt, Artificial Sequence
  Description of Artificial Sequence: Synthetic oligonucleotide
aauuuuaacuaaugccuac

SEQ ID NO: 1804849 - RNA, 19 nt, Artificial Sequence
  Description of Artificial Sequence: Synthetic oligonucleotide
uauucagccacaaacaaga

SEQ ID NO: 1804850 - RNA, 19 nt, Artificial Sequence
  Description of Artificial Sequence: Synthetic oligonucleotide
uaugauacgucccacaaga

SEQ ID NO: 1804851 - RNA, 19 nt, Artificial Sequence
  Description of Artificial Sequence: Synthetic oligonucleotide
aaauuaauacucugcaucu

SEQ ID NO: 1804852 - RNA, 19 nt, Artificial Sequence
  Description of Artificial Sequence: Synthetic oligonucleotide
uuuggaauagccaaaggac

SEQ ID NO: 1804853 - RNA, 19 nt, Artificial Sequence
  Description of Artificial Sequence: Synthetic oligonucleotide
uggggaauuaccaaaaucu

SEQ ID NO: 1804854 - RNA, 19 nt, Artificial Sequence
  Description of Artificial Sequence: Synthetic oligonucleotide
ugugagauacaaaaggccc

SEQ ID NO: 1804855 - RNA, 19 nt, Artificial Sequence
  Description of Artificial Sequence: Synthetic oligonucleotide
ugugauuugcccauaaucu

SEQ ID NO: 1804856 - RNA, 19 nt, Artificial Sequence
  Description of Artificial Sequence: Synthetic oligonucleotide
uccuuaauuacaaacuaag

SEQ ID NO: 1804857 - RNA, 19 nt, Artificial Sequence
  Description of Artificial Sequence: Synthetic oligonucleotide
  modified_base (4)..(4): a, c, u, g, unknown or other
uucngaacagucaauaggu

SEQ ID NO: 1804858 - RNA, 19 nt, Artificial Sequence
  Description of Artificial Sequence: Synthetic oligonucleotide
uuuuaaaacggugcaaugg

SEQ ID NO: 1804859 - RNA, 19 nt, Artificial Sequence
  Description of Artificial Sequence: Synthetic oligonucleotide
aauuacaaacuaaggaugg

SEQ ID NO: 1804860 - RNA, 19 nt, Artificial Sequence
  Description of Artificial Sequence: Synthetic oligonucleotide
uccccuauagaacagauga

SEQ ID NO: 1804861 - RNA, 19 nt, Artificial Sequence
  Description of Artificial Sequence: Synthetic oligonucleotide
uuuaaauugcuaaccaaca

SEQ ID NO: 1804862 - RNA, 19 nt, Artificial Sequence
  Description of Artificial Sequence: Synthetic oligonucleotide
aacaggacuguauugccac

SEQ ID NO: 1804863 - RNA, 19 nt, Artificial Sequence
  Description of Artificial Sequence: Synthetic oligonucleotide
cacaucuccauaaacaccg

SEQ ID NO: 1804864 - RNA, 19 nt, Artificial Sequence
  Description of Artificial Sequence: Synthetic oligonucleotide
uagaacagaugaaacauag

SEQ ID NO: 1804865 - RNA, 19 nt, Artificial Sequence
  Description of Artificial Sequence: Synthetic oligonucleotide
auuuaaauugcuaaccaac

SEQ ID NO: 1804866 - RNA, 19 nt, Artificial Sequence
  Description of Artificial Sequence: Synthetic oligonucleotide
ugcucagaaauccacaacc

SEQ ID NO: 1804867 - RNA, 19 nt, Artificial Sequence
  Description of Artificial Sequence: Synthetic oligonucleotide
cauaacugaaucuagacca

SEQ ID NO: 1804868 - RNA, 19 nt, Artificial Sequence
  Description of Artificial Sequence: Synthetic oligonucleotide
cuuaauuacaaacuaagga

SEQ ID NO: 1804869 - RNA, 19 nt, Artificial Sequence
  Description of Artificial Sequence: Synthetic oligonucleotide
gaugacaccaaacaaugug

SEQ ID NO: 1804870 - RNA, 19 nt, Artificial Sequence
  Description of Artificial Sequence: Synthetic oligonucleotide
aaaugcacaacagcaacac

SEQ ID NO: 1804871 - RNA, 19 nt, Artificial Sequence
  Description of Artificial Sequence: Synthetic oligonucleotide
aauucuuuuguccuaguaa

SEQ ID NO: 1804872 - RNA, 19 nt, Artificial Sequence
  Description of Artificial Sequence: Synthetic oligonucleotide
uuuccauacauuuucugcc

SEQ ID NO: 1804873 - RNA, 19 nt, Artificial Sequence
  Description of Artificial Sequence: Synthetic oligonucleotide
acuaguuuuccuuuguaag

SEQ ID NO: 1804874 - RNA, 19 nt, Artificial Sequence
  Description of Artificial Sequence: Synthetic oligonucleotide
acagaugaaacauagcagu

SEQ ID NO: 1804875 - RNA, 19 nt, Artificial Sequence
  Description of Artificial Sequence: Synthetic oligonucleotide
ucauaacugaaucuagacc

SEQ ID NO: 1804876 - RNA, 19 nt, Artificial Sequence
  Description of Artificial Sequence: Synthetic oligonucleotide
caaacaaugugauuugccc

SEQ ID NO: 1804877 - RNA, 19 nt, Artificial Sequence
  Description of Artificial Sequence: Synthetic oligonucleotide
ugagacuccaggcauaccc

SEQ ID NO: 1804878 - RNA, 19 nt, Artificial Sequence
  Description of Artificial Sequence: Synthetic oligonucleotide
aagguuaagguuccacaac

SEQ ID NO: 1804879 - RNA, 19 nt, Artificial Sequence
  Description of Artificial Sequence: Synthetic oligonucleotide
uuaaaugcacauaagucau

SEQ ID NO: 1804880 - RNA, 19 nt, Artificial Sequence
  Description of Artificial Sequence: Synthetic oligonucleotide
auugcuaaccaacaggacu

SEQ ID NO: 1804881 - RNA, 19 nt, Artificial Sequence
  Description of Artificial Sequence: Synthetic oligonucleotide
ucugccuuuacauaugcca

SEQ ID NO: 1804882 - RNA, 19 nt, Artificial Sequence
  Description of Artificial Sequence: Synthetic oligonucleotide
aauuaccaaaaucuuuugu

SEQ ID NO: 1804883 - RNA, 19 nt, Artificial Sequence
  Description of Artificial Sequence: Synthetic oligonucleotide
cuuuuguccuaguaaaugc

SEQ ID NO: 1804884 - RNA, 19 nt, Artificial Sequence
  Description of Artificial Sequence: Synthetic oligonucleotide
ucuccauaaacaccgaaga

SEQ ID NO: 1804885 - RNA, 19 nt, Artificial Sequence
  Description of Artificial Sequence: Synthetic oligonucleotide
uuaaaacggugcaaugggg

SEQ ID NO: 1804886 - RNA, 19 nt, Artificial Sequence
  Description of Artificial Sequence: Synthetic oligonucleotide
auauuagacaggugcaggg

SEQ ID NO: 1804887 - RNA, 19 nt, Artificial Sequence
  Description of Artificial Sequence: Synthetic oligonucleotide
agguuaagguuccacaacg

SEQ ID NO: 1804888 - RNA, 19 nt, Artificial Sequence
  Description of Artificial Sequence: Synthetic oligonucleotide
gauacgucccacaagagug

SEQ ID NO: 1804889 - RNA, 19 nt, Artificial Sequence
  Description of Artificial Sequence: Synthetic oligonucleotide
aaauugcuaaccaacagga

SEQ ID NO: 1804890 - RNA, 19 nt, Artificial Sequence
  Description of Artificial Sequence: Synthetic oligonucleotide
acuuacagaaaucacuugu

SEQ ID NO: 1804891 - RNA, 19 nt, Artificial Sequence
  Description of Artificial Sequence: Synthetic oligonucleotide
auuuauaugauacguccca

SEQ ID NO: 1804892 - RNA, 19 nt, Artificial Sequence
  Description of Artificial Sequence: Synthetic oligonucleotide
guuuagagagaguaacacg

SEQ ID NO: 1804893 - RNA, 19 nt, Artificial Sequence
  Description of Artificial Sequence: Synthetic oligonucleotide
uugcuaaccaacaggacug

SEQ ID NO: 1804894 - RNA, 19 nt, Artificial Sequence
  Description of Artificial Sequence: Synthetic oligonucleotide
uaggugaugacaccaaaca

SEQ ID NO: 1804895 - RNA, 19 nt, Artificial Sequence
  Description of Artificial Sequence: Synthetic oligonucleotide
auaaccaaggaaugauaac

SEQ ID NO: 1804896 - RNA, 19 nt, Artificial Sequence
  Description of Artificial Sequence: Synthetic oligonucleotide
aaagguuaagguuccacaa

SEQ ID NO: 1804897 - RNA, 19 nt, Artificial Sequence
  Description of Artificial Sequence: Synthetic oligonucleotide
auacaaaaggcccaauucu

SEQ ID NO: 1804898 - RNA, 19 nt, Artificial Sequence
  Description of Artificial Sequence: Synthetic oligonucleotide
uuacagaaaucacuuguug

SEQ ID NO: 1804899 - RNA, 19 nt, Artificial Sequence
  Description of Artificial Sequence: Synthetic oligonucleotide
  modified_base (6)..(6): a, c, u, g, unknown or other
uuuucngaacagucaauag

SEQ ID NO: 1804900 - RNA, 19 nt, Artificial Sequence
  Description of Artificial Sequence: Synthetic oligonucleotide
uuguuaauuuuaacuaaug

SEQ ID NO: 1804901 - RNA, 19 nt, Artificial Sequence
  Description of Artificial Sequence: Synthetic oligonucleotide
uaccaaaaucuuuuguuag

SEQ ID NO: 1804902 - RNA, 19 nt, Artificial Sequence
  Description of Artificial Sequence: Synthetic oligonucleotide
uucauaacugaaucuagac

SEQ ID NO: 1804903 - RNA, 19 nt, Artificial Sequence
  Description of Artificial Sequence: Synthetic oligonucleotide
acguaugucaacuaaaguu

SEQ ID NO: 1804904 - RNA, 19 nt, Artificial Sequence
  Description of Artificial Sequence: Synthetic oligonucleotide
agaaggagggauauuagac

SEQ ID NO: 1804905 - RNA, 19 nt, Artificial Sequence
  Description of Artificial Sequence: Synthetic oligonucleotide
uuagugcugacauuuauau

SEQ ID NO: 1804906 - RNA, 19 nt, Artificial Sequence
  Description of Artificial Sequence: Synthetic oligonucleotide
ucuagaccagauuugugag

SEQ ID NO: 1804907 - RNA, 19 nt, Artificial Sequence
  Description of Artificial Sequence: Synthetic oligonucleotide
uuagacaggugcagggugg

SEQ ID NO: 1804908 - RNA, 19 nt, Artificial Sequence
  Description of Artificial Sequence: Synthetic oligonucleotide
uuggaauagccaaaggacu

SEQ ID NO: 1804909 - RNA, 19 nt, Artificial Sequence
  Description of Artificial Sequence: Synthetic oligonucleotide
aguaacacguauaauuuuc

SEQ ID NO: 1804910 - RNA, 19 nt, Artificial Sequence
  Description of Artificial Sequence: Synthetic oligonucleotide
uauaugauacgucccacaa

SEQ ID NO: 1804911 - RNA, 19 nt, Artificial Sequence
  Description of Artificial Sequence: Synthetic oligonucleotide
guaaacagacuuuggggcg

SEQ ID NO: 1804912 - RNA, 19 nt, Artificial Sequence
  Description of Artificial Sequence: Synthetic oligonucleotide
uuguaaggcacguauguca

SEQ ID NO: 1804913 - RNA, 19 nt, Artificial Sequence
  Description of Artificial Sequence: Synthetic oligonucleotide
accaacaggacuguauugc

SEQ ID NO: 1804914 - RNA, 19 nt, Artificial Sequence
  Description of Artificial Sequence: Synthetic oligonucleotide
acaaacaagacauuacuua

SEQ ID NO: 1804915 - RNA, 19 nt, Artificial Sequence
  Description of Artificial Sequence: Synthetic oligonucleotide
aacacguauaauuuuccau

SEQ ID NO: 1804916 - RNA, 19 nt, Artificial Sequence
  Description of Artificial Sequence: Synthetic oligonucleotide
aacaaugugauuugcccau

SEQ ID NO: 1804917 - RNA, 19 nt, Artificial Sequence
  Description of Artificial Sequence: Synthetic oligonucleotide
uuuuguccuaguaaaugca

SEQ ID NO: 1804918 - RNA, 19 nt, Artificial Sequence
  Description of Artificial Sequence: Synthetic oligonucleotide
aucuagaccagauuuguga

SEQ ID NO: 1804919 - RNA, 19 nt, Artificial Sequence
  Description of Artificial Sequence: Synthetic oligonucleotide
uggaauagccaaaggacug

SEQ ID NO: 1804920 - RNA, 19 nt, Artificial Sequence
  Description of Artificial Sequence: Synthetic oligonucleotide
accaaggaaugauaacagc

SEQ ID NO: 1804921 - RNA, 19 nt, Artificial Sequence
  Description of Artificial Sequence: Synthetic oligonucleotide
uugucuuaagaaauuaaua

SEQ ID NO: 1804922 - RNA, 19 nt, Artificial Sequence
  Description of Artificial Sequence: Synthetic oligonucleotide
ugaaacauagcaguuagua

SEQ ID NO: 1804923 - RNA, 19 nt, Artificial Sequence
  Description of Artificial Sequence: Synthetic oligonucleotide
uccacaaccauuuuccaaa

SEQ ID NO: 1804924 - RNA, 19 nt, Artificial Sequence
  Description of Artificial Sequence: Synthetic oligonucleotide
cugacauuuauaugauacg

SEQ ID NO: 1804925 - RNA, 19 nt, Artificial Sequence
  Description of Artificial Sequence: Synthetic oligonucleotide
ucuuauuguacaaaaucuu

SEQ ID NO: 1804926 - RNA, 19 nt, Artificial Sequence
  Description of Artificial Sequence: Synthetic oligonucleotide
aaaaggcccaauucuuuug

SEQ ID NO: 1804927 - RNA, 19 nt, Artificial Sequence
  Description of Artificial Sequence: Synthetic oligonucleotide
gguaaacagacuuuggggc

SEQ ID NO: 1804928 - RNA, 19 nt, Artificial Sequence
  Description of Artificial Sequence: Synthetic oligonucleotide
cauuuauaugauacguccc

SEQ ID NO: 1804929 - RNA, 19 nt, Artificial Sequence
  Description of Artificial Sequence: Synthetic oligonucleotide
uaaggauggcaauauauau

SEQ ID NO: 1804930 - RNA, 19 nt, Artificial Sequence
  Description of Artificial Sequence: Synthetic oligonucleotide
uaguugcacagucugaugu

SEQ ID NO: 1804931 - RNA, 19 nt, Artificial Sequence
  Description of Artificial Sequence: Synthetic oligonucleotide
uagcccuugaucaucaagu

SEQ ID NO: 1804932 - RNA, 19 nt, Artificial Sequence
  Description of Artificial Sequence: Synthetic oligonucleotide
ucuuuuguccuaguaaaug

SEQ ID NO: 1804933 - RNA, 19 nt, Artificial Sequence
  Description of Artificial Sequence: Synthetic oligonucleotide
uaacuaaugccuacauuca

SEQ ID NO: 1804934 - RNA, 19 nt, Artificial Sequence
  Description of Artificial Sequence: Synthetic oligonucleotide
uguuuagagagaguaacac

SEQ ID NO: 1804935 - RNA, 19 nt, Artificial Sequence
  Description of Artificial Sequence: Synthetic oligonucleotide
aaauggcuccccuauagaa

SEQ ID NO: 1804936 - RNA, 19 nt, Artificial Sequence
  Description of Artificial Sequence: Synthetic oligonucleotide
auucauggcgagcugugac

SEQ ID NO: 1804937 - RNA, 19 nt, Artificial Sequence
  Description of Artificial Sequence: Synthetic oligonucleotide
aaugcacauaagucauguc

SEQ ID NO: 1804938 - RNA, 19 nt, Artificial Sequence
  Description of Artificial Sequence: Synthetic oligonucleotide
aggcccaauucuuuugucc

SEQ ID NO: 1804939 - RNA, 19 nt, Artificial Sequence
  Description of Artificial Sequence: Synthetic oligonucleotide
acgcuuuccacauagggcu

SEQ ID NO: 1804940 - RNA, 19 nt, Artificial Sequence
  Description of Artificial Sequence: Synthetic oligonucleotide
ccauaaacaccgaagaggg

SEQ ID NO: 1804941 - RNA, 19 nt, Artificial Sequence
  Description of Artificial Sequence: Synthetic oligonucleotide
uuaauacucugcaucuugu

SEQ ID NO: 1804942 - RNA, 19 nt, Artificial Sequence
  Description of Artificial Sequence: Synthetic oligonucleotide
uuuguccuaguaaaugcac

SEQ ID NO: 1804943 - RNA, 19 nt, Artificial Sequence
  Description of Artificial Sequence: Synthetic oligonucleotide
aggauggcaauauauauuu

SEQ ID NO: 1804944 - RNA, 19 nt, Artificial Sequence
  Description of Artificial Sequence: Synthetic oligonucleotide
ucaauaggugaugacacca

SEQ ID NO: 1804945 - RNA, 19 nt, Artificial Sequence
  Description of Artificial Sequence: Synthetic oligonucleotide
uacauucauaacugaaucu

SEQ ID NO: 1804946 - RNA, 19 nt, Artificial Sequence
  Description of Artificial Sequence: Synthetic oligonucleotide
uuacaaacuaaggauggca

SEQ ID NO: 1804947 - RNA, 19 nt, Artificial Sequence
  Description of Artificial Sequence: Synthetic oligonucleotide
aagaugauucauggcgagc

SEQ ID NO: 1804948 - RNA, 19 nt, Artificial Sequence
  Description of Artificial Sequence: Synthetic oligonucleotide
aaacuuacagaaaucacuu

SEQ ID NO: 1804949 - RNA, 19 nt, Artificial Sequence
  Description of Artificial Sequence: Synthetic oligonucleotide
uuauaugauacgucccaca

SEQ ID NO: 1804950 - RNA, 19 nt, Artificial Sequence
  Description of Artificial Sequence: Synthetic oligonucleotide
uuuuaacuaaugccuacau

SEQ ID NO: 1804951 - RNA, 19 nt, Artificial Sequence
  Description of Artificial Sequence: Synthetic oligonucleotide
cuauagaacagaugaaaca

SEQ ID NO: 1804952 - RNA, 19 nt, Artificial Sequence
  Description of Artificial Sequence: Synthetic oligonucleotide
aaucacuuguugucuuaag

SEQ ID NO: 1804953 - RNA, 19 nt, Artificial Sequence
  Description of Artificial Sequence: Synthetic oligonucleotide
caagacauuacuuagugcu

SEQ ID NO: 1804954 - RNA, 19 nt, Artificial Sequence
  Description of Artificial Sequence: Synthetic oligonucleotide
ugcaaguuuucgcaguaca

SEQ ID NO: 1804955 - RNA, 19 nt, Artificial Sequence
  Description of Artificial Sequence: Synthetic oligonucleotide
uuaaucuuccugcaaguuu
